United States Patent Application Publication US 2023/0026259 A1 - sequence listing, part 17

SEQ ID NO: 77947 - protein, 416 aa, Homo sapiens
  Payload ID: 15531
  Gene Symbol: STK26
  Gene Name: serine/threonine protein kinase 26
  Uniprot ID: Q9P289
  ENSP ID: ENSP00000377867
MAHSPVAVQVPGMQNNIADPEELFTKLERIGKGSFGEVFKGIDNRTQQVVAIKIIDLEEAEDEIEDIQQEITVLSQCDSSYVTKYYGSYLKGSKLWIIMEYLGGGSALDLLRAGPFDEFQIATMLKEILKGLDYLHSEKKIHRDIKAANVLLSEQGDVKLADFGVAGQLTDTQIKRNTFVGTPFWMAPEVIQQSAYDSKADIWSLGITAIELAKGEPPNSDMHPMRVLFLIPKNNPPTLVGDFTKSFKEFIDACLNKDPSFRPTAKELLKHKFIVKNSKKTSYLTELIDRFKRWKAEGHSDDESDSEGSDSESTSRENNTHPEWSFTTVRKKPDPKKVQNGAEQDLVQTLSCLSMIITPAFAELKQQDENNASRNQAIEELEKSIAVAEAACPGITDKMVKKLIEKFQKCSADESP

SEQ ID NO: 77948 - protein, 339 aa, Homo sapiens
  Payload ID: 15531
  Gene Symbol: STK26
  Gene Name: serine/threonine protein kinase 26
  Uniprot ID: Q9P289
  ENSP ID: ENSP00000377868
MAHSPVAVQVPGMQGSKLWIIMEYLGGGSALDLLRAGPFDEFQIATMLKEILKGLDYLHSEKKIHRDIKAANVLLSEQGDVKLADFGVAGQLTDTQIKRNTFVGTPFWMAPEVIQQSAYDSKADIWSLGITAIELAKGEPPNSDMHPMRVLFLIPKNNPPTLVGDFTKSFKEFIDACLNKDPSFRPTAKELLKHKFIVKNSKKTSYLTELIDRFKRWKAEGHSDDESDSEGSDSESTSRENNTHPEWSFTTVRKKPDPKKVQNGAEQDLVQTLSCLSMIITPAFAELKQQDENNASRNQAIEELEKSIAVAEAACPGITDKMVKKLIEKFQKCSADESP

SEQ ID NO: 77949 - protein, 438 aa, Homo sapiens
  Payload ID: 15531
  Gene Symbol: STK26
  Gene Name: serine/threonine protein kinase 26
  ENSP ID: ENSP00000418753
MAHSPVAVQVPGMQNNIADPEELFTKLERIGKGSFGEVFKGIDNRTQQVVAIKIIDLEEAEDEIEDIQQEITVLSQCDSSYVTKYYGSYLKDHGISRHLKFQQMEVLLHSRKLGSKLWIIMEYLGGGSALDLLRAGPFDEFQIATMLKEILKGLDYLHSEKKIHRDIKAANVLLSEQGDVKLADFGVAGQLTDTQIKRNTFVGTPFWMAPEVIQQSAYDSKADIWSLGITAIELAKGEPPNSDMHPMRVLFLIPKNNPPTLVGDFTKSFKEFIDACLNKDPSFRPTAKELLKHKFIVKNSKKTSYLTELIDRFKRWKAEGHSDDESDSEGSDSESTSRENNTHPEWSFTTVRKKPDPKKVQNGAEQDLVQTLSCLSMIITPAFAELKQQDENNASRNQAIEELEKSIAVAEAACPGITDKMVKKLIEKFQKCSADESP

SEQ ID NO: 77950 - protein, 354 aa, Homo sapiens
  Payload ID: 15531
  Gene Symbol: STK26
  Gene Name: serine/threonine protein kinase 26
  Uniprot ID: Q9P289
  ENSP ID: ENSP00000419702
MAHSPVAVQVPGMQNNIADPEELFTKLERIGKGSFGEVFKGIDNRTQQVVAIKIIDLEEAEDEIEDIQQEITVLSQCDSSYVTKYYGSYLKGSKLWIIMEYLGGGSALDLLRAGPFDEFQIATMLKEILKGLDYLHSEKKIHRDIKAANVLLSEQGDVKLADFGVAGQLTDTQIKRNTFVGTPFWMAPEVIQQSAYDSKRPTAKELLKHKFIVKNSKKTSYLTELIDRFKRWKAEGHSDDESDSEGSDSESTSRENNTHPEWSFTTVRKKPDPKKVQNGAEQDLVQTLSCLSMIITPAFAELKQQDENNASRNQAIEELEKSIAVAEAACPGITDKMVKKLIEKFQKCSADESP

SEQ ID NO: 77951 - protein, 223 aa, Homo sapiens
  Payload ID: 15532
  Gene Symbol: STYX
  Gene Name: serine/threonine/tyrosine interacting protein
  Uniprot ID: Q8WUJ0
  ENSP ID: ENSP00000346599
MEDVKLEFPSLPQCKEDAEEWTYPMRREMQEILPGLFLGPYSSAMKSKLPVLQKHGITHIICIRQNIEANFIKPNFQQLFRYLVLDIADNPVENIIRFFPMTKEFIDGSLQMGGKVLVHGNAGISRSAAFVIAYIMETFGMKYRDAFAYVQERRFCINPNAGFVHQLQEYEAIYLAKLTIQMMSPLQIERSLSVHSGTTGSLKRTHEEEDDFGTMQVATAQNG

SEQ ID NO: 77952 - protein, 223 aa, Homo sapiens; identical to SEQ ID NO: 77951
  Payload ID: 15532
  Gene Symbol: STYX
  Gene Name: serine/threonine/tyrosine interacting protein
  Uniprot ID: Q8WUJ0
  ENSP ID: ENSP00000403214

SEQ ID NO: 77953 - protein, 313 aa, Homo sapiens
  Payload ID: 15533
  Gene Symbol: STYXL1
  Gene Name: serine/threonine/tyrosine interacting-like 1
  Uniprot ID: Q9Y6J8
  ENSP ID: ENSP00000248600
MPGLLLCEPTELYNILNQATKLSRLTDPNYLCLLDVRSKWEYDESHVITALRVKKKNNEYLLPESVDLECVKYCVVYDNNSSTLEILLKDDDDDSDSDGDGKDLVPQAAIEYGRILTRLTHHPVYILKGGYERFSGTYHFLRTQKIIWMPQELDAFQPYPIEIVPGKVFVGNFSQACDPKIQKDLKIKAHVNVSMDTGPFFAGDADKLLHIRIEDSPEAQILPFLRHMCHFIEIHHHLGSVILIFSTQGISRSCAAIIAYLMHSNEQTLQRSWAYVKKCKNNMCPNRGLVSQLLEWEKTILGDSITNIMDPLY

SEQ ID NO: 77954 - protein, 217 aa, Homo sapiens
  Payload ID: 15533
  Gene Symbol: STYXL1
  Gene Name: serine/threonine/tyrosine interacting-like 1
  Uniprot ID: Q9Y6J8
  ENSP ID: ENSP00000343383
MPGLLLCEPTELYNILNQATKLSRLTDPNYLCLLDVRSKWEYDESHVITALRVKKELDAFQPYPIEIVPGKVFVGNFSQACDPKIQKDLKIKAHVNVSMDTGPFFAGDADKLLHIRIEDSPEAQILPFLRHMCHFIEIHHHLGSVILIFSTQGISRSCAAIIAYLMHSNEQTLQRSWAYVKKCKNNMCPNRGLVSQLLEWEKTILGDSITNIMDPLY

SEQ ID NO: 77955 - protein, 313 aa, Homo sapiens; identical to SEQ ID NO: 77953
  Payload ID: 15533
  Gene Symbol: STYXL1
  Gene Name: serine/threonine/tyrosine interacting-like 1
  Uniprot ID: Q9Y6J8
  ENSP ID: ENSP00000352726

SEQ ID NO: 77956 - protein, 217 aa, Homo sapiens; identical to SEQ ID NO: 77954
  Payload ID: 15533
  Gene Symbol: STYXL1
  Gene Name: serine/threonine/tyrosine interacting-like 1
  Uniprot ID: Q9Y6J8
  ENSP ID: ENSP00000353798

SEQ ID NO: 77957 - protein, 313 aa, Homo sapiens; identical to SEQ ID NO: 77953
  Payload ID: 15533
  Gene Symbol: STYXL1
  Gene Name: serine/threonine/tyrosine interacting-like 1
  Uniprot ID: Q9Y6J8
  ENSP ID: ENSP00000392221

SEQ ID NO: 77958 - protein, 68 aa, Homo sapiens
  Payload ID: 15533
  Gene Symbol: STYXL1
  Gene Name: serine/threonine/tyrosine interacting-like 1
  ENSP ID: ENSP00000403033
  MOD_RES (1)..(1): Any amino acid
XHVITALRVKKKNNEYLLPESVDLECVKYCVVYDNNSSTLEILLKDDDDDSDSDGDGKGTGCISAIPH

SEQ ID NO: 77959 - protein, 68 aa, Homo sapiens; identical to SEQ ID NO: 77958
  Payload ID: 15533
  Gene Symbol: STYXL1
  Gene Name: serine/threonine/tyrosine interacting-like 1
  ENSP ID: ENSP00000404495
  MOD_RES (1)..(1): Any amino acid

SEQ ID NO: 77960 - protein, 221 aa, Homo sapiens
  Payload ID: 15533
  Gene Symbol: STYXL1
  Gene Name: serine/threonine/tyrosine interacting-like 1
  ENSP ID: ENSP00000406073
HVITALRVKKKNNEYLLPESVDLECVKYCVVYDNNSSTLEILLKDDDDDSDSDGDGKDLVPQAAIEYGRILTRLTHHPVYILKGGYERFSGTYHFLRTQKIIWMPQELDAFQPYPIEIVPGKVFVGNFSQACDPKIQKDLKIKAHVNVSMDTGPFFAGDADKLLHIRIEDSPEAQILPFLRHMCHFIEVLGLCQEVQKQHVSKSGIGEPAAGMGEDYPWRF

SEQ ID NO: 77961 - protein, 282 aa, Homo sapiens
  Payload ID: 15533
  Gene Symbol: STYXL1
  Gene Name: serine/threonine/tyrosine interacting-like 1
  ENSP ID: ENSP00000411812
MPGLLLCEPTELYNILNQATKLSRLTDPNYLCLLDVRSKWEYDESHVITALRVKKKNNEYLLPESVDLECVKYCVVYDNNSSTLEILLKDDDDDSDSDGDGKDLVPQAAIEYGRILTRLTHHPVYILKGGYERFSGTYHFLRTQKIIWMPQELDAFQPYPIEIVPGKVFVGNFSQACDPKIQKDLKIKAHVNVSMDTGPFFAGDADKLLHIRIEDSPEAQILPFLRHMCHFIEIHHHLGSVILIFSTQGISRSCAAIIAYLMHSNEQTLQTESRSVTQAGVQ

SEQ ID NO: 77962 - protein, 422 aa, Homo sapiens
  Payload ID: 15534
  Gene Symbol: STYK1
  Gene Name: serine/threonine/tyrosine kinase 1
  Uniprot ID: Q6J9G0
  ENSP ID: ENSP00000075503
MGMTRMLLECSLSDKLCVIQEKQYEVIIVPTLLVTIFLILLGVILWLFIREQRTQQQRSGPQGIAPVPPPRDLSWEAGHGGNVALPLKETSVENFLGATTPALAKLQVPREQLSEVLEQICSGSCGPIFRANMNTGDPSKPKSVILKALKEPAGLHEVQDFLGRIQFHQYLGKHKNLVQLEGCCTEKLPLYMVLEDVAQGDLLSFLWTCRRDVMTMDGLLYDLTEKQVYHIGKQVLLALEFLQEKHLFHGDVAARNILMQSDLTAKLCGLGLAYEVYTRGAISSTQTIPLKWLAPERLLLRPASIRADVWSFGILLYEMVTLGAPPYPEVPPTSILEHLQRRKIMKRPSSCTHTMYSIMKSCWRWREADRPSPRELRLRLEAAIKTADDEAVLQVPELVVPELYAAVAGIRVESLFYNYSML

SEQ ID NO: 77963 - protein, 83 aa, Homo sapiens
  Payload ID: 15534
  Gene Symbol: STYK1
  Gene Name: serine/threonine/tyrosine kinase 1
  ENSP ID: ENSP00000443760
  MOD_RES (1)..(1): Any amino acid
XRIQFHQYLGKHKNLVQLEGCCTEKLPLYMVLEDVAQGDLLSFLWTCRRVSSRAEDVMTMDGLLYDLTEKQVYHIGKQVLLAL

SEQ ID NO: 77964 - protein, 65 aa, Homo sapiens
  Payload ID: 15534
  Gene Symbol: STYK1
  Gene Name: serine/threonine/tyrosine kinase 1
  ENSP ID: ENSP00000444488
MGMTRMLLECSLSDKLCVIQEKQYEVIIVPTLLVTIFLILLGVILWLFIREQRTQQQRSGPQGKA

SEQ ID NO: 77965 - protein, 40 aa, Homo sapiens
  Payload ID: 15534
  Gene Symbol: STYK1
  Gene Name: serine/threonine/tyrosine kinase 1
  ENSP ID: ENSP00000444942
MGMTRMLLECSLSDKLCVIQEKQYEVIIVPTLLVTIFLIL

SEQ ID NO: 77966 - protein, 83 aa, Homo sapiens
  Payload ID: 15534
  Gene Symbol: STYK1
  Gene Name: serine/threonine/tyrosine kinase 1
  ENSP ID: ENSP00000445391
MGMTRMLLECSLSDKLCVIQEKQYEVIIVPTLLVTIFLILLGVILWLFIREQRTQQQRSGPQGIAPVPPPRDLSWEAGHGGNV

SEQ ID NO: 77967 - protein, 87 aa, Homo sapiens
  Payload ID: 15534
  Gene Symbol: STYK1
  Gene Name: serine/threonine/tyrosine kinase 1
  ENSP ID: ENSP00000446241
MGMTRMLLECSLSDKLCVIQEKQYEVIIVPTLLVTIFLILLGVILWLFIREQRTQQQRSGPQGIAPVPPPRDLSWEAGHGGNVALPL

SEQ ID NO: 77968 - protein, 107 aa, Homo sapiens
  Payload ID: 15535
  Gene Symbol: SERTM1
  Gene Name: serine-rich and transmembrane domain containing 1
  Uniprot ID: A2A2V5
  ENSP ID: ENSP00000325776
MSEPDTSSGFSGSVENGTFLELFPTSLSTSVDPSSGHLSNVYIYVSIFLSLLAFLLLLLIIALQRLKNIISSSSSYPEYPSDAGSSFTNLEVCSISSQRSTFSNLSS

SEQ ID NO: 77969 - protein, 244 aa, Homo sapiens
  Payload ID: 15536
  Gene Symbol: SSMEM1
  Gene Name: serine-rich single-pass membrane protein 1
  Uniprot ID: Q8WWF3
  ENSP ID: ENSP00000297819
MGDLFSLFWEVDPPPIPVNCAIPNQDYECWKDDSCGTIGSFLLWYFVIVFVLMFFSRASVWMSEDKKDEGSGTSTSVRKASKETSCKRQSKDSAWDPSQTMKKPKQNQLTPVTNSEVALVNAYPEQRRARRQSQFNEVNQNQHDSDTTEYGSEESNSEASSWKESESEHHPSPDSIKRRKMAQRQRNLGSYQMSERHCLHCKALRTNEWLAHHSRQKPSVTPPMKRDSQEESSISDINKKFSKF

SEQ ID NO: 77970 - protein, 412 aa, Homo sapiens
  Payload ID: 15537
  Gene Symbol: SDCCAG3
  Gene Name: serologically defined colon cancer antigen 3
  Uniprot ID: Q96C92
  ENSP ID: ENSP00000298537
MSGYQRRPGATPLSRARSLAIPDAPAFYERRSCLPQLNCERPHGRDLDSPFFGIRPAFMCYVPSPVLASVGDTDDRFEDLEEANPFSFREFLKTKNLGLSKEDPASRIYAKEASRHSLGLDHNSPPSQTGGYGLEYQQPFFEDPTGAGDLLDEEEDEDTGWSGAYLPSAIEQTHPERVPAGTSPCSTYLSFFSTPSELAGPESLPSWALSDTDSRVSPASPAGSPSADFAVHGESLGDRHLRTLQISYDALKDENSKLRRKLNEVQSFSEAQTEMVRTLERKLEAKMIKEESDYHDLESVVQQVEQNLELMTKRAVKAENHVVKLKQEISLLQAQVSNFQRENEALRCGQGASLTVVKQNADVALQNLRVVMNSAQASIKQLVSGAETLNLVAEILKSIDRISEVKDEEEDS

SEQ ID NO: 77971 - protein, 435 aa, Homo sapiens
  Payload ID: 15537
  Gene Symbol: SDCCAG3
  Gene Name: serologically defined colon cancer antigen 3
  Uniprot ID: Q96C92
  ENSP ID: ENSP00000349929
MSGYQRRPGATPLSRARSLAIPDAPAFYERRSCLPQLNCERPHGRDLDSPFFGIRPAFMCYVPSPVLASVGDTDFGYGKGKCSKQSPSGAHGTHFGDDRFEDLEEANPFSFREFLKTKNLGLSKEDPASRIYAKEASRHSLGLDHNSPPSQTGGYGLEYQQPFFEDPTGAGDLLDEEEDEDTGWSGAYLPSAIEQTHPERVPAGTSPCSTYLSFFSTPSELAGPESLPSWALSDTDSRVSPASPAGSPSADFAVHGESLGDRHLRTLQISYDALKDENSKLRRKLNEVQSFSEAQTEMVRTLERKLEAKMIKEESDYHDLESVVQQVEQNLELMTKRAVKAENHVVKLKQEISLLQAQVSNFQRENEALRCGQGASLTVVKQNADVALQNLRVVMNSAQASIKQLVSGAETLNLVAEILKSIDRISEVKDEEEDS

SEQ ID NO: 77972 - protein, 223 aa, Homo sapiens
  Payload ID: 15537
  Gene Symbol: SDCCAG3
  Gene Name: serologically defined colon cancer antigen 3
  ENSP ID: ENSP00000360788
MSGYQRRPGATPLSRARSLAIPDDFGYGKGKCSKQSPSGAHGTHFGDDRFEDLEEANPFSFREFLKTKNLGLSKEDPASRIYAKEASRHSLGLDHNSPPSQTGGYGLEYQQPFFEDPTGAGDLLDEEEDEDTGWSGAYLPSAIEQTHPERVPAGTSPCSTYLSFFSTPSELAGPESLPSWALSDTDSRVSPASPAGSPSADFAVHGESLGDRHLRTLQISYDA

SEQ ID NO: 77973 - protein, 362 aa, Homo sapiens
  Payload ID: 15537
  Gene Symbol: SDCCAG3
  Gene Name: serologically defined colon cancer antigen 3
  Uniprot ID: Q96C92
  ENSP ID: ENSP00000360790
MSGYQRRPGATPLSRARSLAIPDDDRFEDLEEANPFSFREFLKTKNLGLSKEDPASRIYAKEASRHSLGLDHNSPPSQTGGYGLEYQQPFFEDPTGAGDLLDEEEDEDTGWSGAYLPSAIEQTHPERVPAGTSPCSTYLSFFSTPSELAGPESLPSWALSDTDSRVSPASPAGSPSADFAVHGESLGDRHLRTLQISYDALKDENSKLRRKLNEVQSFSEAQTEMVRTLERKLEAKMIKEESDYHDLESVVQQVEQNLELMTKRAVKAENHVVKLKQEISLLQAQVSNFQRENEALRCGQGASLTVVKQNADVALQNLRVVMNSAQASIKQLVSGAETLNLVAEILKSIDRISEVKDEEEDS

SEQ ID NO: 77974 - protein, 167 aa, Homo sapiens
  Payload ID: 15537
  Gene Symbol: SDCCAG3
  Gene Name: serologically defined colon cancer antigen 3
  ENSP ID: ENSP00000409255
  MOD_RES (1)..(1): Any amino acid
XDRHLRTLQISYDALKDENSKLRRKLNEVQSFSEAQTEMVRTLERKLEAKMIKEESDYHDLESVVQQKRAVKAENHVVKLKQEISLLQAQVSNFQRENEALRCGQGASLTVVKQNADVALQNLRVVMNSAQASIKQLVSGAETLNLVAEILKSIDRISEVKDEEEDS

SEQ ID NO: 77975 - protein, 108 aa, Homo sapiens
  Payload ID: 15537
  Gene Symbol: SDCCAG3
  Gene Name: serologically defined colon cancer antigen 3
  ENSP ID: ENSP00000409357
MCYVPSPVLASVGDTGERRGRRPRGRFQFPRHVWHLRCSTSSSIDPSMCRALTACQALGIQRRSPLLGAHSLVAGRPPPRQTVPVQDDDRFEDLEEANPFSFREFLKT

SEQ ID NO: 77976 - protein, 713 aa, Homo sapiens
  Payload ID: 15538
  Gene Symbol: SDCCAG8
  Gene Name: serologically defined colon cancer antigen 8
  Uniprot ID: Q86SQ7
  ENSP ID: ENSP00000355499
MAKSPENSTLEEILGQYQRSLREHASRSIHQLTCALKEGDVTIGEDAPNLSFSTSVGNEDARTAWPELQQSHAVNQLKDLLRQQADKESEVSPSRRRKMSPLRSLEHEETNMPTMHDLVHTINDQSQYIHHLEAEVKFCKEELSGMKNKIQVVVLENEGLQQQLKSQRQEETLREQTLLDASGNMHNSWITTGEDSGVGETSKRPFSHDNADFGKAASAGEQLELEKLKLTYEEKCEIEESQLKFLRNDLAEYQRTCEDLKEQLKHKEFLLAANTCNRVGGLCLKCAQHEAVLSQTHTNVHMQTIERLVKERDDLMSALVSVRSSLADTQQREASAYEQVKQVLQISEEANFEKTKALIQCDQLRKELERQAERLEKELASQQEKRAIEKDMMKKEITKEREYMGSKMLILSQNIAQLEAQVEKVTKEKISAINQLEEIQSQLASREMDVTKVCGEMRYQLNKTNMEKDEAEKEHREFRAKTNRDLEIKDQEIEKLRIELDESKQHLEQEQQKAALAREECLRLTELLGESEHQLHLTRQEKDSIQQSFSKEAKAQALQAQQREQELTQKIQQMEAQHDKTENEQYLLLTSQNTFLTKLKEECCTLAKKLEQISQKTRSEIAQLSQEKRYTYDKLGKLQRRNEELEEQCVQHGRVHETMKQRLRQLDKHSQATAQQLVQLLSKQNQLLLERQSLSEEVDRLRTQLPSMPQSDC

SEQ ID NO: 77977 - protein, 414 aa, Homo sapiens
  Payload ID: 15538
  Gene Symbol: SDCCAG8
  Gene Name: serologically defined colon cancer antigen 8
  ENSP ID: ENSP00000410200
LLDASEKLKLTYEEKCEIEESQLKFLRNDLAEYQRTCEDLKEQLKHKEFLLAANTCNRVGGLCLKCAQHEAVLSQTHTNVHMQTIERLVKERDDLMSALVSVRSSLADTQQREASAYEQVKQVLQISEEANFEKTKALIQCDQLRKELERQAERLEKELASQQEKRAIEKDMMKKEITKEREYMGSKMLILSQNIAQLEAQVEKVTKEKISAINQLEEIQSQLASREMDVTKVCGEMRYQLNKTNMEKDEAEKEHREFRAKTNRDLEIKDQEIEKLRIELDESKQHLEQEQQKAALAREECLRLTELLGESEHQLHLTRSEIAQLSQEKRYTYDKLGKLQRRNEELEEQCVQHGRVHETMKQRLRQLDKHSQATAQQLVQLLSKQNQLLLERQSLSEEVDRLRTQLPSMPQSDC

SEQ ID NO: 77978 - protein, 155 aa, Homo sapiens
  Payload ID: 15538
  Gene Symbol: SDCCAG8
  Gene Name: serologically defined colon cancer antigen 8
  ENSP ID: ENSP00000473868
  MOD_RES (1)..(1): Any amino acid
XQEETLREQTLLDASGNMHNSWITTGEDSGVGETSKRPFSHDNADFGKAASAGEQLELNFLIISNKKSGRIKQYLHSPPCQPLMTSLQLSEKLKLTYEEKCEIEESQLKFLRNKNHGRARWLTPVIPALWEAEAGESRGQEIETILANMVKPRFY

SEQ ID NO: 77979 - protein, 713 aa, Homo sapiens; identical to SEQ ID NO: 77976
  Payload ID: 15538
  Gene Symbol: SDCCAG8
  Gene Name: serologically defined colon cancer antigen 8
  Uniprot ID: Q86SQ7
  ENSP ID: ENSP00000483550

SEQ ID NO: 77980 - protein, 525 aa, Homo sapiens
  Payload ID: 15538
  Gene Symbol: SDCCAG8
  Gene Name: serologically defined colon cancer antigen 8
  ENSP ID: ENSP00000485978
MKNKIQVVVLENEGLQQQLKSQRQEETLREQTLLDASEKLKLTYEEKCEIEESQLKFLRNDLAEYQRTCEDLKEQLKHKEFLLAANTCNRVGGLCLKCAQHEAVLSQTHTNVHMQTIERLVKERDDLMSALVSVRSSLADTQQREASAYEQVKQVLQISEEANFEKTKALIQCDQLRKELERQAERLEKELASQQEKRAIEKDMMKKEITKEREYMGSKMLILSQNIAQLEAQVEKVTKEKISAINQLEEIQSQLASREMDVTKVCGEMRYQLNKTNMEKDEAEKEHREFRAKTNRDLEIKDQEIEKLRIELDESKQHLEQEQQKAALAREECLRLTELLGESEHQLHLTRQEKDSIQQSFSKEAKAQALQAQQREQELTQKIQQMEAQHDKTENEQYLLLTSQNTFLTKLKEECCTLAKKLEQISQKTRSEIAQLSQEKRYTYDKLGKLQRRNEELEEQCVQHGRVHETMKQRLRQLDKHSQATAQQLVQLLSKQNQLLLERQSLSEEVDRLRTQLPSMPQSDC

SEQ ID NO: 77981 - protein, 409 aa, Homo sapiens
  Payload ID: 15538
  Gene Symbol: SDCCAG8
  Gene Name: serologically defined colon cancer antigen 8
  ENSP ID: ENSP00000486376
EKLKLTYEEKCEIEESQLKFLRNDLAEYQRTCEDLKEQLKHKEFLLAANTCNRVGGLCLKCAQHEAVLSQTHTNVHMQTIERLVKERDDLMSALVSVRSSLADTQQREASAYEQVKQVLQISEEANFEKTKALIQCDQLRKELERQAERLEKELASQQEKRAIEKDMMKKEITKEREYMGSKMLILSQNIAQLEAQVEKVTKEKISAINQLEEIQSQLASREMDVTKVCGEMRYQLNKTNMEKDEAEKEHREFRAKTNRDLEIKDQEIEKLRIELDESKQHLEQEQQKAALAREECLRLTELLGESEHQLHLTRSEIAQLSQEKRYTYDKLGKLQRRNEELEEQCVQHGRVHETMKQRLRQLDKHSQATAQQLVQLLSKQNQLLLERQSLSEEVDRLRTQLPSMPQSDC

SEQ ID NO: 77982 - protein, 568 aa, Homo sapiens
  Payload ID: 15538
  Gene Symbol: SDCCAG8
  Gene Name: serologically defined colon cancer antigen 8
  ENSP ID: ENSP00000486441
MKNKIQVVVLENEGLQQQLKSQRQEETLREQTLLDASGNMHNSWITTGEDSGVGETSKRPFSHDNADFGKAASAGEQLELEKLKLTYEEKCEIEESQLKFLRNDLAEYQRTCEDLKEQLKHKEFLLAANTCNRVGGLCLKCAQHEAVLSQTHTNVHMQTIERLVKERDDLMSALVSVRSSLADTQQREASAYEQVKQVLQISEEANFEKTKALIQCDQLRKELERQAERLEKELASQQEKRAIEKDMMKKEITKEREYMGSKMLILSQNIAQLEAQVEKVTKEKISAINQLEEIQSQLASREMDVTKVCGEMRYQLNKTNMEKDEAEKEHREFRAKTNRDLEIKDQEIEKLRIELDESKQHLEQEQQKAALAREECLRLTELLGESEHQLHLTRQEKDSIQQSFSKEAKAQALQAQQREQELTQKIQQMEAQHDKTENEQYLLLTSQNTFLTKLKEECCTLAKKLEQISQKTRSEIAQLSQEKRYTYDKLGKLQRRNEELEEQCVQHGRVHETMKQRLRQLDKHSQATAQQLVQLLSKQNQLLLERQSLSEEVDRLRTQLPSMPQSDC

SEQ ID NO: 77983 - protein, 418 aa, Homo sapiens
  Payload ID: 15539
  Gene Symbol: SERPINA1
  Gene Name: serpin peptidase inhibitor, clade A (alpha-1 antiproteinase, antitrypsin), member 1
  Uniprot ID: P01009
  ENSP ID: ENSP00000348068
MPSSVSWGILLLAGLCCLVPVSLAEDPQGDAAQKTDTSHHDQDHPTFNKITPNLAEFAFSLYRQLAHQSNSTNIFFSPVSIATAFAMLSLGTKADTHDEILEGLNFNLTEIPEAQIHEGFQELLRTLNQPDSQLQLTTGNGLFLSEGLKLVDKFLEDVKKLYHSEAFTVNFGDTEEAKKQINDYVEKGTQGKIVDLVKELDRDTVFALVNYIFFKGKWERPFEVKDTEEEDFHVDQVTTVKVPMMKRLGMFNIQHCKKLSSWVLLMKYLGNATAIFFLPDEGKLQHLENELTHDIITKFLENEDRRSASLHLPKLSITGTYDLKSVLGQLGITKVFSNGADLSGVTEEAPLKLSKAVHKAVLTIDEKGTEAAGAMFLEAIPMSIPPEVKFNKPFVFLMIEQNTKSPLFMGKVVNPTQK

SEQ ID NO: 77984 - protein, 418 aa, Homo sapiens; identical to SEQ ID NO: 77983
  Payload ID: 15539
  Gene Symbol: SERPINA1
  Gene Name: serpin peptidase inhibitor, clade A (alpha-1 antiproteinase, antitrypsin), member 1
  Uniprot ID: P01009
  ENSP ID: ENSP00000376802

SEQ ID NO: 77985 - protein, 418 aa, Homo sapiens; identical to SEQ ID NO: 77983
  Payload ID: 15539
  Gene Symbol: SERPINA1
  Gene Name: serpin peptidase inhibitor, clade A (alpha-1 antiproteinase, antitrypsin), member 1
  Uniprot ID: P01009
  ENSP ID: ENSP00000376803

SEQ ID NO: 77986 - protein, 418 aa, Homo sapiens; identical to SEQ ID NO: 77983
  Payload ID: 15539
  Gene Symbol: SERPINA1
  Gene Name: serpin peptidase inhibitor, clade A (alpha-1 antiproteinase, antitrypsin), member 1
  Uniprot ID: P01009
  ENSP ID: ENSP00000385960

SEQ ID NO: 77987 - protein, 359 aa, Homo sapiens
  Payload ID: 15539
  Gene Symbol: SERPINA1
  Gene Name: serpin peptidase inhibitor, clade A (alpha-1 antiproteinase, antitrypsin), member 1
  Uniprot ID: P01009
  ENSP ID: ENSP00000386094
MPSSVSWGILLLAGLCCLVPVSLAEDPQGDAAQKTDTSHHDQDHPTFNKITPNLAEFAFSLYRQLAHQSNSTNIFFSPVSIATAFAMLSLGTKADTHDEILEGLNFNLTEIPEAQIHEGFQELLRTLNQPDSQLQLTTGNGLFLSEGLKLVDKFLEDVKKLYHSEAFTVNFGDTEEAKKQINDYVEKGTQGKIVDLVKELDRDTVFALVNYIFFKGKWERPFEVKDTEEEDFHVDQVTTVKVPMMKRLGMFNIQHCKKLSSWVLLMKYLGNATAIFFLPDEGKLQHLENELTHDIITKFLENEDRRSASLHLPKLSITGTYDLKSVLGQLGITKVFSNGADLSGVTEEAPLKLSKVRSP

SEQ ID NO: 77988 - protein, 418 aa, Homo sapiens; identical to SEQ ID NO: 77983
  Payload ID: 15539
  Gene Symbol: SERPINA1
  Gene Name: serpin peptidase inhibitor, clade A (alpha-1 antiproteinase, antitrypsin), member 1
  Uniprot ID: P01009
  ENSP ID: ENSP00000390299

SEQ ID NO: 77989 - protein, 418 aa, Homo sapiens; identical to SEQ ID NO: 77983
  Payload ID: 15539
  Gene Symbol: SERPINA1
  Gene Name: serpin peptidase inhibitor, clade A (alpha-1 antiproteinase, antitrypsin), member 1
  Uniprot ID: P01009
  ENSP ID: ENSP00000408474

SEQ ID NO: 77990 - protein, 418 aa, Homo sapiens; identical to SEQ ID NO: 77983
  Payload ID: 15539
  Gene Symbol: SERPINA1
  Gene Name: serpin peptidase inhibitor, clade A (alpha-1 antiproteinase, antitrypsin), member 1
  Uniprot ID: P01009
  ENSP ID: ENSP00000416066

SEQ ID NO: 77991 - protein, 418 aa, Homo sapiens; identical to SEQ ID NO: 77983
  Payload ID: 15539
  Gene Symbol: SERPINA1
  Gene Name: serpin peptidase inhibitor, clade A (alpha-1 antiproteinase, antitrypsin), member 1
  Uniprot ID: P01009
  ENSP ID: ENSP00000416354

SEQ ID NO: 77992 - protein, 105 aa, Homo sapiens
  Payload ID: 15539
  Gene Symbol: SERPINA1
  Gene Name: serpin peptidase inhibitor, clade A (alpha-1 antiproteinase, antitrypsin), member 1
  ENSP ID: ENSP00000450561
MLSLGTKADTHDEILEGLNFNLTEIPEAQIHEGFQELLRTLNQPDSQLQLTTGNGLFLSEGLKLVDKFLEDVKKLYHSEAFTVNFGDTEEAKKQINDYVEKGTQG

SEQ ID NO: 77993 - protein, 117 aa, Homo sapiens
  Payload ID: 15539
  Gene Symbol: SERPINA1
  Gene Name: serpin peptidase inhibitor, clade A (alpha-1 antiproteinase, antitrypsin), member 1
  ENSP ID: ENSP00000451098
MPSSVSWGILLLAGLCCLVPVSLAEDPQGDAAQKTDTSHHDQDHPTFNKITPNLAEFAFSLYRQLAHQSNSTNIFFSPVSIATAFAMLSLGTKADTHDEILEGLNFNLTEIPEAQIH

SEQ ID NO: 77994 - protein, 306 aa, Homo sapiens
  Payload ID: 15539
  Gene Symbol: SERPINA1
  Gene Name: serpin peptidase inhibitor, clade A (alpha-1 antiproteinase, antitrypsin), member 1
  Uniprot ID: P01009
  ENSP ID: ENSP00000451525
MPSSVSWGILLLAGLCCLVPVSLAEDPQGDAAQKTDTSHHDQDHPTFNKITPNLAEFAFSLYRQLAHQSNSTNIFFSPVSIATAFAMLSLGTKADTHDEILEGLNFNLTEIPEAQIHEGFQELLRTLNQPDSQLQLTTGNGLFLSEGLKLVDKFLEDVKKLYHSEAFTVNFGDTEEAKKQINDYVEKGTQGKIVDLVKELDRDTVFALVNYIFFKGKWERPFEVKDTEEEDFHVDQVTTVKVPMMKRLGMFNIQHCKKLSSWVLLMKYLGNATAIFFLPDEGKLQHLENELTHDIITKFLENEDRR

SEQ ID NO: 77995 - protein, 22 aa, Homo sapiens
  Payload ID: 15539
  Gene Symbol: SERPINA1
  Gene Name: serpin peptidase inhibitor, clade A (alpha-1 antiproteinase, antitrypsin), member 1
  ENSP ID: ENSP00000451826
MPSSVSWGILLLAGLCCLVPVS

SEQ ID NO: 77996 - protein, 156 aa, Homo sapiens
  Payload ID: 15539
  Gene Symbol: SERPINA1
  Gene Name: serpin peptidase inhibitor, clade A (alpha-1 antiproteinase, antitrypsin), member 1
  ENSP ID: ENSP00000452169
MPSSVSWGILLLAGLCCLVPVSLAEDPQGDAAQKTDTSHHDQDHPTFNKITPNLAEFAFSLYRQLAHQSNSTNIFFSPVSIATAFAMLSLGTKADTHDEILEGLNFNLTEIPEAQIHEGFQELLRTLNQPDSQLQLTTGNGLFLSEGLKLVDKFLE

SEQ ID NO: 77997 - protein, 144 aa, Homo sapiens
  Payload ID: 15539
  Gene Symbol: SERPINA1
  Gene Name: serpin peptidase inhibitor, clade A (alpha-1 antiproteinase, antitrypsin), member 1
  ENSP ID: ENSP00000452452
MPSSVSWGILLLAGLCCLVPVSLAEDPQGDAAQKTDTSHHDQDHPTFNKITPNLAEFAFSLYRQLAHQSNSTNIFFSPVSIATAFAMLSLGTKADTHDEILEGLNFNLTEIPEAQIHEGFQELLRTLNQPDSQLQLTTGNGLFL

SEQ ID NO: 77998 - protein, 92 aa, Homo sapiens
  Payload ID: 15539
  Gene Symbol: SERPINA1
  Gene Name: serpin peptidase inhibitor, clade A (alpha-1 antiproteinase, antitrypsin), member 1
  ENSP ID: ENSP00000452480
MPSSVSWGILLLAGLCCLVPVSLAEDPQGDAAQKTDTSHHDQDHPTFNKITPNLAEFAFSLYRQLAHQSNSTNIFFSPVSIATAFAMLSLGT

SEQ ID NO: 77999 - protein, 418 aa, Homo sapiens
  Payload ID: 15539
  Gene Symbol: SERPINA1
  Gene Name: serpin peptidase inhibitor, clade A (alpha-1 antiproteinase, antitrypsin), member 1
  ENSP ID: ENSP00000477615
MPSSVSWGILLLAGLCCLVPVSLAEDPQGDAAQKTDTSHHDQDHPTFNKITPNLAEFAFSLYRQLAHQSNSTNIFFSPVSIATAFAMLSLGTKADTHDEILEGLNFNLTEIPEAQIHEGFQELLRTLNQPDSQLQLTTGNGLFLSEGLKLVDKFLEDVKKLYHSEAFTVNFGDTEEAKKQINDYVEKGTQGKIVDLVKELDRDTVFALVNYIFFKGKWERPFEVKDTEEEDFHVDQATTVKVPMMKRLGMFNIQHCKKLSSWVLLMKYLGNATAIFFLPDEGKLQHLENELTHDIITKFLENEDRRSASLHLPKLSITGTYDLKSVLGQLGITKVFSNGADLSGVTEEAPLKLSKAVHKAVLTIDEKGTEAAGAMFLEAIPMSIPPEVKFNKPFVFLMIEQNTKSPLFMGKVVNPTQK

SEQ ID NO: 78000 - protein, 418 aa, Homo sapiens; identical to SEQ ID NO: 77999
  Payload ID: 15539
  Gene Symbol: SERPINA1
  Gene Name: serpin peptidase inhibitor, clade A (alpha-1 antiproteinase, antitrypsin), member 1
  ENSP ID: ENSP00000479923

SEQ ID NO: 78001 - protein, 418 aa, Homo sapiens; identical to SEQ ID NO: 77999
  Payload ID: 15539
  Gene Symbol: SERPINA1
  Gene Name: serpin peptidase inhibitor, clade A (alpha-1 antiproteinase, antitrypsin), member 1
  ENSP ID: ENSP00000480231

SEQ ID NO: 78002 - protein, 418 aa, Homo sapiens; identical to SEQ ID NO: 77999
  Payload ID: 15539
  Gene Symbol: SERPINA1
  Gene Name: serpin peptidase inhibitor, clade A (alpha-1 antiproteinase, antitrypsin), member 1
  ENSP ID: ENSP00000485908

SEQ ID NO: 78003 - protein, 418 aa, Homo sapiens; identical to SEQ ID NO: 77999
  Payload ID: 15539
  Gene Symbol: SERPINA1
  Gene Name: serpin peptidase inhibitor, clade A (alpha-1 antiproteinase, antitrypsin), member 1
  ENSP ID: ENSP00000486067

SEQ ID NO: 78004 - protein, 117 aa, Homo sapiens; identical to SEQ ID NO: 77993
  Payload ID: 15539
  Gene Symbol: SERPINA1
  Gene Name: serpin peptidase inhibitor, clade A (alpha-1 antiproteinase, antitrypsin), member 1
  ENSP ID: ENSP00000486117

SEQ ID NO: 78005 - protein, 418 aa, Homo sapiens; identical to SEQ ID NO: 77999
  Payload ID: 15539
  Gene Symbol: SERPINA1
  Gene Name: serpin peptidase inhibitor, clade A (alpha-1 antiproteinase, antitrypsin), member 1
  ENSP ID: ENSP00000486302

SEQ ID NO: 78006 - protein, 92 aa, Homo sapiens; identical to SEQ ID NO: 77998
  Payload ID: 15539
  Gene Symbol: SERPINA1
  Gene Name: serpin peptidase inhibitor, clade A (alpha-1 antiproteinase, antitrypsin), member 1
  ENSP ID: ENSP00000486467

SEQ ID NO: 78007 - protein, 144 aa, Homo sapiens; identical to SEQ ID NO: 77997
  Payload ID: 15539
  Gene Symbol: SERPINA1
  Gene Name: serpin peptidase inhibitor, clade A (alpha-1 antiproteinase, antitrypsin), member 1
  ENSP ID: ENSP00000486654

SEQ ID NO: 78008 - protein, 359 aa, Homo sapiens
  Payload ID: 15539
  Gene Symbol: SERPINA1
  Gene Name: serpin peptidase inhibitor, clade A (alpha-1 antiproteinase, antitrypsin), member 1
  ENSP ID: ENSP00000486935
MPSSVSWGILLLAGLCCLVPVSLAEDPQGDAAQKTDTSHHDQDHPTFNKITPNLAEFAFSLYRQLAHQSNSTNIFFSPVSIATAFAMLSLGTKADTHDEILEGLNFNLTEIPEAQIHEGFQELLRTLNQPDSQLQLTTGNGLFLSEGLKLVDKFLEDVKKLYHSEAFTVNFGDTEEAKKQINDYVEKGTQGKIVDLVKELDRDTVFALVNYIFFKGKWERPFEVKDTEEEDFHVDQATTVKVPMMKRLGMFNIQHCKKLSSWVLLMKYLGNATAIFFLPDEGKLQHLENELTHDIITKFLENEDRRSASLHLPKLSITGTYDLKSVLGQLGITKVFSNGADLSGVTEEAPLKLSKVRSP

SEQ ID NO: 78009 - protein, 418 aa, Homo sapiens; identical to SEQ ID NO: 77999
  Payload ID: 15539
  Gene Symbol: SERPINA1
  Gene Name: serpin peptidase inhibitor, clade A (alpha-1 antiproteinase, antitrypsin), member 1
  ENSP ID: ENSP00000486957

SEQ ID NO: 78010 - protein, 156 aa, Homo sapiens; identical to SEQ ID NO: 77996
  Payload ID: 15539
  Gene Symbol: SERPINA1
  Gene Name: serpin peptidase inhibitor, clade A (alpha-1 antiproteinase, antitrypsin), member 1
  ENSP ID: ENSP00000487269

SEQ ID NO: 78011 - protein, 22 aa, Homo sapiens
  Payload ID: 15539
  Gene Symbol: SERPINA1
  Gene Name: serpin peptidase inhibitor, clade A (alpha-1 antiproteinase, antitrypsin), member 1
  ENSP ID: ENSP00000487293
MPSSVSWGILLLAGLCCLVPVS

SEQ ID NO: 78012 - protein, 418 aa, Homo sapiens; identical to SEQ ID NO: 77999
  Payload ID: 15539
  Gene Symbol: SERPINA1
  Gene Name: serpin peptidase inhibitor, clade A (alpha-1 antiproteinase, antitrypsin), member 1
  ENSP ID: ENSP00000487579

SEQ ID NO: 78013 - protein, 444 aa, Homo sapiens
  Payload ID: 15540
  Gene Symbol: SERPINA10
  Gene Name: serpin peptidase inhibitor, clade A (alpha-1 antiproteinase, antitrypsin), member 10
  Uniprot ID: Q9UK55
  ENSP ID: ENSP00000261994
MKVVPSLLLSVLLAQVWLVPGLAPSPQSPETPAPQNQTSRVVQAPKEEEEDEQEASEEKASEEEKAWLMASRQQLAKETSNFGFSLLRKISMRHDGNMVFSPFGMSLAMTGLMLGATGPTETQIKRGLHLQALKPTKPGLLPSLFKGLRETLSRNLELGLTQGSFAFIHKDFDVKETFFNLSKRYFDTECVPMNFRNASQAKRLMNHYINKETRGKIPKLFDEINPETKLILVDYILFKGKWLTPFDPVFTEVDTFHLDKYKTIKVPMMYGAGKFASTFDKNFRCHVLKLPYQGNATMLVVLMEKMGDHLALEDYLTTDLVETWLRNMKTRNMEVFFPKFKLDQKYEMHELLRQMGIRRIFSPFADLSELSATGRNLQVSRVLQRTVIEVDERGTEAVAGILSEITAYSMPPVIKVDRPFHFMIYEETSGMLLFLGRVVNPTLL

SEQ ID NO: 78014 - protein, 444 aa, Homo sapiens; identical to SEQ ID NO: 78013
  Payload ID: 15540
  Gene Symbol: SERPINA10
  Gene Name: serpin peptidase inhibitor, clade A (alpha-1 antiproteinase, antitrypsin), member 10
  Uniprot ID: Q9UK55
  ENSP ID: ENSP00000376809

SEQ ID NO: 78015 - protein, 484 aa, Homo sapiens
  Payload ID: 15540
  Gene Symbol: SERPINA10
  Gene Name: serpin peptidase inhibitor, clade A (alpha-1 antiproteinase, antitrypsin), member 10
  ENSP ID: ENSP00000450896
MSRSTQELLGYHCRLQDKLQEQEGSLAAEGRHSLASAADHMKVVPSLLLSVLLAQVWLVPGLAPSPQSPETPAPQNQTSRVVQAPKEEEEDEQEASEEKASEEEKAWLMASRQQLAKETSNFGFSLLRKISMRHDGNMVFSPFGMSLAMTGLMLGATGPTETQIKRGLHLQALKPTKPGLLPSLFKGLRETLSRNLELGLTQGSFAFIHKDFDVKETFFNLSKRYFDTECVPMNFRNASQAKRLMNHYINKETRGKIPKLFDEINPETKLILVDYILFKGKWLTPFDPVFTEVDTFHLDKYKTIKVPMMYGAGKFASTFDKNFRCHVLKLPYQGNATMLVVLMEKMGDHLALEDYLTTDLVETWLRNMKTRNMEVFFPKFKLDQKYEMHELLRQMGIRRIFSPFADLSELSATGRNLQVSRVLQRTVIEVDERGTEAVAGILSEITAYSMPPVIKVDRPFHFMIYEETSGMLLFLGRVVNPTLL

SEQ ID NO: 78016 - protein, 444 aa, Homo sapiens; identical to SEQ ID NO: 78013
  Payload ID: 15540
  Gene Symbol: SERPINA10
  Gene Name: serpin peptidase inhibitor, clade A (alpha-1 antiproteinase, antitrypsin), member 10
  Uniprot ID: Q9UK55
  ENSP ID: ENSP00000450971

SEQ ID NO: 78017 - protein, 484 aa, Homo sapiens; identical to SEQ ID NO: 78015
  Payload ID: 15540
  Gene Symbol: SERPINA10
  Gene Name: serpin peptidase inhibitor, clade A (alpha-1 antiproteinase, antitrypsin), member 10
  ENSP ID: ENSP00000482029

SEQ ID NO: 78018 - protein, 444 aa, Homo sapiens; identical to SEQ ID NO: 78013
  Payload ID: 15540
  Gene Symbol: SERPINA10
  Gene Name: serpin peptidase inhibitor, clade A (alpha-1 antiproteinase, antitrypsin), member 10
  Uniprot ID: Q9UK55
  ENSP ID: ENSP00000484632

SEQ ID NO: 78019 - protein, 422 aa, Homo sapiens
  Payload ID: 15541
  Gene Symbol: SERPINA11
  Gene Name: serpin peptidase inhibitor, clade A (alpha-1 antiproteinase, antitrypsin), member 11
  Uniprot ID: Q86U17
  ENSP ID: ENSP00000335024
MGPAWLWLLGTGILASVHCQPLLAHGDKSLQGPQPPRHQLSEPAPAYHRITPTITNFALRLYKELAADAPGNIFFSPVSISTTLALLSLGAQANTSALILEGLGFNLTETPEADIHQGFRSLLHTLALPSPKLELKVGNSLFLDKRLKPRQHYLDSIKELYGAFAFSANFTDSVTTGRQINDYLRRQTYGQVVDCLPEFSQDTFMVLANYIFFKAKWKHPFSRYQTQKQESFFVDERTSLQVPMMHQKEMHRFLYDQDLACTVLQIEYRGNALALLVLPDPGKMKQVEAALQPQTLRKWGQLLLPSLLDLHLPRFSISGTYNLEDILPQIGLTNILNLEADFSGVTGQLNKTISKVSHKAMVDMSEKGTEAGAASGLLSQPPSLNTMSDPHAHFNRPFLLLLWEVTTQSLLFLGKVVNPVAG

SEQ ID NO: 78020 - protein, 414 aa, Homo sapiens
  Payload ID: 15542
  Gene Symbol: SERPINA12
  Gene Name: serpin peptidase inhibitor, clade A (alpha-1 antiproteinase, antitrypsin), member 12
  Uniprot ID: Q8IW75
  ENSP ID: ENSP00000342109
MNPTLGLAIFLAVLLTVKGLLKPSFSPRNYKALSEVQGWKQRMAAKELARQNMDLGFKLLKKLAFYNPGRNIFLSPLSISTAFSMLCLGAQDSTLDEIKQGFNFRKMPEKDLHEGFHYIIHELTQKTQDLKLSIGNTLFIDQRLQPQRKFLEDAKNFYSAETILTNFQNLEMAQKQINDFISQKTHGKINNLIENIDPGTVMLLANYIFFRARWKHEFDPNVTKEEDFFLEKNSSVKVPMMFRSGIYQVGYDDKLSCTILEIPYQKNITAIFILPDEGKLKHLEKGLQVDTFSRWKTLLSRRVVDVSVPRLHMTGTFDLKKTLSYIGVSKIFEEHGDLTKIAPHRSLKVGEAVHKAELKMDERGTEGAAGTGAQTLPMETPLVVKIDKPYLLLIYSEKIPSVLFLGKIVNPIGK

SEQ ID NO: 78021 - protein, 414 aa, Homo sapiens; identical to SEQ ID NO: 78020
  Payload ID: 15542
  Gene Symbol: SERPINA12
  Gene Name: serpin peptidase inhibitor, clade A (alpha-1 antiproteinase, antitrypsin), member 12
  Uniprot ID: Q8IW75
  ENSP ID: ENSP00000451738

SEQ ID NO: 78022 - protein, 421 aa, Homo sapiens
  Payload ID: 15543
  Gene Symbol: SERPINA2
  Gene Name: serpin peptidase inhibitor, clade A (alpha-1 antiproteinase, antitrypsin), member 2 (gene/pseudogene)
  ENSP ID: ENSP00000477957
MPFSVSWGILLLAGLCCLVPSSLVEDPQEDAAQKTDTSHHDQGDWEDLACQKISYNVTDLAFDLYKELADLSQTSNVLVTPTSVAMAFAMLSLGTKADTRTEILEGLNVNLTETPEAKIHECFQQVLQALSRPDTRLQLTTGSSLFVNKSMKLVDTFLEDTKKLYHSEASSINFRDTEEAKEQINNYVEKRTGRKVVDLVKHLKKDTSLALVDYISFHGKWKDKFKAEHIMVEGFHVDDKTIIRVPMINHLGRFDIHRDRELSSWVLAQHYVGNATAFFILPDPKKMWQLEEKLTYSHLENIQRAFDIRSINLHFPKLSISGTYKLKRVLRNLGITKIFSNEADLSGVSQEAPLKLSKAVHVAVLTIDEKGTEATGAPHLEEKAWSKYQTVMFNRPFLVIIKDDITNFPLFIGKVVNPTQK

SEQ ID NO: 78023 - protein, 421 aa, Homo sapiens; identical to SEQ ID NO: 78022
  Payload ID: 15543
  Gene Symbol: SERPINA2
  Gene Name: serpin peptidase inhibitor, clade A (alpha-1 antiproteinase, antitrypsin), member 2 (gene/pseudogene)
  ENSP ID: ENSP00000483813

SEQ ID NO: 78024 - protein, 309 aa, Homo sapiens
  Payload ID: 15543
  Gene Symbol: SERPINA2
  Gene Name: serpin peptidase inhibitor, clade A (alpha-1 antiproteinase, antitrypsin), member 2 (gene/pseudogene)
  ENSP ID: ENSP00000486888
IPFSVSWGVLLLAGLCCLVPSSLVEDPQEDAAQKTDTSHHDQGDWEDLACQKISYNVTDLAFDLYKELADLSQTSNVLVTPTSVAMAFAMLSLGTKADTRTEILEGLNVNLTETPEAKIHECFQQVLQALSRPDTRLQLTTGSSLFVNKSMKLVDTFLEDTKKLYHSEASSINFRDTEEAKEQINNYVEKRTGRKVVDLVKHLKKDTSLALVDYISFHGKWKDKFKAERIMVEGFHVDDKTIIRVPMINHLGRFDIHRDRELSSWVLAQHYVGNATAFFILPDPKKMWQLEEKLTYSHLENIQRAFDIR

SEQ ID NO: 78025 - protein, 64 aa, Homo sapiens
  Payload ID: 15543
  Gene Symbol: SERPINA2
  Gene Name: serpin peptidase inhibitor, clade A (alpha-1 antiproteinase, antitrypsin), member 2 (gene/pseudogene)
  ENSP ID: ENSP00000487283
VKHLKKDTSLALVDYISFHGLSIYIFPNCPFLEPTNSRESLGIWASPRSSATRPTSLESVRRHP

SEQ ID NO: 78026 - protein, 423 aa, Homo sapiens
  Payload ID: 15544
  Gene Symbol: SERPINA3
  Gene Name: serpin peptidase inhibitor, clade A (alpha-1 antiproteinase, antitrypsin), member 3
  Uniprot ID: P01011
  ENSP ID: ENSP00000376795
MERMLPLLALGLLAAGFCPAVLCHPNSPLDEENLTQENQDRGTHVDLGLASANVDFAFSLYKQLVLKAPDKNVIFSPLSISTALAFLSLGAHNTTLTEILKGLKFNLTETSEAEIHQSFQHLLRTLNQSSDELQLSMGNAMFVKEQLSLLDRFTEDAKRLYGSEAFATDFQDSAAAKKLINDYVKNGTRGKITDLIKDLDSQTMMVLVNYIFFKAKWEMPFDPQDTHQSRFYLSKKKWVMVPMMSLHHLTIPYFRDEELSCTVVELKYTGNASALFILPDQDKMEEVEAMLLPETLKRWRDSLEFREIGELYLPKFSISRDYNLNDILLQLGIEEAFTSKADLSGITGARNLAVSQVVHKAVLDVFEEGTEASAATAVKITLLSALVETRTIVRFNRPFLMIIVPTDTQNIFFMSKVTNPKQA

SEQ ID NO: 78027 - protein, 423 aa, Homo sapiens; identical to SEQ ID NO: 78026
  Payload ID: 15544
  Gene Symbol: SERPINA3
  Gene Name: serpin peptidase inhibitor, clade A (alpha-1 antiproteinase, antitrypsin), member 3
  Uniprot ID: P01011
  ENSP ID: ENSP00000450540

SEQ ID NO: 78028 - protein, 205 aa, Homo sapiens
  Payload ID: 15544
  Gene Symbol: SERPINA3
  Gene Name: serpin peptidase inhibitor, clade A (alpha-1 antiproteinase, antitrypsin), member 3
  ENSP ID: ENSP00000451119
MPFDPQDTHQSRFYLSKKKWVMVPMMSLHHLTIPYFRDEELSCTVVELKYTGNASALFILPDQDKMEEVEAMLLPETLKRWRDSLEFREIGELYLPKFSISRDYNLNDILLQLGIEEAFTSKADLSGITGARNLAVSQVVHKAVLDVFEEGTEASAATAVKITLLSALVETRTIVRFNRPFLMIIVPTDTQNIFFMSKVTNPKQA

SEQ ID NO: 78029 - protein, 305 aa, Homo sapiens
  Payload ID: 15544
  Gene Symbol: SERPINA3
  Gene Name: serpin peptidase inhibitor, clade A (alpha-1 antiproteinase, antitrypsin), member 3
  ENSP ID: ENSP00000452246
MERMLPLLALGLLAAGFCPAVLCHPNSPLDEENLTQENQDRGTHVDLGLASANVDFAFSLYKQLVLKAPDKNVIFSPLSISTALAFLSLGAHNTTLTEILKGLKFNLTETSEAEIHQSFQHLLRTLNQSSDELQLSMGNAMFVKEQLSLLDRFTEDAKRLYGSEAFATDFQDSAAAKKLINDYVKNGTRGKITDLIKDLDSQTMMVLVNYIFFKAKWEMPFDPQDTHQSRFYLSKKKWVMVPMMSLHHLTIPYFRDEELSCTVVELKYTGNASALFILPDQDKMEEVEAMLLPETLKRWRDSLEF

SEQ ID NO: 78030 - protein, 216 aa, Homo sapiens
  Payload ID: 15544
  Gene Symbol: SERPINA3
  Gene Name: serpin peptidase inhibitor, clade A (alpha-1 antiproteinase, antitrypsin), member 3
  Uniprot ID: P01011
  ENSP ID: ENSP00000452476
MERMLPLLALGLLAAGFCPAVLCHPNSPLDEENLTQENQDRGTHVDLGLASANVDFAFSLYKQLVLKAPDKNVIFSPLSISTALAFLSLGAHNTTLTEILKGLKFNLTETSEAEIHQSFQHLLRTLNQSSDELQLSMGNAMFVKEQLSLLDRFTEDAKRLYGSEAFATDFQDSAAAKKLINDYVKNGTRGKITDLIKDLDSQTMMVLVNYIFFKER

SEQ ID NO: 78031 - protein, 46 aa, Homo sapiens
  Payload ID: 15544
  Gene Symbol: SERPINA3
  Gene Name: serpin peptidase inhibitor, clade A (alpha-1 antiproteinase, antitrypsin), member 3
  ENSP ID: ENSP00000481617
  MOD_RES (1)..(1): Any amino acid
XTVVELKYTGNASALFILPDQDKMEEVEAMLLPETLKRWRDSLEFR

SEQ ID NO: 78032 - protein, 423 aa, Homo sapiens; identical to SEQ ID NO: 78026
  Payload ID: 15545
  Gene Symbol:
  Gene Name: serpin peptidase inhibitor, clade A (alpha-1 antiproteinase, antitrypsin), member 3 [Source:EntrezGene
  Acc:12]
  ENSP ID: ENSP00000376793

SEQ ID NO: 78033 - protein, 45 aa, Homo sapiens
  Payload ID: 15545
  Gene Symbol:
  Gene Name: serpin peptidase inhibitor, clade A (alpha-1 antiproteinase, antitrypsin), member 3 [Source:EntrezGene
  Acc:12]
  ENSP ID: ENSP00000452367
  MOD_RES (1)..(1): Any amino acid
XVHKAVVEVDESGTRAAAATGTIFTFRYSLNGHCVPGTVPSAEEK

SEQ ID NO: 78034 - protein, 427 aa, Homo sapiens
  Payload ID: 15546
  Gene Symbol: SERPINA4
  Gene Name: serpin peptidase inhibitor, clade A (alpha-1 antiproteinase, antitrypsin), member 4
  Uniprot ID: P29622
  ENSP ID: ENSP00000298841
MHLIDYLLLLLVGLLALSHGQLHVEHDGESCSNSSHQQILETGEGSPSLKIAPANADFAFRFYYLIASETPGKNIFFSPLSISAAYAMLSLGACSHSRSQILEGLGFNLTELSESDVHRGFQHLLHTLNLPGHGLETRVGSALFLSHNLKFLAKFLNDTMAVYEAKLFHTNFYDTVGTIQLINDHVKKETRGKIVDLVSELKKDVLMVLVNYIYFKALWEKPFISSRTTPKDFYVDENTTVRVPMMLQDQEHHWYLHDRYLPCSVLRMDYKGDATVFFILPNQGKMREIEEVLTPEMLMRWNNLLRKRNFYKKLELHLPKFSISGSYVLDQILPRLGFTDLFSKWADLSGITKQQKLEASKSFHKATLDVDEAGTEAAAATSFAIKFFSAQTNRHILRFNRPFLVVIFSTSTQSVLFLGKVVDPTKP

SEQ ID NO: 78035 - protein, 427 aa, Homo sapiens; identical to SEQ ID NO: 78034
  Payload ID: 15546
  Gene Symbol: SERPINA4
  Gene Name: serpin peptidase inhibitor, clade A (alpha-1 antiproteinase, antitrypsin), member 4
  Uniprot ID: P29622
  ENSP ID: ENSP00000450838

SEQ ID NO: 78036 - protein, 427 aa, Homo sapiens; identical to SEQ ID NO: 78034
  Payload ID: 15546
  Gene Symbol: SERPINA4
  Gene Name: serpin peptidase inhibitor, clade A (alpha-1 antiproteinase, antitrypsin), member 4
  Uniprot ID: P29622
  ENSP ID: ENSP00000451172

SEQ ID NO: 78037 - protein, 406 aa, Homo sapiens
  Payload ID: 15547
  Gene Symbol: SERPINA5
  Gene Name: serpin peptidase inhibitor, clade A (alpha-1 antiproteinase, antitrypsin), member 5
  Uniprot ID: P05154
  ENSP ID: ENSP00000333203
MQLFLLLCLVLLSPQGASLHRHHPREMKKRVEDLHVGATVAPSSRRDFTFDLYRALASAAPSQSIFFSPVSISMSLAMLSLGAGSSTKMQILEGLGLNLQKSSEKELHRGFQQLLQELNQPRDGFQLSLGNALFTDLVVDLQDTFVSAMKTLYLADTFPTNFRDSAGAMKQINDYVAKQTKGKIVDLLKNLDSNAVVIMVNYIFFKAKWETSFNHKGTQEQDFYVTSETVVRVPMMSREDQYHYLLDRNLSCRVVGVPYQGNATALFILPSEGKMQQVENGLSEKTLRKWLKMFKKRQLELYLPKFSIEGSYQLEKVLPSLGISNVFTSHADLSGISNHSNIQVSEMVHKAVVEVDESGTRAAAATGTIFTFRSARLNSQRLVFNRPFLMFIVDNNILFLGKVNRP

SEQ ID NO: 78038 - protein, 172 aa, Homo sapiens
  Payload ID: 15547
  Gene Symbol: SERPINA5
  Gene Name: serpin peptidase inhibitor, clade A (alpha-1 antiproteinase, antitrypsin), member 5
  ENSP ID: ENSP00000450484
MQLFLLLCLVLLSPQGASLHRHHPREMKKRVEDLHVGATVAPSSRRDFTFDLYRALASAAPSQSIFFSPVSISMSLAMLSLGAGSSTKMQILEGLGLNLQKSSEKELHRGFQQLLQELNQPRDGFQLSLGNALFTDLVVDLQDTFVSAMKTLYLADTFPTNFRDSAGAMKQI

SEQ ID NO: 78039 - protein, 157 aa, Homo sapiens
  Payload ID: 15547
  Gene Symbol: SERPINA5
  Gene Name: serpin peptidase inhibitor, clade A (alpha-1 antiproteinase, antitrypsin), member 5
  ENSP ID: ENSP00000450485
MQLFLLLCLVLLSPQGASLHRHHPREMKKRVEDLHVGATVAPSSRRDFTFDLYRALASAAPSQSIFFSPVSISMSLAMLSLGAGSSTKMQILEGLGLNLQKSSEKELHRGFQQLLQELNQPRDGFQLSLGNALFTDLVVDLQDTFVSAMKTLYLADT

SEQ ID NO: 78040 - protein, 231 aa, Homo sapiens
  Payload ID: 15547
  Gene Symbol: SERPINA5
  Gene Name: serpin peptidase inhibitor, clade A (alpha-1 antiproteinase, antitrypsin), member 5
  ENSP ID: ENSP00000450745
MQLFLLLCLVLLSPQGASLHRHHPREMKKRVEDLHVGATVAPSSRRDFTFDLYRALASAAPSQSIFFSPVSISMSLAMLSLGAGSSTKMQILEGLGLNLQKSSEKELHRGFQQLLQELNQPRDGFQLSLGNALFTDLVVDLQDTFVSAMKTLYLADTFPTNFRDSAGAMKQINDYVAKQTKGKIVDLLKNLDSNAVVIMVNYIFFKAKWETSFNHKGTQEQDFYVTSETVV

SEQ ID NO: 78041 - protein, 406 aa, Homo sapiens; identical to SEQ ID NO: 78037
  Payload ID: 15547
  Gene Symbol: SERPINA5
  Gene Name: serpin peptidase inhibitor, clade A (alpha-1 antiproteinase, antitrypsin), member 5
  Uniprot ID: P05154
  ENSP ID: ENSP00000450837

SEQ ID NO: 78042 - protein, 406 aa, Homo sapiens; identical to SEQ ID NO: 78037
  Payload ID: 15547
  Gene Symbol: SERPINA5
  Gene Name: serpin peptidase inhibitor, clade A (alpha-1 antiproteinase, antitrypsin), member 5
  Uniprot ID: P05154
  ENSP ID: ENSP00000451126

SEQ ID NO: 78043 - protein, 90 aa, Homo sapiens
  Payload ID: 15547
  Gene Symbol: SERPINA5
  Gene Name: serpin peptidase inhibitor, clade A (alpha-1 antiproteinase, antitrypsin), member 5
  ENSP ID: ENSP00000451215
MQLFLLLCLVLLSPQGASLHRHHPREMKKRVEDLHVGATVAPSSRRDFTFDLYRALASAAPSQSIFFSPVSISMSLAMLSLGAGSSTKMQ

SEQ ID NO: 78044 - protein, 24 aa, Homo sapiens
  Payload ID: 15547
  Gene Symbol: SERPINA5
  Gene Name: serpin peptidase inhibitor, clade A (alpha-1 antiproteinase, antitrypsin), member 5
  ENSP ID: ENSP00000451487
MQLFLLLCLVLLSPQGASLHRHHP

SEQ ID NO: 78045 - protein, 406 aa, Homo sapiens; identical to SEQ ID NO: 78037
  Payload ID: 15547
  Gene Symbol: SERPINA5
  Gene Name: serpin peptidase inhibitor, clade A (alpha-1 antiproteinase, antitrypsin), member 5
  Uniprot ID: P05154
  ENSP ID: ENSP00000451610

SEQ ID NO: 78046 - protein, 144 aa, Homo sapiens
  Payload ID: 15547
  Gene Symbol: SERPINA5
  Gene Name: serpin peptidase inhibitor, clade A (alpha-1 antiproteinase, antitrypsin), member 5
  ENSP ID: ENSP00000451650
MQLFLLLCLVLLSPQGASLHRHHPREMKKRVEDLHVGATVAPSSRRDFTFDLYRALASAAPSQSIFFSPVSISMSLAMLSLGAGSSTKMQILEGLGLNLQKSSEKELHRGFQQLLQELNQPRDGFQLSLGNALFTDLVVDLQDT

SEQ ID NO: 78047 - protein, 86 aa, Homo sapiens
  Payload ID: 15547
  Gene Symbol: SERPINA5
  Gene Name: serpin peptidase inhibitor, clade A (alpha-1 antiproteinase, antitrypsin), member 5
  ENSP ID: ENSP00000451697
MQLFLLLCLVLLSPQGASLHRHHPREMKKRVEDLHVGATVAPSSRRDFTFDLYRALASAAPSQSIFFSPVSISMSLAMLSLGAGSS

SEQ ID NO: 78048 - protein, 301 aa, Homo sapiens
  Payload ID: 15547
  Gene Symbol: SERPINA5
  Gene Name: serpin peptidase inhibitor, clade A (alpha-1 antiproteinase, antitrypsin), member 5
  ENSP ID: ENSP00000452469
MQLFLLLCLVLLSPQGASLHRHHPREMKKRVEDLHVGATVAPSSRRDFTFDLYRALASAAPSQSIFFSPVSISMSLAMLSLGAGSSTKMQILEGLGLNLQKSSEKELHRGFQQLLQELNQPRDGFQLSLGNALFTDLVVDLQDTFVSAMKTLYLADTFPTNFRDSAGAMKQINDYVAKQTKGKIVDLLKNLDSNAVVIMVNYIFFKAKWETSFNHKGTQEQDFYVTSETVVRVPMMSREDQYHYLLDRNLSCRVVGVPYQGNATALFILPSEGKMQQVENGLSEKTLRKWLKMFKKRYFQT

SEQ ID NO: 78049 - protein, 405 aa, Homo sapiens
  Payload ID: 15548
  Gene Symbol: SERPINA6
  Gene Name: serpin peptidase inhibitor, clade A (alpha-1 antiproteinase, antitrypsin), member 6
  Uniprot ID: P08185
  ENSP ID: ENSP00000342850
MPLLLYTCLLWLPTSGLWTVQAMDPNAAYVNMSNHHRGLASANVDFAFSLYKHLVALSPKKNIFISPVSISMALAMLSLGTCGHTRAQLLQGLGFNLTERSETEIHQGFQHLHQLFAKSDTSLEMTMGNALFLDGSLELLESFSADIKHYYESEVLAMNFQDWATASRQINSYVKNKTQGKIVDLFSGLDSPAILVLVNYIFFKGTWTQPFDLASTREENFYVDETTVVKVPMMLQSSTISYLHDSELPCQLVQMNYVGNGTVFFILPDKGKMNTVIAALSRDTINRWSAGLTSSQVDLYIPKVTISGVYDLGDVLEEMGIADLFTNQANFSRITQDAQLKSSKVVHKAVLQLNEEGVDTAGSTGVTLNLTSKPIILRFNQPFIIMIFDHFTWSSLFLARVMNPV

SEQ ID NO: 78050 - protein, 278 aa, Homo sapiens
  Payload ID: 15548
  Gene Symbol: SERPINA6
  Gene Name: serpin peptidase inhibitor, clade A (alpha-1 antiproteinase, antitrypsin), member 6
  ENSP ID: ENSP00000451045
MPLLLYTCLLWLPTSGLWTVQAMDPNAAYVNMSNHHRGLASANVDFAFSLYKHLVALSPKKNIFISPVSISMALAMLSLGTCGHTRAQLLQGLGFNLTERSETEIHQGFQHLHQLFAKSDTSLEMTMGNALFLDGSLELLESFSADIKHYYESEVLAMNFQDWATASRQINSYVKNKTQGKIVDLFSGLDSPAILVLVNYIFFKGIPTHPHLKAHPLWPGITAAKIQGTLLGKVFDSVKHIHIWESPSSPQSCWAHGHSPLTWQAPGRRTSMWTRQLW

SEQ ID NO: 78051 - protein, 136 aa, Homo sapiens
  Payload ID: 15548
  Gene Symbol: SERPINA6
  Gene Name: serpin peptidase inhibitor, clade A (alpha-1 antiproteinase, antitrypsin), member 6
  ENSP ID: ENSP00000452018
MPLLLYTCLLWLPTSGLWTVQAMDPNAAYVNMSNHHRGLASANVDFAFSLYKHLVALSPKKNIFISPVSISMALAMLSLGTCGHTRAQLLQGLGFNLTERSETEIHQGFQHLHQLFAKSDTSLEMTMGNALFLDGS

SEQ ID NO: 78052 - protein, 405 aa, Homo sapiens; identical to SEQ ID NO: 78049
  Payload ID: 15548
  Gene Symbol: SERPINA6
  Gene Name: serpin peptidase inhibitor, clade A (alpha-1 antiproteinase, antitrypsin), member 6
  Uniprot ID: P08185
  ENSP ID: ENSP00000484501

SEQ ID NO: 78053 - protein, 278 aa, Homo sapiens; identical to SEQ ID NO: 78050
  Payload ID: 15548
  Gene Symbol: SERPINA6
  Gene Name: serpin peptidase inhibitor, clade A (alpha-1 antiproteinase, antitrypsin), member 6
  ENSP ID: ENSP00000486588

SEQ ID NO: 78054 - protein, 136 aa, Homo sapiens; identical to SEQ ID NO: 78051
  Payload ID: 15548
  Gene Symbol: SERPINA6
  Gene Name: serpin peptidase inhibitor, clade A (alpha-1 antiproteinase, antitrypsin), member 6
  ENSP ID: ENSP00000486954

SEQ ID NO: 78055 - protein, 415 aa, Homo sapiens
  Payload ID: 15549
  Gene Symbol: SERPINA7
  Gene Name: serpin peptidase inhibitor, clade A (alpha-1 antiproteinase, antitrypsin), member 7
  Uniprot ID: P05543
  ENSP ID: ENSP00000329374
MSPFLYLVLLVLGLHATIHCASPEGKVTACHSSQPNATLYKMSSINADFAFNLYRRFTVETPDKNIFFSPVSISAALVMLSFGACCSTQTEIVETLGFNLTDTPMVEIQHGFQHLICSLNFPKKELELQIGNALFIGKHLKPLAKFLNDVKTLYETEVFSTDFSNISAAKQEINSHVEMQTKGKVVGLIQDLKPNTIMVLVNYIHFKAQWANPFDPSKTEDSSSFLIDKTTTVQVPMMHQMEQYYHLVDMELNCTVLQMDYSKNALALFVLPKEGQMESVEAAMSSKTLKKWNRLLQKGWVDLFVPKFSISATYDLGATLLKMGIQHAYSENADFSGLTEDNGLKLSNAAHKAVLHIGEKGTEAAAVPEVELSDQPENTFLHPIIQIDRSFMLLILERSTRSILFLGKVVNPTEA

SEQ ID NO: 78056 - protein, 415 aa, Homo sapiens; identical to SEQ ID NO: 78055
  Payload ID: 15549
  Gene Symbol: SERPINA7
  Gene Name: serpin peptidase inhibitor, clade A (alpha-1 antiproteinase, antitrypsin), member 7
  Uniprot ID: P05543
  ENSP ID: ENSP00000361644

SEQ ID NO: 78057 - protein, 335 aa, Homo sapiens
  Payload ID: 15550
  Gene Symbol: SERPINA9
  Gene Name: serpin peptidase inhibitor, clade A (alpha-1 antiproteinase, antitrypsin), member 9
  Uniprot ID: Q86WD7
  ENSP ID: ENSP00000298845
MQGQGRRRGTCKDIFCSKMASYLYGVLFAVGLCAPIYCVSPANAPSAYPRPSSTKSTPASQVYSLNTDFAFRLYRRLVLETPSQNIFFSPARINSHVKKKTQGKVVDIIQGLDLLTAMVLVNHIFFKAKWEKPFHPEYTRKNFPFLVGEQVTVHVPMMHQKEQFAFGVDTELNCFVLQMDYKGDAVAFFVLPSKGKMRQLEQALSARTLRKWSHSLQKRWIEVFIPRFSISASYNLETILPKMGIQNVFDKNADFSGIAKRDSLQVSKATHKAVLDVSEEGTEATAATTTKFIVRSKDGPSYFTVSFNRTFLMMITNKATDGILFLGKVENPTKS

SEQ ID NO: 78058 - protein, 435 aa, Homo sapiens
  Payload ID: 15550
  Gene Symbol: SERPINA9
  Gene Name: serpin peptidase inhibitor, clade A (alpha-1 antiproteinase, antitrypsin), member 9
  Uniprot ID: Q86WD7
  ENSP ID: ENSP00000337133
MQGQGRRRGTCKDIFCSKMASYLYGVLFAVGLCAPIYCVSPANAPSAYPRPSSTKSTPASQVYSLNTDFAFRLYRRLVLETPSQNIFFSPVSVSTSLAMLSLGAHSVTKTQILQGLGFNLTHTPESAIHQGFQHLVHSLTVPSKDLTLKMGSALFVKKELQLQANFLGNVKRLYEAEVFSTDFSNPSIAQARINSHVKKKTQGKVVDIIQGLDLLTAMVLVNHIFFKAKWEKPFHPEYTRKNFPFLVGEQVTVHVPMMHQKEQFAFGVDTELNCFVLQMDYKGDAVAFFVLPSKGKMRQLEQALSARTLRKWSHSLQKRWIEVFIPRFSISASYNLETILPKMGIQNVFDKNADFSGIAKRDSLQVSKATHKAVLDVSEEGTEATAATTTKFIVRSKDGPSYFTVSFNRTFLMMITNKATDGILFLGKVENPTKS

SEQ ID NO: 78059 - protein, 417 aa, Homo sapiens
  Payload ID: 15550
  Gene Symbol: SERPINA9
  Gene Name: serpin peptidase inhibitor, clade A (alpha-1 antiproteinase, antitrypsin), member 9
  Uniprot ID: Q86WD7
  ENSP ID: ENSP00000369723
MASYLYGVLFAVGLCAPIYCVSPANAPSAYPRPSSTKSTPASQVYSLNTDFAFRLYRRLVLETPSQNIFFSPVSVSTSLAMLSLGAHSVTKTQILQGLGFNLTHTPESAIHQGFQHLVHSLTVPSKDLTLKMGSALFVKKELQLQANFLGNVKRLYEAEVFSTDFSNPSIAQARINSHVKKKTQGKVVDIIQGLDLLTAMVLVNHIFFKAKWEKPFHPEYTRKNFPFLVGEQVTVHVPMMHQKEQFAFGVDTELNCFVLQMDYKGDAVAFFVLPSKGKMRQLEQALSARTLRKWSHSLQKRWIEVFIPRFSISASYNLETILPKMGIQNVFDKNADFSGIAKRDSLQVSKATHKAVLDVSEEGTEATAATTTKFIVRSKDGPSYFTVSFNRTFLMMITNKATDGILFLGKVENPTKS

SEQ ID NO: 78060 - protein, 286 aa, Homo sapiens
  Payload ID: 15550
  Gene Symbol: SERPINA9
  Gene Name: serpin peptidase inhibitor, clade A (alpha-1 antiproteinase, antitrypsin), member 9
  Uniprot ID: Q86WD7
  ENSP ID: ENSP00000409012
MGSALFVKKELQLQANFLGNVKRLYEAEVFSTDFSNPSIAQARINSHVKKKTQGKVVDIIQGLDLLTAMVLVNHIFFKAKWEKPFHPEYTRKNFPFLVGEQVTVHVPMMHQKEQFAFGVDTELNCFVLQMDYKGDAVAFFVLPSKGKMRQLEQALSARTLRKWSHSLQKRWIEVFIPRFSISASYNLETILPKMGIQNVFDKNADFSGIAKRDSLQVSKATHKAVLDVSEEGTEATAATTTKFIVRSKDGPSYFTVSFNRTFLMMITNKATDGILFLGKVENPTKS

SEQ ID NO: 78061 - protein, 337 aa, Homo sapiens
  Payload ID: 15550
  Gene Symbol: SERPINA9
  Gene Name: serpin peptidase inhibitor, clade A (alpha-1 antiproteinase, antitrypsin), member 9
  Uniprot ID: Q86WD7
  ENSP ID: ENSP00000414092
MLSLGAHSVTKTQILQGLGFNLTHTPESAIHQGFQHLVHSLTVPSKDLTLKMGSALFVKKELQLQANFLGNVKRLYEAEVFSTDFSNPSIAQARINSHVKKKTQGKVVDIIQGLDLLTAMVLVNHIFFKAKWEKPFHPEYTRKNFPFLVGEQVTVHVPMMHQKEQFAFGVDTELNCFVLQMDYKGDAVAFFVLPSKGKMRQLEQALSARTLRKWSHSLQKRWIEVFIPRFSISASYNLETILPKMGIQNVFDKNADFSGIAKRDSLQVSKATHKAVLDVSEEGTEATAATTTKFIVRSKDGPSYFTVSFNRTFLMMITNKATDGILFLGKVENPTKS

SEQ ID NO: 78062 - protein, 201 aa, Homo sapiens
  Payload ID: 15550
  Gene Symbol: SERPINA9
  Gene Name: serpin peptidase inhibitor, clade A (alpha-1 antiproteinase, antitrypsin), member 9
  Uniprot ID: Q86WD7
  ENSP ID: ENSP00000441511
MRSAGGRGEIKVRRELQPSKQVSGLTNHARTGQEKRNLQRHILFQNGILPLWSTLCCWPLCSNLLCVPGQCPQCIPPPFLHKEHPCLTGVFPQHRLCLPPIPQAGFGDPESEHLLLPCECLHFPGHALPWGPLSHQDPDSPGPGLQPHTHTRVCHPPGLPAPGSLTDCSQQRPDLEDGKCPLRQEGAAAAGKFLGQCQEAV

SEQ ID NO: 78063 - protein, 334 aa, Homo sapiens
  Payload ID: 15550
  Gene Symbol: SERPINA9
  Gene Name: serpin peptidase inhibitor, clade A (alpha-1 antiproteinase, antitrypsin), member 9
  Uniprot ID: Q86WD7
  ENSP ID: ENSP00000445476
MRSAGGRGEIKVRRELQPSKQVSGLTNHARTGQEKRNLQRLVLETPSQNIFFSPVSVSTSLAMLSLGAHSVTKTQILQGLGFNLTHTPESAIHQGFQHLVHSLTVPSKDLTLKMGSALFVKKELQLQANFLGNVKRLYEAEVFSTDFSNPSIAQARINSHVKKKTQGKVVDIIQGLDLLTAMVLVNHIFFKAKWEKPFHPEYTRKNFPFLVGEQVTVHVPMMHQKEQFAFGVDTELNCFVLQMDYKGDAVAFFVLPSKGKMRQLEQALSARTLRKWSHSLQKRWIEVFIPRFSISASYNLETILPKMGIQNVFDKNADFSGIAKRDSLQVSKVS

SEQ ID NO: 78064 - protein, 379 aa, Homo sapiens
  Payload ID: 15551
  Gene Symbol: SERPINB1
  Gene Name: serpin peptidase inhibitor, clade B (ovalbumin), member 1
  Uniprot ID: P30740
  ENSP ID: ENSP00000370115
MEQLSSANTRFALDLFLALSENNPAGNIFISPFSISSAMAMVFLGTRGNTAAQLSKTFHFNTVEEVHSRFQSLNADINKRGASYILKLANRLYGEKTYNFLPEFLVSTQKTYGADLASVDFQHASEDARKTINQWVKGQTEGKIPELLASGMVDNMTKLVLVNAIYFKGNWKDKFMKEATTNAPFRLNKKDRKTVKMMYQKKKFAYGYIEDLKCRVLELPYQGEELSMVILLPDDIEDESTGLKKIEEQLTLEKLHEWTKPENLDFIEVNVSLPRFKLEESYTLNSDLARLGVQDLFNSSKADLSGMSGARDIFISKIVHKSFVEVNEEGTEAAAATAGIATFCMLMPEENFTADHPFLFFIRHNSSGSILFLGRFSSP

SEQ ID NO: 78065 - protein, 397 aa, Homo sapiens
  Payload ID: 15552
  Gene Symbol: SERPINB10
  Gene Name: serpin peptidase inhibitor, clade B (ovalbumin), member 10
  Uniprot ID: P48595
  ENSP ID: ENSP00000238508
MDSLATSINQFALELSKKLAESAQGKNIFFSSWSISTSLTIVYLGAKGTTAAQMAQVLQFNRDQGVKCDPESEKKRKMEFNLSNSEEIHSDFQTLISEILKPNDDYLLKTANAIYGEKTYAFHNKYLEDMKTYFGAEPQPVNFVEASDQIRKDINSWVERQTEGKIQNLLPDDSVDSTTRMILVNALYFKGIWEHQFLVQNTTEKPFRINETTSKPVQMMFMKKKLHIFHIEKPKAVGLQLYYKSRDLSLLILLPEDINGLEQLEKAITYEKLNEWTSADMMELYEVQLHLPKFKLEDSYDLKSTLSSMGMSDAFSQSKADFSGMSSARNLFLSNVFHKAFVEINEQGTEAAAGSGSEIDIRIRVPSIEFNANHPFLFFIRHNKTNTILFYGRLCSP

SEQ ID NO: 78066 - protein, 280 aa, Homo sapiens
  Payload ID: 15552
  Gene Symbol: SERPINB10
  Gene Name: serpin peptidase inhibitor, clade B (ovalbumin), member 10
  ENSP ID: ENSP00000381082
  MOD_RES (1)..(1): Any amino acid
XSVNKLFGEKSASFREEYIRLCQKYYSSEPQAVDFLECAEEARKKINSWVKTQTKGKIPNLLPEGSVDGDTRMVLVNAVYFKGKWKTPFEKKLNGLYPFRVNSAQRTPVQMMYLREKLNIGYIEDLKAQILELPYAGDVSMFLLLPDEIADVSTGLELLESEITYDKLNKWTSKDKMAEDEVELKVSQLFSHNLLLQEQIANSAPVGENKVSSMDSLATSINQFALELSKKLAESAQGKNIFFSSWSISTSLTIVYLGAKGTTAAQMAQVLQFNRDQGVK

SEQ ID NO: 78067 - protein, 253 aa, Homo sapiens
  Payload ID: 15552
  Gene Symbol: SERPINB10
  Gene Name: serpin peptidase inhibitor, clade B (ovalbumin), member 10
  ENSP ID: ENSP00000392381
  MOD_RES (1)..(1): Any amino acid
XSVNKLFGEKSASFREEYIRLCQKYYSSEPQAVDFLECAEEARKKINSWVKTQTKGKIPNLLPEGSVDGDTRMVLVNAVYFKGKWKTPFEKKLNGLYPFRVNSAQRTPVQMMYLREKLNIGYIEDLKAQILELPYAGDVSMFLLLPDEIADVSTGLELLESEITYDKLNKWTSKDKMAEDEVEVSSMDSLATSINQFALELSKKLAESAQGKNIFFSSWSISTSLTIVYLGAKGTTAAQMAQVLQFNRDQGVK

SEQ ID NO: 78068 - protein, 397 aa, Homo sapiens; identical to SEQ ID NO: 78065
  Payload ID: 15552
  Gene Symbol: SERPINB10
  Gene Name: serpin peptidase inhibitor, clade B (ovalbumin), member 10
  Uniprot ID: P48595
  ENSP ID: ENSP00000479385

SEQ ID NO: 78069 - protein, 392 aa, Homo sapiens
  Payload ID: 15553
  Gene Symbol: SERPINB11
  Gene Name: serpin peptidase inhibitor, clade B (ovalbumin), member 11 (gene/pseudogene)
  Uniprot ID: Q96P15
  ENSP ID: ENSP00000421854
MGSLSTANVEFCLDVFKELNSNNIGDNIFFSSLSLLYALSMVLLGARGETEEQLEKVLHFSHTVDSLKPGFKDSPKCSQAGRIHSEFGVEFSQINQPDSNCTLSIANRLYGTKTMAFHQQYLSCSEKWYQARLQTVDFEQSTEETRKTINAWVENKTNGKVANLFGKSTIDPSSVMVLVNAIYFKGQWQNKFQVRETVKSPFQLSEGKNVTVEMMYQIGTFKLAFVKEPQMQVLELPYVNNKLSMIILLPVGIANLKQIEKQLNSGTFHEWTSSSNMMEREVEVHLPRFKLETKYELNSLLKSLGVTDLFNQVKADLSGMSPTKGLYLSKAIHKSYLDVSEEGTEAAAATGDSIAVKSLPMRAQFKANHPFLFFIRHTHTNTILFCGKLASP

SEQ ID NO: 78070 - protein, 392 aa, Homo sapiens; identical to SEQ ID NO: 78069
  Payload ID: 15553
  Gene Symbol: SERPINB11
  Gene Name: serpin peptidase inhibitor, clade B (ovalbumin), member 11 (gene/pseudogene)
  ENSP ID: ENSP00000441497

SEQ ID NO: 78071 - protein, 135 aa, Homo sapiens
  Payload ID: 15553
  Gene Symbol: SERPINB11
  Gene Name: serpin peptidase inhibitor, clade B (ovalbumin), member 11 (gene/pseudogene)
  ENSP ID: ENSP00000441708
MGSLSTANVEFCLDVFKELNSNNIGDNIFFSSLSLLYALSMVLLGARGETEEQLEKVLHFSHTVDSLKPGFKDSPKCSQAGRIHSEFGVEFSQINQPDSNCTLSIANRLYGTKTMAFHQEKSQISLERAQLTLHL

SEQ ID NO: 78072 - protein, 181 aa, Homo sapiens
  Payload ID: 15553
  Gene Symbol: SERPINB11
  Gene Name: serpin peptidase inhibitor, clade B (ovalbumin), member 11 (gene/pseudogene)
  ENSP ID: ENSP00000480275
MGSLSTANVEFCLDVFKELNSNNIGDNIFFSSLSLLYALSMVLLGARGETEEQLEKVLHFSHTVDSLKPGFKDSPKCSQAGRIHSEFGVEFSQINQPDSNCTLSIANRLYGTKTMAFHQQYLSCSEKWYQARLQTVDFEQSTEETRKTINAWVENKTNGKVANLFGKSTIDPSSVMVLVNA

SEQ ID NO: 78073 - protein, 190 aa, Homo sapiens
  Payload ID: 15553
  Gene Symbol: SERPINB11
  Gene Name: serpin peptidase inhibitor, clade B (ovalbumin), member 11 (gene/pseudogene)
  ENSP ID: ENSP00000485426
MGSLSTANVEFCLDVFKELNSNNIGDNIFFSSLSLLYALSMVLLGARGETEEQLEKIEKQLNSGTFHEWTSSSNMMEREVEVHLPRFKLETKYELNSLLKSLGVTDLFNQVKADLSGMSPTKGLYLSKAIHKSYLDVSEEGTEAAAATGDSIAVKSLPMRAQFKANHPFLFFIRHTHTNTILFCGKLASP

SEQ ID NO: 78074 - protein, 305 aa, Homo sapiens
  Payload ID: 15553
  Gene Symbol: SERPINB11
  Gene Name: serpin peptidase inhibitor, clade B (ovalbumin), member 11 (gene/pseudogene)
  ENSP ID: ENSP00000485532
MGSLSTANVEFCLDVFKELNSNNIGDNIFFSSLSLLYALSMVLLGARGETEEQLEKVLHFSHTVDSLKPGFKDSPKCSQAGRIHSEFGVEFSQINQPDSNCTLSIANRLYGTKTMAFHQGKNVTVEMMYQIGTFKLAFVKEPQMQVLELPYVNNKLSMIILLPVGIANLKQIEKQLNSGTFHEWTSSSNMMEREVEVHLPRFKLETKYELNSLLKSLGVTDLFNQVKADLSGMSPTKGLYLSKAIHKSYLDVSEEGTEAAAATGDSIAVKSLPMRAQFKANHPFLFFIRHTHTNTILFCGKLASP

SEQ ID NO: 78075 - protein, 405 aa, Homo sapiens
  Payload ID: 15554
  Gene Symbol: SERPINB12
  Gene Name: serpin peptidase inhibitor, clade B (ovalbumin), member 12
  Uniprot ID: Q96P63
  ENSP ID: ENSP00000269491
MDSLVTANTKFCFDLFQEIGKDDRHKNIFFSPLSLSAALGMVRLGARSDSAHQIDEVLHFNEFSQNESKEPDPCLKSNKQKAGSLNNESGLVSCYFGQLLSKLDRIKTDYTLSIANRLYGEQEFPICQEYLDGVIQFYHTTIESVDFQKNPEKSRQEINFWVECQSQGKIKELFSKDAINAETVLVLVNAVYFKAKWETYFDHENTVDAPFCLNANENKSVKMMTQKGLYRIGFIEEVKAQILEMRYTKGKLSMFVLLPSHSKDNLKGLEELERKITYEKMVAWSSSENMSEESVVLSFPRFTLEDSYDLNSILQDMGITDIFDETRADLTGISPSPNLYLSKIIHKTFVEVDENGTQAAAATGAVVSERSLRSWVEFNANHPFLFFIRHNKTQTILFYGRVCSP

SEQ ID NO: 78076 - protein, 425 aa, Homo sapiens
  Payload ID: 15554
  Gene Symbol: SERPINB12
  Gene Name: serpin peptidase inhibitor, clade B (ovalbumin), member 12
  Uniprot ID: Q96P63
  ENSP ID: ENSP00000372218
MDSLVTANTKFCFDLFQEIGKDDRHKNIFFSPLSLSAALGMVRLGARSDSAHQIDEVLHFNEFSQNESKEPDPCLKSNKQKVLADSSLEGQKKTTEPLDQQAGSLNNESGLVSCYFGQLLSKLDRIKTDYTLSIANRLYGEQEFPICQEYLDGVIQFYHTTIESVDFQKNPEKSRQEINFWVECQSQGKIKELFSKDAINAETVLVLVNAVYFKAKWETYFDHENTVDAPFCLNANENKSVKMMTQKGLYRIGFIEEVKAQILEMRYTKGKLSMFVLLPSHSKDNLKGLEELERKITYEKMVAWSSSENMSEESVVLSFPRFTLEDSYDLNSILQDMGITDIFDETRADLTGISPSPNLYLSKIIHKTFVEVDENGTQAAAATGAVVSERSLRSWVEFNANHPFLFFIRHNKTQTILFYGRVCSP

SEQ ID NO: 78077 - protein, 400 aa, Homo sapiens
  Payload ID: 15555
  Gene Symbol: SERPINB13
  Gene Name: serpin peptidase inhibitor, clade B (ovalbumin), member 13
  ENSP ID: ENSP00000269489
MDSLGAVSTRLGFDLFKELKKTNDGNIFFSPVGILTAIGMVLLGTRGATASQLEEVFHSEKETKSSRIKAEEKEVVRIKAEGKEIENTEAVHQQFQKFLTEISKLTNDYELNITNRLFGEKTYLFLQKYLDYVEKYYHASLEPVDFVNAADESRKKINSWVESKTNEKIKDLFPDGSISSSTKLVLVNMVYFKGQWDREFKKENTKEEKFWMNKSTSKSVQMMTQSHSFSFTFLEDLQAKILGIPYKNNDLSMFVLLPNDIDGLEKIIDKISPEKLVEWTSPGHMEERKVNLHLPRFEVEDGYDLEAVLAAMGMGDAFSEHKADYSGMSSGSGLYAQKFLHSSFVAVTEEGTEAAAATGIGFTVTSAPGHENVHCNHPFLFFIRHNESNSILFFGRFSSP

SEQ ID NO: 78078 - protein, 391 aa, Homo sapiens
  Payload ID: 15555
  Gene Symbol: SERPINB13
  Gene Name: serpin peptidase inhibitor, clade B (ovalbumin), member 13
  Uniprot ID: Q9UIV8
  ENSP ID: ENSP00000341584
MDSLGAVSTRLGFDLFKELKKTNDGNIFFSPVGILTAIGMVLLGTRGATASQLEEVFHSEKETKSSRIKAEEKEVIENTEAVHQQFQKFLTEISKLTNDYELNITNRLFGEKTYLFLQKYLDYVEKYYHASLEPVDFVNAADESRKKINSWVESKTNEKIKDLFPDGSISSSTKLVLVNMVYFKGQWDREFKKENTKEEKFWMNKSTSKSVQMMTQSHSFSFTFLEDLQAKILGIPYKNNDLSMFVLLPNDIDGLEKIIDKISPEKLVEWTSPGHMEERKVNLHLPRFEVEDGYDLEAVLAAMGMGDAFSEHKADYSGMSSGSGLYAQKFLHSSFVAVTEEGTEAAAATGIGFTVTSAPGHENVHCNHPFLFFIRHNESNSILFFGRFSSP

SEQ ID NO: 78079 - protein, 158 aa, Homo sapiens
  Payload ID: 15555
  Gene Symbol: SERPINB13
  Gene Name: serpin peptidase inhibitor, clade B (ovalbumin), member 13
  ENSP ID: ENSP00000388300
MTCQDTALSICVRCPATTVSPKTRGLAKIIMDSLGAVSTRLGFDLFKELKKTNDGNIFFSPVGILTAIGMVLLGTRGATASQLEEVFHSEKETKSSRIKAEEKEVIENTEAVHQQFQKFLTEISKLTNDYELNITNRLFGEKTYLFLQKYLDYVEKYY

SEQ ID NO: 78080 - protein, 124 aa, Homo sapiens
  Payload ID: 15555
  Gene Symbol: SERPINB13
  Gene Name: serpin peptidase inhibitor, clade B (ovalbumin), member 13
  ENSP ID: ENSP00000391156
TNDGNIFFSPVGILTAIGMVLLGTRGATASQLEEVFHSEKETKSSRIKAEEKEVSTSKSVQMMTQSHSFSFTFLEDLQAKILGIPYKNNDLSMFVLLPNDIDGLEKVNHCSEDGVCNTSYASYF

SEQ ID NO: 78081 - protein, 165 aa, Homo sapiens
  Payload ID: 15555
  Gene Symbol: SERPINB13
  Gene Name: serpin peptidase inhibitor, clade B (ovalbumin), member 13
  ENSP ID: ENSP00000394592
MDSLGAVSTRLGFDLFKELKKTNDGNIFFSPVGILTAIGMVLLGTRGATASQLEEVFHSEKETKSSRIKAEEKEIENTEAVHQQFQKFLTEISKLTNDYELNITNRLFGEKTYLFLQKYLDYVEKYYHASLEPVDFVNAADESRKKINSWVESKTNDVETEAQRV

SEQ ID NO: 78082 - protein, 415 aa, Homo sapiens
  Payload ID: 15556
  Gene Symbol: SERPINB2
  Gene Name: serpin peptidase inhibitor, clade B (ovalbumin), member 2
  Uniprot ID: P05120
  ENSP ID: ENSP00000299502
MEDLCVANTLFALNLFKHLAKASPTQNLFLSPWSISSTMAMVYMGSRGSTEDQMAKVLQFNEVGANAVTPMTPENFTSCGFMQQIQKGSYPDAILQAQAADKIHSSFRSLSSAINASTGNYLLESVNKLFGEKSASFREEYIRLCQKYYSSEPQAVDFLECAEEARKKINSWVKTQTKGKIPNLLPEGSVDGDTRMVLVNAVYFKGKWKTPFEKKLNGLYPFRVNSAQRTPVQMMYLREKLNIGYIEDLKAQILELPYAGDVSMFLLLPDEIADVSTGLELLESEITYDKLNKWTSKDKMAEDEVEVYIPQFKLEEHYELRSILRSMGMEDAFNKGRANFSGMSERNDLFLSEVFHQAMVDVNEEGTEAAAGTGGVMTGRTGHGGPQFVADHPFLFLIMHKITNCILFFGRFSSP

SEQ ID NO: 78083 - protein, 113 aa, Homo sapiens
  Payload ID: 15556
  Gene Symbol: SERPINB2
  Gene Name: serpin peptidase inhibitor, clade B (ovalbumin), member 2
  ENSP ID: ENSP00000385397
MEDLCVANTLFALNLFKHLAKASPTQNLFLSPWSISSTMAMVYMGSRGSTEDQMAKVLQFNEVGANAVTPMTPENFTSCGFMQQIQKGSYPDAILQAQAADKIHSSFRSLSSA

SEQ ID NO: 78084 - protein, 132 aa, Homo sapiens
  Payload ID: 15556
  Gene Symbol: SERPINB2
  Gene Name: serpin peptidase inhibitor, clade B (ovalbumin), member 2
  ENSP ID: ENSP00000397096
MEDLCVANTLFALNLFKHLAKASPTQNLFLSPWSISSTMAMVYMGSRGSTEDQMAKVLQFNEVGANAVTPMTPENFTSCGFMQQIQKGSYPDAILQAQAADKIHSSFRSLSSAINASTGNYLLESVNKLFGE

SEQ ID NO: 78085 - protein, 415 aa, Homo sapiens; identical to SEQ ID NO: 78082
  Payload ID: 15556
  Gene Symbol: SERPINB2
  Gene Name: serpin peptidase inhibitor, clade B (ovalbumin), member 2
  Uniprot ID: P05120
  ENSP ID: ENSP00000401645

SEQ ID NO: 78086 - protein, 161 aa, Homo sapiens
  Payload ID: 15556
  Gene Symbol: SERPINB2
  Gene Name: serpin peptidase inhibitor, clade B (ovalbumin), member 2
  ENSP ID: ENSP00000402386
MEDLCVANTLFALNLFKHLAKASPTQNLFLSPWSISSTMAMVYMGSRGSTEDQMAKVLQFNEVGANAVTPMTPENFTSCGFMQQIQKGSYPDAILQAQAADKIHSSFRSLSSAINASTGNYLLESVNKLFGEKSASFREEYIRLCQKYYSSEPQAVDFLEC

SEQ ID NO: 78087 - protein, 390 aa, Homo sapiens
  Payload ID: 15557
  Gene Symbol: SERPINB3
  Gene Name: serpin peptidase inhibitor, clade B (ovalbumin), member 3
  Uniprot ID: P29508
  ENSP ID: ENSP00000283752
MNSLSEANTKFMFDLFQQFRKSKENNIFYSPISITSALGMVLLGAKDNTAQQIKKVLHFDQVTENTTGKAATYHVDRSGNVHHQFQKLLTEFNKSTDAYELKIANKLFGEKTYLFLQEYLDAIKKFYQTSVESVDFANAPEESRKKINSWVESQTNEKIKNLIPEGNIGSNTTLVLVNAIYFKGQWEKKFNKEDTKEEKFWPNKNTYKSIQMMRQYTSFHFASLEDVQAKVLEIPYKGKDLSMIVLLPNEIDGLQKLEEKLTAEKLMEWTSLQNMRETRVDLHLPRFKVEESYDLKDTLRTMGMVDIFNGDADLSGMTGSRGLVLSGVLHKAFVEVTEEGAEAAAATAVVGFGSSPTSTNEEFHCNHPFLFFIRQNKTNSILFYGRFSSP

SEQ ID NO: 78088 - protein, 338 aa, Homo sapiens
  Payload ID: 15557
  Gene Symbol: SERPINB3
  Gene Name: serpin peptidase inhibitor, clade B (ovalbumin), member 3
  Uniprot ID: P29508
  ENSP ID: ENSP00000329498
MNSLSEANTKFMFDLFQQFRKSKENNIFYSPISITSALGMVLLGAKDNTAQQIKKVLHFDQVTENTTGKAATYHVDRSGNVHHQFQKLLTEFNKSTDAYELKIANKLFGEKTYLFLQEYLDAIKKFYQTSVESVDFANAPEESRKKINSWVESQTNEKIKNLIPEGNIGSNTTLVLVNAIYFKGQWEKKFNKEDTKEEKFWPNKLEEKLTAEKLMEWTSLQNMRETRVDLHLPRFKVEESYDLKDTLRTMGMVDIFNGDADLSGMTGSRGLVLSGVLHKAFVEVTEEGAEAAAATAVVGFGSSPTSTNEEFHCNHPFLFFIRQNKTNSILFYGRFSSP

SEQ ID NO: 78089 - protein, 390 aa, Homo sapiens
  Payload ID: 15557
  Gene Symbol: SERPINB3
  Gene Name: serpin peptidase inhibitor, clade B (ovalbumin), member 3
  ENSP ID: ENSP00000348795
MNSLSEANTKFMFDLFQQFRKSKENNIFYSPISITSALGMVLLGAKDNTAQQIKKVLHFDQVTENTTGKAATYHVDRSGNVHHQFQKLLTEFNKSTDAYELKIANKLFGEKTYLFLQEYLDAIKKFYQTSVESVDFANAPEESRKKINSWVESQTNEKIKNLIPEGNIGSNTTLVLVNAIYFKGQWEKKFNKEDTKEEKFWPNKNTYKSIQMMRQYTSFHFASLEDVQAKVLEIPYKGKDLSMIVLLPNEIDGLQKLEEKLTAEKLMEWTSLQNMRETCVDLHLPRFKMEESYDLKDTLRTMGMVNIFNGDADLSGMTWSHGLSVSKVLHKAFVEVTEEGVEAAAATAVVVVELSSPSTNEEFCCNHPFLFFIRQNKTNSILFYGRFSSP

SEQ ID NO: 78090 - protein, 390 aa, Homo sapiens
  Payload ID: 15558
  Gene Symbol: SERPINB4
  Gene Name: serpin peptidase inhibitor, clade B (ovalbumin), member 4
  Uniprot ID: P48594
  ENSP ID: ENSP00000343445
MNSLSEANTKFMFDLFQQFRKSKENNIFYSPISITSALGMVLLGAKDNTAQQISKVLHFDQVTENTTEKAATYHVDRSGNVHHQFQKLLTEFNKSTDAYELKIANKLFGEKTYQFLQEYLDAIKKFYQTSVESTDFANAPEESRKKINSWVESQTNEKIKNLFPDGTIGNDTTLVLVNAIYFKGQWENKFKKENTKEEKFWPNKNTYKSVQMMRQYNSFNFALLEDVQAKVLEIPYKGKDLSMIVLLPNEIDGLQKLEEKLTAEKLMEWTSLQNMRETCVDLHLPRFKMEESYDLKDTLRTMGMVNIFNGDADLSGMTWSHGLSVSKVLHKAFVEVTEEGVEAAAATAVVVVELSSPSTNEEFCCNHPFLFFIRQNKTNSILFYGRFSSP

SEQ ID NO: 78091 - protein, 371 aa, Homo sapiens
  Payload ID: 15558
  Gene Symbol: SERPINB4
  Gene Name: serpin peptidase inhibitor, clade B (ovalbumin), member 4
  ENSP ID: ENSP00000398645
  MOD_RES (1)..(1): Any amino acid
XTMNSLSEANTKFMFDLFQQFRKSKENNIFYSPISITSALGMVLLGAKDNTAQQISKVLHFDQVTENTTEKAATYHVDRSGNVHHQFQKLLTEFNKSTDAYELKIANKLFGEKTYQFLQEYLDAIKKFYQTSVESTDFANAPEESRKKINSWVESQTNEKIKNLFPDGTIGNDTTLVLVNAIYFKGQWENKFKKENTKEEKFWPNKDVQAKVLEIPYKGKDLSMIVLLPNEIDGLQKLEEKLTAEKLMEWTSLQNMRETCVDLHLPRFKMEESYDLKDTLRTMGMVNIFNGDADLSGMTWSHGLSVSKVLHKAFVEVTEEGVEAAAATAVVVVELSSPSTNEEFCCNHPFLFFIRQNKTNSILFYGRFSSP

SEQ ID NO: 78092 - protein, 211 aa, Homo sapiens
  Payload ID: 15558
  Gene Symbol: SERPINB4
  Gene Name: serpin peptidase inhibitor, clade B (ovalbumin), member 4
  ENSP ID: ENSP00000399796
MNSLSEANTKFMFDLFQQFRKSKENNIFYSPISITSALGMVLLGAKDNTAQQISKVLHFDQVTENTTEKAATYHEYLDAIKKFYQTSVESTDFANAPEESRKKINSWVESQTNEKIKNLFPDGTIGNDTTLVLVNAIYFKGQWENKFKKENTKEEKFWPNKNTYKSVQMMRQYNSFNFALLEDVQAKVLEIPYKGKDLSMIVLLPNEIDGL

SEQ ID NO: 78093 - protein, 375 aa, Homo sapiens
  Payload ID: 15559
  Gene Symbol: SERPINB5
  Gene Name: serpin peptidase inhibitor, clade B (ovalbumin), member 5
  Uniprot ID: P36952
  ENSP ID: ENSP00000372221
MDALQLANSAFAVDLFKQLCEKEPLGNVLFSPICLSTSLSLAQVGAKGDTANEIGQVLHFENVKDVPFGFQTVTSDVNKLSSFYSLKLIKRLYVDKSLNLSTEFISSTKRPYAKELETVDFKDKLEETKGQINNSIKDLTDGHFENILADNSVNDQTKILVVNAAYFVGKWMKKFSESETKECPFRVNKTDTKPVQMMNMEATFCMGNIDSINCKIIELPFQNKHLSMFILLPKDVEDESTGLEKIEKQLNSESLSQWTNPSTMANAKVKLSIPKFKVEKMIDPKACLENLGLKHIFSEDTSDFSGMSETKGVALSNVIHKVCLEITEDGGDSIEVPGARILQHKDELNADHPFIYIIRHNKTRNIIFFGKFCSP

SEQ ID NO: 78094 - protein, 129 aa, Homo sapiens
  Payload ID: 15559
  Gene Symbol: SERPINB5
  Gene Name: serpin peptidase inhibitor, clade B (ovalbumin), member 5
  ENSP ID: ENSP00000408821
MDALQLANSAFAVDLFKQLCEKEPLGNVLFSPICLSTSLSLAQVGAKGDTANEIGQVLHFENVKDVPFGFQTVTSDVNKLSSFYSLKLIKRLYVDKSLNLSTEFISSTKRPYAKELETVDFKDKLEETK

SEQ ID NO: 78095 - protein, 231 aa, Homo sapiens
  Payload ID: 15559
  Gene Symbol: SERPINB5
  Gene Name: serpin peptidase inhibitor, clade B (ovalbumin), member 5
  Uniprot ID: P36952
  ENSP ID: ENSP00000467158
MDALQLANSAFAVDLFKQLCEKEPLGNVLFSPICLSTSLSLAQVGAKGDTANEIGQVLHFENVKDVPFGFQTVTSDVNKLSSFYSLKLIKRLYVDKSLNLSTEFISSTKRPYAKELETVDFKDKLEETKGQINNSIKDLTDGHFENILADNSVNDQTKILVVNAAYFVGKWMKKFSESETKECPFRVNKVCGAACSSKRSPIIDVKNDRDRVGHKSIPMRNLRARPAKCLS

SEQ ID NO: 78096 - protein, 376 aa, Homo sapiens
  Payload ID: 15560
  Gene Symbol: SERPINB6
  Gene Name: serpin peptidase inhibitor, clade B (ovalbumin), member 6
  Uniprot ID: P35237
  ENSP ID: ENSP00000338358
MDVLAEANGTFALNLLKTLGKDNSKNVFFSPMSMSCALAMVYMGAKGNTAAQMAQILSFNKSGGGGDIHQGFQSLLTEVNKTGTQYLLRMANRLFGEKSCDFLSSFRDSCQKFYQAEMEELDFISAVEKSRKHINTWVAEKTEGKIAELLSPGSVDPLTRLVLVNAVYFRGNWDEQFDKENTEERLFKVSKNEEKPVQMMFKQSTFKKTYIGEIFTQILVLPYVGKELNMIIMLPDETTDLRTVEKELTYEKFVEWTRLDMMDEEEVEVSLPRFKLEESYDMESVLRNLGMTDAFELGKADFSGMSQTDLSLSKVVHKSFVEVNEEGTEAAAATAAIMMMRCARFVPRFCADHPFLFFIQHSKTNGILFCGRFSSP

SEQ ID NO: 78097 - protein, 376 aa, Homo sapiens; identical to SEQ ID NO: 78096
  Payload ID: 15560
  Gene Symbol: SERPINB6
  Gene Name: serpin peptidase inhibitor, clade B (ovalbumin), member 6
  Uniprot ID: P35237
  ENSP ID: ENSP00000369891

SEQ ID NO: 78098 - protein, 376 aa, Homo sapiens; identical to SEQ ID NO: 78096
  Payload ID: 15560
  Gene Symbol: SERPINB6
  Gene Name: serpin peptidase inhibitor, clade B (ovalbumin), member 6
  Uniprot ID: P35237
  ENSP ID: ENSP00000369896

SEQ ID NO: 78099 - protein, 376 aa, Homo sapiens; identical to SEQ ID NO: 78096
  Payload ID: 15560
  Gene Symbol: SERPINB6
  Gene Name: serpin peptidase inhibitor, clade B (ovalbumin), member 6
  Uniprot ID: P35237
  ENSP ID: ENSP00000369901

SEQ ID NO: 78100 - protein, 376 aa, Homo sapiens; identical to SEQ ID NO: 78096
  Payload ID: 15560
  Gene Symbol: SERPINB6
  Gene Name: serpin peptidase inhibitor, clade B (ovalbumin), member 6
  Uniprot ID: P35237
  ENSP ID: ENSP00000369912

SEQ ID NO: 78101 - protein, 376 aa, Homo sapiens; identical to SEQ ID NO: 78096
  Payload ID: 15560
  Gene Symbol: SERPINB6
  Gene Name: serpin peptidase inhibitor, clade B (ovalbumin), member 6
  Uniprot ID: P35237
  ENSP ID: ENSP00000369919

SEQ ID NO: 78102 - protein, 380 aa, Homo sapiens
  Payload ID: 15560
  Gene Symbol: SERPINB6
  Gene Name: serpin peptidase inhibitor, clade B (ovalbumin), member 6
  ENSP ID: ENSP00000481398
MSAIMDVLAEANGTFALNLLKTLGKDNSKNVFFSPMSMSCALAMVYMGAKGNTAAQMAQILSFNKSGGGGDIHQGFQSLLTEVNKTGTQYLLRMANRLFGEKSCDFLSSFRDSCQKFYQAEMEELDFISAVEKSRKHINTWVAEKTEGKIAELLSPGSVDPLTRLVLVNAVYFRGNWDEQFDKENTEERLFKVSKNEEKPVQMMFKQSTFKKTYIGEIFTQILVLPYVGKELNMIIMLPDETTDLRTVEKELTYEKFVEWTRLDMMDEEEVEVSLPRFKLEESYDMESVLRNLGMTDAFELGKADFSGMSQTDLSLSKVVHKSFVEVNEEGTEAAAATAAIMMMRCARFVPRFCADHPFLFFIQHSKTNGILFCGRFSSP

SEQ ID NO: 78103 - protein, 395 aa, Homo sapiens
  Payload ID: 15560
  Gene Symbol: SERPINB6
  Gene Name: serpin peptidase inhibitor, clade B (ovalbumin), member 6
  ENSP ID: ENSP00000484343
MSSRQRGNFNYKLAFKSAIMDVLAEANGTFALNLLKTLGKDNSKNVFFSPMSMSCALAMVYMGAKGNTAAQMAQILSFNKSGGGGDIHQGFQSLLTEVNKTGTQYLLRMANRLFGEKSCDFLSSFRDSCQKFYQAEMEELDFISAVEKSRKHINTWVAEKTEGKIAELLSPGSVDPLTRLVLVNAVYFRGNWDEQFDKENTEERLFKVSKNEEKPVQMMFKQSTFKKTYIGEIFTQILVLPYVGKELNMIIMLPDETTDLRTVEKELTYEKFVEWTRLDMMDEEEVEVSLPRFKLEESYDMESVLRNLGMTDAFELGKADFSGMSQTDLSLSKVVHKSFVEVNEEGTEAAAATAAIMMMRCARFVPRFCADHPFLFFIQHSKTNGILFCGRFSSP

SEQ ID NO: 78104 - protein, 380 aa, Homo sapiens
  Payload ID: 15561
  Gene Symbol: SERPINB7
  Gene Name: serpin peptidase inhibitor, clade B (ovalbumin), member 7
  Uniprot ID: O75635
  ENSP ID: ENSP00000337212
MASLAAANAEFCFNLFREMDDNQGNGNVFFSSLSLFAALALVRLGAQDDSLSQIDKLLHVNTASGYGNSSNSQSGLQSQLKRVFSDINASHKDYDLSIVNGLFAEKVYGFHKDYIECAEKLYDAKVERVDFTNHLEDTRRNINKWVENETHGKIKNVIGEGGISSSAVMVLVNAVYFKGKWQSAFTKSETINCHFKSPKCSGKAVAMMHQERKFNLSVIEDPSMKILELRYNGGINMYVLLPENDLSEIENKLTFQNLMEWTNPRRMTSKYVEVFFPQFKIEKNYEMKQYLRALGLKDIFDESKADLSGIASGGRLYISRMMHKSYIEVTEEGTEATAATGSNIVEKQLPQSTLFRADHPFLFVIRKDDIILFSGKVSCP

SEQ ID NO: 78105 - protein, 380 aa, Homo sapiens; identical to SEQ ID NO: 78104
  Payload ID: 15561
  Gene Symbol: SERPINB7
  Gene Name: serpin peptidase inhibitor, clade B (ovalbumin), member 7
  Uniprot ID: O75635
  ENSP ID: ENSP00000381101

SEQ ID NO: 78106 - protein, 128 aa, Homo sapiens
  Payload ID: 15561
  Gene Symbol: SERPINB7
  Gene Name: serpin peptidase inhibitor, clade B (ovalbumin), member 7
  ENSP ID: ENSP00000393947
MASLAAANAEFCFNLFREMDDNQGNGNVFFSSLSLFAALALVRLGAQDDSLSQIDKLLHVNTASGYGNSSNSQSGLQSQLKRVFSDINASHKDYDLSIVNGLFAEKVYGFHKDYIECAEKLYDAKVER

SEQ ID NO: 78107 - protein, 127 aa, Homo sapiens
  Payload ID: 15561
  Gene Symbol: SERPINB7
  Gene Name: serpin peptidase inhibitor, clade B (ovalbumin), member 7
  ENSP ID: ENSP00000397301
MASLAAANAEFCFNLFREMDDNQGNGNVFFSSLSLFAALALVRLGAQDDSLSQIDKLLHVNTASGYGNSSNSQSGLQSQLKRVFSDINASHKDYDLSIVNGLFAEKVYGFHKDYIECAEKLYDAKVE

SEQ ID NO: 78108 - protein, 164 aa, Homo sapiens
  Payload ID: 15561
  Gene Symbol: SERPINB7
  Gene Name: serpin peptidase inhibitor, clade B (ovalbumin), member 7
  ENSP ID: ENSP00000402362
MASLAAANAEFCFNLFREMDDNQGNGNVFFSSLSLFAALALVRLGAQDDSLSQIDKLLHVNTASGYGNSSNSQSGLQSQLKRVFSDINASHKDYDLSIVNGLFAEKVYGFHKDYIECAEKLYDAKVERVDFTNHLEDTRRNINKWVENETHGKIKNVIGEGGIS

SEQ ID NO: 78109 - protein, 363 aa, Homo sapiens
  Payload ID: 15561
  Gene Symbol: SERPINB7
  Gene Name: serpin peptidase inhibitor, clade B (ovalbumin), member 7
  Uniprot ID: O75635
  ENSP ID: ENSP00000444572
MASLAAANAEFCFNLFREMDDNQGNGNVFFSSLSLFAALALVRLGAQDDSLSQIDKSGLQSQLKRVFSDINASHKDYDLSIVNGLFAEKVYGFHKDYIECAEKLYDAKVERVDFTNHLEDTRRNINKWVENETHGKIKNVIGEGGISSSAVMVLVNAVYFKGKWQSAFTKSETINCHFKSPKCSGKAVAMMHQERKFNLSVIEDPSMKILELRYNGGINMYVLLPENDLSEIENKLTFQNLMEWTNPRRMTSKYVEVFFPQFKIEKNYEMKQYLRALGLKDIFDESKADLSGIASGGRLYISRMMHKSYIEVTEEGTEATAATGSNIVEKQLPQSTLFRADHPFLFVIRKDDIILFSGKVSCP

SEQ ID NO: 78110 - protein, 380 aa, Homo sapiens; identical to SEQ ID NO: 78104
  Payload ID: 15561
  Gene Symbol: SERPINB7
  Gene Name: serpin peptidase inhibitor, clade B (ovalbumin), member 7
  Uniprot ID: O75635
  ENSP ID: ENSP00000444861

SEQ ID NO: 78111 - protein, 189 aa, Homo sapiens
  Payload ID: 15562
  Gene Symbol: SERPINB8
  Gene Name: serpin peptidase inhibitor, clade B (ovalbumin), member 8
  ENSP ID: ENSP00000295211
  MOD_RES (1)..(1): Any amino acid
XLYKDGDIHRGFQSLLSEVNRTGTQYLLRTANRLFGEKTCDFLPDFKEYCQKFYQAELEELSFAEDTEECRKHINDWVAEKTEGKISEVLDAGTVDPLTKLVLVNAIYFKGKWNEQFDRKYTRGMLFKTNEEKKTVQMMFKEAKFKMGYADEVHTQVLELPYVEEELSMVILLPDDNTDLAVIKAGGEL

SEQ ID NO: 78112 - protein, 374 aa, Homo sapiens
  Payload ID: 15562
  Gene Symbol: SERPINB8
  Gene Name: serpin peptidase inhibitor, clade B (ovalbumin), member 8
  Uniprot ID: P50452
  ENSP ID: ENSP00000331368
MDDLCEANGTFAISLFKILGEEDNSRNVFFSPMSISSALAMVFMGAKGSTAAQMSQALCLYKDGDIHRGFQSLLSEVNRTGTQYLLRTANRLFGEKTCDFLPDFKEYCQKFYQAELEELSFAEDTEECRKHINDWVAEKTEGKISEVLDAGTVDPLTKLVLVNAIYFKGKWNEQFDRKYTRGMLFKTNEEKKTVQMMFKEAKFKMGYADEVHTQVLELPYVEEELSMVILLPDDNTDLAVVEKALTYEKFKAWTNSEKLTKSKVQVFLPRLKLEESYDLEPFLRRLGMIDAFDEAKADFSGMSTEKNVPLSKVAHKCFVEVNEEGTEAAAATAVVRNSRCSRMEPRFCADHPFLFFIRHHKTNCILFCGRFSSP

SEQ ID NO: 78113 - protein, 374 aa, Homo sapiens; identical to SEQ ID NO: 78112
  Payload ID: 15562
  Gene Symbol: SERPINB8
  Gene Name: serpin peptidase inhibitor, clade B (ovalbumin), member 8
  Uniprot ID: P50452
  ENSP ID: ENSP00000381072

SEQ ID NO: 78114 - protein, 242 aa, Homo sapiens
  Payload ID: 15562
  Gene Symbol: SERPINB8
  Gene Name: serpin peptidase inhibitor, clade B (ovalbumin), member 8
  Uniprot ID: P50452
  ENSP ID: ENSP00000381075
MDDLCEANGTFAISLFKILGEEDNSRNVFFSPMSISSALAMVFMGAKGSTAAQMSQALCLYKDGDIHRGFQSLLSEVNRTGTQYLLRTANRLFGEKTCDFLPDFKEYCQKFYQAELEELSFAEDTEECRKHINDWVAEKTEGKISEVLDAGTVDPLTKLVLVNAIYFKGKWNEQFDRKYTRGMLFKTNEEKKTVQMMFKEAKFKMGYADEVHTQVLELPYVEEELSMVILLPDDNTDLAVKE

SEQ ID NO: 78115 - protein, 164 aa, Homo sapiens
  Payload ID: 15562
  Gene Symbol: SERPINB8
  Gene Name: serpin peptidase inhibitor, clade B (ovalbumin), member 8
  ENSP ID: ENSP00000393456
MDDLCEANGTFAISLFKILGEEDNSRNVFFSPMSISSALAMVFMGAKGSTAAQMSQALCLYKDGDIHRGFQSLLSEVNRTGTQYLLRTANRLFGEKTCDFLPDFKEYCQKFYQAELEELSFAEDTEECRKHINDWVAEKTEGKISEVLDAGTVDPLTKLVLVNA

SEQ ID NO: 78116 - protein, 124 aa, Homo sapiens
  Payload ID: 15562
  Gene Symbol: SERPINB8
  Gene Name: serpin peptidase inhibitor, clade B (ovalbumin), member 8
  ENSP ID: ENSP00000414580
MDDLCEANGTFAISLFKILGEEDNSRNVFFSPMSISSALAMVFMGAKGSTAAQMSQALCLYKDGDIHRGFQSLLSEVNRTGTQYLLRTANRLFGEKTCDFLPDFKEYCQKFYQAELEELSFAED

SEQ ID NO: 78117 - protein, 192 aa, Homo sapiens
  Payload ID: 15562
  Gene Symbol: SERPINB8
  Gene Name: serpin peptidase inhibitor, clade B (ovalbumin), member 8
  Uniprot ID: P50452
  ENSP ID: ENSP00000438328
MLFKTNEEKKTVQMMFKEAKFKMGYADEVHTQVLELPYVEEELSMVILLPDDNTDLAVVEKALTYEKFKAWTNSEKLTKSKVQVFLPRLKLEESYDLEPFLRRLGMIDAFDEAKADFSGMSTEKNVPLSKVAHKCFVEVNEEGTEAAAATAVVRNSRCSRMEPRFCADHPFLFFIRHHKTNCILFCGRFSSP

SEQ ID NO: 78118 - protein, 43 aa, Homo sapiens
  Payload ID: 15562
  Gene Symbol: SERPINB8
  Gene Name: serpin peptidase inhibitor, clade B (ovalbumin), member 8
  ENSP ID: ENSP00000478199
  MOD_RES (1)..(1): Any amino acid
XLPYVEEELSMVILLPDDNTDLAVDTLRSTSFFCDILANIIST

SEQ ID NO: 78119 - protein, 376 aa, Homo sapiens
  Payload ID: 15563
  Gene Symbol: SERPINB9
  Gene Name: serpin peptidase inhibitor, clade B (ovalbumin), member 9
  Uniprot ID: P50453
  ENSP ID: ENSP00000370074
METLSNASGTFAIRLLKILCQDNPSHNVFCSPVSISSALAMVLLGAKGNTATQMAQALSLNTEEDIHRAFQSLLTEVNKAGTQYLLRTANRLFGEKTCQFLSTFKESCLQFYHAELKELSFIRAAEESRKHINTWVSKKTEGKIEELLPGSSIDAETRLVLVNAIYFKGKWNEPFDETYTREMPFKINQEEQRPVQMMYQEATFKLAHVGEVRAQLLELPYARKELSLLVLLPDDGVELSTVEKSLTFEKLTAWTKPDCMKSTEVEVLLPKFKLQEDYDMESVLRHLGIVDAFQQGKADLSAMSAERDLCLSKFVHKSFVEVNEEGTEAAAASSCFVVAECCMESGPRFCADHPFLFFIRHNRANSILFCGRFSSP

SEQ ID NO: 78120 - protein, 464 aa, Homo sapiens
  Payload ID: 15564
  Gene Symbol: SERPINC1
  Gene Name: serpin peptidase inhibitor, clade C (antithrombin), member 1
  Uniprot ID: P01008
  ENSP ID: ENSP00000356671
MYSNVIGTVTSGKRKVYLLSLLLIGFWDCVTCHGSPVDICTAKPRDIPMNPMCIYRSPEKKATEDEGSEQKIPEATNRRVWELSKANSRFATTFYQHLADSKNDNDNIFLSPLSISTAFAMTKLGACNDTLQQLMEVFKFDTISEKTSDQIHFFFAKLNCRLYRKANKSSKLVSANRLFGDKSLTFNETYQDISELVYGAKLQPLDFKENAEQSRAAINKWVSNKTEGRITDVIPSEAINELTVLVLVNTIYFKGLWKSKFSPENTRKELFYKADGESCSASMMYQEGKFRYRRVAEGTQVLELPFKGDDITMVLILPKPEKSLAKVEKELTPEVLQEWLDELEEMMLVVHMPRFRIEDGFSLKEQLQDMGLVDLFSPEKSKLPGIVAEGRDDLYVSDAFHKAFLEVNEEGSEAAASTAVVIAGRSLNPNRVTFKANRPFLVFIREVPLNTIIFMGRVANPCVK

SEQ ID NO: 78121 - protein, 259 aa, Homo sapiens
  Payload ID: 15564
  Gene Symbol: SERPINC1
  Gene Name: serpin peptidase inhibitor, clade C (antithrombin), member 1
  ENSP ID: ENSP00000478688
MYSNVIGTVTSGKRKVYLLSLLLIGFWDCVTCHGSPVDICTAKPRDIPMNPMCIYRSPEKKATEDEGSEQKIPEATNRRVWELSKANSRFATTFYQHLADSKNDNDNIFLSPLSISTAFAMTKLGACNDTLQQLMEVFKFDTISEKTSDQIHFFFAKLNCRLYRKANKSSKLVSANRLFGDKSLTFNDLYVSDAFHKAFLEVNEEGSEAAASTAVVIAGRSLNPNRVTFKANRPFLVFIREVPLNTIIFMGRVANPCVK

SEQ ID NO: 78122 - protein, 499 aa, Homo sapiens
  Payload ID: 15565
  Gene Symbol: SERPIND1
  Gene Name: serpin peptidase inhibitor, clade D (heparin cofactor), member 1
  Uniprot ID: P05546
  ENSP ID: ENSP00000215727
MKHSLNALLIFLIITSAWGGSKGPLDQLEKGGETAQSADPQWEQLNNKNLSMPLLPADFHKENTVTNDWIPEGEEDDDYLDLEKIFSEDDDYIDIVDSLSVSPTDSDVSAGNILQLFHGKSRIQRLNILNAKFAFNLYRVLKDQVNTFDNIFIAPVGISTAMGMISLGLKGETHEQVHSILHFKDFVNASSKYEITTIHNLFRKLTHRLFRRNFGYTLRSVNDLYIQKQFPILLDFKTKVREYYFAEAQIADFSDPAFISKTNNHIMKLTKGLIKDALENIDPATQMMILNCIYFKGSWVNKFPVEMTHNHNFRLNEREVVKVSMMQTKGNFLAANDQELDCDILQLEYVGGISMLIVVPHKMSGMKTLEAQLTPRVVERWQKSMTNRTREVLLPKFKLEKNYNLVESLKLMGIRMLFDKNGNMAGISDQRIAIDLFKHQGTITVNEEGTQATTVTTVGFMPLSTQVRFTVDRPFLFLIYEHRTSCLLFMGRVANPSRS

SEQ ID NO: 78123 - protein, 499 aa, Homo sapiens; identical to SEQ ID NO: 78122
  Payload ID: 15565
  Gene Symbol: SERPIND1
  Gene Name: serpin peptidase inhibitor, clade D (heparin cofactor), member 1
  Uniprot ID: P05546
  ENSP ID: ENSP00000384050

SEQ ID NO: 78124 - protein, 402 aa, Homo sapiens [sequence omitted]

SEQ ID NO: 78125 - protein, 398 aa, Homo sapiens
  Payload ID: 15567
  Gene Symbol: SERPINE2
  Gene Name: serpin peptidase inhibitor, clade E (nexin, plasminogen activator inhibitor type 1), member 2
  Uniprot ID: P07093
  ENSP ID: ENSP00000258405
MNWHLPLFLLASVTLPSICSHFNPLSLEELGSNTGIQVFNQIVKSRPHDNIVISPHGIASVLGMLQLGADGRTKKQLAMVMRYGVNGVGKILKKINKAIVSKKNKDIVTVANAVFVKNASEIEVPFVTRNKDVFQCEVRNVNFEDPASACDSINAWVKNETRDMIDNLLSPDLIDGVLTRLVLVNAVYFKGLWKSRFQPENTKKRTFVAADGKSYQVPMLAQLSVFRCGSTSAPNDLWYNFIELPYHGESISMLIALPTESSTPLSAIIPHISTKTIDSWMSIMVPKRVQVILPKFTAVAQTDLKEPLKVLGITDMFDSSKANFAKITTGSENLHVSHILQKAKIEVSEDGTKASAATTAILIARSSPPWFIVDRPFLFFIRHNPTGAVLFMGQINKP

SEQ ID NO: 78126 - protein, 397 aa, Homo sapiens
  Payload ID: 15567
  Gene Symbol: SERPINE2
  Gene Name: serpin peptidase inhibitor, clade E (nexin, plasminogen activator inhibitor type 1), member 2
  Uniprot ID: P07093
  ENSP ID: ENSP00000386412
MNWHLPLFLLASVTLPSICSHFNPLSLEELGSNTGIQVFNQIVKSRPHDNIVISPHGIASVLGMLQLGADGRTKKQLAMVMRYGVNGVGKILKKINKAIVSKKNKDIVTVANAVFVKNASEIEVPFVTRNKDVFQCEVRNVNFEDPASACDSINAWVKNETRDMIDNLLSPDLIDGVLTRLVLVNAVYFKGLWKSRFQPENTKKRTFVAADGKSYQVPMLAQLSVFRCGSTSAPNDLWYNFIELPYHGESISMLIALPTESSTPLSAIIPHISTKTIDSWMSIMVPKRVQVILPKFTAVAQTDLKEPLKVLGITDMFDSSKANFAKITRSENLHVSHILQKAKIEVSEDGTKASAATTAILIARSSPPWFIVDRPFLFFIRHNPTGAVLFMGQINKP

SEQ ID NO: 78127 - protein, 397 aa, Homo sapiens; identical to SEQ ID NO: 78126
  Payload ID: 15567
  Gene Symbol: SERPINE2
  Gene Name: serpin peptidase inhibitor, clade E (nexin, plasminogen activator inhibitor type 1), member 2
  Uniprot ID: P07093
  ENSP ID: ENSP00000386969

SEQ ID NO: 78128 - protein, 42 aa, Homo sapiens
  Payload ID: 15567
  Gene Symbol: SERPINE2
  Gene Name: serpin peptidase inhibitor, clade E (nexin, plasminogen activator inhibitor type 1), member 2
  ENSP ID: ENSP00000394518
MNWHLPLFLLASVTLPSICSHFNPLSLEELGSNTGIQVFNQI

SEQ ID NO: 78129 - protein, 86 aa, Homo sapiens
  Payload ID: 15567
  Gene Symbol: SERPINE2
  Gene Name: serpin peptidase inhibitor, clade E (nexin, plasminogen activator inhibitor type 1), member 2
  ENSP ID: ENSP00000399655
MNWHLPLFLLASVTLPSICSHFNPLSLEELGSNTGIQVFNQIVKSRPHDNIVISPHGIASVLGMLQLGADGRTKKQLAMVMRYGVN

SEQ ID NO: 78130 - protein, 275 aa, Homo sapiens
  Payload ID: 15567
  Gene Symbol: SERPINE2
  Gene Name: serpin peptidase inhibitor, clade E (nexin, plasminogen activator inhibitor type 1), member 2
  ENSP ID: ENSP00000408452
MNWHLPLFLLASVTLPSICSHFNPLSLEELGSNTGIQVFNQIVKSRPHDNIVISPHGIASVLGMLQLGADGRTKKQLAMVMRYGVNGVGKILKKINKAIVSKKNKDIVTVANAVFVKNASEIEVPFVTRNKDVFQCEVRNVNFEDPASACDSINAWVKNETRDMIDNLLSPDLIDGVLTRLVLVNAVYFKGLWKSRFQPENTKKRTFVAADGKSYQVPMLAQLSVFRCGSTSAPNDLWYNFIELPYHGESISMLIALPTESSTPLSAIIPHISTK

SEQ ID NO: 78131 - protein, 409 aa, Homo sapiens
  Payload ID: 15567
  Gene Symbol: SERPINE2
  Gene Name: serpin peptidase inhibitor, clade E (nexin, plasminogen activator inhibitor type 1), member 2
  Uniprot ID: P07093
  ENSP ID: ENSP00000415786
MSDCRSSLVEGTMNWHLPLFLLASVTLPSICSHFNPLSLEELGSNTGIQVFNQIVKSRPHDNIVISPHGIASVLGMLQLGADGRTKKQLAMVMRYGVNGVGKILKKINKAIVSKKNKDIVTVANAVFVKNASEIEVPFVTRNKDVFQCEVRNVNFEDPASACDSINAWVKNETRDMIDNLLSPDLIDGVLTRLVLVNAVYFKGLWKSRFQPENTKKRTFVAADGKSYQVPMLAQLSVFRCGSTSAPNDLWYNFIELPYHGESISMLIALPTESSTPLSAIIPHISTKTIDSWMSIMVPKRVQVILPKFTAVAQTDLKEPLKVLGITDMFDSSKANFAKITRSENLHVSHILQKAKIEVSEDGTKASAATTAILIARSSPPWFIVDRPFLFFIRHNPTGAVLFMGQINKP

SEQ ID NO: 78132 - protein, 47 aa, Homo sapiens
  Payload ID: 15568
  Gene Symbol: SERPINE3
  Gene Name: serpin peptidase inhibitor, clade E (nexin, plasminogen activator inhibitor type 1), member 3
  ENSP ID: ENSP00000427824
MPPFLITLFLFHSCCLRANGHLREGMTLLKTEFALHLYQSVAACRNE

SEQ ID NO: 78133 - protein, 424 aa, Homo sapiens
  Payload ID: 15568
  Gene Symbol: SERPINE3
  Gene Name: serpin peptidase inhibitor, clade E (nexin, plasminogen activator inhibitor type 1), member 3
  Uniprot ID: A8MV23
  ENSP ID: ENSP00000428316
MPPFLITLFLFHSCCLRANGHLREGMTLLKTEFALHLYQSVAACRNETNFVISPAGVSLPLEILQFGAEGSTGQQLADALGYTVHDKRVKDFLHAVYATLPTSSQGTEMELACSLFVQVGTPLSPCFVEHVSWWANSSLEPADLSEPNSTAIQTSEGASRETAGGGPSEGPGGWPWEQVSAAFAQLVLVSTMSFQGTWRKRFSSTDTQILPFTCAYGLVLQVPMMHQTTEVNYGQFQDTAGHQVGVLELPYLGSAVSLFLVLPRDKDTPLSHIEPHLTASTIHLWTTSLRRARMDVFLPRFRIQNQFNLKSILNSWGVTDLFDPLKANLKGISGQDGFYVSEAIHKAKIEVLEEGTKASGATALLLLKRSRIPIFKADRPFIYFLREPNTGITVFFDRIQIIYQCLSSNKGSFVHYPLKNKHSF

SEQ ID NO: 78134 - protein, 404 aa, Homo sapiens
  Payload ID: 15568
  Gene Symbol: SERPINE3
  Gene Name: serpin peptidase inhibitor, clade E (nexin, plasminogen activator inhibitor type 1), member 3
  Uniprot ID: A8MV23
  ENSP ID: ENSP00000430755
MPPFLITLFLFHSCCLRANGHLREGMTLLKTEFALHLYQSVAACRNETNFVISPAGVSLPLEILQFGAEGSTGQQLADALGYTVHDKRVKDFLHAVYATLPTSSQGTEMELACSLFVQVGTPLSPCFVEHVSWWANSSLEPADLSEPNSTAIQTSEGASRETAGGGPSEGPGGWPWEQVSAAFAQLVLVSTMSFQGTWRKRFSSTDTQILPFTCAYGLVLQVPMMHQTTEVNYGQFQDTAGHQVGVLELPYLGSAVSLFLVLPRDKDTPLSHIEPHLTASTIHLWTTSLRRARMDVFLPRFRIQNQFNLKSILNSWGVTDLFDPLKANLKGISGQDGFYVSEAIHKAKIEVLEEGTKASGATALLLLKRSRIPIFKADRPFIYFLREPNTGFVFSIGRVSNPLD

SEQ ID NO: 78135 - protein, 404 aa, Homo sapiens; identical to SEQ ID NO: 78134
  Payload ID: 15568
  Gene Symbol: SERPINE3
  Gene Name: serpin peptidase inhibitor, clade E (nexin, plasminogen activator inhibitor type 1), member 3
  Uniprot ID: A8MV23
  ENSP ID: ENSP00000441468

SEQ ID NO: 78136 - protein, 418 aa, Homo sapiens
  Payload ID: 15569
  Gene Symbol: SERPINF1
  Gene Name: serpin peptidase inhibitor, clade F (alpha-2 antiplasmin, pigment epithelium derived factor), member 1
  Uniprot ID: P36955
  ENSP ID: ENSP00000254722
MQALVLLLCIGALLGHSSCQNPASPPEEGSPDPDSTGALVEEEDPFFKVPVNKLAAAVSNFGYDLYRVRSSTSPTTNVLLSPLSVATALSALSLGAEQRTESIIHRALYYDLISSPDIHGTYKELLDTVTAPQKNLKSASRIVFEKKLRIKSSFVAPLEKSYGTRPRVLTGNPRLDLQEINNWVQAQMKGKLARSTKEIPDEISILLLGVAHFKGQWVTKFDSRKTSLEDFYLDEERTVRVPMMSDPKAVLRYGLDSDLSCKIAQLPLTGSMSIIFFLPLKVTQNLTLIEESLTSEFIHDIDRELKTVQAVLTVPKLKLSYEGEVTKSLQEMKLQSLFDSPDFSKITGKPIKLTQVEHRAGFEWNEDGAGTTPSPGLQPAHLTFPLDYHLNQPFIFVLRDTDTGALLFIGKILDPRGP

SEQ ID NO: 78137 - protein, 99 aa, Homo sapiens
  Payload ID: 15569
  Gene Symbol: SERPINF1
  Gene Name: serpin peptidase inhibitor, clade F (alpha-2 antiplasmin, pigment epithelium derived factor), member 1
  ENSP ID: ENSP00000458484
MKGKLARSTKEIPDEISILLLGVAHFKGQWVTKFDSRKTSLEDFYLDEERTVRVPMMSDPKAVLRYGLDSDLSCKIAQLPLTGSMSIIFFLPLKVTQNL

SEQ ID NO: 78138 - protein, 114 aa, Homo sapiens
  Payload ID: 15569
  Gene Symbol: SERPINF1
  Gene Name: serpin peptidase inhibitor, clade F (alpha-2 antiplasmin, pigment epithelium derived factor), member 1
  ENSP ID: ENSP00000459107
MQALVLLLCIGALLGHSSCQNPASPPEEGSPDPDSTGALVEEEDPFFKVPVNKLAAAVSNFGYDLYRVRSSTSPTTNVLLSPLSVATALSALSLGLMPLTYFRKISKDENSLAT

SEQ ID NO: 78139 - protein, 132 aa, Homo sapiens
  Payload ID: 15569
  Gene Symbol: SERPINF1
  Gene Name: serpin peptidase inhibitor, clade F (alpha-2 antiplasmin, pigment epithelium derived factor), member 1
  ENSP ID: ENSP00000459869
MQALVLLLCIGALLGHSSCQNPASPPEEGSPDPDSTGALVEEEDPFFKVPVNKLAAAVSNFGYDLYRVRSSTSPTTNVLLSPLSVATALSALSLGAEQRTESIIHRALYYDLISSPDIHGTYKELLDTVTAP

SEQ ID NO: 78140 - protein, 111 aa, Homo sapiens
  Payload ID: 15569
  Gene Symbol: SERPINF1
  Gene Name: serpin peptidase inhibitor, clade F (alpha-2 antiplasmin, pigment epithelium derived factor), member 1
  ENSP ID: ENSP00000460842
MQALVLLLCIGALLGHSSCQNPASPPEEGSPDPDSTGALVEEEDPFFKVPVNKLAAAVSNFGYDLYRVRSSTSPTTNVLLSPLSVATALSALSLGAEQRTESIIHRALYYD

SEQ ID NO: 78141 - protein, 87 aa, Homo sapiens
  Payload ID: 15569
  Gene Symbol: SERPINF1
  Gene Name: serpin peptidase inhibitor, clade F (alpha-2 antiplasmin, pigment epithelium derived factor), member 1
  ENSP ID: ENSP00000460905
MQALVLLLCIGALLGHSSCQNPASPPEEGSPDPDSTGALVEEEDPFFKVPVNKLAAAVSNFGYDLYRVRSSTSPTTNVLLSPLSVAT

SEQ ID NO: 78142 - protein, 90 aa, Homo sapiens
  Payload ID: 15569
  Gene Symbol: SERPINF1
  Gene Name: serpin peptidase inhibitor, clade F (alpha-2 antiplasmin, pigment epithelium derived factor), member 1
  ENSP ID: ENSP00000461214
MKGKLARSTKEIPDEISILLLGVAHFKGQWVTKFDSRKTSLEDFYLDEERTVRVPMMSDPKAVLRYGLDSDLSCKIAQLPLTGSMSIIFF

SEQ ID NO: 78143 - protein, 138 aa, Homo sapiens
  Payload ID: 15569
  Gene Symbol: SERPINF1
  Gene Name: serpin peptidase inhibitor, clade F (alpha-2 antiplasmin, pigment epithelium derived factor), member 1
  ENSP ID: ENSP00000461405
MRSAFSFSVWRTSRWVTKFDSRKTSLEDFYLDEERTVRVPMMSDPKAVLRYGLDSDLSCKIAQLPLTGSMSIIFFLPLKVTQNLTLIEESLTSEFIHDIDRELKTVQAVLTVPKLKLSYEGEVTKSLQEMKLQSLFDS

SEQ ID NO: 78144 - protein, 128 aa, Homo sapiens
  Payload ID: 15569
  Gene Symbol: SERPINF1
  Gene Name: serpin peptidase inhibitor, clade F (alpha-2 antiplasmin, pigment epithelium derived factor), member 1
  ENSP ID: ENSP00000461660
MQALVLLLCIGALLGHSSCQNPASPPEEEEDPFFKVPVNKLAAAVSNFGYDLYRVRSSTSPTTNVLLSPLSVATALSALSLGAEQRTESIIHRALYYDLISSPDIHGTYKELLDTVTAPQKNLKSASR

SEQ ID NO: 78145 - protein, 28 aa, Homo sapiens
  Payload ID: 15569
  Gene Symbol: SERPINF1
  Gene Name: serpin peptidase inhibitor, clade F (alpha-2 antiplasmin, pigment epithelium derived factor), member 1
  ENSP ID: ENSP00000488345
MQALVLLLCIGALLGHSSCQNPASPPEE

SEQ ID NO: 78146 - protein, 28 aa, Homo sapiens
  Payload ID: 15569
  Gene Symbol: SERPINF1
  Gene Name: serpin peptidase inhibitor, clade F (alpha-2 antiplasmin, pigment epithelium derived factor), member 1
  ENSP ID: ENSP00000488386
MQALVLLLCIGALLGHSSCQNPASPPEE

SEQ ID NO: 78147 - protein, 43 aa, Homo sapiens
  Payload ID: 15569
  Gene Symbol: SERPINF1
  Gene Name: serpin peptidase inhibitor, clade F (alpha-2 antiplasmin, pigment epithelium derived factor), member 1
  ENSP ID: ENSP00000488572
MRRQQPLQFGQKGPRMQALVLLLCIGALLGHSSCQNPASPPEE

SEQ ID NO: 78148 - protein, 28 aa, Homo sapiens
  Payload ID: 15569
  Gene Symbol: SERPINF1
  Gene Name: serpin peptidase inhibitor, clade F (alpha-2 antiplasmin, pigment epithelium derived factor), member 1
  ENSP ID: ENSP00000488890
MQALVLLLCIGALLGHSSCQNPASPPEE

SEQ ID NO: 78149 - protein, 491 aa, Homo sapiens
  Payload ID: 15570
  Gene Symbol: SERPINF2
  Gene Name: serpin peptidase inhibitor, clade F (alpha-2 antiplasmin, pigment epithelium derived factor), member 2
  Uniprot ID: P08697
  ENSP ID: ENSP00000321853
MALLWGLLVLSWSCLQGPCSVFSPVSAMEPLGRQLTSGPNQEQVSPLTLLKLGNQEPGGQTALKSPPGVCSRDPTPEQTHRLARAMMAFTADLFSLVAQTSTCPNLILSPLSVALALSHLALGAQNHTLQRLQQVLHAGSGPCLPHLLSRLCQDLGPGAFRLAARMYLQKGFPIKEDFLEQSEQLFGAKPVSLTGKQEDDLANINQWVKEATEGKIQEFLSGLPEDTVLLLLNAIHFQGFWRNKFDPSLTQRDSFHLDEQFTVPVEMMQARTYPLRWFLLEQPEIQVAHFPFKNNMSFVVLVPTHFEWNVSQVLANLSWDTLHPPLVWERPTKVRLPKLYLKHQMDLVATLSQLGLQELFQAPDLRGISEQSLVVSGVQHQSTLELSEVGVEAAAATSIAMSRMSLSSFSVNRPFLFFIFEDTTGLPLFVGSVRNPNPSAPRELKEQQDSPGNKDFLQSLKGFPRGDKLFGPDLKLVPPMEEDYPQFGSPK

SEQ ID NO: 78150 - protein, 491 aa, Homo sapiens; identical to SEQ ID NO: 78149
  Payload ID: 15570
  Gene Symbol: SERPINF2
  Gene Name: serpin peptidase inhibitor, clade F (alpha-2 antiplasmin, pigment epithelium derived factor), member 2
  Uniprot ID: P08697
  ENSP ID: ENSP00000371493

SEQ ID NO: 78151 - protein, 264 aa, Homo sapiens
  Payload ID: 15570
  Gene Symbol: SERPINF2
  Gene Name: serpin peptidase inhibitor, clade F (alpha-2 antiplasmin, pigment epithelium derived factor), member 2
  ENSP ID: ENSP00000402056
MALLWGLLVLSWSCLQGPCSVFSPVSAMEPLGRQLTSGPNQEQVSPLTLLKLGNQEPGGQTALKSPPGVCSRDPTPEQTHRLARAMMAFTADLFSLVAQTSTCPNLILSPLSVALALSHLALGFWRNKFDPSLTQRDSFHLDEQFTVPVEMMQARTYPLRWFLLEQPEIQVAHFPFKNNMSFVVLVPTHFEWNVSQVLANLSWDTLHPPLVWERPTKVRLPKLYLKHQMDLVATLSQLGLQELFQAPDLRGISEQSLVVSGVQH

SEQ ID NO: 78152 - protein, 255 aa, Homo sapiens
  Payload ID: 15570
  Gene Symbol: SERPINF2
  Gene Name: serpin peptidase inhibitor, clade F (alpha-2 antiplasmin, pigment epithelium derived factor), member 2
  ENSP ID: ENSP00000402286
MALLWGLLVLSWSCLQGPCSVFSPVSAMEPLGRQLTSGPNQEQVSPLTLLKLGNQEPGGQTALKSPPGVCSRDPTPEQTHRLARAMMAFTADLFSLVAQTSTCPNLILSPLSVALALSHLALGAQNHTLQRLQQVLHAGSGPCLPHLLSRLCQDLGPGAFRLAARMYLQKGFPIKEDFLEQSEQLFGAKPVSLTGKQEDDLANINQWVKEATEGKIQEFLSGLPEDTVLLLLNAIHFQGFWRNKFDPSLTQRDSF

SEQ ID NO: 78153 - protein, 427 aa, Homo sapiens
  Payload ID: 15570
  Gene Symbol: SERPINF2
  Gene Name: serpin peptidase inhibitor, clade F (alpha-2 antiplasmin, pigment epithelium derived factor), member 2
  Uniprot ID: P08697
  ENSP ID: ENSP00000403877
MALLWGLLVLSWSCLQGPCSVFSPVSAMEPLGRQLTSGPNQEQVSPLTLLKLGNQVQPGAQNHTLQRLQQVLHAGSGPCLPHLLSRLCQDLGPGAFRLAARMYLQKGFPIKEDFLEQSEQLFGAKPVSLTGKQEDDLANINQWVKEATEGKIQEFLSGLPEDTVLLLLNAIHFQGFWRNKFDPSLTQRDSFHLDEQFTVPVEMMQARTYPLRWFLLEQPEIQVAHFPFKNNMSFVVLVPTHFEWNVSQVLANLSWDTLHPPLVWERPTKVRLPKLYLKHQMDLVATLSQLGLQELFQAPDLRGISEQSLVVSGVQHQSTLELSEVGVEAAAATSIAMSRMSLSSFSVNRPFLFFIFEDTTGLPLFVGSVRNPNPSAPRELKEQQDSPGNKDFLQSLKGFPRGDKLFGPDLKLVPPMEEDYPQFGSPK

SEQ ID NO: 78154 - protein, 491 aa, Homo sapiens
  Payload ID: 15570
  Gene Symbol: SERPINF2
  Gene Name: serpin peptidase inhibitor, clade F (alpha-2 antiplasmin, pigment epithelium derived factor), member 2
  Uniprot ID: P08697
  ENSP ID: ENSP00000479005
MALLWGLLVLSWSCLQGPCSVFSPVSAMEPLGWQLTSGPNQEQVSPLTLLKLGNQEPGGQTALKSPPGVCSRDPTPEQTHRLARAMMAFTADLFSLVAQTSTCPNLILSPLSVALALSHLALGAQNHTLQRLQQVLHAGSGPCLPHLLSRLCQDLGPGAFRLAARMYLQKGFPIKEDFLEQSEQLFGAKPVSLTGKQEDDLANINQWVKEATEGKIQEFLSGLPEDTVLLLLNAIHFQGFWRNKFDPSLTQRDSFHLDEQFTVPVEMMQARTYPLRWFLLEQPEIQVAHFPFKNNMSFVVLVPTHFEWNVSQVLANLSWDTLHPPLVWERPTKVRLPKLYLKHQMDLVATLSQLGLQELFQAPDLRGISEQSLVVSGVQHQSTLELSEVGVEAAAATSIAMSRMSLSSFSVNRPFLFFIFEDTTGLPLFVGSVRNPNPSAPRELKEQQDSPGNKDFLQSLKGFPRGDKLFGPDLKLVPPMEEDYPQFGSPK

SEQ ID NO: 78155 - protein, 491 aa, Homo sapiens; identical to SEQ ID NO: 78154
  Payload ID: 15570
  Gene Symbol: SERPINF2
  Gene Name: serpin peptidase inhibitor, clade F (alpha-2 antiplasmin, pigment epithelium derived factor), member 2
  Uniprot ID: P08697
  ENSP ID: ENSP00000481874

SEQ ID NO: 78156 - protein, 427 aa, Homo sapiens
  Payload ID: 15570
  Gene Symbol: SERPINF2
  Gene Name: serpin peptidase inhibitor, clade F (alpha-2 antiplasmin, pigment epithelium derived factor), member 2
  ENSP ID: ENSP00000483294
MALLWGLLVLSWSCLQGPCSVFSPVSAMEPLGWQLTSGPNQEQVSPLTLLKLGNQVQPGAQNHTLQRLQQVLHAGSGPCLPHLLSRLCQDLGPGAFRLAARMYLQKGFPIKEDFLEQSEQLFGAKPVSLTGKQEDDLANINQWVKEATEGKIQEFLSGLPEDTVLLLLNAIHFQGFWRNKFDPSLTQRDSFHLDEQFTVPVEMMQARTYPLRWFLLEQPEIQVAHFPFKNNMSFVVLVPTHFEWNVSQVLANLSWDTLHPPLVWERPTKVRLPKLYLKHQMDLVATLSQLGLQELFQAPDLRGISEQSLVVSGVQHQSTLELSEVGVEAAAATSIAMSRMSLSSFSVNRPFLFFIFEDTTGLPLFVGSVRNPNPSAPRELKEQQDSPGNKDFLQSLKGFPRGDKLFGPDLKLVPPMEEDYPQFGSPK

SEQ ID NO: 78157 - protein, 264 aa, Homo sapiens
  Payload ID: 15570
  Gene Symbol: SERPINF2
  Gene Name: serpin peptidase inhibitor, clade F (alpha-2 antiplasmin, pigment epithelium derived factor), member 2
  ENSP ID: ENSP00000488065
MALLWGLLVLSWSCLQGPCSVFSPVSAMEPLGWQLTSGPNQEQVSPLTLLKLGNQEPGGQTALKSPPGVCSRDPTPEQTHRLARAMMAFTADLFSLVAQTSTCPNLILSPLSVALALSHLALGFWRNKFDPSLTQRDSFHLDEQFTVPVEMMQARTYPLRWFLLEQPEIQVAHFPFKNNMSFVVLVPTHFEWNVSQVLANLSWDTLHPPLVWERPTKVRLPKLYLKHQMDLVATLSQLGLQELFQAPDLRGISEQSLVVSGVQH

SEQ ID NO: 78158 - protein, 255 aa, Homo sapiens
  Payload ID: 15570
  Gene Symbol: SERPINF2
  Gene Name: serpin peptidase inhibitor, clade F (alpha-2 antiplasmin, pigment epithelium derived factor), member 2
  ENSP ID: ENSP00000488707
MALLWGLLVLSWSCLQGPCSVFSPVSAMEPLGWQLTSGPNQEQVSPLTLLKLGNQEPGGQTALKSPPGVCSRDPTPEQTHRLARAMMAFTADLFSLVAQTSTCPNLILSPLSVALALSHLALGAQNHTLQRLQQVLHAGSGPCLPHLLSRLCQDLGPGAFRLAARMYLQKGFPIKEDFLEQSEQLFGAKPVSLTGKQEDDLANINQWVKEATEGKIQEFLSGLPEDTVLLLLNAIHFQGFWRNKFDPSLTQRDSF

SEQ ID NO: 78159 - protein, 500 aa, Homo sapiens
  Payload ID: 15571
  Gene Symbol: SERPING1
  Gene Name: serpin peptidase inhibitor, clade G (C1 inhibitor), member 1
  Uniprot ID: P05155
  ENSP ID: ENSP00000278407
MASRLTLLTLLLLLLAGDRASSNPNATSSSSQDPESLQDRGEGKVATTVISKMLFVEPILEVSSLPTTNSTTNSATKITANTTDEPTTQPTTEPTTQPTIQPTQPTTQLPTDSPTQPTTGSFCPGPVTLCSDLESHSTEAVLGDALVDFSLKLYHAFSAMKKVETNMAFSPFSIASLLTQVLLGAGENTKTNLESILSYPKDFTCVHQALKGFTTKGVTSVSQIFHSPDLAIRDTFVNASRTLYSSSPRVLSNNSDANLELINTWVAKNTNNKISRLLDSLPSDTRLVLLNAIYLSAKWKTTFDPKKTRMEPFHFKNSVIKVPMMNSKKYPVAHFIDQTLKAKVGQLQLSHNLSLVILVPQNLKHRLEDMEQALSPSVFKAIMEKLEMSKFQPTLLTLPRIKVTTSQDMLSIMEKLEFFDFSYDLNLCGLTEDPDLQVSAMQHQTVLELTETGVEAAAASAISVARTLLVFEVQQPFLFVLWDQQHKFPVFMGRVYDPRA

SEQ ID NO: 78160 - protein, 463 aa, Homo sapiens
  Payload ID: 15571
  Gene Symbol: SERPING1
  Gene Name: serpin peptidase inhibitor, clade G (C1 inhibitor), member 1
  ENSP ID: ENSP00000341861
MASRLTLLTLLLLLLAGDRASSNPNATSSSSQDPESLQDRGEGKVATTVISKMLFVEPILEVSSLPTTNSTTNSATKITANTTDEPTTQPTTEPTTQPTIQPTQPTTQLPTDSPTQPTTGSFCPGPVTLCSDLESHSTEAVLGDALVDFSLKLYHAFSAMKKVETNMAFSPFSIASLLTQVLLGAGENTKTNLESILSYPKDFTCVHQALKGFTTKGVTSVSQIFHSPDLAIRDTFVNASRTLYSSSPRVLSNNSDANLELINTWVAKNTNNKISRLLDSLPSDTRLVLLNAIYLSAKWKTTFDPKKTRMEPFHFKNSVIKVPMMNSKKYPVAHFIDQTLKAKAIMEKLEMSKFQPTLLTLPRIKVTTSQDMLSIMEKLEFFDFSYDLNLCGLTEDPDLQVSAMQHQTVLELTETGVEAAAASAISVARTLLVFEVQQPFLFVLWDQQHKFPVFMGRVYDPRA

SEQ ID NO: 78161 - protein, 505 aa, Homo sapiens
  Payload ID: 15571
  Gene Symbol: SERPING1
  Gene Name: serpin peptidase inhibitor, clade G (C1 inhibitor), member 1
  Uniprot ID: P05155
  ENSP ID: ENSP00000367574
MASRLTLLTLLLLLLAGFLEPQDRASSNPNATSSSSQDPESLQDRGEGKVATTVISKMLFVEPILEVSSLPTTNSTTNSATKITANTTDEPTTQPTTEPTTQPTIQPTQPTTQLPTDSPTQPTTGSFCPGPVTLCSDLESHSTEAVLGDALVDFSLKLYHAFSAMKKVETNMAFSPFSIASLLTQVLLGAGENTKTNLESILSYPKDFTCVHQALKGFTTKGVTSVSQIFHSPDLAIRDTFVNASRTLYSSSPRVLSNNSDANLELINTWVAKNTNNKISRLLDSLPSDTRLVLLNAIYLSAKWKTTFDPKKTRMEPFHFKNSVIKVPMMNSKKYPVAHFIDQTLKAKVGQLQLSHNLSLVILVPQNLKHRLEDMEQALSPSVFKAIMEKLEMSKFQPTLLTLPRIKVTTSQDMLSIMEKLEFFDFSYDLNLCGLTEDPDLQVSAMQHQTVLELTETGVEAAAASAISVARTLLVFEVQQPFLFVLWDQQHKFPVFMGRVYDPRA

SEQ ID NO: 78162 - protein, 448 aa, Homo sapiens
  Payload ID: 15571
  Gene Symbol: SERPING1
  Gene Name: serpin peptidase inhibitor, clade G (C1 inhibitor), member 1
  Uniprot ID: P05155
  ENSP ID: ENSP00000367575
MLFVEPILEVSSLPTTNSTTNSATKITANTTDEPTTQPTTEPTTQPTIQPTQPTTQLPTDSPTQPTTGSFCPGPVTLCSDLESHSTEAVLGDALVDFSLKLYHAFSAMKKVETNMAFSPFSIASLLTQVLLGAGENTKTNLESILSYPKDFTCVHQALKGFTTKGVTSVSQIFHSPDLAIRDTFVNASRTLYSSSPRVLSNNSDANLELINTWVAKNTNNKISRLLDSLPSDTRLVLLNAIYLSAKWKTTFDPKKTRMEPFHFKNSVIKVPMMNSKKYPVAHFIDQTLKAKVGQLQLSHNLSLVILVPQNLKHRLEDMEQALSPSVFKAIMEKLEMSKFQPTLLTLPRIKVTTSQDMLSIMEKLEFFDFSYDLNLCGLTEDPDLQVSAMQHQTVLELTETGVEAAAASAISVARTLLVFEVQQPFLFVLWDQQHKFPVFMGRVYDPRA

SEQ ID NO: 78163 - protein, 543 aa, Homo sapiens
  Payload ID: 15571
  Gene Symbol: SERPING1
  Gene Name: serpin peptidase inhibitor, clade G (C1 inhibitor), member 1
  ENSP ID: ENSP00000384420
MGAGPGRGGGPWAPRVGAGSEAGWLRRSADVAAQMASRLTLLTLLLLLLAGDRASSNPNATSSSSQDPESLQDRGEGKVATTVISKMLFVEPILEVSSLPTTNSTTNSATKITANTTDEPTTQPTTEPTTQPTIQPTQPTTQLPTDSPTQPTTGSFCPGPVTLCSDLESHSTEAVLGDALVDFSLKLYHAFSAMKKVETNMAFSPFSIASLLTQVLLGAGENTKTNLESILSYPKDFTCVHQALKGFTTKGVTSVSQIFHSPDLAIRDTFVNASRTLYSSSPRVLSNNSDANLELINTWVAKNTNNKISRLLDSLPSDTRLVLLNAIYLSEQPSHLFPLAKWKTTFDPKKTRMEPFHFKNSVIKVPMMNSKKYPVAHFIDQTLKAKVGQLQLSHNLSLVILVPQNLKHRLEDMEQALSPSVFKAIMEKLEMSKFQPTLLTLPRIKVTTSQDMLSIMEKLEFFDFSYDLNLCGLTEDPDLQVSAMQHQTVLELTETGVEAAAASAISVARTLLVFEVQQPFLFVLWDQQHKFPVFMGRVYDPRA

SEQ ID NO: 78164 - protein, 160 aa, Homo sapiens
  Payload ID: 15571
  Gene Symbol: SERPING1
  Gene Name: serpin peptidase inhibitor, clade G (C1 inhibitor), member 1
  ENSP ID: ENSP00000384561
MASRLTLLTLLLLLLAGDRASSNPNATSSSSQDPESLQDRGEGKVATTVISKMLFVEPILEVSSLPTTNSTTNSATKITANTTDEPTTQPTTEPTTQPTIQPTQPTTQLPTDSPTQPTTGSFCPGPVTLCSDLESHSTEAVLGDALVDFSLKLYHAFSAM

SEQ ID NO: 78165 - protein, 122 aa, Homo sapiens
  Payload ID: 15571
  Gene Symbol: SERPING1
  Gene Name: serpin peptidase inhibitor, clade G (C1 inhibitor), member 1
  ENSP ID: ENSP00000399746
MGAGPGRGGGPWAPRVGAGSEAGWLRRSADVAAQMASRLTLLTLLLLLLAGDRASSNPNATSSSSQDPESLQDRGEGKVATTVISKMLFVEPILEVSSLPTTNSTTNSATKITANTTDEPTT

SEQ ID NO: 78166 - protein, 86 aa, Homo sapiens
  Payload ID: 15571
  Gene Symbol: SERPING1
  Gene Name: serpin peptidase inhibitor, clade G (C1 inhibitor), member 1
  ENSP ID: ENSP00000431226
AKWKTTFDPKKTRMEPFHFKNSVIKVPMMNSKKYPVAHFIDQTLKAKPWPRQTLYILGWKQDSQVSSCISTILNGKMWGSCSSPTI

SEQ ID NO: 78167 - protein, 43 aa, Homo sapiens
  Payload ID: 15571
  Gene Symbol: SERPING1
  Gene Name: serpin peptidase inhibitor, clade G (C1 inhibitor), member 1
  ENSP ID: ENSP00000432554
MASRLTLLTLLLLLLAGGLGRTPKQTWRASSLTPRTSPVSTRP

SEQ ID NO: 78168 - protein, 43 aa, Homo sapiens; identical to SEQ ID NO: 78167
  Payload ID: 15571
  Gene Symbol: SERPING1
  Gene Name: serpin peptidase inhibitor, clade G (C1 inhibitor), member 1
  ENSP ID: ENSP00000435431

SEQ ID NO: 78169 - protein, 133 aa, Homo sapiens [sequence omitted]

SEQ ID NO: 78170 - protein, 418 aa, Homo sapiens
  Payload ID: 15572
  Gene Symbol: SERPINH1
  Gene Name: serpin peptidase inhibitor, clade H (heat shock protein 47), member 1, (collagen binding protein 1)
  Uniprot ID: P50454
  ENSP ID: ENSP00000350894
MRSLLLLSAFCLLEAALAAEVKKPAAAAAPGTAEKLSPKAATLAERSAGLAFSLYQAMAKDQAVENILVSPVVVASSLGLVSLGGKATTASQAKAVLSAEQLRDEEVHAGLGELLRSLSNSTARNVTWKLGSRLYGPSSVSFADDFVRSSKQHYNCEHSKINFRDKRSALQSINEWAAQTTDGKLPEVTKDVERTDGALLVNAMFFKPHWDEKFHHKMVDNRGFMVTRSYTVGVMMMHRTGLYNYYDDEKEKLQIVEMPLAHKLSSLIILMPHHVEPLERLEKLLTKEQLKIWMGKMQKKAVAISLPKGVVEVTHDLQKHLAGLGLTEAIDKNKADLSRMSGKKDLYLASVFHATAFELDTDGNPFDQDIYGREELRSPKLFYADHPFIFLVRDTQSGSLLFIGRLVRPKGDKMRDEL

SEQ ID NO: 78171 - protein, 85 aa, Homo sapiens
  Payload ID: 15572
  Gene Symbol: SERPINH1
  Gene Name: serpin peptidase inhibitor, clade H (heat shock protein 47), member 1, (collagen binding protein 1)
  ENSP ID: ENSP00000431384
MRSLLLLSAFCLLEAATLAERSAGLAFSLYQAMAKDQAVENILVSPVVVASSLGLVSLGGKATTASQAKAVLSAEQLRDEEVHAG

SEQ ID NO: 78172 - protein, 150 aa, Homo sapiens
  Payload ID: 15572
  Gene Symbol: SERPINH1
  Gene Name: serpin peptidase inhibitor, clade H (heat shock protein 47), member 1, (collagen binding protein 1)
  ENSP ID: ENSP00000431827
MRSLLLLSAFCLLEAALAAEVKKPAAAAAPGTAEKLSPKAATLAERSAGLAFSLYQAMAKDQAVENILVSPVVVASSLGLVSLGGKATTASQAKAVLSAEQLRDEEVHAGLGELLRSLSNSTARNVTWKLGSRLYGPSSVSFADDFVRSS

SEQ ID NO: 78173 - protein, 165 aa, Homo sapiens
  Payload ID: 15572
  Gene Symbol: SERPINH1
  Gene Name: serpin peptidase inhibitor, clade H (heat shock protein 47), member 1, (collagen binding protein 1)
  ENSP ID: ENSP00000432007
MRSLLLLSAFCLLEAALAAEVKKPAAAAAPGTAEKLSPKAATLAERSAGLAFSLYQAMAKDQAVENILVSPVVVASSLGLVSLGGKATTASQAKAVLSAEQLRDEEVHAGLGELLRSLSNSTARNVTWKLGSRLYGPSSVSFADDFVRSSKQHYNCEHSKINFRD

SEQ ID NO: 78174 - protein, 201 aa, Homo sapiens
  Payload ID: 15572
  Gene Symbol: SERPINH1
  Gene Name: serpin peptidase inhibitor, clade H (heat shock protein 47), member 1, (collagen binding protein 1)
  ENSP ID: ENSP00000433532
MVDNRGFMVTRSYTVGVMMMHRTGLYNYYDDEKEKLQIVEMPLAHKLSSLIILMPHHVEPLERLEKLLTKEQLKIWMGKMQKKAVAISLPKGVVEVTHDLQKHLAGLGLTEAIDKNKADLSRMSGKKDLYLASVFHATAFELDTDGNPFDQDIYGREELRSPKLFYADHPFIFLVRDTQSGSLLFIGRLVRPKGDKMRDEL

SEQ ID NO: 78175 - protein, 418 aa, Homo sapiens; identical to SEQ ID NO: 78170
  Payload ID: 15572
  Gene Symbol: SERPINH1
  Gene Name: serpin peptidase inhibitor, clade H (heat shock protein 47), member 1, (collagen binding protein 1)
  Uniprot ID: P50454
  ENSP ID: ENSP00000434412

SEQ ID NO: 78176 - protein, 142 aa, Homo sapiens
  Payload ID: 15572
  Gene Symbol: SERPINH1
  Gene Name: serpin peptidase inhibitor, clade H (heat shock protein 47), member 1, (collagen binding protein 1)
  ENSP ID: ENSP00000434482
MRSLLLLSAFCLLEAALAAEVKKPAAAAAPGTAEKLSPKATTASQAKAVLSAEQLRDEEVHAGLGELLRSLSNSTARNVTWKLGSRLYGPSSVSFADDFVRSSKQHYNCEHSKINFRDKRSALQSINEWAAQTTDGKLPEVT

SEQ ID NO: 78177 - protein, 418 aa, Homo sapiens; identical to SEQ ID NO: 78170
  Payload ID: 15572
  Gene Symbol: SERPINH1
  Gene Name: serpin peptidase inhibitor, clade H (heat shock protein 47), member 1, (collagen binding protein 1)
  Uniprot ID: P50454
  ENSP ID: ENSP00000434657

SEQ ID NO: 78178 - protein, 249 aa, Homo sapiens
  Payload ID: 15572
  Gene Symbol: SERPINH1
  Gene Name: serpin peptidase inhibitor, clade H (heat shock protein 47), member 1, (collagen binding protein 1)
  ENSP ID: ENSP00000434964
MRSLLLLSAFCLLEAALAAEVKKPAAAAAPGTAEKLSPKAATLAERSAGLAFSLYQAMAKDQAVENILVSPVVVASSLGLVSLGGKATTASQAKAVLSAEQLRDEEVHAGLGELLRSLSNSTARNVTWKLGSRLYGPSSVSFADDFVRSSKQHYNCEHSKINFRDKRSALQSINEWAAQTTDGKLPEVTKDVERTDGALLVNAMFFKPHWDEKFHHKMVDNRGFMVTRSYTVGVMMMHRTGLYNYYDDE

SEQ ID NO: 78179 - protein, 247 aa, Homo sapiens
  Payload ID: 15572
  Gene Symbol: SERPINH1
  Gene Name: serpin peptidase inhibitor, clade H (heat shock protein 47), member 1, (collagen binding protein 1)
  ENSP ID: ENSP00000435452
MRSLLLLSAFCLLEAALAAEVKKPAAAAAPGTAEKLSPKAATLAERSAGLAFSLYQAMAKDQAVENILVSPVVVASSLGLVSLGGKATTASQAKAVLSAEQLRDEEVHAGLGELLRSLSNSTARNVTWKLGSRLYGPSSVSFADDFVRSSKQHYNCEHSKINFRDKRSALQSINEWAAQTTDGKLPEVTKDVERTDGALLVNAMFFKPHWDEKFHHKMVDNRGFMVTRSYTVGVMMMHRTGLYNYYD

SEQ ID NO: 78180 - protein, 166 aa, Homo sapiens
  Payload ID: 15572
  Gene Symbol: SERPINH1
  Gene Name: serpin peptidase inhibitor, clade H (heat shock protein 47), member 1, (collagen binding protein 1)
  ENSP ID: ENSP00000435936
MRSLLLLSAFCLLEAALAAEVKKPAAAAAPGTAEKLSPKAATLAERSAGLAFSLYQAMAKDQAVENILVSPVVVASSLGLVSLGGKATTASQAKAVLSAEQLRDEEVHAGLGELLRSLSNSTARNVTWKLGSRLYGPSSVSFADDFVRSSKQHYNCEHSKINFRDK

SEQ ID NO: 78181 - protein, 295 aa, Homo sapiens
  Payload ID: 15572
  Gene Symbol: SERPINH1
  Gene Name: serpin peptidase inhibitor, clade H (heat shock protein 47), member 1, (collagen binding protein 1)
  ENSP ID: ENSP00000436040
MRSLLLLSAFCLLEAALAAEVKKPAAAAAPGTAEKLSPKAATLAERSAGLAFSLYQAMAKDQAVENILVSPVVVASSLGLVSLGGKATTASQAKAVLSAEQLRDEEVHAGLGELLRSLSNSTARNVTWKLGSRLYGPSSVSFADDFVRSSKQHYNCEHSKINFRDKRSALQSINEWAAQTTDGKLPEVTKDVERTDGALLVNAMFFKPHWDEKFHHKMVDNRGFMVTRSYTVGVMMMHRTGLYNYYDDEKEKLQIVEMPLAHKLSSLIILMPHHVEPLERLEKLLTKEQLKIWMG

SEQ ID NO: 78182 - protein, 324 aa, Homo sapiens
  Payload ID: 15572
  Gene Symbol: SERPINH1
  Gene Name: serpin peptidase inhibitor, clade H (heat shock protein 47), member 1, (collagen binding protein 1)
  ENSP ID: ENSP00000436305
MRSLLLLSAFCLLEAALAAEVKKPAAAAAPGTAEKLSPKAATLAERSAGLAFSLYQAMAKDQAVENILVSPVVVASSLGLVSLGGKATTASQAKAVLSAEQLRDEEVHAGLGELLRSLSNSTARNVTWKLGSRLYGPSSVSFADDFVRSSKQHYNCEHSKINFRDKRSALQSINEWAAQTTDGKLPEVTKDVERTDGALLVNAMFFKPHWDEKFHHKMVDNRGFMVTRSYTVGVMMMHRTGLYNYYDDEKEKLQIVEMPLAHKLSSLIILMPHHVEPLERLEKLLTKEQLKIWMGKMQKKAVAISLPKGVVEVTHDLQVRGGPA

SEQ ID NO: 78183 - protein, 56 aa, Homo sapiens
  Payload ID: 15572
  Gene Symbol: SERPINH1
  Gene Name: serpin peptidase inhibitor, clade H (heat shock protein 47), member 1, (collagen binding protein 1)
  ENSP ID: ENSP00000436306
  MOD_RES (1)..(1): Any amino acid
XNPFDQDIYGREELRSPKLFYADHPFIFLVRDTQSGSLLFIGRLVRPKGDKMRDEL

SEQ ID NO: 78184 - protein, 203 aa, Homo sapiens
  Payload ID: 15572
  Gene Symbol: SERPINH1
  Gene Name: serpin peptidase inhibitor, clade H (heat shock protein 47), member 1, (collagen binding protein 1)
  ENSP ID: ENSP00000437108
MRSLLLLSAFCLLEAALAAEVKKPAAAAAPGTAEKLSPKAATLAERSAGLAFSLYQAMAKDQAVENILVSPVVVASSLGLVSLGGKATTASQAKAVLSAEQLRDEEVHAGLGELLRSLSNSTARNVTWKLGSRLYGPSSVSFADDFVRSSKQHYNCEHSKINFRDKRSALQSINEWAAQTTDGKLPEVTKDVERTDGALLVNA

SEQ ID NO: 78185 - protein, 410 aa, Homo sapiens
  Payload ID: 15573
  Gene Symbol: SERPINI1
  Gene Name: serpin peptidase inhibitor, clade I (neuroserpin), member 1
  Uniprot ID: Q99574
  ENSP ID: ENSP00000295777
MAFLGLFSLLVLQSMATGATFPEEAIADLSVNMYNRLRATGEDENILFSPLSIALAMGMMELGAQGSTQKEIRHSMGYDSLKNGEEFSFLKEFSNMVTAKESQYVMKIANSLFVQNGFHVNEEFLQMMKKYFNAAVNHVDFSQNVAVANYINKWVENNTNNLVKDLVSPRDFDAATYLALINAVYFKGNWKSQFRPENTRTFSFTKDDESEVQIPMMYQQGEFYYGEFSDGSNEAGGIYQVLEIPYEGDEISMMLVLSRQEVPLATLEPLVKAQLVEEWANSVKKQKVEVYLPRFTVEQEIDLKDVLKALGITEIFIKDANLTGLSDNKEIFLSKAIHKSFLEVNEEGSEAAAVSGMIAISRMAVLYPQVIVDHPFFFLIRNRRTGTILFMGRVMHPETMNTSGHDFEEL

SEQ ID NO: 78186 - protein, 410 aa, Homo sapiens; identical to SEQ ID NO: 78185
  Payload ID: 15573
  Gene Symbol: SERPINI1
  Gene Name: serpin peptidase inhibitor, clade I (neuroserpin), member 1
  Uniprot ID: Q99574
  ENSP ID: ENSP00000397373

SEQ ID NO: 78187 - protein, 160 aa, Homo sapiens
  Payload ID: 15573
  Gene Symbol: SERPINI1
  Gene Name: serpin peptidase inhibitor, clade I (neuroserpin), member 1
  ENSP ID: ENSP00000420133
MAFLGLFSLLVLQSMATGATFPEEAIADLSVNMYNRLRATGEDENILFSPLSIALAMGMMELGAQGSTQKEIRHSMGYDSLKNGEEFSFLKEFSNMVTAKESQYVMKIANSLFVQNGFHVNEEFLQMMKKYFNAAVNHVDFSQNVAVANYINKWVENNTN

SEQ ID NO: 78188 - protein, 245 aa, Homo sapiens
  Payload ID: 15573
  Gene Symbol: SERPINI1
  Gene Name: serpin peptidase inhibitor, clade I (neuroserpin), member 1
  ENSP ID: ENSP00000420561
MAFLGLFSLLVLQSMATGATFPEEAIADLSVNMYNRLRATGEDENILFSPLSIALAMGMMELGAQGSTQKEIRHSMGYDSLKNGEEFSFLKEFSNMVTAKESQYVMKIANSLFVQNGFHVNEEFLQMMKKYFNAAVNHVDFSQNVAVANYINKWVENNTNNLVKDLVSPRDFDAATYLALINAVYFKGNWKSQFRPENTRTFSFTKDDESEVQIPMMYQQGEFYYGEFSDGSNEAGGIYQVLEIP

SEQ ID NO: 78189 - protein, 119 aa, Homo sapiens
  Payload ID: 15573
  Gene Symbol: SERPINI1
  Gene Name: serpin peptidase inhibitor, clade I (neuroserpin), member 1
  ENSP ID: ENSP00000420807
  MOD_RES (1)..(1): Any amino acid
XSRFTVEQEIDLKDVLKALGITEIFIKDANLTGLSDNKEIFLSKAIHKSFLEVNEEGSEAAAVSGMIAISRMAVLYPQVIVDHPFFFLIRNRRTGTILFMGRVMHPETMNTSGHDFEEL

SEQ ID NO: 78190 - protein, 405 aa, Homo sapiens
  Payload ID: 15574
  Gene Symbol: SERPINI2
  Gene Name: serpin peptidase inhibitor, clade I (pancpin), member 2
  Uniprot ID: O75830
  ENSP ID: ENSP00000264677
MDTIFLWSLLLLFFGSQASRCSAQKNTEFAVDLYQEVSLSHKDNIIFSPLGITLVLEMVQLGAKGKAQQQIRQTLKQQETSAGEEFFVLKSFFSAISEKKQEFTFNLANALYLQEGFTVKEQYLHGNKEFFQSAIKLVDFQDAKACAEMISTWVERKTDGKIKDMFSGEEFGPLTRLVLVNAIYFKGDWKQKFRKEDTQLINFTKKNGSTVKIPMMKALLRTKYGYFSESSLNYQVLELSYKGDEFSLIIILPAEGMDIEEVEKLITAQQILKWLSEMQEEEVEISLPRFKVEQKVDFKDVLYSLNITEIFSGGCDLSGITDSSEVYVSQVTQKVFFEINEDGSEAATSTGIHIPVIMSLAQSQFIANHPFLFIMKHNPTESILFMGRVTNPDTQEIKGRDLDSL

SEQ ID NO: 78191 - protein, 405 aa, Homo sapiens; identical to SEQ ID NO: 78190
  Payload ID: 15574
  Gene Symbol: SERPINI2
  Gene Name: serpin peptidase inhibitor, clade I (pancpin), member 2
  Uniprot ID: O75830
  ENSP ID: ENSP00000417692

SEQ ID NO: 78192 - protein, 206 aa, Homo sapiens
  Payload ID: 15574
  Gene Symbol: SERPINI2
  Gene Name: serpin peptidase inhibitor, clade I (pancpin), member 2
  ENSP ID: ENSP00000417752
MDTIFLWSLLLLFFGSQASRCSAQKNTEFAVDLYQEVSLSHKDNIIFSPLGITLVLEMVQLGAKGKAQQQIRQTLKQQETSAGEEFFVLKSFFSAISEKKQEFTFNLANALYLQEGFTVKEQYLHGNKEFFQSAIKLVDFQDAKACAEMISTWVERKTDGKIKDMFSGEEFGPLTRLVLVNAIYFKGDWKQKFRKEDTQLINFTKK

SEQ ID NO: 78193 - protein, 157 aa, Homo sapiens
  Payload ID: 15574
  Gene Symbol: SERPINI2
  Gene Name: serpin peptidase inhibitor, clade I (pancpin), member 2
  ENSP ID: ENSP00000419255
MDTIFLWSLLLLFFGSQASRCSAQKNTEFAVDLYQEVSLSHKDNIIFSPLGITLVLEMVQLGAKGKAQQQIRQTLKQQETSAEKKQEFTFNLANALYLQEGFTVKEQYLHGNKEFFQSAIKLVDFQDAKACAEMISTWVERKTDGKIKDMFSGEEFG

SEQ ID NO: 78194 - protein, 405 aa, Homo sapiens; identical to SEQ ID NO: 78190
  Payload ID: 15574
  Gene Symbol: SERPINI2
  Gene Name: serpin peptidase inhibitor, clade I (pancpin), member 2
  Uniprot ID: O75830
  ENSP ID: ENSP00000419407

SEQ ID NO: 78195 - protein, 405 aa, Homo sapiens; identical to SEQ ID NO: 78190
  Payload ID: 15574
  Gene Symbol: SERPINI2
  Gene Name: serpin peptidase inhibitor, clade I (pancpin), member 2
  Uniprot ID: O75830
  ENSP ID: ENSP00000420621

SEQ ID NO: 78196 - protein, 415 aa, Homo sapiens
  Payload ID: 15574
  Gene Symbol: SERPINI2
  Gene Name: serpin peptidase inhibitor, clade I (pancpin), member 2
  ENSP ID: ENSP00000481699
MIQNLMREVKMDTIFLWSLLLLFFGSQASRCSAQKNTEFAVDLYQEVSLSHKDNIIFSPLGITLVLEMVQLGAKGKAQQQIRQTLKQQETSAGEEFFVLKSFFSAISEKKQEFTFNLANALYLQEGFTVKEQYLHGNKEFFQSAIKLVDFQDAKACAEMISTWVERKTDGKIKDMFSGEEFGPLTRLVLVNAIYFKGDWKQKFRKEDTQLINFTKKNGSTVKIPMMKALLRTKYGYFSESSLNYQVLELSYKGDEFSLIIILPAEGMDIEEVEKLITAQQILKWLSEMQEEEVEISLPRFKVEQKVDFKDVLYSLNITEIFSGGCDLSGITDSSEVYVSQVTQKVFFEINEDGSEAATSTGIHIPVIMSLAQSQFIANHPFLFIMKHNPTESILFMGRVTNPDTQEIKGRDLDSL

SEQ ID NO: 78197 - protein, 393 aa, Homo sapiens
  Payload ID: 15575
  Gene Symbol: SERBP1
  Gene Name: SERPINE1 mRNA binding protein 1
  Uniprot ID: Q8NC51
  ENSP ID: ENSP00000354591
MPGHLQEGFGCVVTNRFDQLFDDESDPFEVLKAAENKKKEAGGGGVGGPGAKSAAQAAAQTNSNAAGKQLRKESQKDRKNPLPPSVGVVDKKEETQPPVALKKEGIRRVGRRPDQQLQGEGKIIDRRPERRPPRERRFEKPLEEKGEGGEFSVDRPIIDRPIRGRGGLGRGRGGRGRGMGRGDGFDSRGKREFDRHSGSDRSSFSHYSGLKHEDKRGGSGSHNWGTVKDELTDLDQSNVTEETPEGEEHHPVADTENKENEVEEVKEEGPKEMTLDEWKAIQNKDRAKVEFNIRKPNEGADGQWKKGFVLHKSKSEEAHAEDSVMDHHFRKPANDITSQLEINFGDLGRPGRGGRGGRGGRGRGGRPNRGSRTDKSSASAPDVDDPEAFPALA

SEQ ID NO: 78198 - protein, 402 aa, Homo sapiens
  Payload ID: 15575
  Gene Symbol: SERBP1
  Gene Name: SERPINE1 mRNA binding protein 1
  Uniprot ID: Q8NC51
  ENSP ID: ENSP00000360029
MPGHLQEGFGCVVTNRFDQLFDDESDPFEVLKAAENKKKEAGGGGVGGPGAKSAAQAAAQTNSNAAGKQLRKESQKDRKNPLPPSVGVVDKKEETQPPVALKKEGIRRVGRRPDQQLQGEGKIIDRRPERRPPRERRFEKPLEEKGEGGEFSVDRPIIDRPIRGRGGLGRGRGGRGRGMGRGDGFDSRGKREFDRHSGSDRSGLKHEDKRGGSGSHNWGTVKDELTESPKYIQKQISYNYSDLDQSNVTEETPEGEEHHPVADTENKENEVEEVKEEGPKEMTLDEWKAIQNKDRAKVEFNIRKPNEGADGQWKKGFVLHKSKSEEAHAEDSVMDHHFRKPANDITSQLEINFGDLGRPGRGGRGGRGGRGRGGRPNRGSRTDKSSASAPDVDDPEAFPALA

SEQ ID NO: 78199 - protein, 387 aa, Homo sapiens
  Payload ID: 15575
  Gene Symbol: SERBP1
  Gene Name: SERPINE1 mRNA binding protein 1
  Uniprot ID: Q8NC51
  ENSP ID: ENSP00000360033
MPGHLQEGFGCVVTNRFDQLFDDESDPFEVLKAAENKKKEAGGGGVGGPGAKSAAQAAAQTNSNAAGKQLRKESQKDRKNPLPPSVGVVDKKEETQPPVALKKEGIRRVGRRPDQQLQGEGKIIDRRPERRPPRERRFEKPLEEKGEGGEFSVDRPIIDRPIRGRGGLGRGRGGRGRGMGRGDGFDSRGKREFDRHSGSDRSGLKHEDKRGGSGSHNWGTVKDELTDLDQSNVTEETPEGEEHHPVADTENKENEVEEVKEEGPKEMTLDEWKAIQNKDRAKVEFNIRKPNEGADGQWKKGFVLHKSKSEEAHAEDSVMDHHFRKPANDITSQLEINFGDLGRPGRGGRGGRGGRGRGGRPNRGSRTDKSSASAPDVDDPEAFPALA

SEQ ID NO: 78200 - protein, 408 aa, Homo sapiens
  Payload ID: 15575
  Gene Symbol: SERBP1
  Gene Name: SERPINE1 mRNA binding protein 1
  Uniprot ID: Q8NC51
  ENSP ID: ENSP00000360034
MPGHLQEGFGCVVTNRFDQLFDDESDPFEVLKAAENKKKEAGGGGVGGPGAKSAAQAAAQTNSNAAGKQLRKESQKDRKNPLPPSVGVVDKKEETQPPVALKKEGIRRVGRRPDQQLQGEGKIIDRRPERRPPRERRFEKPLEEKGEGGEFSVDRPIIDRPIRGRGGLGRGRGGRGRGMGRGDGFDSRGKREFDRHSGSDRSSFSHYSGLKHEDKRGGSGSHNWGTVKDELTESPKYIQKQISYNYSDLDQSNVTEETPEGEEHHPVADTENKENEVEEVKEEGPKEMTLDEWKAIQNKDRAKVEFNIRKPNEGADGQWKKGFVLHKSKSEEAHAEDSVMDHHFRKPANDITSQLEINFGDLGRPGRGGRGGRGGRGRGGRPNRGSRTDKSSASAPDVDDPEAFPALA

SEQ ID NO: 78201 - protein, 77 aa, Homo sapiens
  Payload ID: 15576
  Gene Symbol: SRRT
  Gene Name: serrate, RNA effector molecule
  ENSP ID: ENSP00000396807
  MOD_RES (1)..(1): Any amino acid
XVHIMQHHVLPIQARLGSIAEIDLGVPPPVMKTFKEFLLSLDDSVDETEAVKRYNDYKLDFRRQQMQDFFLAHKDEE

SEQ ID NO: 78202 - protein, 148 aa, Homo sapiens
  Payload ID: 15576
  Gene Symbol: SRRT
  Gene Name: serrate, RNA effector molecule
  ENSP ID: ENSP00000398618
GPEFVRKHIFNKHAEKIEEVKKEVAFFNNFLTDAKRPALPEIKPAQPPGPAQILPPGLTPGLPYPHQTPQGLMPYGQPRPPILGYGGWFVETQGPLWNIGTWMPQTMLISFEPSPVPQSCIIHTCTTLSYEALRIFCTISLTANKSTS

SEQ ID NO: 78203 - protein, 47 aa, Homo sapiens
  Payload ID: 15576
  Gene Symbol: SRRT
  Gene Name: serrate, RNA effector molecule
  ENSP ID: ENSP00000400703
  MOD_RES (1)..(1): Any amino acid
XRPLHKTCSLFMRNIAPNISRAEIISLCKRYPGFMRVALSEPQPERR

SEQ ID NO: 78204 - protein, 112 aa, Homo sapiens
  Payload ID: 15576
  Gene Symbol: SRRT
  Gene Name: serrate, RNA effector molecule
  ENSP ID: ENSP00000400912
MAPSDRAMGDSDDEYDRRRRDKFRRERSDYDRSRERDERRRGDDWNDREWDRGRERRSRGEYRDYDRNRRERFSPPRHELSPPQKRMRRDWDEHSSDPYHSGYEMPYAGGGG

SEQ ID NO: 78205 - protein, 499 aa, Homo sapiens
  Payload ID: 15576
  Gene Symbol: SRRT
  Gene Name: serrate, RNA effector molecule
  ENSP ID: ENSP00000410588
ESESESGQAEEEKEEAEEALKEKEKPKEEEWEKPKDAAGLECKPRPLHKTCSLFMRNIAPNISRAEIISLCKRYPGFMRVALSEPQPERRFFRRGWVTFDRSVNIKEICWNLQNIRLRECELSPGVNRDLTRRVRNINGITQHKQIVRNDIKLAAKLIHTLDDRTQLWASEPGTPPLPTSLPSQNPILKNITDYLIEEVSAEEEELLGSSGGAPPEEPPKEGNPAEINVERDEKLIKVLDKLLLYLRIVHSLDYYNTCEYPNEDEMPNRCGIIHVRGPMPPNRISHGEVLEWQKTFEEKLTPLLSVRESLSEEEAQKMGRKDPEQEVEKFVTSNTQELGKDKWLCPLSGKKFKGPEFVRKHIFNKHAEKIEEVKKEVAFFNNFLTDAKRPALPEIKPAQPPGPAQILPPGLTPGLPYPHQTPQGLMPYGQPRPPILGYGVPTGGPPYPHAPYGAGRGNYDAFRGQGGYPGKPRNRMVRGDPRAIVEYRDLDAPDDVDFF

SEQ ID NO: 78206 - protein, 872 aa, Homo sapiens
  Payload ID: 15576
  Gene Symbol: SRRT
  Gene Name: serrate, RNA effector molecule
  Uniprot ID: Q9BXP5
  ENSP ID: ENSP00000478341
MGDSDDEYDRRRRDKFRRERSDYDRSRERDERRRGDDWNDREWDRGRERRSRGEYRDYDRNRRERFSPPRHELSPPQKRMRRDWDEHSSDPYHSGYEMPYAGGGGGPTYGPPQPWGHPDVHIMQHHVLPIQARLGSIAEIDLGVPPPVMKTFKEFLLSLDDSVDETEAVKRYNDYKLDFRRQQMQDFFLAHKDEEWFRSKYHPDEVGKRRQEARGALQNRLRVFLSLMETGWFDNLLLDIDKADAIVKMLDAAVIKMEGGTENDLRILEQEEEEEQAGKPGEPSKKEEGRAGAGLGDGERKTNDKDEKKEDGKQAENDSSNDDKTKKSEGDGDKEEKKEDSEKEAKKSSKKRNRKHSGDDSFDEGSVSESESESESGQAEEEKEEAEEALKEKEKPKEEEWEKPKDAAGLECKPRPLHKTCSLFMRNIAPNISRAEIISLCKRYPGFMRVALSEPQPERRFFRRGWVTFDRSVNIKEICWNLQNIRLRECELSPGVNRDLTRRVRNINGITQHKQIVRNDIKLAAKLIHTLDDRTQLWASEPGTPPLPTSLPSQNPILKNITDYLIEEVSAEEEELLGSSGGAPPEEPPKEGNPAEINVERDEKLIKVLDKLLLYLRIVHSLDYYNTCEYPNEDEMPNRCGIIHVRGPMPPNRISHGEVLEWQKTFEEKLTPLLSVRESLSEEEAQKMGRKDPEQEVEKFVTSNTQELGKDKWLCPLSGKKFKGPEFVRKHIFNKHAEKIEEVKKEVAFFNNFLTDAKRPALPEIKPAQPPGPAQSLTPGLPYPHQTPQGLMPYGQPRPPILGYGAGAVRPAVPTGGPPYPHAPYGAGRGNYDAFRGQGGYPGKPRNRMVRGDPRAIVEYRDLDAPDDVDFF

SEQ ID NO: 78207 - protein, 876 aa, Homo sapiens
  Payload ID: 15576
  Gene Symbol: SRRT
  Gene Name: serrate, RNA effector molecule
  Uniprot ID: Q9BXP5
  ENSP ID: ENSP00000480421
MGDSDDEYDRRRRDKFRRERSDYDRSRERDERRRGDDWNDREWDRGRERRSRGEYRDYDRNRRERFSPPRHELSPPQKRMRRDWDEHSSDPYHSGYEMPYAGGGGGPTYGPPQPWGHPDVHIMQHHVLPIQARLGSIAEIDLGVPPPVMKTFKEFLLSLDDSVDETEAVKRYNDYKLDFRRQQMQDFFLAHKDEEWFRSKYHPDEVGKRRQEARGALQNRLRVFLSLMETGWFDNLLLDIDKADAIVKMLDAAVIKMEGGTENDLRILEQEEEEEQAGKPGEPSKKEEGRAGAGLGDGERKTNDKDEKKEDGKQAENDSSNDDKTKKSEGDGDKEEKKEDSEKEAKKSSKKRNRKHSGDDSFDEGSVSESESESESGQAEEEKEEAEEALKEKEKPKEEEWEKPKDAAGLECKPRPLHKTCSLFMRNIAPNISRAEIISLCKRYPGFMRVALSEPQPERRFFRRGWVTFDRSVNIKEICWNLQNIRLRECELSPGVNRDLTRRVRNINGITQHKQIVRNDIKLAAKLIHTLDDRTQLWASEPGTPPLPTSLPSQNPILKNITDYLIEEVSAEEEELLGSSGGAPPEEPPKEGNPAEINVERDEKLIKVLDKLLLYLRIVHSLDYYNTCEYPNEDEMPNRCGIIHVRGPMPPNRISHGEVLEWQKTFEEKLTPLLSVRESLSEEEAQKMGRKDPEQEVEKFVTSNTQELGKDKWLCPLSGKKFKGPEFVRKHIFNKHAEKIEEVKKEVAFFNNFLTDAKRPALPEIKPAQPPGPAQILPPGLTPGLPYPHQTPQGLMPYGQPRPPILGYGAGAVRPAVPTGGPPYPHAPYGAGRGNYDAFRGQGGYPGKPRNRMVRGDPRAIVEYRDLDAPDDVDFF

SEQ ID NO: 78208 - protein, 875 aa, Homo sapiens
  Payload ID: 15576
  Gene Symbol: SRRT
  Gene Name: serrate, RNA effector molecule
  Uniprot ID: Q9BXP5
  ENSP ID: ENSP00000481173
MGDSDDEYDRRRRDKFRRERSDYDRSRERDERRRGDDWNDREWDRGRERRSRGEYRDYDRNRRERFSPPRHELSPPQKRMRRDWDEHSSDPYHSGYEMPYAGGGGGPTYGPPQPWGHPDVHIMQHHVLPIQARLGSIAEIDLGVPPPVMKTFKEFLLSLDDSVDETEAVKRYNDYKLDFRRQQMQDFFLAHKDEEWFRSKYHPDEVGKRRQEARGALQNRLRVFLSLMETGWFDNLLLDIDKADAIVKMLDAAVIKMEGGTENDLRILEQEEEEEQAGKPGEPSKKEEGRAGAGLGDGERKTNDKDEKKEDGKQAENDSSNDDKTKKSEGDGDKEEKKEDSEKEAKKSSKKRNRKHSGDDSFDEGSVSESESESESGQAEEEKEEAEALKEKEKPKEEEWEKPKDAAGLECKPRPLHKTCSLFMRNIAPNISRAEIISLCKRYPGFMRVALSEPQPERRFFRRGWVTFDRSVNIKEICWNLQNIRLRECELSPGVNRDLTRRVRNINGITQHKQIVRNDIKLAAKLIHTLDDRTQLWASEPGTPPLPTSLPSQNPILKNITDYLIEEVSAEEEELLGSSGGAPPEEPPKEGNPAEINVERDEKLIKVLDKLLLYLRIVHSLDYYNTCEYPNEDEMPNRCGIIHVRGPMPPNRISHGEVLEWQKTFEEKLTPLLSVRESLSEEEAQKMGRKDPEQEVEKFVTSNTQELGKDKWLCPLSGKKFKGPEFVRKHIFNKHAEKIEEVKKEVAFFNNFLTDAKRPALPEIKPAQPPGPAQILPPGLTPGLPYPHQTPQGLMPYGQPRPPILGYGAGAVRPAVPTGGPPYPHAPYGAGRGNYDAFRGQGGYPGKPRNRMVRGDPRAIVEYRDLDAPDDVDFF

SEQ ID NO: 78209 - protein, 50 aa, Homo sapiens
  Payload ID: 15576
  Gene Symbol: SRRT
  Gene Name: serrate, RNA effector molecule
  ENSP ID: ENSP00000483348
MGDSDDEYDRRRRDKFRRERSDYDRSRERDERRRGDDWNDRDRVSLCHPG

SEQ ID NO: 78210 - protein, 871 aa, Homo sapiens
  Payload ID: 15576
  Gene Symbol: SRRT
  Gene Name: serrate, RNA effector molecule
  Uniprot ID: Q9BXP5
  ENSP ID: ENSP00000483556
MGDSDDEYDRRRRDKFRRERSDYDRSRERDERRRGDDWNDREWDRGRERRSRGEYRDYDRNRRERFSPPRHELSPPQKRMRRDWDEHSSDPYHSGYEMPYAGGGGGPTYGPPQPWGHPDVHIMQHHVLPIQARLGSIAEIDLGVPPPVMKTFKEFLLSLDDSVDETEAVKRYNDYKLDFRRQQMQDFFLAHKDEEWFRSKYHPDEVGKRRQEARGALQNRLRVFLSLMETGWFDNLLLDIDKADAIVKMLDAAVIKMEGGTENDLRILEQEEEEEQAGKPGEPSKKEEGRAGAGLGDGERKTNDKDEKKEDGKQAENDSSNDDKTKKSEGDGDKEEKKEDSEKEAKKSSKKRNRKHSGDDSFDEGSVSESESESESGQAEEEKEEAEALKEKEKPKEEEWEKPKDAAGLECKPRPLHKTCSLFMRNIAPNISRAEIISLCKRYPGFMRVALSEPQPERRFFRRGWVTFDRSVNIKEICWNLQNIRLRECELSPGVNRDLTRRVRNINGITQHKQIVRNDIKLAAKLIHTLDDRTQLWASEPGTPPLPTSLPSQNPILKNITDYLIEEVSAEEEELLGSSGGAPPEEPPKEGNPAEINVERDEKLIKVLDKLLLYLRIVHSLDYYNTCEYPNEDEMPNRCGIIHVRGPMPPNRISHGEVLEWQKTFEEKLTPLLSVRESLSEEEAQKMGRKDPEQEVEKFVTSNTQELGKDKWLCPLSGKKFKGPEFVRKHIFNKHAEKIEEVKKEVAFFNNFLTDAKRPALPEIKPAQPPGPAQSLTPGLPYPHQTPQGLMPYGQPRPPILGYGAGAVRPAVPTGGPPYPHAPYGAGRGNYDAFRGQGGYPGKPRNRMVRGDPRAIVEYRDLDAPDDVDFF

SEQ ID NO: 78211 - protein, 236 aa, Homo sapiens [sequence omitted]

SEQ ID NO: 78212 - protein, 314 aa, Homo sapiens
  Payload ID: 15578
  Gene Symbol: SERTAD2
  Gene Name: SERTA domain containing 2
  Uniprot ID: Q14140
  ENSP ID: ENSP00000326933
MLGKGGKRKFDEHEDGLEGKIVSPCDGPSKVSYTLQRQTIFNISLMKLYNHRPLTEPSLQKTVLINNMLRRIQEELKQEGSLRPMFTPSSQPTTEPSDSYREAPPAFSHLASPSSHPCDLGSTTPLEACLTPASLLEDDDDTFCTSQAMQPTAPTKLSPPALLPEKDSFSSALDEIEELCPTSTSTEAATAATDSVKGTSSEAGTQKLDGPQESRADDSKLMDSLPGNFEITTSTGFLTDLTLDDILFADIDTSMYDFDPCTSSSGTASKMAPVSADDLLKTLAPYSSQPVTPSQPFKMDLTELDHIMEVLVGS

SEQ ID NO: 78213 - protein, 196 aa, Homo sapiens
  Payload ID: 15579
  Gene Symbol: SERTAD3
  Gene Name: SERTA domain containing 3
  Uniprot ID: Q9UJW9
  ENSP ID: ENSP00000325414
MVGGLKRKHSDLEEEEERWEWSPAGLQSYQQALLRISLDKVQRSLGPRAPSLRRHVLIHNTLQQLQAALRLAPAPALPPEPLFLGEEDFSLSATIGSILRELDTSMDGTEPPQNPVTPLGLQNEVPPQPDPVFLEALSSRYLGDSGLDDFFLDIDTSAVEKEPARAPPEPPHNLFCAPGSWEWNELDHIMEIILGS

SEQ ID NO: 78214 - protein, 196 aa, Homo sapiens; identical to SEQ ID NO: 78213
  Payload ID: 15579
  Gene Symbol: SERTAD3
  Gene Name: SERTA domain containing 3
  Uniprot ID: Q9UJW9
  ENSP ID: ENSP00000375882

SEQ ID NO: 78215 - protein, 177 aa, Homo sapiens
  Payload ID: 15579
  Gene Symbol: SERTAD3
  Gene Name: SERTA domain containing 3
  ENSP ID: ENSP00000469245
MVGGLKRKHSDLEEEEERWEWSPAGLQSYQQALLRISLDKVQRSLGPRAPSLRRHVLIHNTLQQLQAALRLAPAPALPPEPLFLGEEDFSLSATIGSILRELDTSMDGTEPPQNPVTPLGLQNEVPPQPDPVFLEALSSRYLGDSGLDDFFLDIDTSAVEKEPARAPPEPPHNLFCA

SEQ ID NO: 78216 - protein, 91 aa, Homo sapiens
  Payload ID: 15579
  Gene Symbol: SERTAD3
  Gene Name: SERTA domain containing 3
  ENSP ID: ENSP00000472999
MVGGLKRKHSDLEEEEERWEWSPAGLQSYQQALLRISLDKVQRSLGPRAPSLRRHVLIHNTLQQLQAALRLAPAPALPPEPLFLGEEDFSL

SEQ ID NO: 78217 - protein, 356 aa, Homo sapiens
  Payload ID: 15580
  Gene Symbol: SERTAD4
  Gene Name: SERTA domain containing 4
  Uniprot ID: Q9NUC0
  ENSP ID: ENSP00000355979
MTLVLSMNRFCEPIVSEGAAEIAGYQTLWEADSYGGPSPPGPAQAPLQGDRGAGPPLAGSHYRGISNPITTSKITYFKRKYVEEEDFHPPLSSCSHKTISIFEERAHILYMSLEKLKFIDDPEVYLRRSVLINNLMKRIHGEIIMQNNWCFPACSFNGTSAQEWFMAQDCPYRKRPRMAKEECEKFHACCFYQECGGHYLNLPLSVNANVGSASTAASSPSASSSSSSSSSSPPLPLPSCSRQVDFDVGSASIYKSDGQIPANEIFVTNVRSLGVQEKAKLNDEKANDDTNRDGGPLSHEPVGNDLAFECKGQFYDYFETGYNERNNVNESWKKSLRKKEASPPSNKLCCSKGSKI

SEQ ID NO: 78218 - protein, 356 aa, Homo sapiens; identical to SEQ ID NO: 78217
  Payload ID: 15580
  Gene Symbol: SERTAD4
  Gene Name: SERTA domain containing 4
  Uniprot ID: Q9NUC0
  ENSP ID: ENSP00000486369

SEQ ID NO: 78219 - protein, 122 aa, Homo sapiens
  Payload ID: 15581
  Gene Symbol: SAA1
  Gene Name: serum amyloid A1
  Uniprot ID: P0DJI8
  ENSP ID: ENSP00000348918
MKLLTGLVFCSLVLGVSSRSFFSFLGEAFDGARDMWRAYSDMREANYIGSDKYFHARGNYDAAKRGPGGAWAAEVITDARENIQRFFGHGAEDSLADQAANEWGRSGKDPNHFRPAGLPEKY

SEQ ID NO: 78220 - protein, 122 aa, Homo sapiens; identical to SEQ ID NO: 78219
  Payload ID: 15581
  Gene Symbol: SAA1
  Gene Name: serum amyloid A1
  Uniprot ID: P0DJI8
  ENSP ID: ENSP00000384906

SEQ ID NO: 78221 - protein, 122 aa, Homo sapiens; identical to SEQ ID NO: 78219
  Payload ID: 15581
  Gene Symbol: SAA1
  Gene Name: serum amyloid A1
  ENSP ID: ENSP00000436866

SEQ ID NO: 78222 - protein, 122 aa, Homo sapiens
  Payload ID: 15582
  Gene Symbol: SAA2
  Gene Name: serum amyloid A2
  Uniprot ID: P0DJI9
  ENSP ID: ENSP00000256733
MKLLTGLVFCSLVLSVSSRSFFSFLGEAFDGARDMWRAYSDMREANYIGSDKYFHARGNYDAAKRGPGGAWAAEVISNARENIQRLTGRGAEDSLADQAANKWGRSGRDPNHFRPAGLPEKY

SEQ ID NO: 78223 - protein, 83 aa, Homo sapiens
  Payload ID: 15582
  Gene Symbol: SAA2
  Gene Name: serum amyloid A2
  Uniprot ID: P0DJI9
  ENSP ID: ENSP00000416716
MKLLTGLVFCSLVLSVSSRSFFSFLGEAFDGARDMWRAYSDMREANYIGSDKYFHARGNYDAAKRGPGGAWAAEVISLFSAEL

SEQ ID NO: 78224 - protein, 80 aa, Homo sapiens
  Payload ID: 15582
  Gene Symbol: SAA2
  Gene Name: serum amyloid A2
  ENSP ID: ENSP00000432370
MKLLTGLVFCSLVLSVSSRSFFSFLGEAFDGARDMWRAYSDMREANYIGSDKYFHARGNYDAAKRGPGGAWAAEVIREDD

SEQ ID NO: 78225 - protein, 113 aa, Homo sapiens
  Payload ID: 15582
  Gene Symbol: SAA2
  Gene Name: serum amyloid A2
  ENSP ID: ENSP00000435659
MKLLTGLVFCSLVLSVSSRSFFSFLGEAFDGARDMWRAYSDMREANYIGSDKYFHARGNYDAAKRGPGGAWAAEVIRLKCHGMIMAHCNLDLPGLKRSSHFSLLNNWDCRCAP

SEQ ID NO: 78226 - protein, 122 aa, Homo sapiens; identical to SEQ ID NO: 78222
  Payload ID: 15582
  Gene Symbol: SAA2
  Gene Name: serum amyloid A2
  Uniprot ID: P0DJI9
  ENSP ID: ENSP00000436126

SEQ ID NO: 78227 - protein, 122 aa, Homo sapiens; identical to SEQ ID NO: 78222
  Payload ID: 15582
  Gene Symbol: SAA2
  Gene Name: serum amyloid A2
  Uniprot ID: P0DJI9
  ENSP ID: ENSP00000437162

SEQ ID NO: 78228 - protein, 130 aa, Homo sapiens
  Payload ID: 15583
  Gene Symbol: SAA4
  Gene Name: serum amyloid A4, constitutive
  Uniprot ID: P35542
  ENSP ID: ENSP00000278222
MRLFTGIVFCSLVMGVTSESWRSFFKEALQGVGDMGRAYWDIMISNHQNSNRYLYARGNYDAAQRGPGGVWAAKLISRSRVYLQGLIDCYLFGNSSTVLEDSKSNEKAEEWGRSGKDPDRFRPDGLPKKY

SEQ ID NO: 78229 - protein, 473 aa, Homo sapiens
  Payload ID: 15584
  Gene Symbol: SAAL1
  Gene Name: serum amyloid A-like 1
  ENSP ID: ENSP00000300013
MDRNPSPPPPGRDKEEEEEVAGGDCIGSTVYSKHWLFGVLSGLIQIVSPENTKSSSDDEEQLTELDEEMENEICRVWDMSMDEDVALFLQEFNAPDIFMGVLAKSKCPRLREICVGILGNMACFQEICVSISSDKNLGQVLLHCLYDSDPPTLLETSRLLLTCLSQAEVASVWVERIQEHPAIYDSICFIMSSSTNVDLLVKVGEVVDKLFDLDEKLMLEWVRNGAAQPLDQPQEESEEQPVFRLVPCILEAAKQVRSENPEWLDVYMHILQLLTTVDDGIQAIVHCPDTGKDIWNLLFDLVCHEFCQSDDPPIILQEQKTVLASVFSVLSAIYASQTEQEYLKIEKDLPLIDSLIRVLQNMEQCQKKPENSAESNTEETKRTDLTQDDFHLKILKDILCEFLSNIFQALTKETVAQGVKEGQLSKQKCSSAFQNLLPFYSPVVEDFIKILREVDKALADDLEKNFPSLKVQT

SEQ ID NO: 78230 - protein, 353 aa, Homo sapiens
  Payload ID: 15584
  Gene Symbol: SAAL1
  Gene Name: serum amyloid A-like 1
  ENSP ID: ENSP00000431160
MDRNPSPPPPGRDKEEEEEVAGGDCIGSTVYSKHWLFGVLSGLIQIVSPENTKSSSDDEEQLTELDEEMENEICRVWDMSMDEDVALFLQEFNAPDIFMGVLAKSKCPRLREICVGILGNMACFQEICVSISSDKNLGQVLLHCLYDSDPPTLLETSRLLLTCLSQAEVASVWVERIQEHPAIYDSICFIMSSSTNVDLLVKVGEVVDKLFDLDEKLMLEWVRNGAAQPLDQPQEESEEQPVFRLVPCILEAAKQVRSENPEWLDVYMHILQLLTTVDDGIQAIVHCPDTGKDIWNLLFDLVCHEFCQSDDPPIILQEQKTVLASVFSVLSAIYASQTEQEYLKIEKGKSSSN

SEQ ID NO: 78231 - protein, 209 aa, Homo sapiens
  Payload ID: 15584
  Gene Symbol: SAAL1
  Gene Name: serum amyloid A-like 1
  ENSP ID: ENSP00000431489
MDRNPSPPPPGRDKEEEEEVAGGDCIGSTVYSKHWLFGVLSGLIQIVSPENTKSSSDDEEQLTELDEEMENEICRVWDMSMDEDVALFLQEFNAPDIFMGVLAKSKCPRLREICVGILGNMACFQEICVSISSDKNLGCYCTVCMIQTHLLCWKQAEVASVWVERIQEHPAIYDSICFIMSSSTNVDLLVKVGEVVDKLFDLDEKLMLE

SEQ ID NO: 78232 - protein, 149 aa, Homo sapiens
  Payload ID: 15584
  Gene Symbol: SAAL1
  Gene Name: serum amyloid A-like 1
  ENSP ID: ENSP00000432044
LSQAEVASVWVERIQEHPAIYDSICFIMSSSTNVDLLVKVGEVVDKLFDLDEKLMLEWVRNGAAQPLDQPQEESEEQPVFRLVPCILEAAKQVRSENPEWLDVYMHILQLLTTVDDGIQAIGDGGSGSKGRPVEQTEVFLCISKPSSFL

SEQ ID NO: 78233 - protein, 476 aa, Homo sapiens
  Payload ID: 15584
  Gene Symbol: SAAL1
  Gene Name: serum amyloid A-like 1
  ENSP ID: ENSP00000432216
MDRNPSPPPPGRDKEEEEEVAGGDCIGSTVYSKHWLFGVLSGLIQIVSPENTKSSSDDEEQLTELDEEMENEICRVWDMSMDEDVALFLQEFNAPDIFMGVLAKSKCPRLREICVGILGNMACFQEICVSISSDKNLGQVLLHCLYDSDPPTLLETSRLLLTCLSQAEVASVWVERIQEHPAIYDSICFIMSSSTNVDLLVKVGEVVDKLFDLDEKLMLEWVRNGAAQPLDQPQEESEEQPVFRLVPCILEAAKQVRSENPEWLDVYMHILQLLTTVDDGIQAIVHCPDTGKDIWNLLFDLVCHEFCQSDDPPIILQEQKTVLASVFSVLSAIYASQTEQEYLKIEKGKYNLPLIDSLIRVLQNMEQCQKKPENSAESNTEETKRTDLTQDDFHLKILKDILCEFLSNIFQALTKETVAQGVKEGQLSKQKCSSAFQNLLPFYSPVVEDFIKILREVDKALADDLEKNFPSLKVQT

SEQ ID NO: 78234 - protein, 474 aa, Homo sapiens
  Payload ID: 15584
  Gene Symbol: SAAL1
  Gene Name: serum amyloid A-like 1
  Uniprot ID: Q96ER3
  ENSP ID: ENSP00000432487
MDRNPSPPPPGRDKEEEEEVAGGDCIGSTVYSKHWLFGVLSGLIQIVSPENTKSSSDDEEQLTELDEEMENEICRVWDMSMDEDVALFLQEFNAPDIFMGVLAKSKCPRLREICVGILGNMACFQEICVSISSDKNLGQVLLHCLYDSDPPTLLETSRLLLTCLSQAEVASVWVERIQEHPAIYDSICFIMSSSTNVDLLVKVGEVVDKLFDLDEKLMLEWVRNGAAQPLDQPQEESEEQPVFRLVPCILEAAKQVRSENPEWLDVYMHILQLLTTVDDGIQAIVHCPDTGKDIWNLLFDLVCHEFCQSDDPPIILQEQKTVLASVFSVLSAIYASQTEQEYLKIEKVDLPLIDSLIRVLQNMEQCQKKPENSAESNTEETKRTDLTQDDFHLKILKDILCEFLSNIFQALTKETVAQGVKEGQLSKQKCSSAFQNLLPFYSPVVEDFIKILREVDKALADDLEKNFPSLKVQT

SEQ ID NO: 78235 - protein, 133 aa, Homo sapiens
  Payload ID: 15584
  Gene Symbol: SAAL1
  Gene Name: serum amyloid A-like 1
  ENSP ID: ENSP00000433946
  MOD_RES (1)..(1): Any amino acid
XPPGRDKEEEEEVAGGDCIGSTVYSKHWLFGVLSGLIQIVSPENTKSSSDDEEQLTELDEEMENEICRALTKETVAQGVKEGQLSKQKCSSAFQNLLPFYSPVVEDFIKILREVDKALADDLEKNFPSLKVQT

SEQ ID NO: 78236 - protein, 264 aa, Homo sapiens
  Payload ID: 15584
  Gene Symbol: SAAL1
  Gene Name: serum amyloid A-like 1
  ENSP ID: ENSP00000436031
EICVGILGNMACFQEICVSISSDKNLGQVLLHCLYDSDPPTLLETSRLLLTCLSQAEVASVWVERIQEHPAIYDSICFIMSSSTNVDLLVKVGEVVDKLFDLDEKLMLEWVRNGAAQPLDQPQEESEEQPVFRLVPCILEAAKQVRSENPEWLDVYMHILQLLTTVDDGIQAIVHCPDTGKDIWNLLFDLVCHEFCQSDDPPIILQEQKTVLASVFSVLSAIYASQTEQEYLKIEKGDGGSGSKGRPVEQTEVFLCISKPSSFL

SEQ ID NO: 78237 - protein, 425 aa, Homo sapiens
  Payload ID: 15585
  Gene Symbol: SDPR
  Gene Name: serum deprivation response
  Uniprot ID: O95810
  ENSP ID: ENSP00000305675
MGEDAAQAEKFQHPGSDMRQEKPSSPSPMPSSTPSPSLNLGNTEEAIRDNSQVNAVTVLTLLDKLVNMLDAVQENQHKMEQRQISLEGSVKGIQNDLTKLSKYQASTSNTVSKLLEKSRKVSAHTRAVKERMDRQCAQVKRLENNHAQLLRRNHFKVLIFQEENEIPASVFVKQPVSGAVEGKEELPDENKSLEETLHTVDLSSDDDLPHDEEALEDSAEEKVEESRAEKIKRSSLKKVDSLKKAFSRQNIEKKMNKLGTKIVSVERREKIKKSLTSNHQKISSGKSSPFKVSPLTFGRKKVREGESHAENETKSEDLPSSEQMPNDQEEESFAEGHSEASLASALVEGEIAEEAAEKATSRGSNSGMDSNIDLTIVEDEEEESVALEQAQKVRYEGSYALTSEEAERSDGDPVQPAVLQVHQTS

SEQ ID NO: 78238 - protein, 508 aa, Homo sapiens
  Payload ID: 15586
  Gene Symbol: SRF
  Gene Name: serum response factor
  Uniprot ID: P11831
  ENSP ID: ENSP00000265354
MLPTQAGAAAALGRGSALGGSLNRTPTGRPGGGGGTRGANGGRVPGNGAGLGPGRLEREAAAAAATTPAPTAGALYSGSEGDSESGEEEELGAERRGLKRSLSEMEIGMVVGGPEASAAATGGYGPVSGAVSGAKPGKKTRGRVKIKMEFIDNKLRRYTTFSKRKTGIMKKAYELSTLTGTQVLLLVASETGHVYTFATRKLQPMITSETGKALIQTCLNSPDSPPRSDPTTDQRMSATGFEETDLTYQVSESDSSGETKDTLKPAFTVTNLPGTTSTIQTAPSTSTTMQVSSGPSFPITNYLAPVSASVSPSAVSSANGTVLKSTGSGPVSSGGLMQLPTSFTLMPGGAVAQQVPVQAIQVHQAPQQASPSRDSSTDLTQTSSSGTVTLPATIMTSSVPTTVGGHMMYPSPHAVMYAPTSGLGDGSLTVLNAFSQAPSTMQVSHSQVQEPGGVPQVFLTASSGTVQIPVSAVQLHQMAVIGQQAGSSSNLTELQVVNLDTAHSTKSE

SEQ ID NO: 78239 - protein, 429 aa, Homo sapiens
  Payload ID: 15587
  Gene Symbol: SRFBP1
  Gene Name: serum response factor binding protein 1
  Uniprot ID: Q8NEF9
  ENSP ID: ENSP00000341324
MAQPGTLNLNNEVVKMRKEVKRIRVLVIRKLVRSVGRLKSKKGTEDALLKNQRRAQRLLEEIHAMKELKPDIVTKSALGDDINFEKIFKKPDSTATERAIARLAVHPLLKKKIDVLKAAVQAFKEARQNVAEVESSKNASEDNHSENTLYSNDNGSNLQREATVISEQKVKETKILAKKPIHNSKEKIAKMEHGPKAVTIANSPSKPSEKDSVVSLESQKTPADPKLKTLSQTKKNKGSDSSLSGNSDGGEEFCEEEKEYFDDSTEERFYKQSSMSEDSDSGDDFFIGKVRRTRKKESSCHSSVKEQKPLEKVFLKEDTGETHGDTRNDKIKPSTETRKLESVFFHSLSGSKSSRRNFKEQAPKTRSLDFPQNEPQIKNQFNKKLSGRLENTKQQLQLPLHPSWEASRRRKEQQSNIAVFQGKKITFDD

SEQ ID NO: 78240 - protein, 431 aa, Homo sapiens
  Payload ID: 15588
  Gene Symbol: SGK1
  Gene Name: serum/glucocorticoid regulated kinase 1
  Uniprot ID: O00141
  ENSP ID: ENSP00000237305
MTVKTEAAKGTLTYSRMRGMVAILIAFMKQRRMGLNDFIQKIANNSYACKHPEVQSILKISQPQEPELMNANPSPPPSPSQQINLGPSSNPHAKPSDFHFLKVIGKGSFGKVLLARHKAEEVFYAVKVLQKKAILKKKEEKHIMSERNVLLKNVKHPFLVGLHFSFQTADKLYFVLDYINGGELFYHLQRERCFLEPRARFYAAEIASALGYLHSLNIVYRDLKPENILLDSQGHIVLTDFGLCKENIEHNSTTSTFCGTPEYLAPEVLHKQPYDRTVDWWCLGAVLYEMLYGLPPFYSRNTAEMYDNILNKPLQLKPNITNSARHLLEGLLQKDRTKRLGAKDDFMEIKSHVFFSLINWDDLINKKITPPFNPNVSGPNDLRHFDPEFTEEPVPNSIGKSPDSVLVTASVKEAAEAFLGFSYAPPTDSFL

SEQ ID NO: 78241 - protein, 421 aa, Homo sapiens
  Payload ID: 15588
  Gene Symbol: SGK1
  Gene Name: serum/glucocorticoid regulated kinase 1
  Uniprot ID: O00141
  ENSP ID: ENSP00000356831
MKPSKRFFISPPSSTAFMKQRRMGLNDFIQKIANNSYACKHPEVQSILKISQPQEPELMNANPSPPPSPSQQINLGPSSNPHAKPSDFHFLKVIGKGSFGKVLLARHKAEEVFYAVKVLQKKAILKKKEEKHIMSERNVLLKNVKHPFLVGLHFSFQTADKLYFVLDYINGGELFYHLQRERCFLEPRARFYAAEIASALGYLHSLNIVYRDLKPENILLDSQGHIVLTDFGLCKENIEHNSTTSTFCGTPEYLAPEVLHKQPYDRTVDWWCLGAVLYEMLYGLPPFYSRNTAEMYDNILNKPLQLKPNITNSARHLLEGLLQKDRTKRLGAKDDFMEIKSHVFFSLINWDDLINKKITPPFNPNVSGPNDLRHFDPEFTEEPVPNSIGKSPDSVLVTASVKEAAEAFLGFSYAPPTDSFL

SEQ ID NO: 78242 - protein, 526 aa, Homo sapiens
  Payload ID: 15588
  Gene Symbol: SGK1
  Gene Name: serum/glucocorticoid regulated kinase 1
  Uniprot ID: O00141
  ENSP ID: ENSP00000356832
MVNKDMNGFPVKKCSAFQFFKKRVRRWIKSPMVSVDKHQSPSLKYTGSSMVHIPPGEPDFESSLCQTCLGEHAFQRGVLPQENESCSWETQSGCEVREPCNHANILTKPDPRTFWTNDDPAFMKQRRMGLNDFIQKIANNSYACKHPEVQSILKISQPQEPELMNANPSPPPSPSQQINLGPSSNPHAKPSDFHFLKVIGKGSFGKVLLARHKAEEVFYAVKVLQKKAILKKKEEKHIMSERNVLLKNVKHPFLVGLHFSFQTADKLYFVLDYINGGELFYHLQRERCFLEPRARFYAAEIASALGYLHSLNIVYRDLKPENILLDSQGHIVLTDFGLCKENIEHNSTTSTFCGTPEYLAPEVLHKQPYDRTVDWWCLGAVLYEMLYGLPPFYSRNTAEMYDNILNKPLQLKPNITNSARHLLEGLLQKDRTKRLGAKDDFMEIKSHVFFSLINWDDLINKKITPPFNPNVSGPNDLRHFDPEFTEEPVPNSIGKSPDSVLVTASVKEAAEAFLGFSYAPPTDSFL

SEQ ID NO: 78243 - protein, 445 aa, Homo sapiens
  Payload ID: 15588
  Gene Symbol: SGK1
  Gene Name: serum/glucocorticoid regulated kinase 1
  Uniprot ID: O00141
  ENSP ID: ENSP00000396242
MGEMQGALARARLESLLRPRHKKRAEAQKRSESFLLSGLAFMKQRRMGLNDFIQKIANNSYACKHPEVQSILKISQPQEPELMNANPSPPPSPSQQINLGPSSNPHAKPSDFHFLKVIGKGSFGKVLLARHKAEEVFYAVKVLQKKAILKKKEEKHIMSERNVLLKNVKHPFLVGLHFSFQTADKLYFVLDYINGGELFYHLQRERCFLEPRARFYAAEIASALGYLHSLNIVYRDLKPENILLDSQGHIVLTDFGLCKENIEHNSTTSTFCGTPEYLAPEVLHKQPYDRTVDWWCLGAVLYEMLYGLPPFYSRNTAEMYDNILNKPLQLKPNITNSARHLLEGLLQKDRTKRLGAKDDFMEIKSHVFFSLINWDDLINKKITPPFNPNVSGPNDLRHFDPEFTEEPVPNSIGKSPDSVLVTASVKEAAEAFLGFSYAPPTDSFL

SEQ ID NO: 78244 - protein, 55 aa, Homo sapiens
  Payload ID: 15588
  Gene Symbol: SGK1
  Gene Name: serum/glucocorticoid regulated kinase 1
  ENSP ID: ENSP00000431705
  MOD_RES (1)..(1): Any amino acid
XPPGEPDFESSLCQTCLGEHAFQRGVLPQENESCSWETQSGCEILCKTSGQLTSP

SEQ ID NO: 78245 - protein, 387 aa, Homo sapiens
  Payload ID: 15588
  Gene Symbol: SGK1
  Gene Name: serum/glucocorticoid regulated kinase 1
  ENSP ID: ENSP00000434302
MTVKTEAAKGTLTYSRMRGMVAILIAFMKQRRMGLNDFIQKIANNSYACKHPEVQSILKISQPQEPELMNANPSPPPSPSQQINLGPSSNPHAKPSDFHFLKVIGKGSFGKVLLARHKAEEVFYAVKVLQKKAILKKKELFYHLQRERCFLEPRARFYAAEIASALGYLHSLNIVYRDLKPENILLDSQGHIVLTDFGLCKENIEHNSTTSTFCGTPEYLAPEVLHKQPYDRTVDWWCLGAVLYEMLYGLPPFYSRNTAEMYDNILNKPLQLKPNITNSARHLLEGLLQKDRTKRLGAKDDFMEIKSHVFFSLINWDDLINKKITPPFNPNVSGPNDLRHFDPEFTEEPVPNSIGKSPDSVLVTASVKEAAEAFLGFSYAPPTDSFL

SEQ ID NO: 78246 - protein, 459 aa, Homo sapiens
  Payload ID: 15588
  Gene Symbol: SGK1
  Gene Name: serum/glucocorticoid regulated kinase 1
  Uniprot ID: O00141
  ENSP ID: ENSP00000434450
MSSQSSSLSEACSREAYSSHNWALPPASRSNPQPAYPWATRRMKEEAIKPPLKAFMKQRRMGLNDFIQKIANNSYACKHPEVQSILKISQPQEPELMNANPSPPPSPSQQINLGPSSNPHAKPSDFHFLKVIGKGSFGKVLLARHKAEEVFYAVKVLQKKAILKKKEEKHIMSERNVLLKNVKHPFLVGLHFSFQTADKLYFVLDYINGGELFYHLQRERCFLEPRARFYAAEIASALGYLHSLNIVYRDLKPENILLDSQGHIVLTDFGLCKENIEHNSTTSTFCGTPEYLAPEVLHKQPYDRTVDWWCLGAVLYEMLYGLPPFYSRNTAEMYDNILNKPLQLKPNITNSARHLLEGLLQKDRTKRLGAKDDFMEIKSHVFFSLINWDDLINKKITPPFNPNVSGPNDLRHFDPEFTEEPVPNSIGKSPDSVLVTASVKEAAEAFLGFSYAPPTDSFL

SEQ ID NO: 78247 - protein, 144 aa, Homo sapiens
  Payload ID: 15588
  Gene Symbol: SGK1
  Gene Name: serum/glucocorticoid regulated kinase 1
  ENSP ID: ENSP00000435577
MVSVDKHQSPSLKYTGSSMVHIPPGEPDFESSLCQTCLGEHAFQRGVLPQENESCSWETQSGCEVREPCNHANILTKPDPRTFWTNDDPAFMKQRRMGLNDFIQKIANNSYACKHPEVQSILKISQPQEPELMNANPSPPPSPS

SEQ ID NO: 78248 - protein, 153 aa, Homo sapiens
  Payload ID: 15588
  Gene Symbol: SGK1
  Gene Name: serum/glucocorticoid regulated kinase 1
  ENSP ID: ENSP00000435724
MVNKDMNGFPVKKCSAFQFFKKRVRRWIKSPMVSVDKHQSPSLKYTGSSMVHIPPGEPDFESSLCQTCLGEHAFQRGVLPQENESCSWETQSGCEVSSCSLWIYSPGKILGLCFSCISARVYPKNNFLMHIYKASEEDLELWSLLAHYVIFLK

SEQ ID NO: 78249 - protein, 60 aa, Homo sapiens
  Payload ID: 15588
  Gene Symbol: SGK1
  Gene Name: serum/glucocorticoid regulated kinase 1
  ENSP ID: ENSP00000436470
MVNKDMNGFPVKKCSAFQFFKKRVRRWIKSPMVSVDKHQSPSLKYTGSSMVHIPPGEPDF

SEQ ID NO: 78250 - protein, 427 aa, Homo sapiens
  Payload ID: 15589
  Gene Symbol: SGK2
  Gene Name: serum/glucocorticoid regulated kinase 2
  Uniprot ID: Q9HBY8
  ENSP ID: ENSP00000340608
MQGLLTSGRKPSGGGRCTGRGGWRGQWCLKPWMGGADPPTPTLSCLLLPVPPELPDHCYRMNSSPAGTPSPQPSRANGNINLGPSANPNAQPTDFDFLKVIGKGNYGKVLLAKRKSDGAFYAVKVLQKKSILKKKEQSHIMAERSVLLKNVRHPFLVGLRYSFQTPEKLYFVLDYVNGGELFFHLQRERRFLEPRARFYAAEVASAIGYLHSLNIIYRDLKPENILLDCQGHVVLTDFGLCKEGVEPEDTTSTFCGTPEYLAPEVLRKEPYDRAVDWWCLGAVLYEMLHGLPPFYSQDVSQMYENILHQPLQIPGGRTVAACDLLQSLLHKDQRQRLGSKADFLEIKNHVFFSPINWDDLYHKRLTPPFNPNVTGPADLKHFDPEFTQEAVSKSIGCTPDTVASSSGASSAFLGFSYAPEDDDILDC

SEQ ID NO: 78251 - protein, 358 aa, Homo sapiens
  Payload ID: 15589
  Gene Symbol: SGK2
  Gene Name: serum/glucocorticoid regulated kinase 2
  ENSP ID: ENSP00000362168
MNSSPAGTPSPQPSRANGNINLGPSANPNAQPTDFDFLKVIGKGNYGKVLLAKRKSDGAFYAVKVLQKKSILKKKEQSHIMAERSVLLKNVRHPFLVGLRYSFQTPEKLYFVLDYVNGGELFFHLQRERRFLEPRARFYAAEVASAIGYLHSLNIIYRDLKPENILLDCQGHVVLTDFGLCKEGVEPEDTTSTFCGTPEYLAPEVLRKEPYDRAVDWWCLGAVLYEMLHGLPPFYSQDVSQMYENILHQPLQIPGGRTVAACDLLQSLLHKDQRQRLGSKADFLEIKNHVFFSPINWDDLYHKRLTPPFNPNVDTLGPGTRKASFRWDFKKTVKIMSNLYPGERTIHGILGRDEWTLE

SEQ ID NO: 78252 - protein, 367 aa, Homo sapiens
  Payload ID: 15589
  Gene Symbol: SGK2
  Gene Name: serum/glucocorticoid regulated kinase 2
  Uniprot ID: Q9HBY8
  ENSP ID: ENSP00000362184
MNSSPAGTPSPQPSRANGNINLGPSANPNAQPTDFDFLKVIGKGNYGKVLLAKRKSDGAFYAVKVLQKKSILKKKEQSHIMAERSVLLKNVRHPFLVGLRYSFQTPEKLYFVLDYVNGGELFFHLQRERRFLEPRARFYAAEVASAIGYLHSLNIIYRDLKPENILLDCQGHVVLTDFGLCKEGVEPEDTTSTFCGTPEYLAPEVLRKEPYDRAVDWWCLGAVLYEMLHGLPPFYSQDVSQMYENILHQPLQIPGGRTVAACDLLQSLLHKDQRQRLGSKADFLEIKNHVFFSPINWDDLYHKRLTPPFNPNVTGPADLKHFDPEFTQEAVSKSIGCTPDTVASSSGASSAFLGFSYAPEDDDILDC

SEQ ID NO: 78253 - protein, 367 aa, Homo sapiens; identical to SEQ ID NO: 78252
  Payload ID: 15589
  Gene Symbol: SGK2
  Gene Name: serum/glucocorticoid regulated kinase 2
  Uniprot ID: Q9HBY8
  ENSP ID: ENSP00000362192

SEQ ID NO: 78254 - protein, 367 aa, Homo sapiens; identical to SEQ ID NO: 78252
  Payload ID: 15589
  Gene Symbol: SGK2
  Gene Name: serum/glucocorticoid regulated kinase 2
  Uniprot ID: Q9HBY8
  ENSP ID: ENSP00000392795

SEQ ID NO: 78255 - protein, 198 aa, Homo sapiens
  Payload ID: 15589
  Gene Symbol: SGK2
  Gene Name: serum/glucocorticoid regulated kinase 2
  ENSP ID: ENSP00000396222
MNSSPAGTPSPQPSRANGNINLGPSANPNAQPTDFDFLKVIGKGNYGKVLLAKRKSDGAFYAVKVLQKKSILKKKESHIMAERSVLLKNVRHPFLVGLRYSFQTPEKLYFVLDYVNGGELFFHLQRERRFLEPRARFYAAEVASAIGYLHSLNIIYRDLKPENILLDCQGHVVLTDFGLCKEGVEPEDTTSTFCGTPE

SEQ ID NO: 78256 - protein, 393 aa, Homo sapiens
  Payload ID: 15589
  Gene Symbol: SGK2
  Gene Name: serum/glucocorticoid regulated kinase 2
  Uniprot ID: Q9HBY8
  ENSP ID: ENSP00000412214
MQGLLTSGRKPSGGGRCTELPDHCYRMNSSPAGTPSPQPSRANGNINLGPSANPNAQPTDFDFLKVIGKGNYGKVLLAKRKSDGAFYAVKVLQKKSILKKKEQSHIMAERSVLLKNVRHPFLVGLRYSFQTPEKLYFVLDYVNGGELFFHLQRERRFLEPRARFYAAEVASAIGYLHSLNIIYRDLKPENILLDCQGHVVLTDFGLCKEGVEPEDTTSTFCGTPEYLAPEVLRKEPYDRAVDWWCLGAVLYEMLHGLPPFYSQDVSQMYENILHQPLQIPGGRTVAACDLLQSLLHKDQRQRLGSKADFLEIKNHVFFSPINWDDLYHKRLTPPFNPNVTGPADLKHFDPEFTQEAVSKSIGCTPDTVASSSGASSAFLGFSYAPEDDDILDC

SEQ ID NO: 78257 - protein, 285 aa, Homo sapiens
  Payload ID: 15589
  Gene Symbol: SGK2
  Gene Name: serum/glucocorticoid regulated kinase 2
  ENSP ID: ENSP00000436841
MNSSPAGTPSPQPSRANGNINLGPSANPNAQPTDFDFLKVIGKGNYGKVLLAKRKSDGAFYAVKVLQKKSILKKKEQSHIMAERSVLLKNVRHPFLVGLRYSFQTPEKLYFVLDYVNGGELFFHLQRERRFLEPRARFYAAEVASAIGYLHSLNIIYRDLKPENILLDCQGHVVLTDFGLCKEGVEPEDTTSTFCGTPEYLAPEVLRKEPYDRAVDWWCLGAVLYEMLHGLPPFYSQDVSQMYENILHQPLQIPGGRTVAACDLLQSLLHKDQRQRLGSKADFVA

SEQ ID NO: 78258 - protein, 10 aa, Homo sapiens
  Payload ID: 15589
  Gene Symbol: SGK2
  Gene Name: serum/glucocorticoid regulated kinase 2
  ENSP ID: ENSP00000481432
MNSSPAGTPS

SEQ ID NO: 78259 - protein, 496 aa, Homo sapiens; identical to SEQ ID NO: 10263
  Payload ID: 15590
  Gene Symbol: SGK3
  Gene Name: serum/glucocorticoid regulated kinase family, member 3
  Uniprot ID: Q96BR1
  ENSP ID: ENSP00000331816

SEQ ID NO: 78260 - protein, 496 aa, Homo sapiens; identical to SEQ ID NO: 10263
  Payload ID: 15590
  Gene Symbol: SGK3
  Gene Name: serum/glucocorticoid regulated kinase family, member 3
  Uniprot ID: Q96BR1
  ENSP ID: ENSP00000379842

SEQ ID NO: 78261 - protein, 126 aa, Homo sapiens
  Payload ID: 15590
  Gene Symbol: SGK3
  Gene Name: serum/glucocorticoid regulated kinase family, member 3
  ENSP ID: ENSP00000428529
MDSPKHQSDPSEDEDERSSQKLHSTSQNINLGPSGNPHAKPTDFDFLKVIGKGSFGKVLLAKRKLDGKFYAVKVLQKKIVLNRKEQKHIMAERNVLLKNVKHPFLVGLHYSFQTTEKLYFVLDFVN

SEQ ID NO: 78262 - protein, 128 aa, Homo sapiens
  Payload ID: 15590
  Gene Symbol: SGK3
  Gene Name: serum/glucocorticoid regulated kinase family, member 3
  ENSP ID: ENSP00000428972
MQRDHTMDYKESCPSVSIPSSDEHREKKKRFTVYKVLVSVGRSEWFVFRRYAEFDKLYNTLKKQFPAMALKIPAKRIFGDNFDPDFIKQRRAGLNEFIQNLVRYPELYNHPDVRAFLQMDSPKHQSDP

SEQ ID NO: 78263 - protein, 166 aa, Homo sapiens
  Payload ID: 15590
  Gene Symbol: SGK3
  Gene Name: serum/glucocorticoid regulated kinase family, member 3
  ENSP ID: ENSP00000429565
MALKIPAKRIFGDNFDPDFIKQRRAGLNEFIQNLVRYPELYNHPDVRAFLQMDSPKHQSDPSEDEDERSSQKVLLAKRKLDGKFYAVKVLQKKIVLNRKEQKHIMAERNVLLKNVKHPFLVGLHYSFQTTEKLYFVLDFVNGGELFFHLQRERSFPEHRARFYAAE

SEQ ID NO: 78264 - protein, 149 aa, Homo sapiens
  Payload ID: 15590
  Gene Symbol: SGK3
  Gene Name: serum/glucocorticoid regulated kinase family, member 3
  ENSP ID: ENSP00000429606
MQRDHTMDYKESCPSVSIPSSDEHREKKKRFTVYKVLVSVGRSEWFVFRRYAEFDKLYNTLKKQFPAMALKIPAKRIFGDNFDPDFIKQRRAGLNEFIQNLVRYPELYNHPDVRAFLQMDSPKHQSDPSEDEDERSSQKVLLAKRKLDG

SEQ ID NO: 78265 - protein, 496 aa, Homo sapiens; identical to SEQ ID NO: 10263
  Payload ID: 15590
  Gene Symbol: SGK3
  Gene Name: serum/glucocorticoid regulated kinase family, member 3
  Uniprot ID: Q96BR1
  ENSP ID: ENSP00000430256

SEQ ID NO: 78266 - protein, 496 aa, Homo sapiens; identical to SEQ ID NO: 10263
  Payload ID: 15590
  Gene Symbol: SGK3
  Gene Name: serum/glucocorticoid regulated kinase family, member 3
  Uniprot ID: Q96BR1
  ENSP ID: ENSP00000430463

SEQ ID NO: 78267 - protein, 108 aa, Homo sapiens
  Payload ID: 15590
  Gene Symbol: SGK3
  Gene Name: serum/glucocorticoid regulated kinase family, member 3
  ENSP ID: ENSP00000430475
MALKIPAKRIFGDNFDPDFIKQRRAGLNEFIQNLVRYPELYNHPDVRAFLQMDSPKHQSDPSEDEDERSSQKLHSTSQNINLGPSGNPHAKPTDFDFLKVIGKGSFGK

SEQ ID NO: 78268 - protein, 464 aa, Homo sapiens
  Payload ID: 15590
  Gene Symbol: SGK3
  Gene Name: serum/glucocorticoid regulated kinase family, member 3
  Uniprot ID: Q96BR1
  ENSP ID: ENSP00000430691
MQRDHTMDYKESCPSVSIPSSDEHREKKKRFTVYKVLVSVGRSEWFVFRRYAEFDKLYNTLKKQFPAMALKIPAKRIFGDNFDPDFIKQRRAGLNEFIQNLVRYPELYNHPDVRAFLQMDSPKHQSDPSEDEDERSSQKLHSTSQNINLGPSGNPHAKPTDFDFLKVIGKGSFGKVLLAKRKLDGKFYAVKVLQKKIVLNRKEQKHIMAERNVLLKNVKHPFLVGLHYSFQTTEKLYFVLDFVNGGELFFHLQRERSFPEHRARFYAAEIASALGYLHSIKIVYRDLKPENILLDSVGHVVLTDFGLCKEGIAISDTTTTFCGTPEPPFYCRDVAEMYDNILHKPLSLRPGVSLTAWSILEELLEKDRQNRLGAKEDFLEIQNHPFFESLSWADLVQKKIPPPFNPNVAGPDDIRNFDTAFTEETVPYSVCVSSDYSIVNASVLEADDAFVGFSYAPPSEDLFL

SEQ ID NO: 78269 - protein, 514 aa, Homo sapiens
  Payload ID: 15591
  Gene Symbol: SARS
  Gene Name: seryl-tRNA synthetase
  Uniprot ID: P49591
  ENSP ID: ENSP00000234677
MVLDLDLFRVDKGGDPALIRETQEKRFKDPGLVDQLVKADSEWRRCRFRADNLNKLKNLCSKTIGEKMKKKEPVGDDESVPENVLSFDDLTADALANLKVSQIKKVRLLIDEAILKCDAERIKLEAERFENLREIGNLLHPSVPISNDEDVDNKVERIWGDCTVRKKYSHVDLVVMVDGFEGEKGAVVAGSRGYFLKGVLVFLEQALIQYALRTLGSRGYIPIYTPFFMRKEVMQEVAQLSQFDEELYKVIGKGSEKSDDNSYDEKYLIATSEQPIAALHRDEWLRPEDLPIKYAGLSTCFRQEVGSHGRDTRGIFRVHQFEKIEQFVYSSPHDNKSWEMFEEMITTAEEFYQSLGIPYHIVNIVSGSLNHAASKKLDLEAWFPGSGAFRELVSCSNCTDYQARRLRIRYGQTKKMMDKVEFVHMLNATMCATTRTICAILENYQTEKGITVPEKLKEFMPPGLQELIPFVKPAPIEQEPSKKQKKQHEGSKKKAAARDVTLENRLQNMEVTDA

SEQ ID NO: 78270 - protein, 536 aa, Homo sapiens
  Payload ID: 15591
  Gene Symbol: SARS
  Gene Name: seryl-tRNA synthetase
  ENSP ID: ENSP00000358939
MVLDLDLFRVDKGGDPALIRETQEKRFKDPGLVDQLVKADSEWRRCRFRADNLNKLKNLCSKTIGEKMKKKEPVGDDESVPENVLSFDDLTADALANLKVSQIKKVRLLIDEAILKCDAERIKLEAERFENLREIGNLLHPSVPISNDEDVDNKVERIWGDCTVRKKYSHVDLVVMVDGFEGEKGAVVAGSRGYFLKGVLVFLEQALIQYALRTLGSRGYIPIYTPFFMRKEVMQEVAQLSQFDEELYKVIGKGSEKSDDNSYDEKYLIATSEQPIAALHRDEWLRPEDLPIKYAGLSTCFRQEVGSHGRDTRGIFRVHQFEKIEQFVYSSPHDNKSWEMFEEMITTAEEFYQSLGIPYHIVNIVSGSLNHAASKKLDLEAWFPGSGAFRELVSCSNCTDYQARRLRIRYGQTKKMMDKRKNNLHLSTQNKLEASLFSPKKVEFVHMLNATMCATTRTICAILENYQTEKGITVPEKLKEFMPPGLQELIPFVKPAPIEQEPSKKQKKQHEGSKKKAAARDVTLENRLQNMEVTDA

SEQ ID NO: 78271 - protein, 518 aa, Homo sapiens
  Payload ID: 15592
  Gene Symbol: SARS2
  Gene Name: seryl-tRNA synthetase 2, mitochondrial
  Uniprot ID: Q9NP81
  ENSP ID: ENSP00000221431
MAASMARRLWPLLTRRGFRPRGGCISNDSPRRSFTTEKRNRNLLYEYAREGYSALPQLDIERFCACPEEAAHALELRKGELRSADLPAIISTWQELRQLQEQIRSLEEEKAAVTEAVRALLANQDSGEVQQDPKYQGLRARGREIRKELVHLYPREAQLEEQFYLQALKLPNQTHPDVPVGDESQARVLHMVGDKPVFSFQPRGHLEIGEKLDIIRQKRLSHVSGHRSYYLRGAGALLQHGLVNFTFNKLLRRGFTPMTVPDLLRGAVFEGCGMTPNANPSQIYNIDPARFKDLNLAGTAEVGLAGYFMDHTVAFRDLPVRMVCSSTCYRAETNTGQEPRGLYRVHHFTKVEMFGVTGPGLEQSSQLLEEFLSLQMEILTELGLHFRVLDMPTQELGLPAYRKFDIEAWMPGRGRFGEVTSASNCTDFQSRRLHIMFQTEAGELQFAHTVNATACAVPRLLIALLESNQQKDGSVLVPPALQSYLGTDRITAPTHVPLQYIGPNQPRKPGLPGQPAVS

SEQ ID NO: 78272 - protein, 518 aa, Homo sapiens
  Payload ID: 15592
  Gene Symbol: SARS2
  Gene Name: seryl-tRNA synthetase 2, mitochondrial
  ENSP ID: ENSP00000406754
MAASMARRLWPLLTRRGFRPRGGCISNDSPRRSFTTEKRNRNLLYEYAREGYSALPQLDIERFCACPEEAAHALELRKGELRSADLPAIISTWQELRQLQEQIRSLEEEKAAVTEAVRALLANQDSGEVQQDPKYQGLRARGREIRKELVHLYPREAQLEEQFYLQALKLPNQTHPDVPVGDESQARVLHMVGDKPVFSFQPRGHLEIGEKLDIIRQKRLSHVSGHRSYYLRGAGALLQHGLVNFTFNKLLRRGFTPMTVPDLLRGAVFEGCGMTPNANPSQIYNIDPARFKDLNLAGTAEVGLAGYFMDHTVAFRDLPVRMVCSSTCYRAETNTGQEPRGLYRVHHFTKAGMFGVTGPGLEQSSQLLEEFLSLQMEILTELGLHFRVLDMPTQELGLPAYRKFDIEAWMPGRGRFGEVTSASNCTDFQSRRLHIMFQTEAGELQFAHTVNATACAVPRLLIALLESNQQKDGSVLVPPALQSYLGTDRITAPTHVPLQYIGPNQPRKPGLPGQPAVS

SEQ ID NO: 78273 - protein, 236 aa, Homo sapiens
  Payload ID: 15592
  Gene Symbol: SARS2
  Gene Name: seryl-tRNA synthetase 2, mitochondrial
  ENSP ID: ENSP00000414954
MAASMARRLWPLLTRRGFRPRGGCISNDSPRRSFTTEKRNRNLLYEYAREGYSALPQLDIERFCACPEEAAHALELRKGELRSADLPAIISTWQELRQLQEQIRSLEEEKAAVTEAVRALLANQDSGEVQQDPKYQGLRARGREIRKELVHLYPREAQLEEQFYLQALKLPNQTHPDVPVGDESQARVLHMVGDKPGACPTCLATGPITCAGLEPSCSTAWSTSHSTSFSAGASPP

SEQ ID NO: 78274 - protein, 187 aa, Homo sapiens
  Payload ID: 15592
  Gene Symbol: SARS2
  Gene Name: seryl-tRNA synthetase 2, mitochondrial
  ENSP ID: ENSP00000468865
MFGVTGPGLEQSSQLLEEFLSLQMEILTELGLHFRVLDMPTQELGLPAYRKFDIEAWMPGRGRFGEVTSASNCTDFQSRRLHIMFQTEAGELQFAHTVNATACAVPRLLIALLESNQQKDGSVLVPPALQSYLGTDRITAPTHVPLQYIGPNQPRKPGLPGQPALHARAPGPRGPPLLCPCCLRVSH

SEQ ID NO: 78275 - protein, 90 aa, Homo sapiens
  Payload ID: 15592
  Gene Symbol: SARS2
  Gene Name: seryl-tRNA synthetase 2, mitochondrial
  ENSP ID: ENSP00000471767
MAASMARRLWPLLTRRGFRPRGGCISNDSPRRSFTTEKRNRNLLYEYAREGYSALPQLDIERFCACPEEAAHALELRKGELRSADLPAIA

SEQ ID NO: 78276 - protein, 328 aa, Homo sapiens
  Payload ID: 15592
  Gene Symbol: SARS2
  Gene Name: seryl-tRNA synthetase 2, mitochondrial
  ENSP ID: ENSP00000472339
MVGDKPVFSFQPRGHLEIGEKLDIIRQKRLSHVSGHRSYYLRGAGALLQHGLVNFTFNKLLRRGFTPMTVPDLLRGAVFEGCGMTPNANPSQIYNIDPARFKDLNLAGTAEVGLAGYFMDHTVAFRDLPVRMVCSSTCYRAETNTGQEPRGLYRVHHFTKVEMFGVTGPGLEQSSQLLEEFLSLQMEILTELGLHFRVLDMPTQELGLPAYRKFDIEAWMPGRGRFGEVTSASNCTDFQSRRLHIMFQTEAGELQFAHTVNATACAVPRLLIALLESNQQKDGSVLVPPALQSYLGTDRITAPTHVPLQYIGPNQPRKPGLPGQPAVS

SEQ ID NO: 78277 - protein, 135 aa, Homo sapiens
  Payload ID: 15592
  Gene Symbol: SARS2
  Gene Name: seryl-tRNA synthetase 2, mitochondrial
  ENSP ID: ENSP00000472576
MAASMARRLWPLLTRRGFRPRGGCISNDSPRRSFTTEKRNRNLLYEYAREGYSALPQLDIERFCACPEEAAHALELRKGELRSADLPAIISTWQELRQLQEQIRSLEEEKAAVTEAVRALLANQDSGEVQQGGPA

SEQ ID NO: 78278 - protein, 520 aa, Homo sapiens
  Payload ID: 15592
  Gene Symbol: SARS2
  Gene Name: seryl-tRNA synthetase 2, mitochondrial
  Uniprot ID: Q9NP81
  ENSP ID: ENSP00000472847
MAASMARRLWPLLTRRGFRPRGGCISNDSPRRSFTTEKRNRNLLYEYAREGYSALPQLDIERFCACPEEAAHALELRKGELRSADLPAIISTWQELRQLQEQIRSLEEEKAAVTEAVRALLANQDSGEVQQVRLDPGAGSIFGPTFLPFPGQLSLLVEAQLEEQFYLQALKLPNQTHPDVPVGDESQARVLHMVGDKPVFSFQPRGHLEIGEKLDIIRQKRLSHVSGHRSYYLRGAGALLQHGLVNFTFNKLLRRGFTPMTVPDLLRGAVFEGCGMTPNANPSQIYNIDPARFKDLNLAGTAEVGLAGYFMDHTVAFRDLPVRMVCSSTCYRAETNTGQEPRGLYRVHHFTKVEMFGVTGPGLEQSSQLLEEFLSLQMEILTELGLHFRVLDMPTQELGLPAYRKFDIEAWMPGRGRFGEVTSASNCTDFQSRRLHIMFQTEAGELQFAHTVNATACAVPRLLIALLESNQQKDGSVLVPPALQSYLGTDRITAPTHVPLQYIGPNQPRKPGLPGQPAVS

SEQ ID NO: 78279 - protein, 135 aa, Homo sapiens; identical to SEQ ID NO: 78277
  Payload ID: 15592
  Gene Symbol: SARS2
  Gene Name: Seryl-tRNA synthetase 2, mitochondrial
  ENSP ID: ENSP00000488935

SEQ ID NO: 78280 - protein, 518 aa, Homo sapiens; identical to SEQ ID NO: 78272
  Payload ID: 15592
  Gene Symbol: SARS2
  Gene Name: Seryl-tRNA synthetase 2, mitochondrial
  ENSP ID: ENSP00000488985

SEQ ID NO: 78281 - protein, 187 aa, Homo sapiens; identical to SEQ ID NO: 78274
  Payload ID: 15592
  Gene Symbol: SARS2
  Gene Name: Seryl-tRNA synthetase 2, mitochondrial
  ENSP ID: ENSP00000489303

SEQ ID NO: 78282 - protein, 328 aa, Homo sapiens; identical to SEQ ID NO: 78276
  Payload ID: 15592
  Gene Symbol: SARS2
  Gene Name: Seryl-tRNA synthetase 2, mitochondrial
  ENSP ID: ENSP00000489392

SEQ ID NO: 78283 - protein, 90 aa, Homo sapiens; identical to SEQ ID NO: 78275
  Payload ID: 15592
  Gene Symbol: SARS2
  Gene Name: Seryl-tRNA synthetase 2, mitochondrial
  ENSP ID: ENSP00000489404

SEQ ID NO: 78284 - protein, 520 aa, Homo sapiens; identical to SEQ ID NO: 78278
  Payload ID: 15592
  Gene Symbol: SARS2
  Gene Name: Seryl-tRNA synthetase 2, mitochondrial
  ENSP ID: ENSP00000489453

SEQ ID NO: 78285 - protein, 236 aa, Homo sapiens; identical to SEQ ID NO: 78273
  Payload ID: 15592
  Gene Symbol: SARS2
  Gene Name: Seryl-tRNA synthetase 2, mitochondrial
  ENSP ID: ENSP00000489522

SEQ ID NO: 78286 - protein, 518 aa, Homo sapiens; identical to SEQ ID NO: 78271
  Payload ID: 15592
  Gene Symbol: SARS2
  Gene Name: Seryl-tRNA synthetase 2, mitochondrial
  ENSP ID: ENSP00000489539

SEQ ID NO: 78287 - protein, 426 aa, Homo sapiens
  Payload ID: 15593
  Gene Symbol: SESN1
  Gene Name: sestrin 1
  Uniprot ID: Q9Y6P5
  ENSP ID: ENSP00000306734
MHALFADSFAALGRLDNITLVMVFHPQYLESFLKTQHYLLQMDGPLPLHYRHYIGIMAAARHQCSYLVNLHVNDFLHVGGDPKWLNGLENAPQKLQNLGELNKVLAHRPWLITKEHIEGLLKAEEHSWSLAELVHAVVLLTHYHSLASFTFGCGISPEIHCDGGHTFRPPSVSNYCICDITNGNHSVDEMPVNSAENVSVSDSFFEVEALMEKMRQLQECRDEEEASQEEMASRFEIEKRESMFVFSSDDEEVTPARAVSRHFEDTSYGYKDFSRHGMHVPTFRVQDYCWEDHGYSLVNRLYPDVGQLIDEKFHIAYNLTYNTMAMHKDVDTSMLRRAIWNYIHCMFGIRYDDYDYGEINQLLDRSFKVYIKTVVCTPEKVTKRMYDSFWRQFKHSEKVHVNLLLIEARMQAELLYALRAITRYMT

SEQ ID NO: 78288 - protein, 492 aa, Homo sapiens
  Payload ID: 15593
  Gene Symbol: SESN1
  Gene Name: sestrin 1
  Uniprot ID: Q9Y6P5
  ENSP ID: ENSP00000349061
MRLAAAANEAYTAPLAVSGLLGCKQCGGGRDQDEELGIRIPRPLGQGPSRFIPEKEILQVGSEDAQMHALFADSFAALGRLDNITLVMVFHPQYLESFLKTQHYLLQMDGPLPLHYRHYIGIMAAARHQCSYLVNLHVNDFLHVGGDPKWLNGLENAPQKLQNLGELNKVLAHRPWLITKEHIEGLLKAEEHSWSLAELVHAVVLLTHYHSLASFTFGCGISPEIHCDGGHTFRPPSVSNYCICDITNGNHSVDEMPVNSAENVSVSDSFFEVEALMEKMRQLQECRDEEEASQEEMASRFEIEKRESMFVFSSDDEEVTPARAVSRHFEDTSYGYKDFSRHGMHVPTFRVQDYCWEDHGYSLVNRLYPDVGQLIDEKFHIAYNLTYNTMAMHKDVDTSMLRRAIWNYIHCMFGIRYDDYDYGEINQLLDRSFKVYIKTVVCTPEKVTKRMYDSFWRQFKHSEKVHVNLLLIEARMQAELLYALRAITRYMT

SEQ ID NO: 78289 - protein, 551 aa, Homo sapiens
  Payload ID: 15593
  Gene Symbol: SESN1
  Gene Name: sestrin 1
  Uniprot ID: Q9Y6P5
  ENSP ID: ENSP00000393762
MAEGENEVRWDGLCSRDSTTRETALENIRQTILRKTEYLRSVKETPHRPSDGLSNTESSDGLNKLLAHLLMLSKRCPFKDVREKSEFILKSIQELGIRIPRPLGQGPSRFIPEKEILQVGSEDAQMHALFADSFAALGRLDNITLVMVFHPQYLESFLKTQHYLLQMDGPLPLHYRHYIGIMAAARHQCSYLVNLHVNDFLHVGGDPKWLNGLENAPQKLQNLGELNKVLAHRPWLITKEHIEGLLKAEEHSWSLAELVHAVVLLTHYHSLASFTFGCGISPEIHCDGGHTFRPPSVSNYCICDITNGNHSVDEMPVNSAENVSVSDSFFEVEALMEKMRQLQECRDEEEASQEEMASRFEIEKRESMFVFSSDDEEVTPARAVSRHFEDTSYGYKDFSRHGMHVPTFRVQDYCWEDHGYSLVNRLYPDVGQLIDEKFHIAYNLTYNTMAMHKDVDTSMLRRAIWNYIHCMFGIRYDDYDYGEINQLLDRSFKVYIKTVVCTPEKVTKRMYDSFWRQFKHSEKVHVNLLLIEARMQAELLYALRAITRYMT

SEQ ID NO: 78290 - protein, 480 aa, Homo sapiens
  Payload ID: 15594
  Gene Symbol: SESN2
  Gene Name: sestrin 2
  Uniprot ID: P58004
  ENSP ID: ENSP00000253063
MIVADSECRAELKDYLRFAPGGVGDSGPGEEQRESRARRGPRGPSAFIPVEEVLREGAESLEQHLGLEALMSSGRVDNLAVVMGLHPDYFTSFWRLHYLLLHTDGPLASSWRHYIAIMAAARHQCSYLVGSHMAEFLQTGGDPEWLLGLHRAPEKLRKLSEINKLLAHRPWLITKEHIQALLKTGEHTWSLAELIQALVLLTHCHSLSSFVFGCGILPEGDADGSPAPQAPTPPSEQSSPPSRDPLNNSGGFESARDVEALMERMQQLQESLLRDEGTSQEEMESRFELEKSESLLVTPSADILEPSPHPDMLCFVEDPTFGYEDFTRRGAQAPPTFRAQDYTWEDHGYSLIQRLYPEGGQLLDEKFQAAYSLTYNTIAMHSGVDTSVLRRAIWNYIHCVFGIRYDDYDYGEVNQLLERNLKVYIKTVACYPEKTTRRMYNLFWRHFRHSEKVHVNLLLLEARMQAALLYALRAITRYMT

SEQ ID NO: 78291 - protein, 353 aa, Homo sapiens
  Payload ID: 15595
  Gene Symbol: SESN3
  Gene Name: sestrin 3
  Uniprot ID: P58005
  ENSP ID: ENSP00000278499
MSLHTQYLESFLRSQFYMLRMDGPLPLPYRHYIAIMKLVKTGENNWSLPELVHAVVLLAHYHALASFVFGSGINPERDPEISNGFRLISVNNFCVCDLANDNNIENASLSGSNFGIVDSLSELEALMERMKRLQEEREDEEASQEEMSTRFEKEKKESLFVVSGDTFHSFPHSDFEDDMIITSDVSRYIEDPGFGYEDFARRGEEHLPTFRAQDYTWENHGFSLVNRLYSDIGHLLDEKFRMVYNLTYNTMATHEDVDTTMLRRALFNYVHCMFGIRYDDYDYGEVNQLLERSLKVYIKTVTCYPERTTKRMYDSYWRQFKHSEKVHVNLLLMEARMQAELLYALRAITRHLT

SEQ ID NO: 78292 - protein, 321 aa, Homo sapiens
  Payload ID: 15595
  Gene Symbol: SESN3
  Gene Name: sestrin 3
  Uniprot ID: P58005
  ENSP ID: ENSP00000407008
MNRGGGSPSAAANYLLCTNCRKVLRKDKRIRVSQPLTRGPSAFIPEKEVVQANTVDERTNFLVEEYSTSGRLDNITQVMSLHTQYLESFLRSQFYMLRMDGPLPLPYRHYIAIMAAARHQCSYLINMHVDEFLKTGGIAEWLNGLEYVPQRLKNLNEINKLLAHRPWLITKEHIQKLVKTGENNWSLPELVHAVVLLAHYHALASFVFGSGINPERDPEISNGFRLISVNNFCVCDLANDNNIENASLSGSNFGIVDSLSELEALMERMKRLQEEREDEEASQEEMSTRFEKEKKESLFVVSGDTFHSFPHSGAFLHFFAF

SEQ ID NO: 78293 - protein, 70 aa, Homo sapiens
  Payload ID: 15595
  Gene Symbol: SESN3
  Gene Name: sestrin 3
  ENSP ID: ENSP00000439580
MDKDKRIRVSQPLTRGPSAFIPEKEVVQANTVDERTNFLVEEYSTSGRLDNITQVMSLHTQYLESFLRSQ

SEQ ID NO: 78294 - protein, 492 aa, Homo sapiens
  Payload ID: 15595
  Gene Symbol: SESN3
  Gene Name: sestrin 3
  Uniprot ID: P58005
  ENSP ID: ENSP00000441927
MNRGGGSPSAAANYLLCTNCRKVLRKDKRIRVSQPLTRGPSAFIPEKEVVQANTVDERTNFLVEEYSTSGRLDNITQVMSLHTQYLESFLRSQFYMLRMDGPLPLPYRHYIAIMAAARHQCSYLINMHVDEFLKTGGIAEWLNGLEYVPQRLKNLNEINKLLAHRPWLITKEHIQKLVKTGENNWSLPELVHAVVLLAHYHALASFVFGSGINPERDPEISNGFRLISVNNFCVCDLANDNNIENASLSGSNFGIVDSLSELEALMERMKRLQEEREDEEASQEEMSTRFEKEKKESLFVVSGDTFHSFPHSDFEDDMIITSDVSRYIEDPGFGYEDFARRGEEHLPTFRAQDYTWENHGFSLVNRLYSDIGHLLDEKFRMVYNLTYNTMATHEDVDTTMLRRALFNYVHCMFGIRYDDYDYGEVNQLLERSLKVYIKTVTCYPERTTKRMYDSYWRQFKHSEKVHVNLLLMEARMQAELLYALRAITRHLT

SEQ ID NO: 78295 - protein, 83 aa, Homo sapiens
  Payload ID: 15595
  Gene Symbol: SESN3
  Gene Name: sestrin 3
  ENSP ID: ENSP00000489281
MSLHTQYLESFLRSQFYMLRMDGPLPLPYRHYIAIMAAARHQCSYLINMHVDEFLKTGGIAEWLNGLEYVPQRLKNLNEINKL

SEQ ID NO: 78296 - protein, 103 aa, Homo sapiens
  Payload ID: 15596
  Gene Symbol: SMYD1
  Gene Name: SET and MYND domain containing 1
  ENSP ID: ENSP00000387482
MTIGRMENVEVFTAEGKGRGLKATKEFWAADIIFAERAYSAVVFDSLVNFVCHTCFKRQEKLHRCGQCKFAHYCDRTCQKDAWLNHKNECSAIKRYGKVLQED

SEQ ID NO: 78297 - protein, 490 aa, Homo sapiens
  Payload ID: 15596
  Gene Symbol: SMYD1
  Gene Name: SET and MYND domain containing 1
  Uniprot ID: Q8NB12
  ENSP ID: ENSP00000393453
MTIGRMENVEVFTAEGKGRGLKATKEFWAADIIFAERAYSAVVFDSLVNFVCHTCFKRQEKLHRCGQCKFAHYCDRTCQKDAWLNHKNECSAIKRYGKVPNENIRLAARIMWRVEREGTGLTEGCLVSVDDLQNHVEHFGEEEQKDLRVDVDTFLQYWPPQSQQFSMQYISHIFGVINCNGFTLSDQRGLQAVGVGIFPNLGLVNHDCWPNCTVIFNNGNHEAVKSMFHTQMRIELRALGKISEGEELTVSYIDFLNVSEERKRQLKKQYYFDCTCEHCQKKLKDDLFLGVKDNPKPSQEVVKEMIQFSKDTLEKIDKARSEGLYHEVVKLCRECLEKQEPVFADTNIYMLRMLSIVSEVLSYLQAFEEASFYARRMVDGYMKLYHPNNAQLGMAVMRAGLTNWHAGNIEVGHGMICKAYAILLVTHGPSHPITKDLEAMRVQTEMELRMFRQNEFMYYKMREAALNNQPMQVMAEPSNEPSPALFHKKQ

SEQ ID NO: 78298 - protein, 477 aa, Homo sapiens
  Payload ID: 15596
  Gene Symbol: SMYD1
  Gene Name: SET and MYND domain containing 1
  ENSP ID: ENSP00000407888
MTIGRMENVEVFTAEGKGRGLKATKEFWAADIIFAERAYSAVVFDSLVNFVCHTCFKRQEKLHRCGQCKFAHYCDRTCQKDAWLNHKNECSAIKRYGKVPNENIRLAARIMWRVEREGTGLTEGCLVSVDDLQNHVEHFGEEEQKDLRVDVDTFLQYWPPQSQQFSMQYISHIFGVINCNGFTLSDQRGLQAVGVGIFPNLGLVNHDCWPNCTVIFNNGKIELRALGKISEGEELTVSYIDFLNVSEERKRQLKKQYYFDCTCEHCQKKLKDDLFLGVKDNPKPSQEVVKEMIQFSKDTLEKIDKARSEGLYHEVVKLCRECLEKQEPVFADTNIYMLRMLSIVSEVLSYLQAFEEASFYARRMVDGYMKLYHPNNAQLGMAVMRAGLTNWHAGNIEVGHGMICKAYAILLVTHGPSHPITKDLEAMRVQTEMELRMFRQNEFMYYKMREAALNNQPMQVMAEPSNEPSPALFHKKQ

SEQ ID NO: 78299 - protein, 433 aa, Homo sapiens
  Payload ID: 15597
  Gene Symbol: SMYD2
  Gene Name: SET and MYND domain containing 2
  Uniprot ID: Q9NRG4
  ENSP ID: ENSP00000355924
MRAEGLGGLERFCSPGKGRGLRALQPFQVGDLLFSCPAYAYVLTVNERGNHCEYCFTRKEGLSKCGRCKQAFYCNVECQKEDWPMHKLECSPMVVFGENWNPSETVRLTARILAKQKIHPERTPSEKLLAVKEFESHLDKLDNEKKDLIQSDIAALHHFYSKHLGFPDNDSLVVLFAQVNCNGFTIEDEELSHLGSAIFPDVALMNHSCCPNVIVTYKGTLAEVRAVQEIKPGEEVFTSYIDLLYPTEDRNDRLRDSYFFTCECQECTTKDKDKAKVEIRKLSDPPKAEAIRDMVRYARNVIEEFRRAKHYKSPSELLEICELSQEKMSSVFEDSNVYMLHMMYQAMGVCLYMQDWEGALQYGQKIIKPYSKHYPLYSLNVASMWLKLGRLYMGLEHKAAGEKALKKAIAIMEVAHGKDHPYISEIKQEIESH

SEQ ID NO: 78300 - protein, 98 aa, Homo sapiens
  Payload ID: 15597
  Gene Symbol: SMYD2
  Gene Name: SET and MYND domain containing 2
  ENSP ID: ENSP00000409822
LSDPPKAEAIRDMVRYARNVIEEFRRAKHYKSPSELLEICELSQEKMSSVFEDSNVYMLHMMYQAMGVCLYMQDWEGALQYGQKIIKPYSLGHCNHGS

SEQ ID NO: 78301 - protein, 147 aa, Homo sapiens
  Payload ID: 15598
  Gene Symbol: SMYD3
  Gene Name: SET and MYND domain containing 3
  ENSP ID: ENSP00000375712
MQEVGVGLYPSISLLNHSCDPNCSIVFNGPHLLLRAVRDIEVGEELTICYLDMLMTSEERRKQLRDQYCFECDCFRCQTQDKDADMLTGDEQVWKEVQESLKKIEELKAHWKWEQVLAMCQAIISSNSERLPDINIYQLKVLDCAMD

SEQ ID NO: 78302 - protein, 182 aa, Homo sapiens
  Payload ID: 15598
  Gene Symbol: SMYD3
  Gene Name: SET and MYND domain containing 3
  ENSP ID: ENSP00000385380
MEPLKVEKFATAKRGNGLRAVTPLRPGELLFRSDPLAYTVCKGSRGVVCDRCLLGKEKLMRCSQCRVAKYCSAKCQKKAWPDHKRECKCLKSCKPRYPPDSVRLLGRVVFKLMDGAPSESEKLYSFYDLESNINKLTEDKKEGLRQLVMTFQHFMREEIQDASQLPPAFDLFEAFAKPIGMK

SEQ ID NO: 78303 - protein, 74 aa, Homo sapiens
  Payload ID: 15598
  Gene Symbol: SMYD3
  Gene Name: SET and MYND domain containing 3
  ENSP ID: ENSP00000394281
MRCSQCRVAKYCSAKCQKKAWPDHKRECKCLKSCKPRYPPDSVRLLGRVVFKLMDGAPSESEKLYSFYDLESNI

SEQ ID NO: 78304 - protein, 131 aa, Homo sapiens
  Payload ID: 15598
  Gene Symbol: SMYD3
  Gene Name: SET and MYND domain containing 3
  ENSP ID: ENSP00000408122
MRCSQCRVAKYCSAKCQKKAWPDHKRECKCLKSCKPRYPPDSVRLLGRVVFKLMDGAPSESEKLYSFYDLESNINKLTEDKKEGLRQLVMTFQHFMREEIQDASQLPPAFDLFEAFAKVICNSFTICNAEM

SEQ ID NO: 78305 - protein, 428 aa, Homo sapiens
  Payload ID: 15598
  Gene Symbol: SMYD3
  Gene Name: SET and MYND domain containing 3
  Uniprot ID: Q9H7B4
  ENSP ID: ENSP00000419184
MEPLKVEKFATAKRGNGLRAVTPLRPGELLFRSDPLAYTVCKGSRGVVCDRCLLGKEKLMRCSQCRVAKYCSAKCQKKAWPDHKRECKCLKSCKPRYPPDSVRLLGRVVFKLMDGAPSESEKLYSFYDLESNINKLTEDKKEGLRQLVMTFQHFMREEIQDASQLPPAFDLFEAFAKVICNSFTICNAEMQEVGVGLYPSISLLNHSCDPNCSIVFNGPHLLLRAVRDIEVGEELTICYLDMLMTSEERRKQLRDQYCFECDCFRCQTQDKDADMLTGDEQVWKEVQESLKKIEELKAHWKWEQVLAMCQAIISSNSERLPDINIYQLKVLDCAMDACINLGLLEEALFYGTRTMEPYRIFFPGSHPVRGVQVMKVGKLQLHQGMFPQAMKNLRLAFDIMRVTHGREHSLIEDLILLLEECDANIRAS

SEQ ID NO: 78306 - protein, 369 aa, Homo sapiens
  Payload ID: 15598
  Gene Symbol: SMYD3
  Gene Name: SET and MYND domain containing 3
  Uniprot ID: Q9H7B4
  ENSP ID: ENSP00000487434
MRCSQCRVAKYCSAKCQKKAWPDHKRECKCLKSCKPRYPPDSVRLLGRVVFKLMDGAPSESEKLYSFYDLESNINKLTEDKKEGLRQLVMTFQHFMREEIQDASQLPPAFDLFEAFAKVICNSFTICNAEMQEVGVGLYPSISLLNHSCDPNCSIVFNGPHLLLRAVRDIEVGEELTICYLDMLMTSEERRKQLRDQYCFECDCFRCQTQDKDADMLTGDEQVWKEVQESLKKIEELKAHWKWEQVLAMCQAIISSNSERLPDINIYQLKVLDCAMDACINLGLLEEALFYGTRTMEPYRIFFPGSHPVRGVQVMKVGKLQLHQGMFPQAMKNLRLAFDIMRVTHGREHSLIEDLILLLEECDANIRAS

SEQ ID NO: 78307 - protein, 804 aa, Homo sapiens
  Payload ID: 15599
  Gene Symbol: SMYD4
  Gene Name: SET and MYND domain containing 4
  Uniprot ID: Q8IYR2
  ENSP ID: ENSP00000304360
MDLPVDEWKSYLLQKWASLPTSVQVTISTAETLRDIFLHSSSLLQPEDELFLKRLSKGYLVGKDSDAPLFYREEGNKKFQEKDYTGAAVLYSKGVSHSRPNTEDMSLCHANRSAALFHLGQYETCLKDINRAQTHGYPERLQPKIMLRKAECLVALGRLQEASQTISDLERNFTATPALADVLPQTLQRNLHRLKMKMQEKDSLTESFPAALAKTLEDAALREENEQLSNASSSIGLCVDPLKGRCLVATKDILPGELLVQEDAFVSVLNPGELPPPHHGLDSKWDTRVTNGDLYCHRCLKHTLATVPCDGCSYAKYCSQECLQQAWELYHRTECPLGGLLLTLGVFCHIALRLTLLVGFEDVRKIITKLCDKISNKDICLPESNNQVKTLNYGLGESEKNGNIVETPIPGCDINGKYENNYNAVFNLLPHTENHSPEHKFLCALCVSALCRQLEAASLQAIPTERIVNSSQLKAAVTPELCPDVTIWGVAMLRHMLQLQCNAQAMTTIQHTGPKGSIVTDSRQVRLATGIFPVISLLNHSCSPNTSVSFISTVATIRASQRIRKGQEILHCYGPHKSRMGVAERQQKLRSQYFFDCACPACQTEAHRMAAGPRWEAFCCNSCGAPMQGDDVLRCGSRSCAESAVSRDHLVSRLQDLQQQVRVAQKLLRDGELERAVQRLSGCQRDAESFLWAEHAVVGEIADGLARACAALGDWQKSATHLQRSLYVVEVRHGPSSVEMGHELFKLAQIFFNGFAVPEALSTIQKAEEVLSLHCGPWDDEIQELQKMKSCLLDLPPTPVGPAL

SEQ ID NO: 78308 - protein, 72 aa, Homo sapiens
  Payload ID: 15599
  Gene Symbol: SMYD4
  Gene Name: SET and MYND domain containing 4
  ENSP ID: ENSP00000459129
MDLPVDEWKSYLLQKWASLPTSVQVTISTAETLRDIFLHSSSLLQLECDGAISAHCNLHLPGSSDSRASASQ

SEQ ID NO: 78309 - protein, 223 aa, Homo sapiens
  Payload ID: 15599
  Gene Symbol: SMYD4
  Gene Name: SET and MYND domain containing 4
  ENSP ID: ENSP00000459819
MDLPVDEWKSYLLQKWASLPTSVQVTISTAETLRDIFLHSSSLLQPEDELFLKRLSKGYLVGKDSDAPLFYREEGNKKFQEKDYTGAAVLYSKGVSHSRPNTEDMSLCHANRSAALFHLGQYETCLKDINRAQTHGYPERLQPKIMLRKAECLVALGRLQEASQTISDLERNFTATPALADVLPQTLQRNLHRLKMKMQEKDSLTESFPAALAKTLEDAALRE

SEQ ID NO: 78310 - protein, 558 aa, Homo sapiens
  Payload ID: 15599
  Gene Symbol: SMYD4
  Gene Name: SET and MYND domain containing 4
  ENSP ID: ENSP00000460921
KMQEKDSLTESFPAALAKTLEDAALREENEQLSNASSSIGLCVDPLKGRCLVATKDILPGELLVQEDAFVSVLNPGELPPPHHGLDSKWDTRVTNGDLYCHRCLKHTLATVPCDGCSYAKYCSQECLQQAWELYHRTECPLGGLLLTLGVFCHIALRLTLLVGFEDVRKIITKLCDKISNKDICLPESNNQVKTLNYGLGESEKNGNIVETPIPGCDINGKYENNYNAVFNLLPHTENHSPEHKFLCALCVSALCRQLEAASLQAIPTERIVNSSQLKAAVTPELCPDVTIWGVAMLRHMLQLQCNAQAMTTIQHTGPKGSIVTDSRQVRLATGIFPVISLLNHSCSPNTSVSFISTVATIRASQRIRKGQEILHCYGPHKSRMGVAERQQKLRSQYFFDCACPACQTEAHRMAAGPRWEAFCCNSCGAPMQGDDVLRCGSRSCAESAVSRDHLVSRLQDLQQQVRVAQKLLRDGELERAVQRLSGCQRDAESFLWAEHAVVGEIADGLARACAALGDWQKSATHLQRSLYVVEVRHGPSSVEMGHELFKLAQIFFNG

SEQ ID NO: 78311 - protein, 177 aa, Homo sapiens
  Payload ID: 15599
  Gene Symbol: SMYD4
  Gene Name: SET and MYND domain containing 4
  ENSP ID: ENSP00000461089
MDLPVDEWKSYLLQKWASLPTSVQVTISTAETLRDIFLHSSSLLQPEDELFLKRLSKGYLVGKDSDAPLFYREEGNKKFQEKDYTGAAVLYSKGVSHSRPNTEDMSLCHANRSAALFHLGQYETCLKDINRAQTHGYPERLQPKIMLRKAECLVALGRLQEASQTISDLERNFTATP

SEQ ID NO: 78312 - protein, 1868 aa, Homo sapiens
  Payload ID: 15600
  Gene Symbol: SBF1
  Gene Name: SET binding factor 1
  ENSP ID: ENSP00000252027
MARLADYFVLVAFGPHPRGSGEGQGQILQRFPEKDWEDNPFPQGIELFCQPSGWQLCPERNPPTFFVAVLTDINSERHYCACLTFWEPAEPSQQETTRVEDATEREEEGDEGGQTHLSPTAPAPSAQLFAPKTLVLVSRLDHTEVFRNSLGLIYAIHVEGLNVCLENVIGNLLTCTVPLAGGSQRTISLGAGDRQVIQTPLADSLPVSRCSVALLFRQLGITNVLSLFCAALTEHKVLFLSRSYQRLADACRGLLALLFPLRYSFTYVPILPAQLLEVLSTPTPFIIGVNAAFQAETQELLDVIVADLDGGTVTIPECVHIPPLPEPLQSQTHSVLSMVLDPELELADLAFPPPTTSTSSLKMQDKELRAVFLRLFAQLLQGYRWCLHVVRIHPEPVIRFHKAAFLGQRGLVEDDFLMKVLEGMAFAGFVSERGVPYRPTDLFDELVAHEVARMRADENHPQRVLRHVQELAEQLYKNENPYPAVAMHKVQRPGESSHLRRVPRPFPRLDEGTVQWIVDQAAAKMQGAPPAVKAERRTTVPSGPPMTAILERCSGLHVNSARRLEVVRNCISYVFEGKMLEAKKLLPAVLRALKGRAARRCLAQELHLHVQQNRAVLDHQQFDFVVRMMNCCLQDCTSLDEHGIAAALLPLVTAFCRKLSPGVTQFAYSCVQEHVVWSTPQFWEAMFYGDVQTHIRALYLEPTEDLAPAQEVGEAPSQEDERSALDVASEQRRLWPTLSREKQQELVQKEESTVFSQAIHYANRMSYLLLPLDSSKSRLLRERAGLGDLESASNSLVTNSMAGSVAESYDTESGFEDAETCDVAGAVVRFINRFVDKVCTESGVTSDHLKGLHVMVPDIVQMHIETLEAVQRESRRLPPIQKPKLLRPRLLPGEECVLDGLRVYLLPDGREEGAGGSAGGPALLPAEGAVFLTTYRVIFTGMPTDPLVGEQVVVRSFPVAALTKEKRISVQTPVDQLLQDGLQLRSCTFQLLKMAFDEEVGSDSAELFRKQLHKLRYPPDIRATFAFTLGSAHTPGRPPRVTKDKGPSLRTLSRNLVKNAKKTIGRQHVTRKKYNPPSWEHRGQPPPEDQEDEISVSEELEPSTLTPSSALKPSDRMTMSSLVERACCRDYQRLGLGTLSSSLSRAKSEPFRISPVNRMYAICRSYPGLLIVPQSVQDNALQRVSRCYRQNRFPVVCWRSGRSKAVLLRSGGLHGKGVVGLFKAQNAPSPGQSQADSSSLEQEKYLQAVVSSMPRYADASGRNTLSGFSSAHMGSHGKWGSVRTSGRSSGLGTDVGSRLAGRDALAPPQANGGPPDPGFLRPQRAALYILGDKAQLKGVRSDPLQQWELVPIEVFEARQVKASFKKLLKACVPGCPAAEPSPASFLRSLEDSEWLIQIHKLLQVSVLVVELLDSGSSVLVGLEDGWDITTQVVSLVQLLSDPFYRTLEGFRLLVEKEWLSFGHRFSHRGAHTLAGQSSGFTPVFLQFLDCVHQVHLQFPMEFEFSQFYLKFLGYHHVSRRFRTFLLDSDYERIELGLLYEEKGERRGQVPCRSVWEYVDRLSKRTPVFHNYMYAPEDAEVLRPYSNVSNLKVWDFYTEETLAEGPPYDWELAQGPPEPPEEERSDGGAPQSRRRVVWPCYDSCPRAQPDAISRLLEELQRLETELGQPAERWKDTWDRVKAAQRLEGRPDGRGTPSSLLVSTAPHHRRSLGVYLQEGPVGSTLSLSLDSDQSSGSTTSGSRQAARRSTSTLYSQFQTAESENRSYEGTLYKKGAFMKPWKARWFVLDKTKHQLRYYDHRVDTECKGVIDLAEVEAVAPGTPTMGAPKTVDEKAFFDVKTTRRVYNFCAQDVPSAQQWVDRIQSCLSDA

SEQ ID NO: 78313 - protein, 1893 aa, Homo sapiens
  Payload ID: 15600
  Gene Symbol: SBF1
  Gene Name: SET binding factor 1
  Uniprot ID: O95248
  ENSP ID: ENSP00000370196
MARLADYFVLVAFGPHPRGSGEGQGQILQRFPEKDWEDNPFPQGIELFCQPSGWQLCPERNPPTFFVAVLTDINSERHYCACLTFWEPAEPSQETTRVEDATEREEEGDEGGQTHLSPTAPAPSAQLFAPKTLVLVSRLDHTEVFRNSLGLIYAIHVEGLNVCLENVIGNLLTCTVPLAGGSQRTISLGAGDRQVIQTPLADSLPVSRCSVALLFRQLGITNVLSLFCAALTEHKVLFLSRSYQRLADACRGLLALLFPLRYSFTYVPILPAQLLEVLSTPTPFIIGVNAAFQAETQELLDVIVADLDGGTVTIPECVHIPPLPEPLQSQTHSVLSMVLDPELELADLAFPPPTTSTSSLKMQDKELRAVFLRLFAQLLQGYRWCLHVVRIHPEPVIRFHKAAFLGQRGLVEDDFLMKVLEGMAFAGFVSERGVPYRPTDLFDELVAHEVARMRADENHPQRVLRHVQELAEQLYKNENPYPAVAMHKVQRPGESSHLRRVPRPFPRLDEGTVQWIVDQAAAKMQGAPPAVKAERRTTVPSGPPMTAILERCSGLHVNSARRLEVVRNCISYVFEGKMLEAKKLLPAVLRALKGRAARRCLAQELHLHVQQNRAVLDHQQFDFVVRMMNCCLQDCTSLDEHGIAAALLPLVTAFCRKLSPGVTQFAYSCVQEHVVWSTPQFWEAMFYGDVQTHIRALYLEPTEDLAPAQEVGEAPSQEDERSALDVASEQRRLWPTLSREKQQELVQKEESTVFSQAIHYANRMSYLLLPLDSSKSRLLRERAGLGDLESASNSLVTNSMAGSVAESYDTESGFEDAETCDVAGAVVRFINRFVDKVCTESGVTSDHLKGLHVMVPDIVQMHIETLEAVQRESRRLPPIQKPKLLRPRLLPGEECVLDGLRVYLLPDGREEGAGGSAGGPALLPAEGAVFLTTYRVIFTGMPTDPLVGEQVVVRSFPVAALTKEKRISVQTPVDQLLQDGLQLRSCTFQLLKMAFDEEVGSDSAELFRKQLHKLRYPPDIRATFAFTLGSAHTPGRPPRVTKDKGPSLRTLSRNLVKNAKKTIGRQHVTRKKYNPPSWEHRGQPPPEDQEDEISVSEELEPSTLTPSSALKPSDRMTMSSLVERACCRDYQRLGLGTLSSSLSRAKSEPFRISPVNRMYAICRSYPGLLIVPQSVQDNALQRVSRCYRQNRFPVVCWRSGRSKAVLLRSGGLHGKGVVGLFKAQNAPSPGQSQADSSSLEQEKYLQAVVSSMPRYADASGRNTLSGFSSAHMGSHVPSPRARVTTLSNPMAASASRRTAPRGKWGSVRTSGRSSGLGTDVGSRLAGRDALAPPQANGGPPDPGFLRPQRAALYILGDKAQLKGVRSDPLQQWELVPIEVFEARQVKASFKKLLKACVPGCPAAEPSPASFLRSLEDSEWLIQIHKLLQVSVLVVELLDSGSSVLVGLEDGWDITTQVVSLVQLLSDPFYRTLEGFRLLVEKEWLSFGHRFSHRGAHTLAGQSSGFTPVFLQFLDCVHQVHLQFPMEFEFSQFYLKFLGYHHVSRRFRTFLLDSDYERIELGLLYEEKGERRGQVPCRSVWEYVDRLSKRTPVFHNYMYAPEDAEVLRPYSNVSNLKVWDFYTEETLAEGPPYDWELAQGPPEPPEEERSDGGAPQSRRRVVWPCYDSCPRAQPDAISRLLEELQRLETELGQPAERWKDTWDRVKAAQRLEGRPDGRGTPSSLLVSTAPHHRRSLGVYLQEGPVGSTLSLSLDSDQSSGSTTSGSRQAARRSTSTLYSQFQTAESENRSYEGTLYKKGAFMKPWKARWFVLDKTKHQLRYYDHRVDTECKGVIDLAEVEAVAPGTPTMGAPKTVDEKAFFDVKTTRRVYNFCAQDVPSAQQWVDRIQSCLSDA

SEQ ID NO: 78314 - protein, 415 aa, Homo sapiens
  Payload ID: 15600
  Gene Symbol: SBF1
  Gene Name: SET binding factor 1
  ENSP ID: ENSP00000401538
  MOD_RES (1)..(1): Any amino acid
XFYRTLEGFRLLVEKEWLSFGHRFSHRGAHTLAGQSSGFTPVFLQFLDCVHQVHLQFPMEFEFSQFYLKFLGYHHVSRRFRTFLLDSDYERIELGLLYEEKGERRGQVPCRSVWEYVDRLSKRTPVFHNYMYAPEDAEVWDFYTEETLAEGPPYDWELAQGPPEPPEEERSDGGAPQSRRRVVWPCYDSCPRAQPDAISRLLEELQRLETELGQPAERWKDTWDRVKAAQRLEGRPDGRGTPSSLLVSTAPHHRRSLGVYLQEGPVGSTLSLSLDSDQSSGSTTSGSRQAARRSTSTLYSQFQTAESENRSYEGTLYKKGAFMKPWKARWFVLDKTKHQLRYYDHRVDTECKGVIDLAEVEAVAPGTPTMGAPKTVDEKAFFDVKTTRRVYNFCAQDVPSAQQWVDRIQSCLSDA

SEQ ID NO: 78315 - protein, 1849 aa, Homo sapiens
  Payload ID: 15601
  Gene Symbol: SBF2
  Gene Name: SET binding factor 2
  Uniprot ID: Q86WG5
  ENSP ID: ENSP00000256190
MARLADYFIVVGYDHEKPGSGEGLGKIIQRFPQKDWDDTPFPQGIELFCQPGGWQLSRERKQPTFFVVVLTDIDSDRHYCSCLTFYEAEINLQGTKKEEIEGEAKVSGLIQPAEVFAPKSLVLVSRLYYPEIFRACLGLIYTVYVDSLNVSLESLIANLCACLVPAAGGSQKLFSLGAGDRQLIQTPLHDSLPITGTSVALLFQQLGIQNVLSLFCAVLTENKVLFHSASFQRLSDACRALESLMFPLKYSYPYIPILPAQLLEVLSSPTPFIIGVHSVFKTDVHELLDVIIADLDGGTIKIPECIHLSSLPEPLLHQTQSALSLILHPDLEVADHAFPPPRTALSHSKMLDKEVRAVFLRLFAQLFQGYRSCLQLIRIHAEPVIHFHKTAFLGQRGLVENDFLTKVLSGMAFAGFVSERGPPYRSCDLFDELVAFEVERIKVEENNPVKMIKHVRELAEQLFKNENPNPHMAFQKVPRPTEGSHLRVHILPFPEINEARVQELIQENVAKNQNAPPATRIEKKCVVPAGPPVVSIMDKVTTVFNSAQRLEVVRNCISFIFENKILETEKTLPAALRALKGKAARQCLTDELGLHVQQNRAILDHQQFDYIIRMMNCTLQDCSSLEEYNIAAALLPLTSAFYRKLAPGVSQFAYTCVQDHPIWTNQQFWETTFYNAVQEQVRSLYLSAKEDNHAPHLKQKDKLPDDHYQEKTAMDLAAEQLRLWPTLSKSTQQELVQHEESTVFSQAIHFANLMVNLLVPLDTSKNKLLRTSAPGDWESGSNSIVTNSIAGSVAESYDTESGFEDSENTDIANSVVRFITRFIDKVCTESGVTQDHIKSLHCMIPGIVAMHIETLEAVHRESRRLPPIQKPKILRPALLPGEEIVCEGLRVLLDPDGREEATGGLLGGPQLLPAEGALFLTTYRILFRGTPHDQLVGEQTVVRSFPIASITKEKKITMQNQLQQNMQEGLQITSASFQLIKVAFDEEVSPEVVEIFKKQLMKFRYPQSIFSTFAFAAGQTTPQIILPKQKEKNTSFRTFSKTIVKGAKRAGKMTIGRQYLLKKKTGTIVEERVNRPGWNEDDDVSVSDESELPTSTTLKASEKSTMEQLVEKACFRDYQRLGLGTISGSSSRSRPEYFRITASNRMYSLCRSYPGLLVVPQAVQDSSLPRVARCYRHNRLPVVCWKNSRSGTLLLRSGGFHGKGVVGLFKSQNSPQAAPTSSLESSSSIEQEKYLQALLNAVSVHQKLRGNSTLTVRPAFALSPGVWASLRSSTRLISSPTSFIDVGARLAGKDHSASFSNSSYLQNQLLKRQAALYIFGEKSQLRNFKVEFALNCEFVPVEFHEIRQVKASFKKLMRACIPSTIPTDSEVTFLKALGDSEWFPQLHRIMQLAVVVSEVLENGSSVLVCLEEGWDITAQVTSLVQLLSDPFYRTLEGFQMLVEKEWLSFGHKFSQRSSLTLNCQGSGFAPVFLQFLDCVHQVHNQYPTEFEFNLYYLKFLAFHYVSNRFKTFLLDSDYERLEHGTLFDDKGEKHAKKGVCIWECIDRMHKRSPIFFNYLYSPLEIEALKPNVNVSSLKKWDYYIEETLSTGPSYDWMMLTPKHFPSEDSDLAGEAGPRSQRRTVWPCYDDVSCTQPDALTSLFSEIEKLEHKLNQAPEKWQQLWERVTVDLKEEPRTDRSQRHLSRSPGIVSTNLPSYQKRSLLHLPDSSMGEEQNSSISPSNGVERRAATLYSQYTSKNDENRSFEGTLYKRGALLKGWKPRWFVLDVTKHQLRYYDSGEDTSCKGHIDLAEVEMVIPAGPSMGAPKHTSDKAFFDLKTSKRVYNFCAQDGQSAQQWMDKIQSCISDA

SEQ ID NO: 78316 - protein, 396 aa, Homo sapiens
  Payload ID: 15601
  Gene Symbol: SBF2
  Gene Name: SET binding factor 2
  ENSP ID: ENSP00000410478
  MOD_RES (1)..(1): Any amino acid
XDKEVRAVFLRLFAQLFQGYRSCLQLIRIHAEPVIHFHKLVAFEVERIKVEENNPVKMIKHVRELAEQLFKNENPNPHMAFQKVPRPTEGSHLRVHILPFPEINEARVQELIQENVAKNQNAPPATRIEKKCVVPAGPPVVSIMDKVTTVFNSAQRLEVVRNCISFIFENKILETEKTLPAALRALKGKAARQCLTDELGLHVQQNRAILDHQQFDYIIRMMNCTLQDCSSLEEYNIAAALLPLTSAFYRKLAPGVSQFAYTCVQDHPIWTNQQFWETTFYNAVQEQVRSLYLSAKEDNHAPHLKQKDKLPDDHYQEKTAMDLAAEQLRLWPTLSKSTQQELVQHEESTVFSQAIHFANLMVNLLVPLDTSKNKLLRTSAPGDWESGSNSIVTNSI

SEQ ID NO: 78317 - protein, 331 aa, Homo sapiens
  Payload ID: 15601
  Gene Symbol: SBF2
  Gene Name: SET binding factor 2
  ENSP ID: ENSP00000432643
  MOD_RES (1)..(1): Any amino acid
XYQRLGLGTISGSSSRSRPEYFRITASNRMYSLCRSYPGLLVVPQAVQDSSLPRVARCYRHNRLPVVCWKNSRSGTLLLRSGGFHGKGVVGLFKSQNSPQAAPTSSLESSSSIEQEKYLQALLNAVSVHQKLRGNSTLTVRPAFALSPGTERRTSRMSTVLKQVVPGHLDVNPSNSFAQGGVWASLRSSTRLISSPTSFIDVGARLAGKDHSASFSNSSYLQNQLLKRQAALYIFGEKSQLRNFKVEFALNCEFVPVEFHEIRQVKASFKKLMRACIPSTIPTDSEVTFLKALGDSEWFPQLHRIMQLAVVVSEVLENGSSVLVCLEEGWD

SEQ ID NO: 78318 - protein, 132 aa, Homo sapiens
  Payload ID: 15601
  Gene Symbol: SBF2
  Gene Name: SET binding factor 2
  ENSP ID: ENSP00000434620
GEAGPRSQRRTVWPCYDDVSCTQPDALTSLFSEIEKLEHKLNQAPEKWQQLWERVTVDLKEEPRTDRSQRHLSRSPGIVSTNLPSYQKRSLLHLPDSSMGEEQNSSISPSNGVERRAATLYSQYTSKNDENR

SEQ ID NO: 78319 - protein, 1802 aa, Homo sapiens
  Payload ID: 15601
  Gene Symbol: SBF2
  Gene Name: SET binding factor 2
  ENSP ID: ENSP00000482806
FCQPGGWQLSRERKQPTFFVVVLTDIDSDRHYCSCLTFYEAEINLQGTKKEEIEGEAKVSGLIQPAEVFAPKSLVLVSRLYYPEIFRACLGLIYTVYVDSLNVSLESLIANLCACLVPAAGGSQKLFSLGAGDRQLIQTPLHDSLPITGTSVALLFQQLGIQNVLSLFCAVLTENKVLFHSASFQRLSDACRALESLMFPLKYSYPYIPILPAQLLEVLSSPTPFIIGVHSVFKTDVHELLDVIIADLDGGTIKIPECIHLSSLPEPLLHQTQSALSLILHPDLEVADHAFPPPRTALSHSKMLDKEVRAVFLRLFAQLFQGYRSCLQLIRIHAEPVIHFHKTAFLGQRGLVENDFLTKVLSGMAFAGFVSERGPPYRSCDLFDELVAFEVERIKVEENNPVKMIKHVRELAEQLFKNENPNPHMAFQKVPRPTEGSHLRVHILPFPEINEARVQELIQENVAKNQNAPPATRIEKKCVVPAGPPVVSIMDKVTTVFNSAQRLEVVRNCISFIFENKILETEKTLPAALRALKGKAARQCLTDELGLHVQQNRAILDHQQFDYIIRMMNCTLQDCSSLEEYNIAAALLPLTSAFYRKLAPGVSQFAYTCVQDHPIWTNQQFWETTFYNAVQEQVRSLYLSAKEDNHAPHLKQKDKLPDDHYQEKTAMDLAAEQLRLWPTLSKSTQQELVQHEESTVFSQAIHFANLMVNLLVPLDTSKNKLLRTSAPGDWESGSNSIVTNSIAGSVAESYDTESGFEDSENTDIANSVVRFITRFIDKVCTESGVTQDHIKSLHCMIPGIVAMHIETLEAVHRESRRLPPIQKPKILRPALLPGEEIVCEGLRVLLDPDGREEATGGLLGGPQLLPAEGALFLTTYRILFRGTPHDQLVGEQTVVRSFPIASITKEKKITMQNQLQQNMQEGLQITSASFQLIKVAFDEEVSPEVVEIFKKQLMKFRYPQSIFSTFAFAAGQTTPQIILPKQKEKNTSFRTFSKTIVKGAKRAGKMTIGRQYLLKKKTGTIVEERVNRPGWNEDDDVSVSDESELPTSTTLKASEKSTMEQLVEKACFRDYQRLGLGTISGSSSRSRPEYFRITASNRMYSLCRSYPGLLVVPQAVQDSSLPRVARCYRHNRLPVVCWKNSRSGTLLLRSGGFHGKGVVGLFKSQNSPQAAPTSSLESSSSIEQEKYLQALLNAVSVHQKLRGNSTLTVRPAFALSPGVWASLRSSTRLISSPTSFIDVGARLAGKDHSASFSNSSYLQNQLLKRQAALYIFGEKSQLRNFKVEFALNCEFVPVEFHEIRQVKASFKKLMRACIPSTIPTDSEVTFLKALGDSEWFPQLHRIMQLAVVVSEVLENGSSVLVCLEEGWDITAQVTSLVQLLSDPFYRTLEGFQMLVEKEWLSFGHKFSQRSSLTLNCQGSGFAPVFLQFLDCVHQVHNQYPTEFEFNLYYLKFLAFHYVSNRFKTFLLDSDYERLEHGTLFDDKGEKHAKKGVCIWECIDRMHKRSPIFFNYLYSPLEIEALKPNVNVSSLKKWDYYIEETLSTGPSYDWMMLTPKHFPSEDSDLAGEAGPRSQRRTVWPCYDDVSCTQPDALTSLFSEIEKLEHKLNQAPEKWQQLWERVTVDLKEEPRTDRSQRHLSRSPGIVSTNLPSYQKRSLLHLPDSSMGEEQNSSISPSNGVERRAATLYSQYTSKNDENRSFEGTLYKRGALLKGWKPRWFVLDVTKHQLRYYDSGEDTSCKGHIDLAEVEMVIPAGPSMGAPKHTSDKAFFDLKTSKRVYNFCAQDGQSAQQWMDKIQSCISDA

SEQ ID NO: 78320 - protein, 1596 aa, Homo sapiens
  Payload ID: 15602
  Gene Symbol: SETBP1
  Gene Name: SET binding protein 1
  Uniprot ID: Q9Y6X0
  ENSP ID: ENSP00000282030
MESRETLSSSRQRGGESDFLPVSSAKPPAAPGCAGEPLLSTPGPGKGIPVGGERMEPEEEDELGSGRDVDSNSNADSEKWVAGDGLEEQEFSIKEANFTEGSLKLKIQTTKRAKKPPKNLENYICPPEIKITIKQSGDQKVSRAGKNSKATKEEERSHSKKKLLTASDLAASDLKGFQPQAYERPQKHSTLHYDTGLPQDFTGDTLKPKHQQKSSSQNHMDWSTNSDSGPVTQNCFISPESGRETASTSKIPALEPVASFAKAQGKKGSAGNTWSQLSNNNKDLLLGGVAPSPSSHSSPAPPSSSAECNGLQPLVDQDGGGTKEPPEPPTVGSKKKSSKKDVISQTIPNPDLDWVKNAQKAFDNTEGKREGYSADSAQEASPARQNVSSASNPENDSSHVRITIPIKAPSLDPTNHKRKKRQSIKAVVEKIMPEKALASGITMSSEVVNRILSNSEGNKKDPRVPKLSKMIENESPSVGLETGGNAEKVIPGGVSKPRKPPMVMTPPTCTDHSPSRKLPEIQHPKFAAKRRWTCSKPKPSTMLREAVMATSDKLMLEPPSAYPITPSSPLYTNTDSLTVITPVKKKRGRPKKQPLLTVETIHEGTSTSPVSPISREFPGTKKRKRRRNLAKLAQLVPGEDKPMSEMKFHKKVGKLGVLDKKTIKTINKMKTLKRKNILNQILSCSSSVALKAKAPPETSPGAAAIESKLGKQINVSKRGTIYIGKKRGRKPRAELPPPSEEPKTAIKHPRPVSSQPDVPAVPSNFQSLVASSPAAMHPLSTQLGGSNGNLSPASTETNFSELKTMPNLQPISALPTKTQKGIHSGTWKLSPPRLMANSPSHLCEIGSLKEITLSPVSESHSEETIPSDSGIGTDNNSTSDQAEKSSESRRRYSFDFCSLDNPEAIPSDTSTKNRHGHRQKHLIVDNFLAHESLKKPKHKRKRKSLQNRDDLQFLADLEELITKFQVFRISHRSYTFYHENPYPSIFRINFDHYYPVPYIQYDPLLYLRRTSDLKSKKKRGRPAKTNDTMTKVPFLQGFSYPIPSGSYYAPYGMPYTSMPMMNLGYYGQYPAPLYLSHTLGAASPFMRPTVPPPQFHTNSHVKMSGAAKHKAKHGVHLQGPVSMGLGDMQPSLNPPKVGSASLSSGRLHKRKHKHKHKHKEDRILGTHDNLSGLFAGKATGFSSHILSERLSSADKELPLVSEKNKHKEKQKHQHSEAGHKASKNNFEVDTLSTLSLSDAQHWTQAKEKGDLSSEPVDSCTKRYSGSGGDGGSTRSENLDVFSEMNPSNDKWDSDVSGSKRRSYEGFGTYREKDIQAFKMNRKERSSYDSSMSPGMPSPHLKVDQTAVHSKNEGSVPTMMTRKKPAAVDSVTIPPAPVLSLLAASAATSDAVGSSLKKRFKRREIEAIQCEVRKMCNYTKILSTKKNLDHVNKILKAKRLQRQSKTGNNFVKKRRGRPRKQPTQFDEDSRDQMPVLEKCIDLPSKRGQKPSLSPLVLEPAASQDTIMATIEAVIHMAREAPPLPPPPPPPLPPPPPPPLPPPPPLPKTPRGGKRKHKPQAPAQPPQQSPPQQPLPQEEEVKAKRQRKSRGSESEVLP

SEQ ID NO: 78321 - protein, 242 aa, Homo sapiens
  Payload ID: 15602
  Gene Symbol: SETBP1
  Gene Name: SET binding protein 1
  Uniprot ID: Q9Y6X0
  ENSP ID: ENSP00000390687
MESRETLSSSRQRGGESDFLPVSSAKPPAAPGCAGEPLLSTPGPGKGIPVGGERMEPEEEDELGSGRDVDSNSNADSEKWVAGDGLEEQEFSIKEANFTEGSLKLKIQTTKRAKKPPKNLENYICPPEIKITIKQSGDQKVSRAGKNSKATKEEERSHSKKKLLTASDLAASDLKGFQPQIKDSSKEEVWKRRGGQGIPFKKQFLSQERAMCFSCPRNPFPAKPGSLTLPFHSEPAVWAQEV

SEQ ID NO: 78322 - protein, 137 aa, Homo sapiens
  Payload ID: 15602
  Gene Symbol: SETBP1
  Gene Name: SET binding protein 1
  ENSP ID: ENSP00000468506
MESRETLSSSRQRGGESDFLPVSSAKPPAAPGCAGEPLLSTPGPGKGIPVGGERMEPEEEDELGSGRDVDSNSNADSEKWVAGDGLEEQEFSIKEANFTEGSLKLKIQTTKRAKKPPKNLENYICPPEIKITIKQSG

SEQ ID NO: 78323 - protein, 212 aa, Homo sapiens
  Payload ID: 15603
  Gene Symbol: SETMAR
  Gene Name: SET domain and mariner transposase fusion gene
  ENSP ID: ENSP00000369673
MPRPGPFSVDPRHHLSKGVVLFSPFPEAQNRRPCENLAFCPVLSSELKEASRGESFTSLVSGVSHSSLYCPVEKSNISCGNEKEPSMCGSAPSVFPSCKRLTLETMKMMLDKKQIRAIFLFEFKMGRKAAETTRNINNAFGPGTANERTVQWWFKKFCKGDESLEDEERSGRPSEVDNDQLRAIIEADPLTTTREVAEELNVNHSTVVRHLK

SEQ ID NO: 78324 - protein, 684 aa, Homo sapiens
  Payload ID: 15603
  Gene Symbol: SETMAR
  Gene Name: SET domain and mariner transposase fusion gene
  Uniprot ID: Q53H47
  ENSP ID: ENSP00000373354
MFAEAAKTTRPCGMAEFKEKPEAPTEQLDVACGQENLPVGAWPPGAAPAPFQYTPDHVVGPGADIDPTQITFPGCICVKTPCLPGTCSCLRHGENYDDNSCLRDIGSGGKYAEPVFECNVLCRCSDHCRNRVVQKGLQFHFQVFKTHKKGWGLRTLEFIPKGRFVCEYAGEVLGFSEVQRRIHLQTKSDSNYIIAIREHVYNGQVMETFVDPTYIGNIGRFLNHSCEPNLLMIPVRIDSMVPKLALFAAKDIVPEEELSYDYSGRYLNLTVSEDKERLDHGKLRKPCYCGAKSCTAFLPFDSSLYCPVEKSNISCGNEKEPSMCGSAPSVFPSCKRLTLETMKMMLDKKQIRAIFLFEFKMGRKAAETTRNINNAFGPGTANERTVQWWFKKFCKGDESLEDEERSGRPSEVDNDQLRAIIEADPLTTTREVAEELNVNHSTVVRHLKQIGKVKKLDKWVPHELTENQKNRRFEVSSSLILRNHNEPFLDRIVTCDEKWILYDNRRRSAQWLDQEEAPKHFPKPILHPKKVMVTIWWSAAGLIHYSFLNPGETITSEKYAQEIDEMNQKLQRLQLALVNRKGPILLHDNARPHVAQPTLQKLNELGYEVLPHPPYSPDLLPTNYHVFKHLNNFLQGKRFHNQQDAENAFQEFVESQSTDFYATGINQLISRWQKCVDCNGSYFD

SEQ ID NO: 78325 - protein, 171 aa, Homo sapiens
  Payload ID: 15603
  Gene Symbol: SETMAR
  Gene Name: SET domain and mariner transposase fusion gene
  ENSP ID: ENSP00000393044
MFAEAAKTTRPCGMAEFKEKPEAPTEQLDVACGQENLPVGAWPPGAAPAPFQYTPDHVVGPGADIDPTQITFPGCICVKTPCLPGTCSCLRHGENYDDNSCLRDIGSGGKYAEPVFECNVLCRCSDHCRNRVVQKGLQFHFQVFKTHKKGWGLRTLEFIPKGRKVEHQLWK

SEQ ID NO: 78326 - protein, 67 aa, Homo sapiens
  Payload ID: 15603
  Gene Symbol: SETMAR
  Gene Name: SET domain and mariner transposase fusion gene
  ENSP ID: ENSP00000397463
MFAEAAKTTRPCGMAEFKEKPEAPTEQLDVACGQENLPVGAWPPGAAPAPFQFSVLPRRKVEHQLWK

SEQ ID NO: 78327 - protein, 365 aa, Homo sapiens
  Payload ID: 15603
  Gene Symbol: SETMAR
  Gene Name: SET domain and mariner transposase fusion gene
  Uniprot ID: Q53H47
  ENSP ID: ENSP00000403000
MFAEAAKTTRPCGMAEFKEKPEAPTEQLDVACGQENLPVGAWPPGAAPAPFQYTPDHVVGPGADIDPTQITFPGCICVKTPCLPGTCSCLRHGENYDDNSCLRDIGSGGKYAEPVFECNVLCRCSDHCRNRVVQKGLQFHFQVFKTHKKGWGLRTLEFIPKGRFVCEYAGEVLGFSEVQRRIHLQTKSDSNYIIAIREHVYNGQVMETFVDPTYIGNIGRFLNHSCEPNLLMIPVRIDSMVPKLALFAAKDIVPEEELSYDYSGRYLNLTVSEDKERLDHGKLRKPCYCGAKSCTAFLPFDSSLYCPVEKSNISCGNEKEPSMCGSAPSVFPSCKRLTLEVSLFSDKQLAPPYSGRQWLASFTSA

SEQ ID NO: 78328 - protein, 545 aa, Homo sapiens
  Payload ID: 15603
  Gene Symbol: SETMAR
  Gene Name: SET domain and mariner transposase fusion gene
  Uniprot ID: Q53H47
  ENSP ID: ENSP00000403145
MFAEAAKTTRPCGMAEFKEKPEAPTEQLDVACGQENLPVGAWPPGAAPAPFQYTPDHVVGPGADIDPTQITFPGCICVKTPCLPGTCSCLRHGENYDDNSCLRDIGSGGKYAEPVFECNVLCRCSDHCRNRVVQKGLQFHFQVFKTHKKGWGLRTLEFIPKGSSLYCPVEKSNISCGNEKEPSMCGSAPSVFPSCKRLTLETMKMMLDKKQIRAIFLFEFKMGRKAAETTRNINNAFGPGTANERTVQWWFKKFCKGDESLEDEERSGRPSEVDNDQLRAIIEADPLTTTREVAEELNVNHSTVVRHLKQIGKVKKLDKWVPHELTENQKNRRFEVSSSLILRNHNEPFLDRIVTCDEKWILYDNRRRSAQWLDQEEAPKHFPKPILHPKKVMVTIWWSAAGLIHYSFLNPGETITSEKYAQEIDEMNQKLQRLQLALVNRKGPILLHDNARPHVAQPTLQKLNELGYEVLPHPPYSPDLLPTNYHVFKHLNNFLQGKRFHNQQDAENAFQEFVESQSTDFYATGINQLISRWQKCVDCNGSYFD

SEQ ID NO: 78329 - protein, 366 aa, Homo sapiens
  Payload ID: 15604
  Gene Symbol: SETD7
  Gene Name: SET domain containing (lysine methyltransferase) 7
  Uniprot ID: Q8WTS6
  ENSP ID: ENSP00000274031
MDSDDEMVEEAVEGHLDDDGLPHGFCTVTYSSTDRFEGNFVHGEKNGRGKFFFFDGSTLEGYYVDDALQGQGVYTYEDGGVLQGTYVDGELNGPAQEYDTDGRLIFKGQYKDNIRHGVCWIYYPDGGSLVGEVNEDGEMTGEKIAYVYPDERTALYGKFIDGEMIEGKLATLMSTEEGRPHFELMPGNSVYHFDKSTSSCISTNALLPDPYESERVYVAESLISSAGEGLFSKVAVGPNTVMSFYNGVRITHQEVDSRDWALNGNTLSLDEETVIDVPEPYNHVSKYCASLGHKANHSFTPNCIYDMFVHPRFGPIKCIRTLRAVEADEELTVAYGYDHSPPGKSGPEAPEWYQVELKAFQATQQK

SEQ ID NO: 78330 - protein, 69 aa, Homo sapiens
  Payload ID: 15604
  Gene Symbol: SETD7
  Gene Name: SET domain containing (lysine methyltransferase) 7
  ENSP ID: ENSP00000384336
MTDYRTGSAQSPTPPQTDLRGTLFTEKRTDGGSSSSLMAAPWRGIMWMMPCRAREFTLTKMGEFSRARM

SEQ ID NO: 78331 - protein, 135 aa, Homo sapiens
  Payload ID: 15604
  Gene Symbol: SETD7
  Gene Name: SET domain containing (lysine methyltransferase) 7
  ENSP ID: ENSP00000385913
MDSDDEMVEEAVEGHLDDDGLPHGFCTVTYSSTDRFEGNFVHGEKNGRGKFFFFDGSTLEGYYVDDALQGQGVYTYEDGGVLQGTYVDGELNGPAQEYDTDGRLIFKGQYKDNIRHGVCWIYYPVSRVTVHSAGK

SEQ ID NO: 78332 - protein, 362 aa, Homo sapiens
  Payload ID: 15604
  Gene Symbol: SETD7
  Gene Name: SET domain containing (lysine methyltransferase) 7
  ENSP ID: ENSP00000427300
MDSDDEMVEEAVEGHLDDDGLPHGFCTVTYSSTDRFEGNFVHGEKNGRGKFFFFDGSTLEGYYVDDALQGQGVYTYEDGGVLQGTYVDGELNGPAQEYDTDGRLIFKGQYKDNIRHGVCWIYYPDGGSLVGEVNEDGEMTGEKIAYVYPDERTALYGKFIDGEMIEGKLATLMSTEEGRPHFELMPGNSVYHFDKSTSSCISTNALLPDPYESERVYVAESLISSAGEGLFSKVAVGPNTVMSFYNGVRITHQEVDSRDWALNGNTLSLDEETVIDVPEPYNHVSKYCASLGHKANHSFTPNCIYDIGQKNHLGTCKRSRFGAPLPKIPHLDQAPWVEHRKAGIPLYSAAQGLMLIMMFVSN

SEQ ID NO: 78333 - protein, 46 aa, Homo sapiens
  Payload ID: 15604
  Gene Symbol: SETD7
  Gene Name: SET domain containing (lysine methyltransferase) 7
  ENSP ID: ENSP00000476302
MMQPQEAELCRPHDATASGKCNCVHGESSAARTITSPGDRFIMKGL

SEQ ID NO: 78334 - protein, 94 aa, Homo sapiens
  Payload ID: 15604
  Gene Symbol: SETD7
  Gene Name: SET domain containing (lysine methyltransferase) 7
  ENSP ID: ENSP00000476712
MMQPQGHLDDDGLPHGFCTVTYSSTDRFEGNFVHGEKNGRGKFFFFDGSTLEGYYVDDALQGQGVYTYEDGGVLQGTYVDGELNGPAQEYDTDG

SEQ ID NO: 78335 - protein, 322 aa, Homo sapiens
  Payload ID: 15605
  Gene Symbol: SETD8
  Gene Name: SET domain containing (lysine methyltransferase) 8
  ENSP ID: ENSP00000332995
MVERRGPGRPRTDGENVFTGQSKIYSYMSPNKCSGMRFPLQEENSVTHHEVKCQGKPLAGIYRKREEKRNAGNAVRSAMKSEEQKIKDARKGPLVPFPNQKSEAAEPPKTPPSSCDSTNAAIAKQALKKPIKGKQAPRKKAQGKTQQNRKLTDFYPVRRSSRKSKAELQSEERKRIDELIESGKEEGMKIDLIDGKGRGVIATKQFSRGDFVVEYHGDLIEITDAKKREALYAQDPSTGCYMYYFQYLSKTYCVDATRETNRLGRLINHSKCGNCQTKLHDIDGVPHLILIASRDIAAGEELLYDYGDRSKASIEAHPWLKH

SEQ ID NO: 78336 - protein, 352 aa, Homo sapiens
  Payload ID: 15605
  Gene Symbol: SETD8
  Gene Name: SET domain containing (lysine methyltransferase) 8
  Uniprot ID: Q9NQR1
  ENSP ID: ENSP00000384629
MARGRKMSKPRAVEAAAAAAAVAATAPGPEMVERRGPGRPRTDGENVFTGQSKIYSYMSPNKCSGMRFPLQEENSVTHHEVKCQGKPLAGIYRKREEKRNAGNAVRSAMKSEEQKIKDARKGPLVPFPNQKSEAAEPPKTPPSSCDSTNAAIAKQALKKPIKGKQAPRKKAQGKTQQNRKLTDFYPVRRSSRKSKAELQSEERKRIDELIESGKEEGMKIDLIDGKGRGVIATKQFSRGDFVVEYHGDLIEITDAKKREALYAQDPSTGCYMYYFQYLSKTYCVDATRETNRLGRLINHSKCGNCQTKLHDIDGVPHLILIASRDIAAGEELLYDYGDRSKASIEAHPWLKH

SEQ ID NO: 78337 - protein, 91 aa, Homo sapiens
  Payload ID: 15605
  Gene Symbol: SETD8
  Gene Name: SET domain containing (lysine methyltransferase) 8
  ENSP ID: ENSP00000406830
MARGERIYRAVKDLFLHEPEQMLWNAFPPSGRELSYTSRSQMPGETISRNLQETRREKKCWERSTERHEVRGTEDQRRQERSPGTFSKPKI

SEQ ID NO: 78338 - protein, 299 aa, Homo sapiens
  Payload ID: 15605
  Gene Symbol: SETD8
  Gene Name: SET domain containing (lysine methyltransferase) 8
  ENSP ID: ENSP00000413811
MRWLWLLLFPDSPVTLREVLPSQPWRLRGCSDLRGENVFTGQSKIYSYMSPNKCSGMRFPLQEENSVTHHEVKCQGKPLAGIYRKREEKRNAGNAVRSAMKSEEQKIKDARKGPLVPFPNQKSEAAEPPKTPPSSCDSTNAAIAKQALKKPIKGKQAPRKKAQGKTQQNRKLTDFYPVRRSSRKSKAELQSEERKRIDELIESGKEEGMKIDLIDGKGRGVIATKQFSRGDFVVEYHGDLIEITDAKKREALYAQDPSTGCYMYYFQYLSKTYCVDATRETNRLGRLINHSKCGNCQTK

SEQ ID NO: 78339 - protein, 1707 aa, Homo sapiens
  Payload ID: 15606
  Gene Symbol: SETD1A
  Gene Name: SET domain containing 1A
  Uniprot ID: O15047
  ENSP ID: ENSP00000262519
MDQEGGGDGQKAPSFQWRNYKLIVDPALDPALRRPSQKVYRYDGVHFSVNDSKYIPVEDLQDPRCHVRSKNRDFSLPVPKFKLDEFYIGQIPLKEVTFARLNDNVRETFLKDMCRKYGEVEEVEILLHPRTRKHLGLARVLFTSTRGAKETVKNLHLTSVMGNIIHAQLDIKGQQRMKYYELIVNGSYTPQTVPTGGKALSEKFQGSGAATETAESRRRSSSDTAAYPAGTTAVGTPGNGTPCSQDTSFSSSRQDTPSSFGQFTPQSSQGTPYTSRGSTPYSQDSAYSSSTTSTSFKPRRSENSYQDAFSRRHFSASSASTTASTAIAATTAATASSSASSSSLSSSSSSSSSSSSSQFRSSDANYPAYYESWNRYQRHTSYPPRRATREEPPGAPFAENTAERFPPSYTSYLPPEPSRPTDQDYRPPASEAPPPEPPEPGGGGGGGGPSPEREEVRTSPRPASPARSGSPAPETTNESVPFAQHSSLDSRIEMLLKEQRSKFSFLASDTEEEEENSSMVLGARDTGSEVPSGSGHGPCTPPPAPANFEDVAPTGSGEPGATRESPKANGQNQASPCSSGDDMEISDDDRGGSPPPAPTPPQQPPPPPPPPPPPPPYLASLPLGYPPHQPAYLLPPRPDGPPPPEYPPPPPPPPHIYDFVNSLELMDRLGAQWGGMPMSFQMQTQMLTRLHQLRQGKGLIAASAGPPGGAFGEAFLPFPPPQEAAYGLPYALYAQGQEGRGAYSREAYHLPMPMAAEPLPSSSVSGEEARLPPREEAELAEGKTLPTAGTVGRVLAMLVQEMKSIMQRDLNRKMVENVAFGAFDQWWESKEEKAKPFQNAAKQQAKEEDKEKTKLKEPGLLSLVDWAKSGGTTGIEAFAFGSGLRGALRLPSFKVKRKEPSEISEASEEKRPRPSTPAEEDEDDPEQEKEAGEPGRPGTKPPKRDEERGKTQGKHRKSFALDSEGEEASQESSSEKDEEDDEEDEEDEDREEAVDTTKKETEVSDGEDEESDSSSKCSLYADSDGENDSTSDSESSSSSSSSSSSSSSSSSSSSSSSSESSSEDEEEEERPAALPSASPPPREVPVPTPAPVEVPVPERVAGSPVTPLPEQEASPARPAGPTEESPPSAPLRPPEPPAGPPAPAPRPDERPSSPIPLLPPPKKRRKTVSFSAIEVVPAPEPPPATPPQAKFPGPASRKAPRGVERTIRNLPLDHASLVKSWPEEVSRGGRSRAGGRGRLTEEEEAEPGTEVDLAVLADLALTPARRGLPALPAVEDSEATETSDEAERPRPLLSHILLEHNYALAVKPTPPAPALRPPEPVPAPAALFSSPADEVLEAPEVVVAEAEEPKPQQLQQQREEGEEEGEEEGEEEEEESSDSSSSSDGEGALRRRSLRSHARRRRPPPPPPPPPPRAYEPRSEFEQMTILYDIWNSGLDSEDMSYLRLTYERLLQQTSGADWLNDTHWVHHTITNLTTPKRKRRPQDGPREHQTGSARSEGYYPISKKEKDKYLDVCPVSARQLEGVDTQGTNRVLSERRSEQRRLLSAIGTSAIMDSDLLKLNQLKFRKKKLRFGRSRIHEWGLFAMEPIAADEMVIEYVGQNIRQMVADMREKRYVQEGIGSSYLFRVDHDTIIDATKCGNLARFINHCCTPNCYAKVITIESQKKIVIYSKQPIGVDEEITYDYKFPLEDNKIPCLCGTESCRGSLN

SEQ ID NO: 78340 - protein, 247 aa, Homo sapiens
  Payload ID: 15606
  Gene Symbol: SETD1A
  Gene Name: SET domain containing 1A
  ENSP ID: ENSP00000391408
MDQEGGGDGQKAPSFQWRNYKLIVDPALDPALRRPSQKVYRYDGVHFSVNDSKYIPVEDLQDPRCHVRSKNRDFSLPVPKFKLDEFYIGQIPLKEVTFARLNDNVRETFLKDMCRKYGEVEEVEILLHPRTRKHLGLARVLFTSTRGAKETVKNLHLTSVMGNIIHAQLDIKGQQRMKYYELIVNGSYTPQTVPTGGKALSEKFQGSGAATETAESRRRSSSDTAAYPAGTTAVGTPGNGTPCSQDT

SEQ ID NO: 78341 - protein, 1923 aa, Homo sapiens [sequence omitted]

SEQ ID NO: 78342 - protein, 1923 aa, Homo sapiens
  Payload ID: 15607
  Gene Symbol: SETD1B
  Gene Name: SET domain containing 1B
  Uniprot ID: Q9UPS6
  ENSP ID: ENSP00000442924
MENSHPPHHHHQQPPPQPGPSGERRNHHWRSYKLMIDPALKKGHHKLYRYDGQHFSLAMSSNRPVEIVEDPRVVGIWTKNKELELSVPKFKIDEFYVGPVPPKQVTFAKLNDNIRENFLRDMCKKYGEVEEVEILYNPKTKKHLGIAKVVFATVRGAKDAVQHLHSTSVMGNIIHVELDTKGETRMRFYELLVTGRYTPQTLPVGELDAVSPIVNETLQLSDALKRLKDGGLSAGCGSGSSSVTPNSGGTPFSQDTAYSSCRLDTPNSYGQGTPLTPRLGTPFSQDSSYSSRQPTPSYLFSQDPAVTFKARRHESKFTDAYNRRHEHHYVHNSPAVTAVAGATAAFRGSSDLPFGAVGGTGGSSGPPFKAQPQDSATFAHTPPPAQATPAPGFKSAFSPYQTPVAHFPPPPEEPTATAAFGARDSGEFRRAPAPPPLPPAEPLAKEKPGTPPGPPPPDTNSMELGGRPTFGWSPEPCDSPGTPTLESSPAGPEKPHDSLDSRIEMLLKEQRTKLLFLREPDSDTELQMEGSPISSSSSQLSPLAPFGTNSQPGFRGPTPPSSRPSSTGLEDISPTPLPDSDEDEELDLGLGPRPPPEPGPPDPAGLLSQTAEVALDLVGDRTPTSEKMDEGQQSSGEDMEISDDEMPSAPITSADCPKPMVVTPGAAAVAAPSVLAPTLPLPPPPGFPPLPPPPPPPPPQPGFPMPPPLPPPPPPPPPAHPAVTVPPPPLPAPPGVPPPPILPPLPPFPPGLFPVMQVDMSHVLGGQWGGMPMSFQMQTQVLSRLMTGQGACPYPPFMAAAAAAASAGLQFVNLPPYRGPFSLSNSGPGRGQHWPPLPKFDPSVPPPGYMPRQEDPHKATVDGVLLVVLKELKAIMKRDLNRKMVEVVAFRAFDEWWDKKERMAKASLTPVKSGEHKDEDRPKPKDRIASCLLESWGKGEGLGYEGLGLGIGLRGAIRLPSFKVKRKEPPDTTSSGDQKRLRPSTSVDEEDEESERERDRDMADTPCELAKRDPKGVGVRRRPARPLELDSGGEEDEKESLSEEQESTEEEEEAEEEEEEEDDDDDDSDDRDESENDDEDTALSEASEKDEGDSDEEETVSIVTSKAEATSSSESSESSEFESSSESSPSSSEDEEEVVAREEEEEEEEEEMVAEESMASAGPEDFEQDGEEAALAPGAPAVDSLGMEEEVDIETEAVAPEERPSMLDEPPLPVGVEEPADSREPPEEPGLSQEGAMLLSPEPPAKEVEARPPLSPERAPEHDLEVEPEPPMMLPLPLQPPLPPPRPPRPPSPPPEPETTDASHPSVPPEPLAEDHPPHTPGLCGSLAKSQSTETVPATPGGEPPLSGGSSGLSLSSPQVPGSPFSYPAPSPSLSSGGLPRTPGRDFSFTPTFSEPSGPLLLPVCPLPTGRRDERSGPLASPVLLETGLPLPLPLPLPLPLALPAVLRAQARAPTPLPPLLPAPLASCPPPMKRKPGRPRRSPPSMLSLDGPLVRPPAGAALGRELLLLPGQPQTPVFPSTHDPRTVTLDFRNAGIPAPPPPLPPQPPPPPPPPPVEPTKLPFKELDNQWPSEAIPPGPRGRDEVTEEYMELAKSRGPWRRPPKKRHEDLVPPAGSPELSPPQPLFRPRSEFEEMTILYDIWNGGIDEEDIRFLCVTYERLLQQDNGMDWLNDTLWVYHPSTSLSSAKKKKRDDGIREHVTGCARSEGFYTIDKKDKLRYLNSSRASTDEPPADTQGMSIPAQPHASTRAGSERRSEQRRLLSSFTGSCDSDLLKFNQLKFRKKKLKFCKSHIHDWGLFAMEPIAADEMVIEYVGQNIRQVIADMREKRYEDEGIGSSYMFRVDHDTIIDATKCGNFARFINHSCNPNCYAKVITVESQKKIVIYSKQHINVNEEITYDYKFPIEDVKIPCLCGSENCRGTLN

SEQ ID NO: 78343 - protein, 1966 aa, Homo sapiens
  Payload ID: 15607
  Gene Symbol: SETD1B
  Gene Name: SET domain containing 1B
  Uniprot ID: Q9UPS6
  ENSP ID: ENSP00000474253
MENSHPPHHHHQQPPPQPGPSGERRNHHWRSYKLMIDPALKKGHHKLYRYDGQHFSLAMSSNRPVEIVEDPRVVGIWTKNKELELSVPKFKIDEFYVGPVPPKQVTFAKLNDNIRENFLRDMCKKYGEVEEVEILYNPKTKKHLGIAKVVFATVRGAKDAVQHLHSTSVMGNIIHVELDTKGETRMRFYELLVTGRYTPQTLPVGELDAVSPIVNETLQLSDALKRLKDGGLSAGCGSGSSSVTPNSGGTPFSQDTAYSSCRLDTPNSYGQGTPLTPRLGTPFSQDSSYSSRQPTPSYLFSQDPAVTFKARRHESKFTDAYNRRHEHHYVHNSPAVTAVAGATAAFRGSSDLPFGAVGGTGGSSGPPFKAQPQDSATFAHTPPPAQATPAPGFKSAFSPYQTPVAHFPPPPEEPTATAAFGARDSGEFRRAPAPPPLPPAEPLAKEKPGTPPGPPPPDTNSMELGGRPTFGWSPEPCDSPGTPTLESSPAGPEKPHDSLDSRIEMLLKEQRTKLLFLREPDSDTELQMEGSPISSSSSQLSPLAPFGTNSQPGFRGPTPPSSRPSSTGLEDISPTPLPDSDEDEELDLGLGPRPPPEPGPPDPAGLLSQTAEVALDLVGDRTPTSEKMDEGQQSSGEDMEISDDEMPSAPITSADCPKPMVVTPGAAAVAAPSVLAPTLPLPPPPGFPPLPPPPPPPPPQPGFPMPPPLPPPPPPPPPAHPAVTVPPPPLPAPPGVPPPPILPPLPPFPPGLFPVMQVDMSHVLGGQWGGMPMSFQMQTQVLSRLMTGQGACPYPPFMAAAAAAASAGLQFVNLPPYRGPFSLSNSGPGRGQHWPPLPKFDPSVPPPGYMPRQEDPHKATVDGVLLVVLKELKAIMKRDLNRKMVEVVAFRAFDEWWDKKERMAKASLTPVKSGEHKDEDRPKPKDRIASCLLESWGKGEGLGYEGLGLGIGLRGAIRLPSFKVKRKEPPDTTSSGDQKRLRPSTSVDEEDEESERERDRDMADTPCELAKRDPKGVGVRRRPARPLELDSGGEEDEKESLSASSSSSASSSSGSSTTSPSSSASDKEEEQESTEEEEEAEEEEEEEVPRSQLSSSSTSSTSDKDDDDDDSDDRDESENDDEDTALSEASEKDEGDSDEEETVSIVTSKAEATSSSESSESSEFESSSESSPSSSEDEEEVVAREEEEEEEEEEMVAEESMASAGPEDFEQDGEEAALAPGAPAVDSLGMEEEVDIETEAVAPEERPSMLDEPPLPVGVEEPADSREPPEEPGLSQEGAMLLSPEPPAKEVEARPPLSPERAPEHDLEVEPEPPMMLPLPLQPPLPPPRPPRPPSPPPEPETTDASHPSVPPEPLAEDHPPHTPGLCGSLAKSQSTETVPATPGGEPPLSGGSSGLSLSSPQVPGSPFSYPAPSPSLSSGGLPRTPGRDFSFTPTFSEPSGPLLLPVCPLPTGRRDERSGPLASPVLLETGLPLPLPLPLPLPLALPAVLRAQARAPTPLPPLLPAPLASCPPPMKRKPGRPRRSPPSMLSLDGPLVRPPAGAALGRELLLLPGQPQTPVFPSTHDPRTVTLDFRNAGIPAPPPPLPPQPPPPPPPPPVEPTKLPFKELDNQWPSEAIPPGPRGRDEVTEEYMELAKSRGPWRRPPKKRHEDLVPPAGSPELSPPQPLFRPRSEFEEMTILYDIWNGGIDEEDIRFLCVTYERLLQQDNGMDWLNDTLWVYHPSTSLSSAKKKKRDDGIREHVTGCARSEGFYTIDKKDKLRYLNSSRASTDEPPADTQGMSIPAQPHASTRAGSERRSEQRRLLSSFTGSCDSDLLKFNQLKFRKKKLKFCKSHIHDWGLFAMEPIAADEMVIEYVGQNIRQVIADMREKRYEDEGIGSSYMFRVDHDTIIDATKCGNFARFINHSCNPNCYAKVITVESQKKIVIYSKQHINVNEEITYDYKFPIEDVKIPCLCGSENCRGTLN

SEQ ID NO: 78344 - protein, 1966 aa, Homo sapiens; identical to SEQ ID NO: 78343
  Payload ID: 15607
  Gene Symbol: SETD1B
  Gene Name: SET domain containing 1B
  Uniprot ID: Q9UPS6
  ENSP ID: ENSP00000481531

SEQ ID NO: 78345 - protein, 1365 aa, Homo sapiens
  Payload ID: 15608
  Gene Symbol: SETD2
  Gene Name: SET domain containing 2
  ENSP ID: ENSP00000332415
  MOD_RES (1)..(1): Any amino acid
XSSPPKSRVELGKIHFKKHLLHVTSRPLLATTTAVASPPTHAAPLPAVIAESTTVDSPPSSPPPPPPPAQATTLSSPAPVTEPVALPHTPITVLMAAPVPLPVDVAVRSLKEPPIIIVPESLEADTKQDTISNSLEEHVTQILNEQADISSKKEDSHIGKDEEIPDSSKISLSCKKTGSKKKSSQSEGIFLGSESDEDSVRTSSSQRSHDLKFSASIEKERDFKKSSAPLKSEDLGKPSRSKTDRDDKYFSYSKLERDTRYVSSRCRSERERRRSRSHSRSERGSRTNLSYSRSERSHYYDSDRRYHRSSPYRERTRYSRPYTDNRARESSDSEEEYKKTYSRRTSSHSSSYRDLRTSSYSKSDRDCKTETSYLEMERRGKYSSKLERESKRTSENEAIKRCCSPPNELGFRRGSSYSKHDSSASRYKSTLSKPIPKSDKFKNSFCCTELNEEIKQSHSFSLQTPCSKGSELRMINKNPEREKAGSPAPSNRLNDSPTLKKLDELPIFKSEFITHDSHDSIKELDSLSKVKNDQLRSFCPIELNINGSPGAESDLATFCTSKTDAVLMTSDDSVTGSELSPLVKACMLSSNGFQNISRCKEKDLDDTCMLHKKSESPFRETEPLVSPHQDKLMSMPVMTVDYSKTVVKEPVDTRVSCCKTKDSDIYCTLNDSNPSLCNSEAENIEPSVMKISSNSFMNVHLESKPVICDSRNLTDHSKFACEEYKQSIGSTSSASVNHFDDLYQPIGSSGIASSLQSLPPGIKVDSLTLLKCGENTSPVLDAVLKSKKSSEFLKHAGKETIVEVGSDLPDSGKGFASRENRRNNGLSGKCLQEAQEEGNSILPERRGRPEISLDERGEGGHVHTSDDSEVVFSSCDLNLTMEDSDGVTYALKCDSSGHAPEIVSTVHEDYSGSSESSNDESDSEDTDSDDSSIPRNRLQSVVVVPKNSTLPMEETSPCSSRSSQSYRHYSDHWEDERLESRRHLYEEKFESIASKACPQTDKFFLHKGTEKNPEISFTQSSRKQIDNRLPELSHPQSDGVDSTSHTDVKSDPLGHPNSEETVKAKIPSRQQEELPIYSSDFEDVPNKSWQQTTFQNRPDSRLGKTELSFSSSCEIPHVDGLHSSEELRNLGWDFSQEKPSTTYQQPDSSYGACGGHKYQQNAEQYGGTRDYWQGNGYWDPRSGRPPGTGVVYDRTQGQVPDSLTDDREEEENWDQQDGSHFSDQSDKFLLSLQKDKGSVQAPEISSNSIKDTLAVNEKKDFSKNLEKNDIKDRGPLKKRRQEIESDSESDGELQDRKKVRVEVEQGETSVPPGSALVGPSCVMDDFRDPQRWKECAKQGKMPCYFDLIEENVYLTERMKYLWVLY

SEQ ID NO: 78346 - protein, 2564 aa, Homo sapiens
  Payload ID: 15608
  Gene Symbol: SETD2
  Gene Name: SET domain containing 2
  Uniprot ID: Q9BYW2
  ENSP ID: ENSP00000386759
MKQLQPQPPPKMGDFYDPEHPTPEEEENEAKIENVQKTGFIKGPMFKGVASSRFLPKGTKTKVNLEEQGRQKVSFSFSLTKKTLQNRFLTALGNEKQSDTPNPPAVPLQVDSTPKMKMEIGDTLSTAEESSPPKSRVELGKIHFKKHLLHVTSRPLLATTTAVASPPTHAAPLPAVIAESTTVDSPPSSPPPPPPPAQATTLSSPAPVTEPVALPHTPITVLMAAPVPLPVDVAVRSLKEPPIIIVPESLEADTKQDTISNSLEEHVTQILNEQADISSKKEDSHIGKDEEIPDSSKISLSCKKTGSKKKSSQSEGIFLGSESDEDSVRTSSSQRSHDLKFSASIEKERDFKKSSAPLKSEDLGKPSRSKTDRDDKYFSYSKLERDTRYVSSRCRSERERRRSRSHSRSERGSRTNLSYSRSERSHYYDSDRRYHRSSPYRERTRYSRPYTDNRARESSDSEEEYKKTYSRRTSSHSSSYRDLRTSSYSKSDRDCKTETSYLEMERRGKYSSKLERESKRTSENEAIKRCCSPPNELGFRRGSSYSKHDSSASRYKSTLSKPIPKSDKFKNSFCCTELNEEIKQSHSFSLQTPCSKGSELRMINKNPEREKAGSPAPSNRLNDSPTLKKLDELPIFKSEFITHDSHDSIKELDSLSKVKNDQLRSFCPIELNINGSPGAESDLATFCTSKTDAVLMTSDDSVTGSELSPLVKACMLSSNGFQNISRCKEKDLDDTCMLHKKSESPFRETEPLVSPHQDKLMSMPVMTVDYSKTVVKEPVDTRVSCCKTKDSDIYCTLNDSNPSLCNSEAENIEPSVMKISSNSFMNVHLESKPVICDSRNLTDHSKFACEEYKQSIGSTSSASVNHFDDLYQPIGSSGIASSLQSLPPGIKVDSLTLLKCGENTSPVLDAVLKSKKSSEFLKHAGKETIVEVGSDLPDSGKGFASRENRRNNGLSGKCLQEAQEEGNSILPERRGRPEISLDERGEGGHVHTSDDSEVVFSSCDLNLTMEDSDGVTYALKCDSSGHAPEIVSTVHEDYSGSSESSNDESDSEDTDSDDSSIPRNRLQSVVVVPKNSTLPMEETSPCSSRSSQSYRHYSDHWEDERLESRRHLYEEKFESIASKACPQTDKFFLHKGTEKNPEISFTQSSRKQIDNRLPELSHPQSDGVDSTSHTDVKSDPLGHPNSEETVKAKIPSRQQEELPIYSSDFEDVPNKSWQQTTFQNRPDSRLGKTELSFSSSCEIPHVDGLHSSEELRNLGWDFSQEKPSTTYQQPDSSYGACGGHKYQQNAEQYGGTRDYWQGNGYWDPRSGRPPGTGVVYDRTQGQVPDSLTDDREEEENWDQQDGSHFSDQSDKFLLSLQKDKGSVQAPEISSNSIKDTLAVNEKKDFSKNLEKNDIKDRGPLKKRRQEIESDSESDGELQDRKKVRVEVEQGETSVPPGSALVGPSCVMDDFRDPQRWKECAKQGKMPCYFDLIEENVYLTERKKNKSHRDIKRMQCECTPLSKDERAQGEIACGEDCLNRLLMIECSSRCPNGDYCSNRRFQRKQHADVEVILTEKKGWGLRAAKDLPSNTFVLEYCGEVLDHKEFKARVKEYARNKNIHYYFMALKNDEIIDATQKGNCSRFMNHSCEPNCETQKWTVNGQLRVGFFTTKLVPSGSELTFDYQFQRYGKEAQKCFCGSANCRGYLGGENRVSIRAAGGKMKKERSRKKDSVDGELEALMENGEGLSDKNQVLSLSRLMVRIETLEQKLTCLELIQNTHSQSCLKSFLERHGLSLLWIWMAELGDGRESNQKLQEEIIKTLEHLPIPTKNMLEESKVLPIIQRWSQTKTAVPPLSEGDGYSSENTSRAHTPLNTPDPSTKLSTEADTDTPKKLMFRRLKIISENSMDSAISDATSELEGKDGKEDLDQLENVPVEEEEELQSQQLLPQQLPECKVDSETNIEASKLPTSEPEADAEIEPKESNGTKLEEPINEETPSQDEEEGVSDVESERSQEQPDKTVDISDLATKLLDSWKDLKEVYRIPKKSQTEKENTTTERGRDAVGFRDQTPAPKTPNRSRERDPDKQTQNKEKRKRRSSLSPPSSAYERGTKRPDDRYDTPTSKKKVRIKDRNKLSTEERRKLFEQEVAQREAQKQQQQMQNLGMTSPLPYDSLGYNAPHHPFAGYPPGYPMQAYVDPSNPNAGKVLLPTPSMDPVCSPAPYDHAQPLVGHSTEPLSAPPPVPVVPHVAAPVEVSSSQYVAQSDGVVHQDSSVAVLPVPAPGPVQGQNYSVWDSNQQSVSVQQQYSPAQSQATIYYQGQTCPTVYGVTSPYSQTTPPIVQSYAQPSLQYIQGQQIFTAHPQGVVVQPAAAVTTIVAPGQPQPLQPSEMVVTNNLLDLPPPSPPKPKTIVLPPNWKTARDPEGKIYYYHVITRQTQWDPPTWESPGDDASLEHEAEMDLGTPTYDENPMKASKKPKTAEADTSSELAKKSKEVFRKEMSQFIVQCLNPYRKPDCKVGRITTTEDFKHLARKLTHGVMNKELKYCKNPEDLECNENVKHKTKEYIKKYMQKFGAVYKPKEDTELE

SEQ ID NO: 78347 - protein, 1290 aa, Homo sapiens
  Payload ID: 15608
  Gene Symbol: SETD2
  Gene Name: SET domain containing 2
  ENSP ID: ENSP00000388349
  MOD_RES (1)..(1): Any amino acid
XSHIGKDEEIPDSSKISLSCKKTGSKKKSSQSEGIFLGSESDEDSVRTSSSQRSHDLKFSASIEKERDFKKSSAPLKSEDLGKPSRSKTDRDDKYFSYSKLERDTRYVSSRCRSERERRRSRSHSRSERGSRTNLSYSRSERSHYYDSDRRYHRSSPYRERTRYSRPYTDNRARESSDSEEEYKKTYSRRTSSHSSSYRDLRTSSYSKSDRDCKTETSYLEMERRGKYSSKLERESKRTSENEAIKRCCSPPNELGFRRGSSYSKHDSSASRYKSTLSKPIPKSDKFKNSFCCTELNEEIKQSHSFSLQTPCSKGSELRMINKNPEREKAGSPAPSNRLNDSPTLKKLDELPIFKSEFITHDSHDSIKELDSLSKVKNDQLRSFCPIELNINGSPGAESDLATFCTSKTDAVLMTSDDSVTGSELSPLVKACMLSSNGFQNISRCKEKDLDDTCMLHKKSESPFRETEPLVSPHQDKLMSMPVMTVDYSKTVVKEPVDTRVSCCKTKDSDIYCTLNDSNPSLCNSEAENIEPSVMKISSNSFMNVHLESKPVICDSRNLTDHSKFACEEYKQSIGSTSSASVNHFDDLYQPIGSSGIASSLQSLPPGIKVDSLTLLKCGENTSPVLDAVLKSKKSSEFLKHAGKETIVEVGSDLPDSGKGFASRENRRNNGLSGKCLQEAQEEGNSILPERRGRPEISLDERGEGGHVHTSDDSEVVFSSCDLNLTMEDSDGVTYALKCDSSGHAPEIVSTVHEDYSGSSESSNDESDSEDTDSDDSSIPRNRLQSVVVVPKNSTLPMEETSPCSSRSSQSYRHYSDHWEDERLESRRHLYEEKFESIASKACPQTDKFFLHKGTEKNPEISFTQSSRKQIDNRLPELSHPQSDGVDSTSHTDVKSDPLGHPNSEETVKAKIPSRQQEELPIYSSDFEDVPNKSWQQTTFQNRPDSRLGKTELSFSSSCEIPHVDGLHSSEELRNLGWDFSQEKPSTTYQQPDSSYGACGGHKYQQNAEQYGGTRDYWQGNGYWDPRSGRPPGTGVVYDRTQGQVPDSLTDDREEEENWDQQDGSHFSDQSDKFLLSLQKDKGSVQAPEISSNSIKDTLAVNEKKDFSKNLEKNDIKDRGPLKKRRQEIESDSESDGELQDRKKVRVEVEQGETSVPPGSALVGPSCVMDDFRDPQRWKECAKQGKMPCYFDLIEENVYLTERKKNKSHRDIKRMQCECTPLSKDERAQGEIACGEDCLNRLLMIECSSRCPNGDYCSNRRFQRKQHADVEVILTEKKGWGLRAAKDLPS

SEQ ID NO: 78348 - protein, 1675 aa, Homo sapiens
  Payload ID: 15608
  Gene Symbol: SETD2
  Gene Name: SET domain containing 2
  ENSP ID: ENSP00000411901
  MOD_RES (1)..(1): Any amino acid
XRSKTDRDDKYFSYSKLERDTRYVSSRCRSERERRRSRSHSRSERGSRTNLSYSRSERSHYYDSDRRYHRSSPYRERTRYSRPYTDNRARESSDSEEEYKKTYSRRTSSHSSSYRDLRTSSYSKSDRDCKTETSYLEMERRGKYSSKLERESKRTSENEAIKRCCSPPNELGFRRGSSYSKHDSSASRYKSTLSKPIPKSDKFKNSFCCTELNEEIKQSHSFSLQTPCSKGSELRMINKNPEREKAGSPAPSNRLNDSPTLKKLDELPIFKSEFITHDSHDSIKELDSLSKVKNDQLRSFCPIELNINGSPGAESDLATFCTSKTDAVLMTSDDSVTGSELSPLVKACMLSSNGFQNISRCKEKDLDDTCMLHKKSESPFRETEPLVSPHQDKLMSMPVMTVDYSKTVVKEPVDTRVSCCKTKDSDIYCTLNDSNPSLCNSEAENIEPSVMKISSNSFMNVHLESKPVICDSRNLTDHSKFACEEYKQSIGSTSSASVNHFDDLYQPIGSSGIASSLQSLPPGIKVDSLTLLKCGENTSPVLDAVLKSKKSSEFLKHAGKETIVEVGSDLPDSGKGFASRENRRNNGLSGKCLQEAQEEGNSILPERRGRPEISLDERGEGGHVHTSDDSEVVFSSCDLNLTMEDSDGVTYALKCDSSGHAPEIVSTVHEDYSGSSESSNDESDSEDTDSDDSSIPRNRLQSVVVVPKNSTLPMEETSPCSSRSSQSYRHYSDHWEDERLESRRHLYEEKFESIASKACPQTDKFFLHKGTEKNPEISFTQSSRKQIDNRLPELSHPQSDGVDSTSHTDVKSDPLGHPNSEETVKAKIPSRQQEELPIYSSDFEDVPNKSWQQTTFQNRPDSRLGKTELSFSSSCEIPHVDGLHSSEELRNLGWDFSQEKPSTTYQQPDSSYGACGGHKYQQNAEQYGGTRDYWQGNGYWDPRSGRPPGTGVVYDRTQGQVPDSLTDDREEEENWDQQDGSHFSDQSDKFLLSLQKDKGSVQAPEISSNSIKDTLAVNEKKDFSKNLEKNDIKDRGPLKKRRQEIESDSESDGELQDRKKVRVEVEQGETSVPPGSALVGPSCVMDDFRDPQRWKECAKQGKMPCYFDLIEENVYLTERKKNKSHRDIKRMQCECTPLSKDERAQGEIACGEDCLNRLLMIECSSRCPNGDYCSNRRFQRKQHADVEVILTEKKGWGLRAAKDLPSNTFVLEYCGEVLDHKEFKARVKEYARNKNIHYYFMALKNDEIIDATQKGNCSRFMNHSCEPNCETQKWTVNGQLRVGFFTTKLVPSGSELTFDYQFQRYGKEAQKCFCGSANCRGYLGGENRVSIRAAGGKMKKERSRKKDSVDGELEALMENGEGLSDKNQVLSLSRLMVRIETLEQKLTCLELIQNTHSQSCLKSFLERHGLSLLWIWMAELGDGRESNQKLQEEIIKTLEHLPIPTKNMLEESKVLPIIQRWSQTKTAVPPLSEGDGYSSENTSRAHTPLNTPDPSTKLSTEADTDTPKKLMFRRLKIISENSMDSAISDATSELEGKDGKEDLDQLENVPVEEEEELQSQQLLPQQLPECKVDSETNIEASKLPTSEPEADAEIEPKESNGTKLEEPINEETPSQDEEEGVSDVESERSQEQPDKTVDISDLATKLLDSWKDLKEVYRIPKKSQTEKENTRNQPE

SEQ ID NO: 78349 - protein, 1340 aa, Homo sapiens
  Payload ID: 15608
  Gene Symbol: SETD2
  Gene Name: SET domain containing 2
  ENSP ID: ENSP00000416401
MFKGVASSRFLPKGTKTKVNLEEQGRQKVSFSFSLTKKTLQNRFLTALGNEKQSDTPNPPAVPLQVDSTPKMKMEIGDTLSTAEESSPPKSRVELGKIHFKKHLLHVTSRPLLATTTAVASPPTHAAPLPAVIAESTTVDSPPSSPPPPPPPAQATTLSSPAPVTEPVALPHTPITVLMAAPVPLPVDVAVRSLKEPPIIIVPESLEADTKQDTISNSLEEHVTQILNEQADISSKKEDSHIGKDEEIPDSSKISLSCKKTGSKKKSSQSEGIFLGSESDEDSVRTSSSQRSHDLKFSASIEKERDFKKSSAPLKSEDLGKPSRSKTDRDDKYFSYSKLERDTRYVSSRCRSERERRRSRSHSRSERGSRTNLSYSRSERSHYYDSDRRYHRSSPYRERTRYSRPYTDNRARESSDSEEEYKKTYSRRTSSHSSSYRDLRTSSYSKSDRDCKTETSYLEMERRGKYSSKLERESKRTSENEAIKRCCSPPNELGFRRGSSYSKHDSSASRYKSTLSKPIPKSDKFKNSFCCTELNEEIKQSHSFSLQTPCSKGSELRMINKNPEREKAGSPAPSNRLNDSPTLKKLDELPIFKSEFITHDSHDSIKELDSLSKVKNDQLRSFCPIELNINGSPGAESDLATFCTSKTDAVLMTSDDSVTGSELSPLVKACMLSSNGFQNISRCKEKDLDDTCMLHKKSESPFRETEPLVSPHQDKLMSMPVMTVDYSKTVVKEPVDTRVSCCKTKDSDIYCTLNDSNPSLCNSEAENIEPSVMKISSNSFMNVHLESKPVICDSRNLTDHSKFACEEYKQSIGSTSSASVNHFDDLYQPIGSSGIASSLQSLPPGIKVDSLTLLKCGENTSPVLDAVLKSKKSSEFLKHAGKETIVEVGSDLPDSGKGFASRENRRNNGLSGKCLQEAQEEGNSILPERRGRPEISLDERGEGGHVHTSDDSEVVFSSCDLNLTMEDSDGVTYALKCDSSGHAPEIVSTVHEDYSGSSESSNDESDSEDTDSDDSSIPRNRLQSVVVVPKNSTLPMEETSPCSSRSSQSYRHYSDHWEDERLESRRHLYEEKFESIASKACPQTDKFFLHKGTEKNPEISFTQSSRKQIDNRLPELSHPQSDGVDSTSHTDVKSDPLGHPNSEETVKAKIPSRQQEELPIYSSDFEDVPNKSWQQTTFQNRPDSRLGKTELSFSSSCEIPHVDGLHSSEELRNLGWDFSQEKPSTTYQQPDSSYGACGGHKYQQNAEQYGGTRDYWQGNGYWDPRSGRPPGTGVVYDRTQGQVPDSLTDDREEEENWDQQDGSHFSDQSDKFLLSLQKDKGSVQAPEISSNSIKDTLAVN

SEQ ID NO: 78350 - protein, 594 aa, Homo sapiens
  Payload ID: 15609
  Gene Symbol: SETD3
  Gene Name: SET domain containing 3
  Uniprot ID: Q86TU7
  ENSP ID: ENSP00000327436
MGKKSRVKTQKSGTGATATVSPKEILNLTSELLQKCSSPAPGPGKEWEEYVQIRTLVEKIRKKQKGLSVTFDGKREDYFPDLMKWASENGASVEGFEMVNFKEEGFGLRATRDIKAEELFLWVPRKLLMTVESAKNSVLGPLYSQDRILQAMGNIALAFHLLCERASPNSFWQPYIQTLPSEYDTPLYFEEDEVRYLQSTQAIHDVFSQYKNTARQYAYFYKVIQTHPHANKLPLKDSFTYEDYRWAVSSVMTRQNQIPTEDGSRVTLALIPLWDMCNHTNGLITTGYNLEDDRCECVALQDFRAGEQIYIFYGTRSNAEFVIHSGFFFDNNSHDRVKIKLGVSKSDRLYAMKAEVLARAGIPTSSVFALHFTEPPISAQLLAFLRVFCMTEEELKEHLLGDSAIDRIFTLGNSEFPVSWDNEVKLWTFLEDRASLLLKTYKTTIEEDKSVLKNHDLSVRAKMAIKLRLGEKEILEKAVKSAAVNREYYRQQMEEKAPLPKYEESNLGLLESSVGDSRLPLVLRNLEEEAGVQDALNIREAISKAKATENGLVNGENSIPNGTRSENESLNQESKRAVEDAKGSSSDSTAGVKE

SEQ ID NO: 78351 - protein, 296 aa, Homo sapiens
  Payload ID: 15609
  Gene Symbol: SETD3
  Gene Name: SET domain containing 3
  Uniprot ID: Q86TU7
  ENSP ID: ENSP00000327910
MGKKSRVKTQKSGTGATATVSPKEILNLTSELLQKCSSPAPGPGKEWEEYVQIRTLVEKIRKKQKGLSVTFDGKREDYFPDLMKWASENGASVEGFEMVNFKEEGFGLRATRDIKAEELFLWVPRKLLMTVESAKNSVLGPLYSQDRILQAMGNIALAFHLLCERASPNSFWQPYIQTLPSEYDTPLYFEEDEVRYLQSTQAIHDVFSQYKNTARQYAYFYKVIQTHPHANKLPLKDSFTYEDYRWAVSSVMTRQNQIPTEDGSRVTLALIPLWDMCNHTNGLTPEDSFALAVASA

SEQ ID NO: 78352 - protein, 81 aa, Homo sapiens
  Payload ID: 15609
  Gene Symbol: SETD3
  Gene Name: SET domain containing 3
  ENSP ID: ENSP00000350174
MGKKSRVKTQKSGTGATATVSPKEILNLTSELLQKCSSPAPGPGKEWEEYVQIRTLVEKIRKKQKGRRIVFMGSTKIANDC

SEQ ID NO: 78353 - protein, 81 aa, Homo sapiens; identical to SEQ ID NO: 78352
  Payload ID: 15609
  Gene Symbol: SETD3
  Gene Name: SET domain containing 3
  ENSP ID: ENSP00000396870

SEQ ID NO: 78354 - protein, 81 aa, Homo sapiens; identical to SEQ ID NO: 78352
  Payload ID: 15609
  Gene Symbol: SETD3
  Gene Name: SET domain containing 3
  ENSP ID: ENSP00000398966

SEQ ID NO: 78355 - protein, 292 aa, Homo sapiens
  Payload ID: 15609
  Gene Symbol: SETD3
  Gene Name: SET domain containing 3
  ENSP ID: ENSP00000408602
MGKKSRVKTQKSGTGATATVSPKEILNLTSELLQKCSSPAPGPGKEWEEYVQIRTLVEKIRKKQKGLSVTFDGKREDYFPDLMKWASENGASVEGFEMVNFKEEGFGLRATRDIKAEELFLWVPRKLLMTVESAKNSVLGPLYSQDRILQAMGNIALAFHLLCERASPNSFWQPYIQTLPSEYDTPLYFEEDEVRYLQSTQAIHDVFSQYKNTARQYAYFYKVIQTHPHANKLPLKDSFTYEDYRWAVSSVMTRQNQIPTEDGSRVTLALIPLWDMCNHTNGLVTTSSPVLC

SEQ ID NO: 78356 - protein, 81 aa, Homo sapiens; identical to SEQ ID NO: 78352
  Payload ID: 15609
  Gene Symbol: SETD3
  Gene Name: SET domain containing 3
  ENSP ID: ENSP00000486445

SEQ ID NO: 78357 - protein, 440 aa, Homo sapiens
  Payload ID: 15610
  Gene Symbol: SETD4
  Gene Name: SET domain containing 4
  Uniprot ID: Q9NVD3
  ENSP ID: ENSP00000329189
MQKGKGRTSRIRRRKLCGSSESRGVNESHKSEFIELRKWLKARKFQDSNLAPACFPGTGRGLMSQTSLQEGQMIISLPESCLLTTDTVIRSYLGAYITKWKPPPSPLLALCTFLVSEKHAGHRSLWKPYLEILPKAYTCPVCLEPEVVNLLPKSLKAKAEEQRAHVQEFFASSRDFFSSLQPLFAEAVDSIFSYSALLWAWCTVNTRAVYLRPRQRECLSAEPDTCALAPYLDLLNHSPHVQVKAAFNEETHSYEIRTTSRWRKHEEVFICYGPHDNQRLFLEYGFVSVHNPHACVYVSREILVKYLPSTDKQMDKKISILKDHGYIENLTFGWDGPSWRLLTALKLLCLEAEKFTCWKKVLLGEVISDTNEKTSLDIAQKICYYFIEETNAVLQKVSHMKDEKEALINQLTLVESLWTEELKILRASAETLHSLQTAFT

SEQ ID NO: 78358 - protein, 283 aa, Homo sapiens
  Payload ID: 15610
  Gene Symbol: SETD4
  Gene Name: SET domain containing 4
  ENSP ID: ENSP00000382152
MNESHKSEFIELRKWLKARKFQDSNLAPACFPGTGRGLMSQTSLQEGQMIISLPESCLLTTDTVIRSYLGAYITKWKPPPSPLLALCTFLVSEKHAGHRSLWKPYLEILPKAYTCPVCLEPEVVNLLPKSLKAKAEEQRAHVQEFFASSRDFFSSLQPLFAEAVDSIFSYSALLWAWCTVNTRAVYLRPRQRECLSAEPDTCALAPYLDLLNHSPHVQVKAAFNEETHSYEIRTTSRWRKHEEVFICYGPHDNQRLFLEYGFVSVHNPHACVYVSRGWNQLCS

SEQ ID NO: 78359 - protein, 283 aa, Homo sapiens; identical to SEQ ID NO: 78358
  Payload ID: 15610
  Gene Symbol: SETD4
  Gene Name: SET domain containing 4
  ENSP ID: ENSP00000382156

SEQ ID NO: 78360 - protein, 307 aa, Homo sapiens
  Payload ID: 15610
  Gene Symbol: SETD4
  Gene Name: SET domain containing 4
  Uniprot ID: Q9NVD3
  ENSP ID: ENSP00000382158
MQKGKGRTSRIRRRKLCGSSESRGVNESHKSEFIELRKWLKARKFQDSNLAPACFPGTGRGLMSQTSLQEGQMIISLPESCLLTTDTVIRSYLGAYITKWKPPPSPLLALCTFLVSEKHAGHRSLWKPYLEILPKAYTCPVCLEPEVVNLLPKSLKAKAEEQRAHVQEFFASSRDFFSSLQPLFAEAVDSIFSYSALLWAWCTVNTRAVYLRPRQRECLSAEPDTCALAPYLDLLNHSPHVQVKAAFNEETHSYEIRTTSRWRKHEEVFICYGPHDNQRLFLEYGFVSVHNPHACVYVSRGWNQLCS

SEQ ID NO: 78361 - protein, 307 aa, Homo sapiens; identical to SEQ ID NO: 78360
  Payload ID: 15610
  Gene Symbol: SETD4
  Gene Name: SET domain containing 4
  Uniprot ID: Q9NVD3
  ENSP ID: ENSP00000382159

SEQ ID NO: 78362 - protein, 416 aa, Homo sapiens
  Payload ID: 15610
  Gene Symbol: SETD4
  Gene Name: SET domain containing 4
  Uniprot ID: Q9NVD3
  ENSP ID: ENSP00000382161
MNESHKSEFIELRKWLKARKFQDSNLAPACFPGTGRGLMSQTSLQEGQMIISLPESCLLTTDTVIRSYLGAYITKWKPPPSPLLALCTFLVSEKHAGHRSLWKPYLEILPKAYTCPVCLEPEVVNLLPKSLKAKAEEQRAHVQEFFASSRDFFSSLQPLFAEAVDSIFSYSALLWAWCTVNTRAVYLRPRQRECLSAEPDTCALAPYLDLLNHSPHVQVKAAFNEETHSYEIRTTSRWRKHEEVFICYGPHDNQRLFLEYGFVSVHNPHACVYVSREILVKYLPSTDKQMDKKISILKDHGYIENLTFGWDGPSWRLLTALKLLCLEAEKFTCWKKVLLGEVISDTNEKTSLDIAQKICYYFIEETNAVLQKVSHMKDEKEALINQLTLVESLWTEELKILRASAETLHSLQTAFT

SEQ ID NO: 78363 - protein, 440 aa, Homo sapiens; identical to SEQ ID NO: 78357
  Payload ID: 15610
  Gene Symbol: SETD4
  Gene Name: SET domain containing 4
  Uniprot ID: Q9NVD3
  ENSP ID: ENSP00000382163

SEQ ID NO: 78364 - protein, 67 aa, Homo sapiens
  Payload ID: 15610
  Gene Symbol: SETD4
  Gene Name: SET domain containing 4
  ENSP ID: ENSP00000392463
MQKGKGRTSRIRRRKLCGSSESRGVNESHKSEFIELRKWLKARKFQDSNLAPACFPGTGRGLMSQTS

SEQ ID NO: 78365 - protein, 70 aa, Homo sapiens
  Payload ID: 15610
  Gene Symbol: SETD4
  Gene Name: SET domain containing 4
  ENSP ID: ENSP00000394822
MNESHKSEFIELRKWLKARKFQDSNLAPACFPGTGRGLMSQTSLQEGQMIISLPESCLLTTDTVIRSYLG

SEQ ID NO: 78366 - protein, 225 aa, Homo sapiens
  Payload ID: 15610
  Gene Symbol: SETD4
  Gene Name: SET domain containing 4
  ENSP ID: ENSP00000396837
MQKGKGRTSRIRRRKLCGSSESRGVNESHKSEFIELRKWLKARKFQDSNLAPACFPGTGRGLMSQTSLQEGQMIISLPESCLLTTDTVIRSYLGAYITKWKPPPSPLLALCTFLVSEKHAGHRSLWKPYLEILPKAYTCPVCLEPEVVNLLPKSLKAKAEEQRAHVQEFFASSRDFFSSLQPLFAEAVDSIFSYSALLWAWCTVNTRAVYLRPRQRECLSAEPDT

SEQ ID NO: 78367 - protein, 231 aa, Homo sapiens
  Payload ID: 15610
  Gene Symbol: SETD4
  Gene Name: SET domain containing 4
  ENSP ID: ENSP00000399998
MQKGKGRTSRIRRRKLCGSSESRGVNESHKSEFIELRKWLKARKFQDSNLAPACFPGTGRGLMSQTSLQEGQMIISLPESCLLTTDTVIRSYLGAYITKWKPPPSPLLALCTFLVSEKHAGHRSLWKPYLEILPKAYTCPVCLEPEVVNLLPKSLKAKAEEQRAHVQEFFASSRDFFSSLQPLFAEAVDSIFSYSALLWAWCTVNTRAVYLRPRQRECLSAEPDTCALAPY

SEQ ID NO: 78368 - protein, 124 aa, Homo sapiens
  Payload ID: 15610
  Gene Symbol: SETD4
  Gene Name: SET domain containing 4
  ENSP ID: ENSP00000413318
MNESHKSEFIELRKWLKARKFQDSNLAPACFPGTGRGLMSQTSLQEGQMIISLPESCLLTTDTVIRSYLGAYITKWKPPPSPLLALCTFLVSEKHAGHRSLWKPYLEILPKAYTCPVCLEPEVV

SEQ ID NO: 78369 - protein, 1344 aa, Homo sapiens
  Payload ID: 15611
  Gene Symbol: SETD5
  Gene Name: SET domain containing 5
  Uniprot ID: Q9C0A6
  ENSP ID: ENSP00000302028
MSRGKVIRLHRRKQDNISGGDSSATESWDEELSPSTVLYTATQHTPTSITLTVRRTKPKKRKKSPEKGRAAPKTKKIKAFREGSRKSLRMKNSPSEAQNLDENTTEGWENRIRLWTDQYEEAFTNQYSADVQNALEQHLHSSKEFVGKPTILDTINKTELACNNTVIGSQMQLQLGRVTRVQKHRKILRAARDLALDTLIIEYRGKVMLRQQFEVNGHFFKKPYPFVLFYSKFNGVEMCVDARTFGNDARFIRRSCTPNAEVRHMIADGMIHLCIYAVSAITKDAEVTIAFDYEYSNCNYKVDCACHKGNRNCPIQKRNPNATELPLLPPPPSLPTIGAETRRRKARRKELEMEQQNEASEENNDQQSQEVPEKVTVSSDHEEVDNPEEKPEEEKEEVIDDQENLAHSRRTREDRKVEAIMHAFENLEKRKKRRDQPLEQSNSDVEITTTTSETPVGEETKTEAPESEVSNSVSNVTIPSTPQSVGVNTRRSSQAGDIAAEKLVPKPPPAKPSRPRPKSRISRYRTSSAQRLKRQKQANAQQAELSQAALEEGGSNSLVTPTEAGSLDSSGENRPLTGSDPTVVSITGSHVNRAASKYPKTKKYLVTEWLNDKAEKQECPVECPLRITTDPTVLATTLNMLPGLIHSPLICTTPKHYIRFGSPFIPERRRRPLLPDGTFSSCKKRWIKQALEEGMTQTSSVPQETRTQHLYQSNENSSSSSICKDNADLLSPLKKWKSRYLMEQNVTKLLRPLSPVTPPPPNSGSKSPQLATPGSSHPGEEECRNGYSLMFSPVTSLTTASRCNTPLQFELCHRKDLDLAKVGYLDSNTNSCADRPSLLNSGHSDLAPHPSLGPTSETGFPSRSGDGHQTLVRNSDQAFRTEFNLMYAYSPLNAMPRADGLYRGSPLVGDRKPLHLDGGYCSPAEGFSSRYEHGLMKDLSRGSLSPGGERACEGVPSAPQNPPQRKKVSLLEYRKRKQEAKENSAGGGGDSAQSKSKSAGAGQGSSNSVSDTGAHGVQGSSARTPSSPHKKFSPSHSSMSHLEAVSPSDSRGTSSSHCRPQENISSRWMVPTSVERLREGGSIPKVLRSSVRVAQKGEPSPTWESNITEKDSDPADGEGPETLSSALSKGATVYSPSRYSYQLLQCDSPRTESQSLLQQSSSPFRGHPTQSPGYSYRTTALRPGNPPSHGSSESSLSSTSYSSPAHPVSTDSLAPFTGTPGYFSSQPHSGNSTGSNLPRRSCPSSAASPTLQGPSDSPTSDSVSQSSTGTLSSTSFPQNSRSSLPSDLRTISLPSAGQSAVYQASRVSAVSNSQHYPHRGSGGVHQYRLQPLQGSGVKTQTGLS

SEQ ID NO: 78370 - protein, 911 aa, Homo sapiens
  Payload ID: 15611
  Gene Symbol: SETD5
  Gene Name: SET domain containing 5
  ENSP ID: ENSP00000382593
  MOD_RES (1)..(1): Any amino acid
XVEMCVDARTFGNDARFIRRSCTPNAEVRHMIADGMIHLCIYAVSAITKDAEVTIAFDYEYSNCNYKVDCACHKGNRNCPIQKRNPNATELPLLPPPPSLPTIGAETRRRKARRKELEMEQQNEASEENNDQQSQEVPEKVTVSSDHEEVDNPEEKPEEEKEEVIDDQENLAHSRRTREDRKVEAIMHAFENLEKRKKRRDQPLEQSNSDVEITTTTSETPVGEETKTEAPESEVSNSVSNVTIPSTPQSVGVNTRRSSQAGDIAAEKLVPKPPPAKPSRPRPKSRISRYRTSSAQRLKRQKQANAQQAELSQAALEEGGSNSLVTPTEAGSLDSSGENRPLTGSDPTVVSITGSHVNRAASKYPKTKKYLVTEWLNDKAEKQECPVECPLRITTDPTVLATTLNMLPGLIHSPLICTTPKHYIRFGSPFIPERRRRPLLPDGTFSSCKKRWIKQALEEGMTQTSSVPQETRTQHLYQSNENSSSSSICKDNADLLSPLKKWKSRYLMEQNVTKLLRPLSPVTPPPPNSGSKSPQLATPGSSHPGEEECRNGYSLMFSPVTSLTTASRCNTPLQFELCHRKDLDLAKVGYLDSNTNSCADRPSLLNSGHSDLAPHPSLGPTSETGFPSRSGDGHQTLVRNSDQAFRTEFNLMYAYSPLNAMPRADGLYRGSPLVGDRKPLHLDGGYCSPAEGFSSRYEHGLMKDLSRGSLSPGGERACEGVPSAPQNPPQRKKVSLLEYRKRKQEAKENSAGGGGDSAQSKSKSAGAGQGSSNSVSDTGAHGVQGSSARTPSSPHKKFSPSHSSMSHLEAVSPSDSRGTSSSHCRPQENISSRWMVPTSVERLREGGSIPKVLRSSVRVAQKGEPSPTWESNITEKDSDPADGEGPETLSSALSKGATVYSPSRYSYQICD

SEQ ID NO: 78371 - protein, 1442 aa, Homo sapiens
  Payload ID: 15611
  Gene Symbol: SETD5
  Gene Name: SET domain containing 5
  Uniprot ID: Q9C0A6
  ENSP ID: ENSP00000383939
MSIAIPLGVTTSDTSYSDMAAGSDPESVEASPAVNEKSVYSTHNYGTTQRHGCRGLPYATIIPRSDLNGLPSPVEERCGDSPNSEGETVPTWCPCGLSQDGFLLNCDKCRGMSRGKVIRLHRRKQDNISGGDSSATESWDEELSPSTVLYTATQHTPTSITLTVRRTKPKKRKKSPEKGRAAPKTKKIKNSPSEAQNLDENTTEGWENRIRLWTDQYEEAFTNQYSADVQNALEQHLHSSKEFVGKPTILDTINKTELACNNTVIGSQMQLQLGRVTRVQKHRKILRAARDLALDTLIIEYRGKVMLRQQFEVNGHFFKKPYPFVLFYSKFNGVEMCVDARTFGNDARFIRRSCTPNAEVRHMIADGMIHLCIYAVSAITKDAEVTIAFDYEYSNCNYKVDCACHKGNRNCPIQKRNPNATELPLLPPPPSLPTIGAETRRRKARRKELEMEQQNEASEENNDQQSQEVPEKVTVSSDHEEVDNPEEKPEEEKEEVIDDQENLAHSRRTREDRKVEAIMHAFENLEKRKKRRDQPLEQSNSDVEITTTTSETPVGEETKTEAPESEVSNSVSNVTIPSTPQSVGVNTRRSSQAGDIAAEKLVPKPPPAKPSRPRPKSRISRYRTSSAQRLKRQKQANAQQAELSQAALEEGGSNSLVTPTEAGSLDSSGENRPLTGSDPTVVSITGSHVNRAASKYPKTKKYLVTEWLNDKAEKQECPVECPLRITTDPTVLATTLNMLPGLIHSPLICTTPKHYIRFGSPFIPERRRRPLLPDGTFSSCKKRWIKQALEEGMTQTSSVPQETRTQHLYQSNENSSSSSICKDNADLLSPLKKWKSRYLMEQNVTKLLRPLSPVTPPPPNSGSKSPQLATPGSSHPGEEECRNGYSLMFSPVTSLTTASRCNTPLQFELCHRKDLDLAKVGYLDSNTNSCADRPSLLNSGHSDLAPHPSLGPTSETGFPSRSGDGHQTLVRNSDQAFRTEFNLMYAYSPLNAMPRADGLYRGSPLVGDRKPLHLDGGYCSPAEGFSSRYEHGLMKDLSRGSLSPGGERACEGVPSAPQNPPQRKKVSLLEYRKRKQEAKENSAGGGGDSAQSKSKSAGAGQGSSNSVSDTGAHGVQGSSARTPSSPHKKFSPSHSSMSHLEAVSPSDSRGTSSSHCRPQENISSRWMVPTSVERLREGGSIPKVLRSSVRVAQKGEPSPTWESNITEKDSDPADGEGPETLSSALSKGATVYSPSRYSYQLLQCDSPRTESQSLLQQSSSPFRGHPTQSPGYSYRTTALRPGNPPSHGSSESSLSSTSYSSPAHPVSTDSLAPFTGTPGYFSSQPHSGNSTGSNLPRRSCPSSAASPTLQGPSDSPTSDSVSQSSTGTLSSTSFPQNSRSSLPSDLRTISLPSAGQSAVYQASRVSAVSNSQHYPHRGSGGVHQYRLQPLQGSGVKTQTGLS

SEQ ID NO: 78372 - protein, 1461 aa, Homo sapiens
  Payload ID: 15611
  Gene Symbol: SETD5
  Gene Name: SET domain containing 5
  ENSP ID: ENSP00000384114
MSIAIPLGVTTSDTSYSDMAAGSDPESVEASPAVNEKSVYSTHNYGTTQRHGCRGLPYADHNYGAPPPPTPPASPPVQTIIPRSDLNGLPSPVEERCGDSPNSEGETVPTWCPCGLSQDGFLLNCDKCRGMSRGKVIRLHRRKQDNISGGDSSATESWDEELSPSTVLYTATQHTPTSITLTVRRTKPKKRKKSPEKGRAAPKTKKIKNSPSEAQNLDENTTEGWENRIRLWTDQYEEAFTNQYSADVQNALEQHLHSSKEFVGKPTILDTINKTELACNNTVIGSQMQLQLGRVTRVQKHRKILRAARDLALDTLIIEYRGKVMLRQQFEVNGHFFKKPYPFVLFYSKFNGVEMCVDARTFGNDARFIRRSCTPNAEVRHMIADGMIHLCIYAVSAITKDAEVTIAFDYEYSNCNYKVDCACHKGNRNCPIQKRNPNATELPLLPPPPSLPTIGAETRRRKARRKELEMEQQNEASEENNDQQSQEVPEKVTVSSDHEEVDNPEEKPEEEKEEVIDDQENLAHSRRTREDRKVEAIMHAFENLEKRKKRRDQPLEQSNSDVEITTTTSETPVGEETKTEAPESEVSNSVSNVTIPSTPQSVGVNTRRSSQAGDIAAEKLVPKPPPAKPSRPRPKSRISRYRTSSAQRLKRQKQANAQQAELSQAALEEGGSNSLVTPTEAGSLDSSGENRPLTGSDPTVVSITGSHVNRAASKYPKTKKYLVTEWLNDKAEKQECPVECPLRITTDPTVLATTLNMLPGLIHSPLICTTPKHYIRFGSPFIPERRRRPLLPDGTFSSCKKRWIKQALEEGMTQTSSVPQETRTQHLYQSNENSSSSSICKDNADLLSPLKKWKSRYLMEQNVTKLLRPLSPVTPPPPNSGSKSPQLATPGSSHPGEEECRNGYSLMFSPVTSLTTASRCNTPLQFELCHRKDLDLAKVGYLDSNTNSCADRPSLLNSGHSDLAPHPSLGPTSETGFPSRSGDGHQTLVRNSDQAFRTEFNLMYAYSPLNAMPRADGLYRGSPLVGDRKPLHLDGGYCSPAEGFSSRYEHGLMKDLSRGSLSPGGERACEGVPSAPQNPPQRKKVSLLEYRKRKQEAKENSAGGGGDSAQSKSKSAGAGQGSSNSVSDTGAHGVQGSSARTPSSPHKKFSPSHSSMSHLEAVSPSDSRGTSSSHCRPQENISSRWMVPTSVERLREGGSIPKVLRSSVRVAQKGEPSPTWESNITEKDSDPADGEGPETLSSALSKGATVYSPSRYSYQLLQCDSPRTESQSLLQQSSSPFRGHPTQSPGYSYRTTALRPGNPPSHGSSESSLSSTSYSSPAHPVSTDSLAPFTGTPGYFSSQPHSGNSTGSNLPRRSCPSSAASPTLQGPSDSPTSDSVSQSSTGTLSSTSFPQNSRSSLPSDLRTISLPSAGQSAVYQASRVSAVSNSQHYPHRGSGGVHQYRLQPLQGSGVKTQTGLS

SEQ ID NO: 78373 - protein, 1442 aa, Homo sapiens; identical to SEQ ID NO: 78371
  Payload ID: 15611
  Gene Symbol: SETD5
  Gene Name: SET domain containing 5
  Uniprot ID: Q9C0A6
  ENSP ID: ENSP00000385852

SEQ ID NO: 78374 - protein, 52 aa, Homo sapiens
  Payload ID: 15611
  Gene Symbol: SETD5
  Gene Name: SET domain containing 5
  ENSP ID: ENSP00000393221
MSIAIPLGVTTSDTSYSDMAAGSEKEVEAPYLSRRSGTTPGCESPAKETQGA

SEQ ID NO: 78375 - protein, 65 aa, Homo sapiens
  Payload ID: 15611
  Gene Symbol: SETD5
  Gene Name: SET domain containing 5
  ENSP ID: ENSP00000395959
MSIAIPLGVTTSDTSYSDMAAGSEVSCLGSEWKRAWSLGQCRRHFDHLTHCKCHVRFHGSIKRSN

SEQ ID NO: 78376 - protein, 52 aa, Homo sapiens; identical to SEQ ID NO: 78374
  Payload ID: 15611
  Gene Symbol: SETD5
  Gene Name: SET domain containing 5
  ENSP ID: ENSP00000397076

SEQ ID NO: 78377 - protein, 441 aa, Homo sapiens
  Payload ID: 15611
  Gene Symbol: SETD5
  Gene Name: SET domain containing 5
  ENSP ID: ENSP00000399993
  MOD_RES (1)..(1): Any amino acid
XNRAASKYPKTKKYLVTEWLNDKAEKQECPVECPLRITTDPTVLATTLNMLPGLIHSPLICTTPKHYIRFGSPFIPERRRRPLLPDGTFSSCKKRWIKQALEEGMTQTSSVPQETRTQHLYQSNENSSSSSICKDNADLLSPLKKWKSRYLMEQNVTKLLRPLSPVTPPPPNSGSKSPQLATPGSSHPGEEECRNGYSLMFSPVTSLTTASRCNTPLQFENISSPESSPAHRPESLSPELCHRKDLDLAKVGYLDSNTNSCADRPSLLNSGHSDLAPHPSLGPTSETGFPSRSGDGHQTLVRNSDQAFRTEFNLMYAYSPLNAMPRADGLYRGSPLVGDRKPLHLDGGYCSPAEGFSSRYEHGLMKDLSRGSLSPGGERACEGVPSAPQNPPQRKKVSLLEYRKRKQEAKENSAGGGGDSAQSKSKSAGAGQGSSNSVSDT

SEQ ID NO: 78378 - protein, 177 aa, Homo sapiens
  Payload ID: 15611
  Gene Symbol: SETD5
  Gene Name: SET domain containing 5
  ENSP ID: ENSP00000401554
  MOD_RES (1)..(1): Any amino acid
XEMCVDARTFGNDARFIRRSCTPNAEVRHMIADGMIHLCIYAVSAITKDAEVTIAFDYEYSNCNYKVDCACHKGNRNCPIQKRNPNATELPLLPPPPSLPTIGAETRRRKARRKELEMEQQNEASEENNDQQSQEVPEKVTVSSDHESLSTAEYCLYLKGSRQSRRKTRRRERRGYR

SEQ ID NO: 78379 - protein, 170 aa, Homo sapiens
  Payload ID: 15611
  Gene Symbol: SETD5
  Gene Name: SET domain containing 5
  ENSP ID: ENSP00000408837
MSRGKVIRLHRRKQDNISGGDSSATESWDEELSPSTVLYTATQHTPTSITLTVRRTKPKKRKKSPEKGRAAPKTKKIKNSPSEAQNLDENTTEGWENRIRLWTDQYEEAFTNQYSADVQNALEQHLHSSKEFVGKPTILDTINKTELACNNTVIGSQMQLQLGRVTRVQK

SEQ ID NO: 78380 - protein, 162 aa, Homo sapiens
  Payload ID: 15611
  Gene Symbol: SETD5
  Gene Name: SET domain containing 5
  ENSP ID: ENSP00000413786
MSIAIPLGVTTSDTSYSDMAAGSDPESVEASPAVNEKSVYSTHNYGTTQRHGCRGLPYATIIPRSDLNGLPSPVEERCGDSPNSEGETVPTWCPCGLSQDGFLLNCDKCRGMSRGKVIRLHRRKQDNISGGDSSATESWDEELSPSTVLYTATQHTPTSITL

SEQ ID NO: 78381 - protein, 473 aa, Homo sapiens
  Payload ID: 15612
  Gene Symbol: SETD6
  Gene Name: SET domain containing 6
  Uniprot ID: Q8TBK2
  ENSP ID: ENSP00000219315
MATQAKRPRVAGPVDGGDLDPVACFLSWCRRVGLELSPKVSERAGGRRTRGGARAALTSPPAQVAVSRQGTVAGYGMVARESVQAGELLFVVPRAALLSQHTCSIGGLLERERVALQSQSGWVPLLLALLHELQAPASRWRPYFALWPELGRLEHPMFWPEEERRCLLQGTGVPEAVEKDLANIRSEYQSIVLPFMEAHPDLFSLRVRSLELYHQLVALVMAYSFQEPLEEEEDEKEPNSPVMVPAADILNHLANHNANLEYSANCLRMVATQPIPKGHEIFNTYGQMANWQLIHMYGFVEPYPDNTDDTADIQMVTVREAALQGTKTEAERHLVYERWDFLCKLEMVGEEGAFVIGREEVLTEEELTTTLKVLCMPAEEFRELKDQDGGGDDKREEGSLTITNIPKLKASWRQLLQNSVLLTLQTYATDLKTDQGLLSNKEVYAKLSWREQQALQVRYGQKMILHQLLELTS

SEQ ID NO: 78382 - protein, 449 aa, Homo sapiens
  Payload ID: 15612
  Gene Symbol: SETD6
  Gene Name: SET domain containing 6
  Uniprot ID: Q8TBK2
  ENSP ID: ENSP00000310082
MATQAKRPRVAGPVDGGDLDPVACFLSWCRRVGLELSPKVAVSRQGTVAGYGMVARESVQAGELLFVVPRAALLSQHTCSIGGLLERERVALQSQSGWVPLLLALLHELQAPASRWRPYFALWPELGRLEHPMFWPEEERRCLLQGTGVPEAVEKDLANIRSEYQSIVLPFMEAHPDLFSLRVRSLELYHQLVALVMAYSFQEPLEEEEDEKEPNSPVMVPAADILNHLANHNANLEYSANCLRMVATQPIPKGHEIFNTYGQMANWQLIHMYGFVEPYPDNTDDTADIQMVTVREAALQGTKTEAERHLVYERWDFLCKLEMVGEEGAFVIGREEVLTEEELTTTLKVLCMPAEEFRELKDQDGGGDDKREEGSLTITNIPKLKASWRQLLQNSVLLTLQTYATDLKTDQGLLSNKEVYAKLSWREQQALQVRYGQKMILHQLLELTS

SEQ ID NO: 78383 - protein, 404 aa, Homo sapiens
  Payload ID: 15612
  Gene Symbol: SETD6
  Gene Name: SET domain containing 6
  ENSP ID: ENSP00000377809
MATQAKRPRVAGPVDGGDLDPVACFLSWCRRVGLELSPKVAVSRQGTVAGYGMVARESVQAGELLFVVPRAALLSQHTCSIGGLLERERVALQSQSGWVPLLLALLHELQAPASRWRPYFALWPELGRLEHPMFCLRVRSLELYHQLVALVMAYSFQEPLEEEEDEKEPNSPVMVPAADILNHLANHNANLEYSANCLRMVATQPIPKGHEIFNTYGQMANWQLIHMYGFVEPYPDNTDDTADIQMVTVREAALQGTKTEAERHLVYERWDFLCKLEMVGEEGAFVIGREEVLTEEELTTTLKVLCMPAEEFRELKDQDGGGDDKREEGSLTITNIPKLKASWRQLLQNSVLLTLQTYATDLKTDQGLLSNKEVYAKLSWREQQALQVRYGQKMILHQLLELTS

SEQ ID NO: 78384 - protein, 183 aa, Homo sapiens
  Payload ID: 15612
  Gene Symbol: SETD6
  Gene Name: SET domain containing 6
  ENSP ID: ENSP00000396437
MATQAKRPRVAGPVDGGDLDPVACFLSWCRRVGLELSPKSELRCRASRAGCHCCWRCSTSCRPRPHAGGPTLRSGPSWAAWSTRCSGTKTEAERHLVYERWDFLCKLEMVGEEGAFVIGREEVLTEEELTTTLKVLCMPAEEFRELKDQDGGGDDKREEGSLTITNIPKLKASWRQLLQNSVL

SEQ ID NO: 78385 - protein, 262 aa, Homo sapiens
  Payload ID: 15612
  Gene Symbol: SETD6
  Gene Name: SET domain containing 6
  ENSP ID: ENSP00000398033
MATQAKRPRVAGPVDGGDLDPVACFLSWCRRVGLELSPKVAVSRQGTVAGYGMVARESVQAGELLFVVPRAALLSQHTCSIGGLLERERVALQSQSGWVPLLLALLHELQAPASRWRPYFALWPELGRLEHPMFWPEEERRCLLQGTGVPEAVEKDLANIRSEYQSIVLPFMEAHPDLFSLRVRSLELYHQLVALVMAYSFQEPLEEEEDEKEPNSPVMVPAADILNHLANHNANLEYSAAWPQLLPFTSELSSDGSHSAHS

SEQ ID NO: 78386 - protein, 263 aa, Homo sapiens
  Payload ID: 15612
  Gene Symbol: SETD6
  Gene Name: SET domain containing 6
  ENSP ID: ENSP00000412858
VAGPVDGGDLDPVACFLSWCRRVGLELSPKVSERAGGRRTRGGARAALTSPPAQVAVSRQGTVAGYGMVARESVQAGELLFVVPRAALLSQHTCSIGGLLERERVALQSQSGWVPLLLALLHELQAPASRWRPYFALWPELGRLEHPMFWPEEERRCLLQGTGVPEAVEKDLANIRSEYQSIVLPFMEAHPDLFSLRVRSLELYHQLVALVMAYSFQEPLEEEEDEKEPNSPVMVPAADILNHLANHNANLEYSAMTQLTFRW

SEQ ID NO: 78387 - protein, 299 aa, Homo sapiens
  Payload ID: 15613
  Gene Symbol: SETD9
  Gene Name: SET domain containing 9
  Uniprot ID: Q8NE22
  ENSP ID: ENSP00000285947
MPGRLLRGLWQRWRRYKYRFVPWIALNLSHNPRTLRYVPEESKDKVISDEDVLGTLLKVFQALFLNDFNKQSEILSMLPESVKSKYQDLLAVEHQGVKLLENRHQQQSTFKPEEILYKTLGFSVAQATSSLISAGKGVFVTKGLVPKGAVVSMYPGTVYQKYEPIFFQSIGNPFIFRCLDGVLIDGNDKGISKVVYRSCNGRDRLGPLKMSDSTWLTSEIHNPLAVGQYVNNCSNDRAANVCYQEFDVPAVFPIELKQYLPNIAYSYDKQSPLRCVVLVALRDINQGEELFSNYYTIVS

SEQ ID NO: 78388 - protein, 39 aa, Homo sapiens
  Payload ID: 15613
  Gene Symbol: SETD9
  Gene Name: SET domain containing 9
  ENSP ID: ENSP00000398449
MPGRLLRGLWQRWRRYKYRFVPWIALNLSHNPRYSISEV

SEQ ID NO: 78389 - protein, 49 aa, Homo sapiens
  Payload ID: 15613
  Gene Symbol: SETD9
  Gene Name: SET domain containing 9
  ENSP ID: ENSP00000406183
MVGFGLGTLRYVPEESKDKVISDEDVLGTLLKVFQALFLNDFNKQSEIL

SEQ ID NO: 78390 - protein, 271 aa, Homo sapiens
  Payload ID: 15613
  Gene Symbol: SETD9
  Gene Name: SET domain containing 9
  Uniprot ID: Q8NE22
  ENSP ID: ENSP00000486609
MPGRLLRGLWQRWRRYKYRFVPWIALNLSHNPRTLRYVPEESKDKVISDEDVLGTLLKVFQALFLNDFNKQSEILSMLPESVKSKYQDLLAVEHQGVKLLENRHQQQSTFKPEEILYKTLGFSVAQATSSLISAGKGVFVTKGLVPKGAVVSMYPGTVYQKYEPIFFQSIGNPFIFRCLDGVLIDGNDKGISKVVYRSCNGRDRLGPLKMSDSTWLTSEIHNPLAVGQYVNNCSNDRAANVCYQEFDVPAVFPIELKQYLPNIAYSYDKQR

SEQ ID NO: 78391 - protein, 1291 aa, Homo sapiens
  Payload ID: 15614
  Gene Symbol: SETDB1
  Gene Name: SET domain, bifurcated 1
  Uniprot ID: Q15047
  ENSP ID: ENSP00000271640
MSSLPGCIGLDAATATVESEEIAELQQAVVEELGISMEELRHFIDEELEKMDCVQQRKKQLAELETWVIQKESEVAHVDQLFDDASRAVTNCESLVKDFYSKLGLQYRDSSSEDESSRPTEIIEIPDEDDDVLSIDSGDAGSRTPKDQKLREAMAALRKSAQDVQKFMDAVNKKSSSQDLHKGTLSQMSGELSKDGDLIVSMRILGKKRTKTWHKGTLIAIQTVGPGKKYKVKFDNKGKSLLSGNHIAYDYHPPADKLYVGSRVVAKYKDGNQVWLYAGIVAETPNVKNKLRFLIFFDDGYASYVTQSELYPICRPLKKTWEDIEDISCRDFIEEYVTAYPNRPMVLLKSGQLIKTEWEGTWWKSRVEEVDGSLVRILFLDDKRCEWIYRGSTRLEPMFSMKTSSASALEKKQGQLRTRPNMGAVRSKGPVVQYTQDLTGTGTQFKPVEPPQPTAPPAPPFPPAPPLSPQAGDSDLESQLAQSRKQVAKKSTSFRPGSVGSGHSSPTSPALSENVSGGKPGINQTYRSPLGSTASAPAPSALPAPPAPPVFHGMLERAPAEPSYRAPMEKLFYLPHVCSYTCLSRVRPMRNEQYRGKNPLLVPLLYDFRRMTARRRVNRKMGFHVIYKTPCGLCLRTMQEIERYLFETGCDFLFLEMFCLDPYVLVDRKFQPYKPFYYILDITYGKEDVPLSCVNEIDTTPPPQVAYSKERIPGKGVFINTGPEFLVGCDCKDGCRDKSKCACHQLTIQATACTPGGQINPNSGYQYKRLEECLPTGVYECNKRCKCDPNMCTNRLVQHGLQVRLQLFKTQNKGWGIRCLDDIAKGSFVCIYAGKILTDDFADKEGLEMGDEYFANLDHIESVENFKEGYESDAPCSSDSSGVDLKDQEDGNSGTEDPEESNDDSSDDNFCKDEDFSTSSVWRSYATRRQTRGQKENGLSETTSKDSHPPDLGPPHIPVPPSIPVGGCNPPSSEETPKNKVASWLSCNSVSEGGFADSDSHSSFKTNEGGEGRAGGSRMEAEKASTSGLGIKDEGDIKQAKKEDTDDRNKMSVVTESSRNYGYNPSPVKPEGLRRPPSKTSMHQSRRLMASAQSNPDDVLTLSSSTESEGESGTSRKPTAGQTSATAVDSDDIQTISSGSEGDDFEDKKNMTGPMKRQVAVKSTRGFALKSTHGIAIKSTNMASVDKGESAPVRKNTRQFYDGEESCYIIDAKLEGNLGRYLNHSCSPNLFVQNVFVDTHDLRFPWVAFFASKRIRAGTELTWDYNYEVGSVEGKELLCCCGAIECRGRLL

SEQ ID NO: 78392 - protein, 397 aa, Homo sapiens
  Payload ID: 15614
  Gene Symbol: SETDB1
  Gene Name: SET domain, bifurcated 1
  Uniprot ID: Q15047
  ENSP ID: ENSP00000357958
MSSLPGCIGLDAATATVESEEIAELQQAVVEELGISMEELRHFIDEELEKMDCVQQRKKQLAELETWVIQKESEVAHVDQLFDDASRAVTNCESLVKDFYSKLGLQYRDSSSEDESSRPTEIIEIPDEDDDVLSIDSGDAGSRTPKDQKLREAMAALRKSAQDVQKFMDAVNKKSSSQDLHKGTLSQMSGELSKDGDLIVSMRILGKKRTKTWHKGTLIAIQTVGPGKKYKVKFDNKGKSLLSGNHIAYDYHPPADKLYVGSRVVAKYKDGNQVWLYAGIVAETPNVKNKLRFLIFFDDGYASYVTQSELYPICRPLKKTWEDIEDISCRDFIEEYVTAYPNRPMVLLKSGQLIKTEWEGTWWKSRVEEVDGSLVRILFLVLFFSTILEAEVGGGGT

SEQ ID NO: 78393 - protein, 249 aa, Homo sapiens
  Payload ID: 15614
  Gene Symbol: SETDB1
  Gene Name: SET domain, bifurcated 1
  ENSP ID: ENSP00000357959
MSSLPGCIGLDAATATVESEEIAELQQAVVEELGISMEELRHFIDEELEKMDCVQQRKKQLAELETWVIQKESEVAHVDQLFDDASRAVTNCESLVKDFYSKLGLQYRDSSSEDESSRPTEIIEIPDEDDDVLSIDSGDAGSRTPKDQKLREAMAALRKSAQDVQKFMDAVNKKSSSQDLHKGTLSQMSGELSKDGDLIVSMRILGKKRTKTWHKGTLIAIQTVGFSFSLMMAMLPMSHSRNCIPFAGH

SEQ ID NO: 78394 - protein, 111 aa, Homo sapiens
  Payload ID: 15614
  Gene Symbol: SETDB1
  Gene Name: SET domain, bifurcated 1
  ENSP ID: ENSP00000357960
MSSLPGCIGLDAATATVESEEIAELQQAVVEELGISMEELRHFIDEELEKMDCVQQRKKQLAELETWVIQKESEVAHVDQLFDDASRTSTPSWDYNTGTVALRTNLPGLQK

SEQ ID NO: 78395 - protein, 1290 aa, Homo sapiens
  Payload ID: 15614
  Gene Symbol: SETDB1
  Gene Name: SET domain, bifurcated 1
  Uniprot ID: Q15047
  ENSP ID: ENSP00000357965
MSSLPGCIGLDAATATVESEEIAELQQAVVEELGISMEELRHFIDEELEKMDCVQQRKKQLAELETWVIQKESEVAHVDQLFDDASRAVTNCESLVKDFYSKLGLQYRDSSSEDESSRPTEIIEIPDEDDDVLSIDSGDAGSRTPKDQKLREAMAALRKSAQDVQKFMDAVNKKSSSQDLHKGTLSQMSGELSKDGDLIVSMRILGKKRTKTWHKGTLIAIQTVGPGKKYKVKFDNKGKSLLSGNHIAYDYHPPADKLYVGSRVVAKYKDGNQVWLYAGIVAETPNVKNKLRFLIFFDDGYASYVTQSELYPICRPLKKTWEDIEDISCRDFIEEYVTAYPNRPMVLLKSGQLIKTEWEGTWWKSRVEEVDGSLVRILFLDDKRCEWIYRGSTRLEPMFSMKTSSASALEKKQGQLRTRPNMGAVRSKGPVVQYTQDLTGTGTQFKPVEPPQPTAPPAPPFPPAPPLSPQAGDSDLESQLAQSRKQVAKKSTSFRPGSVGSGHSSPTSPALSENVSGGKPGINQTYRSPLGSTASAPAPSALPAPPAPPVFHGMLERAPAEPSYRAPMEKLFYLPHVCSYTCLSRVRPMRNEQYRGKNPLLVPLLYDFRRMTARRRVNRKMGFHVIYKTPCGLCLRTMQEIERYLFETGCDFLFLEMFCLDPYVLVDRKFQPYKPFYYILDITYGKEDVPLSCVNEIDTTPPPQVAYSKERIPGKGVFINTGPEFLVGCDCKDGCRDKSKCACHQLTIQATACTPGGQINPNSGYQYKRLEECLPTGVYECNKRCKCDPNMCTNRLVQHGLQVRLQLFKTQNKGWGIRCLDDIAKGSFVCIYAGKILTDDFADKEGLEMGDEYFANLDHIESVENFKEGYESDAPCSSDSSGVDLKDQEDGNSGTEDPEESNDDSSDDNFCKDEDFSTSSVWRSYATRRQTRGQKENGLSETTSKDSHPPDLGPPHIPVPPSIPVGGCNPPSSEETPKNKVASWLSCNSVSEGGFADSDSHSSFKTNEGGEGRAGGSRMEAEKASTSGLGIKDEGDIKQAKKEDTDDRNKMSVVTESSRNYGYNPSPVKPEGLRRPPSKTSMHQSRRLMASAQSNPDDVLTLSSSTESEGESGTSRKPTAGQTSATAVDSDDIQTISSGSEGDDFEDKKNMTGPMKRQVAVKSTRGFALKSTHGIAIKSTNMASVDKGESAPVRKNTRQFYDGEESCYIIDAKLEGNLGRYLNHSCSPNLFVQNVFVDTHDLRFPWVAFFASKIRAGTELTWDYNYEVGSVEGKELLCCCGAIECRGRLL

SEQ ID NO: 78396 - protein, 150 aa, Homo sapiens
  Payload ID: 15614
  Gene Symbol: SETDB1
  Gene Name: SET domain, bifurcated 1
  ENSP ID: ENSP00000407831
MCEVFGLWILEDKSMSSLPGCIGLDAATATVESEEIAELQQAVVEELGISMEELRHFIDEELEKMDCVQQRKKQLAELETWVIQKESEVAHVDQLFDDASRAVTNCESLVKDFYSKLGLQYRDSSSEDESSRPTEIIEIPDEDDDVLSID

SEQ ID NO: 78397 - protein, 156 aa, Homo sapiens
  Payload ID: 15614
  Gene Symbol: SETDB1
  Gene Name: SET domain, bifurcated 1
  ENSP ID: ENSP00000409379
MSSLPGCIGLDAATATVESEEIAELQQAVVEELGISMEELRHFIDEELEKMDCVQQRKKQLAELETWVIQKESEVAHVDQLFDDASRAVTNCESLVKDFYSKLGLQYRDSSSEDESSRPTEIIEIPDEDDDVLSIDSGDAGSRTPKDQKLREAMAA

SEQ ID NO: 78398 - protein, 1259 aa, Homo sapiens
  Payload ID: 15614
  Gene Symbol: SETDB1
  Gene Name: SET domain, bifurcated 1
  ENSP ID: ENSP00000432348
MSSLPGCIGLDAATATVESEEIAELQQAVVEELGISMEELRHFIDEELEKMDCVQQRKKQLAELETWVIQKESEVAHVDQLFDDASRAVTNCESLVKDFYSKLGLQYRDSSSEDESSRPTEIIEIPDEDDDVLSIDSGDAGSRTPKDQKLREAMAALRKSAQDVQKFMDAVNKKSSSQDLHKGTLSQMSGELSKDGDLIVSMRILGKKRTKTWHKGTLIAIQTVGPGKKYKVKFDNKGKSLLSGNHIAYDYHPPADKLYVGSRVVAKYKDGNQVWLYAGIVAETPNVKNKLRFLIFFDDGYASYVTQSELYPICRPLKKTWEDIEDISCRDFIEEYVTAYPNRPMVLLKSGQLIKTEWEGTWWKSRVEEVDGSLVRILFLDDKRCEWIYRGSTRLEPMFSMKTSSASALEKKQGQLRTRPNMGAVRSKGPVVQYTQDLTGTGTQFKPVEPPQPTAPPAPPFPPAPPLSPQAGDSDLESQLAQSRKQVAKKSTSFRPGSVGSGHSSPTSPALSENVSGGKPGINQTYRSPLGSTASAPAPSALPAPPAPPVFHGMLERAPAEPSYRAPMEKLFYLPHVCSYTCLSRVRPMRNEQYRGKNPLLVPLLYDFRRMTARRRVNRKMGFHVIYKTPCGLCLRTMQEIERYLFETGCDFLFLEMFCLDPYVLVDRKFQPYKPFYYILDITYGKEDVPLSCVNEIDTTPPPQVAYSKERIPGKGVFINTGPEFLVGCDCKDGCRDKSKCACHQLTIQATACTPGGQINPNSGYQYKRLEECLPTGVYECNKRCKCDPNMCTNRLVQHGLQVRLQLFKTQNKGWGIRCLDDIAKGSFVCIYAGKILTDDFADKEGLEMGDEYFANLDHIESVENFKEGYESDAPCSSDSSGVDLKDQEDGNSGTEDPEESNDDSSDDNFCKDEDFSTSSVWRSYATRRQTRGQKENGLSETTSKDSHPPDLGPPHIPVPPSIPVGGCNPPSSEETPKNKVASWLSCNSVSEGGFADSDSHSSFKTNEGGEGRAGGSRMEAEKASTSGLGIKDEGDIKQAKKEDTDDRNKMSVVTESSRNYGYNPSPVKPEGLRRPPSKTSMHQSRRLMASAQSNPDDVLTLSSSTESEGESGTSRKPTAGQTSATAVDSDDIQTISSGSEGDDFEDKKNMTGPMKRQVAVKSTRGFALKSTHGIAIKSTNMASVDKGESAPVRKNTRQFYDGEESCYIIDAKLEGNLGRYLNVRPLSPPLDAGLSHGPQISFNILYKPFSCYKLLISK

SEQ ID NO: 78399 - protein, 163 aa, Homo sapiens
  Payload ID: 15614
  Gene Symbol: SETDB1
  Gene Name: SET domain, bifurcated 1
  ENSP ID: ENSP00000435922
MSSLPGCIGLDAATATVESEEIAELQQAVVEELGISMEELRHFIDEELEKMDCVQQRKKQLAELETWVIQKESEVAHVDQLFDDASRAVTNCESLVKDFYSKLGLQYRDSSSEDESSRPTEIIEIPDEDDDVLSIDSGDAGSRTPKDQKLREAMAALRKSAQD

SEQ ID NO: 78400 - protein, 636 aa, Homo sapiens
  Payload ID: 15614
  Gene Symbol: SETDB1
  Gene Name: SET domain, bifurcated 1
  ENSP ID: ENSP00000436148
MSSLPGCIGLDAATATVESEEIAELQQAVVEELGISMEELRHFIDEELEKMDCVQQRKKQLAELETWVIQKESEVAHVDQLFDDASRAVTNCESLVKDFYSKLGLQYRDSSSEDESSRPTEIIEIPDEDDDVLSIDSGDAGSRTPKDQKLREAMAALRKSAQDVQKFMDAVNKKSSSQDLHKGTLSQMSGELSKDGDLIVSMRILGKKRTKTWHKGTLIAIQTVGPGKKYKVKFDNKGKSLLSGNHIAYDYHPPADKLYVGSRVVAKYKDGNQVWLYAGIVAETPNVKNKLRFLIFFDDGYASYVTQSELYPICRPLKKTWEDIEDISCRDFIEEYVTAYPNRPMVLLKSGQLIKTEWEGTWWKSRVEEVDGSLVRILFLDDKRCEWIYRGSTRLEPMFSMKTSSASALEKKQGQLRTRPNMGAVRSKGPVVQYTQDLTGTGTQFKPVEPPQPTAPPAPPFPPAPPLSPQAGDSESLESQLAQSRKQVAKKSTSFRPGSVGSGHSSPTSPALSENVSGGKPGINQTYRSPLGSTASAPAPSALPAPPAPPVFHGMLERAPAEPSYRAPMEKLFYLPHVCSYTCLSRVRPMRNEQYRGKNPLLVPLLYDFRRMTARRRVNRKMGFHVIYKTPCGLCL

SEQ ID NO: 78401 - protein, 548 aa, Homo sapiens
  Payload ID: 15615
  Gene Symbol: SETDB2
  Gene Name: SET domain, bifurcated 2
  ENSP ID: ENSP00000258672
MGEKNGDAKTFWMELEDDGKVDFIFEQVQNVLQSLKQKIKDGSATNKEYIQAMILVNEATIINSSTSIKDPMPVTQKEQENKSNAFPSTSCENSFPEDCTFLTTENKEILSLEDKVVDFREKDSSSNLSYQSHDCSGACLMKMPLNLKGENPLQLPIKCHFQRRHAKTNSHSSALHVSYKTPCGRSLRNVEEVFRYLLETECNFLFTDNFSFNTYVQLARNYPKQKEVVSDVDISNGVESVPISFCNEIDSRKLPQFKYRKTVWPRAYNLTNFSSMFTDSCDCSEGCIDITKCACLQLTARNAKTSPLSSDKITTGYKYKRLQRQIPTGIYECSLLCKCNRQLCQNRVVQHGPQVRLQVFKTEQKGWGVRCLDDIDRGTFVCIYSGRLLSRANTEKSYGIDENGRDENTMKNIFSKKRKLEVACSDCEVEVLPLGLETHPRTAKTEKCPPKFSNNPKELTVETKYDNISRIQYHSVIRDPESKTAIFQHNGKKMEFVSSESVTPEDNDGFKPPREHLNSKTKGAQSRLCFFCECLPLLPVSLSLAQYL

SEQ ID NO: 78402 - protein, 707 aa, Homo sapiens
  Payload ID: 15615
  Gene Symbol: SETDB2
  Gene Name: SET domain, bifurcated 2
  Uniprot ID: Q96T68
  ENSP ID: ENSP00000326477
MGEKNGDAKTFWMELEDDGKVDFIFEQVQNVLQSLKQKIKDGSATNKEYIQAMILVNEATIINSSTSIKDPMPVTQKEQENKSNAFPSTSCENSFPEDCTFLTTENKEILSLEDKVVDFREKDSSSNLSYQSHDCSGACLMKMPLNLKGENPLQLPIKCHFQRRHAKTNSHSSALHVSYKTPCGRSLRNVEEVFRYLLETECNFLFTDNFSFNTYVQLARNYPKQKEVVSDVDISNGVESVPISFCNEIDSRKLPQFKYRKTVWPRAYNLTNFSSMFTDSCDCSEGCIDITKCACLQLTARNAKTSPLSSDKITTGYKYKRLQRQIPTGIYECSLLCKCNRQLCQNRVVQHGPQVRLQVFKTEQKGWGVRCLDDIDRGTFVCIYSGRLLSRANTEKSYGIDENGRDENTMKNIFSKKRKLEVACSDCEVEVLPLGLETHPRTAKTEKCPPKFSNNPKELTVETKYDNISRIQYHSVIRDPESKTAIFQHNGKKMEFVSSESVTPEDNDGFKPPREHLNSKTKGAQKDSSSNHVDEFEDNLLIESDVIDITKYREETPPRSRCNQATTLDNQNIKKAIEVQIQKPQEGRSTACQRQQVFCDEELLSETKNTSSDSLTKFNKGNVFLLDATKEGNVGRFLNHSCCPNLLVQNVFVETHNRNFPLVAFFTNRYVKARTELTWDYGYEAGTVPEKEIFCQCGVNKCRKKIL

SEQ ID NO: 78403 - protein, 719 aa, Homo sapiens
  Payload ID: 15615
  Gene Symbol: SETDB2
  Gene Name: SET domain, bifurcated 2
  Uniprot ID: Q96T68
  ENSP ID: ENSP00000346175
MGEKNGDAKTFWMELEDDGKVDFIFEQVQNVLQSLKQKIKDGSATNKEYIQAMILVNEATIINSSTSIKGASQKEVNAQSSDPMPVTQKEQENKSNAFPSTSCENSFPEDCTFLTTENKEILSLEDKVVDFREKDSSSNLSYQSHDCSGACLMKMPLNLKGENPLQLPIKCHFQRRHAKTNSHSSALHVSYKTPCGRSLRNVEEVFRYLLETECNFLFTDNFSFNTYVQLARNYPKQKEVVSDVDISNGVESVPISFCNEIDSRKLPQFKYRKTVWPRAYNLTNFSSMFTDSCDCSEGCIDITKCACLQLTARNAKTSPLSSDKITTGYKYKRLQRQIPTGIYECSLLCKCNRQLCQNRVVQHGPQVRLQVFKTEQKGWGVRCLDDIDRGTFVCIYSGRLLSRANTEKSYGIDENGRDENTMKNIFSKKRKLEVACSDCEVEVLPLGLETHPRTAKTEKCPPKFSNNPKELTVETKYDNISRIQYHSVIRDPESKTAIFQHNGKKMEFVSSESVTPEDNDGFKPPREHLNSKTKGAQKDSSSNHVDEFEDNLLIESDVIDITKYREETPPRSRCNQATTLDNQNIKKAIEVQIQKPQEGRSTACQRQQVFCDEELLSETKNTSSDSLTKFNKGNVFLLDATKEGNVGRFLNHSCCPNLLVQNVFVETHNRNFPLVAFFTNRYVKARTELTWDYGYEAGTVPEKEIFCQCGVNKCRKKIL

SEQ ID NO: 78404 - protein, 719 aa, Homo sapiens
  Payload ID: 15615
  Gene Symbol: SETDB2
  Gene Name: SET domain, bifurcated 2
  ENSP ID: ENSP00000482240
MGKKPSDAKTFWMELEDDGKVDFIFEQVQNVLQSLKQKIKDGSATNKEYIQAMILVNEATIINSSTSIKGASQKEVNAQSSDPMPVTQKEQENKSNAFPSTSCENSFPEDCTFLTTENKEILSLEDKVVDFREKDSSSNLSYQSHDCSGACLMKMPLNLKGENPLQLPIKCHFQRRHAKTNSHSSALHVSYKTPCGRSLRNVEEVFRYLLETECNFLFTDNFSFNTYVQLARNYPKQKEVVSDVDISNGVESVPISFCNEIDSRKLPQFKYRKTVWPRAYNLTNFSSMFTDSCDCSEGCIDITKCACLQLTARNAKTSPLSSDKITTGYKYKRLQRQIPTGIYECSLLCKCNRQLCQNRVVQHGPQVRLQVFKTEQKGWGVRCLDDIDRGTFVCIYSGRLLSRANTEKSYGIDENGRDENTMKNIFSKKRKLEVACSDCEVEVLPLGLETHPRTAKTEKCPPKFSNNPKELTVETKYDNISRIQYHSVIRDPESKTAIFQHNGKKMEFVSSESVTPEDNDGFKPPREHLNSKTKGAQKDSSSNHVDEFEDNLLIESDVIDITKYREETPPRSRCNQATTLDNQNIKKAIEVQIQKPQEGRSTACQRQQVFCDEELLSETKNTSSDSLTKFNKGNVFLLDATKEGNVGRFLNHSCCPNLLVQNVFVETHNRNFPLVAFFTNRYVKARTELTWDYGYEAGTVPEKEIFCQCGVNKCRKKIL

SEQ ID NO: 78405 - protein, 277 aa, Homo sapiens
  Payload ID: 15616
  Gene Symbol: SET
  Gene Name: SET nuclear proto-oncogene
  Uniprot ID: Q01105
  ENSP ID: ENSP00000318012
MSAPAAKVSKKELNSNHDGADETSEKEQQEAIEHIDEVQNEIDRLNEQASEEILKVEQKYNKLRQPFFQKRSELIAKIPNFWVTTFVNHPQVSALLGEEDEEALHYLTRVEVTEFEDIKSGYRIDFYFDENPYFENKVLSKEFHLNESGDPSSKSTEIKWKSGKDLTKRSSQTQNKASRKRQHEEPESFFTWFTDHSDAGADELGEVIKDDIWPNPLQYYLVPDMDDEEGEGEEDDDDDEEEEGLEDIDEEGDEDEGEEDEDDDEGEEGEEDEGEDD

SEQ ID NO: 78406 - protein, 265 aa, Homo sapiens
  Payload ID: 15616
  Gene Symbol: SET
  Gene Name: SET nuclear proto-oncogene
  Uniprot ID: Q01105
  ENSP ID: ENSP00000361771
MPRSHQPPPPPHEKEQQEAIEHIDEVQNEIDRLNEQASEEILKVEQKYNKLRQPFFQKRSELIAKIPNFWVTTFVNHPQVSALLGEEDEEALHYLTRVEVTEFEDIKSGYRIDFYFDENPYFENKVLSKEFHLNESGDPSSKSTEIKWKSGKDLTKRSSQTQNKASRKRQHEEPESFFTWFTDHSDAGADELGEVIKDDIWPNPLQYYLVPDMDDEEGEGEEDDDDDEEEEGLEDIDEEGDEDEGEEDEDDDEGEEGEEDEGEDD

SEQ ID NO: 78407 - protein, 266 aa, Homo sapiens
  Payload ID: 15616
  Gene Symbol: SET
  Gene Name: SET nuclear proto-oncogene
  ENSP ID: ENSP00000361773
MMPRSHQPPPPPHEKEQQEAIEHIDEVQNEIDRLNEQASEEILKVEQKYNKLRQPFFQKRSELIAKIPNFWVTTFVNHPQVSALLGEEDEEALHYLTRVEVTEFEDIKSGYRIDFYFDENPYFENKVLSKEFHLNESGDPSSKSTEIKWKSGKDLTKRSSQTQNKASRKRQHEEPESFFTWFTDHSDAGADELGEVIKDDIWPNPLQYYLVPDMDDEEGEGEEDDDDDEEEEGLEDIDEEGDEDEGEEDEDDDEGEEGEEDEGEDD

SEQ ID NO: 78408 - protein, 290 aa, Homo sapiens
  Payload ID: 15616
  Gene Symbol: SET
  Gene Name: SET nuclear proto-oncogene
  Uniprot ID: Q01105
  ENSP ID: ENSP00000361777
MAPKRQSPLPPQKKKPRPPPALGPEETSASAGLPKKGEKEQQEAIEHIDEVQNEIDRLNEQASEEILKVEQKYNKLRQPFFQKRSELIAKIPNFWVTTFVNHPQVSALLGEEDEEALHYLTRVEVTEFEDIKSGYRIDFYFDENPYFENKVLSKEFHLNESGDPSSKSTEIKWKSGKDLTKRSSQTQNKASRKRQHEEPESFFTWFTDHSDAGADELGEVIKDDIWPNPLQYYLVPDMDDEEGEGEEDDDDDEEEEGLEDIDEEGDEDEGEEDEDDDEGEEGEEDEGEDD

SEQ ID NO: 78409 - protein, 268 aa, Homo sapiens
  Payload ID: 15616
  Gene Symbol: SET
  Gene Name: SET nuclear proto-oncogene
  Uniprot ID: Q01105
  ENSP ID: ENSP00000387321
MGCRDLLPSLKPTLLEKEQQEAIEHIDEVQNEIDRLNEQASEEILKVEQKYNKLRQPFFQKRSELIAKIPNFWVTTFVNHPQVSALLGEEDEEALHYLTRVEVTEFEDIKSGYRIDFYFDENPYFENKVLSKEFHLNESGDPSSKSTEIKWKSGKDLTKRSSQTQNKASRKRQHEEPESFFTWFTDHSDAGADELGEVIKDDIWPNPLQYYLVPDMDDEEGEGEEDDDDDEEEEGLEDIDEEGDEDEGEEDEDDDEGEEGEEDEGEDD

SEQ ID NO: 78410 - protein, 32 aa, Homo sapiens
  Payload ID: 15616
  Gene Symbol: SET
  Gene Name: SET nuclear proto-oncogene
  ENSP ID: ENSP00000410806
MAPKRQSPLPPQKKKPRPPPALGPEETSASAG

SEQ ID NO: 78411 - protein, 302 aa, Homo sapiens
  Payload ID: 15617
  Gene Symbol: SETSIP
  Gene Name: SET-like protein
  Uniprot ID: P0DME0
  ENSP ID: ENSP00000480946
MVWFLDFPNSMAPKRQSPLPLQKKKPRPPPALGLEETSASAGLPKKGEKEQQEAIEHIDEVQNEIDRLNEQDSEEILKVEQKYNKLRQPFFQKRSELIAKIPNFGVTTFVNHPQVSSLLGEEDEEALHYLTKVEVTEFEDIKSGYRIDFYFDENPYFENKVFSKEFHLNESGDPSSKSTKIKWKSGKDVTKRSSQTQNKASRKRQHEEPESFFTWFTDHSDAGADELEEVIKDDIWPNPLQYYLVPDMDDEEGGEDDDDDDDDGDEGEEELEDIDEGDEDEGEEDEDDDEGEEGEEDEGEDD

SEQ ID NO: 78412 - protein, 292 aa, Homo sapiens
  Payload ID: 15617
  Gene Symbol: SETSIP
  Gene Name: SET-like protein
  ENSP ID: ENSP00000483053
MAPKRQSPLPLQKKKPRPPPALGLEETSASAGLPKKGEKEQQEAIEHIDEVQNEIDRLNEQDSEEILKVEQKYNKLRQPFFQKRSELIAKIPNFGVTTFVNHPQVSSLLGEEDEEALHYLTKVEVTEFEDIKSGYRIDFYFDENPYFENKVFSKEFHLNESGDPSSKSTKIKWKSGKDVTKRSSQTQNKASRKRQHEEPESFFTWFTDHSDAGADELEEVIKDDIWPNPLQYYLVPDMDDEEGGEDDDDDDDDGDEGEEELEDIDEGDEDEGEEDEDDDEGEEGEEDEGEDD

SEQ ID NO: 78413 - protein, 660 aa, Homo sapiens
  Payload ID: 15618
  Gene Symbol: SCMH1
  Gene Name: sex comb on midleg homolog 1 (Drosophila)
  Uniprot ID: Q96GD3
  ENSP ID: ENSP00000318094
MLVCYSVLACEILWDLPCSIMGSPLGHFTWDKYLKETCSVPAPVHCFKQSYTPPSNEFKISMKLEAQDPRNTTSTCIATVVGLTGARLRLRLDGSDNKNDFWRLVDSAEIQPIGNCEKNGGMLQPPLGFRLNASSWPMFLLKTLNGAEMAPIRIFHKEPPSPSHNFFKMGMKLEAVDRKNPHFICPATIGEVRGSEVLVTFDGWRGAFDYWCRFDSRDIFPVGWCSLTGDNLQPPGTKVVIPKNPYPASDVNTEKPSIHSSTKTVLEHQPGQRGRKPGKKRGRTPKTLISHPISAPSKTAEPLKFPKKRGPKPGSKRKPRTLLNPPPASPTTSTPEPDTSTVPQDAATIPSSAMQAPTVCIYLNKNGSTGPHLDKKKVQQLPDHFGPARASVVLQQAVQACIDCAYHQKTVFSFLKQGHGGEVISAVFDREQHTLNLPAVNSITYVLRFLEKLCHNLRSDNLFGNQPFTQTHLSLTAIEYSHSHDRYLPGETFVLGNSLARSLEPHSDSMDSASNPTNLVSTSQRHRPLLSSCGLPPSTASAVRRLCSRGVLKGSNERRDMESFWKLNRSPGSDRYLESRDASRLSGRDPSSWTVEDVMQFVREADPQLGPHADLFRKHEIDGKALLLLRSDMMMKYMGLKLGPALKLSYHIDRLKQGKF

SEQ ID NO: 78414 - protein, 648 aa, Homo sapiens
  Payload ID: 15618
  Gene Symbol: SCMH1
  Gene Name: sex comb on midleg homolog 1 (Drosophila)
  Uniprot ID: Q96GD3
  ENSP ID: ENSP00000337352
MQPNVIDWSDVRKHKYGHLSESASQYQEAADILDLGHFTWDKYLKETCSVPAPVHCFKQSYTPPSNEFKISMKLEAQDPRNTTSTCIATVVGLTGARLRLRLDGSDNKNDFWRLVDSAEIQPIGNCEKNGGMLQPPLGFRLNASSWPMFLLKTLNGAEMAPIRIFHKEPPSPSHNFFKMGMKLEAVDRKNPHFICPATIGEVRGSEVLVTFDGWRGAFDYWCRFDSRDIFPVGWCSLTGDNLQPPGTKVVIPKNPYPASDVNTEKPSIHSSTKTVLEHQPGQRGRKPGKKRGRTPKTLISHPISAPSKTAEPLKFPKKRGPKPGSKRKPRTLLNPPPASPTTSTPEPDTSTVPQDAATIPSSAMQAPTVCIYLNKNGSTGPHLDKKKVQQLPDHFGPARASVVLQQAVQACIDCAYHQKTVFSFLKQGHGGEVISAVFDREQHTLNLPAVNSITYVLRFLEKLCHNLRSDNLFGNQPFTQTHLSLTAIEYSHSHDRYLPGETFVLGNSLARSLEPHSDSMDSASNPTNLVSTSQRHRPLLSSCGLPPSTASAVRRLCSRGSDRYLESRDASRLSGRDPSSWTVEDVMQFVREADPQLGPHADLFRKHEIDGKALLLLRSDMMMKYMGLKLGPALKLSYHIDRLKQGKF

SEQ ID NO: 78415 - protein, 577 aa, Homo sapiens
  Payload ID: 15618
  Gene Symbol: SCMH1
  Gene Name: sex comb on midleg homolog 1 (Drosophila)
  Uniprot ID: Q96GD3
  ENSP ID: ENSP00000354656
MKLEAQDPRNTTSTCIATVVGLTGARLRLRLDGSDNKNDFWRLVDSAEIQPIGNCEKNGGMLQPPLGFRLNASSWPMFLLKTLNGAEMAPIRIFHKEPPSPSHNFFKMGMKLEAVDRKNPHFICPATIGEVRGSEVLVTFDGWRGAFDYWCRFDSRDIFPVGWCSLTGDNLQPPGTKVVIPKNPYPASDVNTEKPSIHSSTKTVLEHQPGQRGRKPGKKRGRTPKTLISHPISAPSKTAEPLKFPKKRGPKPGSKRKPRTLLNPPPASPTTSTPEPDTSTVPQDAATIPSSAMQAPTVCIYLNKNGSTGPHLDKKKVQQLPDHFGPARASVVLQQAVQACIDCAYHQKTVFSFLKQGHGGEVISAVFDREQHTLNLPAVNSITYVLRFLEKLCHNLRSDNLFGNQPFTQTHLSLTAIEYSHSHDRYLPGETFVLGNSLARSLEPHSDSMDSASNPTNLVSTSQRHRPLLSSCGLPPSTASAVRRLCSRGSDRYLESRDASRLSGRDPSSWTVEDVMQFVREADPQLGPHADLFRKHEIDGKALLLLRSDMMMKYMGLKLGPALKLSYHIDRLKQGKF

SEQ ID NO: 78416 - protein, 591 aa, Homo sapiens
  Payload ID: 15618
  Gene Symbol: SCMH1
  Gene Name: sex comb on midleg homolog 1 (Drosophila)
  Uniprot ID: Q96GD3
  ENSP ID: ENSP00000354996
MQSYTPPSNEFKISMKLEAQDPRNTTSTCIATVVGLTGARLRLRLDGSDNKNDFWRLVDSAEIQPIGNCEKNGGMLQPPLGFRLNASSWPMFLLKTLNGAEMAPIRIFHKEPPSPSHNFFKMGMKLEAVDRKNPHFICPATIGEVRGSEVLVTFDGWRGAFDYWCRFDSRDIFPVGWCSLTGDNLQPPGTKVVIPKNPYPASDVNTEKPSIHSSTKTVLEHQPGQRGRKPGKKRGRTPKTLISHPISAPSKTAEPLKFPKKRGPKPGSKRKPRTLLNPPPASPTTSTPEPDTSTVPQDAATIPSSAMQAPTVCIYLNKNGSTGPHLDKKKVQQLPDHFGPARASVVLQQAVQACIDCAYHQKTVFSFLKQGHGGEVISAVFDREQHTLNLPAVNSITYVLRFLEKLCHNLRSDNLFGNQPFTQTHLSLTAIEYSHSHDRYLPGETFVLGNSLARSLEPHSDSMDSASNPTNLVSTSQRHRPLLSSCGLPPSTASAVRRLCSRGSDRYLESRDASRLSGRDPSSWTVEDVMQFVREADPQLGPHADLFRKHEIDGKALLLLRSDMMMKYMGLKLGPALKLSYHIDRLKQGKF

SEQ ID NO: 78417 - protein, 599 aa, Homo sapiens
  Payload ID: 15618
  Gene Symbol: SCMH1
  Gene Name: sex comb on midleg homolog 1 (Drosophila)
  Uniprot ID: Q96GD3
  ENSP ID: ENSP00000361676
MKLEAQDPRNTTSTCIATVVGLTGARLRLRLDGSDNKNDFWRLVDSAEIQPIGNCEKNGGMLQPPLGFRLNASSWPMFLLKTLNGAEMAPIRIFHKEPPSPSHNFFKMGMKLEAVDRKNPHFICPATIGEVRGSEVLVTFDGWRGAFDYWCRFDSRDIFPVGWCSLTGDNLQPPGTKVVIPKNPYPASDVNTEKPSIHSSTKTVLEHQPGQRGRKPGKKRGRTPKTLISHPISAPSKTAEPLKFPKKRGPKPGSKRKPRTLLNPPPASPTTSTPEPDTSTVPQDAATIPSSAMQAPTVCIYLNKNGSTGPHLDKKKVQQLPDHFGPARASVVLQQAVQACIDCAYHQKTVFSFLKQGHGGEVISAVFDREQHTLNLPAVNSITYVLRFLEKLCHNLRSDNLFGNQPFTQTHLSLTAIEYSHSHDRYLPGETFVLGNSLARSLEPHSDSMDSASNPTNLVSTSQRHRPLLSSCGLPPSTASAVRRLCSRGVLKGSNERRDMESFWKLNRSPGSDRYLESRDASRLSGRDPSSWTVEDVMQFVREADPQLGPHADLFRKHEIDGKALLLLRSDMMMKYMGLKLGPALKLSYHIDRLKQGKF

SEQ ID NO: 78418 - protein, 577 aa, Homo sapiens; identical to SEQ ID NO: 78415
  Payload ID: 15618
  Gene Symbol: SCMH1
  Gene Name: sex comb on midleg homolog 1 (Drosophila)
  Uniprot ID: Q96GD3
  ENSP ID: ENSP00000361677

SEQ ID NO: 78419 - protein, 591 aa, Homo sapiens; identical to SEQ ID NO: 78416
  Payload ID: 15618
  Gene Symbol: SCMH1
  Gene Name: sex comb on midleg homolog 1 (Drosophila)
  Uniprot ID: Q96GD3
  ENSP ID: ENSP00000361678

SEQ ID NO: 78420 - protein, 577 aa, Homo sapiens; identical to SEQ ID NO: 78415
  Payload ID: 15618
  Gene Symbol: SCMH1
  Gene Name: sex comb on midleg homolog 1 (Drosophila)
  Uniprot ID: Q96GD3
  ENSP ID: ENSP00000380356

SEQ ID NO: 78421 - protein, 660 aa, Homo sapiens; identical to SEQ ID NO: 78413
  Payload ID: 15618
  Gene Symbol: SCMH1
  Gene Name: sex comb on midleg homolog 1 (Drosophila)
  Uniprot ID: Q96GD3
  ENSP ID: ENSP00000380359

SEQ ID NO: 78422 - protein, 599 aa, Homo sapiens; identical to SEQ ID NO: 78417
  Payload ID: 15618
  Gene Symbol: SCMH1
  Gene Name: sex comb on midleg homolog 1 (Drosophila)
  Uniprot ID: Q96GD3
  ENSP ID: ENSP00000386079

SEQ ID NO: 78423 - protein, 480 aa, Homo sapiens
  Payload ID: 15618
  Gene Symbol: SCMH1
  Gene Name: sex comb on midleg homolog 1 (Drosophila)
  Uniprot ID: Q96GD3
  ENSP ID: ENSP00000403974
MQSYTPPSNEFKISMKLEAQDPRNTTSTCIATVVGLTGARLRLRLDGSDNKNDFWRLVDSAEIQPIGNCEKNGGMLQPPLVVIPKNPYPASDVNTEKPSIHSSTKTVLEHQPGQRGRKPGKKRGRTPKTLISHPISAPSKTAEPLKFPKKRGPKPGSKRKPRTLLNPPPASPTTSTPEPDTSTVPQDAATIPSSAMQAPTVCIYLNKNGSTGPHLDKKKVQQLPDHFGPARASVVLQQAVQACIDCAYHQKTVFSFLKQGHGGEVISAVFDREQHTLNLPAVNSITYVLRFLEKLCHNLRSDNLFGNQPFTQTHLSLTAIEYSHSHDRYLPGETFVLGNSLARSLEPHSDSMDSASNPTNLVSTSQRHRPLLSSCGLPPSTASAVRRLCSRGSDRYLESRDASRLSGRDPSSWTVEDVMQFVREADPQLGPHADLFRKHEIDGKALLLLRSDMMMKYMGLKLGPALKLSYHIDRLKQGKF

SEQ ID NO: 78424 - protein, 141 aa, Homo sapiens
  Payload ID: 15618
  Gene Symbol: SCMH1
  Gene Name: sex comb on midleg homolog 1 (Drosophila)
  ENSP ID: ENSP00000479881
VSTSQRHRPLLSSCGLPPSTASAVRRLCSRGVLKGSNERRDMESFWKLNRSPGSDRYLESRDASRLSGRDPSSWTVEDVMQFVREADPQLGPHADLFRKHEIDGKALLLLRSDMMMKYMGLKLGPALKLSYHIDRLKQGKF

SEQ ID NO: 78425 - protein, 329 aa, Homo sapiens
  Payload ID: 15619
  Gene Symbol: SCML1
  Gene Name: sex comb on midleg-like 1 (Drosophila)
  Uniprot ID: Q9UN30
  ENSP ID: ENSP00000369380
MMSNSSSEIDVIKTRIPTYDEDDNTILYAYETKPEFVNKEPNIVSDASCNTEEQLKTVDDVLIHCQVIYDALQNLDKKIDVIRRKVSKIQRFHARSLWTNHKRYGYKKHSYRLVKKLKLQKMKKNEVYETFSYPESYSPTLPVSRRENNSPSNLPRPSFCMEEYQRAELEEDPILSRTPSPVHPSDFSEHNCQPYYASDGATYGSSSGLCLGNPRADSIHNTYSTDHASAAPPSVTRSPVENDGYIEEGSITKHPSTWSVEAVVLFLKQTDPLALCPLVDLFRSHEIDGKALLLLTSDVLLKHLGVKLGTAVKLCYYIDRLKQGKCFEN

SEQ ID NO: 78426 - protein, 302 aa, Homo sapiens
  Payload ID: 15619
  Gene Symbol: SCML1
  Gene Name: sex comb on midleg-like 1 (Drosophila)
  Uniprot ID: Q9UN30
  ENSP ID: ENSP00000369382
MMSNSSSEIDVQEPNIVSDASCNTEEQLKTVDDVLIHCQVIYDALQNLDKKIDVIRRKVSKIQRFHARSLWTNHKRYGYKKHSYRLVKKLKLQKMKKNEVYETFSYPESYSPTLPVSRRENNSPSNLPRPSFCMEEYQRAELEEDPILSRTPSPVHPSDFSEHNCQPYYASDGATYGSSSGLCLGNPRADSIHNTYSTDHASAAPPSVTRSPVENDGYIEEGSITKHPSTWSVEAVVLFLKQTDPLALCPLVDLFRSHEIDGKALLLLTSDVLLKHLGVKLGTAVKLCYYIDRLKQGKCFEN

SEQ ID NO: 78427 - protein, 208 aa, Homo sapiens
  Payload ID: 15619
  Gene Symbol: SCML1
  Gene Name: sex comb on midleg-like 1 (Drosophila)
  Uniprot ID: Q9UN30
  ENSP ID: ENSP00000369384
MKKNEVYETFSYPESYSPTLPVSRRENNSPSNLPRPSFCMEEYQRAELEEDPILSRTPSPVHPSDFSEHNCQPYYASDGATYGSSSGLCLGNPRADSIHNTYSTDHASAAPPSVTRSPVENDGYIEEGSITKHPSTWSVEAVVLFLKQTDPLALCPLVDLFRSHEIDGKALLLLTSDVLLKHLGVKLGTAVKLCYYIDRLKQGKCFEN

SEQ ID NO: 78428 - protein, 208 aa, Homo sapiens; identical to SEQ ID NO: 78427
  Payload ID: 15619
  Gene Symbol: SCML1
  Gene Name: sex comb on midleg-like 1 (Drosophila)
  Uniprot ID: Q9UN30
  ENSP ID: ENSP00000381154

SEQ ID NO: 78429 - protein, 147 aa, Homo sapiens
  Payload ID: 15619
  Gene Symbol: SCML1
  Gene Name: sex comb on midleg-like 1 (Drosophila)
  ENSP ID: ENSP00000392587
MMSNSSSEIDVQEPNIVSDASCNTEEQLKTVDDVLIHCQVIYDALQNLDKKIDVIRRKVSKIQRFHARSLWTNHKRYGYKKHSYRLVKKLKLQKMKKNEVYETFSYPESYSPTLPVSRRENNSPSNLPRPSFCMEEYQRAELEEDPI

SEQ ID NO: 78430 - protein, 700 aa, Homo sapiens
  Payload ID: 15620
  Gene Symbol: SCML2
  Gene Name: sex comb on midleg-like 2 (Drosophila)
  Uniprot ID: Q9UQR0
  ENSP ID: ENSP00000251900
MGQTVNEDSMDVKKENQEKTPQSSTSSVQRDDFHWEEYLKETGSISAPSECFRQSQIPPVNDFKVGMKLEARDPRNATSVCIATVIGITGARLRLRLDGSDNRNDFWRLVDSPDIQPVGTCEKEGDLLQPPLGYQMNTSSWPMFLLKTLNGSEMASATLFKKEPPKPPLNNFKVGMKLEAIDKKNPYLICPATIGDVKGDEVHITFDGWSGAFDYWCKYDSRDIFPAGWCRLTGDVLQPPGTSVPIVKNIAKTESSPSEASQHSMQSPQKTTLILPTQQVRRSSRIKPPGPTAVPKRSSSVKNITPRKKGPNSGKKEKPLPVICSTSAASLKSLTRDRGMLYKDVASGPCKIVMSTVCVYVNKHGNFGPHLDPKRIQQLPDHFGPGPVNVVLRRIVQACVDCALETKTVFGYLKPDNRGGEVITASFDGETHSIQLPPVNSASFALRFLENFCHSLQCDNLLSSQPFSSSRGHTHSSAEHDKNQSAKEDVTERQSTKRSPQQTVPYVVPLSPKLPKTKEYASEGEPLFAGGSAIPKEENLSEDSKSSSLNSGNYLNPACRNPMYIHTSVSQDFSRSVPGTTSSPLVGDISPKSSPHEVKFQMQRKSEAPSYIAVPDPSVLKQGFSKDPSTWSVDEVIQFMKHTDPQISGPLADLFRQHEIDGKALFLLKSDVMMKYMGLKLGPALKLCYYIEKLKEGKYS

SEQ ID NO: 78431 - protein, 138 aa, Homo sapiens
  Payload ID: 15620
  Gene Symbol: SCML2
  Gene Name: sex comb on midleg-like 2 (Drosophila)
  Uniprot ID: Q9UQR0
  ENSP ID: ENSP00000381126
MYIHTSVSQDFSRSVPGTTSSPLVGDISPKSSPHEVKFQMQRKSEAPSYIAVPDPSVLKQGFSKDPSTWSVDEVIQFMKHTDPQISGPLADLFRQHEIDGKALFLLKSDVMMKYMGLKLGPALKLCYYIEKLKEGKYS

SEQ ID NO: 78432 - protein, 125 aa, Homo sapiens
  Payload ID: 15620
  Gene Symbol: SCML2
  Gene Name: sex comb on midleg-like 2 (Drosophila)
  ENSP ID: ENSP00000407315
  MOD_RES (1)..(1): Any amino acid
XAKEDVTERQSTKRSPQQTVPYVVPLSPKLPKTKEYASEGEPLFAGGSAIPKEENLSEDSKSSSLNSGNYLNPACRNPMYIHTSVSQDFSRSVPGTTSSPLVGDISPKSSPHEVKFQMQRKSEGN

SEQ ID NO: 78433 - protein, 414 aa, Homo sapiens
  Payload ID: 15621
  Gene Symbol: SCML4
  Gene Name: sex comb on midleg-like 4 (Drosophila)
  Uniprot ID: Q8N228
  ENSP ID: ENSP00000358016
MQSQRIPGRKRGRPSLHSTPMKMAVHNLYSASAGSLPAVKIPKKRGRKPGYKIKSRVLMTPLALSPPRSTPEPDLSSIPQDAATVPSLAAPQALTVCLYINKQANAGPYLERKKVQQLPEHFGPERPSAVLQQAVQACIDCAHQQKLVFSLVKQGYGGEMVSVSASFDGKQHLRSLPVVNSIGYVLRFLAKLCRSLLCDDLFSHQPFPRGCSASEKVQEKEEGRMESVKTVTTEEYLVNPVGMNRYSVDTSASTFNHRGSLHPSSSLYCKRQNSGDSHLGGGPAATAGGPRTSPMSSGGPSAPGLRPPASSPKRNTTSLEGNRCASSPSQDAQDARRPRSRNPSAWTVEDVVWFVKDADPQALGPHVELFRKHEIDGNALLLLKSDMVMKYLGLKLGPALKLCYHIDKLKQAKF

SEQ ID NO: 78434 - protein, 305 aa, Homo sapiens
  Payload ID: 15621
  Gene Symbol: SCML4
  Gene Name: sex comb on midleg-like 4 (Drosophila)
  Uniprot ID: Q8N228
  ENSP ID: ENSP00000358017
MPCQRTAWIGCDRQRTPPFHWREIKSRVLMTPLALSPPRSTPEPDLSSIPQDAATVPSLAAPQALTVCLYINKQANAGPYLERKKVQQLPEHFGPERPSAVLQQAVQACIDCAHQQKLVFSLVKQGYGGEMVSVSASFDGKQHLRSLPVVNSIGYVLRFLAKLCRSLLCDDLFSHQPFPRGCSASEKVQEKEEGRMESVKTVTTEEYLVNPVGMNRYSVDTSASTFNHRGSLHPSSSLYCKRQNSGDSHLGGGPAATAGGPRTSPMSSGGPSAPGLRPPASSPKRNTTSLEGNRCGNVMHASASH

SEQ ID NO: 78435 - protein, 356 aa, Homo sapiens
  Payload ID: 15621
  Gene Symbol: SCML4
  Gene Name: sex comb on midleg-like 4 (Drosophila)
  Uniprot ID: Q8N228
  ENSP ID: ENSP00000358018
MTPLALSPPRSTPEPDLSSIPQDAATVPSLAAPQALTVCLYINKQANAGPYLERKKVQQLPEHFGPERPSAVLQQAVQACIDCAHQQKLVFSLVKQGYGGEMVSVSASFDGKQHLRSLPVVNSIGYVLRFLAKLCRSLLCDDLFSHQPFPRGCSASEKVQEKEEGRMESVKTVTTEEYLVNPVGMNRYSVDTSASTFNHRGSLHPSSSLYCKRQNSGDSHLGGGPAATAGGPRTSPMSSGGPSAPGLRPPASSPKRNTTSLEGNRCASSPSQDAQDARRPRSRNPSAWTVEDVVWFVKDADPQALGPHVELFRKHEIDGNALLLLKSDMVMKYLGLKLGPALKLCYHIDKLKQAKF

SEQ ID NO: 78436 - protein, 172 aa, Homo sapiens
  Payload ID: 15621
  Gene Symbol: SCML4
  Gene Name: sex comb on midleg-like 4 (Drosophila)
  ENSP ID: ENSP00000358021
MNRYSVDTSASTFNHRGSLHPSSSLYCKRQNSGDSHLGGGPAATAGGPRTSPMSSGGPSAPGLRPPASSPKRNTTSLEGNRCASSPSQDAQDARRPRSRNPSAWTVEDVVWFVKDADPQALGPHVELFRKHEIDGNALLLLKSDMVMKYLGLKLGPALKLCYHIDKLKQAKF

SEQ ID NO: 78437 - protein, 171 aa, Homo sapiens
  Payload ID: 15621
  Gene Symbol: SCML4
  Gene Name: sex comb on midleg-like 4 (Drosophila)
  ENSP ID: ENSP00000395589
MTPLALSPPRSTPEPDLSSIPQDAATVPSLAAPQALTVCLYINKQANAGPYLERKKVQQLPEHFGPERPSAVLQQAVQACIDCAHQQKLVFSLVKQGYGGEMVSVSASFDGKQHLRSLPVVNSIGYVLRFLAKLCRSLLCDDLFSHQPFPRGCSASEKVQEKEEGRMESGG

SEQ ID NO: 78438 - protein, 198 aa, Homo sapiens
  Payload ID: 15621
  Gene Symbol: SCML4
  Gene Name: sex comb on midleg-like 4 (Drosophila)
  ENSP ID: ENSP00000404688
MPCQRTAWIGCDRQRTPPFHWREIKSRVLMTPLALSPPRSTPEPDLSSIPQDAATVPSLAAPQALTVCLYINKQANAGPYLERKKVQQLPEHFGPERPSAVLQQAVQACIDCAHQQKLVFSLVKQGYGGEMVSVSASFDGKQHLRSLPVVNSIGYVLRFLAKLCRSLLCDDLFSHQPFPRGCSASEKVQEKEEGRMES

SEQ ID NO: 78439 - protein, 204 aa, Homo sapiens
  Payload ID: 15622
  Gene Symbol: SRY
  Gene Name: sex determining region Y
  Uniprot ID: Q05066
  ENSP ID: ENSP00000372547
MQSYASAMLSVFNSDDYSPAVQENIPALRRSSSFLCTESCNSKYQCETGENSKGNVQDRVKRPMNAFIVWSRDQRRKMALENPRMRNSEISKQLGYQWKMLTEAEKWPFFQEAQKLQAMHREKYPNYKYRPRRKAKMLPKNCSLLPADPASVLCSEVQLDNRLYRDDCTKATHSRMEHQLGHLPPINAASSPQQRDRYSHWTKL

SEQ ID NO: 78440 - protein, 344 aa, Homo sapiens
  Payload ID: 15623
  Gene Symbol: SHBG
  Gene Name: sex hormone-binding globulin
  ENSP ID: ENSP00000345675
MTFDLTKITKTSSSFEVRTWDPEGVIFYGDTNPKDDWFMLGLRDGRPEIQLHNHWAQLTVGAGPRLDDGRWHQVEVKMEGDSVLLEVDGEEVLRLRQVSGPLTSKRHPIMRIALGGLLFPASNLRLPLVPALDGCLRRDSWLDKQAEISASAPTSLRSCDVESNPGIFLPPGTQAEFNLRDIPQPHAEPWAFSLDLGLKQAAGSGHLLALGTPENPSWLSLHLQDQKVVLSSGSGPGLDLPLVLGLPLQLKLSMSRVVLSQGSKMKALALPPLGLAPLLNLWAKPQGRLFLGALPGEDSSTSFCLNGLWAQGQRLDVDQALNRSHEIWTHSCPQSPGNGTDASH

SEQ ID NO: 78441 - protein, 402 aa, Homo sapiens
  Payload ID: 15623
  Gene Symbol: SHBG
  Gene Name: sex hormone-binding globulin
  Uniprot ID: P04278
  ENSP ID: ENSP00000369816
MESRGPLATSRLLLLLLLLLLRHTRQGWALRPVLPTQSAHDPPAVHLSNGPGQEPIAVMTFDLTKITKTSSSFEVRTWDPEGVIFYGDTNPKDDWFMLGLRDGRPEIQLHNHWAQLTVGAGPRLDDGRWHQVEVKMEGDSVLLEVDGEEVLRLRQVSGPLTSKRHPIMRIALGGLLFPASNLRLPLVPALDGCLRRDSWLDKQAEISASAPTSLRSCDVESNPGIFLPPGTQAEFNLRDIPQPHAEPWAFSLDLGLKQAAGSGHLLALGTPENPSWLSLHLQDQKVVLSSGSGPGLDLPLVLGLPLQLKLSMSRVVLSQGSKMKALALPPLGLAPLLNLWAKPQGRLFLGALPGEDSSTSFCLNGLWAQGQRLDVDQALNRSHEIWTHSCPQSPGNGTDASH

SEQ ID NO: 78442 - protein, 293 aa, Homo sapiens
  Payload ID: 15623
  Gene Symbol: SHBG
  Gene Name: sex hormone-binding globulin
  Uniprot ID: P04278
  ENSP ID: ENSP00000388867
MESRGPLATSRLLLLLLLLLLRHTRQGWALRPVLPTQSAHDPPAVHLSNGPGQEPIAVMTFDLTKITKTSSSFEVRTWDPEGVIFYGDTNPKDDWFMLGLRDGRPEIQLHNHWAQLTVGAGPRLDDGRWHQVEVKMEGDSVLLEVDGEEVLRLRQVSGPLTSKRHPIMRIALGGLLFPASNLRLPLVPALDGCLRRDSWLDKQAEISASAPTSLRSCDVESNPGIFLPPGTQAEFNLRDIPQPHAEPWAFSLDLGLKQAAGSGHLLALGTPENPSWLSLHLQDQEKTLPPLFA

SEQ ID NO: 78443 - protein, 287 aa, Homo sapiens
  Payload ID: 15623
  Gene Symbol: SHBG
  Gene Name: sex hormone-binding globulin
  Uniprot ID: P04278
  ENSP ID: ENSP00000393426
MESRGPLATSRLLLLLLLLLLRHTRQGWALRPVLPTQSAHDPPAVHLSNGPGQEPIAVMTFDLTKITKTSSSFEVRTWDPEGVIFYGDTNPKDDWFMLGLRDGRPEIQLHNHWAQLTVGAGPRLDDGRWHQVEVKMEGDSVLLEVDGEEVLRLRQVSGPLTSKRHPIMRIALGGLLFPASNLRLPLVPALDGCLRRDSWLDKQAEISASAPTSLRSCDVESNPGIFLPPGTQAEFNLRGEDSSTSFCLNGLWAQGQRLDVDQALNRSHEIWTHSCPQSPGNGTDASH

SEQ ID NO: 78444 - protein, 235 aa, Homo sapiens
  Payload ID: 15623
  Gene Symbol: SHBG
  Gene Name: sex hormone-binding globulin
  ENSP ID: ENSP00000458181
MTFDLTKITKTSSSFEVRTWDPEGVIFYGDTNPKDDWFMLGLRDGRPEIQLHNHWAQLTVGAGPRLDDGRWHQVEVKMEGDSVLLEVDGEEVLRLRQVSGPLTSKRHPIMRIALGGLLFPASNLRLPLVPALDGCLRRDSWLDKQAEISASAPTSLRSCDVESNPGIFLPPGTQAEFNLRDIPQPHAEPWAFSLDLGLKQAAGSGHLLALGTPENPSWLSLHLQDQEKTLPPLFA

SEQ ID NO: 78445 - protein, 181 aa, Homo sapiens
  Payload ID: 15623
  Gene Symbol: SHBG
  Gene Name: sex hormone-binding globulin
  ENSP ID: ENSP00000458199
MESRGPLATSRLLLLLLLLLLRHTRQGWALRPVLPTQSAHDPPAVHLSNGPGQEPIAVMTFDLTKITKTSSSFEVRTWDPEGVIFYGDTNPKDDWFMLGLRDGRPEIQLHNHWAQLTVGAAPETGLWAPDQQTPSHHEDCAWGAALPRFQPSVAAGSCPGWLPAPGFLAGQTGRDLSICPH

SEQ ID NO: 78446 - protein, 344 aa, Homo sapiens; identical to SEQ ID NO: 78440
  Payload ID: 15623
  Gene Symbol: SHBG
  Gene Name: sex hormone-binding globulin
  ENSP ID: ENSP00000458559

SEQ ID NO: 78447 - protein, 93 aa, Homo sapiens
  Payload ID: 15623
  Gene Symbol: SHBG
  Gene Name: sex hormone-binding globulin
  ENSP ID: ENSP00000458719
MTFDLTKITKTSSSFEVRTWDPEGVIFYGDTNPKDDWFMLGLRDGRPEIQLHNHWAQLTVGAGPRLDDGRWHQVEVKMEGDSVLLEVDGEEVL

SEQ ID NO: 78448 - protein, 82 aa, Homo sapiens
  Payload ID: 15623
  Gene Symbol: SHBG
  Gene Name: sex hormone-binding globulin
  ENSP ID: ENSP00000458816
MTFDLTKITKTSSSFEVRTWDPEGVIFYGDTNPKDDWFMLGLRDGRPEIQLHNHWAQLTVGAGPRLDDGRWHQEKTLPPLFA

SEQ ID NO: 78449 - protein, 212 aa, Homo sapiens
  Payload ID: 15623
  Gene Symbol: SHBG
  Gene Name: sex hormone-binding globulin
  ENSP ID: ENSP00000458858
WALRPVLPTQSAHDPPAVHLSNGPGQEPIAVMTFDLTKITKTSSSFEVRTWDPEGVIFYGDTNPKDDWFMLGLRDGRPEIQLHNHWAQLTVGAGPRLDDGRWHQLVPALDGCLRRDSWLDKQAEISASAPTSLRSCDVESNPGIFLPPGTQAEFNLRDIPQPHAEPWAFSLDLGLKQAAGSGHLLALGTPENPSWLSLHLQDQEKTLPPLFA

SEQ ID NO: 78450 - protein, 229 aa, Homo sapiens
  Payload ID: 15623
  Gene Symbol: SHBG
  Gene Name: sex hormone-binding globulin
  ENSP ID: ENSP00000458875
MTFDLTKITKTSSSFEVRTWDPEGVIFYGDTNPKDDWFMLGLRDGRPEIQLHNHWAQLTVGAGPRLDDGRWHQVEVKMEGDSVLLEVDGEEVLRLRQVSGPLTSKRHPIMRIALGGLLFPASNLRLPLVPALDGCLRRDSWLDKQAEISASAPTSLRSCDVESNPGIFLPPGTQAEFNLRGEDSSTSFCLNGLWAQGQRLDVDQALNRSHEIWTHSCPQSPGNGTDASH

SEQ ID NO: 78451 - protein, 384 aa, Homo sapiens
  Payload ID: 15623
  Gene Symbol: SHBG
  Gene Name: sex hormone-binding globulin
  Uniprot ID: P04278
  ENSP ID: ENSP00000458973
MESRGPLATSRLLLLLLLLLLRHTRQGWALRPVLPTQSAHDPPAVHLSNGPGQEPIAVMTFDLTKITKTSSSFEVRTWDPEGVIFYGDTNPKDDWFMLGLRDGRPEIQLHNHWAQLTVGAGPRLDDGRWHQVEVKMEGDSVLLEVDGEEVLRLRQVSGPLTSKRHPIMRIALGGLLFPASNLRLPAEISASAPTSLRSCDVESNPGIFLPPGTQAEFNLRDIPQPHAEPWAFSLDLGLKQAAGSGHLLALGTPENPSWLSLHLQDQKVVLSSGSGPGLDLPLVLGLPLQLKLSMSRVVLSQGSKMKALALPPLGLAPLLNLWAKPQGRLFLGALPGEDSSTSFCLNGLWAQGQRLDVDQALNRSHEIWTHSCPQSPGNGTDASH

SEQ ID NO: 78452 - protein, 181 aa, Homo sapiens
  Payload ID: 15623
  Gene Symbol: SHBG
  Gene Name: sex hormone-binding globulin
  ENSP ID: ENSP00000459620
MTFDLTKITKTSSSFEVRTWDPEGVIFYGDTNPKDDWFMLGLRDGRPEIQLHNHWAQLTVGAGPRLDDGRWHQLVPALDGCLRRDSWLDKQAEISASAPTSLRSCDVESNPGIFLPPGTQAEFNLRDIPQPHAEPWAFSLDLGLKQAAGSGHLLALGTPENPSWLSLHLQDQEKTLPPLFA

SEQ ID NO: 78453 - protein, 113 aa, Homo sapiens
  Payload ID: 15623
  Gene Symbol: SHBG
  Gene Name: sex hormone-binding globulin
  ENSP ID: ENSP00000459826
WALRPVLPTQSAHDPPAVHLSNGPGQEPIAVMTFDLTKITKTSSSFEVRTWDPEGVIFYGDTNPKDDWFMLGLRDGRPEIQLHNHWAQLTVGAGPRLDDGRWHQEKTLPPLFA

SEQ ID NO: 78454 - protein, 290 aa, Homo sapiens
  Payload ID: 15623
  Gene Symbol: SHBG
  Gene Name: sex hormone-binding globulin
  ENSP ID: ENSP00000459999
MTFDLTKITKTSSSFEVRTWDPEGVIFYGDTNPKDDWFMLGLRDGRPEIQLHNHWAQLTVGAGPRLDDGRWHQLVPALDGCLRRDSWLDKQAEISASAPTSLRSCDVESNPGIFLPPGTQAEFNLRDIPQPHAEPWAFSLDLGLKQAAGSGHLLALGTPENPSWLSLHLQDQKVVLSSGSGPGLDLPLVLGLPLQLKLSMSRVVLSQGSKMKALALPPLGLAPLLNLWAKPQGRLFLGALPGEDSSTSFCLNGLWAQGQRLDVDQALNRSHEIWTHSCPQSPGNGTDASH

SEQ ID NO: 78455 - protein, 260 aa, Homo sapiens
  Payload ID: 15623
  Gene Symbol: SHBG
  Gene Name: sex hormone-binding globulin
  ENSP ID: ENSP00000460219
WALRPVLPTQSAHDPPAVHLSNGPGQEPIAVMTFDLTKITKTSSSFEVRTWDPEGVIFYGDTNPKDDWFMLGLRDGRPEIQLHNHWAQLTVGAGPRLDDGRWHQVEVKMEGDSVLLEVDGEEVLRLRQVSGPLTSKRHPIMRIALGGLLFPASNLRLPLVPALDGCLRRDSWLDKQAEISASAPTSLRSCDVESNPGIFLPPGTQAEFNLRGEDSSTSFCLNGLWAQGQRLDVDQALNRSHEIWTHSCPQSPGNGTDASH

SEQ ID NO: 78456 - protein, 175 aa, Homo sapiens
  Payload ID: 15623
  Gene Symbol: SHBG
  Gene Name: sex hormone-binding globulin
  ENSP ID: ENSP00000461133
MTFDLTKITKTSSSFEVRTWDPEGVIFYGDTNPKDDWFMLGLRDGRPEIQLHNHWAQLTVGAGPRLDDGRWHQLVPALDGCLRRDSWLDKQAEISASAPTSLRSCDVESNPGIFLPPGTQAEFNLRGEDSSTSFCLNGLWAQGQRLDVDQALNRSHEIWTHSCPQSPGNGTDASH

SEQ ID NO: 78457 - protein, 57 aa, Homo sapiens
  Payload ID: 15623
  Gene Symbol: SHBG
  Gene Name: sex hormone-binding globulin
  ENSP ID: ENSP00000461162
MESRGPLATSRLLLLLLLLLLRHTRQGWALRPVLPTQVQERDRALSSCSLPFSPLAL

SEQ ID NO: 78458 - protein, 206 aa, Homo sapiens
  Payload ID: 15623
  Gene Symbol: SHBG
  Gene Name: sex hormone-binding globulin
  ENSP ID: ENSP00000461743
WALRPVLPTQSAHDPPAVHLSNGPGQEPIAVMTFDLTKITKTSSSFEVRTWDPEGVIFYGDTNPKDDWFMLGLRDGRPEIQLHNHWAQLTVGAGPRLDDGRWHQLVPALDGCLRRDSWLDKQAEISASAPTSLRSCDVESNPGIFLPPGTQAEFNLRGEDSSTSFCLNGLWAQGQRLDVDQALNRSHEIWTHSCPQSPGNGTDASH

SEQ ID NO: 78459 - protein, 1242 aa, Homo sapiens
  Payload ID: 15624
  Gene Symbol: SFI1
  Gene Name: SFI1 centrin binding protein
  Uniprot ID: A8K8P3
  ENSP ID: ENSP00000383145
MKNLLTEKCISSHNFHQKVIKQRMEKKVDSRYFKDGAVKKPYSAKTLSNKKSSASFGIRRELPSTSHLVQYRGTHTCTRQGRLRELRIRCVARKFLYLWIRMTFGRVFPSKARFYYEQRLLRKVFEEWKEEWWVFQHEWKLCVRADCHYRYYLYNLMFQTWKTYVRQQQEMRNKYIRAEVHDAKQKMRQAWKSWLIYVVVRRTKLQMQTTALEFRQRIILRVWWSTWRQRLGQVRVSRALHASALKHRALSLQVQAWSQWREQLLYVQKEKQKVVSAVKHHQHWQKRRFLKAWLEYLQVRRVKRQQNEMAERFHHVTVLQIYFCDWQQAWERRESLYAHHAQVEKLARKMALRRAFTHWKHYMLLCAEEAAQFEMAEEHHRHSQLYFCFRALKDNVTHAHLQQIRRNLAHQQHGVTLLHRFWNLWRSQIEQKKERELLPLLHAAWDHYRIALLCKCIELWLQYTQKRRYKQLLQARADGHFQQRALPAAFHTWNRLWRWRHQENVLSARATRFHRETLEKQVFSLWRQKMFQHRENRLAERMAILHAERQLLYRSWFMWHQQAAARHQEQEWQTVACAHHRHGRLKKAFCLWRESAQGLRTERTGRVRAAEFHMAQLLRWAWSQWRECLALRGAERQKLMRADLHHQHSVLHRALQAWVTYQGRVRSILREVAARESQHNRQLLRGALRRWKENTMARVDEAKKTFQASTHYRRTICSKVLVQWREAVSVQMYYRQQEDCAIWEAQKVLDRGCLRTWFQRWWDCSRRSAQQRLQLERAVQHHHRQLLLEGLARWKTHHLQCVRKRLLHRQSTQLLAQRLSRTCFRQWRQQLAARRQEQRATVRALWFWAFSLQAKVWATWLAFVLERRRKKARLQWALQAYQGQLLQEGATRLLRFAASMKASRQQLQAQQQVQAAHSLHRAVRRCATLWKQKVLGRGGKPQPLAAIAPSRKVTFEGPLLNRIAAGAGDGTLETKRPQASRPLGALGRLAAEEPHALELNTAHSARKQPRRPHFLLEPAQSQRPQKPQEHGLGMAQPAAPSLTRPFLAEAPTALVPHSPLPGALSSAPGPKQPPTASTGPELLLLPLSSFMPCGAAAPARVSAQRATPRDKPPVPSSLASVPDPHLLLPGDFSATRAGPGLSTAGSLDLEAELEEIQQQLLHYQTTKQNLWSCRRQASSLRRWLELNREEPGPEDQEVEQQVQKELEQVEMQIQLLAEELQAQRQPIGACVARIQALRQALC

SEQ ID NO: 78460 - protein, 1160 aa, Homo sapiens
  Payload ID: 15624
  Gene Symbol: SFI1
  Gene Name: SFI1 centrin binding protein
  Uniprot ID: A8K8P3
  ENSP ID: ENSP00000383146
MKNLLTEKCISSHNFHQKVIKQRMEKKVDSRFYYEQRLLRKVFEEWKEEWWVFQHEWKLCVRADCHYRYYLYNLMFQTWKTYVRQQQEMRNKYIRAEVHDAKQKMRQAWKSWLIYVVVRRTKLQMQTTALEFRQRIILRVWWSTWRQRLGQVRVSRALHASALKHRALSLQVQAWSQWREQLLYVQKEKQKVVSAVKHHQHWQKRRFLKAWLEYLQVRRVKRQQNEMAERFHHVTVLQIYFCDWQQAWERRESLYAHHAQVEKLARKMALRRAFTHWKHYMLLCAEEAAQFEMAEEHHRHSQLYFCFRALKDNVTHAHLQQIRRNLAHQQHGVTLLHRFWNLWRSQIEQKKERELLPLLHAAWDHYRIALLCKCIELWLQYTQKRRYKQLLQARADGHFQQRALPAAFHTWNRLWRWRHQENVLSARATRFHRETLEKQVFSLWRQKMFQHRENRLAERMAILHAERQLLYRSWFMWHQQAAARHQEQEWQTVACAHHRHGRLKKAFCLWRESAQGLRTERTGRVRAAEFHMAQLLRWAWSQWRECLALRGAERQKLMRADLHHQHSVLHRALQAWVTYQGRVRSILREVAARESQHNRQLLRGALRRWKENTMARVDEAKKTFQASTHYRRTICSKVLVQWREAVSVQMYYRQQEDCAIWEAQKVLDRGCLRTWFQRWWDCSRRSAQQRLQLERAVQHHHRQLLLEGLARWKTHHLQCVRKRLLHRQSTQLLAQRLSRTCFRQWRQQLAARRQEQRATVRALWFWAFSLQAKVWATWLAFVLERRRKKARLQWALQAYQGQLLQEGATRLLRFAASMKASRQQLQAQQQVQAAHSLHRAVRRCATLWKQKVLGRGGKPQPLAAIAPSRKVTFEGPLLNRIAAGAGDGTLETKRPQASRPLGALGRLAAEEPHALELNTAHSARKQPRRPHFLLEPAQSQRPQKPQEHGLGMAQPAAPSLTRPFLAEAPTALVPHSPLPGALSSAPGPKQPPTASTGPELLLLPLSSFMPCGAAAPARVSAQRATPRDKPPVPSSLASVPDPHLLLPGDFSATRAGPGLSTAGSLDLEAELEEIQQQLLHYQTTKQNLWSCRRQASSLRRWLELNREEPGPEDQEVEQQVQKELEQVEMQIQLLAEELQAQRQPIGACVARIQALRQALC

SEQ ID NO: 78461 - protein, 149 aa, Homo sapiens
  Payload ID: 15624
  Gene Symbol: SFI1
  Gene Name: SFI1 centrin binding protein
  ENSP ID: ENSP00000389364
KKSSASFGIRRELPSTSHLVQYRGTHTCTRQGRLRELRIRCVARKFLYLWIRMTFGRVFPSKARYYLYNLMFQTWKTYVRQQQEMRNKYIRAEVHDAKQKMRQAWKSWLIYVVVRRTKLQMQTTALEFRQRIILRVWWSTWRQRLGQVR

SEQ ID NO: 78462 - protein, 102 aa, Homo sapiens
  Payload ID: 15624
  Gene Symbol: SFI1
  Gene Name: SFI1 centrin binding protein
  ENSP ID: ENSP00000391339
MKNLLTEKCISSHNFHQKVIKQRMEKKVDSRYFKDGAVKKPYSAKTLSNKKSSASFGIRRELPSTSHLVQYRGTHTCTRQGRLRELRIRGSQCRGNDRHPVS

SEQ ID NO: 78463 - protein, 605 aa, Homo sapiens
  Payload ID: 15624
  Gene Symbol: SFI1
  Gene Name: SFI1 centrin binding protein
  ENSP ID: ENSP00000398871
YFCFRALKDNVTHAHLQQIRRNLAHQQHGVTLLHRFWNLWRSQIEQKKERELLPLLHAAWDHYRIALLCKCIELWLQYTQKRRYKQLLQARADGHFQQRALPAAFHTWNRLWRWRHQENVLSARATRFHRETLEKQVFSLWRQKMFQHRENRLAERMAILHAERQLLYRSWFMWHQQAAARHQEQEWQTVACAHHRHGRLKKAFCLWRESAQGLRTERTGRVRAAEFHMAQLLRWAWSQWRETYQGRVRSILREVAARESQHNRQLLRGALRRWKENTMARVDEAKKTFQASTHYRRTICSKVLVQWREAVSVQMYYRQQEDCAIWEAQKVLDRGCLRTWFQRWWDCSRRSAQQRLQLERAVQHHHRQLLLEGLARWKTHHLQCVRKRLLHRQSTQLLAQRLSRTCFRQWRQQLAARRQEQRATVRALWFWAFSLQAKVWATWLAFVLERRRKKARLQWALQAYQGQLLQEGATRLLRFAASMKASRQQLQAQQQVQAAHSLHRAVRRCATLWKQKVLGRGGKPQPLAAIAPSRKVTFEGPLLNRIAAGAGDGTLETKRPQASRPLGALGRLAAEEPHALELNTAHSARKQPRRPHFLLEPAQSQ

SEQ ID NO: 78464 - protein, 1089 aa, Homo sapiens
  Payload ID: 15624
  Gene Symbol: SFI1
  Gene Name: SFI1 centrin binding protein
  ENSP ID: ENSP00000401199
MKNLLTEKCISSHNFHQKVIKQRMEKKVDSRFYYEQRLLRKVFEEWKEEWWVFQHEWKLCVRADCHYRVWWSTWRQRLGQVRVSRALHASALKHRALSLQVQAWSQWREQLLYVQKEKQKVVSAVKHHQHWQKRRFLKAWLEYLQVRRVKRQQNEMAERFHHVTVLQIYFCDWQQAWERRESLYAHHAQVEKLARKMALRRAFTHWKHYMLLCAEEAAQFEMAEEHHRHSQLYFCFRALKDNVTHAHLQQIRRNLAHQQHGVTLLHRFWNLWRSQIEQKKERELLPLLHAAWDHYRIALLCKCIELWLQYTQKRRYKQLLQARADGHFQQRALPAAFHTWNRLWRWRHQENVLSARATRFHRETLEKQVFSLWRQKMFQHRENRLAERMAILHAERQLLYRSWFMWHQQAAARHQEQEWQTVACAHHRHGRLKKAFCLWRESAQGLRTERTGRVRAAEFHMAQLLRWAWSQWRECLALRGAERQKLMRADLHHQHSVLHRALQAWVTYQGRVRSILREVAARESQHNRQLLRGALRRWKENTMARVDEAKKTFQASTHYRRTICSKVLVQWREAVSVQMYYRQQEDCAIWEAQKVLDRGCLRTWFQRWWDCSRRSAQQRLQLERAVQHHHRQLLLEGLARWKTHHLQCVRKRLLHRQSTQLLAQRLSRTCFRQWRQQLAARRQEQRATVRALWFWAFSLQAKVWATWLAFVLERRRKKARLQWALQAYQGQLLQEGATRLLRFAASMKASRQQLQAQQQVQAAHSLHRAVRRCATLWKQKVLGRGGKPQPLAAIAPSRKVTFEGPLLNRIAAGAGDGTLETKRPQASRPLGALGRLAAEEPHALELNTAHSARKQPRRPHFLLEPAQSQRPQKPQEHGLGMAQPAAPSLTRPFLAEAPTALVPHSPLPGALSSAPGPKQPPTASTGPELLLLPLSSFMPCGAAAPARVSAQRATPRDKPPVPSSLASVPDPHLLLPGDFSATRAGPGLSTAGSLDLEAELEEIQQQLLHYQTTKQNLWSCRRQASSLRRWLELNREEPGPEDQEVEQQVQKELEQVEMQIQLLAEELQAQRQPIGACVARIQALRQALC

SEQ ID NO: 78465 - protein, 1211 aa, Homo sapiens
  Payload ID: 15624
  Gene Symbol: SFI1
  Gene Name: SFI1 centrin binding protein
  Uniprot ID: A8K8P3
  ENSP ID: ENSP00000402679
MKNLLTEKCISSHNFHQKVIKQRMEKKVDSRYFKDGAVKKPYSAKTLSNKKSSASFGIRRELPSTSHLVQYRGTHTCTRQGRLRELRIRCVARKFLYLWIRMTFGRVFPSKARFYYEQRLLRKVFEEWKEEWWVFQHEWKLCVRADCHYRYYLYNLMFQTWKTYVRQQQEMRNKYIRAEVHDAKQKMRQAWKSWLIYVVVRRTKLQMQTTALEFRQRIILRVWWSTWRQRLGQVRVSRALHASALKHRALSLQVQAWSQWREQLLYVQKEKQKVVSAVKHHQHWQKRRFLKAWLEYLQVRRVKRQQNEMAERFHHVTVLQIYFCDWQQAWERRESLYAHHAQVEKLARKMALRRAFTHWKHYMLLCAEEAAQFEMAEEHHRHSQLLLHRFWNLWRSQIEQKKERELLPLLHAAWDHYRIALLCKCIELWLQYTQKRRYKQLLQARADGHFQQRALPAAFHTWNRLWRWRHQENVLSARATRFHRETLEKQVFSLWRQKMFQHRENRLAERMAILHAERQLLYRSWFMWHQQAAARHQEQEWQTVACAHHRHGRLKKAFCLWRESAQGLRTERTGRVRAAEFHMAQLLRWAWSQWRECLALRGAERQKLMRADLHHQHSVLHRALQAWVTYQGRVRSILREVAARESQHNRQLLRGALRRWKENTMARVDEAKKTFQASTHYRRTICSKVLVQWREAVSVQMYYRQQEDCAIWEAQKVLDRGCLRTWFQRWWDCSRRSAQQRLQLERAVQHHHRQLLLEGLARWKTHHLQCVRKRLLHRQSTQLLAQRLSRTCFRQWRQQLAARRQEQRATVRALWFWAFSLQAKVWATWLAFVLERRRKKARLQWALQAYQGQLLQEGATRLLRFAASMKASRQQLQAQQQVQAAHSLHRAVRRCATLWKQKVLGRGGKPQPLAAIAPSRKVTFEGPLLNRIAAGAGDGTLETKRPQASRPLGALGRLAAEEPHALELNTAHSARKQPRRPHFLLEPAQSQRPQKPQEHGLGMAQPAAPSLTRPFLAEAPTALVPHSPLPGALSSAPGPKQPPTASTGPELLLLPLSSFMPCGAAAPARVSAQRATPRDKPPVPSSLASVPDPHLLLPGDFSATRAGPGLSTAGSLDLEAELEEIQQQLLHYQTTKQNLWSCRRQASSLRRWLELNREEPGPEDQEVEQQVQKELEQVEMQIQLLAEELQAQRQPIGACVARIQALRQALC

SEQ ID NO: 78466 - protein, 489 aa, Homo sapiens
  Payload ID: 15624
  Gene Symbol: SFI1
  Gene Name: SFI1 centrin binding protein
  ENSP ID: ENSP00000405541
  MOD_RES (1)..(1): Any amino acid
XEYLQVRRVKRQQNEMAERFHHVTVLQIYFCDWQQAWERRESLYAHHAQVEKLARKMALRRAFTHWKHYMLLCAEEAAQFEMAEEHHRHSQLYFCFRALKDNVTHAHLQQIRRNLAHQQHGVTLLHRFWNLWRSQIEQKKERELLPLLHAAWDHYRIALLCKCIELWLQYTQKRRYKQLLQARADGHFQQRALPAAFHTWNRLWRWRHQENVLSARATRFHRETLEKQVFSLWRQKMFQHRENRLAERMAILHAERQLLYRSWFMWHQQAAARHQEQEWQTVACAHHRHGRLKKAFCLWRESAQGLRTESWSSGGKLCQCRCITDSRRTVPSGRPRRCWTGAVCGPGFSAGGTAAGGQPSRDCSWRGQCNTTTGSCCWRGWPGGRRTICSVSGRGSCTGRAPNCWHRDSAGPASASGDNSWQPGGRSSGRQCGPCGSGPSRCRQRCGPRGWPLYWKGGERRRGCSGRSRPTRGSSSRRVPRGSCALQPA

SEQ ID NO: 78467 - protein, 79 aa, Homo sapiens
  Payload ID: 15624
  Gene Symbol: SFI1
  Gene Name: SFI1 centrin binding protein
  ENSP ID: ENSP00000411793
MKNLLTEKCISSHNFHQKVIKQRMEKKVDSRYFKDGAVKKPYSAKTLSNKKSSASFGIRRELPSTSHLVQYRGTHTCTR

SEQ ID NO: 78468 - protein, 57 aa, Homo sapiens
  Payload ID: 15624
  Gene Symbol: SFI1
  Gene Name: SFI1 centrin binding protein
  ENSP ID: ENSP00000416931
  MOD_RES (1)..(1): Any amino acid
XQIEQKKERELLPLLHAAWDHYRIALLCKCIELWLQYTQKRRYKQVSLCHPGWSTVA

SEQ ID NO: 78469 - protein, 389 aa, Homo sapiens
  Payload ID: 15624
  Gene Symbol: SFI1
  Gene Name: SFI1 centrin binding protein
  ENSP ID: ENSP00000430488
MKNLLTEKCISSHNFHQKVIKQRMEKKVDSRYFKDGAVKKPYSAKTLSNKKSSASFGIRRELPSTSHLVQYRGTHTCTRQGRLRELRIRCVARKFLYLWIRMTFGRVFPSKARFYYEQRLLRKVFEEWKEEWWVFQHEWKLCVRADCHYRYYLYNLMFQTWKTYVRQQQEMRNKYIRAEVHDAKQKMRQAWKSWLIYVVVRRTKLQMQTTALEFRQRIILRVWWSTWRQRLGQVRVSRALHASALKHRALSLQVQAWSQWREQLLYVQKEKQKVVSAVKHHQHWQKRRFLKAWLEYLQVRRVKRQQNAATGQSGWSFPAESPACCLPHMEQTLAMAPPGKCPQCKSNTFPQGDIREASIFSLEAEDVSASRKPPGRENGHPSRRATASV

SEQ ID NO: 78470 - protein, 1187 aa, Homo sapiens
  Payload ID: 15624
  Gene Symbol: SFI1
  Gene Name: SFI1 centrin binding protein
  Uniprot ID: A8K8P3
  ENSP ID: ENSP00000443025
MKNLLTEKCISSHNFHQKVIKQRMEKKVDSRYFKDGAVKKPYSAKTLSNKKSSASFGIRRELPSTSHLVQYRGTHTCTRQGRLRELRIRFYYEQRLLRKVFEEWKEEWWVFQHEWKLCVRADCHYRYYLYNLMFQTWKTYVRQQQEMRNKYIRAEVHDAKQKMRQAWKSWLIYVVVRRTKLQMQTTALEFRQRIILRVWWSTWRQRLGQVRVSRALHASALKHRALSLQVQAWSQWREQLLYVQKEKQKVVSAVKHHQHWQKRRFLKAWLEYLQVRRVKRQQNEMAERFHHVTVLQIYFCDWQQAWERRESLYAHHAQVEKLARKMALRRAFTHWKHYMLLCAEEAAQFEMAEEHHRHSQLLLHRFWNLWRSQIEQKKERELLPLLHAAWDHYRIALLCKCIELWLQYTQKRRYKQLLQARADGHFQQRALPAAFHTWNRLWRWRHQENVLSARATRFHRETLEKQVFSLWRQKMFQHRENRLAERMAILHAERQLLYRSWFMWHQQAAARHQEQEWQTVACAHHRHGRLKKAFCLWRESAQGLRTERTGRVRAAEFHMAQLLRWAWSQWRECLALRGAERQKLMRADLHHQHSVLHRALQAWVTYQGRVRSILREVAARESQHNRQLLRGALRRWKENTMARVDEAKKTFQASTHYRRTICSKVLVQWREAVSVQMYYRQQEDCAIWEAQKVLDRGCLRTWFQRWWDCSRRSAQQRLQLERAVQHHHRQLLLEGLARWKTHHLQCVRKRLLHRQSTQLLAQRLSRTCFRQWRQQLAARRQEQRATVRALWFWAFSLQAKVWATWLAFVLERRRKKARLQWALQAYQGQLLQEGATRLLRFAASMKASRQQLQAQQQVQAAHSLHRAVRRCATLWKQKVLGRGGKPQPLAAIAPSRKVTFEGPLLNRIAAGAGDGTLETKRPQASRPLGALGRLAAEEPHALELNTAHSARKQPRRPHFLLEPAQSQRPQKPQEHGLGMAQPAAPSLTRPFLAEAPTALVPHSPLPGALSSAPGPKQPPTASTGPELLLLPLSSFMPCGAAAPARVSAQRATPRDKPPVPSSLASVPDPHLLLPGDFSATRAGPGLSTAGSLDLEAELEEIQQQLLHYQTTKQNLWSCRRQASSLRRWLELNREEPGPEDQEVEQQVQKELEQVEMQIQLLAEELQAQRQPIGACVARIQALRQALC

SEQ ID NO: 78471 - protein, 102 aa, Homo sapiens; identical to SEQ ID NO: 78462
  Payload ID: 15624
  Gene Symbol: SFI1
  Gene Name: SFI1 centrin binding protein
  ENSP ID: ENSP00000485935

SEQ ID NO: 78472 - protein, 159 aa, Homo sapiens
  Payload ID: 15625
  Gene Symbol: SFT2D1
  Gene Name: SFT2 domain containing 1
  Uniprot ID: Q8WV19
  ENSP ID: ENSP00000354590
MEKLRRVLSGQDDEEQGLTAQVLDASSLSFNTRLKWFAICFVCGVFFSILGTGLLWLPGGIKLFAVFYTLGNLAALASTCFLMGPVKQLKKMFEATRLLATIVMLLCFIFTLCAALWWHKKGLAVLFCILQFLSMTWYSLSYIPYARDAVIKCCSSLLS

SEQ ID NO: 78473 - protein, 160 aa, Homo sapiens
  Payload ID: 15626
  Gene Symbol: SFT2D2
  Gene Name: SFT2 domain containing 2
  Uniprot ID: O95562
  ENSP ID: ENSP00000271375
MDKLKKVLSGQDTEDRSGLSEVVEASSLSWSTRIKGFIACFAIGILCSLLGTVLLWVPRKGLHLFAVFYTFGNIASIGSTIFLMGPVKQLKRMFEPTRLIATIMVLLCFALTLCSAFWWHNKGLALIFCILQSLALTWYSLSFIPFARDAVKKCFAVCLA

SEQ ID NO: 78474 - protein, 108 aa, Homo sapiens
  Payload ID: 15626
  Gene Symbol: SFT2D2
  Gene Name: SFT2 domain containing 2
  ENSP ID: ENSP00000356803
MDKLKKVLSGQDTEDRSGLSEVVEASSLSWSTRIKGFIACFAIGILCSLLGTVLLWVPRKGLHLFAVFYTFGNIASIGSCVLHLPCVLPFGGITRDLHLSSAFCSLWH

SEQ ID NO: 78475 - protein, 108 aa, Homo sapiens; identical to SEQ ID NO: 78474
  Payload ID: 15626
  Gene Symbol: SFT2D2
  Gene Name: SFT2 domain containing 2
  ENSP ID: ENSP00000486492

SEQ ID NO: 78476 - protein, 215 aa, Homo sapiens
  Payload ID: 15627
  Gene Symbol: SFT2D3
  Gene Name: SFT2 domain containing 3
  Uniprot ID: Q587I9
  ENSP ID: ENSP00000310803
MADLHRQLQEYLAQGKAGGPAAAEPLLAAEKAEEPGDRPAEEWLGRAGLRWTWARSPAESAAAGLTCLPSVTRGQRLAAGGGCLLLAALCFGLAALYAPVLLLRARKFALLWSLGSALALAGSALLRGGAACGRLLRCEEAPSRPALLYMAALGATLFAALGLRSTLLTVLGAGAQVAALLAALVGLLPWGGGTALRLALGRLGRGAGLAKVLPV

SEQ ID NO: 78477 - protein, 333 aa, Homo sapiens
  Payload ID: 15628
  Gene Symbol: SUGT1
  Gene Name: SGT1 homolog, MIS12 kinetochore complex assembly cochaperone
  Uniprot ID: Q9Y2Z0
  ENSP ID: ENSP00000308067
MAAAAAGTATSQRFFQSFSDALIDEDPQAALEELTKALEQKPDDAQYYCQRAYCHILLGNYCVAVADAKKSLELNPNNSTAMLRKGICEYHEKNYAAALETFTEGQKLDSADANFSVWIKRCQEAQNGSESEVWTHQSKIKYDWYQTESQVVITLMIKNVQKNDVNVEFSEKELSALVKLPSGEDYNLKLELLHPIIPEQSTFKVLSTKIEIKLKKPEAVRWEKLEGQGDVPTPKQFVADVKNLYPSSSPYTRNWDKLVGEIKEEEKNEKLEGDAALNRLFQQIYSDGSDEVKRAMNKSFMESGGTVLSTNWSDVGKRKVEINPPDDMEWKKY

SEQ ID NO: 78478 - protein, 365 aa, Homo sapiens
  Payload ID: 15628
  Gene Symbol: SUGT1
  Gene Name: SGT1 homolog, MIS12 kinetochore complex assembly cochaperone
  Uniprot ID: Q9Y2Z0
  ENSP ID: ENSP00000367208
MAAAAAGTATSQRFFQSFSDALIDEDPQAALEELTKALEQKPDDAQYYCQRAYCHILLGNYCVAVADAKKSLELNPNNSTAMLRKGICEYHEKNYAAALETFTEGQKLDIETGFHRVGQAGLQLLTSSDPPALDSQSAGITGADANFSVWIKRCQEAQNGSESEVWTHQSKIKYDWYQTESQVVITLMIKNVQKNDVNVEFSEKELSALVKLPSGEDYNLKLELLHPIIPEQSTFKVLSTKIEIKLKKPEAVRWEKLEGQGDVPTPKQFVADVKNLYPSSSPYTRNWDKLVGEIKEEEKNEKLEGDAALNRLFQQIYSDGSDEVKRAMNKSFMESGGTVLSTNWSDVGKRKVEINPPDDMEWKKY

SEQ ID NO: 78479 - protein, 125 aa, Homo sapiens
  Payload ID: 15629
  Gene Symbol: SH2D1A
  Gene Name: SH2 domain containing 1A
  Uniprot ID: O60880
  ENSP ID: ENSP00000353126
MDAVAVYHGKISRETGEKLLLATGLDGSYLLRDSESVPGVYCLCVLYHGYIYTYRVSQTETGSWSAETAPGVHKRYFRKIKNLISAFQKPDQGIVIPLQYPVEKKSSARSTQGIREDPDVCLKAP

SEQ ID NO: 78480 - protein, 128 aa, Homo sapiens
  Payload ID: 15629
  Gene Symbol: SH2D1A
  Gene Name: SH2 domain containing 1A
  Uniprot ID: O60880
  ENSP ID: ENSP00000360181
MDAVAVYHGKISRETGEKLLLATGLDGSYLLRDSESVPGVYCLCVLYHGYIYTYRVSQTETGSWSAETAPGVHKRYFRKIKNLISAFQKPDQGIVIPLQYPVEKKSSARSTQGTTGIREDPDVCLKAP

SEQ ID NO: 78481 - protein, 76 aa, Homo sapiens
  Payload ID: 15629
  Gene Symbol: SH2D1A
  Gene Name: SH2 domain containing 1A
  Uniprot ID: O60880
  ENSP ID: ENSP00000477094
MDAVAVYHGKISRETGEKLLLATGLDGSYLLRDSESVPGITVTFIHTECPRQKQVLGVLSISEARSRHCNTSAVSS

SEQ ID NO: 78482 - protein, 132 aa, Homo sapiens
  Payload ID: 15630
  Gene Symbol: SH2D1B
  Gene Name: SH2 domain containing 1B
  Uniprot ID: O14796
  ENSP ID: ENSP00000356906
MDLPYYHGRLTKQDCETLLLKEGVDGNFLLRDSESIPGVLCLCVSFKNIVYTYRIFREKHGYYRIQTAEGSPKQVFPSLKELISKFEKPNQGMVVHLLKPIKRTSPSLRWRGLKLELETFVNSNSDYVDVLP

SEQ ID NO: 78483 - protein, 371 aa, Homo sapiens
  Payload ID: 15631
  Gene Symbol: SH2D2A
  Gene Name: SH2 domain containing 2A
  Uniprot ID: Q9NP31
  ENSP ID: ENSP00000357181
MSPSTFQITDMTRRSCQNLGYTAASPQAPEAASNTGNAERAEEVPGEGSLFLQAETRAWFQKTQAHWLLQHGAAPAWFHGFITRREAERLLEPKPQGCYLVRFSESAVTFVLTYRSRTCCRHFLLAQLRDGRHVVLGEDSAHARLQDLLLHYTAHPLSPYGETLTEPLARQTPEPAGLSLRTEESNFGSKSQDPNPQYSPIIKQGQAPVPMQKEGAGEKEPSQLLRPKPPIPAKPQLPPEVYTIPVPRHRPAPRPKPSNPIYNEPDEPIAFYAMGRGSPGEAPSNIYVEVEDEGLPATLGHPVLRKSWSRPVPGGQNTGGSQLHSENSVIGQGPPLPHQPPPAWRHTLPHNLSRQVLQDRGQAWLPLGPPQ

SEQ ID NO: 78484 - protein, 389 aa, Homo sapiens
  Payload ID: 15631
  Gene Symbol: SH2D2A
  Gene Name: SH2 domain containing 2A
  Uniprot ID: Q9NP31
  ENSP ID: ENSP00000357182
MEFPLAQICPQGSHEAPIPTFSTFQITDMTRRSCQNLGYTAASPQAPEAASNTGNAERAEEVPGEGSLFLQAETRAWFQKTQAHWLLQHGAAPAWFHGFITRREAERLLEPKPQGCYLVRFSESAVTFVLTYRSRTCCRHFLLAQLRDGRHVVLGEDSAHARLQDLLLHYTAHPLSPYGETLTEPLARQTPEPAGLSLRTEESNFGSKSQDPNPQYSPIIKQGQAPVPMQKEGAGEKEPSQLLRPKPPIPAKPQLPPEVYTIPVPRHRPAPRPKPSNPIYNEPDEPIAFYAMGRGSPGEAPSNIYVEVEDEGLPATLGHPVLRKSWSRPVPGGQNTGGSQLHSENSVIGQGPPLPHQPPPAWRHTLPHNLSRQVLQDRGQAWLPLGPPQ

SEQ ID NO: 78485 - protein, 399 aa, Homo sapiens
  Payload ID: 15631
  Gene Symbol: SH2D2A
  Gene Name: SH2 domain containing 2A
  Uniprot ID: Q9NP31
  ENSP ID: ENSP00000376123
MEFPLAQICPQGSHEAPIPTFSTFQITDMTRRSCQNLGYTAASPQAPEAASNTGNAERAEEVPGEGSLFLQAETRAWFQKTQAHWLLQHGAAPAWFHGFITRRVRPPLSVTHREAERLLEPKPQGCYLVRFSESAVTFVLTYRSRTCCRHFLLAQLRDGRHVVLGEDSAHARLQDLLLHYTAHPLSPYGETLTEPLARQTPEPAGLSLRTEESNFGSKSQDPNPQYSPIIKQGQAPVPMQKEGAGEKEPSQLLRPKPPIPAKPQLPPEVYTIPVPRHRPAPRPKPSNPIYNEPDEPIAFYAMGRGSPGEAPSNIYVEVEDEGLPATLGHPVLRKSWSRPVPGGQNTGGSQLHSENSVIGQGPPLPHQPPPAWRHTLPHNLSRQVLQDRGQAWLPLGPPQ

SEQ ID NO: 78486 - protein, 576 aa, Homo sapiens
  Payload ID: 15632
  Gene Symbol: SH2D3A
  Gene Name: SH2 domain containing 3A
  Uniprot ID: Q9BRG2
  ENSP ID: ENSP00000245908
MQVPQDGEDLAGQPWYHGLLSRQKAEALLQQNGDFLVRASGSRGGNPVISCRWRGSALHFEVFRVALRPRPGRPTALFQLEDEQFPSIPALVHSYMTGRRPLSQATGAVVSRPVTWQGPLRRSFSEDTLMDGPARIEPLRARKWSNSQPADLAHMGRSREDPAGMEASTMPISALPRTSSDPVLLKAPAPLGTVADSLRASDGQLQAKAPTKPPRTPSFELPDASERPPTYCELVPRVPSVQGTSPSQSCPEPEAPWWEAEEDEEEENRCFTRPQAEISFCPHDAPSCLLGPQNRPLEPQVLHTLRGLFLEHHPGSTALHLLLVDCQATGLLGVTRDQRGNMGVSSGLELLTLPHGHHLRLELLERHQTLALAGALAVLGCSGPLEERAAALRGLVELALALRPGAAGDLPGLAAVMGALLMPQVSRLEHTWRQLRRSHTEAALAFEQELKPLMRALDEGAGPCDPGEVALPHVAPMVRLLEGEEVAGPLDESCERLLRTLHGARHMVRDAPKFRKVAAQRLRGFRPNPELREALTTGFVRRLLWGSRGAGAPRAERFEKFQRVLGVLSQRLEPDR

SEQ ID NO: 78487 - protein, 483 aa, Homo sapiens
  Payload ID: 15632
  Gene Symbol: SH2D3A
  Gene Name: SH2 domain containing 3A
  Uniprot ID: Q9BRG2
  ENSP ID: ENSP00000393303
MEKTLLANLGTTASCPARARKWSNSQPADLAHMGRSREDPAGMEASTMPISALPRTSSDPVLLKAPAPLGTVADSLRASDGQLQAKAPTKPPRTPSFELPDASERPPTYCELVPRVPSVQGTSPSQSCPEPEAPWWEAEEDEEEENRCFTRPQAEISFCPHDAPSCLLGPQNRPLEPQVLHTLRGLFLEHHPGSTALHLLLVDCQATGLLGVTRDQRGNMGVSSGLELLTLPHGHHLRLELLERHQTLALAGALAVLGCSGPLEERAAALRGLVELALALRPGAAGDLPGLAAVMGALLMPQVRGEQGLEEAGVRVTGKTGEEACSDLFSQVSRLEHTWRQLRRSHTEAALAFEQELKPLMRALDEGAGPCDPGEVALPHVAPMVRLLEGEEVAGPLDESCERLLRTLHGARHMVRDAPKFRKVAAQRLRGFRPNPELREALTTGFVRRLLWGSRGAGAPRAERFEKFQRVLGVLSQRLEPDR

SEQ ID NO: 78488 - protein, 238 aa, Homo sapiens
  Payload ID: 15632
  Gene Symbol: SH2D3A
  Gene Name: SH2 domain containing 3A
  ENSP ID: ENSP00000470700
MQVPQDGEDLAGQPWYHGLLSRQKAEALLQQNGDFLVRASGSRGGNPVISCRWRGSALHFEVFRVALRPRPGRPTALFQLEDEQFPSIPALVHSYMTGRRPLSQATGAVVSRPVTWQGPLRRSFSEDTLMDGPARIEPLRARKWSNSQPADLAHMGRSREDPAGMESAPGTPSPAYPPWPVPGAPSWEHRPSPAIGRLPGHRPPGSDQRSAGQHGSLIWPGAAHSSPWTPLEVGTAGE

SEQ ID NO: 78489 - protein, 860 aa, Homo sapiens
  Payload ID: 15633
  Gene Symbol: SH2D3C
  Gene Name: SH2 domain containing 3C
  Uniprot ID: Q8N5H7
  ENSP ID: ENSP00000317817
MTEGTKKTSKKFKFFKFKGFGSLSNLPRSFTLRRSSASISRQSHLEPDTFEATQDDMVTVPKSPPAYARSSDMYSHMGTMPRPSIKKAQNSQAARQAQEAGPKPNLVPGGVPDPPGLEAAKEVMVKATGPLEDTPAMEPNPSAVEVDPIRKPEVPTGDVEEERPPRDVHSERAAGEPEAGSDYVKFSKEKYILDSSPEKLHKELEEELKLSSTDLRSHAWYHGRIPREVSETLVQRNGDFLIRDSLTSLGDYVLTCRWRNQALHFKINKVVVKAGESYTHIQYLFEQESFDHVPALVRYHVGSRKAVSEQSGAIIYCPVNRTFPLRYLEASYGLGQGSSKPASPVSPSGPKGSHMKRRSVTMTDGLTADKVTRSDGCPTSTSLPRPRDSIRSCALSMDQIPDLHSPMSPISESPSSPAYSTVTRVHAAPAAPSATALPASPVARRSSEPQLCPGSAPKTHGESDKGPHTSPSHTLGKASPSPSLSSYSDPDSGHYCQLQPPVRGSREWAATETSSQQARSYGERLKELSENGAPEGDWGKTFTVPIVEVTSSFNPATFQSLLIPRDNRPLEVGLLRKVKELLAEVDARTLARHVTKVDCLVARILGVTKEMQTLMGVRWGMELLTLPHGRQLRLDLLERFHTMSIMLAVDILGCTGSAEERAALLHKTIQLAAELRGTMGNMFSFAAVMGALDMAQISRLEQTWVTLRQRHTEGAILYEKKLKPFLKSLNEGKEGPPLSNTTFPHVLPLITLLECDSAPPEGPEPWGSTEHGVEVVLAHLEAARTVAHHGGLYHTNAEVKLQGFQARPELLEVFSTEFQMRLLWGSQGASSSQARRYEKFDKVLTALSHKLEPAVRSSEL

SEQ ID NO: 78490 - protein, 792 aa, Homo sapiens
  Payload ID: 15633
  Gene Symbol: SH2D3C
  Gene Name: SH2 domain containing 3C
  Uniprot ID: Q8N5H7
  ENSP ID: ENSP00000362373
MAPALPSPHKAVARPELLLDTAAHSGKLRAPDGGEGAECAGHNGGPSWGVGQGQSQEPSRQGIPQAPWLVSWQRRGFPPSSFCPGPLRTEKLRAGRCPLLLCGGAAGEPEAGSDYVKFSKEKYILDSSPEKLHKELEEELKLSSTDLRSHAWYHGRIPREVSETLVQRNGDFLIRDSLTSLGDYVLTCRWRNQALHFKINKVVVKAGESYTHIQYLFEQESFDHVPALVRYHVGSRKAVSEQSGAIIYCPVNRTFPLRYLEASYGLGQGSSKPASPVSPSGPKGSHMKRRSVTMTDGLTADKVTRSDGCPTSTSLPRPRDSIRSCALSMDQIPDLHSPMSPISESPSSPAYSTVTRVHAAPAAPSATALPASPVARRSSEPQLCPGSAPKTHGESDKGPHTSPSHTLGKASPSPSLSSYSDPDSGHYCQLQPPVRGSREWAATETSSQQARSYGERLKELSENGAPEGDWGKTFTVPIVEVTSSFNPATFQSLLIPRDNRPLEVGLLRKVKELLAEVDARTLARHVTKVDCLVARILGVTKEMQTLMGVRWGMELLTLPHGRQLRLDLLERFHTMSIMLAVDILGCTGSAEERAALLHKTIQLAAELRGTMGNMFSFAAVMGALDMAQISRLEQTWVTLRQRHTEGAILYEKKLKPFLKSLNEGKEGPPLSNTTFPHVLPLITLLECDSAPPEGPEPWGSTEHGVEVVLAHLEAARTVAHHGGLYHTNAEVKLQGFQARPELLEVFSTEFQMRLLWGSQGASSSQARRYEKFDKVLTALSHKLEPAVRSSEL

SEQ ID NO: 78491 - protein, 703 aa, Homo sapiens
  Payload ID: 15633
  Gene Symbol: SH2D3C
  Gene Name: SH2 domain containing 3C
  Uniprot ID: Q8N5H7
  ENSP ID: ENSP00000362374
MTAVGRRCPALGSRGAAGEPEAGSDYVKFSKEKYILDSSPEKLHKELEEELKLSSTDLRSHAWYHGRIPREVSETLVQRNGDFLIRDSLTSLGDYVLTCRWRNQALHFKINKVVVKAGESYTHIQYLFEQESFDHVPALVRYHVGSRKAVSEQSGAIIYCPVNRTFPLRYLEASYGLGQGSSKPASPVSPSGPKGSHMKRRSVTMTDGLTADKVTRSDGCPTSTSLPRPRDSIRSCALSMDQIPDLHSPMSPISESPSSPAYSTVTRVHAAPAAPSATALPASPVARRSSEPQLCPGSAPKTHGESDKGPHTSPSHTLGKASPSPSLSSYSDPDSGHYCQLQPPVRGSREWAATETSSQQARSYGERLKELSENGAPEGDWGKTFTVPIVEVTSSFNPATFQSLLIPRDNRPLEVGLLRKVKELLAEVDARTLARHVTKVDCLVARILGVTKEMQTLMGVRWGMELLTLPHGRQLRLDLLERFHTMSIMLAVDILGCTGSAEERAALLHKTIQLAAELRGTMGNMFSFAAVMGALDMAQISRLEQTWVTLRQRHTEGAILYEKKLKPFLKSLNEGKEGPPLSNTTFPHVLPLITLLECDSAPPEGPEPWGSTEHGVEVVLAHLEAARTVAHHGGLYHTNAEVKLQGFQARPELLEVFSTEFQMRLLWGSQGASSSQARRYEKFDKVLTALSHKLEPAVRSSEL

SEQ ID NO: 78492 - protein, 702 aa, Homo sapiens
  Payload ID: 15633
  Gene Symbol: SH2D3C
  Gene Name: SH2 domain containing 3C
  Uniprot ID: Q8N5H7
  ENSP ID: ENSP00000388536
MTERCSLWSALSAAACCFYRGSFVQVQFSKEKYILDSSPEKLHKELEEELKLSSTDLRSHAWYHGRIPREVSETLVQRNGDFLIRDSLTSLGDYVLTCRWRNQALHFKINKVVVKAGESYTHIQYLFEQESFDHVPALVRYHVGSRKAVSEQSGAIIYCPVNRTFPLRYLEASYGLGQGSSKPASPVSPSGPKGSHMKRRSVTMTDGLTADKVTRSDGCPTSTSLPRPRDSIRSCALSMDQIPDLHSPMSPISESPSSPAYSTVTRVHAAPAAPSATALPASPVARRSSEPQLCPGSAPKTHGESDKGPHTSPSHTLGKASPSPSLSSYSDPDSGHYCQLQPPVRGSREWAATETSSQQARSYGERLKELSENGAPEGDWGKTFTVPIVEVTSSFNPATFQSLLIPRDNRPLEVGLLRKVKELLAEVDARTLARHVTKVDCLVARILGVTKEMQTLMGVRWGMELLTLPHGRQLRLDLLERFHTMSIMLAVDILGCTGSAEERAALLHKTIQLAAELRGTMGNMFSFAAVMGALDMAQISRLEQTWVTLRQRHTEGAILYEKKLKPFLKSLNEGKEGPPLSNTTFPHVLPLITLLECDSAPPEGPEPWGSTEHGVEVVLAHLEAARTVAHHGGLYHTNAEVKLQGFQARPELLEVFSTEFQMRLLWGSQGASSSQARRYEKFDKVLTALSHKLEPAVRSSEL

SEQ ID NO: 78493 - protein, 506 aa, Homo sapiens
  Payload ID: 15633
  Gene Symbol: SH2D3C
  Gene Name: SH2 domain containing 3C
  Uniprot ID: Q8N5H7
  ENSP ID: ENSP00000394632
MKRRSVTMTDGLTADKVTRSDGCPTSTSLPRPRDSIRSCALSMDQIPDLHSPMSPISESPSSPAYSTVTRVHAAPAAPSATALPASPVARRSSEPQLCPGSAPKTHGESDKGPHTSPSHTLGKASPSPSLSSYSDPDSGHYCQLQPPVRGSREWAATETSSQQARSYGERLKELSENGAPEGDWGKTFTVPIVEVTSSFNPATFQSLLIPRDNRPLEVGLLRKVKELLAEVDARTLARHVTKVDCLVARILGVTKEMQTLMGVRWGMELLTLPHGRQLRLDLLERFHTMSIMLAVDILGCTGSAEERAALLHKTIQLAAELRGTMGNMFSFAAVMGALDMAQISRLEQTWVTLRQRHTEGAILYEKKLKPFLKSLNEGKEGPPLSNTTFPHVLPLITLLECDSAPPEGPEPWGSTEHGVEVVLAHLEAARTVAHHGGLYHTNAEVKLQGFQARPELLEVFSTEFQMRLLWGSQGASSSQARRYEKFDKVLTALSHKLEPAVRSSEL

SEQ ID NO: 78494 - protein, 134 aa, Homo sapiens
  Payload ID: 15633
  Gene Symbol: SH2D3C
  Gene Name: SH2 domain containing 3C
  ENSP ID: ENSP00000401641
MKRRSVTMTDGLTADKVTRSDGCPTSTSLPRPRDSIRSCALSMDQIPDLHSPMSPISESPSSPAYSTVTRVHAAPAAPSATALPASPVARRSSEPQLCPGSAPKTHGESDKGPHTSPSHTLGKASPSPSLSSYS

SEQ ID NO: 78495 - protein, 196 aa, Homo sapiens
  Payload ID: 15633
  Gene Symbol: SH2D3C
  Gene Name: SH2 domain containing 3C
  ENSP ID: ENSP00000413760
MPFSKEKYILDSSPEKLHKELEEELKLSSTDLRSHAWYHGRIPREVSETLVQRNGDFLIRDSLTSLGDYVLTCRWRNQALHFKINKVVVKAGESYTHIQYLFEQESFDHVPALVRYHVGSRKAVSEQSGAIIYCPVNRTFPLRYLEASYGLGQGSSKPASPVSPSGPKGSHMKRRSVTMTDGLTADKVTRSDGCPT

SEQ ID NO: 78496 - protein, 700 aa, Homo sapiens
  Payload ID: 15633
  Gene Symbol: SH2D3C
  Gene Name: SH2 domain containing 3C
  Uniprot ID: Q8N5H7
  ENSP ID: ENSP00000485866
MTERCSLWSALSAAACCFYRGSFVQFSKEKYILDSSPEKLHKELEEELKLSSTDLRSHAWYHGRIPREVSETLVQRNGDFLIRDSLTSLGDYVLTCRWRNQALHFKINKVVVKAGESYTHIQYLFEQESFDHVPALVRYHVGSRKAVSEQSGAIIYCPVNRTFPLRYLEASYGLGQGSSKPASPVSPSGPKGSHMKRRSVTMTDGLTADKVTRSDGCPTSTSLPRPRDSIRSCALSMDQIPDLHSPMSPISESPSSPAYSTVTRVHAAPAAPSATALPASPVARRSSEPQLCPGSAPKTHGESDKGPHTSPSHTLGKASPSPSLSSYSDPDSGHYCQLQPPVRGSREWAATETSSQQARSYGERLKELSENGAPEGDWGKTFTVPIVEVTSSFNPATFQSLLIPRDNRPLEVGLLRKVKELLAEVDARTLARHVTKVDCLVARILGVTKEMQTLMGVRWGMELLTLPHGRQLRLDLLERFHTMSIMLAVDILGCTGSAEERAALLHKTIQLAAELRGTMGNMFSFAAVMGALDMAQISRLEQTWVTLRQRHTEGAILYEKKLKPFLKSLNEGKEGPPLSNTTFPHVLPLITLLECDSAPPEGPEPWGSTEHGVEVVLAHLEAARTVAHHGGLYHTNAEVKLQGFQARPELLEVFSTEFQMRLLWGSQGASSSQARRYEKFDKVLTALSHKLEPAVRSSEL

SEQ ID NO: 78497 - protein, 454 aa, Homo sapiens
  Payload ID: 15634
  Gene Symbol: SH2D4A
  Gene Name: SH2 domain containing 4A
  Uniprot ID: Q9H788
  ENSP ID: ENSP00000265807
MLKQILSEMYIDPDLLAELSEEQKQILFFKMREEQIRRWKEREAAMERKESLPVKPRPKKENGKSVHWKLGADKEVWVWVMGEHHLDKPYDVLCNEIIAERARLKAEQEAEEPRKTHSEEFTNSLKTKSQYHDLQAPDNQQTKDIWKKVAEKEELEQGSRPAPTLEEEKIRSLSSSSRNIQQMLADSINRMKAYAFHQKKESMKKKQDEEINQIEEERTKQICKSWKEDSEWQASLRKSKAADEKRRSLAKQAREDYKRLSLGAQKGRGGERLQSPLRVPQKPERPPLPPKPQFLNSGAYPQKPLRNQGVVRTLSSSAQEDIIRWFKEEQLPLRAGYQKTSDTIAPWFHGILTLKKANELLLSTGMPGSFLIRVSERIKGYALSYLSEDGCKHFLIDASADAYSFLGVDQLQHATLADLVEYHKEEPITSLGKELLLYPCGQQDQLPDYLELFE

SEQ ID NO: 78498 - protein, 189 aa, Homo sapiens
  Payload ID: 15634
  Gene Symbol: SH2D4A
  Gene Name: SH2 domain containing 4A
  ENSP ID: ENSP00000428048
LLAELSEEQKQILFFKMREEQIRRWKEREAAMERKESLPVKPRPKKENGKSVHWKLGADKEVWVWVMGEHHLDKPYDVLCNEIIAERARLKAEQEAEEPRKTHSEEFTNSLKTKSQYHDLQAPDNQQTKDIWKKVAEKEELEQGSRPAPTLEEEKIRKKESMKKKQDEEINQIEEERTKQICKSWKEDS

SEQ ID NO: 78499 - protein, 454 aa, Homo sapiens; identical to SEQ ID NO: 78497
  Payload ID: 15634
  Gene Symbol: SH2D4A
  Gene Name: SH2 domain containing 4A
  Uniprot ID: Q9H788
  ENSP ID: ENSP00000428684

SEQ ID NO: 78500 - protein, 409 aa, Homo sapiens
  Payload ID: 15634
  Gene Symbol: SH2D4A
  Gene Name: SH2 domain containing 4A
  Uniprot ID: Q9H788
  ENSP ID: ENSP00000429482
MWRVIEPPCPGAPSTENGKSVHWKLGADKEVWVWVMGEHHLDKPYDVLCNEIIAERARLKAEQEAEEPRKTHSEEFTNSLKTKSQYHDLQAPDNQQTKDIWKKVAEKEELEQGSRPAPTLEEEKIRSLSSSSRNIQQMLADSINRMKAYAFHQKKESMKKKQDEEINQIEEERTKQICKSWKEDSEWQASLRKSKAADEKRRSLAKQAREDYKRLSLGAQKGRGGERLQSPLRVPQKPERPPLPPKPQFLNSGAYPQKPLRNQGVVRTLSSSAQEDIIRWFKEEQLPLRAGYQKTSDTIAPWFHGILTLKKANELLLSTGMPGSFLIRVSERIKGYALSYLSEDGCKHFLIDASADAYSFLGVDQLQHATLADLVEYHKEEPITSLGKELLLYPCGQQDQLPDYLELFE

SEQ ID NO: 78501 - protein, 309 aa, Homo sapiens
  Payload ID: 15635
  Gene Symbol: SH2D4B
  Gene Name: SH2 domain containing 4B
  Uniprot ID: Q5SQS7
  ENSP ID: ENSP00000314242
MLPEDSGGSPDAAASDKHIQWLLGADGEVWVWIMGEGPGDKPYEEISEELIAERARLQAQREAEELWRQKEAEITKKFRDALANEKARILAEKWKVEMEDRKAAKVLEERIHEEFKRKEEEERKRGEEQIRLQEEQRAKELYWTLKQAQLHCQASEKEEREWEEQLRRSKAADEERSRRAQRARDEYRHHSLRAIQKGTVAGLSSMFRELGQSHEQEARLYHHLPDPGLPQPLALPVSRTWERPLRPVSRDVIVRWFKEEQLPRRAGFERNTKFIAPWFHGGNYHCFRRRVTSGTLRTEGQPTRLPSVV

SEQ ID NO: 78502 - protein, 357 aa, Homo sapiens
  Payload ID: 15635
  Gene Symbol: SH2D4B
  Gene Name: SH2 domain containing 4B
  Uniprot ID: Q5SQS7
  ENSP ID: ENSP00000345295
MLQQILHDMYIDPELLAELSDVQKHILFYKMREEQLRRWKERETWEALAQDEGLRPPKTKRAASDKHIQWLLGADGEVWVWIMGEGPGDKPYEEISEELIAERARLQAQREAEELWRQKEAEITKKFRDALANEKARILAEKWKVEMEDRKAAKVLEERIHEEFKRKEEEERKRGEEQIRLQEEQRAKELYWTLKQAQLHCQASEKEEREWEEQLRRSKAADEERSRRAQRARDEYRHHSLRAIQKGTVAGLSSMFRELGQSHEQEARLYHHLPDPGLPQPLALPVRTWERPLRPVSRDVIVRWFKEEQLPRRAGFERNTKFIAPWFHGGNYHCFRRRVTSGTLRTEGQPTRLPSVV

SEQ ID NO: 78503 - protein, 339 aa, Homo sapiens
  Payload ID: 15636
  Gene Symbol: SH2D5
  Gene Name: SH2 domain containing 5
  Uniprot ID: Q6ZV89
  ENSP ID: ENSP00000364171
MAHALRRILYSTWCPADCQFAFMARNPRSPASKLFCHLFVGSQPGEVQILHLLLCRSFQLAYLLQHPEERAQPEPCPGPTGEVPLKPLSSSGGLVREPFGRDQLSQNVHALVSFRRLPAEGLVGSGKELPESEGRARHARLGNPYCSPTLVRKKAIRSKVIRSGAYRGCTYETQLQLSAREAFPAAWEAWPRGPGGHSCLVESEGSLTENIWAFAGISRPCALALLRRDVLGAFLLWPELGASGQWCLSVRTQCGVVPHQVFRNHLGRYCLEHLPAEFPSLEALVENHAVTERSLFCPLDMGRLNPTYEEQDCGPPGRPPRTLRPLSHAKSEAELQGLG

SEQ ID NO: 78504 - protein, 423 aa, Homo sapiens
  Payload ID: 15636
  Gene Symbol: SH2D5
  Gene Name: SH2 domain containing 5
  Uniprot ID: Q6ZV89
  ENSP ID: ENSP00000406026
MQKAGAGGRRASDCGLAPHRPRCITKFAQYVGSFPVDDLDTQESVWLVQQQLWALKDCPRRRAVILKFSLQGLKIYSGEGEVLLMAHALRRILYSTWCPADCQFAFMARNPRSPASKLFCHLFVGSQPGEVQILHLLLCRSFQLAYLLQHPEERAQPEPCPGPTGEVPLKPLSSSGGLVREPFGRDQLSQNVHALVSFRRLPAEGLVGSGKELPESEGRARHARLGNPYCSPTLVRKKAIRSKVIRSGAYRGCTYETQLQLSAREAFPAAWEAWPRGPGGHSCLVESEGSLTENIWAFAGISRPCALALLRRDVLGAFLLWPELGASGQWCLSVRTQCGVVPHQVFRNHLGRYCLEHLPAEFPSLEALVENHAVTERSLFCPLDMGRLNPTYEEQDCGPPGRPPRTLRPLSHAKSEAELQGLG

SEQ ID NO: 78505 - protein, 134 aa, Homo sapiens
  Payload ID: 15636
  Gene Symbol: SH2D5
  Gene Name: SH2 domain containing 5
  ENSP ID: ENSP00000408509
MQKAGAGGRRASDCGLAPHRPRCITKFAQYVGSFPVDDLDTQESVWLVQQQLWALKVGGLGGHFPSGSHSLEDQVLLMAHALRRILYSTWCPADCQFAFMARNPRSPASKLFCHLFVGSQPGEVQILHLLLCRS

SEQ ID NO: 78506 - protein, 131 aa, Homo sapiens
  Payload ID: 15636
  Gene Symbol: SH2D5
  Gene Name: SH2 domain containing 5
  ENSP ID: ENSP00000428153
MQKAGAGGRRASDCGLAPHRPRCITKFAQYVGSFPVDDLDTQESVWLVQQQLWALKDCPRRRAVILKFSLQGLKIYSGEGEVLLMAHALRRILYSTWCPADCQFAFMARNPRSPASKLFCHLFVGSQPGEV

SEQ ID NO: 78507 - protein, 126 aa, Homo sapiens
  Payload ID: 15636
  Gene Symbol: SH2D5
  Gene Name: SH2 domain containing 5
  ENSP ID: ENSP00000428656
MQKAGAGGRRASDCGLAPHRPRCITKFAQYVGSFPVDDLDTQESVWLVQQQLWALKDCPRRRAVILKFSLQGLKIYSGEGEVLLMAHALRRILYSTWCPADCQFAFMARNPRSPASKLFCHLFVGS

SEQ ID NO: 78508 - protein, 70 aa, Homo sapiens
  Payload ID: 15636
  Gene Symbol: SH2D5
  Gene Name: SH2 domain containing 5
  ENSP ID: ENSP00000430115
MQKAGAGGRRASDCGLAPHRPRCITKFAQYVGSFPVDDLDTQESVWLVQQQLWALKDCPRRRAVILKFSL

SEQ ID NO: 78509 - protein, 175 aa, Homo sapiens
  Payload ID: 15637
  Gene Symbol: SH2D6
  Gene Name: SH2 domain containing 6
  Uniprot ID: Q7Z4S9
  ENSP ID: ENSP00000341867
MYASSYPPPPQLSPRSHLCPPPPHPTPPQLNNLLLLEGRKSSLPSVAPTGSASAAEDSDLLTQPWYSGNCDRYAVESALLHLQKDGAYTVRPSSGPHGSQPFTLAVLLRGRVFNIPIRRLDGGRHYALGREGRNREELFSSVAAMVQHFMWHPLPLVDRHSGSRELTCLLFPTKP

SEQ ID NO: 78510 - protein, 143 aa, Homo sapiens
  Payload ID: 15637
  Gene Symbol: SH2D6
  Gene Name: SH2 domain containing 6
  Uniprot ID: Q7Z4S9
  ENSP ID: ENSP00000374588
MPSGPLPRTSVVPRPTTAPQETRNGTADAASKEGRKSSLPSVAPTGSASAAEDGAYTVRPSSGPHGSQPFTLAVLLRGRVFNIPIRRLDGGRHYALGREGRNREELFSSVAAMVQHFMWHPLPLVDRHSGSRELTCLLFPTKP

SEQ ID NO: 78511 - protein, 451 aa, Homo sapiens
  Payload ID: 15638
  Gene Symbol: SH2D7
  Gene Name: SH2 domain containing 7
  Uniprot ID: A6NKC9
  ENSP ID: ENSP00000327846
MEDSLKQLSLGRDPEGAGDSQALAELQELALKWFMETQAPFILQNGALPPWFHGFITRKQTEQLLRDKALGSFLIRLSDRATGYILSYRGSDRCRHFVINQLRNRRYIISGDTQSHSTLAELVHHYQEAQLEPFKEMLTAACPRPEDNDLYDAITRGLHQTIVDPENPPATAFLTVVPDKAASPRSSPKPQVSFLHAQKSLDVSPRNLSQEESMEAPIRVSPLPEKSSSLLEESFGGPSDIIYADLRRMNQARLGLGTEGSGRHGPVPAGSQAYSPGREAQRRLSDGEQNRPDGLGPVLSGVSPDQGPTESPTSWGCSDAMGSLGATWRQEFPKLSQEAQPCSQGSSADIYEFIGTEGLLQEARDTPDQEGSTYEQIPACWGGPARAPHPGASPTYSPWVHGYKRISGTPELSEPGNTYEQIPATKSKETGRTHKPDKLRRLFFTYRKHKF

SEQ ID NO: 78512 - protein, 315 aa, Homo sapiens
  Payload ID: 15638
  Gene Symbol: SH2D7
  Gene Name: SH2 domain containing 7
  ENSP ID: ENSP00000386676
MLTAACPRPEDNDLYDAITRGLHQTIVDPENPPATAFLTVVPDKAASPRSSPKPQVSFLHAQKSLDVSPRNLSQEESMEAPIRVSPLPEKSSSLLEESFGGPSDIIYADLRRMNQARLGLGTEGSGRHGPVPAGSQAYSPGREAQRRLSDGEQNRPDGLGPVLSGVSPDQGPTESPTSWGCSDAMGSLGATWRQEFPKLSQEAQPCSQGSSADIYEFIGTEGLLQEARDTPDQEGSTYEQIPACWGGPARAPHPGASPTYSPWVHGYKRISGTPELSEPGNTYEQIPATKSKETGRTHKPDKLRRLFFTYRKHKF

SEQ ID NO: 78513 - protein, 756 aa, Homo sapiens
  Payload ID: 15639
  Gene Symbol: SH2B1
  Gene Name: SH2B adaptor protein 1
  Uniprot ID: Q9NRF2
  ENSP ID: ENSP00000321221
MNGAPSPEDGASPSSPPLPPPPPPSWREFCESHARAAALDFARRFRLYLASHPQYAGPGAEAAFSRRFAELFLQHFEAEVARASGSLSPPILAPLSPGAEISPHDLSLESCRVGGPLAVLGPSRSSEDLAGPLPSSVSSSSTTSSKPKLKKRFSLRSVGRSVRGSVRGILQWRGTVDPPSSAGPLETSSGPPVLGGNSNSNSSGGAGTVGRGLVSDGTSPGERWTHRFERLRLSRGGGALKDGAGMVQREELLSFMGAEEAAPDPAGVGRGGGVAGPPSGGGGQPQWQKCRLLLRSEGEGGGGSRLEFFVPPKASRPRLSIPCSSITDVRTTTALEMPDRENTFVVKVEGPSEYIMETVDAQHVKAWVSDIQECLSPGPCPATSPRPMTLPLAPGTSFLTRENTDSLELSCLNHSESLPSQDLLLGPSESNDRLSQGAYGGLSDRPSASISPSSASIAASHFDSMELLPPELPPRIPIEEGPPTGTVHPLSAPYPPLDTPETATGSFLFQGEPEGGEGDQPLSGYPWFHGMLSRLKAAQLVLTGGTGSHGVFLVRQSETRRGEYVLTFNFQGKAKHLRLSLNEEGQCRVQHLWFQSIFDMLEHFRVHPIPLESGGSSDVVLVSYVPSSQRQQEPTTSHDPPQPPEPPSWTDPPQPGAEEASRAPEVAAAAAAAAKERQEKEKAGGGGVPEELVPVVELVPVVELEEAIAPGSEAQGAGSGGDAGVPPMVQLQQSPLGGDGEEGGHPRAINNQYSFV

SEQ ID NO: 78514 - protein, 671 aa, Homo sapiens
  Payload ID: 15639
  Gene Symbol: SH2B1
  Gene Name: SH2B adaptor protein 1
  Uniprot ID: Q9NRF2
  ENSP ID: ENSP00000337163
MNGAPSPEDGASPSSPPLPPPPPPSWREFCESHARAAALDFARRFRLYLASHPQYAGPGAEAAFSRRFAELFLQHFEAEVARASGSLSPPILAPLSPGAEISPHDLSLESCRVGGPLAVLGPSRSSEDLAGPLPSSVSSSSTTSSKPKLKKRFSLRSVGRSVRGSVRGILQWRGTVDPPSSAGPLETSSGPPVLGGNSNSNSSGGAGTVGRGLVSDGTSPGERWTHRFERLRLSRGGGALKDGAGMVQREELLSFMGAEEAAPDPAGVGRGGGVAGPPSGGGGQPQWQKCRLLLRSEGEGGGGSRLEFFVPPKASRPRLSIPCSSITDVRTTTALEMPDRENTFVVKVEGPSEYIMETVDAQHVKAWVSDIQECLSPGPCPATSPRPMTLPLAPGTSFLTRENTDSLELSCLNHSESLPSQDLLLGPSESNDRLSQGAYGGLSDRPSASISPSSASIAASHFDSMELLPPELPPRIPIEEGPPTGTVHPLSAPYPPLDTPETATGSFLFQGEPEGGEGDQPLSGYPWFHGMLSRLKAAQLVLTGGTGSHGVFLVRQSETRRGEYVLTFNFQGKAKHLRLSLNEEGQCRVQHLWFQSIFDMLEHFRVHPIPLESGGSSDVVLVSYVPSSQRQQGREQAGSHAGVCEGDGCHPDASCTLMPFGASDCVTDHLP

SEQ ID NO: 78515 - protein, 683 aa, Homo sapiens
  Payload ID: 15639
  Gene Symbol: SH2B1
  Gene Name: SH2B adaptor protein 1
  Uniprot ID: Q9NRF2
  ENSP ID: ENSP00000352232
MNGAPSPEDGASPSSPPLPPPPPPSWREFCESHARAAALDFARRFRLYLASHPQYAGPGAEAAFSRRFAELFLQHFEAEVARASGSLSPPILAPLSPGAEISPHDLSLESCRVGGPLAVLGPSRSSEDLAGPLPSSVSSSSTTSSKPKLKKRFSLRSVGRSVRGSVRGILQWRGTVDPPSSAGPLETSSGPPVLGGNSNSNSSGGAGTVGRGLVSDGTSPGERWTHRFERLRLSRGGGALKDGAGMVQREELLSFMGAEEAAPDPAGVGRGGGVAGPPSGGGGQPQWQKCRLLLRSEGEGGGGSRLEFFVPPKASRPRLSIPCSSITDVRTTTALEMPDRENTFVVKVEGPSEYIMETVDAQHVKAWVSDIQECLSPGPCPATSPRPMTLPLAPGTSFLTRENTDSLELSCLNHSESLPSQDLLLGPSESNDRLSQGAYGGLSDRPSASISPSSASIAASHFDSMELLPPELPPRIPIEEGPPTGTVHPLSAPYPPLDTPETATGSFLFQGEPEGGEGDQPLSGYPWFHGMLSRLKAAQLVLTGGTGSHGVFLVRQSETRRGEYVLTFNFQGKAKHLRLSLNEEGQCRVQHLWFQSIFDMLEHFRVHPIPLESGGSSDVVLVSYVPSSQRQQGEQSRSAGEEVPVHPRSEAGSRLGAMRGCAREMDATPMPPAPSCPSERVTV

SEQ ID NO: 78516 - protein, 671 aa, Homo sapiens; identical to SEQ ID NO: 78514
  Payload ID: 15639
  Gene Symbol: SH2B1
  Gene Name: SH2B adaptor protein 1
  Uniprot ID: Q9NRF2
  ENSP ID: ENSP00000378903

SEQ ID NO: 78517 - protein, 335 aa, Homo sapiens
  Payload ID: 15639
  Gene Symbol: SH2B1
  Gene Name: SH2B adaptor protein 1
  ENSP ID: ENSP00000438784
MPDRENTFVVKVEGPSEYIMETVDAQHVKAWVSDIQECLSPGPCPATSPRPMTLPLAPGTSFLTRENTDSLELSCLNHSESLPSQDLLLGPSESNDRLSQGAYGGLSDRPSASISPSSASIAASHFDSMELLPPELPPRIPIEEGPPTGTVHPLSAPYPPLDTPETATGSFLFQGEPEGGEGDQPLSGYPWFHGMLSRLKAAQLVLTGGTGSHGVFLVRQSETRRGEYVLTFNFQGKAKHLRLSLNEEGQCRVQHLWFQSIFDMLEHFRVHPIPLESGGSSDVVLVSYVPSSQRQQGREQAGSHAGVCEGDGCHPDASCTLMPFGASDCVTDHLP

SEQ ID NO: 78518 - protein, 373 aa, Homo sapiens
  Payload ID: 15639
  Gene Symbol: SH2B1
  Gene Name: SH2B adaptor protein 1
  ENSP ID: ENSP00000440354
MAEASRPRLSIPCSSITDVRTTTALEMPDRENTFVVKVEGPSEYIMETVDAQHVKAWVSDIQECLSPGPCPATSPRPMTLPLAPGTSFLTRENTDSLELSCLNHSESLPSQDLLLGPSESNDRLSQGAYGGLSDRPSASISPSSASIAASHFDSMELLPPELPPRIPIEEGPPTGTVHPLSAPYPPLDTPETATGSFLFQGEPEGGEGDQPLSGYPWFHGMLSRLKAAQLVLTGGTGSHGVFLVRQSETRRGEYVLTFNFQGKAKHLRLSLNEEGQCRVQHLWFQSIFDMLEHFRVHPIPLESGGSSDVVLVSYVPSSQRQQGEQSRSAGEEVPVHPRSEAGSRLGAMRGCAREMDATPMPPAPSCPSERVTV

SEQ ID NO: 78519 - protein, 122 aa, Homo sapiens
  Payload ID: 15639
  Gene Symbol: SH2B1
  Gene Name: SH2B adaptor protein 1
  ENSP ID: ENSP00000454601
MPDRENTFVVKVEGPSEYIMETVDAQHVKAWVSDIQECLSPGENTDSLELSCLNHSESLPSQDLLLGPSESNDRLSQGAYGGLSDRPSASISPSSASIAASHFDSMELLPPELPPRIPIEEG

SEQ ID NO: 78520 - protein, 18 aa, Homo sapiens
  Payload ID: 15639
  Gene Symbol: SH2B1
  Gene Name: SH2B adaptor protein 1
  ENSP ID: ENSP00000455236
MTLPLAPGTSFLTRENTD

SEQ ID NO: 78521 - protein, 182 aa, Homo sapiens
  Payload ID: 15639
  Gene Symbol: SH2B1
  Gene Name: SH2B adaptor protein 1
  ENSP ID: ENSP00000455534
SAGPLETSSGPPVLDVRTTTALEMPDRENTFVVKVEGPSEYIMETVDAQHVKAWVSDIQECLSPGPCPATSPRPMTLPLAPGTSFLTRENTDSLELSCLNHSESLPSQDLLLGPSESNDRLSQGAYGGLSDRPSASISPSSASIAASHFDSMELLPPELPPRIPIEEGPPTGTVHPLSAPYP

SEQ ID NO: 78522 - protein, 56 aa, Homo sapiens
  Payload ID: 15639
  Gene Symbol: SH2B1
  Gene Name: SH2B adaptor protein 1
  ENSP ID: ENSP00000457214
MNGAPSPEDGASPSSPPLPPPPPPSWREFCESHARAAALDFARRFRLYLASHPQYA

SEQ ID NO: 78523 - protein, 114 aa, Homo sapiens
  Payload ID: 15639
  Gene Symbol: SH2B1
  Gene Name: SH2B adaptor protein 1
  ENSP ID: ENSP00000457315
  MOD_RES (1)..(1): Any amino acid
XQSETRRGEYVLTFNFQGKAKHLRLSLNEEGQCRVQHLWFQSIFDMLEHFRVHPIPLESGGSSDVVLVSYVPSSQRQQGEQSRSAGEEVPVHPRSEVCVPERWGGEGGLSQGEA

SEQ ID NO: 78524 - protein, 200 aa, Homo sapiens
  Payload ID: 15639
  Gene Symbol: SH2B1
  Gene Name: SH2B adaptor protein 1
  ENSP ID: ENSP00000457724
  MOD_RES (1)..(1): Any amino acid
XWFHGMLSRLKAAQLVLTGGTGSHGVFLVRQSETRRGEYVLTFNFQGKAKHLRLSLNEEGQCRVQHLWFQSIFDMLEHFRVHPIPLESGGSSDVVLVSYVPSSQRQQGEQSRSAGEEVPVHPRSENRPPPMTHPSPLNPLHGQIPHSLGQKRRRGRQKWRQQQPQQPKRGKRKRKRAVEGSRKSWSPWLSWSPWLNWKRP

SEQ ID NO: 78525 - protein, 63 aa, Homo sapiens
  Payload ID: 15639
  Gene Symbol: SH2B1
  Gene Name: SH2B adaptor protein 1
  ENSP ID: ENSP00000458097
MNGAPSPEDGASPSSPPLPPPPPPSWREFCESHARAAALDFARRFRLYLASHPQYAGPGAEAA

SEQ ID NO: 78526 - protein, 756 aa, Homo sapiens; identical to SEQ ID NO: 78513
  Payload ID: 15639
  Gene Symbol: SH2B1
  Gene Name: SH2B adaptor protein 1
  Uniprot ID: Q9NRF2
  ENSP ID: ENSP00000481709

SEQ ID NO: 78527 - protein, 243 aa, Homo sapiens
  Payload ID: 15640
  Gene Symbol: SH2B2
  Gene Name: SH2B adaptor protein 2
  ENSP ID: ENSP00000401883
MNGAGPGPAAAAPVPVPVPVPDWRQFCELHAQAAAVDFAHKFCRFLRDNPAYDTPDAGASFSRHFAANFLDVFGEEVRRVLVAGPTTRGAAVSAEAMEPELADTSALKAAPYGHSRSSEDVSTHAATKARVRKGFSLRNMSLCVVDGVRDMWHRRASPEPDAAAAPRTAEPRDKWTRRLRLSRTLAAKVELVDIQREGALRFMVADDAAAGSGGSAQWQKCRLLLRRAVAEERFRLEFFVPPK

SEQ ID NO: 78528 - protein, 675 aa, Homo sapiens
  Payload ID: 15640
  Gene Symbol: SH2B2
  Gene Name: SH2B adaptor protein 2
  ENSP ID: ENSP00000440273
MDPSYCPAHGFPSQDPLWPLSSQQWSSAHYSEPAAGGCDGTEAMNGAGPGPAAAAPVPVPVPVPDWRQFCELHAQAAAVDFAHKFCRFLRDNPAYDTPDAGASFSRHFAANFLDVFGEEVRRVLVAGPTTRGAAVSAEAMEPELADTSALKAAPYGHSRSSEDVSTHAATKARVRKGFSLRNMSLCVVDGVRDMWHRRASPEPDAAAAPRTAEPRDKWTRRLRLSRTLAAKVELVDIQREGALRFMVADDAAAGSGGSAQWQKCRLLLRRAVAEERFRLEFFVPPKASRPKVSIPLSAIIEVRTTMPLEMPEKDNTFVLKVENGAEYILETIDSLQKHSWVADIQGCVDPGDSEEDTELSCTRGGCLASRVASCSCELLTDAVDLPRPPETTAVGAVVTAPHSRGRDAVRESLIHVPLETFLQTLESPGGSGSDSNNTGEQGAETDPEAEPELELSDYPWFHGTLSRVKAAQLVLAGGPRNHGLFVIRQSETRPGEYVLTFNFQGKAKHLRLSLNGHGQCHVQHLWFQSVLDMLRHFHTHPIPLESGGSADITLRSYVRAQDPPPEPGPTPPAAPASPACWSDSPGQHYFSSLAAAACPPASPSDAAGASSSSASSSSAASGPAPPRPVEGQLSARSRSNSAERLLEAVAATAAEEPPEAAPGRARAVENQYSFY

SEQ ID NO: 78529 - protein, 47 aa, Homo sapiens
  Payload ID: 15640
  Gene Symbol: SH2B2
  Gene Name: SH2B adaptor protein 2
  ENSP ID: ENSP00000483034
MDPSYCPAHGFPSQDPLWPLSSQQWSSAHYSEPGLQAQGQHPTVSHH

SEQ ID NO: 78530 - protein, 575 aa, Homo sapiens
  Payload ID: 15641
  Gene Symbol: SH2B3
  Gene Name: SH2B adaptor protein 3
  Uniprot ID: Q9UQQ2
  ENSP ID: ENSP00000345492
MNGPALQPSSPSSAPSASPAAAPRGWSEFCELHAVAAARELARQYWLFAREHPQHAPLRAELVSLQFTDLFQRYFCREVRDGRAPGRDYRDTGRGPPAKAEASPEPGPGPAAPGLPKARSSEELAPPRPPGPCSFQHFRRSLRHIFRRRSAGELPAAHTAAAPGTPGEAAETPARPGLAKKFLPWSLAREPPPEALKEAVLRYSLADEASMDSGARWQRGRLALRRAPGPDGPDRVLELFDPPKSSRPKLQAACSSIQEVRWCTRLEMPDNLYTFVLKVKDRTDIIFEVGDEQQLNSWMAELSECTGRGLESTEAEMHIPSALEPSTSSSPRGSTDSLNQGASPGGLLDPACQKTDHFLSCYPWFHGPISRVKAAQLVQLQGPDAHGVFLVRQSETRRGEYVLTFNFQGIAKHLRLSLTERGQCRVQHLHFPSVVDMLHHFQRSPIPLECGAACDVRLSSYVVVVSQPPGSCNTVLFPFSLPHWDSESLPHWGSELGLPHLSSSGCPRGLSPEGLPGRSSPPEQIFHLVPSPEELANSLQHLEHEPVNRARDSDYEMDSSSRSHLRAIDNQYTPL

SEQ ID NO: 78531 - protein, 373 aa, Homo sapiens
  Payload ID: 15641
  Gene Symbol: SH2B3
  Gene Name: SH2B adaptor protein 3
  ENSP ID: ENSP00000440597
MGFPVLCRGWRRTWPGCASWLGAPPPQKPLLSPLLLNHRSSKSSRPKLQAACSSIQEVRWCTRLEMPDNLYTFVLKVKDRTDIIFEVGDEQQLNSWMAELSECTGRGLESTEAEMHIPSALEPSTSSSPRGSTDSLNQGASPGGLLDPACQKTDHFLSCYPWFHGPISRVKAAQLVQLQGPDAHGVFLVRQSETRRGEYVLTFNFQGIAKHLRLSLTERGQCRVQHLHFPSVVDMLHHFQRSPIPLECGAACDVRLSSYVVVVSQPPGSCNTVLFPFSLPHWDSESLPHWGSELGLPHLSSSGCPRGLSPEGLPGRSSPPEQIFHLVPSPEELANSLQHLEHEPVNRARDSDYEMDSSSRSHLRAIDNQYTPL

SEQ ID NO: 78532 - protein, 216 aa, Homo sapiens
  Payload ID: 15641
  Gene Symbol: SH2B3
  Gene Name: SH2B adaptor protein 3
  ENSP ID: ENSP00000473529
  MOD_RES (1)..(1): Any amino acid
XQFTDLFQRYFCREVRDGRAPGRDYRDTGRGPPAKAEASPEPGPGPAAPGLPKARSSEELAPPRPPGPCSFQHFRRSLRHIFRRRSAGELPAAHTAAAPGTPGEAAETPARPGLAKKFLPWSLAREPPPEALKEAVLRYSLADEASMDSGARWQRGRLALRRAPGPDGPDRVLELFDPPKWPEPELSRLRFRLKQGLSCAHVPTRCNLAGASGIGH

SEQ ID NO: 78533 - protein, 402 aa, Homo sapiens
  Payload ID: 15642
  Gene Symbol: STAC
  Gene Name: SH3 and cysteine rich domain
  Uniprot ID: Q99469
  ENSP ID: ENSP00000273183
MIPPSSPREDGVDGLPKEAVGAEQPPSPASTSSQESKLQKLKRSLSFKTKSLRSKSADNFFQRTNSEDMKLQAHMVAEISPSSSPLPAPGSLTSTPARAGLHPGGKAHAFQEYIFKKPTFCDVCNHMIVGTNAKHGLRCKACKMSIHHKCTDGLAPQRCMGKLPKGFRRYYSSPLLIHEQFGCIKEVMPIACGNKVDPVYETLRFGTSLAQRTKKGSSGSGSDSPHRTSTSDLVEVPEEANGPGGGYDLRKRSNSVFTYPENGTDDFRDPAKNINHQGSLSKDPLQMNTYVALYKFVPQENEDLEMRPGDIITLLEDSNEDWWKGKIQDRIGFFPANFVQRLQQNEKIFRCVRTFIGCKEQGQITLKENQICVSSEEEQDGFIRVLSGKKKGLIPLDVLENI

SEQ ID NO: 78534 - protein, 341 aa, Homo sapiens
  Payload ID: 15642
  Gene Symbol: STAC
  Gene Name: SH3 and cysteine rich domain
  ENSP ID: ENSP00000393713
MIPPSSPREDGVDGLPKEAVGAEQPPSPASTSSQESKLQKLKRSLSFKTKSLRSKSADNFFQRTNSEDMKLQAHMVAEISPSSSPLPAPGSLTSTPARAGLHPGGKAHAFQEYIFKKPTFCDVCNHMIVACGNKVDPVYETLRFGTSLAQRTKKGSSGSGSDSPHRTSTSDLVEVPEEANGPGGGYDLRKRSNSVFTYPENGTDDFRDPAKNINHQGSLSKDPLQMNTYVALYKFVPQENEDLEMRPGDIITLLEDSNEDWWKGKIQDRIGFFPANFVQRLQQNEKIFRCVRTFIGCKEQGQITLKENQICVSSEEEQDGFIRVLSGKKKGLIPLDVLENI

SEQ ID NO: 78535 - protein, 51 aa, Homo sapiens
  Payload ID: 15642
  Gene Symbol: STAC
  Gene Name: SH3 and cysteine rich domain
  ENSP ID: ENSP00000397521
MIPPSSPREDGVDGLPKEAVGAEQPPSPASTSSQESKEQMLSMDCAAKPVR

SEQ ID NO: 78536 - protein, 252 aa, Homo sapiens
  Payload ID: 15642
  Gene Symbol: STAC
  Gene Name: SH3 and cysteine rich domain
  ENSP ID: ENSP00000398403
MIPPSSPREDGVDGLPKEAVGAEQPPSPASTSSQESKTKSLRSKSADNFFQRTNSEDMKLQAHMVAEISPSSSPLPAPGSLTSTPARAGLHPGGKAHAFQEYIFKKPTFCDVCNHMIVACGNKVDPVYETLRFGTSLAQRTKKGSSGSGSDSPHRTSTSDLVEVPEEANGPGGGYDLRKRSNSVFTYPENGTDDFRDPAKNINHQGSLSKDPLQMNTYVALYKFVPQENEDLEMRPGDIITLLEDSNEDWWK

SEQ ID NO: 78537 - protein, 411 aa, Homo sapiens
  Payload ID: 15643
  Gene Symbol: STAC2
  Gene Name: SH3 and cysteine rich domain 2
  Uniprot ID: Q6ZMT1
  ENSP ID: ENSP00000327509
MTEMSEKENEPDDAATHSPPGTVSALQETKLQRFKRSLSLKTILRSKSLENFFLRSGSELKCPTEVLLTPPTPLPPPSPPPTASDRGLATPSPSPCPVPRPLAALKPVRLHSFQEHVFKRASPCELCHQLIVGNSKQGLRCKMCKVSVHLWCSEEISHQQCPGKTSTSFRRNFSSPLLVHEPPPVCATSKESPPTGDSGKVDPVYETLRYGTSLALMNRSSFSSTSESPTRSLSERDELTEDGEGSIRSSEEGPGDSASPVFTAPAESEGPGPEEKSPGQQLPKATLRKDVGPMYSYVALYKFLPQENNDLALQPGDRIMLVDDSNEDWWKGKIGDRVGFFPANFVQRVRPGENVWRCCQPFSGNKEQGYMSLKENQICVGVGRSKDADGFIRVSSGKKRGLVPVDALTEI

SEQ ID NO: 78538 - protein, 148 aa, Homo sapiens
  Payload ID: 15643
  Gene Symbol: STAC2
  Gene Name: SH3 and cysteine rich domain 2
  ENSP ID: ENSP00000463299
MTEMSEKENEPDDAATHSPPGTVSALQETKLQRFKRSLSLKTILRSKSLENFFLRSGSELKCPTEETPNRACDVRCAKSASTSGALRRSPTSNAQARRPPPSAATSVPLSWCMSRHQSVPQAKSPHPLGTVGRWTLSTRPCAMAPPWH

SEQ ID NO: 78539 - protein, 364 aa, Homo sapiens
  Payload ID: 15644
  Gene Symbol: STAC3
  Gene Name: SH3 and cysteine rich domain 3
  Uniprot ID: Q96MF2
  ENSP ID: ENSP00000329200
MTEKEVLESPKPSFPAETRQSGLQRLKQLLRKGSTGTKEMELPPEPQANGEAVGAGGGPIYYIYEEEEEEEEEEEEPPPEPPKLVNDKPHKFKDHFFKKPKFCDVCARMIVLNNKFGLRCKNCKTNIHEHCQSYVEMQRCFGKIPPGFHRAYSSPLYSNQQYACVKDLSAANRNDPVFETLRTGVIMANKERKKGQADKKNPVAAMMEEEPESARPEEGKPQDGNPEGDKKAEKKTPDDKHKQPGFQQSHYFVALYRFKALEKDDLDFPPGEKITVIDDSNEEWWRGKIGEKVGFFPPNFIIRVRAGERVHRVTRSFVGNREIGQITLKKDQIVVQKGDEAGGYVKVYTGRKVGLFPTDFLEEI

SEQ ID NO: 78540 - protein, 178 aa, Homo sapiens
  Payload ID: 15644
  Gene Symbol: STAC3
  Gene Name: SH3 and cysteine rich domain 3
  Uniprot ID: Q96MF2
  ENSP ID: ENSP00000441515
MANKERKKGQADKKNPVAAMMEEEPESARPEEGKPQDGNPEGDKKAEKKTPDDKHKQPGFQQSHYFVALYRFKALEKDDLDFPPGEKITVIDDSNEEWWRGKIGEKVGFFPPNFIIRVRAGERVHRVTRSFVGNREIGQITLKKDQIVVQKGDEAGGYVKVYTGRKVGLFPTDFLEEI

SEQ ID NO: 78541 - protein, 104 aa, Homo sapiens
  Payload ID: 15644
  Gene Symbol: STAC3
  Gene Name: SH3 and cysteine rich domain 3
  ENSP ID: ENSP00000450740
MANKERKKGQADKKNETLKGIRRLRRRHLMTSTSSLASSSLITLWLSIGSKPWRRTIWISRQERRSQSLMTPMKNGGGGKSGRRSDFSLQTSSFGSGLENVCTA

SEQ ID NO: 78542 - protein, 325 aa, Homo sapiens
  Payload ID: 15644
  Gene Symbol: STAC3
  Gene Name: SH3 and cysteine rich domain 3
  Uniprot ID: Q96MF2
  ENSP ID: ENSP00000452068
MELPPEPQANGEAVGAGGGPIYYIYEEEEEEEEEEEEPPPEPPKLVNDKPHKFKDHFFKKPKFCDVCARMIVLNNKFGLRCKNCKTNIHEHCQSYVEMQRCFGKIPPGFHRAYSSPLYSNQQYACVKDLSAANRNDPVFETLRTGVIMANKERKKGQADKKNPVAAMMEEEPESARPEEGKPQDGNPEGDKKAEKKTPDDKHKQPGFQQSHYFVALYRFKALEKDDLDFPPGEKITVIDDSNEEWWRGKIGEKVGFFPPNFIIRVRAGERVHRVTRSFVGNREIGQITLKKDQIVVQKGDEAGGYVKVYTGRKVGLFPTDFLEEI

SEQ ID NO: 78543 - protein, 168 aa, Homo sapiens
  Payload ID: 15644
  Gene Symbol: STAC3
  Gene Name: SH3 and cysteine rich domain 3
  ENSP ID: ENSP00000452299
MTEKEVLESPKPSFPAETRQSGLQRLKQLLRKGSTGTKEMELPPEPQANGEAVGAGGGPIYYIYEEEEEEEEEEEEPPPEPPKLVNDKPHKFKDHFFKKPKFCDVCARMIVLNNKFGLRCKNCKTNIHEHCQSYVEMQRCFGKIPPGFHRAYSSPLYSNQQYACVKDL

SEQ ID NO: 78544 - protein, 2161 aa, Homo sapiens
  Payload ID: 15645
  Gene Symbol: SHANK1
  Gene Name: SH3 and multiple ankyrin repeat domains 1
  Uniprot ID: Q9Y566
  ENSP ID: ENSP00000293441
MTHSPATSEDEERHSASECPEGGSESDSSPDGPGRGPRGTRGQGSGAPGSLASVRGLQGRSMSVPDDAHFSMMVFRIGIPDLHQTKCLRFNPDATIWTAKQQVLCALSESLQDVLNYGLFQPATSGRDANFLEEERLLREYPQSFEKGVPYLEFRYKTRVYKQTNLDEKQLAKLHTKTGLKKFLEYVQLGTSDKVARLLDKGLDPNYHDSDSGETPLTLAAQTEGSVEVIRTLCLGGAHIDFRARDGMTALHKAACARHCLALTALLDLGGSPNYKDRRGLTPLFHTAMVGGDPRCCELLLFNRAQLGIADENGWQEIHQACQRGHSQHLEHLLFYGAEPGAQNASGNTALHICALYNKETCARILLYRGADKDVKNNNGQTPFQVAVIAGNFELGELIRNHREQDVVPFQESPKYAARRRGPPGTGLTVPPALLRANSDTSMALPDWMVFSAPGAASSGAPGPTSGSQGQSQPSAPTTKLSSGTLRSASSPRGARARSPSRGRHPEDAKRQPRGRPSSSGTPREGPAGGTGGSGGPGGSLGSRGRRRKLYSAVPGRSFMAVKSYQAQAEGEISLSKGEKIKVLSIGEGGFWEGQVKGRVGWFPSDCLEEVANRSQESKQESRSDKAKRLFRHYTVGSYDSFDAPSLMDGIGPGSDYIIKEKTVLLQKKDSEGFGFVLRGAKAQTPIEEFTPTPAFPALQYLESVDEGGVAWRAGLRMGDFLIEVNGQNVVKVGHRQVVNMIRQGGNTLMVKVVMVTRHPDMDEAVHKKAPQQAKRLPPPTISLRSKSMTSELEEMEYEQQPAPVPSMEKKRTVYQMALNKLDEILAAAQQTISASESPGPGGLASLGKHRPKGFFATESSFDPHHRAQPSYERPSFLPPGPGLMLRQKSIGAAEDDRPYLAPPAMKFSRSLSVPGSEDIPPPPTTSPPEPPYSTPPVPSSSGRLTPSPRGGPFNPGSGGPLPASSPASFDGPSPPDTRVGSREKSLYHSGPLPPAHHHPPHHHHHHAPPPQPHHHHAHPPHPPEMETGGSPDDPPPRLALGPQPSLRGWRGGGPSPTPGAPSPSHHGSAGGGGGSSQGPALRYFQLPPRAASAAMYVPARSGRGRKGPLVKQTKVEGEPQKGGGLPPAPSPTSPASPQPPPAVAAPSEKNSIPIPTIIIKAPSTSSSGRSSQGSSTEAEPPTQPEPTGGGGGGGSSPSPAPAMSPVPPSPSPVPTPASPSGPATLDFTSQFGAALVGAARREGGWQNEARRRSTLFLSTDAGDEDGGDGGLGTGAAPGPRLRHSKSIDEGMFSAEPYLRLESAGSGAGYGGYGAGSRAYGGGGGSSAFTSFLPPRPLVHPLTGKALDPASPLGLALAARERALKESSEGGGAPQPPPRPPSPRYEAPPPTPHHHSPHAHHEPVLRLWGASPPDPARRELGYRAGLGSQEKSLPASPPAARRSLLHRLPPTAPGVGPLLLQLGTEPPAPHPGVSKPWRSAAPEEPERLPLHVRFLENCQPRAPVTSGRGPPSEDGPGVPPPSPRRSVPPSPTSPRASEENGLPLLVLPPPAPSVDVEDGEFLFVEPLPPPLEFSNSFEKPESPLTPGPPHPLPDTPAPATPLPPVPPPAVAAAPPTLDSTASSLTSYDSEVATLTQGASAAPGDPHPPGPPAPAAPAPAAPQPGPDPPPGTDSGIEEVDSRSSSDHPLETISSASTLSSLSAEGGGSAGGGGGAGAGVASGPELLDTYVAYLDGQAFGGSSTPGPPYPPQLMTPSKLRGRALGASGGLRPGPSGGLRDPVTPTSPTVSVTGAGTDGLLALRACSGPPTAGVAGGPVAVEPEVPPVPLPTASSLPRKLLPWEEGPGPPPPPLPGPLAQPQASALATVKASIISELSSKLQQFGGSSAAGGALPWARGGSGGGGDSHHGGASYVPERTSSLQRQRLSDDSQSSLLSKPVSSLFQNWPKPPLPPLPTGTGVSPTAAAAPGATSPSASSSSTSTRHLQGVEFEMRPPLLRRAPSPSLLPASEHKVSPAPRPSSLPILPSGPLYPGLFDIRGSPTGGAGGSADPFAPVFVPPHPGISGGLGGALSGASRSLSPTRLLSLPPDKPFGAKPLGFWTKFDVADWLEWLGLAEHRAQFLDHEIDGSHLPALTKEDYVDLGVTRVGHRMNIDRALKFFLER

SEQ ID NO: 78545 - protein, 2152 aa, Homo sapiens
  Payload ID: 15645
  Gene Symbol: SHANK1
  Gene Name: SH3 and multiple ankyrin repeat domains 1
  Uniprot ID: Q9Y566
  ENSP ID: ENSP00000351984
MTHSPATSEDEERHSASECPEGGSESDSSPDGPGRGPRGTRGQGSGAPGSLASVRGLQGRSMSVPDDAHFSMMVFRIGIPDLHQTKCLRFNPDATIWTAKQQVLCALSESLQDVLNYGLFQPATSGRDANFLEEERLLREYPQSFEKGVPYLEFRYKTRVYKQTNLDEKQLAKLHTKTGLKKFLEYVQLGTSDKVARLLDKGLDPNYHDSDSGETPLTLAAQTEGSVEVIRTLCLGGAHIDFRARDGMTALHKAACARHCLALTALLDLGGSPNYKDRRGLTPLFHTAMVGGDPRCCELLLFNRAQLGIADENGWQEIHQACQRGHSQHLEHLLFYGAEPGAQNASGNTALHICALYNKETCARILLYRGADKDVKNNNGQTPFQVAVIAGNFELGELIRNHREQDVVPFQESPKYAARRRGPPGTGLTVPPALLRANSDTSMALPDWMVFSAPGAASSGAPGPTSGSQGQSQPSAPTTKLSSGTLRSASSPRGARARSPSRGRHPEDAKRQPRGRPSSSGTPREGPAGGTGGSGGPGGSLGSRGRRRKLYSAVPGRSFMAVKSYQAQAEGEISLSKGEKIKVLSIGEGGFWEGQVKGRVGWFPSDCLEEVANRSQESKQESRSDKAKRLFRHYTVGSYDSFDAPSDYIIKEKTVLLQKKDSEGFGFVLRGAKAQTPIEEFTPTPAFPALQYLESVDEGGVAWRAGLRMGDFLIEVNGQNVVKVGHRQVVNMIRQGGNTLMVKVVMVTRHPDMDEAVHKKAPQQAKRLPPPTISLRSKSMTSELEEMEYEQQPAPVPSMEKKRTVYQMALNKLDEILAAAQQTISASESPGPGGLASLGKHRPKGFFATESSFDPHHRAQPSYERPSFLPPGPGLMLRQKSIGAAEDDRPYLAPPAMKFSRSLSVPGSEDIPPPPTTSPPEPPYSTPPVPSSSGRLTPSPRGGPFNPGSGGPLPASSPASFDGPSPPDTRVGSREKSLYHSGPLPPAHHHPPHHHHHHAPPPQPHHHHAHPPHPPEMETGGSPDDPPPRLALGPQPSLRGWRGGGPSPTPGAPSPSHHGSAGGGGGSSQGPALRYFQLPPRAASAAMYVPARSGRGRKGPLVKQTKVEGEPQKGGGLPPAPSPTSPASPQPPPAVAAPSEKNSIPIPTIIIKAPSTSSSGRSSQGSSTEAEPPTQPEPTGGGGGGGSSPSPAPAMSPVPPSPSPVPTPASPSGPATLDFTSQFGAALVGAARREGGWQNEARRRSTLFLSTDAGDEDGGDGGLGTGAAPGPRLRHSKSIDEGMFSAEPYLRLESAGSGAGYGGYGAGSRAYGGGGGSSAFTSFLPPRPLVHPLTGKALDPASPLGLALAARERALKESSEGGGAPQPPPRPPSPRYEAPPPTPHHHSPHAHHEPVLRLWGASPPDPARRELGYRAGLGSQEKSLPASPPAARRSLLHRLPPTAPGVGPLLLQLGTEPPAPHPGVSKPWRSAAPEEPERLPLHVRFLENCQPRAPVTSGRGPPSEDGPGVPPPSPRRSVPPSPTSPRASEENGLPLLVLPPPAPSVDVEDGEFLFVEPLPPPLEFSNSFEKPESPLTPGPPHPLPDTPAPATPLPPVPPPAVAAAPPTLDSTASSLTSYDSEVATLTQGASAAPGDPHPPGPPAPAAPAPAAPQPGPDPPPGTDSGIEEVDSRSSSDHPLETISSASTLSSLSAEGGGSAGGGGGAGAGVASGPELLDTYVAYLDGQAFGGSSTPGPPYPPQLMTPSKLRGRALGASGGLRPGPSGGLRDPVTPTSPTVSVTGAGTDGLLALRACSGPPTAGVAGGPVAVEPEVPPVPLPTASSLPRKLLPWEEGPGPPPPPLPGPLAQPQASALATVKASIISELSSKLQQFGGSSAAGGALPWARGGSGGGGDSHHGGASYVPERTSSLQRQRLSDDSQSSLLSKPVSSLFQNWPKPPLPPLPTGTGVSPTAAAAPGATSPSASSSSTSTRHLQGVEFEMRPPLLRRAPSPSLLPASEHKVSPAPRPSSLPILPSGPLYPGLFDIRGSPTGGAGGSADPFAPVFVPPHPGISGGLGGALSGASRSLSPTRLLSLPPDKPFGAKPLGFWTKFDVADWLEWLGLAEHRAQFLDHEIDGSHLPALTKEDYVDLGVTRVGHRMNIDRALKFFLER

SEQ ID NO: 78546 - protein, 1548 aa, Homo sapiens
  Payload ID: 15645
  Gene Symbol: SHANK1
  Gene Name: SH3 and multiple ankyrin repeat domains 1
  Uniprot ID: Q9Y566
  ENSP ID: ENSP00000375689
MQLMALEQRFGSGLPGGGQPLCLMMSSPLPPPPPHFSCLPASDYIIKEKTVLLQKKDSEGFGFVLRGAKAQTPIEEFTPTPAFPALQYLESVDEGGVAWRAGLRMGDFLIEVNGQNVVKVGHRQVVNMIRQGGNTLMVKVVMVTRHPDMDEAVHKKAPQQAKRLPPPTISLRSKSMTSELEEMEYEQQPAPVPSMEKKRTVYQMALNKLDEILAAAQQTISASESPGPGGLASLGKHRPKGFFATESSFDPHHRAQPSYERPSFLPPGPGLMLRQKSIGAAEDDRPYLAPPAMKFSRSLSVPGSEDIPPPPTTSPPEPPYSTPPVPSSSGRLTPSPRGGPFNPGSGGPLPASSPASFDGPSPPDTRVGSREKSLYHSGPLPPAHHHPPHHHHHHAPPPQPHHHHAHPPHPPEMETGGSPDDPPPRLALGPQPSLRGWRGGGPSPTPGAPSPSHHGSAGGGGGSSQGPALRYFQLPPRAASAAMYVPARSGRGRKGPLVKQTKVEGEPQKGGGLPPAPSPTSPASPQPPPAVAAPSEKNSIPIPTIIIKAPSTSSSGRSSQGSSTEAEPPTQPEPTGGGGGGGSSPSPAPAMSPVPPSPSPVPTPASPSGPATLDFTSQFGAALVGAARREGGWQNEARRRSTLFLSTDAGDEDGGDGGLGTGAAPGPRLRHSKSIDEGMFSAEPYLRLESAGSGAGYGGYGAGSRAYGGGGGSSAFTSFLPPRPLVHPLTGKALDPASPLGLALAARERALKESSEGGGAPQPPPRPPSPRYEAPPPTPHHHSPHAHHEPVLRLWGASPPDPARRELGYRAGLGSQEKSLPASPPAARRSLLHRLPPTAPGVGPLLLQLGTEPPAPHPGVSKPWRSAAPEEPERLPLHVRFLENCQPRAPVTSGRGPPSEDGPGVPPPSPRRSVPPSPTSPRASEENGLPLLVLPPPAPSVDVEDGEFLFVEPLPPPLEFSNSFEKPESPLTPGPPHPLPDTPAPATPLPPVPPPAVAAAPPTLDSTASSLTSYDSEVATLTQGASAAPGDPHPPGPPAPAAPAPAAPQPGPDPPPGTDSGIEEVDSRSSSDHPLETISSASTLSSLSAEGGGSAGGGGGAGAGVASGPELLDTYVAYLDGQAFGGSSTPGPPYPPQLMTPSKLRGRALGASGGLRPGPSGGLRDPVTPTSPTVSVTGAGTDGLLALRACSGPPTAGVAGGPVAVEPEVPPVPLPTASSLPRKLLPWEEGPGPPPPPLPGPLAQPQASALATVKASIISELSSKLQQFGGSSAAGGALPWARGGSGGGGDSHHGGASYVPERTSSLQRQRLSDDSQSSLLSKPVSSLFQNWPKPPLPPLPTGTGVSPTAAAAPGATSPSASSSSTSTRHLQGVEFEMRPPLLRRAPSPSLLPASEHKVSPAPRPSSLPILPSGPLYPGLFDIRGSPTGGAGGSADPFAPVFVPPHPGISGGLGGALSGASRSLSPTRLLSLPPDKPFGAKPLGFWTKFDVADWLEWLGLAEHRAQFLDHEIDGSHLPALTKEDYVDLGVTRVGHRMNIDRALKFFLER

SEQ ID NO: 78547 - protein, 2169 aa, Homo sapiens
  Payload ID: 15645
  Gene Symbol: SHANK1
  Gene Name: SH3 and multiple ankyrin repeat domains 1
  ENSP ID: ENSP00000375690
MTHSPATSEDEERHSASECPEGGSESDSSPDGPGRGPRGTRGQGSGAPGSLASVRGLQGRSMSVPDDAHFSMMVFRIGIPDLHQTKCLRFNPDATIWTAKQQVLCALSESLQDVLNYGLFQPATSGRDANFLEEERLLREYPQSFEKGVPYLEFRYKTRVYKQTNLDEKQLAKLHTKTGLKKFLEYVQLGTSDKVARLLDKGLDPNYHDSDSGETPLTLAAQTEGSVEVIRTLCLGGAHIDFRARDGMTALHKAACARHCLALTALLDLGGSPNYKDRRGLTPLFHTAMVGGDPRCCELLLFNRAQLGIADENGWQEIHQACQRGHSQHLEHLLFYGAEPGAQNASGNTALHICALYNKETCARILLYRGADKDVKNNNGQTPFQVAVIAGNFELGELIRNHREQDVVPFQESPKYAARRRGPPGTGLTVPPALLRANSDTSMALPDWMVFSAPGAASSGAPGPTSGSQGQSQPSAPTTKLSSGTLRSASSPRGARARSPSRGRHPEDAKRQPRGRPSSSGTPREGPAGGTGGSGGPGGSLGSRGRRRKLYSAVPGRSFMAVKSYQAQAEGEISLSKGEKIKVLSIGEGGFWEGQVKGRVGWFPSDCLEEVANRSQESKQESRSDKAKRLFRHYTVGSYDSFDAPSLMDGIGPGSDYIIKEKTVLLQKKDSEGFGFVLRGAKAQTPIEEFTPTPAFPALQYLESVDEGGVAWRAGLRMGDFLIEVNGQNVVKVGHRQVVNMIRQGGNTLMVKVVMVTRHPDMDEAVHKKAPQQAKRLPPPTISLRSKSMTSELEEMVSPWKKKSEYEQQPAPVPSMEKKRTVYQMALNKLDEILAAAQQTISASESPGPGGLASLGKHRPKGFFATESSFDPHHRAQPSYERPSFLPPGPGLMLRQKSIGAAEDDRPYLAPPAMKFSRSLSVPGSEDIPPPPTTSPPEPPYSTPPVPSSSGRLTPSPRGGPFNPGSGGPLPASSPASFDGPSPPDTRVGSREKSLYHSGPLPPAHHHPPHHHHHHAPPPQPHHHHAHPPHPPEMETGGSPDDPPPRLALGPQPSLRGWRGGGPSPTPGAPSPSHHGSAGGGGGSSQGPALRYFQLPPRAASAAMYVPARSGRGRKGPLVKQTKVEGEPQKGGGLPPAPSPTSPASPQPPPAVAAPSEKNSIPIPTIIIKAPSTSSSGRSSQGSSTEAEPPTQPEPTGGGGGGGSSPSPAPAMSPVPPSPSPVPTPASPSGPATLDFTSQFGAALVGAARREGGWQNEARRRSTLFLSTDAGDEDGGDGGLGTGAAPGPRLRHSKSIDEGMFSAEPYLRLESAGSGAGYGGYGAGSRAYGGGGGSSAFTSFLPPRPLVHPLTGKALDPASPLGLALAARERALKESSEGGGAPQPPPRPPSPRYEAPPPTPHHHSPHAHHEPVLRLWGASPPDPARRELGYRAGLGSQEKSLPASPPAARRSLLHRLPPTAPGVGPLLLQLGTEPPAPHPGVSKPWRSAAPEEPERLPLHVRFLENCQPRAPVTSGRGPPSEDGPGVPPPSPRRSVPPSPTSPRASEENGLPLLVLPPPAPSVDVEDGEFLFVEPLPPPLEFSNSFEKPESPLTPGPPHPLPDTPAPATPLPPVPPPAVAAAPPTLDSTASSLTSYDSEVATLTQGASAAPGDPHPPGPPAPAAPAPAAPQPGPDPPPGTDSGIEEVDSRSSSDHPLETISSASTLSSLSAEGGGSAGGGGGAGAGVASGPELLDTYVAYLDGQAFGGSSTPGPPYPPQLMTPSKLRGRALGASGGLRPGPSGGLRDPVTPTSPTVSVTGAGTDGLLALRACSGPPTAGVAGGPVAVEPEVPPVPLPTASSLPRKLLPWEEGPGPPPPPLPGPLAQPQASALATVKASIISELSSKLQQFGGSSAAGGALPWARGGSGGGGDSHHGGASYVPERTSSLQRQRLSDDSQSSLLSKPVSSLFQNWPKPPLPPLPTGTGVSPTAAAAPGATSPSASSSSTSTRHLQGVEFEMRPPLLRRAPSPSLLPASEHKVSPAPRPSSLPILPSGPLYPGLFDIRGSPTGGAGGSADPFAPVFVPPHPGISGGLGGALSGASRSLSPTRLLSLPPDKPFGAKPLGFWTKFDVADWLEWLGLAEHRAQFLDHEIDGSHLPALTKEDYVDLGVTRVGHRMNIDRALKFFLER

SEQ ID NO: 78548 - protein, 183 aa, Homo sapiens
  Payload ID: 15645
  Gene Symbol: SHANK1
  Gene Name: SH3 and multiple ankyrin repeat domains 1
  ENSP ID: ENSP00000469719
PGPPYPPQLMTPSKLRGRALGASGGLRPGPSGGLRDPVTPTSPTVSVTGAGTDGLLALRACSGPPTAGVAGGPVAVEPEVPPVPLPTASSLPRKLLPWEEGPGPPPPPLPGPLAQPQASALATVKASIISELSSKLQQFGGSSAAGGALPWARGGSGGGGDSHHGGASYVPERTSSLQRQSIE

SEQ ID NO: 78549 - protein, 1261 aa, Homo sapiens
  Payload ID: 15646
  Gene Symbol: SHANK2
  Gene Name: SH3 and multiple ankyrin repeat domains 2
  ENSP ID: ENSP00000345193
MMMNVPGGGAAAVMMTGYNNGRCPRNSLYSDCIIEEKTVVLQKKDNEGFGFVLRGAKADTPIEEFTPTPAFPALQYLESVDEGGVAWQAGLRTGDFLIEVNNENVVKVGHRQVVNMIRQGGNHLVLKVVTVTRNLDPDDTARKKAPPPPKRAPTTALTLRSKSMTSELEELVDKASVRKKKDKPEEIVPASKPSRAAENMAVEPRVATIKQRPSSRCFPAGSDMNSVYERQGIAVMTPTVPGSPKAPFLGIPRGTMRRQKSIDSRIFLSGITEEERQFLAPPMLKFTRSLSMPDTSEDIPPPPQSVPPSPPPPSPTTYNCPKSPTPRVYGTIKPAFNQNSAAKVSPATRSDTVATMMREKGMYFRRELDRYSLDSEDLYSRNAGPQANFRNKRGQMPENPYSEVGKIASKAVYVPAKPARRKGMLVKQSNVEDSPEKTCSIPIPTIIVKEPSTSSSGKSSQGSSMEIDPQAPEPPSQLRPDESLTVSSPFAAAIAGAVRDREKRLEARRNSPAFLSTDLGDEDVGLGPPAPRTRPSMFPEEGDFADEDSAEQLSSPMPSATPREPENHFVGGAEASAPGEAGRPLNSTSKAQGPESSPAVPSASSGTAGPGNYVHPLTGRLLDPSSPLALALSARDRAMKESQQGPKGEAPKADLNKPLYIDTKMRPSLDAGFPTVTRQNTRGPLRRQETENKYETDLGRDRKGDDKKNMLIDIMDTSQQKSAGLLMVHTVDATKLDNALQEEDEKAEVEMKPDSSPSEVPEGVSETEGALQISAAPEPTTVPGRTIVAVGSMEEAVILPFRIPPPPLASVDLDEDFIFTEPLPPPLEFANSFDIPDDRAASVPALSDLVKQKKSDTPQSPSLNSSQPTNSADSKKPASLSNCLPASFLPPPESFDAVADSGIEEVDSRSSSDHHLETTSTISTVSSISTLSSEGGENVDTCTVYADGQAFMVDKPPVPPKPKMKPIIHKSNALYQDALVEEDVDSFVIPPPAPPPPPGSAQPGMAKVLQPRTSKLWGDVTEIKSPILSGPKANVISELNSILQQMNREKLAKPGEGLDSPMGAKSASLAPRSPEIMSTISGTRSTTVTFTVRPGTSQPITLQSRPPDYESRTSGTRRAPSPVVSPTEMNKETLPAPLSAATASPSPALSDVFSLPSQPPSGDLFGLNPAGRSRSPSPSILQQPISNKPFTTKPVHLWTKPDVADWLESLNLGEHKEAFMDNEIDGSHLPNLQKEDLIDLGVTRVGHRMNIERALKQLLDR

SEQ ID NO: 78550 - protein, 244 aa, Homo sapiens [sequence omitted]

SEQ ID NO: 78551 - protein, 1253 aa, Homo sapiens
  Payload ID: 15646
  Gene Symbol: SHANK2
  Gene Name: SH3 and multiple ankyrin repeat domains 2
  ENSP ID: ENSP00000386491
MMNVPGGGAAAVMMTGYNNGRCPRNSLYSDCIIEEKTVVLQKKDNEGFGFVLRGAKADTPIEEFTPTPAFPALQYLESVDEGGVAWQAGLRTGDFLIEVNNENVVKVGHRQVVNMIRQGGNHLVLKVVTVTRNLDPDDTARKKAPPPPKRAPTTALTLRSKSMTSELEELVDKDKPEEIVPASKPSRAAENMAVEPRVATIKQRPSSRCFPAGSDMNSVYERQGIAVMTPTVPGSPKAPFLGIPRGTMRRQKSIDSRIFLSGITEEERQFLAPPMLKFTRSLSMPDTSEDIPPPPQSVPPSPPPPSPTTYNCPKSPTPRVYGTIKPAFNQNSAAKVSPATRSDTVATMMREKGMYFRRELDRYSLDSEDLYSRNAGPQANFRNKRGQMPENPYSEVGKIASKAVYVPAKPARRKGMLVKQSNVEDSPEKTCSIPIPTIIVKEPSTSSSGKSSQGSSMEIDPQAPEPPSQLRPDESLTVSSPFAAAIAGAVRDREKRLEARRNSPAFLSTDLGDEDVGLGPPAPRTRPSMFPEEGDFADEDSAEQLSSPMPSATPREPENHFVGGAEASAPGEAGRPLNSTSKAQGPESSPAVPSASSGTAGPGNYVHPLTGRLLDPSSPLALALSARDRAMKESQQGPKGEAPKADLNKPLYIDTKMRPSLDAGFPTVTRQNTRGPLRRQETENKYETDLGRDRKGDDKKNMLIDIMDTSQQKSAGLLMVHTVDATKLDNALQEEDEKAEVEMKPDSSPSEVPEGVSETEGALQISAAPEPTTVPGRTIVAVGSMEEAVILPFRIPPPPLASVDLDEDFIFTEPLPPPLEFANSFDIPDDRAASVPALSDLVKQKKSDTPQSPSLNSSQPTNSADSKKPASLSNCLPASFLPPPESFDAVADSGIEEVDSRSSSDHHLETTSTISTVSSISTLSSEGGENVDTCTVYADGQAFMVDKPPVPPKPKMKPIIHKSNALYQDALVEEDVDSFVIPPPAPPPPPGSAQPGMAKVLQPRTSKLWGDVTEIKSPILSGPKANVISELNSILQQMNREKLAKPGEGLDSPMGAKSASLAPRSPEIMSTISGTRSTTVTFTVRPGTSQPITLQSRPPDYESRTSGTRRAPSPVVSPTEMNKETLPAPLSAATASPSPALSDVFSLPSQPPSGDLFGLNPAGRSRSPSPSILQQPISNKPFTTKPVHLWTKPDVADWLESLNLGEHKEAFMDNEIDGSHLPNLQKEDLIDLGVTRVGHRMNIERALKQLLDR

SEQ ID NO: 78552 - protein, 281 aa, Homo sapiens
  Payload ID: 15646
  Gene Symbol: SHANK2
  Gene Name: SH3 and multiple ankyrin repeat domains 2
  Uniprot ID: Q9UPX8
  ENSP ID: ENSP00000387324
MMMNVPGGGAAAVMMTGYNNGRCPRNSLYSDCIIEEKTVVLQKKDNEGFGFVLRGAKADTPIEEFTPTPAFPALQYLESVDEGGVAWQAGLRTGDFLIEVNNENVVKVGHRQVVNMIRQGGNHLVLKVVTVTRNLDPDDTARKKAPPPPKRAPTTALTLRSKSMTSELEELVDKASVRKKKDKPEEIVPASKPSRAAENMAVEPRVATIKQRPSSRCFPAGSDMNSVYERQGIAVMTPTVPGSPKAPFLGIPRGTMRRQKSIGKKCGTPPQKLPLGFQTQP

SEQ ID NO: 78553 - protein, 212 aa, Homo sapiens
  Payload ID: 15646
  Gene Symbol: SHANK2
  Gene Name: SH3 and multiple ankyrin repeat domains 2
  ENSP ID: ENSP00000390636
  MOD_RES (1)..(1): Any amino acid
XTPLTLAAQLDDSVEVIKALKNGGAHLDFRAKDGMTALHKAARARNQVALKTLLELGASPDYKDSYGLTPLYHTAIVGGDPYCCELLLHEHATVCCKDENGWHEIHQACRYGHVQHLEHLLFYGADMSAQNASGNTALHICALYNQDSCARVLLFRGGNKELKNYNSQTPFQPQKAATRDHRWVSVPTLLLLRPPRTHEARAALPSASPRVL

SEQ ID NO: 78554 - protein, 153 aa, Homo sapiens
  Payload ID: 15646
  Gene Symbol: SHANK2
  Gene Name: SH3 and multiple ankyrin repeat domains 2
  ENSP ID: ENSP00000391570
  MOD_RES (1)..(1): Any amino acid
XTETRADRSKKLFRHYTVGSYDSFDTSSDCIIEEKTVVLQKKDNEGFGFVLRGAKADTPIEEFTPTPAFPALQYLESVDEGGVAWQAGLRTGDFLIEVNNENVVKVGHRQVVNMIRQGGNHLVLKVVTVTRNLDPDDTARKKDKPEEIVPASK

SEQ ID NO: 78555 - protein, 186 aa, Homo sapiens
  Payload ID: 15646
  Gene Symbol: SHANK2
  Gene Name: SH3 and multiple ankyrin repeat domains 2
  ENSP ID: ENSP00000392674
  MOD_RES (1)..(1): Any amino acid
XFYKLQGPSCRFHLPEGRHPGGRGTRMDVGTTSALPFSQCPSERPRRTPTAGGGPPTRWPPPGSCCAPTVTTTSMPALPTGPSAPRPPRTAACHPSCCSRCPASPRGPRRPLGATCPGPAAGPHRSTGWAAQARTARGRSLSGMSGRLLLLVPTRTHSRPSSTRGPSGSSTVPCPGGSSSLSSHTN

SEQ ID NO: 78556 - protein, 1470 aa, Homo sapiens
  Payload ID: 15646
  Gene Symbol: SHANK2
  Gene Name: SH3 and multiple ankyrin repeat domains 2
  Uniprot ID: Q9UPX8
  ENSP ID: ENSP00000394536
MKSLLNAFTKKEVPFREAPAYSNRRRRPPNTLAAPRVLLRSNSDNNLNASAPDWAVCSTATSHRSLSPQLLQQMPSKPEGAAKTIGSYVPGPRSRSPSLNRLGGAGEDGKRPQPLWHVGSPFALGANKDSLSAFEYPGPKRKLYSAVPGRLFVAVKPYQPQVDGEIPLHRGDRVKVLSIGEGGFWEGSARGHIGWFPAECVEEVQCKPRDSQAETRADRSKKLFRHYTVGSYDSFDTSSDCIIEEKTVVLQKKDNEGFGFVLRGAKADTPIEEFTPTPAFPALQYLESVDEGGVAWQAGLRTGDFLIEVNNENVVKVGHRQVVNMIRQGGNHLVLKVVTVTRNLDPDDTARKKAPPPPKRAPTTALTLRSKSMTSELEELVDKASVRKKKDKPEEIVPASKPSRAAENMAVEPRVATIKQRPSSRCFPAGSDMNSVYERQGIAVMTPTVPGSPKAPFLGIPRGTMRRQKSIDSRIFLSGITEEERQFLAPPMLKFTRSLSMPDTSEDIPPPPQSVPPSPPPPSPTTYNCPKSPTPRVYGTIKPAFNQNSAAKVSPATRSDTVATMMREKGMYFRRELDRYSLDSEDLYSRNAGPQANFRNKRGQMPENPYSEVGKIASKAVYVPAKPARRKGMLVKQSNVEDSPEKTCSIPIPTIIVKEPSTSSSGKSSQGSSMEIDPQAPEPPSQLRPDESLTVSSPFAAAIAGAVRDREKRLEARRNSPAFLSTDLGDEDVGLGPPAPRTRPSMFPEEGDFADEDSAEQLSSPMPSATPREPENHFVGGAEASAPGEAGRPLNSTSKAQGPESSPAVPSASSGTAGPGNYVHPLTGRLLDPSSPLALALSARDRAMKESQQGPKGEAPKADLNKPLYIDTKMRPSLDAGFPTVTRQNTRGPLRRQETENKYETDLGRDRKGDDKKNMLIDIMDTSQQKSAGLLMVHTVDATKLDNALQEEDEKAEVEMKPDSSPSEVPEGVSETEGALQISAAPEPTTVPGRTIVAVGSMEEAVILPFRIPPPPLASVDLDEDFIFTEPLPPPLEFANSFDIPDDRAASVPALSDLVKQKKSDTPQSPSLNSSQPTNSADSKKPASLSNCLPASFLPPPESFDAVADSGIEEVDSRSSSDHHLETTSTISTVSSISTLSSEGGENVDTCTVYADGQAFMVDKPPVPPKPKMKPIIHKSNALYQDALVEEDVDSFVIPPPAPPPPPGSAQPGMAKVLQPRTSKLWGDVTEIKSPILSGPKANVISELNSILQQMNREKLAKPGEGLDSPMGAKSASLAPRSPEIMSTISGTRSTTVTFTVRPGTSQPITLQSRPPDYESRTSGTRRAPSPVVSPTEMNKETLPAPLSAATASPSPALSDVFSLPSQPPSGDLFGLNPAGRSRSPSPSILQQPISNKPFTTKPVHLWTKPDVADWLESLNLGEHKEAFMDNEIDGSHLPNLQKEDLIDLGVTRVGHRMNIERALKQLLDR

SEQ ID NO: 78557 - protein, 271 aa, Homo sapiens
  Payload ID: 15646
  Gene Symbol: SHANK2
  Gene Name: SH3 and multiple ankyrin repeat domains 2
  ENSP ID: ENSP00000394939
MMMNVPGGGAAAVMMTGYNNGRCPRNSLYSDCIIEEKTVVLQKKDNEGFGFVLRGAKADTPIEEFTPTPAFPALQYLESVDEGGVAWQAGLRTGDFLIEVNNENVVKVGHRQVVNMIRQGGNHLVLKVVTVTRNLDPDDTARKKAPPPPKRAPTTALTLRSKSMTSELEELDKPEEIVPASKPSRAAENMAVEPRVATIKQRPSSRCFPAGSDMNSVYERQGIAVMTPTVPGSPKAPFLGIPRGTMRRQKSIGKKCGTPPQKLPLGFQTQP

SEQ ID NO: 78558 - protein, 1261 aa, Homo sapiens [sequence omitted]

SEQ ID NO: 78559 - protein, 1128 aa, Homo sapiens
  Payload ID: 15646
  Gene Symbol: SHANK2
  Gene Name: SH3 and multiple ankyrin repeat domains 2
  ENSP ID: ENSP00000402944
LVLKVVTVTRNLDPDDTARKKAPPPPKRAPTTALTLRSKSMTSELEELDKPEEIVPASKPSRAAENMAVEPRVATIKQRPSSRCFPAGSDMNSVYERQGIAVMTPTVPGSPKAPFLGIPRGTMRRQKSIDSRIFLSGITEEERQFLAPPMLKFTRSLSMPDTSEDIPPPPQSVPPSPPPPSPTTYNCPKSPTPRVYGTIKPAFNQNSAAKVSPATRSDTVATMMREKGMYFRRELDRYSLDSEDLYSRNAGPQANFRNKRGQMPENPYSEVGKIASKAVYVPAKPARRKGMLVKQSNVEDSPEKTCSIPIPTIIVKEPSTSSSGKSSQGSSMEIDPQAPEPPSQLRPDESLTVSSPFAAAIAGAVRDREKRLEARRNSPAFLSTDLGDEDVGLGPPAPRTRPSMFPEEGDFADEDSAEQLSSPMPSATPREPENHFVGGAEASAPGEAGRPLNSTSKAQGPESSPAVPSASSGTAGPGNYVHPLTGRLLDPSSPLALALSARDRAMKESQQGPKGEAPKADLNKPLYIDTKMRPSLDAGFPTVTRQNTRGPLRRQETENKYETDLGRDRKGDDKKNMLIDIMDTSQQKSAGLLMVHTVDATKLDNALQEEDEKAEVEMKPDSSPSEVPEGVSETEGALQISAAPEPTTVPGRTIVAVGSMEEAVILPFRIPPPPLASVDLDEDFIFTEPLPPPLEFANSFDIPDDRAASVPALSDLVKQKKSDTPQSPSLNSSQPTNSADSKKPASLSNCLPASFLPPPESFDAVADSGIEEVDSRSSSDHHLETTSTISTVSSISTLSSEGGENVDTCTVYADGQAFMVDKPPVPPKPKMKPIIHKSNALYQDALVEEDVDSFVIPPPAPPPPPGSAQPGMAKVLQPRTSKLWGDVTEIKSPILSGPKANVISELNSILQQMNREKLAKPGEGLDSPMGAKSASLAPRSPEIMSTISGTRSTTVTFTVRPGTSQPITLQSRPPDYESRTSGTRRAPSPVVSPTEMNKETLPAPLSAATASPSPALSDVFSLPSQPPSGDLFGLNPAGRSRSPSPSILQQPISNKPFTTKPVHLWTKPDVADWLESLNLGEHKEAFMDNEIDGSHLPNLQKEDLIDLGVTRVGHRMNIERALKQLLDR

SEQ ID NO: 78560 - protein, 257 aa, Homo sapiens
  Payload ID: 15646
  Gene Symbol: SHANK2
  Gene Name: SH3 and multiple ankyrin repeat domains 2
  ENSP ID: ENSP00000414876
  MOD_RES (1)..(1): Any amino acid
XMNVPGGGAAAVMMTGYNNGRCPRNSLYSDCIIEEKTVVLQKKDNEGFGFVLRGAKADTPIEEFTPTPAFPALQYLESVDEGGVAWQAGLRTGDFLIEVNNENVVKVGHRQVVNMIRQGGNHLVLKVVTVTRNLDPDDTARKKAPPPPKRAPTTALTLRSKSMTSELEELVDKASVRKKKDKPEEIVPASKPSRAAENMAVEPRVATIKQRPSSRCFPAGSDMNSVYERQGIAVMTPTVPGSPKAPFLGIPREARRS

SEQ ID NO: 78561 - protein, 1849 aa, Homo sapiens
  Payload ID: 15646
  Gene Symbol: SHANK2
  Gene Name: SH3 and multiple ankyrin repeat domains 2
  Uniprot ID: Q9UPX8
  ENSP ID: ENSP00000469689
MPRSPTSSEDEMAQSFSDYSVGSESDSSKEETIYDTIRATAEKPGGARTEESQGNTLVIRVVIHDLQQTKCIRFNPDATVWVAKQRILCTLTQSLKDVLNYGLFQPASNGRDGKFLDEERLLREYPQPVGEGVPSLEFRYKKRVYKQASLDEKQLAKLHTKTNLKKCMDHIQHRLVEKITKMLDRGLDPNFHDPETGETPLTLAAQLDDSVEVIKALKNGGAHLDFRAKDGMTALHKAARARNQVALKTLLELGASPDYKDSYGLTPLYHTAIVGGDPYCCELLLHEHATVCCKDENGWHEIHQACRYGHVQHLEHLLFYGADMSAQNASGNTALHICALYNQDSCARVLLFRGGNKELKNYNSQTPFQVAIIAGNFELAEYIKNHKETDIVPFREAPAYSNRRRRPPNTLAAPRVLLRSNSDNNLNASAPDWAVCSTATSHRSLSPQLLQQMPSKPEGAAKTIGSYVPGPRSRSPSLNRLGGAGEDGKRPQPLWHVGSPFALGANKDSLSAFEYPGPKRKLYSAVPGRLFVAVKPYQPQVDGEIPLHRGDRVKVLSIGEGGFWEGSARGHIGWFPAECVEEVQCKPRDSQAETRADRSKKLFRHYTVGSYDSFDTSSDCIIEEKTVVLQKKDNEGFGFVLRGAKADTPIEEFTPTPAFPALQYLESVDEGGVAWQAGLRTGDFLIEVNNENVVKVGHRQVVNMIRQGGNHLVLKVVTVTRNLDPDDTARKKAPPPPKRAPTTALTLRSKSMTSELEELVDKASVRKKKDKPEEIVPASKPSRAAENMAVEPRVATIKQRPSSRCFPAGSDMNSVYERQGIAVMTPTVPGSPKAPFLGIPRGTMRRQKSIDSRIFLSGITEEERQFLAPPMLKFTRSLSMPDTSEDIPPPPQSVPPSPPPPSPTTYNCPKSPTPRVYGTIKPAFNQNSAAKVSPATRSDTVATMMREKGMYFRRELDRYSLDSEDLYSRNAGPQANFRNKRGQMPENPYSEVGKIASKAVYVPAKPARRKGMLVKQSNVEDSPEKTCSIPIPTIIVKEPSTSSSGKSSQGSSMEIDPQAPEPPSQLRPDESLTVSSPFAAAIAGAVRDREKRLEARRNSPAFLSTDLGDEDVGLGPPAPRTRPSMFPEEGDFADEDSAEQLSSPMPSATPREPENHFVGGAEASAPGEAGRPLNSTSKAQGPESSPAVPSASSGTAGPGNYVHPLTGRLLDPSSPLALALSARDRAMKESQQGPKGEAPKADLNKPLYIDTKMRPSLDAGFPTVTRQNTRGPLRRQETENKYETDLGRDRKGDDKKNMLIDIMDTSQQKSAGLLMVHTVDATKLDNALQEEDEKAEVEMKPDSSPSEVPEGVSETEGALQISAAPEPTTVPGRTIVAVGSMEEAVILPFRIPPPPLASVDLDEDFIFTEPLPPPLEFANSFDIPDDRAASVPALSDLVKQKKSDTPQSPSLNSSQPTNSADSKKPASLSNCLPASFLPPPESFDAVADSGIEEVDSRSSSDHHLETTSTISTVSSISTLSSEGGENVDTCTVYADGQAFMVDKPPVPPKPKMKPIIHKSNALYQDALVEEDVDSFVIPPPAPPPPPGSAQPGMAKVLQPRTSKLWGDVTEIKSPILSGPKANVISELNSILQQMNREKLAKPGEGLDSPMGAKSASLAPRSPEIMSTISGTRSTTVTFTVRPGTSQPITLQSRPPDYESRTSGTRRAPSPVVSPTEMNKETLPAPLSAATASPSPALSDVFSLPSQPPSGDLFGLNPAGRSRSPSPSILQQPISNKPFTTKPVHLWTKPDVADWLESLNLGEHKEAFMDNEIDGSHLPNLQKEDLIDLGVTRVGHRMNIERALKQLLDR

SEQ ID NO: 78562 - protein, 126 aa, Homo sapiens
  Payload ID: 15646
  Gene Symbol: SHANK2
  Gene Name: SH3 and multiple ankyrin repeat domains 2
  ENSP ID: ENSP00000476264
MPRSPTSSEDEMAQSFSDYSVGSESDSSKEETIYDTIRATAEKPGGARTEESQGNTLVIRVVIHDLQQTKCIRFNPDATVWVAKQRILCTLTQSLKDVLNYGLFQPASNGRDGRSFPGVSIQEAGV

SEQ ID NO: 78563 - protein, 108 aa, Homo sapiens
  Payload ID: 15646
  Gene Symbol: SHANK2
  Gene Name: SH3 and multiple ankyrin repeat domains 2
  ENSP ID: ENSP00000482553
  MOD_RES (1)..(1): Any amino acid
XEHATVCCKDENGWHEIHQACRYGHVQHLEHLLFYGADMSAQNASGNTALHICALYNQDSCARVLLFRGGNKELKNYNSQTPFQVAIIAGNFELAEYIKNHKETDIGE

SEQ ID NO: 78564 - protein, 74 aa, Homo sapiens
  Payload ID: 15646
  Gene Symbol: SHANK2
  Gene Name: SH3 and multiple ankyrin repeat domains 2
  ENSP ID: ENSP00000483920
  MOD_RES (1)..(1): Any amino acid
XAGFESSPSTCSWFPADRQNMGWALSPARWVWHAQLCSEVHRAQTPATSPRVPAALAPRGRAARLSFLPSRKVI

SEQ ID NO: 78565 - protein, 1730 aa, Homo sapiens
  Payload ID: 15647
  Gene Symbol: SHANK3
  Gene Name: SH3 and multiple ankyrin repeat domains 3
  ENSP ID: ENSP00000489147
MDGPGASAVVVRVGIPDLQQTKCLRLDPAAPVWAAKQRVLCALNHSLQDALNYGLFQPPSRGRAGKFLDEERLLQEYPPNLDTPLPYLEFRYKRRVYAQNLIDDKQFAKLHTKANLKKFMDYVQLHSTDKVARLLDKGLDPNFHDPDSGECPLSLAAQLDNATDLLKVLKNGGAHLDFRTRDGLTAVHCATRQRNAAALTTLLDLGASPDYKDSRGLTPLYHSALGGGDALCCELLLHDHAQLGITDENGWQEIHQACRFGHVQHLEHLLFYGADMGAQNASGNTALHICALYNQESCARVLLFRGANRDVRNYNSQTAFQVAIIAGNFELAEVIKTHKDSDVVPFRETPSYAKRRRLAGPSGLASPRPLQRSASDINLKGEAQPAASPGPSLRSLPHQLLLQRLQEEKDRDRDADQESNISGPLAGRAGQSKISPAGPGDPGPGPGGPAPPAPPAPPPRGPKRKLYSAVPGRKFIAVKAHSPQGEGEIPLHRGEAVKVLSIGEGGFWEGTVKGRTGWFPADCVEEVQMRQHDTRPETREDRTKRLFRHYTVGSYDSLTSHSDYVIDDKVAVLQKRDHEGFGFVLRGAKAETPIEEFTPTPAFPALQYLESVDVEGVAWRAGLRTGDFLIEVNGVNVVKVGHKQVVALIRQGGNRLVMKVVSVTRKPEEDGARRRAPPPPKRAPSTTLTLRSKSMTAELEELASIRRRKGEKLDEMLAAAAEPTLRPDIADADSRAATVKQRPTSRRITPAEISSLFERQGLPGPEKLPGSLRKGIPRTKSVGEDEKLASLLEGRFPRSTSMQDPVREGRGIPPPPQTAPPPPPAPYYFDSGPPPAFSPPPPPGRAYDTVRSSFKPGLEARLGAGAAGLYEPGAALGPLPYPERQKRARSMIILQDSAPESGDAPRPPPAATPPERPKRRPRPPGPDSPYANLGAFSASLFAPSKPQRRKSPLVKQLQVEDAQERAALAVGSPGPGGGSFAREPSPTHRGPRPGGLDYGAGDGPGLAFGGPGPAKDRRLEERRRSTVFLSVGAIEGSAPGADLPSLQPSRSIDERLLGTGPTAGRDLLLPSPVSALKPLVSGPSLGPSGSTFIHPLTGKPLDPSSPLALALAARERALASQAPSRSPTPVHSPDADRPGPLFVDVQARDPERGSLASPAFSPRSPAWIPVPARREAEKVPREERKSPEDKKSMILSVLDTSLQRPAGLIVVHATSNGQEPSRLGGAEEERPGTPELAPAPMQSAAVAEPLPSPRAQPPGGTPADAGPGQGSSEEEPELVFAVNLPPAQLSSSDEETREELARIGLVPPPEEFANGVLLATPLAGPGPSPTTVPSPASGKPSSEPPPAPESAADSGVEEADTRSSSDPHLETTSTISTVSSMSTLSSESGELTDTHTSFADGHTFLLEKPPVPPKPKLKSPLGKGPVTFRDPLLKQSSDSELMAQQHHAASAGLASAAGPARPRYLFQRRSKLWGDPVESRGLPGPEDDKPTVISELSSRLQQLNKDTRSLGEEPVGGLGSLLDPAKKSPIAAARLFSSLGELSSISAQRSPGGPGGGASYSVRPSGRYPVARRAPSPVKPASLERVEGLGAGAGGAGRPFGLTPPTILKSSSLSIPHEPKEVRFVVRSVSARSRSPSPSPLPSPASGPGPGAPGPRRPFQQKPLQLWSKFDVGDWLESIHLGEHRDRFEDHEIEGAHLPALTKDDFVELGVTRVGHRMNIERALRQLDGS

SEQ ID NO: 78566 - protein, 1724 aa, Homo sapiens
  Payload ID: 15647
  Gene Symbol: SHANK3
  Gene Name: SH3 and multiple ankyrin repeat domains 3
  ENSP ID: ENSP00000489407
MDGPGASAVVVRVGIPDLQQTKCLRLDPAAPVWAAKQRVLCALNHSLQDALNYGLFQPPSRGRAGKFLDEERLLQEYPPNLDTPLPYLEFRYKRRVYAQNLIDDKQFAKLHTKANLKKFMDYVQLHSTDKVARLLDKGLDPNFHDPDSGECPLSLAAQLDNATDLLKVLKNGGAHLDFRTRDGLTAVHCATRQRNAAALTTLLDLGASPDYKDSRGLTPLYHSALGGGDALCCELLLHDHAQLGITDENGWQEIHQACRFGHVQHLEHLLFYGADMGAQNASGNTALHICALYNQESCARVLLFRGANRDVRNYNSQTAFQVAIIAGNFELAEVIKTHKDSDVVPFRETPSYAKRRRLAGPSGLASPRPLQRSASDINLKGEAQPAASPGPSLRSLPHQLLLQRLQEEKDRDRDADQESNISGPLAGRAGQSKIREGAGRPCPAPPAPPAPPPRGPKRKLYSAVPGRKFIAVKAHSPQGEGEIPLHRGEAVKVLSIGEGGFWEGTVKGRTGWFPADCVEEVQMRQHDTRPETREDRTKRLFRHYTVGSYDSLTSHSDYVIDDKVAVLQKRDHEGFGFVLRGAKAETPIEEFTPTPAFPALQYLESVDVEGVAWRAGLRTGDFLIEVNGVNVVKVGHKQVVALIRQGGNRLVMKVVSVTRKPEEDGARRRAPPPPKRAPSTTLTLRSKSMTAELEELASIRRRKGEKLDEMLAAAAEPTLRPDIADADSRAATVKQRPTSRRITPAEISSLFERQGLPGPEKLPGSLRKGIPRTKSVGEDEKLASLLEGRFPRSTSMQDPVREGRGIPPPPQTAPPPPPAPYYFDSGPPPAFSPPPPPGRAYDTVRSSFKPGLEARLGAGAAGLYEPGAALGPLPYPERQKRARSMIILQDSAPESGDAPRPPPAATPPERPKRRPRPPGPDSPYANLGAFSASLFAPSKPQRRKSPLVKQLQVEDAQERAALAVGSPGPGGGSFAREPSPTHRGPRPGGLDYGAGDGPGLAFGGPGPAKDRRLEERRRSTVFLSVGAIEGSAPGADLPSLQPSRSIDERLLGTGPTAGRDLLLPSPVSALKPLVSGPSLGPSGSTFIHPLTGKPLDPSSPLALALAARERALASQAPSRSPTPVHSPDADRPGPLFVDVQARDPERGSLASPAFSPRSPAWIPVPARREAEKVPREERKSPEDKKSMILSVLDTSLQRPAGLIVVHATSNGQEPSRLGGAEEERPGTPELAPAPMQSAAVAEPLPSPRAQPPGGTPADAGPGQGSSEEEPELVFAVNLPPAQLSSSDEETREELARIGLVPPPEEFANGVLLATPLAGPGPSPTTVPSPASGKPSSEPPPAPESAADSGVEEADTRSSSDPHLETTSTISTVSSMSTLSSESGELTDTHTSFADGHTFLLEKPPVPPKPKLKSPLGKGPVTFRDPLLKQSSDSELMAQQHHAASAGLASAAGPARPRYLFQRRSKLWGDPVESRGLPGPEDDKPTVISELSSRLQQLNKDTRSLGEEPVGGLGSLLDPAKKSPIAAARLFSSLGELSSISAQRSPGGPGGGASYSVRPSGRYPVARRAPSPVKPASLERVEGLGAGAGGAGRPFGLTPPTILKSSSLSIPHEPKEVRFVVRSVSARSRSPSPSPLPSPASGPGPGAPGPRRPFQQKPLQLWSKFDVGDWLESIHLGEHRDRFEDHEIEGAHLPALTKDDFVELGVTRVGHRMNIERALRQLDGS

SEQ ID NO: 78567 - protein, 1105 aa, Homo sapiens
  Payload ID: 15648
  Gene Symbol: SH3PXD2A
  Gene Name: SH3 and PX domains 2A
  Uniprot ID: Q5TCZ1
  ENSP ID: ENSP00000348215
MLAYCVQDATVVDVEKRRNPSKHYVYIINVTWSDSTSQTIYRRYSKFFDLQMQLLDKFPIEGGQKDPKQRIIPFLPGKILFRRSHIRDVAVKRLKPIDEYCRALVRLPPHISQCDEVFRFFEARPEDVNPPKEDYGSSKRKSVWLSSWAESPKKDVTGADATAEPMILEQYVVVSNYKKQENSELSLQAGEVVDVIEKNESGWWFVSTSEEQGWVPATYLEAQNGTRDDSDINTSKTGEEEKYVTVQPYTSQSKDEIGFEKGVTVEVIRKNLEGWWYIRYLGKEGWAPASYLKKAKDDLPTRKKNLAGPVEIIGNIMEISNLLNKKASGDKETPPAEGEGHEAPIAKKEISLPILCNASNGSAVGVPDRTVSRLAQGSPAVARIAPQRAQISSPNLRTRPPPRRESSLGFQLPKPPEPPSVEVEYYTIAEFQSCISDGISFRGGQKAEVIDKNSGGWWYVQIGEKEGWAPASYIDKRKKPNLSRRTSTLTRPKVPPPAPPSKPKEAEEGPTGASESQDSPRKLKYEEPEYDIPAFGFDSEPELSEEPVEDRASGERRPAQPHRPSPASSLQRARFKVGESSEDVALEEETIYENEGFRPYAEDTLSARGSSGDSDSPGSSSLSLTRKNSPKSGSPKSSSLLKLKAEKNAQAEMGKNHSSASFSSSITINTTCCSSSSSSSSSLSKTSGDLKPRSASDAGIRGTPKVRAKKDADANAGLTSCPRAKPSVRPKPFLNRAESQSQEKMDISTLRRQLRPTGQLRGGLKGSKSEDSELPPQTASEAPSEGSRRSSSDLITLPATTPPCPTKKEWEGPATSYMTCSAYQKVQDSEISFPAGVEVQVLEKQESGWWYVRFGELEGWAPSHYLVLDENEQPDPSGKELDTVPAKGRQNEGKSDSLEKIERRVQALNTVNQSKKATPPIPSKPPGGFGKTSGTPAVKMRNGVRQVAVRPQSVFVSPPPKDNNLSCALRRNESLTATDGLRGVRRNSSFSTARSAAAEAKGRLAERAASQGSDSPLLPAQRNSIPVSPVRPKPIEKSQFIHNNLKDVYVSIADYEGDEETAGFQEGVSMEVLERNPNGWWYCQILDGVKPFKGWVPSNYLEKKN

SEQ ID NO: 78568 - protein, 1133 aa, Homo sapiens
  Payload ID: 15648
  Gene Symbol: SH3PXD2A
  Gene Name: SH3 and PX domains 2A
  Uniprot ID: Q5TCZ1
  ENSP ID: ENSP00000358789
MLAYCVQDATVVDVEKRRNPSKHYVYIINVTWSDSTSQTIYRRYSKFFDLQMQLLDKFPIEGGQKDPKQRIIPFLPGKILFRRSHIRDVAVKRLKPIDEYCRALVRLPPHISQCDEVFRFFEARPEDVNPPKEDYGSSKRKSVWLSSWAESPKKDVTGADATAEPMILEQYVVVSNYKKQENSELSLQAGEVVDVIEKNESGWWFVSTSEEQGWVPATYLEAQNGTRDDSDINTSKTGEVSKRRKAHLRRLDRRWTLGGMVNRQHSREEKYVTVQPYTSQSKDEIGFEKGVTVEVIRKNLEGWWYIRYLGKEGWAPASYLKKAKDDLPTRKKNLAGPVEIIGNIMEISNLLNKKASGDKETPPAEGEGHEAPIAKKEISLPILCNASNGSAVGVPDRTVSRLAQGSPAVARIAPQRAQISSPNLRTRPPPRRESSLGFQLPKPPEPPSVEVEYYTIAEFQSCISDGISFRGGQKAEVIDKNSGGWWYVQIGEKEGWAPASYIDKRKKPNLSRRTSTLTRPKVPPPAPPSKPKEAEEGPTGASESQDSPRKLKYEEPEYDIPAFGFDSEPELSEEPVEDRASGERRPAQPHRPSPASSLQRARFKVGESSEDVALEEETIYENEGFRPYAEDTLSARGSSGDSDSPGSSSLSLTRKNSPKSGSPKSSSLLKLKAEKNAQAEMGKNHSSASFSSSITINTTCCSSSSSSSSSLSKTSGDLKPRSASDAGIRGTPKVRAKKDADANAGLTSCPRAKPSVRPKPFLNRAESQSQEKMDISTLRRQLRPTGQLRGGLKGSKSEDSELPPQTASEAPSEGSRRSSSDLITLPATTPPCPTKKEWEGPATSYMTCSAYQKVQDSEISFPAGVEVQVLEKQESGWWYVRFGELEGWAPSHYLVLDENEQPDPSGKELDTVPAKGRQNEGKSDSLEKIERRVQALNTVNQSKKATPPIPSKPPGGFGKTSGTPAVKMRNGVRQVAVRPQSVFVSPPPKDNNLSCALRRNESLTATDGLRGVRRNSSFSTARSAAAEAKGRLAERAASQGSDSPLLPAQRNSIPVSPVRPKPIEKSQFIHNNLKDVYVSIADYEGDEETAGFQEGVSMEVLERNPNGWWYCQILDGVKPFKGWVPSNYLEKKN

SEQ ID NO: 78569 - protein, 1060 aa, Homo sapiens
  Payload ID: 15648
  Gene Symbol: SH3PXD2A
  Gene Name: SH3 and PX domains 2A
  ENSP ID: ENSP00000395781
  MOD_RES (1)..(1): Any amino acid
XFFDLQMQLLDKFPIEGGQKDPKQRIIPFLPGKILFRRSHIRDVAVKRLKPIDEYCRALVRLPPHISQCDEVFRFFEARPEDVNPPKEDYGSSKRKSVWLSSWAESPKKDVTGADATAEPMILEQYVVVSNYKKQENSELSLQAGEVVDVIEKNESGWWFVSTSEEQGWVPATYLEAQNGTRDDSDINTSKTGEEEKYVTVQPYTSQSKDEIGFEKGVTVEVIRKNLEGWWYIRYLGKEGWAPASYLKKAKDDLPTRKKNLAGPVEIIGNIMEISNLLNKKASGDKETPPAEGEGHEAPIAKKEISLPILCNASNGSAVGVPDRTVSRLAQGSPAVARIAPQRAQISSPNLRTRPPPRRESSLGFQLPKPPEPPSVEVEYYTIAEFQSCISDGISFRGGQKAEVIDKNSGGWWYVQIGEKEGWAPASYIDKRKKPNLSRRTSTLTRPKVPPPAPPSKPKEAEEGPTGASESQDSPRKLKYEEPEYDIPAFGFDSEPELSEEPVEDRASGERRPAQPHRPSPASSLQRARFKVGESSEDVALEEETIYENEGFRPYAEDTLSARGSSGDSDSPGSSSLSLTRKNSPKSGSPKSSSLLKLKAEKNAQAEMGKNHSSASFSSSITINTTCCSSSSSSSSSLSKTSGDLKPRSASDAGIRGTPKVRAKKDADANAGLTSCPRAKPSVRPKPFLNRAESQSQEKMDISTLRRQLRPTGQLRGGLKGSKSEDSELPPQTASEAPSEGSRRSSSDLITLPATTPPCPTKKEWEGPATSYMTCSAYQKVQDSEISFPAGVEVQVLEKQESGWWYVRFGELEGWAPSHYLVLDENEQPDPSGKELDTVPAKGRQNEGKSDSLEKIERRVQALNTVNQSKKATPPIPSKPPGGFGKTSGTPAVKMRNGVRQVAVRPQSVFVSPPPKDNNLSCALRRNESLTATDGLRGVRRNSSFSTARSAAAEAKGRLAERAASQGSDSPLLPAQRNSIPVSPVRPKPIEKSQFIHNNLKDVYVSIADYEGDEETAGFQEGVSMEVLERNPNGWWYCQILDGVKPFKGWVPSNYLEKKN

SEQ ID NO: 78570 - protein, 911 aa, Homo sapiens
  Payload ID: 15649
  Gene Symbol: SH3PXD2B
  Gene Name: SH3 and PX domains 2B
  Uniprot ID: A1X283
  ENSP ID: ENSP00000309714
MPPRRSIVEVKVLDVQKRRVPNKHYVYIIRVTWSSGSTEAIYRRYSKFFDLQMQMLDKFPMEGGQKDPKQRIIPFLPGKILFRRSHIRDVAVKRLIPIDEYCKALIQLPPYISQCDEVLQFFETRPEDLNPPKEEHIGKKKSGGDQTSVDPMVLEQYVVVANYQKQESSEISLSVGQVVDIIEKNESGWWFVSTAEEQGWVPATCLEGQDGVQDEFSLQPEEEEKYTVIYPYTARDQDEMNLERGAVVEVIQKNLEGWWKIRYQGKEGWAPASYLKKNSGEPLPPKPGPGSPSHPGALDLDGVSRQQNAVGREKELLSSQRDGRFEGRPVPDGDAKQRSPKMRQRPPPRRDMTIPRGLNLPKPPIPPQVEEEYYTIAEFQTTIPDGISFQAGLKVEVIEKNLSGWWYIQIEDKEGWAPATFIDKYKKTSNASRPNFLAPLPHEVTQLRLGEAAALENNTGSEATGPSRPLPDAPHGVMDSGLPWSKDWKGSKDVLRKASSDMSASAGYEEISDPDMEEKPSLPPRKESIIKSEGELLERERERQRTEQLRGPTPKPPGVILPMMPAKHIPPARDSRRPEPKPDKSRLFQLKNDMGLECGHKVLAKEVKKPNLRPISKSKTDLPEEKPDATPQNPFLKSRPQVRPKPAPSPKTEPPQGEDQVDICNLRSKLRPAKSQDKSLLDGEGPQAVGGQDVAFSRSFLPGEGPGRAQDRTGKQDGLSPKEISCRAPPRPAKTTDPVSKSVPVPLQEAPQQRPVVPPRRPPPPKKTSSSSRPLPEVRGPQCEGHESRAAPTPGRALLVPPKAKPFLSNSLGGQDDTRGKGSLGPWGTGKIGENREKAAAASVPNADGLKDSLYVAVADFEGDKDTSSFQEGTVFEVREKNSSGWWFCQVLSGAPSWEGWIPSNYLRKKP

SEQ ID NO: 78571 - protein, 81 aa, Homo sapiens
  Payload ID: 15649
  Gene Symbol: SH3PXD2B
  Gene Name: SH3 and PX domains 2B
  ENSP ID: ENSP00000428076
  MOD_RES (1)..(1): Any amino acid
XPDGDAKQRSPKMRQRPPPRRDMTIPRGLNLPKPPIPPQVEEEYYTIAEFQTTIPDGISFQAGLKVEEQWALPTTSCLLIG

SEQ ID NO: 78572 - protein, 430 aa, Homo sapiens
  Payload ID: 15649
  Gene Symbol: SH3PXD2B
  Gene Name: SH3 and PX domains 2B
  ENSP ID: ENSP00000430890
MPPRRSIVEVKVLDVQKRRVPNKHYVYIIRVTWSSGSTEAIYRRYSKFFDLQMQMLDKFPMEGGQKDPKQRIIPFLPGKILFRRSHIRDVAVKRLIPIDEYCKALIQLPPYISQCDEVLQFFETRPEDLNPPKEEHIGKKKSGGDQTSVDPMVLEQYVVVANYQKQESSEISLSVGQVVDIIEKNESGWWFVSTAEEQGWVPATCLEGQDGVQDEFSLQPEEEEKYTVIYPYTARDQDEMNLERGAVVEVIQKNLEGWWKIRYQGKEGWAPASYLKKNSGEPLPPKPGPGSPSHPGALDLDGVSRQQNAVGREKELLSSQRDGRFEGRPVPDGDAKQRSPKMRQRPPPRRDMTIPRGLNLPKPPIPPQVEEEYYTIAEFQTTIPDGISFQAGLKVEDHKNVHLESPVEVPLRRIKMRTALGKHVAASMEM

SEQ ID NO: 78573 - protein, 342 aa, Homo sapiens
  Payload ID: 15650
  Gene Symbol: SH3YL1
  Gene Name: SH3 and SYLF domain containing 1
  Uniprot ID: Q96HL8
  ENSP ID: ENSP00000348471
MNNPIPSNLKSEAKKAAKILREFTEITSRNGPDKIIPAHVIAKAKGLAILSVIKAGFLVTARGGSGIVVARLPDGKWSAPSAIGIAGLGGGFEIGIEVSDLVIILNYDRAVEAFAKGGNLTLGGNLTVAVGPLGRNLEGNVALRSSAAVFTYCKSRGLFAGVSLEGSCLIERKETNRKFYCQDIRAYDILFGDTPRPAQAEDLYEILDSFTEKYENEGQRINARKAAREQRKSSAKELPPKPLSRPQQSSAPVQLNSGSQSNRNEYKLYPGLSSYHERVGNLNQPIEVTALYSFEGQQPGDLNFQAGDRITVISKTDSHFDWWEGKLRGQTGIFPANYVTMN

SEQ ID NO: 78574 - protein, 227 aa, Homo sapiens
  Payload ID: 15650
  Gene Symbol: SH3YL1
  Gene Name: SH3 and SYLF domain containing 1
  Uniprot ID: Q96HL8
  ENSP ID: ENSP00000383928
MVSDLVIILNYDRAVEAFAKGGNLTLGGNLTVAVGPLGRNLEGNVALRSSAAVFTYCKSRGLFAGVSLEGSCLIERKETNRKFYCQDIRAYDILFGDTPRPAQAEDLYEILDSFTEKYENEGQRINARKAAREQRKSSAKELPPKPLSRPQQSSAPVQLNSGSQSNLNQPIEVTALYSFEGQQPGDLNFQAGDRITVISKTDSHFDWWEGKLRGQTGIFPANYVTMN

SEQ ID NO: 78575 - protein, 342 aa, Homo sapiens; identical to SEQ ID NO: 78573
  Payload ID: 15650
  Gene Symbol: SH3YL1
  Gene Name: SH3 and SYLF domain containing 1
  Uniprot ID: Q96HL8
  ENSP ID: ENSP00000384269

SEQ ID NO: 78576 - protein, 323 aa, Homo sapiens
  Payload ID: 15650
  Gene Symbol: SH3YL1
  Gene Name: SH3 and SYLF domain containing 1
  Uniprot ID: Q96HL8
  ENSP ID: ENSP00000384276
MNNPIPSNLKSEAKKAAKILREFTEITSRNGPDKIIPAHVIAKAKGLAILSVIKAGFLVTARGGSGIVVARLPDGKWSAPSAIGIAGLGGGFEIGIEVSDLVIILNYDRAVEAFAKGGNLTLGGNLTVAVGPLGRNLEGNVALRSSAAVFTYCKSRGLFAGVSLEGSCLIERKETNRKFYCQDIRAYDILFGDTPRPAQAEDLYEILDSFTEKYENEGQRINARKAAREQRKSSAKELPPKPLSRPQQSSAPVQLNSGSQSNLNQPIEVTALYSFEGQQPGDLNFQAGDRITVISKTDSHFDWWEGKLRGQTGIFPANYVTMN

SEQ ID NO: 78577 - protein, 114 aa, Homo sapiens
  Payload ID: 15650
  Gene Symbol: SH3YL1
  Gene Name: SH3 and SYLF domain containing 1
  Uniprot ID: Q96HL8
  ENSP ID: ENSP00000384910
MNNPIPSNLKSEAKKAAKILREFTEITSRNGPDKIIPAHVIAKAKGLAILSVIKAGFLVTARGGSGIVVARLPDGKWSAPSAIGIAGLGGGFEIGIETHLQLHIPSEHCPGCLP

SEQ ID NO: 78578 - protein, 227 aa, Homo sapiens; identical to SEQ ID NO: 78574
  Payload ID: 15650
  Gene Symbol: SH3YL1
  Gene Name: SH3 and SYLF domain containing 1
  Uniprot ID: Q96HL8
  ENSP ID: ENSP00000385668

SEQ ID NO: 78579 - protein, 230 aa, Homo sapiens
  Payload ID: 15650
  Gene Symbol: SH3YL1
  Gene Name: SH3 and SYLF domain containing 1
  ENSP ID: ENSP00000399519
NNPIPSNLKSEAKKAAKILREFTEITSRNGPDKIIPAHVIAKAKGLAILSVIKAGFLVTARGGSGIVVARLPDGKWSAPSAIGIAGLGGGFEIGIEVSDLVIILNYDRAVEAFAKGGNLTLGGNLTVAVGPLGRFYCQDIRAYDILFGDTPRPAQAEDLYEILDSFTEKYENEGQRINARKAAREQRKSSAKELPPKPLSRPQQSSAPVQLNSGSQSKYFCCNSNTVVIK

SEQ ID NO: 78580 - protein, 50 aa, Homo sapiens
  Payload ID: 15650
  Gene Symbol: SH3YL1
  Gene Name: SH3 and SYLF domain containing 1
  ENSP ID: ENSP00000410235
MNNPIPSNLKSEAKKAAKILREFTEITSRNGPDKIIPAHVIAKAKGLAIL

SEQ ID NO: 78581 - protein, 59 aa, Homo sapiens
  Payload ID: 15650
  Gene Symbol: SH3YL1
  Gene Name: SH3 and SYLF domain containing 1
  ENSP ID: ENSP00000415723
MVSDLVIILNYDRAVEAFAKGGNLTLGGNLTVAVGPLGRNLEGNVALRSSAAVFTYCKS

SEQ ID NO: 78582 - protein, 255 aa, Homo sapiens
  Payload ID: 15650
  Gene Symbol: SH3YL1
  Gene Name: SH3 and SYLF domain containing 1
  ENSP ID: ENSP00000416312
ITSRNGPDKIIPAHVIAKAKGLAILSVIKAGFLVTARGGSGIVVARLPDGKWSAPSAIGIAGLGGGFEIGIEVSDLVIILNYDRAVEAFAKGGNLTLGGNLTVAVGPLGRFYCQDIRAYDILFGDTPRPAQAEDLYEILDSFTEKYENEGQRINARKAAREQRKSSAKELPPKPLSRPQQSSAPVQLNSGSQSNLNQPIEVTALYSFEGQQPGDLNFQAGDRITVISKTDSHFDWWEGKLRGQTGIFPANYVTMN

SEQ ID NO: 78583 - protein, 155 aa, Homo sapiens
  Payload ID: 15650
  Gene Symbol: SH3YL1
  Gene Name: SH3 and SYLF domain containing 1
  ENSP ID: ENSP00000441266
MVSDLVIILNYDRAVEAFAKGGNLTLGGNLTVAVGPLGRNLEGNVALRSSAAVFTYCKSRGLFAGVSLEGSCLIERKETNRKFYCQDIRAYDILFGDTPRPAQAEDLYEILDSFTEKYENEGQRINARKAAREQRKSSVPFGFMFHSVFSENLFL

SEQ ID NO: 78584 - protein, 98 aa, Homo sapiens
  Payload ID: 15650
  Gene Symbol: SH3YL1
  Gene Name: SH3 and SYLF domain containing 1
  ENSP ID: ENSP00000474411
  MOD_RES (1)..(1): Any amino acid
XEAFAKGGNLTLGGNLTVAVGPLGRFYCQDIRAYDILFGDTPRPAQAEDLYEILDSFTEKYENEGQRINARKAAREQRKSSVPFGFMFHSVFSENLFL

SEQ ID NO: 78585 - protein, 246 aa, Homo sapiens
  Payload ID: 15650
  Gene Symbol: SH3YL1
  Gene Name: SH3 and SYLF domain containing 1
  Uniprot ID: Q96HL8
  ENSP ID: ENSP00000485824
MVSDLVIILNYDRAVEAFAKGGNLTLGGNLTVAVGPLGRNLEGNVALRSSAAVFTYCKSRGLFAGVSLEGSCLIERKETNRKFYCQDIRAYDILFGDTPRPAQAEDLYEILDSFTEKYENEGQRINARKAAREQRKSSAKELPPKPLSRPQQSSAPVQLNSGSQSNRNEYKLYPGLSSYHERVGNLNQPIEVTALYSFEGQQPGDLNFQAGDRITVISKTDSHFDWWEGKLRGQTGIFPANYVTMN

SEQ ID NO: 78586 - protein, 1336 aa, Homo sapiens
  Payload ID: 15651
  Gene Symbol: SH3TC1
  Gene Name: SH3 domain and tetratricopeptide repeats 1
  Uniprot ID: Q8TE82
  ENSP ID: ENSP00000245105
MENLPAVTTEEPTPMGRGPVGPSGGGSTRDQVRTVVMRPSVSWEKAGPEEAKAPVRGDEAPPARVAGPAAGTPPCQMGVYPTDLTLQLLAVRRKSRLRDPGLQQTLRGQLRLLENDSREMARVLGELSARLLSIHSDQDRIVVTFKTFEEIWKFSTYHALGFTHHCLANLLMDQAFWLLLPSEEEETAIQVHVDENALRLTHESLLIQEGPFFVLCPDHHVRVMTGPRDAGNGPQALRQASGAPQGEAAPETDSSPPSPSVSSEEVAVAAAPEPLIPFHQWALRIPQDPIDDAMGGPVMPGNPLMAVGLASALADFQGSGPEEMTFRGGDLIEILGAQVPSLPWCVGRHAASGRVGFVRSSLISMQGPVSELESAIFLNEEEKSFFSEGCFSEEDARQLLRRMSGTDVCSVYSLDSVEEAETEQPQEKEIPPPCLSLEPQETLQKVKNVLEQCKTCPGCPQEPASWGLCAASSDVSLQDPEEPSFCLEAEDDWEDPEALSSLLLFLNAPGYKASFRGLYDVALPWLSSVFRSFSDEEELTGRLAQARGAAKKAGLLMALARLCFLLGRLCSRRLKLSQARVYFEEALGALEGSFGDLFLVVAVYANLASIYRKQKNREKCAQVVPKAMALLLGTPDHICSTEAEGELLQLALRRAVGGQSLQAEARACFLLARHHVHLKQPEEALPFLERLLLLHRDSGAPEAAWLSDCYLLLADIYSRKCLPHLVLSCVKVASLRTRGSLAGSLRSVNLVLQNAPQPHSLPAQTSHYLRQALASLTPGTGQALRGPLYTSLAQLYSHHGCHGPAITFMTQAVEASAIAGVRAIVDHLVALAWLHVLHGQSPVALDILQSVRDAVVASEDQEGVIANMVAVALKRTGRTRQAAESYYRALRVARDLGQQRNQAVGLANFGALCLHAGASRLAQHYLLEAVRLFSRLPLGECGRDFTHVLLQLGHLCTRQGPAQQGKGYYEWALLVAVEMGHVESQLRAVQRLCHFYSAVMPSEAQCVIYHELQLSLACKVADKVLEGQLLETISQLYLSLGTERAYKSALDYTKRSLGIFIDLQKKEKEAHAWLQAGKIYYILRQSELVDLYIQVAQNVALYTGDPNLGLELFEAAGDIFFDGAWEREKAVSFYRDRALPLAVTTGNRKAELRLCNKLVALLATLEEPQEGLEFAHMALALSITLGDRLNERVAYHRLAALQHRLGHGELAEHFYLKALSLCNSPLEFDEETLYYVKVYLVLGDIIFYDLKDPFDAAGYYQLALAAAVDLGNKKAQLKIYTRLATIYHNFLLDREKSLFFYQKARTFATELNVRRVNLPPLPLCGWAPWLAPSHPR

SEQ ID NO: 78587 - protein, 113 aa, Homo sapiens
  Payload ID: 15651
  Gene Symbol: SH3TC1
  Gene Name: SH3 domain and tetratricopeptide repeats 1
  ENSP ID: ENSP00000371961
MENLPAVTTEEPTPMGRGPVGPSGGGSTRDQVRTVVMRPSVSWEKAGPEEAKAPVRGGATVPAESLERPGPSSCFSRDASVITKLAKNEAGAFEPPCSETVPETVRWVWPWNP

SEQ ID NO: 78588 - protein, 94 aa, Homo sapiens
  Payload ID: 15651
  Gene Symbol: SH3TC1
  Gene Name: SH3 domain and tetratricopeptide repeats 1
  ENSP ID: ENSP00000390311
MENLPAVTTEEPTPMGRGPVGPSGGGSTRDQVRTVVMRPSVSWEKAGPEEAKAPVRGDEAPPARVAGPAAGTPPCQMGVYPTDLTLQLLAVRRK

SEQ ID NO: 78589 - protein, 105 aa, Homo sapiens
  Payload ID: 15651
  Gene Symbol: SH3TC1
  Gene Name: SH3 domain and tetratricopeptide repeats 1
  ENSP ID: ENSP00000422315
MGVYPTDLTLQLLAVRRKSRLRDPGLQQTLRGQLRLLENDSREMARVLGELSARLLSIHSDQDRIVVTFKTFEEIWKFSTYHALGFTHHCLANLLMDQAFWLLLP

SEQ ID NO: 78590 - protein, 101 aa, Homo sapiens
  Payload ID: 15651
  Gene Symbol: SH3TC1
  Gene Name: SH3 domain and tetratricopeptide repeats 1
  ENSP ID: ENSP00000423583
  MOD_RES (1)..(1): Any amino acid
XHVLLQLGHLCTRQGPAQQGKGYYEWALLVAVEMGHVESQLRAVQRLCHFYSAVMPSEAQCVIYHELQLSLACKVADKVLEGQLLETISQLYLSLGTERAQ

SEQ ID NO: 78591 - protein, 76 aa, Homo sapiens
  Payload ID: 15651
  Gene Symbol: SH3TC1
  Gene Name: SH3 domain and tetratricopeptide repeats 1
  ENSP ID: ENSP00000425079
MENLPAVTTEEPTPMGRGPVGPSGGGSTRDQVRTVVMRPSVSWEKAGPEEAKAPVRGERPGAFGAFRGARPLLGLP

SEQ ID NO: 78592 - protein, 202 aa, Homo sapiens
  Payload ID: 15651
  Gene Symbol: SH3TC1
  Gene Name: SH3 domain and tetratricopeptide repeats 1
  ENSP ID: ENSP00000425970
MENLPAVTTEEPTPMGRGPVGPSGGGSTRDQVRTVVMRPSVSWEKAGPEEAKAPVRGDLTLQLLAVRRKSRLRDPGLQQTLRGQLRLLENDSREMARVLGELSARLLSIHSDQDRIVVTFKTFEEIWKFSTYHALGFTHHCLANLLMDQAFWLLLPSEEEETAIQVHVDENALRLTHESLLIQEGGLLGSPRTPSTMPWVAL

SEQ ID NO: 78593 - protein, 183 aa, Homo sapiens
  Payload ID: 15651
  Gene Symbol: SH3TC1
  Gene Name: SH3 domain and tetratricopeptide repeats 1
  ENSP ID: ENSP00000426035
HVDENALRLTHESLLIQEGPFFVLCPDHHVRVMTGPRDAGNGPQALRQASGAPQGEAAPETDSSPPSPSVSSEEVAVAAAPEPLIPFHQWALRIPQDPIDDAMGGPVMPGNPLMAVGLASALADFQGSGPEEMTFRGGDLIEILGAQVPSLPWLESAIFLNEEEKSFFSEGCFSEEDARQLLR

SEQ ID NO: 78594 - protein, 25 aa, Homo sapiens
  Payload ID: 15651
  Gene Symbol: SH3TC1
  Gene Name: SH3 domain and tetratricopeptide repeats 1
  ENSP ID: ENSP00000427316
  MOD_RES (1)..(1): Any amino acid
XTYHALELEGSCRPVASVLTGKAVI

SEQ ID NO: 78595 - protein, 41 aa, Homo sapiens
  Payload ID: 15651
  Gene Symbol: SH3TC1
  Gene Name: SH3 domain and tetratricopeptide repeats 1
  ENSP ID: ENSP00000475411
  MOD_RES (1)..(1): Any amino acid
XYQKARTFATELNVRRVNLPPLPLCGPLCAEVGAASAPIRQ

SEQ ID NO: 78596 - protein, 227 aa, Homo sapiens
  Payload ID: 15652
  Gene Symbol: SH3TC2
  Gene Name: SH3 domain and tetratricopeptide repeats 2
  ENSP ID: ENSP00000313025
MGGCFCIPRERSLTRGPGKETPSKDPTVSSECIASSEYKEKCFLPQNINPDLTLSFCVKSRSRRCVNGPLQEAARRRLWALENEDQEVRMLFKDLSARLVSIQSQRAQFLITFKTMEEIWKFSTYLNLGYVSMCLEHLLFDHKYWLNCILVEDTEIQVSVDDKHLETIYLGLLIQEGHFFCRALCSVTPPAEKEGECLTLCKNELISVKMAEAGSELEGVSLVTGGS

SEQ ID NO: 78597 - protein, 150 aa, Homo sapiens
  Payload ID: 15652
  Gene Symbol: SH3TC2
  Gene Name: SH3 domain and tetratricopeptide repeats 2
  Uniprot ID: Q8TF17
  ENSP ID: ENSP00000421092
MSEQMMQSVGCRISLSVFQFLGDQRQELVAFHRLATVYYSLHMYEMAEDCYLKTLSLCPPWLQSPKEALYYAKVYYRLGRLTFCQLKDAHDATEYFLLALAAAVLLGDEELQDTIRSRLDNICQSPLWHSRPSGCSSERARWLSGGGLAL

SEQ ID NO: 78598 - protein, 95 aa, Homo sapiens
  Payload ID: 15652
  Gene Symbol: SH3TC2
  Gene Name: SH3 domain and tetratricopeptide repeats 2
  ENSP ID: ENSP00000421420
MGGCFCIPRERSLTRGPGKETPSKDPTVSSECIASSEYKEKCFLPQNINPDLTLSFCVKSRSRRCVNGPLQEAARRRLWALENEDQEVRMLFKVL

SEQ ID NO: 78599 - protein, 141 aa, Homo sapiens
  Payload ID: 15652
  Gene Symbol: SH3TC2
  Gene Name: SH3 domain and tetratricopeptide repeats 2
  ENSP ID: ENSP00000421779
CKNELISVKMAEAGSELEGVSLVTGQRGLVLVSALEPLPLPFHQWFLKNYPGSCGLSRKRDWTGSYQIGRGRCKALTGYEPGEKDELNFYQGESIEIIGFVIPGLQWFIGKSTSSGQVGFVPTRNIDPDSYSPMTWCVSSI

SEQ ID NO: 78600 - protein, 1281 aa, Homo sapiens
  Payload ID: 15652
  Gene Symbol: SH3TC2
  Gene Name: SH3 domain and tetratricopeptide repeats 2
  Uniprot ID: Q8TF17
  ENSP ID: ENSP00000421860
MGGCFCIPRERSLTRGPGKETPSKDPTVSSECIASSEYKEKCFLPQNINPDLTLSFCVKSRSRRCVNGPLQEAARRRLWALENEDQEVRMLFKDLSARLVSIQSQRAQFLITFKTMEEIWKFSTYLNLEHLLFDHKYWLNCILVEDTEIQVSVDDKHLETIYLGLLIQEGHFFCRALCSVTPPAEKEGECLTLCKNELISVKMAEAGSELEGVSLVTGQRGLVLVSALEPLPLPFHQWFLKNYPGSCGLSRKRDWTGSYQIGRGRCKALTGYEPGEKDELNFYQGESIEIIGFVIPGLQWFIGKSTSSGQVGFVPTRNIDPDSYSPMSRNSAFLSDEERCSLLALGSDKQTECSSFLHTLARTDITSVYRLSGFESIQNPPNDLSASQPEGFKEVRPGRAWEEHQAVGSRQSSSSEDSSLEEELLSATSDSYRLPEPDDLDDPELLMDLSTGQEEEAENFAPILAFLDHEGYADHFKSLYDFSFSFLTSSFYSFSEEDEFVAYLEASRKWAKKSHMTWAHARLCFLLGRLSIRKVKLSQARVYFEEAIHILNGAFEDLSLVATLYINLAAIYLKQRLRHKGSALLEKAGALLACLPDRESSAKHELDVVAYVLRQGIVVGSSPLEARACFLAIRLLLSLGRHEEVLPFAERLQLLSGHPPASEAVASVLSFLYDKKYLPHLAVASVQQHGIQSAQGMSLPIWQVHLVLQNTTKLLGFPSPGWGEVSALACPMLRQALAACEELADRSTQRALCLILSKVYLEHRSPDGAIHYLSQALVLGQLLGEQESFESSLCLAWAYLLASQAKKALDVLEPLLCSLKETESLTQRGVIYNLLGLALQGEGRVNRAAKSYLRALNRAQEVGDVHNQAVAMANLGHLSLKSWAQHPARNYLLQAVRLYCELQASKETDMELVQVFLWLAQVLVSGHQLTHGLLCYEMALLFGLRHRHLKSQLQATKSLCHFYSSVSPNPEACITYHEHWLALAQQLRDREMEGRLLESLGQLYRNLNTARSLRRSLTCIKESLRIFIDLGETDKAAEAWLGAGRLHYLMQEDELVELCLQAAIQTALKSEEPLLALKLYEEAGDVFFNGTRHRHHAVEYYRAGAVPLARRLKAVRTELRIFNKLTELQISLEGYEKALEFATLAARLSTVTGDQRQELVAFHRLATVYYSLHMYEMAEDCYLKTLSLCPPWLQSPKEALYYAKVYYRLGRLTFCQLKDAHDATEYFLLALAAAVLLGDEELQDTIRSRLDNICQSPLWHSRPSGCSSERARWLSGGGLAL

SEQ ID NO: 78601 - protein, 227 aa, Homo sapiens; identical to SEQ ID NO: 78596
  Payload ID: 15652
  Gene Symbol: SH3TC2
  Gene Name: SH3 domain and tetratricopeptide repeats 2
  ENSP ID: ENSP00000423111

SEQ ID NO: 78602 - protein, 1288 aa, Homo sapiens
  Payload ID: 15652
  Gene Symbol: SH3TC2
  Gene Name: SH3 domain and tetratricopeptide repeats 2
  Uniprot ID: Q8TF17
  ENSP ID: ENSP00000423660
MGGCFCIPRERSLTRGPGKETPSKDPTVSSECIASSEYKEKCFLPQNINPDLTLSFCVKSRSRRCVNGPLQEAARRRLWALENEDQEVRMLFKDLSARLVSIQSQRAQFLITFKTMEEIWKFSTYLNLGYVSMCLEHLLFDHKYWLNCILVEDTEIQVSVDDKHLETIYLGLLIQEGHFFCRALCSVTPPAEKEGECLTLCKNELISVKMAEAGSELEGVSLVTGQRGLVLVSALEPLPLPFHQWFLKNYPGSCGLSRKRDWTGSYQIGRGRCKALTGYEPGEKDELNFYQGESIEIIGFVIPGLQWFIGKSTSSGQVGFVPTRNIDPDSYSPMSRNSAFLSDEERCSLLALGSDKQTECSSFLHTLARTDITSVYRLSGFESIQNPPNDLSASQPEGFKEVRPGRAWEEHQAVGSRQSSSSEDSSLEEELLSATSDSYRLPEPDDLDDPELLMDLSTGQEEEAENFAPILAFLDHEGYADHFKSLYDFSFSFLTSSFYSFSEEDEFVAYLEASRKWAKKSHMTWAHARLCFLLGRLSIRKVKLSQARVYFEEAIHILNGAFEDLSLVATLYINLAAIYLKQRLRHKGSALLEKAGALLACLPDRESSAKHELDVVAYVLRQGIVVGSSPLEARACFLAIRLLLSLGRHEEVLPFAERLQLLSGHPPASEAVASVLSFLYDKKYLPHLAVASVQQHGIQSAQGMSLPIWQVHLVLQNTTKLLGFPSPGWGEVSALACPMLRQALAACEELADRSTQRALCLILSKVYLEHRSPDGAIHYLSQALVLGQLLGEQESFESSLCLAWAYLLASQAKKALDVLEPLLCSLKETESLTQRGVIYNLLGLALQGEGRVNRAAKSYLRALNRAQEVGDVHNQAVAMANLGHLSLKSWAQHPARNYLLQAVRLYCELQASKETDMELVQVFLWLAQVLVSGHQLTHGLLCYEMALLFGLRHRHLKSQLQATKSLCHFYSSVSPNPEACITYHEHWLALAQQLRDREMEGRLLESLGQLYRNLNTARSLRRSLTCIKESLRIFIDLGETDKAAEAWLGAGRLHYLMQEDELVELCLQAAIQTALKSEEPLLALKLYEEAGDVFFNGTRHRHHAVEYYRAGAVPLARRLKAVRTELRIFNKLTELQISLEGYEKALEFATLAARLSTVTGDQRQELVAFHRLATVYYSLHMYEMAEDCYLKTLSLCPPWLQSPKEALYYAKVYYRLGRLTFCQLKDAHDATEYFLLALAAAVLLGDEELQDTIRSRLDNICQSPLWHSRPSGCSSERARWLSGGGLAL

SEQ ID NO: 78603 - protein, 37 aa, Homo sapiens
  Payload ID: 15652
  Gene Symbol: SH3TC2
  Gene Name: SH3 domain and tetratricopeptide repeats 2
  ENSP ID: ENSP00000423940
  MOD_RES (1)..(1): Any amino acid
XECSSFLHTLARTDITSVYRLSGFESIQNPPNDLSGE

SEQ ID NO: 78604 - protein, 1259 aa, Homo sapiens
  Payload ID: 15652
  Gene Symbol: SH3TC2
  Gene Name: SH3 domain and tetratricopeptide repeats 2
  ENSP ID: ENSP00000425627
MGGCFCIPRERSLTRGPGKETPSKDPTVSSECIASSEYKEKCFLPQNINPDLTLSFCVKSRSRRCVNGPLQEAARRRLWALENEDQEVRMLFKDLSARLVSIQSQRAQFLITFKTMEEIWKFSTYLNLGYVSMCLEHLLFDHKYWLNCILVEDTEIQVSVDDKHLETIYLGLLIQEGHFFCRALCSVTPPAEKEGECLTLCKNELISVKMAEAGSELEGVSLVTGQRGLVLVSALEPLPLPFHQWFLKNYPGSCGLSRKRDWTGSYQIGRGRCKALTGYEPGEKDELNFYQGESIEIIGFVIPGLQWFIGKSTSSGQVGFVPTRNIDPDSYSPMSRNSAFLSDEERCSLLALGSDKQTECSSFLHTLARTDITSVYRLSGFESIQNPPNDLSASQPEGFKEVRPGRAWEEHQAVGSRQSSSSEDSSLEEELLSATSDSYRLPEPDDLDDPELLMDLSTGQEEEAENFAPILAFLDHEGYADHFKSLYDFSFSFLTSSFYSFSEEDEFVAYLEASRKWAKKSHMTWAHARLCFLLGRLSIRKVKLSQARVYFEEAIHILNGAFEDLSLVATLYINLAAIYLKQRLRHKGSALLEKAGALLACLPDRESSAKHELDVVAYVLRQGIVVGSSPLEARACFLAIRLLLSLGRHEEVLPFAERLQLLSGHPPASEAVASVLSFLYDKKYLPHLAVASVQQHGIQSAQGMSLPIWQVHLVLQNTTKLLGFPSPGWGEVSALACPMLRQALAACEELADRSTQRALCLILSKVYLEHRSPDGAIHYLSQALVLGQLLGEQESFESSLCLAWAYLLASQAKKALDVLEPLLCSLKETESLTQRGVIYNLLGLALQGEGRVNRAAKSYLRALNRAQEVGDVHNQAVAMANLGHLSLKSWAQHPARNYLLQAVRLYCELQASKETDMELVQVFLWLAQVLVSGHQLTHGLLCYEMALLFGLRHRHLKSQLQATKSLCHFYSSVSPNPEACITYHEHWLALAQQLRDREMEGRLLESLGQLYRNLNTARSLRRSLTCIKESLRIFIDLGETDKAAEAWLGAGRLHYLMQEDELVELCLQAAIQTALKSEEPLLALKLYEEAGDVFFNGTRHRHHAVEYYRAGAVPLARRLKAVRTELRIFNKLTELQISLEGYEKALEFATLAARLSTVTGDQRQELVAFHRLATVYYSLHMYEMAEDCYLKTLSLCPPWLQSPKEALYYAKVYYRLGRLTFCQLKFLLCCPGWSSVVQSGLPATSDSGAQVILQCQPPE

SEQ ID NO: 78605 - protein, 239 aa, Homo sapiens
  Payload ID: 15653
  Gene Symbol: SH3BGR
  Gene Name: SH3 domain binding glutamate-rich protein
  Uniprot ID: P55822
  ENSP ID: ENSP00000332513
MPLLLLGETEPLKLERDCRSPVDPWAAASPDLALACLCHCQDLSSGAFPDRGVLGGVLFPTVEMVIKVFVATSSGSIAIRKKQQEVVGFLEANKIDFKELDIAGDEDNRRWMRENVPGEKKPQNGIPLPPQIFNEEQYCGDFDSFFSAKEENIIYSFLGLAPPPDSKGSEKAEEGGETEAQKEGSEDVGNLPEAQEKNEEEGETATEETEEIAMEGAEGEAEEEEETAEGEEPGEDEDS

SEQ ID NO: 78606 - protein, 128 aa, Homo sapiens
  Payload ID: 15653
  Gene Symbol: SH3BGR
  Gene Name: SH3 domain binding glutamate-rich protein
  Uniprot ID: P55822
  ENSP ID: ENSP00000370005
MRENVPGEKKPQNGIPLPPQIFNEEQYCGDFDSFFSAKEENIIYSFLGLAPPPDSKGSEKAEEGGETEAQKEGSEDVGNLPEAQEKNEEEGETATEETEEIAMEGAEGEAEEEEETAEGEEPGEDEDS

SEQ ID NO: 78607 - protein, 128 aa, Homo sapiens; identical to SEQ ID NO: 78606
  Payload ID: 15653
  Gene Symbol: SH3BGR
  Gene Name: SH3 domain binding glutamate-rich protein
  Uniprot ID: P55822
  ENSP ID: ENSP00000370008

SEQ ID NO: 78608 - protein, 128 aa, Homo sapiens; identical to SEQ ID NO: 78606
  Payload ID: 15653
  Gene Symbol: SH3BGR
  Gene Name: SH3 domain binding glutamate-rich protein
  Uniprot ID: P55822
  ENSP ID: ENSP00000370011

SEQ ID NO: 78609 - protein, 106 aa, Homo sapiens
  Payload ID: 15653
  Gene Symbol: SH3BGR
  Gene Name: SH3 domain binding glutamate-rich protein
  ENSP ID: ENSP00000401572
MRENVPGEKKPQNGIPLPPQIFNEEQYCGDFDSFFSAKEENIIYSFLGLAPPPDSKGSEKAEEGGETEAQKEGSEDVGNLPEAQEKNEEEGETATEETEEIAMEGA

SEQ ID NO: 78610 - protein, 54 aa, Homo sapiens
  Payload ID: 15653
  Gene Symbol: SH3BGR
  Gene Name: SH3 domain binding glutamate-rich protein
  ENSP ID: ENSP00000403115
GSEKAEEGGETEAQKEGSEDVGNLPEAQEKNKMEAMKQHFKCLSTNQTQQNTLA

SEQ ID NO: 78611 - protein, 97 aa, Homo sapiens
  Payload ID: 15653
  Gene Symbol: SH3BGR
  Gene Name: SH3 domain binding glutamate-rich protein
  ENSP ID: ENSP00000404980
MRENVPGEKKPQNGIPLPPQIFNEEQYCGDFDSFFSAKEENIIYSFLGLAPPPDSKEEEGETATEETEEIAMEGAEGEAEEEEETAEGEEPGEDEDS

SEQ ID NO: 78612 - protein, 137 aa, Homo sapiens
  Payload ID: 15653
  Gene Symbol: SH3BGR
  Gene Name: SH3 domain binding glutamate-rich protein
  ENSP ID: ENSP00000405675
  MOD_RES (1)..(1): Any amino acid
XSSGSIAIRKKQQEVVGFLEANKIDFKELDIAGDEDNRRWMRENVPGEKKPQNGIPLPPQIFNEEQYCGDFDSFFSAKEENIIYSFLGLAPPPDSKEEEGETATEETEEIAMEGAEGEAEEEEETAEGEEPGEDEDS

SEQ ID NO: 78613 - protein, 81 aa, Homo sapiens
  Payload ID: 15653
  Gene Symbol: SH3BGR
  Gene Name: SH3 domain binding glutamate-rich protein
  ENSP ID: ENSP00000413981
IFNEEQYCGGSEKAEEGGETEAQKEGSEDVGNLPEAQEKNEEEGETATEETEEIAMEGAEGEAEEEEETAEGEEPGEDEDS

SEQ ID NO: 78614 - protein, 114 aa, Homo sapiens
  Payload ID: 15654
  Gene Symbol: SH3BGRL
  Gene Name: SH3 domain binding glutamate-rich protein like
  Uniprot ID: O75368
  ENSP ID: ENSP00000362308
MVIRVYIASSSGSTAIKKKQQDVLGFLEANKIGFEEKDIAANEENRKWMRENVPENSRPATGYPLPPQIFNESQYRGDYDAFFEARENNAVYAFLGLTAPPGSKEAEVQAKQQA

SEQ ID NO: 78615 - protein, 107 aa, Homo sapiens
  Payload ID: 15655
  Gene Symbol: SH3BGRL2
  Gene Name: SH3 domain binding glutamate-rich protein like 2
  Uniprot ID: Q9UJC5
  ENSP ID: ENSP00000358853
MVIRVFIASSSGFVAIKKKQQDVVRFLEANKIEFEEVDITMSEEQRQWMYKNVPPEKKPTQGNPLPPQIFNGDRYCGDYDSFFESKESNTVFSFLGLKPRLASKAEP

SEQ ID NO: 78616 - protein, 93 aa, Homo sapiens
  Payload ID: 15656
  Gene Symbol: SH3BGRL3
  Gene Name: SH3 domain binding glutamate-rich protein like 3
  Uniprot ID: Q9H299
  ENSP ID: ENSP00000270792
MSGLRVYSTSVTGSREIKSQQSEVTRILDGKRIQYQLVDISQDNALRDEMRALAGNPKATPPQIVNGDQYCGDYELFVEAVEQNTLQEFLKLA

SEQ ID NO: 78617 - protein, 88 aa, Homo sapiens
  Payload ID: 15656
  Gene Symbol: SH3BGRL3
  Gene Name: SH3 domain binding glutamate-rich protein like 3
  ENSP ID: ENSP00000363358
MSGLRVYSTSVTGSREIKSQQSEVTRILDGKRIQYQLVDISQDNALRDEMRALAGNPKATPPQIVNGDQYCGVWAGGRGGGGSVGRGL

SEQ ID NO: 78618 - protein, 226 aa, Homo sapiens
  Payload ID: 15656
  Gene Symbol: SH3BGRL3
  Gene Name: SH3 domain binding glutamate-rich protein like 3
  ENSP ID: ENSP00000479107
MHQTCVRLEREASARPSPGPVLPPRPLPSHTELQIREGPKRTIRAAAEGAPCVGRVRCAPGNRGGREGASGVRGGVAQVPPRLPAPPIGPERDDLAGGAGRKPLPSTAAASSPGSAAAATAALCPPARLSTPSMSGLRVYSTSVTGSREIKSQQSEVTRILDGKRIQYQLVDISQDNALRDEMRALAGNPKATPPQIVNGDQYCGDYELFVEAVEQNTLQEFLKLA

SEQ ID NO: 78619 - protein, 424 aa, Homo sapiens
  Payload ID: 15657
  Gene Symbol: SBK1
  Gene Name: SH3 domain binding kinase 1
  Uniprot ID: Q52WX2
  ENSP ID: ENSP00000343248
MSVGCPEPEPPRSLTCCGPGTAPGPGAGVPLLTEDMQALTLRTLAASDVTKHYELVRELGKGTYGKVDLVVYKGTGTKMALKFVNKSKTKLKNFLREVSITNSLSSSPFIIKVFDVVFETEDCYVFAQEYAPAGDLFDIIPPQVGLPEDTVKRCVQQLGLALDFMHGRQLVHRDIKPENVLLFDRECRRVKLADFGMTRRVGCRVKRVSGTIPYTAPEVCQAGRADGLAVDTGVDVWAFGVLIFCVLTGNFPWEAASGADAFFEEFVRWQRGRLPGLPSQWRRFTEPALRMFQRLLALEPERRGPAKEVFRFLKHELTSELRRRPSHRARKPPGDRPPAAGPLRLEAPGPLKRTVLTESGSGSRPAPPAVGSVPLPVPVPVPVPVPVPVPEPGLAPQGPPGRTDGRADKSKGQVVLATAIEICV

SEQ ID NO: 78620 - protein, 348 aa, Homo sapiens
  Payload ID: 15658
  Gene Symbol: SBK2
  Gene Name: SH3 domain binding kinase family, member 2
  Uniprot ID: P0C263
  ENSP ID: ENSP00000345044
MPGKQSEEGPAEAGASEDSEEEGLGGLTLEELQQGQEAARALEDMMTLSAQTLVRAEVDELYEEVRPLGQGCYGRVLLVTHRQKGTPLALKQLPKPRTSLRGFLYEFCVGLSLGAHSAIVTAYGIGIESAHSYSFLTEPVLHGDLMAFIQPKVGLPQPAVHRCAAQLASALEYIHARGLVYRDLKPENVLVCDPACRRFKLTDFGHTRPRGTLLRLAGPPIPYTAPELCAPPPLPEGLPIQPALDAWALGVLLFCLLTGYFPWDRPLAEADPFYEDFLIWQASGQPRDRPQPWFGLAAAADALLRGLLDPHPRRRSAVIAIREHLGRPWRQREGEAEAVGAVEEEAGQ

SEQ ID NO: 78621 - protein, 348 aa, Homo sapiens; identical to SEQ ID NO: 78620
  Payload ID: 15658
  Gene Symbol: SBK2
  Gene Name: SH3 domain binding kinase family, member 2
  Uniprot ID: P0C263
  ENSP ID: ENSP00000389015

SEQ ID NO: 78622 - protein, 160 aa, Homo sapiens
  Payload ID: 15659
  Gene Symbol: SBK3
  Gene Name: SH3 domain binding kinase family, member 3
  ENSP ID: ENSP00000467263
TPEDGDPEVRDGSQGRKTEREKKEREAGGNTGRERKRNRKQGNAKTSETQTQGERMTEIQGHTARPRPPENWTQKHTAGCTGEEDGGERDQGGHSHSPPTAGGADDQQGDPGEEPSGPVPPHPEAGLRLLRPRAPCPASPGGSSCGSEAPASGFGPEKHL

SEQ ID NO: 78623 - protein, 359 aa, Homo sapiens
  Payload ID: 15659
  Gene Symbol: SBK3
  Gene Name: SH3 domain binding kinase family, member 3
  Uniprot ID: P0C264
  ENSP ID: ENSP00000483467
MERRASETPEDGDPEEDTATALQRLVELTTSRVTPVRSLRDQYHLIRKLGSGSYGRVLLAQPHQGGPAVALKLLRRDLVLRSTFLREFCVGRCVSAHPGLLQTLAGPLQTPRYFAFAQEYAPCGDLSGMLQERGLPELLVKRVVAQLAGALDFLHSRGLVHADVKPDNVLVFDPVCSRVALGDLGLTRPEGSPTPAPPVPLPTAPPELCLLLPPDTLPLRPAVDSWGLGVLLFCAATACFPWDVALAPNPEFEAFAGWVTTKPQPPQPPPPWDQFAPPALALLQGLLDLDPETRSPPLAVLDFLGDDWGLQGNREGPGVLGSAVSYEDREEGGSSLEEWTDEGDDSKSGGRTGTDGGAP

SEQ ID NO: 78624 - protein, 790 aa, Homo sapiens
  Payload ID: 15660
  Gene Symbol: SH3D19
  Gene Name: SH3 domain containing 19
  Uniprot ID: Q5HYK7
  ENSP ID: ENSP00000302913
MNIMNTEQSQNSIVSRIKVFEGQTNIETSGLPKKPEITPRSLPPKPTVSSGKPSVAPKPAANRASGEWDSGTENRLKVTSKEGLTPYPPLQEAGSIPVTKPELPKKPNPGLIRSVNPEIPGRGPLAESSDSGKKVPTPAPRPLLLKKSVSSENPTYPSAPLKPVTVPPRLAGASQAKAYKSLGEGPPANPPVPVLQSKPLVDIDLISFDDDVLPTPSGNLAEESVGSEMVLDPFQLPAKTEPIKERAVQPAPTRKPTVIRIPAKPGKCLHEDPQSPPPLPAEKPIGNTFSTVSGKLSNVERTRNLESNHPGQTGGFVRVPPRLPPRPVNGKTIPTQQPPTKVPPERPPPPKLSATRRSNKKLPFNRSSSDMDLQKKQSNLATGLSKAKSQVFKNQDPVLPPRPKPGHPLYSKYMLSVPHGIANEDIVSQNPGELSCKRGDVLVMLKQTENNYLECQKGEDTGRVHLSQMKIITPLDEHLRSRPNDPSHAQKPVDSGAPHAVVLHDFPAEQVDDLNLTSGEIVYLLEKIDTDWYRGNCRNQIGIFPANYVKVIIDIPEGGNGKRECVSSHCVKGSRCVARFEYIGEQKDELSFSEGEIIILKEYVNEEWARGEVRGRTGIFPLNFVEPVEDYPTSGANVLSTKVPLKTKKEDSGSNSQVNSLPAEWCEALHSFTAETSDDLSFKRGDRIQILERLDSDWCRGRLQDREGIFPAVFVRPCPAEAKSMLAIVPKGRKAKALYDFRGENEDELSFKAGDIITELESVDDDWMSGELMGKSGIFPKNYIQFLQIS

SEQ ID NO: 78625 - protein, 790 aa, Homo sapiens; identical to SEQ ID NO: 78624
  Payload ID: 15660
  Gene Symbol: SH3D19
  Gene Name: SH3 domain containing 19
  Uniprot ID: Q5HYK7
  ENSP ID: ENSP00000386848

SEQ ID NO: 78626 - protein, 767 aa, Homo sapiens
  Payload ID: 15660
  Gene Symbol: SH3D19
  Gene Name: SH3 domain containing 19
  Uniprot ID: Q5HYK7
  ENSP ID: ENSP00000387030
MNIMNTEQSQNSIVSRIKVFEGQTNIETSGLPKKPEITPRSLPPKPTVSSGKPSVAPKPAANRASGEWDSGTENRLKVTSKEGLTPYPPLQEAGSIPVTKPELPKKPNPGLIRSVNPEIPGRGPLAESSDSGKKVPTPAPRPLLLKKSVSSENPTYPSAPLKPVTVPPRLAGASQAKAYKSLGEGPPANPPVPVLQSKPLVDIDLISFDDDVLPTPSGNLAEESVGSEMVLDPFQLPAKTEPIKERAVQPAPTRKPTVIRIPAKPGKCLHEDPQSPPPLPAEKPIGNTFSTVSGKLSNVERTRNLESNHPGQTGGFVRVPPRLPPRPVNGKTIPTQQPPTKVPPERPPPPKLSATRRSNKKLPFNRSSSDMDLQKKQSNLATGLSKAKSQVFKNQDPVLPPRPKPGHPLYSKYMRGDVLVMLKQTENNYLECQKGEDTGRVHLSQMKIITPLDEHLRSRPNDPSHAQKPVDSGAPHAVVLHDFPAEQVDDLNLTSGEIVYLLEKIDTDWYRGNCRNQIGIFPANYVKVIIDIPEGGNGKRECVSSHCVKGSRCVARFEYIGEQKDELSFSEGEIIILKEYVNEEWARGEVRGRTGIFPLNFVEPVEDYPTSGANVLSTKVPLKTKKEDSGSNSQVNSLPAEWCEALHSFTAETSDDLSFKRGDRIQILERLDSDWCRGRLQDREGIFPAVFVRPCPAEAKSMLAIVPKGRKAKALYDFRGENEDELSFKAGDIITELESVDDDWMSGELMGKSGIFPKNYIQFLQIS

SEQ ID NO: 78627 - protein, 731 aa, Homo sapiens
  Payload ID: 15660
  Gene Symbol: SH3D19
  Gene Name: SH3 domain containing 19
  Uniprot ID: Q5HYK7
  ENSP ID: ENSP00000415694
MNIMNTEQSQNSIVSRIKVFEGQTNIETSGLPKKPEITPRSLPPKPTVSSGKPSVAPKPAANRASGEWDSGTENRLKVTSKEGLTPYPPLQEAGSIPVTKPELPKKPNPGLIRSVNPEIPGRGPLAESSDSGKKVPTPAPRPLLLKKSVSSENPTYPSAPLKPVTVPPRLAGASQAKAYKSLGEGPPANPPVPVLQSKPLVDIDLISFDDDVLPTPSGNLAEESVGSEMVLGLHEDPQSPPPLPAEKPIGNTFSTVSGKLSNVERTRNLESNHPGQTGGFVRVPPRLPPRPVNGKTIPTQQPPTKVPPERPPPPKLSATRRSNKKLPFNRSSSDMDLQKKQSNLATGLSKAKSQVFKNQDPVLPPRPKPGHPLYSKYMRGDVLVMLKQTENNYLECQKGEDTGRVHLSQMKIITPLDEHLRSRPNDPSHAQKPVDSGAPHAVVLHDFPAEQVDDLNLTSGEIVYLLEKIDTDWYRGNCRNQIGIFPANYVKVIIDIPEGGNGKRECVSSHCVKGSRCVARFEYIGEQKDELSFSEGEIIILKEYVNEEWARGEVRGRTGIFPLNFVEPVEDYPTSGANVLSTKVPLKTKKEDSGSNSQVNSLPAEWCEALHSFTAETSDDLSFKRGDRIQILERLDSDWCRGRLQDREGIFPAVFVRPCPAEAKSMLAIVPKGRKAKALYDFRGENEDELSFKAGDIITELESVDDDWMSGELMGKSGIFPKNYIQFLQIS

SEQ ID NO: 78628 - protein, 767 aa, Homo sapiens; identical to SEQ ID NO: 78626
  Payload ID: 15660
  Gene Symbol: SH3D19
  Gene Name: SH3 domain containing 19
  Uniprot ID: Q5HYK7
  ENSP ID: ENSP00000423449

SEQ ID NO: 78629 - protein, 1047 aa, Homo sapiens
  Payload ID: 15660
  Gene Symbol: SH3D19
  Gene Name: SH3 domain containing 19
  ENSP ID: ENSP00000488951
MAEGRRREDEEEELRERRELGGQRRARGRALSGHSAADRNERNKPEHRSSSQGPLSSIRAVIKRSSRTSIQSELHRDRRRPEITIVAAEPLRPASWFPGTPPPGLGFPTSSAAGSWRPNELVPAELPPSYEQVIKEINQVQVNTTNNNNAAATPRHTITSATQTDFSEEIDNDLPQTLQAPLKPLQPFSAVSSGNLPTNVAPLIVFDISEEPNCPENPSATRCPVPKPRSKSNLRPIPRDSHIKEQSQQKISPAAVGEESSPGRPQSLLDNASTSDSQAVMNIMNTEQSQNSIVSRIKVFEGQTNIETSGLPKKPEITPRSLPPKPTVSSGKPSVAPKPAANRASGEWDSGTENRLKVTSKEGLTPYPPLQEAGSIPVTKPELPKKPNPGLIRSVNPEIPGRGPLAESSDSGKKVPTPAPRPLLLKKSVSSENPTYPSAPLKPVTVPPRLAGASQAKAYKSLGEGPPANPPVPVLQSKPLVDIDLISFDDDVLPTPSGNLAEESVGSEMVLDPFQLPAKTEPIKERAVQPAPTRKPTVIRIPAKPGKCLHEDPQSPPPLPAEKPIGNTFSTVSGKLSNVERTRNLESNHPGQTGGFVRVPPRLPPRPVNGKTIPTQQPPTKVPPERPPPPKLSATRRSNKKLPFNRSSSDMDLQKKQSNLATGLSKAKSQVFKNQDPVLPPRPKPGHPLYSKYMRGDVLVMLKQTENNYLECQKGEDTGRVHLSQMKIITPLDEHLRSRPNDPSHAQKPVDSGAPHAVVLHDFPAEQVDDLNLTSGEIVYLLEKIDTDWYRGNCRNQIGIFPANYVKVIIDIPEGGNGKRECVSSHCVKGSRCVARFEYIGEQKDELSFSEGEIIILKEYVNEEWARGEVRGRTGIFPLNFVEPVEDYPTSGANVLSTKVPLKTKKEDSGSNSQVNSLPAEWCEALHSFTAETSDDLSFKRGDRIQILERLDSDWCRGRLQDREGIFPAVFVRPCPAEAKSMLAIVPKGRKAKALYDFRGENEDELSFKAGDIITELESVDDDWMSGELMGKSGIFPKNYIQFLQIS

SEQ ID NO: 78630 - protein, 233 aa, Homo sapiens
  Payload ID: 15660
  Gene Symbol: SH3D19
  Gene Name: SH3 domain containing 19
  ENSP ID: ENSP00000489087
  MOD_RES (1)..(1): Any amino acid
XNIETSGLPKKPEITPRSLPPKPTVSSGKPSVAPKPAANRASGEWDSGTENRLKVTSKEGLTPYPPLQEAGSIPVTKPELPKKPNPGLIRSVNPEIPGRGPLAESSDSGKKVPTPAPRPLLLKKSVSSENPTYPSAPLKPVTVPPRLAGASQAKAYKSLGEGPPANPPVPVLQSKPLVDIDLISFDDDVLPTPSGNLAEESVGSEMVLDHVEALPLTRELINNLFKRAEHKHN

SEQ ID NO: 78631 - protein, 378 aa, Homo sapiens
  Payload ID: 15661
  Gene Symbol: SH3D21
  Gene Name: SH3 domain containing 21
  ENSP ID: ENSP00000362232
MEVLVLAGYRAQKEDELSLAPGDVVRQVRWVPARGWLRGEFGGRYGLFPERLVQEIPETLRGSGEARRPRCARRRGHPAKHPRPQRWCKVNFSYSPEQADELKLQAGEIVEMIKEIEDGWWLGKKNGQLGAFPSNFVELLDSGPPSLGNPDMPSVSPGPQRPPKLSSLAYDSPPDYLQTVSHPEVYRVLFDYQPEAPDELALRRGDVVKVLSKTTEDKGWWEGECQGRRGVFPDNFVLPPPPIKKLVPRKVVSRESAPIKEPKKLMPKTSLPTVKKLATATTGPSKAKTSRTPSRDSQKLTSRDSGPNGGFQSGGSYHPGRKRSKTQTPQQRSVSSQEEEHSSPVKAPSVKRTPMPDKTATPERPPAPENAPSSKKIP

SEQ ID NO: 78632 - protein, 756 aa, Homo sapiens
  Payload ID: 15661
  Gene Symbol: SH3D21
  Gene Name: SH3 domain containing 21
  Uniprot ID: A4FU49
  ENSP ID: ENSP00000403476
MEVLVLAGYRAQKEDELSLAPGDVVRQVRWVPARGWLRGEFGGRYGLFPERLVQEIPETLRGSGEARRPRCARRRGHPAKHPRPQRWCKVNFSYSPEQADELKLQAGEIVEMIKEIEDGWWLGKKNGQLGAFPSNFVELLDSGPPSLGNPDMPSVSPGPQRPPKLSSLAYDSPPDYLQTVSHPEVYRVLFDYQPEAPDELALRRGDVVKVLSKTTEDKGWWEGECQGRRGVFPDNFVLPPPPIKKLVPRKVVSRESAPIKEPKKLMPKTSLPTVKKLATATTGPSKAKTSRTPSRDSQKLTSRDSGPNGGFQSGGSYHPGRKRSKTQTPQQRSVSSQEEEHSSPVKAPSVKRTPMPDKTATPERPPAPENAPSSKKIPAPDKVPSPEKTLTLGDKASIPGNSTSGKIPAPDKVPTPEKMVTPEDKASIPENSIIPEETLTVDKPSTPERVFSVEESPALEAPPMDKVPNPKMAPLGDEAPTLEKVLTPELSEEEVSTRDDIQFHHFSSEEALQKVKYFVAKEDPSSQEEAHTPEAPPPQPPSSERCLGEMKCTLVRGDSSPRQAELKSGPASRPALEKPHPHEEATTLPEEAPSNDERTPEEEAPPNEQRPLREEVLPKEGVASKEEVTLKEELPPKEEVAPKEEVPPIERAFAQKTRPIKPPPDSQETLALPSLVPQNYTENKNEGVDVTSLRGEVESLRRALELMEVQLERKLTDIWEELKSEKEQRRRLEVQVMQGTQKSQTPRVIHTQTQTY

SEQ ID NO: 78633 - protein, 645 aa, Homo sapiens
  Payload ID: 15661
  Gene Symbol: SH3D21
  Gene Name: SH3 domain containing 21
  Uniprot ID: A4FU49
  ENSP ID: ENSP00000421294
MIKEIEDGWWLGKKNGQLGAFPSNFVELLDSGPPSLGNPDMPSVSPGPQRPPKLSSLAYDSPPDYLQTVSHPEVYRVLFDYQPEAPDELALRRGDVVKVLSKTTEDKGWWEGECQGRRGVFPDNFVLPPPPIKKLVPRKVVSRESAPIKEPKKLMPKTSLPTVKKLATATTGPSKAKTSRTPSRDSQKLTSRDSGPNGGFQSGGSYHPGRKRSKTQTPQQRSVSSQEEEHSSPVKAPSVKRTPMPDKTATPERPPAPENAPSSKKIPAPDKVPSPEKTLTLGDKASIPGNSTSGKIPAPDKVPTPEKMVTPEDKASIPENSIIPEETLTVDKPSTPERVFSVEESPALEAPPMDKVPNPKMAPLGDEAPTLEKVLTPELSEEEVSTRDDIQFHHFSSEEALQKVKYFVAKEDPSSQEEAHTPEAPPPQPPSSERCLGEMKCTLVRGDSSPRQAELKSGPASRPALEKPHPHEEATTLPEEAPSNDERTPEEEAPPNEQRPLREEVLPKEGVASKEEVTLKEELPPKEEVAPKEEVPPIERAFAQKTRPIKPPPDSQETLALPSLVPQNYTENKNEGVDVTSLRGEVESLRRALELMEVQLERKLTDIWEELKSEKEQRRRLEVQVMQGTQKSQTPRVIHTQTQTY

SEQ ID NO: 78634 - protein, 135 aa, Homo sapiens
  Payload ID: 15661
  Gene Symbol: SH3D21
  Gene Name: SH3 domain containing 21
  ENSP ID: ENSP00000425484
MIKEIEDGWWLGKKNGQLGAFPSNFVELLDSGPPSLGNPDMPSVSPGPQRPPKTTEDKGWWEGECQGRRGVFPDNFVLPPPPIKKLVPRKVVSRESAPIKEPKKLMPKTSLPTVKKLATATTGPSKAKRKSTAAR

SEQ ID NO: 78635 - protein, 888 aa, Homo sapiens
  Payload ID: 15662
  Gene Symbol: SH3RF1
  Gene Name: SH3 domain containing ring finger 1
  Uniprot ID: Q7Z6J0
  ENSP ID: ENSP00000284637
MDESALLDLLECPVCLERLDASAKVLPCQHTFCKRCLLGIVGSRNELRCPECRTLVGSGVEELPSNILLVRLLDGIKQRPWKPGPGGGSGTNCTNALRSQSSTVANCSSKDLQSSQGGQQPRVQSWSPPVRGIPQLPCAKALYNYEGKEPGDLKFSKGDIIILRRQVDENWYHGEVNGIHGFFPTNFVQIIKPLPQPPPQCKALYDFEVKDKEADKDCLPFAKDDVLTVIRRVDENWAEGMLADKIGIFPISYVEFNSAAKQLIEWDKPPVPGVDAGECSSAAAQSSTAPKHSDTKKNTKKRHSFTSLTMANKSSQASQNRHSMEISPPVLISSSNPTAAARISELSGLSCSAPSQVHISTTGLIVTPPPSSPVTTGPSFTFPSDVPYQAALGTLNPPLPPPPLLAATVLASTPPGATAAAAAAGMGPRPMAGSTDQIAHLRPQTRPSVYVAIYPYTPRKEDELELRKGEMFLVFERCQDGWFKGTSMHTSKIGVFPGNYVAPVTRAVTNASQAKVPMSTAGQTSRGVTMVSPSTAGGPAQKLQGNGVAGSPSVVPAAVVSAAHIQTSPQAKVLLHMTGQMTVNQARNAVRTVAAHNQERPTAAVTPIQVQNAAGLSPASVGLSHHSLASPQPAPLMPGSATHTAAISISRASAPLACAAAAPLTSPSITSASLEAEPSGRIVTVLPGLPTSPDSASSACGNSSATKPDKDSKKEKKGLLKLLSGASTKRKPRVSPPASPTLEVELGSAELPLQGAVGPELPPGGGHGRAGSCPVDGDGPVTTAVAGAALAQDAFHRKASSLDSAVPIAPPPRQACSSLGPVLNESRPVVCERHRVVVSYPPQSEAELELKEGDIVFVHKKREDGWFKGTLQRNGKTGLFPGSFVENI

SEQ ID NO: 78636 - protein, 79 aa, Homo sapiens
  Payload ID: 15662
  Gene Symbol: SH3RF1
  Gene Name: SH3 domain containing ring finger 1
  ENSP ID: ENSP00000421714
MDESALLDLLECPVCLERLDASAKVLPCQHTFCKRCLLGIVGSRNELRCPECRTLVGSGVEELPSNILLVRLLDGIKQR

SEQ ID NO: 78637 - protein, 303 aa, Homo sapiens
  Payload ID: 15662
  Gene Symbol: SH3RF1
  Gene Name: SH3 domain containing ring finger 1
  ENSP ID: ENSP00000426418
  MOD_RES (1)..(1): Any amino acid
XKALYNYEGKEPGDLKFSKGDIIILRRQVDENWYHGEVNGIHGFFPTNFVQIIKPLPQPPPQCKALYDFEVKDKEADKDCLPFAKDDVLTVIRRVDENWAEGMLADKIGIFPISYVEFNSAAKQLIEWDKPPVPGVDAGECSSAAAQSSTAPKHSDTKKNTKKRHSFTSLTMANKSSQASQNRHSMEISPPVLISSSNPTAAARISELSGLSCSAPSQVHISTTGLIVTPPPSSPVTTGPSFTFPSDVPYQAALGAPPPLLLLLEWDRGPWQDPLTRLHIYGRRLAPVCMLLYIHTLLGKRMN

SEQ ID NO: 78638 - protein, 99 aa, Homo sapiens
  Payload ID: 15662
  Gene Symbol: SH3RF1
  Gene Name: SH3 domain containing ring finger 1
  ENSP ID: ENSP00000427585
MDESALLDLLECPVCLERLDASAKVLPCQHTFCKRCLLGIVGSRNELRCPECRTLVGSGVEELPSNILLVRLLDGIKQRPWKPGPGGGSGTNCTNALRS

SEQ ID NO: 78639 - protein, 729 aa, Homo sapiens
  Payload ID: 15663
  Gene Symbol: SH3RF2
  Gene Name: SH3 domain containing ring finger 2
  Uniprot ID: Q8TEC5
  ENSP ID: ENSP00000352028
MDDLTLLDLLECPVCFEKLDVTAKVLPCQHTFCKPCLQRVFKAHKELRCPECRTPVFSNIEALPANLLLVRLLDGVRSGQSSGRGGSFRRPGTMTLQDGRKSRTNPRRLQASPFRLVPNVRIHMDGVPRAKALCNYRGQNPGDLRFNKGDIILLRRQLDENWYQGEINGISGNFPASSVEVIKQLPQPPPLCRALYNFDLRGKDKSENQDCLTFLKDDIITVISRVDENWAEGKLGDKVGIFPILFVEPNLTARHLLEKNKGRQSSRTKNLSLVSSSSRGNTSTLRRGPGSRRKVPGQFSITTALNTLNRMVHSPSGRHMVEISTPVLISSSNPSVITQPMEKADVPSSCVGQVSTYHPAPVSPGHSTAVVSLPGSQQHLSANMFVALHSYSAHGPDELDLQKGEGVRVLGKCQDGWLRGVSLVTGRVGIFPNNYVIPIFRKTSSFPDSRSPGLYTTWTLSTSSVSSQGSISEGDPRQSRPFKSVFVPTAIVNPVRSTAGPGTLGQGSLRKGRSSMRKNGSLQRPLQSGIPTLVVGSLRRSPTMVLRPQQFQFYQPQGIPSSPSAVVVEMGSKPALTGEPALTCISRGSEAWIHSAASSLIMEDKEIPIKSEPLPKPPASAPPSILVKPENSRNGIEKQVKTVRFQNYSPPPTKHYTSHPTSGKPEQPATLKASQPEAASLGPEMTVLFAHRSGCHSGQQTDLRRKSALGKATTLVSTASGTQTVFPSK

SEQ ID NO: 78640 - protein, 729 aa, Homo sapiens; identical to SEQ ID NO: 78639
  Payload ID: 15663
  Gene Symbol: SH3RF2
  Gene Name: SH3 domain containing ring finger 2
  Uniprot ID: Q8TEC5
  ENSP ID: ENSP00000424497

SEQ ID NO: 78641 - protein, 882 aa, Homo sapiens
  Payload ID: 15664
  Gene Symbol: SH3RF3
  Gene Name: SH3 domain containing ring finger 3
  Uniprot ID: Q8TEJ3
  ENSP ID: ENSP00000309186
MLLGASWLCASKAAAAAAQSEGDEDRPGERRRRRAAATAAGAGEDMDESSLLDLLECSVCLERLDTTAKVLPCQHTFCRRCLESIVCSRHELRCPECRILVGCGVDELPANILLVRLLDGIRQRPRAGTSPGGSPPARPIPGQSAAPTLAGGGGGAAGSTPGSPVFLSAAAGSTAGSLRELATSRTAPAAKNPCLLPYGKALYSYEGKEPGDLKFNKGDIIVLRRKVDEQWYHGELHGTQGFLPASYIQCIQPLPHAPPQGKALYDFEMKDKDQDKDCLTFTKDEILTVLRRVDENWAEGMLGDKIGIFPLLYVELNDSAKQLIEMDKPCPAAASSCNASLPSDSGAVASVAPSPTLSSSGAVSAFQRRVDGKKNTKKRHSFTALSVTHRSSQAASHRHSMEISAPVLISSSDPRAAARIGDLAHLSCAAPTQDVSSSAGSTPTAVPRAASVSGEQGTPPKVQLPLNVYLALYAYKPQKSDELELHKGEMYRVLEKCQDGWFKGASLRTGVSGVFPGNYVTPVSRVPAGGAGPPRNNVVGGSPLAKGITTTMHPGSGSLSSLATATRPALPITTPQAHAQHPTASPPTGSCLRHSAQPTASQARSTISTAAHSAAQAQDRPTATVSPLRTQNSPSRLPATSLRPHSVVSPQHSHQPPVQMCPRPAIPLTSAASAITPPNVSAANLNGEAGGGPIGVLSTSSPTNTGCKLDEKKSEKKEKKSGLLKLLAGASTKKKSRSPPSVSPTHDPQVAVDALLQGAVGPEVSSLSIHGRAGSCPIESEMQGAMGMEPLHRKAGSLDLNFTSPSRQAPLSMAAIRPEPKLLPRERYRVVVSYPPQSEAEIELKEGDIVFVHKKREDGWYKGTLQRNGRTGLFPGSFVESF

SEQ ID NO: 78642 - protein, 393 aa, Homo sapiens [sequence omitted]

SEQ ID NO: 78643 - protein, 701 aa, Homo sapiens
  Payload ID: 15666
  Gene Symbol: SH3BP1
  Gene Name: SH3-domain binding protein 1
  Uniprot ID: Q9Y3L3
  ENSP ID: ENSP00000350018
MMKRQLHRMRQLAQTGSLGRTPETAEFLGEDLLQVEQRLEPAKRAAHNIHKRLQACLQGQSGADMDKRVKKLPLMALSTTMAESFKELDPDSSMGKALEMSCAIQNQLARILAEFEMTLERDVLQPLSRLSEEELPAILKHKKSLQKLVSDWNTLKSRLSQATKNSGSSQGLGGSPGSHSHTTMANKVETLKEEEEELKRKVEQCRDEYLADLYHFVTKEDSYANYFIRLLEIQADYHRRSLSSLDTALAELRENHGQADHSPSMTATHFPRVYGVSLATHLQELGREIALPIEACVMMLLSEGMKEEGLFRLAAGASVLKRLKQTMASDPHSLEEFCSDPHAVAGALKSYLRELPEPLMTFDLYDDWMRAASLKEPGARLQALQEVCSRLPPENLSNLRYLMKFLARLAEEQEVNKMTPSNIAIVLGPNLLWPPEKEGDQAQLDAASVSSIQVVGVVEALIQSADTLFPGDINFNVSGLFSAVTLQDTVSDRLASEELPSTAVPTPATTPAPAPAPAPAPAPALASAATKERTESEVPPRPASPKVTRSPPETAAPVEDMARRTKRPAPARPTMPPPQVSGSRSSPPAPPLPPGSGSPGTPQALPRRLVGSSLRAPTVPPPLPPTPPQPARRQSRRSPASPSPASPGPASPSPVSLSNPAQVDLGAATAEGGAPEAISGVPTPPAIPPQPRPRSLASETN

SEQ ID NO: 78644 - protein, 20 aa, Homo sapiens
  Payload ID: 15666
  Gene Symbol: SH3BP1
  Gene Name: SH3-domain binding protein 1
  ENSP ID: ENSP00000401076
MMKRQLHRMRQLAQTGSLGR

SEQ ID NO: 78645 - protein, 452 aa, Homo sapiens
  Payload ID: 15666
  Gene Symbol: SH3BP1
  Gene Name: SH3-domain binding protein 1
  Uniprot ID: Q9Y3L3
  ENSP ID: ENSP00000411979
MMKRQLHRMRQLAQTGSLGRTPETAEFLGEDLLQVEQRLEPAKRAAHNIHKRLQACLQGQSGADMDKRVKKLPLMALSTTMAESFKELDPDSSMGKALEMSCAIQNQLARILAEFEMTLERDVLQPLSRLSEEELPAILKHKKSLQKLVSDWNTLKSRLSQATKNSGSSQGLGGSPGSHSHTTMANKVETLKEEEEELKRKVEQCRDEYLADLYHFVTKEDSYANYFIRLLEIQADYHRRSLSSLDTALAELRENHGQADHSPSMTATHFPRVYGVSLATHLQELGREIALPIEACVMMLLSEGMKEEGLFRLAAGASVLKRLKQTMASDPHSLEEFCSDPHAVAGALKSYLRELPEPLMTFDLYDDWMRAASLKEPGARLQALQEVCSRLPPENLSNLRYLMKFLARLAEEQEVNKMTPSNIAIVLGPNLLWPPEKEGTEPARELGSQTLC

SEQ ID NO: 78646 - protein, 561 aa, Homo sapiens
  Payload ID: 15667
  Gene Symbol: SH3BP2
  Gene Name: SH3-domain binding protein 2
  Uniprot ID: P78314
  ENSP ID: ENSP00000348685
MAAEEMHWPVPMKAIGAQNLLTMPGGVAKAGYLHKKGGTQLQLLKWPLRFVIIHKRCVYYFKSSTSASPQGAFSLSGYNRVMRAAEETTSNNVFPFKIIHISKKHRTWFFSASSEEERKSWMALLRREIGHFHEKKDLPLDTSDSSSDTDSFYGAVERPVDISLSPYPTDNEDYEHDDEDDSYLEPDSPEPGRLEDALMHPPAYPPPPVPTPRKPAFSDMPRAHSFTSKGPGPLLPPPPPKHGLPDVGLAAEDSKRDPLCPRRAEPCPRVPATPRRMSDPPLSTMPTAPGLRKPPCFRESASPSPEPWTPGHGACSTSSAAIMATATSRNCDKLKSFHLSPRGPPTSEPPPVPANKPKFLKIAEEDPPREAAMPGLFVPPVAPRPPALKLPVPEAMARPAVLPRPEKPQLPHLQRSPPDGQSFRSFSFEKPRQPSQADTGGDDSDEDYEKVPLPNSVFVNTTESCEVERLFKATSPRGEPQDGLYCIRNSSTKSGKVLVVWDETSNKVRNYRIFEKDSKFYLEGEVLFVSVGSMVEHYHTHVLPSHQSLLLRHPYGYTGPR

SEQ ID NO: 78647 - protein, 589 aa, Homo sapiens
  Payload ID: 15667
  Gene Symbol: SH3BP2
  Gene Name: SH3-domain binding protein 2
  Uniprot ID: P78314
  ENSP ID: ENSP00000388152
MASLGPRTPAPSRSRGRRAMCWVSTISFMAAEEMHWPVPMKAIGAQNLLTMPGGVAKAGYLHKKGGTQLQLLKWPLRFVIIHKRCVYYFKSSTSASPQGAFSLSGYNRVMRAAEETTSNNVFPFKIIHISKKHRTWFFSASSEEERKSWMALLRREIGHFHEKKDLPLDTSDSSSDTDSFYGAVERPVDISLSPYPTDNEDYEHDDEDDSYLEPDSPEPGRLEDALMHPPAYPPPPVPTPRKPAFSDMPRAHSFTSKGPGPLLPPPPPKHGLPDVGLAAEDSKRDPLCPRRAEPCPRVPATPRRMSDPPLSTMPTAPGLRKPPCFRESASPSPEPWTPGHGACSTSSAAIMATATSRNCDKLKSFHLSPRGPPTSEPPPVPANKPKFLKIAEEDPPREAAMPGLFVPPVAPRPPALKLPVPEAMARPAVLPRPEKPQLPHLQRSPPDGQSFRSFSFEKPRQPSQADTGGDDSDEDYEKVPLPNSVFVNTTESCEVERLFKATSPRGEPQDGLYCIRNSSTKSGKVLVVWDETSNKVRNYRIFEKDSKFYLEGEVLFVSVGSMVEHYHTHVLPSHQSLLLRHPYGYTGPR

SEQ ID NO: 78648 - protein, 561 aa, Homo sapiens; identical to SEQ ID NO: 78646
  Payload ID: 15667
  Gene Symbol: SH3BP2
  Gene Name: SH3-domain binding protein 2
  Uniprot ID: P78314
  ENSP ID: ENSP00000403231

SEQ ID NO: 78649 - protein, 561 aa, Homo sapiens; identical to SEQ ID NO: 78646
  Payload ID: 15667
  Gene Symbol: SH3BP2
  Gene Name: SH3-domain binding protein 2
  Uniprot ID: P78314
  ENSP ID: ENSP00000409746

SEQ ID NO: 78650 - protein, 618 aa, Homo sapiens
  Payload ID: 15667
  Gene Symbol: SH3BP2
  Gene Name: SH3-domain binding protein 2
  Uniprot ID: P78314
  ENSP ID: ENSP00000422168
MAGSGPRPRSWGRREAGARDEAAAAGGRGPGPCRCSQGRRAWIAPGKPAMPAAWTPFMAAEEMHWPVPMKAIGAQNLLTMPGGVAKAGYLHKKGGTQLQLLKWPLRFVIIHKRCVYYFKSSTSASPQGAFSLSGYNRVMRAAEETTSNNVFPFKIIHISKKHRTWFFSASSEEERKSWMALLRREIGHFHEKKDLPLDTSDSSSDTDSFYGAVERPVDISLSPYPTDNEDYEHDDEDDSYLEPDSPEPGRLEDALMHPPAYPPPPVPTPRKPAFSDMPRAHSFTSKGPGPLLPPPPPKHGLPDVGLAAEDSKRDPLCPRRAEPCPRVPATPRRMSDPPLSTMPTAPGLRKPPCFRESASPSPEPWTPGHGACSTSSAAIMATATSRNCDKLKSFHLSPRGPPTSEPPPVPANKPKFLKIAEEDPPREAAMPGLFVPPVAPRPPALKLPVPEAMARPAVLPRPEKPQLPHLQRSPPDGQSFRSFSFEKPRQPSQADTGGDDSDEDYEKVPLPNSVFVNTTESCEVERLFKATSPRGEPQDGLYCIRNSSTKSGKVLVVWDETSNKVRNYRIFEKDSKFYLEGEVLFVSVGSMVEHYHTHVLPSHQSLLLRHPYGYTGPR

SEQ ID NO: 78651 - protein, 97 aa, Homo sapiens
  Payload ID: 15667
  Gene Symbol: SH3BP2
  Gene Name: SH3-domain binding protein 2
  Uniprot ID: P78314
  ENSP ID: ENSP00000422605
MAAEEMHWPVPMKAIGAQNLLTMPGGVAKAGYLHKKGGTQLQLLKWPLRFVIIHKRCVYYFKSSTSASPQGAFSLSGYNRQPRPQPAQALSQTEAGP

SEQ ID NO: 78652 - protein, 142 aa, Homo sapiens
  Payload ID: 15667
  Gene Symbol: SH3BP2
  Gene Name: SH3-domain binding protein 2
  ENSP ID: ENSP00000422796
MAAEEMHWPVPMKAIGAQNLLTMPGGVAKAGYLHKKGGTQLQLLKWPLRFVIIHKRCVYYFKSSTSASPQGAFSLSGYNRVMRAAEETTSNNVFPFKIIHISKKHRTWFFSASSEEERKSWMALLRREIGHFHEKKDLPLDT

SEQ ID NO: 78653 - protein, 172 aa, Homo sapiens
  Payload ID: 15667
  Gene Symbol: SH3BP2
  Gene Name: SH3-domain binding protein 2
  ENSP ID: ENSP00000423275
MAAEEMHWPVPMKAIGAQNLLTMPGGVAKAGYLHKKGGTQLQLLKWPLRFVIIHKRCVYYFKSSTSASPQGAFSLSGYNRVMRAAEETTSNNVFPFKIIHISKKHRTWFFSASSEEERKSWMALLRREIGHFHEKKDLPLDTSDSSSDTDSFYGAVERPVDISLSPYPTDNE

SEQ ID NO: 78654 - protein, 136 aa, Homo sapiens
  Payload ID: 15667
  Gene Symbol: SH3BP2
  Gene Name: SH3-domain binding protein 2
  ENSP ID: ENSP00000423823
MAAEEMHWPVPMKAIGAQNLLTMPGGVAKAGYLHKKGGTQLQLLKWPLRFVIIHKRCVYYFKSSTSASPQGAFSLSGYNRVMRAAEETTSNNVFPFKIIHISKKHRTWFFSASSEEERKSWMALLRREIGHFHEKK

SEQ ID NO: 78655 - protein, 97 aa, Homo sapiens; identical to SEQ ID NO: 78651
  Payload ID: 15667
  Gene Symbol: SH3BP2
  Gene Name: SH3-domain binding protein 2
  Uniprot ID: P78314
  ENSP ID: ENSP00000424072

SEQ ID NO: 78656 - protein, 194 aa, Homo sapiens
  Payload ID: 15667
  Gene Symbol: SH3BP2
  Gene Name: SH3-domain binding protein 2
  ENSP ID: ENSP00000424105
MAAEEMHWPVPMKAIGAQNLLTMPGGVAKAGYLHKKGGTQLQLLKWPLRFVIIHKRCVYYFKSSTSASPQGAFSLSGYNRVMRAAEETTSNNVFPFKIIHISKKHRTWFFSASSEEERKSWMALLRREIGHFHEKKDLPLDTSDSSSDTDSFYGAVERPVDISLSPYPTDNEDYEHDDEDDSYLEPDSPEPGRL

SEQ ID NO: 78657 - protein, 561 aa, Homo sapiens; identical to SEQ ID NO: 78646
  Payload ID: 15667
  Gene Symbol: SH3BP2
  Gene Name: SH3-domain binding protein 2
  Uniprot ID: P78314
  ENSP ID: ENSP00000424846

SEQ ID NO: 78658 - protein, 188 aa, Homo sapiens
  Payload ID: 15667
  Gene Symbol: SH3BP2
  Gene Name: SH3-domain binding protein 2
  ENSP ID: ENSP00000424917
MAAEEMHWPVPMKAIGAQNLLTMPGGVAKAGYLHKKGGTQLQLLKWPLRFVIIHKRCVYYFKSSTSASPQGAFSLSGYNRVMRAAEETTSNNVFPFKIIHISKKHRTWFFSASSEEERKSWMALLRREIGHFHEKKDLPLDTSDSSSDTDSFYGAVERPVDISLSPYPTDNEDYEHDDEDDSYLEPDS

SEQ ID NO: 78659 - protein, 142 aa, Homo sapiens; identical to SEQ ID NO: 78652
  Payload ID: 15667
  Gene Symbol: SH3BP2
  Gene Name: SH3-domain binding protein 2
  ENSP ID: ENSP00000425537

SEQ ID NO: 78660 - protein, 190 aa, Homo sapiens
  Payload ID: 15667
  Gene Symbol: SH3BP2
  Gene Name: SH3-domain binding protein 2
  ENSP ID: ENSP00000426818
  MOD_RES (1)..(1): Any amino acid
XRESASPSPEPWTPGHGACSTSSAAIMATATSRNCDKLKSFHLSPRGPPTSEPPPVPANKPKFLKIAEEDPPREAAMPGLFVPPVAPRPPALKLPVPEAMARPAVLPRPEKPQLPHLQRSPPDGQSFRSFSFEKPRQPSQADTGGDDSDEDYEKVVQGYKPPGRAPGWTLLHPELLYQVGEGPGCVGRNL

SEQ ID NO: 78661 - protein, 963 aa, Homo sapiens
  Payload ID: 15668
  Gene Symbol: SH3BP4
  Gene Name: SH3-domain binding protein 4
  Uniprot ID: Q9P0V3
  ENSP ID: ENSP00000340237
MAAQRIRAANSNGLPRCKSEGTLIDLSEGFSETSFNDIKVPSPSALLVDNPTPFGNAKEVIAIKDYCPTNFTTLKFSKGDHLYVLDTSGGEWWYAHNTTEMGYIPSSYVQPLNYRNSTLSDSGMIDNLPDSPDEVAKELELLGGWTDDKKVPGRMYSNNPFWNGVQTNPFLNGNVPVMPSLDELNPKSTVDLLLFDAGTSSFTESSSATTNSTGNIFDELPVTNGLHAEPPVRRDNPFFRSKRSYSLSELSVLQAKSDAPTSSSFFTGLKSPAPEQFQSREDFRTAWLNHRKLARSCHDLDLLGQSPGWGQTQAVETNIVCKLDSSGGAVQLPDTSISIHVPEGHVAPGETQQISMKALLDPPLELNSDRSCSISPVLEVKLSNLEVKTSIILEMKVSAEIKNDLFSKSTVGLQCLRSDSKEGPYVSVPLNCSCGDTVQAQLHNLEPCMYVAVVAHGPSILYPSTVWDFINKKVTVGLYGPKHIHPSFKTVVTIFGHDCAPKTLLVSEVTRQAPNPAPVALQLWGKHQFVLSRPQDLKVCMFSNMTNYEVKASEQAKVVRGFQLKLGKVSRLIFPITSQNPNELSDFTLRVQVKDDQEAILTQFCVQTPQPPPKSAIKPSGQRRFLKKNEVGKIILSPFATTTKYPTFQDRPVSSLKFGKLLKTVVRQNKNHYLLEYKKGDGIALLSEERVRLRGQLWTKEWYIGYYQGRVGLVHTKNVLVVGRARPSLCSGPELSTSVLLEQILRPCKFLTYIYASVRTLLMENISSWRSFADALGYVNLPLTFFCRAELDSEPERVASVLEKLKEDCNNTENKERKSFQKELVMALLKMDCQGLVVRLIQDFVLLTTAVEVAQRWRELAEKLAKVSKQQMDAYESPHRDRNGVVDSEAMWKPAYDFLLTWSHQIGDSYRDVIQELHLGLDKMKNPITKRWKHLTGTLILVNSLDVLRAAAFSPADQDDFVI

SEQ ID NO: 78662 - protein, 963 aa, Homo sapiens; identical to SEQ ID NO: 78661
  Payload ID: 15668
  Gene Symbol: SH3BP4
  Gene Name: SH3-domain binding protein 4
  Uniprot ID: Q9P0V3
  ENSP ID: ENSP00000375867

SEQ ID NO: 78663 - protein, 963 aa, Homo sapiens; identical to SEQ ID NO: 78661
  Payload ID: 15668
  Gene Symbol: SH3BP4
  Gene Name: SH3-domain binding protein 4
  Uniprot ID: Q9P0V3
  ENSP ID: ENSP00000386862

SEQ ID NO: 78664 - protein, 56 aa, Homo sapiens
  Payload ID: 15668
  Gene Symbol: SH3BP4
  Gene Name: SH3-domain binding protein 4
  ENSP ID: ENSP00000387995
MAAQRIRAANSNGLPRCKSEGTLIDLSEGFSETSFNDIKVPSPSALLVDNPTPFGN

SEQ ID NO: 78665 - protein, 122 aa, Homo sapiens
  Payload ID: 15668
  Gene Symbol: SH3BP4
  Gene Name: SH3-domain binding protein 4
  ENSP ID: ENSP00000403251
MAAQRIRAANSNGLPRCKSEGTLIDLSEGFSETSFNDIKVPSPSALLVDNPTPFGNAKEVIAIKDYCPTNFTTLKFSKGDHLYVLDTSGGEWWYAHNTTEMGYIPSSYVQPLNYRNSTLSDS

SEQ ID NO: 78666 - protein, 57 aa, Homo sapiens
  Payload ID: 15668
  Gene Symbol: SH3BP4
  Gene Name: SH3-domain binding protein 4
  ENSP ID: ENSP00000414740
MAAQRIRAANSNGLPRCKSEGTLIDLSEGFSETSFNDIKVPSPSALLVDNPTPFGNA

SEQ ID NO: 78667 - protein, 173 aa, Homo sapiens
  Payload ID: 15668
  Gene Symbol: SH3BP4
  Gene Name: SH3-domain binding protein 4
  ENSP ID: ENSP00000415391
MAAQRIRAANSNGLPRCKSEGTLIDLSEGFSETSFNDIKVPSPSALLVDNPTPFGNAKEVIAIKDYCPTNFTTLKFSKGDHLYVLDTSGGEWWYAHNTTEMGYIPSSYVQPLNYRNSTLSDSGMIDNLPDSPDEVAKELELLGGWTDDKKVPGRMYSNNPFWNGVQTNPFLNG

SEQ ID NO: 78668 - protein, 455 aa, Homo sapiens
  Payload ID: 15669
  Gene Symbol: SH3BP5
  Gene Name: SH3-domain binding protein 5 (BTK-associated)
  Uniprot ID: O60239
  ENSP ID: ENSP00000373301
MDAALKRSRSEEPAEILPPARDEEEEEEEGMEQGLEEEEEVDPRIQGELEKLNQSTDDINRRETELEDARQKFRSVLVEATVKLDELVKKIGKAVEDSKPYWEARRVARQAQLEAQKATQDFQRATEVLRAAKETISLAEQRLLEDDKRQFDSAWQEMLNHATQRVMEAEQTKTRSELVHKETAARYNAAMGRMRQLEKKLKRAINKSKPYFELKAKYYVQLEQLKKTVDDLQAKLTLAKGEYKMALKNLEMISDEIHERRRSSAMGPRGCGVGAEGSSTSVEDLPGSKPEPDAISVASEAFEDDSCSNFVSEDDSETQSVSSFSSGPTSPSEMPDQFPAVVRPGSLDLPSPVSLSEFGMMFPVLGPRSECSGASSPECEVERGDRAEGAENKTSDKANNNRGLSSSSGSGGSSKSQSSTSPEGQALENRMKQLSLQCSKGRDGIIADIKMVQIG

SEQ ID NO: 78669 - protein, 298 aa, Homo sapiens
  Payload ID: 15669
  Gene Symbol: SH3BP5
  Gene Name: SH3-domain binding protein 5 (BTK-associated)
  Uniprot ID: O60239
  ENSP ID: ENSP00000386231
MLNHATQRVMEAEQTKTRSELVHKETAARYNAAMGRMRQLEKKLKRAINKSKPYFELKAKYYVQLEQLKKTVDDLQAKLTLAKGEYKMALKNLEMISDEIHERRRSSAMGPRGCGVGAEGSSTSVEDLPGSKPEPDAISVASEAFEDDSCSNFVSEDDSETQSVSSFSSGPTSPSEMPDQFPAVVRPGSLDLPSPVSLSEFGMMFPVLGPRSECSGASSPECEVERGDRAEGAENKTSDKANNNRGLSSSSGSGGSSKSQSSTSPEGQALENRMKQLSLQCSKGRDGIIADIKMVQIG

SEQ ID NO: 78670 - protein, 298 aa, Homo sapiens; identical to SEQ ID NO: 78669
  Payload ID: 15669
  Gene Symbol: SH3BP5
  Gene Name: SH3-domain binding protein 5 (BTK-associated)
  Uniprot ID: O60239
  ENSP ID: ENSP00000388553

SEQ ID NO: 78671 - protein, 69 aa, Homo sapiens
  Payload ID: 15669
  Gene Symbol: SH3BP5
  Gene Name: SH3-domain binding protein 5 (BTK-associated)
  ENSP ID: ENSP00000389484
MDAALKRSRSEEPAEILPPARDEEEEEEEGMEQGLEEEEEVDPRIQGELEKLNQSTDDINRRETELEVQ

SEQ ID NO: 78672 - protein, 128 aa, Homo sapiens
  Payload ID: 15669
  Gene Symbol: SH3BP5
  Gene Name: SH3-domain binding protein 5 (BTK-associated)
  ENSP ID: ENSP00000394115
MLNHATQRVMEAEQTKTRSELVHKETAARYNAAMGRMRQLEKKLKRAINKSKPYFELKAKYYVQLEQLKKTVDDLQAKLTLAKGEYKMALKNLEMISDEIHERRRSSAMGPRGCGVGAEGSSTSVEDL

SEQ ID NO: 78673 - protein, 57 aa, Homo sapiens
  Payload ID: 15669
  Gene Symbol: SH3BP5
  Gene Name: SH3-domain binding protein 5 (BTK-associated)
  ENSP ID: ENSP00000400128
MDAALKRSRSEEPAEILPPARDEEEEEEEGMEQGLEEEEEVDPRIQHICGGSAREQT

SEQ ID NO: 78674 - protein, 51 aa, Homo sapiens
  Payload ID: 15669
  Gene Symbol: SH3BP5
  Gene Name: SH3-domain binding protein 5 (BTK-associated)
  ENSP ID: ENSP00000408246
MLNHATQRVMEAEQTKTRSELVHKETAARYNAAMGRMRQLEKKLKRAINKS

SEQ ID NO: 78675 - protein, 859 aa, Homo sapiens
  Payload ID: 15670
  Gene Symbol: SGIP1
  Gene Name: SH3-domain GRB2-like (endophilin) interacting protein 1
  Uniprot ID: Q9BQI5
  ENSP ID: ENSP00000237247
MMEGLKKRTRKAFGIRKKEKDTDSTGSPDRDGIQGKKKTQKTQLLLTSCFWLRALSLTLSQKKSNGAPNGFYAEIDWERYNSPELDEEGYSIRPEEPGSTKGKHFYSSSESEEEEESHKKFNIKIKPLQSKDILKNAATVDELKASIGNIALSPSPVRKSPRRSPGAIKRNLSSEEVARPRRSTPTPELISKKPPDDTTALAPLFGPPLESAFDEQKTEVLLDQPEIWGSGQPINPSMESPKLTRPFPTGTPPPLPPKNVPATPPRTGSPLTIGPGNDQSATEVKIEKLPSINDLDSIFGPVLSPKSVAVNAEEKWVHFSDTSPEHVTPELTPREKVVSPPATPDNPADSPAPGPLGPPGPTGPPGPPGPPRNVLSPLNLEEVQKKVAEQTFIKDDYLETISSPKDFGLGQRATPPPPPPPTYRTVVSSPGPGSGPGPGTTSDGKTEAQRYQVICPSLQAGGNELDSYSGASSPARPATPLVPCRSTTPPPPPPRPPSRPKLPPGKPGVGDVSRPFSPPIHSSSPPPIAPLARAESTSSISSTNSLSAATTPTVENEQPSLVWFDRGKFYLTFEGSSRGPSPLTMGAQDTLPVAAAFTETVNAYFKGADPSKCIVKITGEMVLSFPAGITRHFANNPSPAALTFRVINFSRLEHVLPNPQLLCCDNTQNDANTKEFWVNMPNLMTHLKKVSEQKPQATYYNVDMLKYQVSAQGIQSTPLNLAVNWRCEPSSTDLRIDYKYNTDAMTTAVALNNVQFLVPIDGGVTKLQAVLPPAVWNAEQQRILWKIPDISQKSENGGVGSLLARFQLSEGPSKPSPLVVQFTSEGSTLSGCDIELVGAGYRFSLIKKRFAAGKYLADN

SEQ ID NO: 78676 - protein, 828 aa, Homo sapiens
  Payload ID: 15670
  Gene Symbol: SGIP1
  Gene Name: SH3-domain GRB2-like (endophilin) interacting protein 1
  Uniprot ID: Q9BQI5
  ENSP ID: ENSP00000360076
MMEGLKKRTRKAFGIRKKEKDTDSTGSPDRDGIQPSPHEPPYNSKAECAREGGKKVSKKSNGAPNGFYAEIDWERYNSPELDEEGYSIRPEEPGSTKGKHFYSSSESEEEEESHKKFNIKIKPLQSKDILKNAATVDELKASIGNIALSPSPVRKSPRRSPGAIKRNLSSEEVARPRRSTPTPELISKKPPDDTTALAPLFGPPLESAFDEQKTEVLLDQPEIWGSGQPINPSMESPKLTRPFPTGTPPPLPPKNVPATPPRTGSPLTIGPGNDQSATEVKIEKLPSINDLDSIFGPVLSPKSVAVNAEEKWVHFSDTSPEHVTPELTPREKVVSPPATPDNPADSPAPGPLGPPGPTGPPGPPGPPRNVLSPLNLEEVQKKVAEQTFIKDDYLETISSPKDFGLGQRATPPPPPPPTYRTVVSSPGPGSGPGPGTTSGASSPARPATPLVPCRSTTPPPPPPRPPSRPKLPPGKPGVGDVSRPFSPPIHSSSPPPIAPLARAESTSSISSTNSLSAATTPTVENEQPSLVWFDRGKFYLTFEGSSRGPSPLTMGAQDTLPVAAAFTETVNAYFKGADPSKCIVKITGEMVLSFPAGITRHFANNPSPAALTFRVINFSRLEHVLPNPQLLCCDNTQNDANTKEFWVNMPNLMTHLKKVSEQKPQATYYNVDMLKYQVSAQGIQSTPLNLAVNWRCEPSSTDLRIDYKYNTDAMTTAVALNNVQFLVPIDGGVTKLQAVLPPAVWNAEQQRILWKIPDISQKSENGGVGSLLARFQLSEGPSKPSPLVVQFTSEGSTLSGCDIELVGAGYRFSLIKKRFAAGKYLADN

SEQ ID NO: 78677 - protein, 631 aa, Homo sapiens
  Payload ID: 15670
  Gene Symbol: SGIP1
  Gene Name: SH3-domain GRB2-like (endophilin) interacting protein 1
  Uniprot ID: Q9BQI5
  ENSP ID: ENSP00000360078
MMEGLKKRTRKAFGIRKKEKDTDSTGSPDRDGIKKSNGAPNGFYAEIDWERYNSPELDEEGYSIRPEEPGSTKGKHFYSSSESEEEEESHKKFNIKIKPLQSKDILKNAATVDELKASIGNIALSPSPVGAIKRNLSSEEVARPRRSTPTPELISKKPPDDTTALAPLFGPPLESAFDEQKTEVLLDQPEIWGSGQPINPSMESPKLTRPFPTGTPPPLPPKNVPATPPRTGSPLTIGPGASSPARPATPLVPCRSTTPPPPPPRPPSRPKLPPGKPGVGDVSRPFSPPIHSSSPPPIAPLARAESTSSISSTNSLSAATTPTVVSEDDVFYDKLPSFERRCETPAGSSRGPSPLTMGAQDTLPVAAAFTETVNAYFKGADPSKCIVKITGEMVLSFPAGITRHFANNPSPAALTFRVINFSRLEHVLPNPQLLCCDNTQNDANTKEFWVNMPNLMTHLKKVSEQKPQATYYNVDMLKYQVSAQGIQSTPLNLAVNWRCEPSSTDLRIDYKYNTDAMTTAVALNNVQFLVPIDGGVTKLQAVLPPAVWNAEQQRILWKIPDISQKSENGGVGSLLARFQLSEGPSKPSPLVVQFTSEGSTLSGCDIELVGAGYRFSLIKKRFAAGKYLADN

SEQ ID NO: 78678 - protein, 333 aa, Homo sapiens
  Payload ID: 15670
  Gene Symbol: SGIP1
  Gene Name: SH3-domain GRB2-like (endophilin) interacting protein 1
  ENSP ID: ENSP00000395525
MTCSVTHIVSFSLPFLNPSHPASTPGHTENEQPSLVWFDRGKFYLTFEGSSRGPSPLTMGAQDTLPVAAAFTETVNAYFKGADPSKCIVKITGEMVLSFPAGITRHFANNPSPAALTFRVINFSRLEHVLPNPQLLCCDNTQNDANTKEFWVNMPNLMTHLKKVSEQKPQATYYNVDMLKYQVSAQGIQSTPLNLAVNWRCEPSSTDLRIDYKYNTDAMTTAVALNNVQFLVPIDGGVTKLQAVLPPAVWNAEQQRILWKIPDISQKSENGGVGSLLARFQLSEGPSKPSPLVVQFTSEGSTLSGCDIELVGAGYRFSLIKKRFAAGKYLADN

SEQ ID NO: 78679 - protein, 260 aa, Homo sapiens
  Payload ID: 15670
  Gene Symbol: SGIP1
  Gene Name: SH3-domain GRB2-like (endophilin) interacting protein 1
  ENSP ID: ENSP00000410439
MMEGLKKRTRKAFGIRKKEKDTDSTGSPDRDGIQPSPHEPPYNSKAECAREGGKKVSKKSNGAPNGFYAEIDWERYNSPELDEEGYSIRPEEPGSTKGKHFYSSSESEEEEESHKKFNIKIKPLQSKDILKNAATVDELKASIGNIALSPSPVGAIKRNLSSEEVARPRRSTPTPELISKKPPDDTTALAPLFGPPLESAFDEQKTEVLLDQPEIWGSGQPINPSMESPKLTRPFPTGTPPPLPPKNVPATPPRTGSPLT

SEQ ID NO: 78680 - protein, 368 aa, Homo sapiens
  Payload ID: 15671
  Gene Symbol: SH3GL1
  Gene Name: SH3-domain GRB2-like 1
  Uniprot ID: Q99961
  ENSP ID: ENSP00000269886
MSVAGLKKQFYKASQLVSEKVGGAEGTKLDDDFKEMEKKVDVTSKAVTEVLARTIEYLQPNPASRAKLTMLNTVSKIRGQVKNPGYPQSEGLLGECMIRHGKELGGESNFGDALLDAGESMKRLAEVKDSLDIEVKQNFIDPLQNLCEKDLKEIQHHLKKLEGRRLDFDYKKKRQGKIPDEELRQALEKFEESKEVAETSMHNLLETDIEQVSQLSALVDAQLDYHRQAVQILDELAEKLKRRMREASSRPKREYKPKPREPFDLGEPEQSNGGFPCTTAPKIAASSSFRSSDKPIRTPSRSMPPLDQPSCKALYDFEPENDGELGFHEGDVITLTNQIDENWYEGMLDGQSGFFPLSYVEVLVPLPQ

SEQ ID NO: 78681 - protein, 320 aa, Homo sapiens
  Payload ID: 15671
  Gene Symbol: SH3GL1
  Gene Name: SH3-domain GRB2-like 1
  Uniprot ID: Q99961
  ENSP ID: ENSP00000404568
MSVAGLKKQFYKASQLVSEKVGGAEGTKLDDDFKEMEKKVDVTSKAVTEVLARTIEYLQPNPGDALLDAGESMKRLAEVKDSLDIEVKQNFIDPLQNLCEKDLKEIQHHLKKLEGRRLDFDYKKKRQGKIPDEELRQALEKFEESKEVAETSMHNLLETDIEQVSQLSALVDAQLDYHRQAVQILDELAEKLKRRMREASSRPKREYKPKPREPFDLGEPEQSNGGFPCTTAPKIAASSSFRSSDKPIRTPSRSMPPLDQPSCKALYDFEPENDGELGFHEGDVITLTNQIDENWYEGMLDGQSGFFPLSYVEVLVPLPQ

SEQ ID NO: 78682 - protein, 128 aa, Homo sapiens
  Payload ID: 15671
  Gene Symbol: SH3GL1
  Gene Name: SH3-domain GRB2-like 1
  ENSP ID: ENSP00000469766
MEKKVDVTSKAVTEVLARTIEYLQPNPASRAKLTMLNTVSKIRGQVKNPGYPQSEGLLGECMIRHGKELGGESNFGDALLDAGESMKRLAEVKDSLDIEVKQNFIDPLQNLCEKDLKEIQHHLKKLEG

SEQ ID NO: 78683 - protein, 304 aa, Homo sapiens
  Payload ID: 15671
  Gene Symbol: SH3GL1
  Gene Name: SH3-domain GRB2-like 1
  Uniprot ID: Q99961
  ENSP ID: ENSP00000470792
MSVAGLKKQFYKASQLVSEKVGGAEGTKLDDDFKEMEKKVDVTSKAVTEVLARTIEYLQPNPASRAKLTMLNTVSKIRGQNLCEKDLKEIQHHLKKLEGRRLDFDYKKKRQGKIPDEELRQALEKFEESKEVAETSMHNLLETDIEQVSQLSALVDAQLDYHRQAVQILDELAEKLKRRMREASSRPKREYKPKPREPFDLGEPEQSNGGFPCTTAPKIAASSSFRSSDKPIRTPSRSMPPLDQPSCKALYDFEPENDGELGFHEGDVITLTNQIDENWYEGMLDGQSGFFPLSYVEVLVPLPQ

SEQ ID NO: 78684 - protein, 139 aa, Homo sapiens
  Payload ID: 15671
  Gene Symbol: SH3GL1
  Gene Name: SH3-domain GRB2-like 1
  ENSP ID: ENSP00000471260
MEKKVDVTSKAVTEVLARTIEYLQPNPASRAKLTMLNTVSKIRGQVKNPGYPQSEGLLGECMIRHGKELGGESNFGDALLDAGESMKRLAEVKDSLDIEVKQNFIDPLQNLCEKDLKEIQHHLKKLEGRRLDFDYKKKR

SEQ ID NO: 78685 - protein, 26 aa, Homo sapiens
  Payload ID: 15671
  Gene Symbol: SH3GL1
  Gene Name: SH3-domain GRB2-like 1
  ENSP ID: ENSP00000472640
MEKKVDVTSKAVTEVLARTIEYLQPN

SEQ ID NO: 78686 - protein, 352 aa, Homo sapiens
  Payload ID: 15672
  Gene Symbol: SH3GL2
  Gene Name: SH3-domain GRB2-like 2
  Uniprot ID: Q99962
  ENSP ID: ENSP00000369981
MSVAGLKKQFHKATQKVSEKVGGAEGTKLDDDFKEMERKVDVTSRAVMEIMTKTIEYLQPNPASRAKLSMINTMSKIRGQEKGPGYPQAEALLAEAMLKFGRELGDDCNFGPALGEVGEAMRELSEVKDSLDIEVKQNFIDPLQNLHDKDLREIQHHLKKLEGRRLDFDYKKKRQGKIPDEELRQALEKFDESKEIAESSMFNLLEMDIEQVSQLSALVQAQLEYHKQAVQILQQVTVRLEERIRQASSQPRREYQPKPRMSLEFPTGDSTQPNGGLSHTGTPKPSGVQMDQPCCRALYDFEPENEGELGFKEGDIITLTNQIDENWYEGMLHGHSGFFPINYVEILVALPH

SEQ ID NO: 78687 - protein, 355 aa, Homo sapiens
  Payload ID: 15673
  Gene Symbol: SH3GL3
  Gene Name: SH3-domain GRB2-like 3
  Uniprot ID: Q99963
  ENSP ID: ENSP00000320092
MDGIFAGIICNQANRCLTWTSQQLFSEKISGAEGTKLDDEFLDMERKIDVTNKVVAEILSKTTEYLQPNPAYRAKLGMLNTVSKIRGQVKTTGYPQTEGLLGDCMLKYGKELGEDSTFGNALIEVGESMKLMAEVKDSLDINVKQTFIDPLQLLQDKDLKEIGHHLKKLEGRRLDYDYKKKRVGKIPDEEVRQAVEKFEESKELAERSMFNFLENDVEQVSQLAVFIEAALDYHRQSTEILQELQSKLQMRISAASSVPRREYKPRPVKRSSSELNGVSTTSVVKTTGSNIPMDQPCCRGLYDFEPENQGELGFKEGDIITLTNQIDENWYEGMIHGESGFFPINYVEVIVPLPQ

SEQ ID NO: 78688 - protein, 347 aa, Homo sapiens
  Payload ID: 15673
  Gene Symbol: SH3GL3
  Gene Name: SH3-domain GRB2-like 3
  Uniprot ID: Q99963
  ENSP ID: ENSP00000391372
MSVAGLKKQFHKASQLFSEKISGAEGTKLDDEFLDMERKIDVTNKVVAEILSKTTEYLQPNPAYRAKLGMLNTVSKIRGQVKTTGYPQTEGLLGDCMLKYGKELGEDSTFGNALIEVGESMKLMAEVKDSLDINVKQTFIDPLQLLQDKDLKEIGHHLKKLEGRRLDYDYKKKRVGKIPDEEVRQAVEKFEESKELAERSMFNFLENDVEQVSQLAVFIEAALDYHRQSTEILQELQSKLQMRISAASSVPRREYKPRPVKRSSSELNGVSTTSVVKTTGSNIPMDQPCCRGLYDFEPENQGELGFKEGDIITLTNQIDENWYEGMIHGESGFFPINYVEVIVPLPQ

SEQ ID NO: 78689 - protein, 65 aa, Homo sapiens
  Payload ID: 15673
  Gene Symbol: SH3GL3
  Gene Name: SH3-domain GRB2-like 3
  ENSP ID: ENSP00000456249
MSVAGLKKQFHKASQLFSEKISGAEGTKLDDEFLDMERKIDVTNKVVAEILSKTTEYLQPNPELS

SEQ ID NO: 78690 - protein, 386 aa, Homo sapiens
  Payload ID: 15674
  Gene Symbol: SH3GLB1
  Gene Name: SH3-domain GRB2-like endophilin B1
  Uniprot ID: Q9Y371
  ENSP ID: ENSP00000418744
MNIMDFNVKKLAADAGTFLSRAVQFTEEKLGQAEKTELDAHLENLLSKAECTKIWTEKIMKQTEVLLQPNPNARIEEFVYEKLDRKAPSRINNPELLGQYMIDAGTEFGPGTAYGNALIKCGETQKRIGTADRELIQTSALNFLTPLRNFIEGDYKTIAKERKLLQNKRLDLDAAKTRLKKAKAAETRNSQLNSARLEGDNIMIWAEEVTKSEQELRITQSEFDRQAEITRLLLEGISSTHAHHLRCLNDFVEAQMTYYAQCYQYMLDLQKQLGSFPSNYLSNNNQTSVTPVPSVLPNAIGSSAMASTSGLVITSPSNLSDLKECSGSRKARVLYDYDAANSTELSLLADEVITVFSVVGMDSDWLMGERGNQKGKVPITYLELLN

SEQ ID NO: 78691 - protein, 265 aa, Homo sapiens
  Payload ID: 15674
  Gene Symbol: SH3GLB1
  Gene Name: SH3-domain GRB2-like endophilin B1
  Uniprot ID: Q9Y371
  ENSP ID: ENSP00000441355
MIDAGTEFGPGTAYGNALIKCGETQKRIGTADRELIQTSALNFLTPLRNFIEGDYKTIAKERKLLQNKRLDLDAAKTRLKKAKAAETRNSSEQELRITQSEFDRQAEITRLLLEGISSTHAHHLRCLNDFVEAQMTYYAQCYQYMLDLQKQLGSFPSNYLSNNNQTSVTPVPSVLPNAIGSSAMASTSGLVITSPSNLSDLKECSGSRKARVLYDYDAANSTELSLLADEVITVFSVVGMDSDWLMGERGNQKGKVPITYLELLN

SEQ ID NO: 78692 - protein, 365 aa, Homo sapiens
  Payload ID: 15674
  Gene Symbol: SH3GLB1
  Gene Name: SH3-domain GRB2-like endophilin B1
  Uniprot ID: Q9Y371
  ENSP ID: ENSP00000473267
MNIMDFNVKKLAADAGTFLSRAVQFTEEKLGQAEKTELDAHLENLLSKAECTKIWTEKIMKQTEVLLQPNPNARIEEFVYEKLDRKAPSRINNPELLGQYMIDAGTEFGPGTAYGNALIKCGETQKRIGTADRELIQTSALNFLTPLRNFIEGDYKTIAKERKLLQNKRLDLDAAKTRLKKAKAAETRNSSEQELRITQSEFDRQAEITRLLLEGISSTHAHHLRCLNDFVEAQMTYYAQCYQYMLDLQKQLGSFPSNYLSNNNQTSVTPVPSVLPNAIGSSAMASTSGLVITSPSNLSDLKECSGSRKARVLYDYDAANSTELSLLADEVITVFSVVGMDSDWLMGERGNQKGKVPITYLELLN

SEQ ID NO: 78693 - protein, 394 aa, Homo sapiens
  Payload ID: 15674
  Gene Symbol: SH3GLB1
  Gene Name: SH3-domain GRB2-like endophilin B1
  ENSP ID: ENSP00000479919
MNIMDFNVKKLAADAGTFLSRAVQFTEEKLGQAEKTELDAHLENLLSKAECTKIWTEKIMKQTEVLLQPNPNARIEEFVYEKLDRKAPSRINNPELLGQYMIDAGTEFGPGTAYGNALIKCGETQKRIGTADRELIQTSALNFLTPLRNFIEGDYKTIAKERKLLQNKRLDLDAAKTRLKKAKAAETRNSQLNSARLEGDNIMVNFSYMLNFLHVKWLKSEQELRITQSEFDRQAEITRLLLEGISSTHAHHLRCLNDFVEAQMTYYAQCYQYMLDLQKQLGSFPSNYLSNNNQTSVTPVPSVLPNAIGSSAMASTSGLVITSPSNLSDLKECSGSRKARVLYDYDAANSTELSLLADEVITVFSVVGMDSDWLMGERGNQKGKVPITYLELLN

SEQ ID NO: 78694 - protein, 404 aa, Homo sapiens
  Payload ID: 15675
  Gene Symbol: SH3GLB2
  Gene Name: SH3-domain GRB2-like endophilin B2
  Uniprot ID: Q9NR46
  ENSP ID: ENSP00000361634
MDFNMKKLASDAGIFFTRAVQFTEEKFGQAEKTELDAHFENLLARADSTKNWTEKILRQTEVLLQPNPSARVEEFLYEKLDRKVPSRVTNGELLAQYMADAASELGPTTPYGKTLIKVAEAEKQLGAAERDFIHTASISFLTPLRNFLEGDWKTISKERRLLQNRRLDLDACKARLKKAKAAEAKATCEGDTVPDFQETRPRNYILSASASALWNDEVDKAEQELRVAQTEFDRQAEVTRLLLEGISSTHVNHLRCLHEFVKSQTTYYAQCYRHMLDLQKQLGSSQGAIFPGTFVGTTEPASPPLSSTSPTTAAATMPVVPSVASLAPPGEASLCLEEVAPPASGTRKARVLYDYEAADSSELALLADELITVYSLPGMDPDWLIGERGNKKGKVPVTYLELLS

SEQ ID NO: 78695 - protein, 395 aa, Homo sapiens
  Payload ID: 15675
  Gene Symbol: SH3GLB2
  Gene Name: SH3-domain GRB2-like endophilin B2
  Uniprot ID: Q9NR46
  ENSP ID: ENSP00000361640
MDFNMKKLASDAGIFFTRAVQFTEEKFGQAEKTELDAHFENLLARADSTKNWTEKILRQTEVLLQPNPSARVEEFLYEKLDRKVPSRVTNGELLAQYMADAASELGPTTPYGKTLIKVAEAEKQLGAAERDFIHTASISFLTPLRNFLEGDWKTISKERRLLQNRRLDLDACKARLKKAKAAEAKATTVPDFQETRPRNYILSASASALWNDEVDKAEQELRVAQTEFDRQAEVTRLLLEGISSTHVNHLRCLHEFVKSQTTYYAQCYRHMLDLQKQLGRFPGTFVGTTEPASPPLSSTSPTTAAATMPVVPSVASLAPPGEASLCLEEVAPPASGTRKARVLYDYEAADSSELALLADELITVYSLPGMDPDWLIGERGNKKGKVPVTYLELLS

SEQ ID NO: 78696 - protein, 395 aa, Homo sapiens; identical to SEQ ID NO: 78695
  Payload ID: 15675
  Gene Symbol: SH3GLB2
  Gene Name: SH3-domain GRB2-like endophilin B2
  Uniprot ID: Q9NR46
  ENSP ID: ENSP00000361645

SEQ ID NO: 78697 - protein, 374 aa, Homo sapiens
  Payload ID: 15675
  Gene Symbol: SH3GLB2
  Gene Name: SH3-domain GRB2-like endophilin B2
  ENSP ID: ENSP00000388282
MDFNMKKLASDAGIFFTRAVQFTEEKFGQAEKTELDAHFENLLARADSTKNWTEKILRQTEVLLQPNPSARVEEFLYEKLDRKVPSRVTNGELLAQYMADAASELGPTTPYGKTLIKVAEAEKQLGAAERDFIHTASISFLTPLRNFLEGDWKTISKERRLLQNRRLDLDACKARLKKAKAAEAKATLWNDEVDKAEQELRVAQTEFDRQAEVTRLLLEGISSTHVNHLRCLHEFVKSQTTYYAQCYRHMLDLQKQLGRFPGTFVGTTEPASPPLSSTSPTTAAATMPVVPSVASLAPPGEASLCLEEVAPPASGTRKARVLYDYEAADSSELALLADELITVYSLPGMDPDWLIGERGNKKGKVPVTYLELLS

SEQ ID NO: 78698 - protein, 24 aa, Homo sapiens
  Payload ID: 15675
  Gene Symbol: SH3GLB2
  Gene Name: SH3-domain GRB2-like endophilin B2
  ENSP ID: ENSP00000396761
MDFNMKKLASDAGIFFTRAVQGRH

SEQ ID NO: 78699 - protein, 127 aa, Homo sapiens
  Payload ID: 15675
  Gene Symbol: SH3GLB2
  Gene Name: SH3-domain GRB2-like endophilin B2
  ENSP ID: ENSP00000400951
MDFNMKKLASDAGIFFTRAVQFTEEKFGQAEKTELDAHFENLLARADSTKNWTEKILRQTEVLLQPNPSARVEEFLYEKLDRKVPSRVTNGELLAQYMADAASELGPTTPYDRILLCHPDWSAVVQS

SEQ ID NO: 78700 - protein, 400 aa, Homo sapiens
  Payload ID: 15675
  Gene Symbol: SH3GLB2
  Gene Name: SH3-domain GRB2-like endophilin B2
  ENSP ID: ENSP00000402566
MDFNMKKLASDAGIFFTRAVQFTEEKFGQAEKTELDAHFENLLARADSTKNWTEKILRQTEVLLQPNPSARVEEFLYEKLDRKVPSRVTNGELLAQYMADAASELGPTTPYGKTLIKVAEAEKQLGAAERDFIHTASISFLTPLRNFLEGDWKTISKERRLLQNRRLDLDACKARLKKAKAAEAKATTVPDFQETRPRNYILSASASALWNDEVDKAEQELRVAQTEFDRQAEVTRLLLEGISSTHVNHLRCLHEFVKSQTTYYAQCYRHMLDLQKQLGSSQGAIFPGTFVGTTEPASPPLSSTSPTTAAATMPVVPSVASLAPPGEASLCLEEVAPPASGTRKARVLYDYEAADSSELALLADELITVYSLPGMDPDWLIGERGNKKGKVPVTYLELLS

SEQ ID NO: 78701 - protein, 59 aa, Homo sapiens
  Payload ID: 15675
  Gene Symbol: SH3GLB2
  Gene Name: SH3-domain GRB2-like endophilin B2
  ENSP ID: ENSP00000403228
VEEFLYEKLDRKVPSRVTNGELLAQYMADAASELGPTTPYGSCCVTQTGVQWCNHSLLL

SEQ ID NO: 78702 - protein, 553 aa, Homo sapiens
  Payload ID: 15676
  Gene Symbol: SH3KBP1
  Gene Name: SH3-domain kinase binding protein 1
  ENSP ID: ENSP00000369019
MVEAIVEFDYQAQHDDELTISVGEIITNIRKEDGGWWEGQINGRRGLFPDNFVREIKKEMKKDPLTNKAPEKPLHEVPSGNSLLSSETILRTNKRGERRRRRCQVAFSYLPQNDDELELKVGDIIEVVGEVEEGWWEGVLNGKTGMFPSNFIKELSGESDELGISQDEQLSKSRPEGLPPASLLPFPAHGAKGKTTFEGTILYRAAPGKTEGHRRYYSLRETTGSESDGGDSSSTKSEGANGTVATAAIQPKKVKGVGFGDIFKDKPIKLRPRSIEVENDFLPVEKTIGKKLPATTATPDSSKTEMDSRTKSKDYCKVIFPYEAQNDDELTIKEGDIVTLINKDCIDVGWWEGELNGRRGVFPDNFVKLLPPDFEKEGNRPKKPPPPSAPVIKQGAGTTERKHEIKKIPPERPEMLPNRTEEKERPEREPKLDLQKPSVPAIPPKKPRPPKTNSLSRPGALPPRRPERPVGPLTHTRYCCALTSGAGVGWLWKEHRRGTDCHRPWEEGRGEGGAQASLLHPPAKLSEDTGHFCPCSCTQAGVSVRLRGAVWVS

SEQ ID NO: 78703 - protein, 628 aa, Homo sapiens
  Payload ID: 15676
  Gene Symbol: SH3KBP1
  Gene Name: SH3-domain kinase binding protein 1
  Uniprot ID: Q96B97
  ENSP ID: ENSP00000369020
MEVSAAKAPSAADLSEIEIKKEMKKDPLTNKAPEKPLHEVPSGNSLLSSETILRTNKRGERRRRRCQVAFSYLPQNDDELELKVGDIIEVVGEVEEGWWEGVLNGKTGMFPSNFIKELSGESDELGISQDEQLSKSSLRETTGSESDGGDSSSTKSEGANGTVATAAIQPKKVKGVGFGDIFKDKPIKLRPRSIEVENDFLPVEKTIGKKLPATTATPDSSKTEMDSRTKSKDYCKVIFPYEAQNDDELTIKEGDIVTLINKDCIDVGWWEGELNGRRGVFPDNFVKLLPPDFEKEGNRPKKPPPPSAPVIKQGAGTTERKHEIKKIPPERPEMLPNRTEEKERPEREPKLDLQKPSVPAIPPKKPRPPKTNSLSRPGALPPRRPERPVGPLTHTRGDSPKIDLAGSSLSGILDKDLSDRSNDIDLEGFDSVVSSTEKLSHPTTSRPKATGRRPPSQSLTSSSLSSPDIFDSPSPEEDKEEHISLAHRGVDASKKTSKTVTISQVSDNKASLPPKPGTMAAGGGGPAPLSSAAPSPLSSSLGTAGHRANSPSLFGTEGKPKMEPAASSQAAVEELRTQVRELRSIIETMKDQQKREIKQLLSELDEEKKIRLRLQMEVNDIKKALQSK

SEQ ID NO: 78704 - protein, 427 aa, Homo sapiens
  Payload ID: 15676
  Gene Symbol: SH3KBP1
  Gene Name: SH3-domain kinase binding protein 1
  Uniprot ID: Q96B97
  ENSP ID: ENSP00000369039
MGEETIGKKLPATTATPDSSKTEMDSRTKSKDYCKVIFPYEAQNDDELTIKEGDIVTLINKDCIDVGWWEGELNGRRGVFPDNFVKLLPPDFEKEGNRPKKPPPPSAPVIKQGAGTTERKHEIKKIPPERPEMLPNRTEEKERPEREPKLDLQKPSVPAIPPKKPRPPKTNSLSRPGALPPRRPERPVGPLTHTRGDSPKIDLAGSSLSGILDKDLSDRSNDIDLEGFDSVVSSTEKLSHPTTSRPKATGRRPPSQSLTSSSLSSPDIFDSPSPEEDKEEHISLAHRGVDASKKTSKTVTISQVSDNKASLPPKPGTMAAGGGGPAPLSSAAPSPLSSSLGTAGHRANSPSLFGTEGKPKMEPAASSQAAVEELRTQVRELRSIIETMKDQQKREIKQLLSELDEEKKIRLRLQMEVNDIKKALQSK

SEQ ID NO: 78705 - protein, 645 aa, Homo sapiens
  Payload ID: 15676
  Gene Symbol: SH3KBP1
  Gene Name: SH3-domain kinase binding protein 1
  ENSP ID: ENSP00000369049
LTNKAPEKPLHEVPSGNSLLSSETILRTNKRGERRRRRCQVAFSYLPQNDDELELKVGDIIEVVGEVEEGWWEGVLNGKTGMFPSNFIKELSGESDELGISQDEQLSKSRPEGLPPASLLPFPAHGAKGKTTFEGTILYRAAPGKTEGHRRYYSLRETTGSESDGGDSSSTKSEGANGTVATAAIQPKKVKGVGFGDIFKDKPIKLRPRSIEVENDFLPVEKTIGKKLPATTATPDSSKTEMDSRTKSKDYCKVIFPYEAQNDDELTIKEGDIVTLINKDCIDVGWWEGELNGRRGVFPDNFVKLLPPDFEKEGNRPKKPPPPSAPVIKQGAGTTERKHEIKKIPPERPEMLPNRTEEKERPEREPKLDLQKPSVPAIPPKKPRPPKTNSLSRPGALPPRRPERPVGPLTHTRGDSPKIDLAGSSLSGILDKDLSDRSNDIDLEGFDSVVSSTEKLSHPTTSRPKATGRRPPSQSLTSSSLSSPDIFDSPSPEEDKEEHISLAHRGVDASKKTSKTVTISQVSDNKASLPPKPGTMAAGGGGPAPLSSAAPSPLSSSLGTAGHRANSPSLFGTEGKPKMEPAASSQAAVEELRTQVRELRSIIETMKDQQKREIKQLLSELDEEKKIRLRLQMEVNDIKKALQSK

SEQ ID NO: 78706 - protein, 665 aa, Homo sapiens
  Payload ID: 15676
  Gene Symbol: SH3KBP1
  Gene Name: SH3-domain kinase binding protein 1
  Uniprot ID: Q96B97
  ENSP ID: ENSP00000380921
MVEAIVEFDYQAQHDDELTISVGEIITNIRKEDGGWWEGQINGRRGLFPDNFVREIKKEMKKDPLTNKAPEKPLHEVPSGNSLLSSETILRTNKRGERRRRRCQVAFSYLPQNDDELELKVGDIIEVVGEVEEGWWEGVLNGKTGMFPSNFIKELSGESDELGISQDEQLSKSSLRETTGSESDGGDSSSTKSEGANGTVATAAIQPKKVKGVGFGDIFKDKPIKLRPRSIEVENDFLPVEKTIGKKLPATTATPDSSKTEMDSRTKSKDYCKVIFPYEAQNDDELTIKEGDIVTLINKDCIDVGWWEGELNGRRGVFPDNFVKLLPPDFEKEGNRPKKPPPPSAPVIKQGAGTTERKHEIKKIPPERPEMLPNRTEEKERPEREPKLDLQKPSVPAIPPKKPRPPKTNSLSRPGALPPRRPERPVGPLTHTRGDSPKIDLAGSSLSGILDKDLSDRSNDIDLEGFDSVVSSTEKLSHPTTSRPKATGRRPPSQSLTSSSLSSPDIFDSPSPEEDKEEHISLAHRGVDASKKTSKTVTISQVSDNKASLPPKPGTMAAGGGGPAPLSSAAPSPLSSSLGTAGHRANSPSLFGTEGKPKMEPAASSQAAVEELRTQVRELRSIIETMKDQQKREIKQLLSELDEEKKIRLRLQMEVNDIKKALQSK

SEQ ID NO: 78707 - protein, 208 aa, Homo sapiens
  Payload ID: 15676
  Gene Symbol: SH3KBP1
  Gene Name: SH3-domain kinase binding protein 1
  ENSP ID: ENSP00000388766
MEIKKEMKKDPLTNKAPEKPLHEVPSGNSLLSSETILRTNKRGERRRRRCQVAFSYLPQNDDELELKVGDIIEVVGEVEEGWWEGVLNGKTGMFPSNFIKELSGESDELGISQDEQLSKSSLRETTGSESDGGDSSSTKSEGANGTVATAAIQPKKVKGVGFGDIFKDKPIKLRPRSIEVENDFLPVEKTIGKKLPATTATPDSSKTE

SEQ ID NO: 78708 - protein, 149 aa, Homo sapiens
  Payload ID: 15676
  Gene Symbol: SH3KBP1
  Gene Name: SH3-domain kinase binding protein 1
  ENSP ID: ENSP00000409292
MERSERRRRRCQVAFSYLPQNDDELELKVGDIIEVVGEVEEGWWEGVLNGKTGMFPSNFIKELSGESDELGISQDEQLSKSSLRETTGSESDGGDSSSTKSEGANGTVATAAIQPKKVKGVGFGDIFKDKPIKLRPRSIEVENDFLPVE

SEQ ID NO: 78709 - protein, 707 aa, Homo sapiens
  Payload ID: 15677
  Gene Symbol: SHKBP1
  Gene Name: SH3KBP1 binding protein 1
  Uniprot ID: Q8TBC3
  ENSP ID: ENSP00000291842
MAAAATAAEGVPSRGPPGEVIHLNVGGKRFSTSRQTLTWIPDSFFSSLLSGRISTLKDETGAIFIDRDPTVFAPILNFLRTKELDPRGVHGSSLLHEAQFYGLTPLVRRLQLREELDRSSCGNVLFNGYLPPPVFPVKRRNRHSLVGPQQLGGRPAPVRRSNTMPPNLGNAGLLGRMLDEKTPPSPSGQPEEPGMVRLVCGHHNWIAVAYTQFLVCYRLKEASGWQLVFSSPRLDWPIERLALTARVHGGALGEHDKMVAAATGSEILLWALQAEGGGSEIGVFHLGVPVEALFFVGNQLIATSHTGRIGVWNAVTKHWQVQEVQPITSYDAAGSFLLLGCNNGSIYYVDVQKFPLRMKDNDLLVSELYRDPAEDGVTALSVYLTPKTSDSGNWIEIAYGTSSGGVRVIVQHPETVGSGPQLFQTFTVHRSPVTKIMLSEKHLISVCADNNHVRTWSVTRFRGMISTQPGSTPLASFKILALESADGHGGCSAGNDIGPYGERDDQQVFIQKVVPSASQLFVRLSSTGQRVCSVRSVDGSPTTAFTVLECEGSRRLGSRPRRYLLTGQANGSLAMWDLTTAMDGLGQAPAGGLTEQELMEQLEHCELAPPAPSAPSWGCLPSPSPRISLTSLHSASSNTSLSGHRGSPSPPQAEARRRGGGSFVERCQELVRSGPDLRRPPTPAPWPSSGLGTPLTPPKMKLNETSF

SEQ ID NO: 78710 - protein, 37 aa, Homo sapiens
  Payload ID: 15677
  Gene Symbol: SHKBP1
  Gene Name: SH3KBP1 binding protein 1
  ENSP ID: ENSP00000468885
MRPEQSSSTGTLQSSPPSSTSCAPKSWIPAFSVHPHT

SEQ ID NO: 78711 - protein, 131 aa, Homo sapiens
  Payload ID: 15677
  Gene Symbol: SHKBP1
  Gene Name: SH3KBP1 binding protein 1
  ENSP ID: ENSP00000469014
MRPEQSSSTGTLQSSPPSSTSCAPKSWIPVRRLQLREELDRSSCGNVLFNGYLPPPVFPVKRRNRHSLVGPQQLGGRPAPVRRSNTMPPNLGNAGLLGRMLDEKTPPSPSGQPEEPGMVRLVCGHHNWIAV

SEQ ID NO: 78712 - protein, 250 aa, Homo sapiens
  Payload ID: 15677
  Gene Symbol: SHKBP1
  Gene Name: SH3KBP1 binding protein 1
  ENSP ID: ENSP00000469713
  MOD_RES (1)..(1): Any amino acid
XELYRDPAEDGVTALSVYLTPKTSDSGNWIEIAYGTSSGGVRVIVQHPETVGSGPQLFQTFTVHRSPVTKIMLSEKHLISVCADNNHVRTWSVTRFRGMISTQPGSTPLASFKILALESADGHGGCSAGNDIAGGLTEQELMEQLEHCELAPPAPSAPSWGCLPSPSPRISLTSLHSASSNTSLSGHRGSPSPPQAEARRRGGGSFVERCQELVRSGPDLRRPPTPAPWPSSGLGTPLTPPKMKLNETSF

SEQ ID NO: 78713 - protein, 141 aa, Homo sapiens
  Payload ID: 15677
  Gene Symbol: SHKBP1
  Gene Name: SH3KBP1 binding protein 1
  ENSP ID: ENSP00000469878
MAAAATAAEGVPSRGPPGEVIHLNVGGKRFSTSRQTLTWIPDSFFSSLLSGRISTLKDETGAIFIDRDPTVFAPILNFLRTKELDPRGVHGSSLLHEAQFYGLTPLVLLLQFVACSFERSWIDLLVETSSSMVTCRHQCSQ

SEQ ID NO: 78714 - protein, 164 aa, Homo sapiens
  Payload ID: 15677
  Gene Symbol: SHKBP1
  Gene Name: SH3KBP1 binding protein 1
  ENSP ID: ENSP00000470505
  MOD_RES (1)..(1): Any amino acid
XQMGMAAAVLAMTLAPTVSGTTSKCSSRRWCPVPASSSCVSHLLGSAGGLTEQELMEQLEHCELAPPAPSAPSWGCLPSPSPRISLTSLHSASSNTSLSGHRGSPSPPQAEARRRGGGSFVERCQELVRSGPDLRRPPTPAPWPSSGLGTPLTPPKMKLNETSF

SEQ ID NO: 78715 - protein, 102 aa, Homo sapiens
  Payload ID: 15677
  Gene Symbol: SHKBP1
  Gene Name: SH3KBP1 binding protein 1
  ENSP ID: ENSP00000470514
MAAAATAAEGVPSRGPPGEVIHLNVGGKRFSTSRQTLTWIPDSFFSSLLSGRISTLKDETGAIFIDRDPTVFAPILNFLRTKELDPRLAWKKGRESLTVFSP

SEQ ID NO: 78716 - protein, 299 aa, Homo sapiens
  Payload ID: 15677
  Gene Symbol: SHKBP1
  Gene Name: SH3KBP1 binding protein 1
  ENSP ID: ENSP00000470517
  MOD_RES (1)..(1): Any amino acid
XGSIYYVDVQKFPLRMKDNDLLVSELYRDPAEDGVTALSVYLTPKTICADNNHVRTWSVTRFRGMISTQPGSTPLASFKILALESADGHGGCSAGNDIGPYGERDDQQVFIQKVVPSASQLFVRLSSTGQRVCSVRSVDGSPTTAFTVLECEGSRRLGSRPRRYLLTGQANGSLAMWDLTTAMDGLGQAPAGGLTEQELMEQLEHCELAPPAPSAPSWGCLPSPSPRISLTSLHSASSNTSLSGHRGSPSPPQAEARRRGGGSFVERCQELVRSGPDLRRPPTPAPWPSSGLGTPLTPP

SEQ ID NO: 78717 - protein, 262 aa, Homo sapiens
  Payload ID: 15677
  Gene Symbol: SHKBP1
  Gene Name: SH3KBP1 binding protein 1
  ENSP ID: ENSP00000471173
KFPLRMKDNDLLVSELYRDPAEDGVTALSVYLTPKTSDSGNWIEIAYGTSSGGVRVIVQHPETVGSGPQLFQTFTVHRSPVTKIMLSEKHLISVCADNNHVRTWSVTRFRGMISTQPGSTPLASFKILALESADGHGGCSAGNDIGGLTEQELMEQLEHCELAPPAPSAPSWGCLPSPSPRISLTSLHSASSNTSLSGHRGSPSPPQAEARRRGGGSFVERCQELVRSGPDLRRPPTPAPWPSSGLGTPLTPPKMKLNETSF

SEQ ID NO: 78718 - protein, 175 aa, Homo sapiens
  Payload ID: 15677
  Gene Symbol: SHKBP1
  Gene Name: SH3KBP1 binding protein 1
  ENSP ID: ENSP00000471296
  MOD_RES (1)..(1): Any amino acid
XDSGNWIEIAYGTSSGGVRVIVQHPETVGSGPQLFQTFTVHRSPVTKIMLSEKHLISAGGLTEQELMEQLEHCELAPPAPSAPSWGCLPSPSPRISLTSLHSASSNTSLSGHRGSPSPPQAEARRRGGGSFVERCQELVRSGPDLRRPPTPAPWPSSGLGTPLTPPKMKLNETSF

SEQ ID NO: 78719 - protein, 610 aa, Homo sapiens
  Payload ID: 15677
  Gene Symbol: SHKBP1
  Gene Name: SH3KBP1 binding protein 1
  ENSP ID: ENSP00000471406
  MOD_RES (1)..(1): Any amino acid
XAAEGVPSRGPPGEVIHLNVGGKRFSTSRQTLTWIPDSFFSSLLSGRISTLKDETGAIFIDRDPTVFAPILNFLRTKELDPRGVHGSSLLHEAQFYGLTPLVRRLQLREELDRSSCGNVLFNGYLPPPVFPVKRRNRHSLVGPQQLGGRPAPVRRSNTMPPNLGNAGLLGRMLDEKTPPSPSGQPEEPGMVRLVCGHHNWIAVAYTQFLVCYRLKEASGWQLVFSSPRLDWPIERLALTARVHGGALGEHDKMVAAATGSEILLWALQAEGGGSEIGVFHLGVPVEALFFVGNQLIATSHTGRIGVWNAVTKHWQVQEVQPITSYDAAGSFLLLGCNNGSIYYVDVQKFPLRMKDNDLLVSELYRDPAEDGVTALSVYLTPKTSDSGNWIEIAYGTSSGGVRVIVQHPETVGSGPQLFQTFTVHRSPVTKIMLSEKHLISVCADNNHVRTWSVTRFRGMISTQPGSTPLASFKILALESADGHGGCSAGNDIAGGLTEQELMEQLEHCELAPPAPSAPSWGCLPSPSPRISLTSLHSASSNTSLSGHRGSPSPPQAEARRRGGGSFVERCQELVRSGPDLRRPPTPAPWPSSGLGTPLTPPKMKLNETSF

SEQ ID NO: 78720 - protein, 277 aa, Homo sapiens
  Payload ID: 15677
  Gene Symbol: SHKBP1
  Gene Name: SH3KBP1 binding protein 1
  ENSP ID: ENSP00000471408
RSPVTKIMLSEKHLISVCADNNHVRTWSVTRFRGMISTQPGSTPLASFKILALESADGHGGCSAGNDIGPYGERDDQQVFIQKVVPSASQLFVRLSSTGQRVCSVRSVDGSPTTAFTVLECEGSRRLGSRPRRYLLTGQANGSLAMWDLTTAMDGLGQAPGGLTEQELMEQLEHCELAPPAPSAPSWGCLPSPSPRISLTSLHSASSNTSLSGHRGSPSPPQAEARRRGGGSFVERCQELVRSGPDLRRPPTPAPWPSSGLGTPLTPPKMKLNETSF

SEQ ID NO: 78721 - protein, 143 aa, Homo sapiens
  Payload ID: 15677
  Gene Symbol: SHKBP1
  Gene Name: SH3KBP1 binding protein 1
  ENSP ID: ENSP00000471845
  MOD_RES (1)..(1): Any amino acid
XTSKCSSRRWCPVPASSSCVSHLLGSGGLTEQELMEQLEHCELAPPAPSAPSWGCLPSPSPRISLTSLHSASSNTSLSGHRGSPSPPQAEARRRGGGSFVERCQELVRSGPDLRRPPTPAPWPSSGLGTPLTPPKMKLNETSF

SEQ ID NO: 78722 - protein, 129 aa, Homo sapiens
  Payload ID: 15677
  Gene Symbol: SHKBP1
  Gene Name: SH3KBP1 binding protein 1
  ENSP ID: ENSP00000472222
  MOD_RES (1)..(1): Any amino acid
XGSGPQLFQTFTVHRSPVTKIMLSEKHLISVCADNNHVRTWSVTRFRGMISTQPGSTPLASFKILALESADGHGGCSAGNDIGPYGERDDQQVFIQKVVPSASQLFVRLSSTGQRWPDGARADGTAGTL

SEQ ID NO: 78723 - protein, 682 aa, Homo sapiens
  Payload ID: 15677
  Gene Symbol: SHKBP1
  Gene Name: SH3KBP1 binding protein 1
  ENSP ID: ENSP00000472711
MAAAATAAEGVPSRGPPGEVIHLNVGGKRFSTSRQTLTWIPDSFFSSLLSGRISTLKDETGAIFIDRDPTVFAPILNFLRTKELDPRGVHGSSLLHEAQFYGLTPLVRRLQLREELDRSSCGNVLFNGYLPPPVFPVKRRNRHSLVGPQQLGGRPAPVRRSNTMPPNLGNAGLLGRMLDEKTPPSPSGQPEEPGMVRLVCGHHNWIAVAYTQFLVCYRLKEASGWQLVFSSPRLDWPIERLALTARVHGGALGEHDKMVAAATGSEILLWALQAEGGGSEIGRIGVWNAVTKHWQVQEVQPITSYDAAGSFLLLGCNNGSIYYVDVQKFPLRMKDNDLLVSELYRDPAEDGVTALSVYLTPKTSDSGNWIEIAYGTSSGGVRVIVQHPETVGSGPQLFQTFTVHRSPVTKIMLSEKHLISVCADNNHVRTWSVTRFRGMISTQPGSTPLASFKILALESADGHGGCSAGNDIGPYGERDDQQVFIQKVVPSASQLFVRLSSTGQRVCSVRSVDGSPTTAFTVLECEGSRRLGSRPRRYLLTGQANGSLAMWDLTTAMDGLGQAPAGGLTEQELMEQLEHCELAPPAPSAPSWGCLPSPSPRISLTSLHSASSNTSLSGHRGSPSPPQAEARRRGGGSFVERCQELVRSGPDLRRPPTPAPWPSSGLGTPLTPPKMKLNETSF

SEQ ID NO: 78724 - protein, 88 aa, Homo sapiens
  Payload ID: 15677
  Gene Symbol: SHKBP1
  Gene Name: SH3KBP1 binding protein 1
  ENSP ID: ENSP00000472813
MAAAATAAEGVPSRGPPGEVIHLNVGGKRFSTSRQTLTWIPDSFFSSLLSGRISTLKDETGAIFIDRDPTVFAPILNFLRTKELDPRP

SEQ ID NO: 78725 - protein, 151 aa, Homo sapiens
  Payload ID: 15678
  Gene Symbol: SPRN
  Gene Name: shadow of prion protein homolog (zebrafish)
  Uniprot ID: Q5BIV9
  ENSP ID: ENSP00000433712
MNWAPATCWALLLAAAFLCDSGAAKGGRGGARGSARGGVRGGARGASRVRVRPAQRYGAPGSSLRVAAAGAAAGAAAGAAAGLAAGSGWRRAAGPGERGLEDEEDGVPGGNGTGPGIYSYRAWTSGAGPTRGPRLCLVLGGALGALGLLRP

SEQ ID NO: 78726 - protein, 326 aa, Homo sapiens
  Payload ID: 15679
  Gene Symbol: SHARPIN
  Gene Name: SHANK-associated RH domain interactor
  Uniprot ID: Q9H0F6
  ENSP ID: ENSP00000352551
MAPPAGGAAAAASDLGSAAVLLAVHAAVRPLGAGPDAEAQLRRLQLSADPERPGRFRLELLGAGPGAVNLEWPLESVSYTIRGPTQHELQPPPGGPGTLSLHFLNPQEAQRWAVLVRGATVEGQNGSKSNSPPALGPEACPVSLPSPPEASTLKGPPPEADLPRSPGNLTEREELAGSLARAIAGGDEKGAAQVAAVLAQHRVALSVQLQEACFPPGPIRLQVTLEDAASAASAASSAHVALQVHPHCTVAALQEQVFSELGFPPAVQRWVIGRCLCVPERSLASYGVRQDGDPAFLYLLSAPREAPAQLVLSFLHLHQCPRPPWL

SEQ ID NO: 78727 - protein, 387 aa, Homo sapiens
  Payload ID: 15679
  Gene Symbol: SHARPIN
  Gene Name: SHANK-associated RH domain interactor
  Uniprot ID: Q9H0F6
  ENSP ID: ENSP00000381698
MAPPAGGAAAAASDLGSAAVLLAVHAAVRPLGAGPDAEAQLRRLQLSADPERPGRFRLELLGAGPGAVNLEWPLESVSYTIRGPTQHELQPPPGGPGTLSLHFLNPQEAQRWAVLVRGATVEGQNGSKSNSPPALGPEACPVSLPSPPEASTLKGPPPEADLPRSPGNLTEREELAGSLARAIAGGDEKGAAQVAAVLAQHRVALSVQLQEACFPPGPIRLQVTLEDAASAASAASSAHVALQVHPHCTVAALQEQVFSELGFPPAVQRWVIGRCLCVPERSLASYGVRQDGDPAFLYLLSAPREAPATGPSPQHPQKMDGELGRLFPPSLGLPPGPQPAASSLPSPLQPSWSCPSCTFINAPDRPGCEMCSTQRPCTWDPLAAAST

SEQ ID NO: 78728 - protein, 95 aa, Homo sapiens
  Payload ID: 15679
  Gene Symbol: SHARPIN
  Gene Name: SHANK-associated RH domain interactor
  ENSP ID: ENSP00000432355
DPAFLYLLSAPREAPATGPSPQHPQKMDGELGRLFPPSLGLPPGPQPAASSLPSPLQPSWSCPSCTFINAPDRPGCEMCSTQRPCTWDPLAAAST

SEQ ID NO: 78729 - protein, 630 aa, Homo sapiens
  Payload ID: 15680
  Gene Symbol: SHC4
  Gene Name: SHC (Src homology 2 domain containing) family, member 4
  Uniprot ID: Q6S5L8
  ENSP ID: ENSP00000329668
MRERGQDSLAGLVLYVGLFGHPGMLHRAKYSRFRNESITSLDEGSSGGSVGNKGSPQPPHPALAPHLPTEDATLPSQESPTPLCTLIPRMASMKLANPATLLSLKNFCLGTKEVPRLKLQESRDPGSSGPSSPETSLSRSGTAPPPQQDLVGHRATALTPDSCPLPGPGEPTLRSRQDRHFLQHLLGMGMNYCVRYMGCVEVLQSMRSLDFGMRTQVTREAISRLCEAVPGANGAIKKRKPPVKFLSTVLGKSNLQFSGMNIKLTISTCSLTLMNLDNQQIIANHHMQSISFASGGDPDTTDYVAYVAKDPVNQRACHILECHNGMAQDVISTIGQAFELRFKQYLKNPSLNTSCESEEVHIDSHAEEREDHEYYNEIPGKQPPVGGVSDMRIKVQATEQMAYCPIQCEKLCYLPGNSKCSSVYENCLEQSRAIGNVHPRGVQSQRDTSLLKHTCRVDLFDDPCYINTQALQSTPGSAGNQRSAQPLGSPWHCGKAPETVQPGATAQPASSHSLPHIKQQLWSEECYHGKLSRKAAESLLVKDGDFLVRESATSPGQYVLSGLQGGQAKHLLLVDPEGKVRTKDHVFDNVGHLIRYHMDNSLPIISSGSEVSLKQPVRKDNNPALLHSNK

SEQ ID NO: 78730 - protein, 387 aa, Homo sapiens
  Payload ID: 15680
  Gene Symbol: SHC4
  Gene Name: SHC (Src homology 2 domain containing) family, member 4
  Uniprot ID: Q6S5L8
  ENSP ID: ENSP00000379786
MLPALEHWIPKFFSFRTRTGSPLSLACRQPIVGPCDHIIANHHMQSISFASGGDPDTTDYVAYVAKDPVNQRACHILECHNGMAQDVISTIGQAFELRFKQYLKNPSLNTSCESEEVHIDSHAEEREDHEYYNEIPGKQPPVGGVSDMRIKVQATEQMAYCPIQCEKLCYLPGNSKCSSVYENCLEQSRAIGNVHPRGVQSQRDTSLLKHTCRVDLFDDPCYINTQALQSTPGSAGNQRSAQPLGSPWHCGKAPETVQPGATAQPASSHSLPHIKQQLWSEECYHGKLSRKAAESLLVKDGDFLVRESATSPGQYVLSGLQGGQAKHLLLVDPEGKVRTKDHVFDNVGHLIRYHMDNSLPIISSGSEVSLKQPVRKDNNPALLHSNK

SEQ ID NO: 78731 - protein, 344 aa, Homo sapiens
  Payload ID: 15680
  Gene Symbol: SHC4
  Gene Name: SHC (Src homology 2 domain containing) family, member 4
  ENSP ID: ENSP00000443300
MQSISFASGGDPDTTDYVAYVAKDPVNQRACHILECHNGMAQDVISTIGQAFELRFKQYLKNPSLNTSCESEEVHIDSHAEEREDHEYYNEIPGKQPPVGGVSDMRIKVQATEQMAYCPIQCEKLCYLPGNSKCSSVYENCLEQSRAIGNVHPRGVQSQRDTSLLKHTCRVDLFDDPCYINTQALQSTPGSAGNQRSAQPLGSPWHCGKAPETVQPGATAQPASSHSLPHIKQQLWSEECYHGKLSRKAAESLLVKDGDFLVRESATSPGQYVLSGLQGGQAKHLLLVDPEGKVRTKDHVFDNVGHLIRYHMDNSLPIISSGSEVSLKQPVRKDNNPALLHSNK

SEQ ID NO: 78732 - protein, 144 aa, Homo sapiens
  Payload ID: 15680
  Gene Symbol: SHC4
  Gene Name: SHC (Src homology 2 domain containing) family, member 4
  ENSP ID: ENSP00000453344
MQSISFASGGDPDTTDYVAYVAKDPVNQRACHILECHNGMAQDVISTIGQAFELRFKQYLKNPSLNTSCESEEVHIDSHAEEREDHEYYNEIPGKQPPVGGVSDMRIKVQATEQMAYCPIQCEKLCYLVMSIQEGCSPSEIPHY

SEQ ID NO: 78733 - protein, 128 aa, Homo sapiens
  Payload ID: 15680
  Gene Symbol: SHC4
  Gene Name: SHC (Src homology 2 domain containing) family, member 4
  ENSP ID: ENSP00000453397
MQSISFASGGDPDTTDYVAYVAKDPVNQRACHILECHNGMAQDVISTIGQAFELRFKQYLKNPSLNTSCESEEVHIDSHAEEREDHEYYNEIPGKQPPVGGVSDMRIKVQATEQMAYCPIQCEKLCYL

SEQ ID NO: 78734 - protein, 583 aa, Homo sapiens
  Payload ID: 15681
  Gene Symbol: SHC1
  Gene Name: SHC (Src homology 2 domain containing) transforming protein 1
  Uniprot ID: P29353
  ENSP ID: ENSP00000357430
MDLLPPKPKYNPLRNESLSSLEEGASGSTPPEELPSPSASSLGPILPPLPGDDSPTTLCSFFPRMSNLRLANPAGGRPGSKGEPGRAADDGEGIVGAAMPDSGPLPLLQDMNKLSGGGGRRTRVEGGQLGGEEWTRHGSFVNKPTRGWLHPNDKVMGPGVSYLVRYMGCVEVLQSMRALDFNTRTQVTREAISLVCEAVPGAKGATRRRKPCSRPLSSILGRSNLKFAGMPITLTVSTSSLNLMAADCKQIIANHHMQSISFASGGDPDTAEYVAYVAKDPVNQRACHILECPEGLAQDVISTIGQAFELRFKQYLRNPPKLVTPHDRMAGFDGSAWDEEEEEPPDHQYYNDFPGKEPPLGGVVDMRLREGAAPGAARPTAPNAQTPSHLGATLPVGQPVGGDPEVRKQMPPPPPCPGRELFDDPSYVNVQNLDKARQAVGGAGPPNPAINGSAPRDLFDMKPFEDALRVPPPPQSVSMAEQLRGEPWFHGKLSRREAEALLQLNGDFLVRESTTTPGQYVLTGLQSGQPKHLLLVDPEGVVRTKDHRFESVSHLISYHMDNHLPIISAGSELCLQQPVERKL

SEQ ID NO: 78735 - protein, 354 aa, Homo sapiens
  Payload ID: 15681
  Gene Symbol: SHC1
  Gene Name: SHC (Src homology 2 domain containing) transforming protein 1
  ENSP ID: ENSP00000357434
MPITLTVSTSSLNLMAADCKQIIANHHMQSISFASGGDPDTAEYVAYVAKDPVNQRACHILECPEGLAQDVISTIGQAFELRFKQYLRNPPKLVTPHDRMAGFDGSAWDEEEEEPPDHQYYNDFPGKEPPLGGVVDMRLREGAAPGAARPTAPNAQTPSHLGATLPVGQPVGGDPEVRKQMPPPPPCPGRELFDDPSYVNVQNLDKARQAVGGAGPPNPAINGSAPRDLFDMKPFEDALRVPPPPQSVSMAEQLRGEPWFHGKLSRREAEALLQLNGDFLVRESTTTPGQYVLTGLQSGQPKHLLLVDPEGVVRTKDHRFESVSHLISYHMDNHLPIISAGSELCLQQPVERKL

SEQ ID NO: 78736 - protein, 473 aa, Homo sapiens
  Payload ID: 15681
  Gene Symbol: SHC1
  Gene Name: SHC (Src homology 2 domain containing) transforming protein 1
  Uniprot ID: P29353
  ENSP ID: ENSP00000357435
MNKLSGGGGRRTRVEGGQLGGEEWTRHGSFVNKPTRGWLHPNDKVMGPGVSYLVRYMGCVEVLQSMRALDFNTRTQVTREAISLVCEAVPGAKGATRRRKPCSRPLSSILGRSNLKFAGMPITLTVSTSSLNLMAADCKQIIANHHMQSISFASGGDPDTAEYVAYVAKDPVNQRACHILECPEGLAQDVISTIGQAFELRFKQYLRNPPKLVTPHDRMAGFDGSAWDEEEEEPPDHQYYNDFPGKEPPLGGVVDMRLREGAAPGAARPTAPNAQTPSHLGATLPVGQPVGGDPEVRKQMPPPPPCPGRELFDDPSYVNVQNLDKARQAVGGAGPPNPAINGSAPRDLFDMKPFEDALRVPPPPQSVSMAEQLRGEPWFHGKLSRREAEALLQLNGDFLVRESTTTPGQYVLTGLQSGQPKHLLLVDPEGVVRTKDHRFESVSHLISYHMDNHLPIISAGSELCLQQPVERKL

SEQ ID NO: 78737 - protein, 474 aa, Homo sapiens
  Payload ID: 15681
  Gene Symbol: SHC1
  Gene Name: SHC (Src homology 2 domain containing) transforming protein 1
  Uniprot ID: P29353
  ENSP ID: ENSP00000357438
MNKLSGGGGRRTRVEGGQLGGEEWTRHGSFVNKPTRGWLHPNDKVMGPGVSYLVRYMGCVEVLQSMRALDFNTRTQVTREAISLVCEAVPGAKGATRRRKPCSRPLSSILGRSNLKFAGMPITLTVSTSSLNLMAADCKQIIANHHMQSISFASGGDPDTAEYVAYVAKDPVNQRACHILECPEGLAQDVISTIGQAFELRFKQYLRNPPKLVTPHDRMAGFDGSAWDEEEEEPPDHQYYNDFPGKEPPLGGVVDMRLREGAAPGAARPTAPNAQTPSHLGATLPVGQPVGGDPEVRKQMPPPPPCPAGRELFDDPSYVNVQNLDKARQAVGGAGPPNPAINGSAPRDLFDMKPFEDALRVPPPPQSVSMAEQLRGEPWFHGKLSRREAEALLQLNGDFLVRESTTTPGQYVLTGLQSGQPKHLLLVDPEGVVRTKDHRFESVSHLISYHMDNHLPIISAGSELCLQQPVERKL

SEQ ID NO: 78738 - protein, 137 aa, Homo sapiens
  Payload ID: 15681
  Gene Symbol: SHC1
  Gene Name: SHC (Src homology 2 domain containing) transforming protein 1
  ENSP ID: ENSP00000396162
MNKLSGGGGRRTRVEGGQLGGEEWTRHGSFVNKPTRGWLHPNDKVMGPGVSYLVRYMGCVEVLQSMRALDFNTRTQVTREAISLVCEAVPGAKGATRRRKPCSRPLSSILGRSNLKFAGMPITLTVSTSSLNLMAAD

SEQ ID NO: 78739 - protein, 297 aa, Homo sapiens
  Payload ID: 15681
  Gene Symbol: SHC1
  Gene Name: SHC (Src homology 2 domain containing) transforming protein 1
  ENSP ID: ENSP00000396333
  MOD_RES (1)..(1): Any amino acid
XDEEEEEPPDHQYYNDFPGKEPPLGGVVDMRLREGAAPGAARPTAPNAQTPSHLGATLPVGQPVGGDPEVRKQMPPPPPCPGRELFDDPSYVNVQNLDKARQAVGGAGPPNPAINGSAPRDLFDMKPFEDALRVPPPPQSVSMAEQLRGEPWFHGKLSRREAEALLQLNGDFLVRESTTTPGQYVLTGLQSGQPKHLLLVDPEGVRWGFAMLPKLFLNSRAQVIRLPRPPRVLGLQARTTMPSLHIFFCTVYTLLRHANFLQVKKGVYSSQLHSFRADVAFAFSHFTDLSIPTTVSF

SEQ ID NO: 78740 - protein, 200 aa, Homo sapiens
  Payload ID: 15681
  Gene Symbol: SHC1
  Gene Name: SHC (Src homology 2 domain containing) transforming protein 1
  ENSP ID: ENSP00000398441
MNKLSGGGGRRTRVEGGQLGGEEWTRHGSFVNKPTRGWLHPNDKVMGPGVSYLVRYMGCVEVLQSMRALDFNTRTQVTREAISLVCEAVPGAKGATRRRKPCSRPLSSILGRSNLKFAGMPITLTVSTSSLNLMAADCKQDTAEYVAYVAKDPVNQRACHILECPEGLAQDVISTIGQAFELRFKQYLRNPPKLVTPHDR

SEQ ID NO: 78741 - protein, 129 aa, Homo sapiens
  Payload ID: 15681
  Gene Symbol: SHC1
  Gene Name: SHC (Src homology 2 domain containing) transforming protein 1
  ENSP ID: ENSP00000398864
MPITLTVSTSSLNLMAADCKQIIANHHMQSISFASGGDPDTAEYVAYVAKDPVNQRACHILECPEGLAQDVISTIGQAFELRFKQYLRNPPKLVTPHDRMAGFDGSAWDEEEEEPPDHQYYNDFPGKEP

SEQ ID NO: 78742 - protein, 584 aa, Homo sapiens
  Payload ID: 15681
  Gene Symbol: SHC1
  Gene Name: SHC (Src homology 2 domain containing) transforming protein 1
  Uniprot ID: P29353
  ENSP ID: ENSP00000401303
MDLLPPKPKYNPLRNESLSSLEEGASGSTPPEELPSPSASSLGPILPPLPGDDSPTTLCSFFPRMSNLRLANPAGGRPGSKGEPGRAADDGEGIVGAAMPDSGPLPLLQDMNKLSGGGGRRTRVEGGQLGGEEWTRHGSFVNKPTRGWLHPNDKVMGPGVSYLVRYMGCVEVLQSMRALDFNTRTQVTREAISLVCEAVPGAKGATRRRKPCSRPLSSILGRSNLKFAGMPITLTVSTSSLNLMAADCKQIIANHHMQSISFASGGDPDTAEYVAYVAKDPVNQRACHILECPEGLAQDVISTIGQAFELRFKQYLRNPPKLVTPHDRMAGFDGSAWDEEEEEPPDHQYYNDFPGKEPPLGGVVDMRLREGAAPGAARPTAPNAQTPSHLGATLPVGQPVGGDPEVRKQMPPPPPCPAGRELFDDPSYVNVQNLDKARQAVGGAGPPNPAINGSAPRDLFDMKPFEDALRVPPPPQSVSMAEQLRGEPWFHGKLSRREAEALLQLNGDFLVRESTTTPGQYVLTGLQSGQPKHLLLVDPEGVVRTKDHRFESVSHLISYHMDNHLPIISAGSELCLQQPVERKL

SEQ ID NO: 78743 - protein, 200 aa, Homo sapiens
  Payload ID: 15681
  Gene Symbol: SHC1
  Gene Name: SHC (Src homology 2 domain containing) transforming protein 1
  ENSP ID: ENSP00000404908
MPITLTVSTSSLNLMAADCKQDTAEYVAYVAKDPVNQRACHILECPEGLAQDVISTIGQAFELRFKQYLRNPPKLVTPHDRMAGFDGSAWDEEEEEPPDHQYYNDFPGKEPPLGGVVDMRLREGAAPGAARPTAPNAQTPSHLGATLPVGQPVGGDPEVRKQMPPPPPCPAGRELFDDPSYVNVQNLDKARQAVGGAGPP

SEQ ID NO: 78744 - protein, 582 aa, Homo sapiens
  Payload ID: 15682
  Gene Symbol: SHC2
  Gene Name: SHC (Src homology 2 domain containing) transforming protein 2
  Uniprot ID: P98077
  ENSP ID: ENSP00000264554
MTQGPGGRAPPAPPAPPEPEAPTTFCALLPRMPQWKFAAPGGFLGRGPAAARAAGASGGADPQPEPAGPGGVPALAAAVLGACEPRCAAPCPLPALSRCRGAGSRGSRGGRGAAGSGDAAAAAEWIRKGSFIHKPAHGWLHPDARVLGPGVSYVVRYMGCIEVLRSMRSLDFNTRTQVTREAINRLHEAVPGVRGSWKKKAPNKALASVLGKSNLRFAGMSISIHISTDGLSLSVPATRQVIANHHMPSISFASGGDTDMTDYVAYVAKDPINQRACHILECCEGLAQSIISTVGQAFELRFKQYLHSPPKVALPPERLAGPEESAWGDEEDSLEHNYYNSIPGKEPPLGGLVDSRLALTQPCALTALDQGPSPSLRDACSLPWDVGSTGTAPPGDGYVQADARGPPDHEEHLYVNTQGLDAPEPEDSPKKDLFDMRPFEDALKLHECSVAAGVTAAPLPLEDQWPSPPTRRAPVAPTEEQLRQEPWYHGRMSRRAAERMLRADGDFLVRDSVTNPGQYVLTGMHAGQPKHLLLVDPEGVVRTKDVLFESISHLIDHHLQNGQPIVAAESELHLRGVVSREP

SEQ ID NO: 78745 - protein, 138 aa, Homo sapiens
  Payload ID: 15682
  Gene Symbol: SHC2
  Gene Name: SHC (Src homology 2 domain containing) transforming protein 2
  ENSP ID: ENSP00000465764
  MOD_RES (1)..(1): Any amino acid
XGPGTEHHQHRGPSFRAALQAVPAQPAQGGAAPRKAGRAGGVGLGGRGGLFGAQLLQQHPGEGAAAGRASGLQAGPDTALRPHGPRPGPISFSKRCLQPAMGRGVHRYRTSGPAPLPAGPLWPPRRNSCVRSPGTTAG

SEQ ID NO: 78746 - protein, 69 aa, Homo sapiens
  Payload ID: 15682
  Gene Symbol: SHC2
  Gene Name: SHC (Src homology 2 domain containing) transforming protein 2
  ENSP ID: ENSP00000466869
  MOD_RES (1)..(1): Any amino acid
XDARVLGPGVSYVVRYMGCIEVLRSMRSLDFNTRTQVTSSCHHSGCRQDLDTDPASGSGPPARCSNPHI

SEQ ID NO: 78747 - protein, 105 aa, Homo sapiens
  Payload ID: 15683
  Gene Symbol: SHC3
  Gene Name: SHC (Src homology 2 domain containing) transforming protein 3
  ENSP ID: ENSP00000364991
MKPFEDALKNQPLGPVLSKAASVECISPVSPRAPDAKMLEELQAETWYQGEMSRKEAEGLLEKDGDFLVRKSTTNPGSFVLTGMHNGQAKHLLLVDPEGTRSNSY

SEQ ID NO: 78748 - protein, 594 aa, Homo sapiens
  Payload ID: 15683
  Gene Symbol: SHC3
  Gene Name: SHC (Src homology 2 domain containing) transforming protein 3
  Uniprot ID: Q92529
  ENSP ID: ENSP00000364995
MLPRTKYNRFRNDSVTSVDDLLHSLSVSGGGGKVSAARATPAAAPYLVSGEALRKAPDDGPGSLGHLLHKVSHLKLSSSGLRGLSSAARERAGARLSGSCSAPSLAAPDGSAPSAPRAPAMSAARKGRPGDEPLPRPPRGAPHASDQVLGPGVTYVVKYLGCIEVLRSMRSLDFSTRTQITREAISRVCEAVPGAKGAFKKRKPPSKMLSSILGKSNLQFAGMSISLTISTASLNLRTPDSKQIIANHHMRSISFASGGDPDTTDYVAYVAKDPVNRRACHILECCDGLAQDVIGSIGQAFELRFKQYLQCPTKIPALHDRMQSLDEPWTEEEGDGSDHPYYNSIPSKMPPPGGFLDTRLKPRPHAPDTAQFAGKEQTYYQGRHLGDTFGEDWQQTPLRQGSSDIYSTPEGKLHVAPTGEAPTYVNTQQIPPQAWPAAVSSAESSPRKDLFDMKPFEDALKNQPLGPVLSKAASVECISPVSPRAPDAKMLEELQAETWYQGEMSRKEAEGLLEKDGDFLVRKSTTNPGSFVLTGMHNGQAKHLLLVDPEGTIRTKDRVFDSISHLINHHLESSLPIVSAGSELCLQQPVERKQ

SEQ ID NO: 78749 - protein, 672 aa, Homo sapiens
  Payload ID: 15684
  Gene Symbol: SHCBP1
  Gene Name: SHC SH2-domain binding protein 1
  Uniprot ID: Q8NEM2
  ENSP ID: ENSP00000306473
MADGSLTGGGLEAAAMAPERMGWAVEQELASLEKGLFQDEDSCSDCSYRDKPGSSLQSFMPEGKTFFPEIFQTNQLLFYERFRAYQDYILADCKASEVQEFTAEFLEKVLEPSGWRAVWHTNVFKVLVEITDVDFAALKAVVRLAEPYLCDSQVSTFTMECMKELLDLKEHRLPLQELWVVFDDSGVFDQTALAIEHVRFFYQNIWRSWDEEEEDEYDYFVRCVEPRLRLHYDILEDRVPSGLIVDYHNLLSQCEESYRKFLNLRSSLSNCNSDSEQENISMVEGLKLYSEMEQLKQKLKLIENPLLRYVFGYQKNSNIQAKGVRSSGQKITHVVSSTMMAGLLRSLLTDRLCQEPGEEEREIQFHSDPLSAINACFEGDTVIVCPGHYVVHGTFSIADSIELEGYGLPDDIVIEKRGKGDTFVDCTGADIKISGIKFVQHDAVEGILIVHRGKTTLENCVLQCETTGVTVRTSAEFLMKNSDLYGAKGAGIEIYPGSQCTLSDNGIHHCKEGILIKDFLDEHYDIPKISMVNNIIHNNEGYGVVLVKPTIFSDLQENAEDGTEENKALKIQTSGEPDVAERVDLEELIECATGKMELCARTDPSEQVEGNCEIVNELIAASTQKGQIKKKRLSELGITQADDNLMSQEMFVGIVGNQFKWNGKGSFGTFLF

SEQ ID NO: 78750 - protein, 155 aa, Homo sapiens
  Payload ID: 15684
  Gene Symbol: SHCBP1
  Gene Name: SHC SH2-domain binding protein 1
  ENSP ID: ENSP00000460840
  MOD_RES (1)..(1): Any amino acid
XDSGVFDQTALAIEHVRFFYQNIWRSWDEEEEDEYDYFVRCVEPRLRLYVFGYQKNSNIQAKGVRSSGQKITHVVSSTMMAGLLRSLLTDRLCQEPGEEEREIQFHSDPLSAINACFEGDTVIVCPGHYVVHGTFSIADSIELEGYGLPDDIVIE

SEQ ID NO: 78751 - protein, 653 aa, Homo sapiens
  Payload ID: 15685
  Gene Symbol: SHCBP1L
  Gene Name: SHC SH2-domain binding protein 1-like
  Uniprot ID: Q9BZQ2
  ENSP ID: ENSP00000356518
MASGSKASVPADSFRTISPDRRGEKSASAVSGDTAAATTLKGTAIPVRSVVASPRPVKGKAGRETARLRLQRLPAAQAEDTGEAAAAAAEEPLLPVPEDEEEAQPLPPVCVSRMRGMWRDEKVSLYCDEVLQDCKAEDADEVMGKYLSEKLKLKDKWLGVWKTNPSVFFVKYEEASIPFVGILVEVTCEPYQDSSSRFKVTVSVAEPFSSNIANIPRDLVDEILEELEHSVPLLEVYPVEGQDTDIHVIALALEVVRFFYDFLWRDWDDEESCENYTALIEERINLWCDIQDGTIPGPIAQRFKKTLEKYKNKRVELIEYQSNIKEDPSAAEAVECWKKYYEIVMLCGLLKMWEDLRLRVHGPFFPRILRRRKGKREFGKTITHIVAKMMTTEMIKDLSSDTLLQQHGDLDLALDNCYSGDTVIIFPGEYQAANLALLTDDIIIKGVGKREEIMITSEPSRDSFVVSKADNVKLMHLSLIQQGTVDGIVVVESGHMTLENCILKCEGTGVCVLTGAALTITDSEITGAQGAGVELYPGSIAILERNEIHHCNNLRTSNSSKSTLGGVNMKVLPAPKLKMTNNHIYSNKGYGVSILQPMEQFFIVAEEALNKRASSGDKKDDKMLFKVMQNLNLEMNNNKIEANVKGDIRIVTS

SEQ ID NO: 78752 - protein, 724 aa, Homo sapiens
  Payload ID: 15685
  Gene Symbol: SHCBP1L
  Gene Name: SHC SH2-domain binding protein 1-like
  ENSP ID: ENSP00000397308
MRPQDPALYPQAPHPLALGRASHPSQSRNTPPAGRPRAAARCGPERRAPIGQSGRGREKWPTAASALGLLRRWRRSKASVPADSFRTISPDRRGEKSASAVSGDTAAATTLKGTAIPVRSVVASPRPVKGKAGRETARLRLQRLPAAQAEDTGEAAAAAAEEPLLPVPEDEEEAQPLPPVCVSRMRGMWRDEKVSLYCDEVLQDCKAEDADEVMGKYLSEKLKLKDKWLGVWKTNPSVFFVKYEEASIPFVGILVEVTCEPYQDSSSRFKVTVSVAEPFSSNIANIPRDLVDEILEELEHSVPLLEVYPVEGQDTDIHVIALALEVVRFFYDFLWRDWDDEESCENYTALIEERINLWCDIQDGTIPGPIAQRFKKTLEKYKNKRVELIEYQSNIKEDPSAAEAVECWKKYYEIVMLCGLLKMWEDLRLRVHGPFFPRILRRRKGKREFGKTITHIVAKMMTTEMIKDLSSDTLLQQHGDLDLALDNCYSGDTVIIFPGEYQAANLALLTDDIIIKGVGKREEIMITSEPSRDSFVVSKADNVKLMHLSLIQQGTVDGIVVVESGHMTLENCILKCEGTGVCVLTGAALTITDSEITGAQGAGVELYPGSIAILERNEIHHCNNLRTSNSSKSTLGGVNMKVLPAPKLKMTNNHIYSNKGYGVSILQPMEQFFIVAEEALNKRASSGDKKDDKMLFKVMQNLNLEMNNNKIEANVKGDIRIVTS

SEQ ID NO: 78753 - protein, 295 aa, Homo sapiens
  Payload ID: 15686
  Gene Symbol: SHISA2
  Gene Name: shisa family member 2
  Uniprot ID: Q6UWI4
  ENSP ID: ENSP00000313079
MWGARRSSVSSSWNAASLLQLLLAALLAAGARASGEYCHGWLDAQGVWRIGFQCPERFDGGDATICCGSCALRYCCSSAEARLDQGGCDNDRQQGAGEPGRADKDGPDGSAVPIYVPFLIVGSVFVAFIILGSLVAACCCRCLRPKQDPQQSRAPGGNRLMETIPMIPSASTSRGSSSRQSSTAASSSSSANSGARAPPTRSQTNCCLPEGTMNNVYVNMPTNFSVLNCQQATQIVPHQGQYLHPPYVGYTVQHDSVPMTAVPPFMDGLQPGYRQIQSPFPHTNSEQKMYPAVTV

SEQ ID NO: 78754 - protein, 238 aa, Homo sapiens
  Payload ID: 15687
  Gene Symbol: SHISA3
  Gene Name: shisa family member 3
  Uniprot ID: A0PJX4
  ENSP ID: ENSP00000326445
MRALLALCLLLGWLRWGPAGAQQSGEYCHGWVDVQGNYHEGFQCPEDFDTLDATICCGSCALRYCCAAADARLEQGGCTNDRRELEHPGITAQPVYVPFLIVGSIFIAFIILGSVVAIYCCTCLRPKEPSQQPIRFSLRSYQTETLPMILTSTSPRAPSRQSSTATSSSSTGGSIRRFSFARAEPGCLVPSPPPPYTTSHSIHLAQPSGFLVSPQYFAYPLQQEPPLPGKSCPDFSSS

SEQ ID NO: 78755 - protein, 197 aa, Homo sapiens
  Payload ID: 15688
  Gene Symbol: SHISA4
  Gene Name: shisa family member 4
  Uniprot ID: Q96DD7
  ENSP ID: ENSP00000355064
MPPAGLRRAAPLTAIALLVLGAPLVLAGEDCLWYLDRNGSWHPGFNCEFFTFCCGTCYHRYCCRDLTLLITERQQKHCLAFSPKTIAGIASAVILFVAVVATTICCFLCSCCYLYRRRQQLQSPFEGQEIPMTGIPVQPVYPYPQDPKAGPAPPQPGFIYPPSGPAPQYPLYPAGPPVYNPAAPPPYMPPQPSYPGA

SEQ ID NO: 78756 - protein, 240 aa, Homo sapiens
  Payload ID: 15689
  Gene Symbol: SHISA5
  Gene Name: shisa family member 5
  Uniprot ID: Q8N114
  ENSP ID: ENSP00000296444
MTAPVPAPRILLPLLLLLLLTPPPGARGEVCMASRGLSLFPESCPDFCCGTCDDQYCCSDVLKKFVWSEERCAVPEASVPASVEPVEQLGSALRFRPGYNDPMSGFGATLAVGLTIFVLSVVTIIICFTCSCCCLYKTCRRPRPVVTTTTSTTVVHAPYPQPPSVPPSYPGPSYQGYHTMPPQPGMPAAPYPMQYPPPYPAQPMGPPAYHETLAGGAAAPYPASQPPYNPAYMDAPKAAL

SEQ ID NO: 78757 - protein, 137 aa, Homo sapiens
  Payload ID: 15689
  Gene Symbol: SHISA5
  Gene Name: shisa family member 5
  Uniprot ID: Q8N114
  ENSP ID: ENSP00000390388
MGFGATLAVGLTIFVLSVVTIIICFTCSCCCLYKTCRRPRPVVTTTTSTTVVHAPYPQPPSVPPSYPGPSYQGYHTMPPQPGMPAAPYPMQYPPPYPAQPMGPPAYHETLAGGAAAPYPASQPPYNPAYMDAPKAAL

SEQ ID NO: 78758 - protein, 233 aa, Homo sapiens
  Payload ID: 15689
  Gene Symbol: SHISA5
  Gene Name: shisa family member 5
  Uniprot ID: Q8N114
  ENSP ID: ENSP00000395373
MTAPVPAPRILLPLLLLLLLTPPPGARGEVCMASRGLSLFPESCPDFCCGTCDDQYCCSDVLKKFVWSEESVPASVEPVEQLGSALRFRPGYNDPMSGFGATLAVGLTIFVLSVVTIIICFTCSCCCLYKTCRRPRPVVTTTTSTTVVHAPYPQPPSVPPSYPGPSYQGYHTMPPQPGMPAAPYPMQYPPPYPAQPMGPPAYHETLAGGAAAPYPASQPPYNPAYMDAPKAAL

SEQ ID NO: 78759 - protein, 61 aa, Homo sapiens
  Payload ID: 15689
  Gene Symbol: SHISA5
  Gene Name: shisa family member 5
  ENSP ID: ENSP00000400498
MTAPVPAPRILLPLLLLLLLTPPPGGLQMVPLPWSPVAQAGLKLLEGTDISWTPAAGPARG

SEQ ID NO: 78760 - protein, 47 aa, Homo sapiens
  Payload ID: 15689
  Gene Symbol: SHISA5
  Gene Name: shisa family member 5
  ENSP ID: ENSP00000407330
  MOD_RES (1)..(1): Any amino acid
XLLLLLTPPPGGEPGVGAARPALGPGRHFPALPLQRAGQHQPHYAPH

SEQ ID NO: 78761 - protein, 209 aa, Homo sapiens
  Payload ID: 15689
  Gene Symbol: SHISA5
  Gene Name: shisa family member 5
  Uniprot ID: Q8N114
  ENSP ID: ENSP00000407957
MASRGLSLFPESCPDFCCGTCDDQYCCSDVLKKFVWSEERCAVPEASVPASVEPVEQLGSALRFRPGYNDPMSGFGATLAVGLTIFVLSVVTIIICFTCSCCCLYKTCRRPRPVVTTTTSTTVVHAPYPQPPSVPPSYPGPSYQGYHTMPPQPGMPAAPYPMQYPPPYPAQPMGPPAYHETLAGGAAAPYPASQPPYNPAYMDAPKAAL

SEQ ID NO: 78762 - protein, 209 aa, Homo sapiens; identical to SEQ ID NO: 78761
  Payload ID: 15689
  Gene Symbol: SHISA5
  Gene Name: shisa family member 5
  Uniprot ID: Q8N114
  ENSP ID: ENSP00000408223

SEQ ID NO: 78763 - protein, 112 aa, Homo sapiens
  Payload ID: 15689
  Gene Symbol: SHISA5
  Gene Name: shisa family member 5
  ENSP ID: ENSP00000412509
MASRGLSLFPESCPDFCCGTCDDQYCCSDVLKKFVWSEERCAVPEASVPASVEPVEQLGSALRFRPGYNDPMSGFGATLAVGLTIFVLSVVTIIICFTCSCCCLYKTCRRPR

SEQ ID NO: 78764 - protein, 123 aa, Homo sapiens
  Payload ID: 15689
  Gene Symbol: SHISA5
  Gene Name: shisa family member 5
  ENSP ID: ENSP00000412811
MTAPVPAPRILLPLLLLLLLTPPPGARGEVCMASRGLSLFPESCPDFCCGTCDDQYCCSDVLKKFVWSEERCAVPEASVPASVEPVEQLGSALRFRPGYNDPMSGFELGQQGGDSAEQAPRGA

SEQ ID NO: 78765 - protein, 44 aa, Homo sapiens
  Payload ID: 15689
  Gene Symbol: SHISA5
  Gene Name: shisa family member 5
  ENSP ID: ENSP00000415097
MTAPVPAPRILLPLLLLLLLTPPPGALAQRLRLGCEDLAAYGFT

SEQ ID NO: 78766 - protein, 170 aa, Homo sapiens [sequence omitted]

SEQ ID NO: 78767 - protein, 209 aa, Homo sapiens; identical to SEQ ID NO: 78761
  Payload ID: 15689
  Gene Symbol: SHISA5
  Gene Name: shisa family member 5
  Uniprot ID: Q8N114
  ENSP ID: ENSP00000484992

SEQ ID NO: 78768 - protein, 500 aa, Homo sapiens
  Payload ID: 15690
  Gene Symbol: SHISA6
  Gene Name: shisa family member 6
  Uniprot ID: Q6ZSJ9
  ENSP ID: ENSP00000387157
MALRRLLLLLLLSLESLDLLPSVHGARGRAANRTLSAGGAAVGGRRAGGALARGGRELNGTARAPGIPEAGSRRGQPAAAVAAAASAAVTYETCWGYYDVSGQYDKEFECNNSESGYLYCCGTCYYRFCCKKRHEKLDQRQCTNYQSPVWVQTPSTKVVSPGPENKYDPEKDKTNFTVYITCGVIAFVIVAGVFAKVSYDKAHRPPREMNIHRALADILRQQGPIPIAHCERETISAIDTSPKENTPVRSSSKNHYTPVRTAKQTPEKPRMNNILTSATEPYDLSFSRSFQNLAHLPPSYESAVKTNPSKYSSLKRLTDKEADEYYMRRRHLPDLAARGTLPLNVIQMSQQKPLPRERPRRPIRAMSQDRVLSPDRGLPDEFSMPYDRILSDEQLLSTERLHSQDPLLSPERTAFPEQSLSRAISHTDVFVSTPVLDRYRMSKMHSHPSASNNSYATLGQSQTAAKRHAFASRRHNTVEQLHYIPGHHTCYTASKTEVTV

SEQ ID NO: 78769 - protein, 532 aa, Homo sapiens
  Payload ID: 15690
  Gene Symbol: SHISA6
  Gene Name: shisa family member 6
  Uniprot ID: Q6ZSJ9
  ENSP ID: ENSP00000388659
MALRRLLLLLLLSLESLDLLPSVHGARGRAANRTLSAGGAAVGGRRAGGALARGGRELNGTARAPGIPEAGSRRGQPAAAVAAAASAAVTYETCWGYYDVSGQYDKEFECNNSESGYLYCCGTCYYRFCCKKRHEKLDQRQCTNYQSPVWVQTPSTKVVSPGPENKYDPEKDKTNFTVYITCGVIAFVIVAGVFAKVSYDKAHRPPREMNIHRALADILRQQGPIPIAHCERETISAIDTSPKENTPVRSSSKNHYTPVRTAKQTPGHYGKDAYRSGGPDLHNFISSGFVTLGRGHTKEKPRMNNILTSATEPYDLSFSRSFQNLAHLPPSYESAVKTNPSKYSSLKRLTDKEADEYYMRRRHLPDLAARGTLPLNVIQMSQQKPLPRERPRRPIRAMSQDRVLSPDRGLPDEFSMPYDRILSDEQLLSTERLHSQDPLLSPERTAFPEQSLSRAISHTDVFVSTPVLDRYRMSKMHSHPSASNNSYATLGQSQTAAKRHAFASRRHNTVEQLHYIPGHHTCYTASKTEVTV

SEQ ID NO: 78770 - protein, 551 aa, Homo sapiens
  Payload ID: 15690
  Gene Symbol: SHISA6
  Gene Name: shisa family member 6
  Uniprot ID: Q6ZSJ9
  ENSP ID: ENSP00000390084
MALRRLLLLLLLSLESLDLLPSVHGARGRAANRTLSAGGAAVGGRRAGGALARGGRELNGTARAPGIPEAGSRRGQPAAAVAAAASAAVTYETCWGYYDVSGQYDKEFECNNSESGYLYCCGTCYYRFCCKKRHEKLDQRQCTNYQSPVWVQTPSTKVVSPGPENKYDPEKDKTNFTVYITCGVIAFVIVAGVFAKVSYDKAHRPPREMNIHRALADILRQQGPIPIAHCERETISAIDTSPKENTPVRSSSKNHYTPVRTAKQTPGHYGKDAYRSGGPDLHNFISSGFVTLGRGHTKGDHQYNHPILSSVTQIPPHEKPRMNNILTSATEPYDLSFSRSFQNLAHLPPSYESAVKTNPSKYSSLKRLTDKEADEYYMRRRHLPDLAARGTLPLNVIQMSQQKPLPRERPRRPIRAMSQDRVLSPDRGLPDEFSMPYDRILSDEQLLSTERLHSQDPLLSPERTAFPEQSLSRAISHTDVFVSTPVLDRYRMSKMHSHPSASNNSYATLGQSQTAAKRHAFASRRHNTVEQLHYIPGHHTCYTASKTEVTV

SEQ ID NO: 78771 - protein, 134 aa, Homo sapiens
  Payload ID: 15690
  Gene Symbol: SHISA6
  Gene Name: shisa family member 6
  ENSP ID: ENSP00000477331
  MOD_RES (1)..(1): Any amino acid
XTNFTVYITCGVIAFVIVAGVFAKVSYDKAHRPPREMNIHRALADILRQQGPIPIAHCERETISAIDTSPKENTPVRSSSKNHYTPVRTAKQTPGHYGKDAYRSGGPDLHNFISSGFVTLGRGHTKGTVETIFY

SEQ ID NO: 78772 - protein, 538 aa, Homo sapiens
  Payload ID: 15691
  Gene Symbol: SHISA7
  Gene Name: shisa family member 7
  Uniprot ID: A6NL88
  ENSP ID: ENSP00000365503
MPALLLLVLLASSAGQARARPSNATSAEPAGPLPALLAHLRRLTGALTGGGGAASPGANGTRTGPAGGAGAAARAPPPAELCHGYYDVMGQYDATFNCSTGSYRFCCGTCHYRFCCEHRHMRLAQASCSNYDTPRWATTPPPLAGGAGGAGGAGGGPGPGQAGWLEGGRTGGAGGRGGEGPGGSTAYVVCGVISFALAVGVGAKVAFSKASRAPRAHRDINVPRALVDILRHQAGPGTRPDRARSSSLTPGIGGPDSMPPRTPKNLYNTVKTPNLDWRALPPPSPSLHYSTLSCSRSFHNLSHLPPSYEAAVKSELNRYSSLKRLAEKDLDEAYLKRRPLELPRGTLPLHALRRPGTGGGYRMEAWGGPEELGLAPAPNPRRVMSQEHLLGDGGRSRYEFTLPRARLVSQEHLLLSSPEALRQSREHLLSPPRSPALPPDPTARASLAASHSNLLLGPGGPPTPLRGLPPPSSLHAHHHHALHGSPQPAWMSDAGGGGGTLARRPPFQRQGTLEQLQFIPGHHLPQHLRTASKNEVTV

SEQ ID NO: 78773 - protein, 153 aa, Homo sapiens
  Payload ID: 15691
  Gene Symbol: SHISA7
  Gene Name: shisa family member 7
  ENSP ID: ENSP00000401307
  MOD_RES (1)..(1): Any amino acid
XGGEGPGGSTAYVVCGVISFALAVGVGAKVAFSKASRAPRAHRDINVPRALVDILRHQAGPGTRPDRARSSSLTPGIGGPDSMPPRTPKNLYNTVKTPNLATCTSTSTAPSTTPPHWTGEPCRRPAPPCTTPRCPALGPSTTSRICPRPTRLP

SEQ ID NO: 78774 - protein, 162 aa, Homo sapiens
  Payload ID: 15692
  Gene Symbol: SHISA8
  Gene Name: shisa family member 8
  Uniprot ID: B8ZZ34
  ENSP ID: ENSP00000389964
  MOD_RES (1)..(1): Any amino acid
XSGRAGAPEAQGPAAPGTTAPEGGDRCRGYYDVMGQWDPPFNCSSGAYSFCCGTCGYRFCCHDGPRRLDQSRCSNYDTPAWVQTGRPPARARDTAAPRDPGRERSHTAVYAVCGVAALLVLAGIGARLGLERAHSPRARRTVTRALTELLKQPGPQEPLPPT

SEQ ID NO: 78775 - protein, 397 aa, Homo sapiens
  Payload ID: 15692
  Gene Symbol: SHISA8
  Gene Name: shisa family member 8
  ENSP ID: ENSP00000481203
MARAGARGLLGGRRPPGLRLALALRLALLLARPPSGRAGAPEAQGPAAPGTTAPEGGDRCRGYYDVMGQWDPPFNCSSGAYSFCCGTCGYRFCCHDGPRRLDQSRCSNYDTPAWVQTGRPPARARDTAAPRDPGRERSHTAVYAVCGVAALLVLAGIGARLGLERAHSPRARRTVTRALTELLKQPGPQEPLPPTLGPPLGGCVQVQMGDGLPRGSPHNSADKKRLNNAPRGSAAPGPPRGPRLQGGGSLTLQPDYAKYATFKAAALKAAEAAPRDFCQRFPALEPSPRQPPARAPRPSPDLPAPLDACPWAPPVYAPPAAPGPYAAWTSSRPARPAPLSHPTARAFQVPRRPGHAARRQFSVKMPETFNPQLPGLYGSAGRGSRYLRTNSKTEVTV

SEQ ID NO: 78776 - protein, 221 aa, Homo sapiens
  Payload ID: 15693
  Gene Symbol: SHISA9
  Gene Name: shisa family member 9
  Uniprot ID: B4DS77
  ENSP ID: ENSP00000395245
MRRVLRLLLGCFLTELCARVCRAQERAGHGQLAQLGGVLLLAGGNRSGAASGEASEGAEASDAPPTRAPTPDFCRGYFDVMGQWDPPFNCSSGDFIFCCGTCGFRFCCTFKKRRLNQSTCTNYDTPLWLNTGKPPARKDDPLHDPTKDKTNLIVYIICGVVAVMVLVGIFTKLGLEKAHRPQREHMSRLYDNLLFMEAQISFQEDEPAPGEWSVGLQTWTV

SEQ ID NO: 78777 - protein, 424 aa, Homo sapiens
  Payload ID: 15693
  Gene Symbol: SHISA9
  Gene Name: shisa family member 9
  Uniprot ID: B4DS77
  ENSP ID: ENSP00000454014
MRRVLRLLLGCFLTELCARVCRAQERAGHGQLAQLGGVLLLAGGNRSGAASGEASEGAEASDAPPTRAPTPDFCRGYFDVMGQWDPPFNCSSGDFIFCCGTCGFRFCCTFKKRRLNQSTCTNYDTPLWLNTGKPPARKDDPLHDPTKDKTNLIVYIICGVVAVMVLVGIFTKLGLEKAHRPQREHMSRALADVMRPQGHCNTDHMERDLNIVVHVQHYENMDTRTPINNLHATQMNNAVPTSPLLQQMGHPHSYPNLGQISNPYEQQPPGKELNKYASLKAVGSSDGDWAVSTLKSPKADKVNDDFYTKRRHLAELAAKGNLPLHPVRVEDEPRAFSPEHGPAKQNGQKSRTNKMPPHPLAYTSTTNFKGWDPNEQSLRRQAYSNKGKLGTAETGSSDPLGTRPQHYPPPQPYFITNSKTEVTV

SEQ ID NO: 78778 - protein, 536 aa, Homo sapiens
  Payload ID: 15694
  Gene Symbol: SHOC2
  Gene Name: SHOC2 leucine-rich repeat scaffold protein
  Uniprot ID: Q9UQ13
  ENSP ID: ENSP00000265277
MSSSLGKEKDSKEKDPKVPSAKEREKEAKASGGFGKESKEKEPKTKGKDAKDGKKDSSAAQPGVAFSVDNTIKRPNPAPGTRKKSSNAEVIKELNKCREENSMRLDLSKRSIHILPSSIKELTQLTELYLYSNKLQSLPAEVGCLVNLMTLALSENSLTSLPDSLDNLKKLRMLDLRHNKLREIPSVVYRLDSLTTLYLRFNRITTVEKDIKNLSKLSMLSIRENKIKQLPAEIGNLSSLSRLGLRYNRLSAIPRSLAKCSALEELNLENNNISTLPESLLSSLVKLNSLTLARNCFQLYPVGGPSQFSTIYSLNMEHNRINKIPFGIFSRAKVLSKLNMKDNQLTSLPLDFGTWTSMVELNLATNQLTKIPEDVSGLVSLEVLILSNNLLKKLPHGLGNLRKLRELDLEENKLESLPNEIAYLKDLQKLVLTNNQLTTLPRGIGHLTNLTHLGLGENLLTHLPEEIGTLENLEELYLNDNPNLHSLPFELALCSKLSIMSIENCPLSHLPPQIVAGGPSFIIQFLKMQGPYRAMV

SEQ ID NO: 78779 - protein, 582 aa, Homo sapiens
  Payload ID: 15694
  Gene Symbol: SHOC2
  Gene Name: SHOC2 leucine-rich repeat scaffold protein
  Uniprot ID: Q9UQ13
  ENSP ID: ENSP00000358464
MSSSLGKEKDSKEKDPKVPSAKEREKEAKASGGFGKESKEKEPKTKGKDAKDGKKDSSAAQPGVAFSVDNTIKRPNPAPGTRKKSSNAEVIKELNKCREENSMRLDLSKRSIHILPSSIKELTQLTELYLYSNKLQSLPAEVGCLVNLMTLALSENSLTSLPDSLDNLKKLRMLDLRHNKLREIPSVVYRLDSLTTLYLRFNRITTVEKDIKNLSKLSMLSIRENKIKQLPAEIGELCNLITLDVAHNQLEHLPKEIGNCTQITNLDLQHNELLDLPDTIGNLSSLSRLGLRYNRLSAIPRSLAKCSALEELNLENNNISTLPESLLSSLVKLNSLTLARNCFQLYPVGGPSQFSTIYSLNMEHNRINKIPFGIFSRAKVLSKLNMKDNQLTSLPLDFGTWTSMVELNLATNQLTKIPEDVSGLVSLEVLILSNNLLKKLPHGLGNLRKLRELDLEENKLESLPNEIAYLKDLQKLVLTNNQLTTLPRGIGHLTNLTHLGLGENLLTHLPEEIGTLENLEELYLNDNPNLHSLPFELALCSKLSIMSIENCPLSHLPPQIVAGGPSFIIQFLKMQGPYRAMV

SEQ ID NO: 78780 - protein, 372 aa, Homo sapiens
  Payload ID: 15694
  Gene Symbol: SHOC2
  Gene Name: SHOC2 leucine-rich repeat scaffold protein
  ENSP ID: ENSP00000408275
LDNLKKLRMLDLRHNKLREIPSVVYRLDSLTTLYLRFNRITTVEKDIKNLSKLSMLSIRENKIKQLPAEIGNLSSLSRLGLRYNRLSAIPRSLAKCSALEELNLENNNISTLPESLLSSLVKLNSLTLARNCFQLYPVGGPSQFSTIYSLNMEHNRINKIPFGIFSRAKVLSKLNMKDNQLTSLPLDFGTWTSMVELNLATNQLTKIPEDVSGLVSLEVLILSNNLLKKLPHGLGNLRKLRELDLEENKLESLPNEIAYLKDLQKLVLTNNQLTTLPRGIGHLTNLTHLGLGENLLTHLPEEIGTLENLEELYLNDNPNLHSLPFELALCSKLSIMSIENCPLSHLPPQIVAGGPSFIIQFLKMQGPYRAMV

SEQ ID NO: 78781 - protein, 571 aa, Homo sapiens
  Payload ID: 15695
  Gene Symbol: SHTN1
  Gene Name: shootin 1
  Uniprot ID: A0MZ66
  ENSP ID: ENSP00000260777
MVIEEVNFMQNHLEIEKTCRESAEALATKLNKENKTLKRISMLYMAKLGPDVITEEINIDDEDSTTDTDGAAETCVSVQCQKQIKELRDQIVSVQEEKKILAIELENLKSKLVEVIEEVNKVKQEKTVLNSEVLEQRKVLEKCNRVSMLAVEEYEEMQVNLELEKDLRKKAESFAQEMFIEQNKLKRQSHLLLQSSIPDQQLLKALDENAKLTQQLEEERIQHQQKVKELEEQLENETLHKEIHNLKQQLELLEEDKKELELKYQNSEEKARNLKHSVDELQKRVNQSENSVPPPPPPPPPLPPPPPNPIRSLMSMIRKRSHPSGSGAKKEKATQPETTEEVTDLKRQAVEEMMDRIKKGVHLRPVNQTARPKTKPESSKGCESAVDELKGILGTLNKSTSSRSLKSLDPENSETELERILRRRKVTAEADSSSPTGILATSESKSMPVLGSVSSVTKTALNKKTLEAEFNSPSPPTPEPGEGPRKLEGCTSSKVTFQPPSSIGCRKKYIDGEKQAEPVVVLDPVSTHEPQTKDQVAEKDPTQHKEDEGEIQPENKEDSIENVRETDSSNC

SEQ ID NO: 78782 - protein, 631 aa, Homo sapiens
  Payload ID: 15695
  Gene Symbol: SHTN1
  Gene Name: shootin 1
  Uniprot ID: A0MZ66
  ENSP ID: ENSP00000347532
MNSSDEEKQLQLITSLKEQAIGEYEDLRAENQKTKEKCDKIRQERDEAVKKLEEFQKISHMVIEEVNFMQNHLEIEKTCRESAEALATKLNKENKTLKRISMLYMAKLGPDVITEEINIDDEDSTTDTDGAAETCVSVQCQKQIKELRDQIVSVQEEKKILAIELENLKSKLVEVIEEVNKVKQEKTVLNSEVLEQRKVLEKCNRVSMLAVEEYEEMQVNLELEKDLRKKAESFAQEMFIEQNKLKRQSHLLLQSSIPDQQLLKALDENAKLTQQLEEERIQHQQKVKELEEQLENETLHKEIHNLKQQLELLEEDKKELELKYQNSEEKARNLKHSVDELQKRVNQSENSVPPPPPPPPPLPPPPPNPIRSLMSMIRKRSHPSGSGAKKEKATQPETTEEVTDLKRQAVEEMMDRIKKGVHLRPVNQTARPKTKPESSKGCESAVDELKGILGTLNKSTSSRSLKSLDPENSETELERILRRRKVTAEADSSSPTGILATSESKSMPVLGSVSSVTKTALNKKTLEAEFNSPSPPTPEPGEGPRKLEGCTSSKVTFQPPSSIGCRKKYIDGEKQAEPVVVLDPVSTHEPQTKDQVAEKDPTQHKEDEGEIQPENKEDSIENVRETDSSNC

SEQ ID NO: 78783 - protein, 498 aa, Homo sapiens
  Payload ID: 15695
  Gene Symbol: SHTN1
  Gene Name: shootin 1
  Uniprot ID: A0MZ66
  ENSP ID: ENSP00000376635
MVIEEVNFMQNHLEIEKTCRESAEALATKLNKENKTLKRISMLYMAKLGPDVITEEINIDDEDSTTDTDGAAETCVSVQCQKQIKELRDQIVSVQEEKKILAIELENLKSKLVEVIEEVNKVKQEKTVLNSEVLEQRKVLEKCNRVSMLAVEEYEEMQVNLELEKDLRKKAESFAQEMFIEQNKLKRQSHLLLQSSIPDQQLLKALDENAKLTQQLEEERIQHQQKVKELEEQLENETLHKEIHNLKQQLELLEEDKKELELKYQNSEEKARNLKHSVDELQKRVNQSENSVPPPPPPPPPLPPPPPNPIRSLMSMIRKRSHPSGSGAKKEKATQPETTEEVTDLKRQAVEEMMDRIKKGVHLRPVNQTARPKTKPESSKGCESAVDELKGILGTLNKSTSSRSLKSLDPENSETELERILRRRKVTAEADSSSPTGILATSESKSMPVLGSVSSVTKTALNKKTLEAEFNSPSPPTPEPGEGPRKLEGCTSSKVTFQ

SEQ ID NO: 78784 - protein, 558 aa, Homo sapiens
  Payload ID: 15695
  Gene Symbol: SHTN1
  Gene Name: shootin 1
  Uniprot ID: A0MZ66
  ENSP ID: ENSP00000376636
MNSSDEEKQLQLITSLKEQAIGEYEDLRAENQKTKEKCDKIRQERDEAVKKLEEFQKISHMVIEEVNFMQNHLEIEKTCRESAEALATKLNKENKTLKRISMLYMAKLGPDVITEEINIDDEDSTTDTDGAAETCVSVQCQKQIKELRDQIVSVQEEKKILAIELENLKSKLVEVIEEVNKVKQEKTVLNSEVLEQRKVLEKCNRVSMLAVEEYEEMQVNLELEKDLRKKAESFAQEMFIEQNKLKRQSHLLLQSSIPDQQLLKALDENAKLTQQLEEERIQHQQKVKELEEQLENETLHKEIHNLKQQLELLEEDKKELELKYQNSEEKARNLKHSVDELQKRVNQSENSVPPPPPPPPPLPPPPPNPIRSLMSMIRKRSHPSGSGAKKEKATQPETTEEVTDLKRQAVEEMMDRIKKGVHLRPVNQTARPKTKPESSKGCESAVDELKGILGTLNKSTSSRSLKSLDPENSETELERILRRRKVTAEADSSSPTGILATSESKSMPVLGSVSSVTKTALNKKTLEAEFNSPSPPTPEPGEGPRKLEGCTSSKVTFQ

SEQ ID NO: 78785 - protein, 456 aa, Homo sapiens
  Payload ID: 15695
  Gene Symbol: SHTN1
  Gene Name: shootin 1
  Uniprot ID: A0MZ66
  ENSP ID: ENSP00000480109
MNSSDEEKQLQLITSLKEQAIGEYEDLRAENQKTKEKCDKIRQERDEAVKKLEEFQKISHMVIEEVNFMQNHLEIEKTCRESAEALATKLNKENKTLKRISMLYMAKLGPDVITEEINIDDEDSTTDTDGAAETCVSVQCQKQIKELRDQIVSVQEEKKILAIELENLKSKLVEVIEEVNKVKQEKTVLNSEVLEQRKVLEKCNRVSMLAVEEYEEMQVNLELEKDLRKKAESFAQEMFIEQNKLKRQSHLLLQSSIPDQQLLKALDENAKLTQQLEEERIQHQQKVKELEEQLENETLHKEIHNLKQQLELLEEDKKELELKYQNSEEKARNLKHSVDELQKRVNQSENSVPPPPPPPPPLPPPPPNPIRSLMSMIRKRSHPSGSGAKKEKATQPETTEEVTDLKRQAVEEMMDRIKKGVHLRPVNQTARPKTKPESSKGCESAVDELKGILASQ

SEQ ID NO: 78786 - protein, 309 aa, Homo sapiens
  Payload ID: 15696
  Gene Symbol: SDR16C5
  Gene Name: short chain dehydrogenase/reductase family 16C, member 5
  Uniprot ID: Q8N3Y7
  ENSP ID: ENSP00000307607
MSFNLQSSKKLFIFLGKSLFSLLEAMIFALLPKPRKNVAGEIVLITGAGSGLGRLLALQFARLGSVLVLWDINKEGNEETCKMAREAGATRVHAYTCDCSQKEGVYRVADQVKKEVGDVSILINNAGIVTGKKFLDCPDELMEKSFDVNFKAHLWTYKAFLPAMIANDHGHLVCISSSAGLSGVNGLADYCASKFAAFGFAESVFVETFVQKQKGIKTTIVCPFFIKTGMFEGCTTGCPSLLPILEPKYAVEKIVEAILQEKMYLYMPKLLYFMMFLKSFLPLKTGLLIADYLGILHAMDGFVDQKKKL

SEQ ID NO: 78787 - protein, 265 aa, Homo sapiens
  Payload ID: 15696
  Gene Symbol: SDR16C5
  Gene Name: short chain dehydrogenase/reductase family 16C, member 5
  Uniprot ID: Q8N3Y7
  ENSP ID: ENSP00000379947
MSFNLQSSKKLFIFLGKSLFSLLEAMIFALLPKPRKNVAGEIVLITGAGSGLGRLLALQFARLGSVLVLWDINKEGNEETCKMAREAGATRVHAYTCDCSQKEGVYRVADQTYKAFLPAMIANDHGHLVCISSSAGLSGVNGLADYCASKFAAFGFAESVFVETFVQKQKGIKTTIVCPFFIKTGMFEGCTTGCPSLLPILEPKYAVEKIVEAILQEKMYLYMPKLLYFMMFLKSFLPLKTGLLIADYLGILHAMDGFVDQKKKL

SEQ ID NO: 78788 - protein, 318 aa, Homo sapiens
  Payload ID: 15696
  Gene Symbol: SDR16C5
  Gene Name: short chain dehydrogenase/reductase family 16C, member 5
  ENSP ID: ENSP00000431010
MSFNLQSSKKLFIFLGKSLFSLLEAMIFALLPKPRKNVAGEIVLITGAGSGLGRLLALQFARLGSVLVLWDINKEGNEETCKMAREAGATRVHAYTCDCSQKEGVYRVADQVKKEVGDVSILINNAGIVTGKKFLDCPDELMEKSFDVNFKAHLWTYKAFLPAMIANDHGHLVCISSSAGLSGVNGLADYCASKFAAFGFAESVFVETFVQKQKGIKTTIVCPFFIKTGMFEGCTTGCPSLLPILEPKYAVEKIVEAILQEKMYLYMPKLLYFMMFLKRLHLAQDGSECLTEAMWDRAKDPGQAIRNSGLRSHYSLSL

SEQ ID NO: 78789 - protein, 319 aa, Homo sapiens
  Payload ID: 15697
  Gene Symbol: SDR39U1
  Gene Name: short chain dehydrogenase/reductase family 39U, member 1
  Uniprot ID: Q9NRG7
  ENSP ID: ENSP00000382322
MGWRRKRVPQRGRKAPPPQLHGNINNLYFPIRWRDRLHWDSPNPAAECQRHEVTLVSRKPGPGRITWDELAASGLPSCDAAVNLAGENILNPLRRWNETFQKEVIGSRLETTQLLAKAITKAPQPPKAWVLVTGVAYYQPSLTAEYDEDSPGGDFDFFSNLVTKWEAAARLPGDSTRQVVVRSGVVLGRGGGAMGHMLLPFRLGLGGPIGSGHQFFPWIHIGDLAGILTHALEANHVHGVLNGVAPSSATNAEFAQTLGAALGRRAFIPLPSAVVQAVFGRQRAIMLLEGQKVIPQRTLATGYQYSFPELGAALKEIVA

SEQ ID NO: 78790 - protein, 293 aa, Homo sapiens
  Payload ID: 15697
  Gene Symbol: SDR39U1
  Gene Name: short chain dehydrogenase/reductase family 39U, member 1
  Uniprot ID: Q9NRG7
  ENSP ID: ENSP00000382327
MRVLVGGGTGFIGTALTQLLNARGHEVTLVSRKPGPGRITWDELAASGLPSCDAAVNLAGENILNPLRRWNETFQKEVIGSRLETTQLLAKAITKAPQPPKAWVLVTGVAYYQPSLTAEYDEDSPGGDFDFFSNLVTKWEAAARLPGDSTRQVVVRSGVVLGRGGGAMGHMLLPFRLGLGGPIGSGHQFFPWIHIGDLAGILTHALEANHVHGVLNGVAPSSATNAEFAQTLGAALGRRAFIPLPSAVVQAVFGRQRAIMLLEGQKVIPQRTLATGYQYSFPELGAALKEIVA

SEQ ID NO: 78791 - protein, 211 aa, Homo sapiens
  Payload ID: 15697
  Gene Symbol: SDR39U1
  Gene Name: short chain dehydrogenase/reductase family 39U, member 1
  ENSP ID: ENSP00000446077
MSSLHRGCRAAMPPSTWPERTSSTLSEAYYQPSLTAEYDEDSPGGDFDFFSNLVTKWEAAARLPGDSTRQVVVRSGVVLGRGGGAMGHMLLPFRLGLGGPIGSGHQFFPWIHIGDLAGILTHALEANHVHGVLNGVAPSSATNAEFAQTLGAALGRRAFIPLPSAVVQAVFGRQRAIMLLEGQKVIPQRTLATGYQYSFPELGAALKEIVA

SEQ ID NO: 78792 - protein, 185 aa, Homo sapiens
  Payload ID: 15697
  Gene Symbol: SDR39U1
  Gene Name: short chain dehydrogenase/reductase family 39U, member 1
  ENSP ID: ENSP00000450915
  MOD_RES (1)..(1): Any amino acid
XLHWDSPNPAAECQRPRSDVGLPKARARPDHVAYYQPSLTAEYDEDSPGGDFDFFSNLVTKWEAAARLPGDSTRQVVVRSGVVLGRGGGAMGHMLLPFRLGLGGPIGSGHQFFPWIHIGDLAGILTHALEANHVHGVLNGVAPSSATNAEFAQTLGAALGRRAFIPLPSAVVQAVFGRQRAIMLL

SEQ ID NO: 78793 - protein, 128 aa, Homo sapiens
  Payload ID: 15697
  Gene Symbol: SDR39U1
  Gene Name: short chain dehydrogenase/reductase family 39U, member 1
  ENSP ID: ENSP00000450946
MGRVRKGKQKPGGAVGSFKAERTPVPSLFPALGVVLGRGGGAMGHMLLPFRLGLGGPIGSGHQFFPWIHIGDLAGILTHALEANHVHGVLNGVAPSSATNAEFAQTLGAALGRRAFIPLPSAVVQAVF

SEQ ID NO: 78794 - protein, 66 aa, Homo sapiens
  Payload ID: 15697
  Gene Symbol: SDR39U1
  Gene Name: short chain dehydrogenase/reductase family 39U, member 1
  ENSP ID: ENSP00000451275
MGHMLLPFRLGLGGPIGSGHQFFPWIHIGDLAGILTHALEANHVHGVLNGVAPSSATNAEFAQTLG

SEQ ID NO: 78795 - protein, 95 aa, Homo sapiens
  Payload ID: 15697
  Gene Symbol: SDR39U1
  Gene Name: short chain dehydrogenase/reductase family 39U, member 1
  ENSP ID: ENSP00000451593
MGHMLLPFRLGLGGPIGSGHQFFPWIHIGDLAGILTHALEANHVHGVLNGVAPSSATNAEFAQTLGAALGRRAFIPLPSAVVQAVFGRQRAIMLL

SEQ ID NO: 78796 - protein, 126 aa, Homo sapiens
  Payload ID: 15697
  Gene Symbol: SDR39U1
  Gene Name: short chain dehydrogenase/reductase family 39U, member 1
  ENSP ID: ENSP00000451903
MGHMLLPFRLGLGGPIGSGHQFFPWIHIGDLAGILTHALEANHVHGVLNGVAPSSATNAEFAQTLGAALGRRAFIPLPSAVVQAVFGRQRAIMLLEGQKVIPQRTLATGYQYSFPELGAALKEIVA

SEQ ID NO: 78797 - protein, 169 aa, Homo sapiens
  Payload ID: 15697
  Gene Symbol: SDR39U1
  Gene Name: short chain dehydrogenase/reductase family 39U, member 1
  ENSP ID: ENSP00000452076
MRTSYYQPSLTAEYDEDSPGGDFDFFSNLVTKWEAAARLPGDSTRQVVVRSGVVLGRGGGAMGHMLLPFRLGLGGPIGSGHQFFPWIHIGDLAGILTHALEANHVHGVLNGVAPSSATNAEFAQTLGAALGRRAFIPLPSAVVQAVFGRQRAIMLLEGQKVIPQRTLAT

SEQ ID NO: 78798 - protein, 185 aa, Homo sapiens
  Payload ID: 15697
  Gene Symbol: SDR39U1
  Gene Name: short chain dehydrogenase/reductase family 39U, member 1
  ENSP ID: ENSP00000452438
MAYYQPSLTAEYDEDSPGGDFDFFSNLVTKWEAAARLPGDSTRQVVVRSGVVLGRGGGAMGHMLLPFRLGLGGPIGSGHQFFPWIHIGDLAGILTHALEANHVHGVLNGVAPSSATNAEFAQTLGAALGRRAFIPLPSAVVQAVFGRQRAIMLLEGQKVIPQRTLATGYQYSFPELGAALKEIVA

SEQ ID NO: 78799 - protein, 168 aa, Homo sapiens
  Payload ID: 15697
  Gene Symbol: SDR39U1
  Gene Name: short chain dehydrogenase/reductase family 39U, member 1
  ENSP ID: ENSP00000452499
MGRVRKGKQKPGGAVGSFKAERTPVPSLFPALGVVLGRGGGAMGHMLLPFRLGLGGPIGSGHQFFPWIHIGDLAGILTHALEANHVHGVLNGVAPSSATNAEFAQTLGAALGRRAFIPLPSAVVQAVFGRQRAIMLLEGQKVIPQRTLATGYQYSFPELGAALKEIVA

SEQ ID NO: 78800 - protein, 393 aa, Homo sapiens
  Payload ID: 15698
  Gene Symbol: SDR42E1
  Gene Name: short chain dehydrogenase/reductase family 42E, member 1
  Uniprot ID: Q8WUS8
  ENSP ID: ENSP00000332407
MDPKRSQKESVLITGGSGYFGFRLGCALNQNGVHVILFDISSPAQTIPEGIKFIQGDIRHLSDVEKAFQDADVTCVFHIASYGMSGREQLNRNLIKEVNVRGTDNILQVCQRRRVPRLVYTSTFNVIFGGQVIRNGDESLPYLPLHLHPDHYSRTKSIAEQKVLEANATPLDRGDGVLRTCALRPAGIYGPGEQRHLPRIVSYIEKGLFKFVYGDPRSLVEFVHVDNLVQAHILASEALRADKGHIASGQPYFISDGRPVNNFEFFRPLVEGLGYTFPSTRLPLTLVYCFAFLTEMVHFILGRLYNFQPFLTRTEVYKTGVTHYFSLEKAKKELGYKAQPFDLQEAVEWFKAHGHGRSSGSRDSECFVWDGLLVFLLIIAVLMWLPSSVILSL

SEQ ID NO: 78801 - protein, 195 aa, Homo sapiens
  Payload ID: 15698
  Gene Symbol: SDR42E1
  Gene Name: short chain dehydrogenase/reductase family 42E, member 1
  ENSP ID: ENSP00000434529
MHSEGLRMSQEDLDQPHLDCLGCALNQNGVHVILFDISSPAQTIPEGIKFIQGDIRHLSDVEKAFQDADVTCVFHIASYGMSGREQLNRNLIKEVNVRGTDNILQVCQRRRVPRLVYTSTFNVIFGGQVIRNGDESLPYLPLHLHPDHYSRTKSIAEQKVLEANATPLDRGDGVLRTCALRPAGIYGPGEQRHLP

SEQ ID NO: 78802 - protein, 422 aa, Homo sapiens
  Payload ID: 15699
  Gene Symbol: SDR42E2
  Gene Name: short chain dehydrogenase/reductase family 42E, member 2
  Uniprot ID: A6NKP2
  ENSP ID: ENSP00000473474
MKSNPPRSSLEACKAAGQAPQQKTQAKPTKAARQKVLVTGGGGYLGFSLGSHLAKSGTSVILLDRRRPQWELSPETKFIQADVRDEEALYRAFEGVDCVFHVASYGMSGAEKLQKEQIESINVGGTKLVIDVCVRRRVPRLIYTSTVNVAFGGKPIEQGDEDSVPYFPLDEHVDHYSRTKAIADQLTLMANGMPLPGGGTLRTCVLRPPGIYGPEEQRHLPRVAGHIKKRLFMFRFGDHKARMNWVHVHNLVQAHVLAAEALTTAKGYVASGQAYYINDGESVNLFEWMAPLFEKLGYSQPWIQVPTSWVYLTAAVMERLHLALRPICSLPPLLTRSEVRSVAVTHTFQIAKARAQLGYAPDKFRFADAVELYVQSTTRRPRGSTARTLLRLLLRLLLFLGLLALALHFLGLQPLHAAVERL

SEQ ID NO: 78803 - protein, 313 aa, Homo sapiens
  Payload ID: 15700
  Gene Symbol: SDR9C7
  Gene Name: short chain dehydrogenase/reductase family 9C, member 7
  Uniprot ID: Q8NEX9
  ENSP ID: ENSP00000293502
MAALTDLSFMYRWFKNCNLVGNLSEKYVFITGCDSGFGNLLAKQLVDRGMQVLAACFTEEGSQKLQRDTSYRLQTTLLDVTKSESIKAAAQWVRDKVGEQGLWALVNNAGVGLPSGPNEWLTKDDFVKVINVNLVGLIEVTLHMLPMVKRARGRVVNMSSSGGRVAVIGGGYCVSKFGVEAFSDSIRRELYYFGVKVCIIEPGNYRTAILGKENLESRMRKLWERLPQETRDSYGEDYFRIYTDKLKNIMQVAEPRVRDVINSMEHAIVSRSPRIRYNPGLDAKLLYIPLAKLPTPVTDFILSRYLPRPADSV

SEQ ID NO: 78804 - protein, 122 aa, Homo sapiens
  Payload ID: 15701
  Gene Symbol: SCOC
  Gene Name: short coiled-coil protein
  Uniprot ID: Q9UIL1
  ENSP ID: ENSP00000345262
MDGSRKEEEEDSTFTNISLADDIDHSSRILYPRPKSLLPKMMNADMDAVDAENQVELEEKTRLINQVLELQHTLEDLSARVDAVKEENLKLKSENQVLGQYIENLMSASSVFQTTDTKSKRK

SEQ ID NO: 78805 - protein, 82 aa, Homo sapiens
  Payload ID: 15701
  Gene Symbol: SCOC
  Gene Name: short coiled-coil protein
  ENSP ID: ENSP00000377751
MMNADMDAVDAENQVELEEKTRLINQVLELQHTLEDLSARVDAVKEENLKLKSENQVLGQYIENLMSASSVFQTTDTKSKRK

SEQ ID NO: 78806 - protein, 122 aa, Homo sapiens; identical to SEQ ID NO: 78804
  Payload ID: 15701
  Gene Symbol: SCOC
  Gene Name: short coiled-coil protein
  Uniprot ID: Q9UIL1
  ENSP ID: ENSP00000377753

SEQ ID NO: 78807 - protein, 122 aa, Homo sapiens; identical to SEQ ID NO: 78804
  Payload ID: 15701
  Gene Symbol: SCOC
  Gene Name: short coiled-coil protein
  Uniprot ID: Q9UIL1
  ENSP ID: ENSP00000377755

SEQ ID NO: 78808 - protein, 82 aa, Homo sapiens; identical to SEQ ID NO: 78805
  Payload ID: 15701
  Gene Symbol: SCOC
  Gene Name: short coiled-coil protein
  ENSP ID: ENSP00000421355

SEQ ID NO: 78809 - protein, 82 aa, Homo sapiens; identical to SEQ ID NO: 78805
  Payload ID: 15701
  Gene Symbol: SCOC
  Gene Name: short coiled-coil protein
  ENSP ID: ENSP00000424605

SEQ ID NO: 78810 - protein, 82 aa, Homo sapiens; identical to SEQ ID NO: 78805
  Payload ID: 15701
  Gene Symbol: SCOC
  Gene Name: short coiled-coil protein
  ENSP ID: ENSP00000424688

SEQ ID NO: 78811 - protein, 131 aa, Homo sapiens
  Payload ID: 15701
  Gene Symbol: SCOC
  Gene Name: short coiled-coil protein
  Uniprot ID: Q9UIL1
  ENSP ID: ENSP00000426649
MRRRVFSSQDWRASGWDGMGFFSRRTFCGRSGRSCRGQLVQVSRPEVSAGSLLLPAPQAEDHSSRILYPRPKSLLPKMMNADMDDLSARVDAVKEENLKLKSENQVLGQYIENLMSASSVFQTTDTKSKRK

SEQ ID NO: 78812 - protein, 82 aa, Homo sapiens; identical to SEQ ID NO: 78805
  Payload ID: 15701
  Gene Symbol: SCOC
  Gene Name: short coiled-coil protein
  ENSP ID: ENSP00000426810

SEQ ID NO: 78813 - protein, 159 aa, Homo sapiens
  Payload ID: 15701
  Gene Symbol: SCOC
  Gene Name: short coiled-coil protein
  Uniprot ID: Q9UIL1
  ENSP ID: ENSP00000477352
MRRRVFSSQDWRASGWDGMGFFSRRTFCGRSGRSCRGQLVQVSRPEVSAGSLLLPAPQAEDHSSRILYPRPKSLLPKMMNADMDAVDAENQVELEEKTRLINQVLELQHTLEDLSARVDAVKEENLKLKSENQVLGQYIENLMSASSVFQTTDTKSKRK

SEQ ID NO: 78814 - protein, 159 aa, Homo sapiens; identical to SEQ ID NO: 78813
  Payload ID: 15701
  Gene Symbol: SCOC
  Gene Name: short coiled-coil protein
  Uniprot ID: Q9UIL1
  ENSP ID: ENSP00000477812

SEQ ID NO: 78815 - protein, 225 aa, Homo sapiens
  Payload ID: 15702
  Gene Symbol: SHOX
  Gene Name: short stature homeobox
  Uniprot ID: O15266
  ENSP ID: ENSP00000335505
MEELTAFVSKSFDQKSKDGNGGGGGGGGKKDSITYREVLESGLARSRELGTSDSSLQDITEGGGHCPVHLFKDHVDNDKEKLKEFGTARVAEGIYECKEKREDVKSEDEDGQTKLKQRRSRTNFTLEQLNELERLFDETHYPDAFMREELSQRLGLSEARVQVWFQNRRAKCRKQENQMHKGVILGTANHLDACRVAPYVNMGALRMPFQQMEFCSCRPGWSIMA

SEQ ID NO: 78816 - protein, 225 aa, Homo sapiens; identical to SEQ ID NO: 78815
  Payload ID: 15702
  Gene Symbol: SHOX
  Gene Name: short stature homeobox
  Uniprot ID: O15266
  ENSP ID: ENSP00000370987

SEQ ID NO: 78817 - protein, 292 aa, Homo sapiens
  Payload ID: 15702
  Gene Symbol: SHOX
  Gene Name: short stature homeobox
  Uniprot ID: O15266
  ENSP ID: ENSP00000370990
MEELTAFVSKSFDQKSKDGNGGGGGGGGKKDSITYREVLESGLARSRELGTSDSSLQDITEGGGHCPVHLFKDHVDNDKEKLKEFGTARVAEGIYECKEKREDVKSEDEDGQTKLKQRRSRTNFTLEQLNELERLFDETHYPDAFMREELSQRLGLSEARVQVWFQNRRAKCRKQENQMHKGVILGTANHLDACRVAPYVNMGALRMPFQQVQAQLQLEGVAHAHPHLHPHLAAHAPYLMFPPPPFGLPIASLAESASAAAVVAAAAKSNSKNSSIADLRLKARKHAEALGL

SEQ ID NO: 78818 - protein, 292 aa, Homo sapiens; identical to SEQ ID NO: 78817
  Payload ID: 15702
  Gene Symbol: SHOX
  Gene Name: short stature homeobox
  Uniprot ID: O15266
  ENSP ID: ENSP00000452016

SEQ ID NO: 78819 - protein, 355 aa, Homo sapiens
  Payload ID: 15703
  Gene Symbol: SHOX2
  Gene Name: short stature homeobox 2
  Uniprot ID: O60902
  ENSP ID: ENSP00000374240
MEELTAFVSKSFDQKVKEKKEAITYREVLESGPLRGAKEPTGCTEAGRDDRSSPAVRAAGGGGGGGGGGGGGGGGGGVGGGGAGGGAGGGRSPVRELDMGAAERSREPGSPRLTEGRRKPTKAEVQATLLLPGEAFRFLVSPELKDRKEDAKGMEDEGQTKIKQRRSRTNFTLEQLNELERLFDETHYPDAFMREELSQRLGLSEARVQVWFQNRRAKCRKQENQLHKGVLIGAASQFEACRVAPYVNVGALRMPFQQDSHCNVTPLSFQVQAQLQLDSAVAHAHHHLHPHLAAHAPYMMFPAPPFGLPLATLAADSASAASVVAAAAAAKTTSKNSSIADLRLKAKKHAAALGL

SEQ ID NO: 78820 - protein, 331 aa, Homo sapiens
  Payload ID: 15703
  Gene Symbol: SHOX2
  Gene Name: short stature homeobox 2
  Uniprot ID: O60902
  ENSP ID: ENSP00000397099
MEELTAFVSKSFDQKVKEKKEAITYREVLESGPLRGAKEPTGCTEAGRDDRSSPAVRAAGGGGGGGGGGGGGGGGGGVGGGGAGGGAGGGRSPVRELDMGAAERSREPGSPRLTEVSPELKDRKEDAKGMEDEGQTKIKQRRSRTNFTLEQLNELERLFDETHYPDAFMREELSQRLGLSEARVQVWFQNRRAKCRKQENQLHKGVLIGAASQFEACRVAPYVNVGALRMPFQQDSHCNVTPLSFQVQAQLQLDSAVAHAHHHLHPHLAAHAPYMMFPAPPFGLPLATLAADSASAASVVAAAAAAKTTSKNSSIADLRLKAKKHAAALGL

SEQ ID NO: 78821 - protein, 190 aa, Homo sapiens
  Payload ID: 15703
  Gene Symbol: SHOX2
  Gene Name: short stature homeobox 2
  ENSP ID: ENSP00000398704
MEDEGQTKIKQRRSRTNFTLEQLNELERLFDETHYPDAFMREELSQRLGLSEARVQVWFQNRRAKCRKQENQLHKGVLIGAASQFEACRVAPYVNVGALRMPFQQVQAQLQLDSAVAHAHHHLHPHLAAHAPYMMFPAPPFGLPLATLAADSASAASVVAAAAAAKTTSKNSSIADLRLKAKKHAAALGL

SEQ ID NO: 78822 - protein, 319 aa, Homo sapiens
  Payload ID: 15703
  Gene Symbol: SHOX2
  Gene Name: short stature homeobox 2
  Uniprot ID: O60902
  ENSP ID: ENSP00000419362
MEELTAFVSKSFDQKVKEKKEAITYREVLESGPLRGAKEPTGCTEAGRDDRSSPAVRAAGGGGGGGGGGGGGGGGGGVGGGGAGGGAGGGRSPVRELDMGAAERSREPGSPRLTEVSPELKDRKEDAKGMEDEGQTKIKQRRSRTNFTLEQLNELERLFDETHYPDAFMREELSQRLGLSEARVQVWFQNRRAKCRKQENQLHKGVLIGAASQFEACRVAPYVNVGALRMPFQQVQAQLQLDSAVAHAHHHLHPHLAAHAPYMMFPAPPFGLPLATLAADSASAASVVAAAAAAKTTSKNSSIADLRLKAKKHAAALGL

SEQ ID NO: 78823 - protein, 146 aa, Homo sapiens
  Payload ID: 15703
  Gene Symbol: SHOX2
  Gene Name: short stature homeobox 2
  ENSP ID: ENSP00000479329
  MOD_RES (1)..(1): Any amino acid
XEKQGAGQPATDGGRKPTKAEVQATLLLPGEAFRFLVSPELKDRKEDAKGMEDEGQTKIKQRRSRTNFTLEQLNELERLFDETHYPDAFMREELSQRLGLSEARVQVWFQNRRAKCRKQENQLHKGVLIGAASQFEACRVAPYVNV

SEQ ID NO: 78824 - protein, 577 aa, Homo sapiens
  Payload ID: 15704
  Gene Symbol: SHQ1
  Gene Name: SHQ1, H/ACA ribonucleoprotein assembly factor
  Uniprot ID: Q6PI26
  ENSP ID: ENSP00000315182
MLTPAFDLSQDPDFLTIAIRVPYARVSEFDVYFEGSDFKFYAKPYFLRLTLPGRIVENGSEQGSYDADKGIFTIRLPKETPGQHFEGLNMLTALLAPRKSRTAKPLVEEIGASEIPEEVVDDEEFDWEIEQTPCEEVSESALNPQCHYGFGNLRSGVLQRLQDELSDVIDIKDPDFTPAAERRQKRLAAELAKFDPDHYLADFFEDEAIEQILKYNPWWTDKYSKMMAFLEKSQEQENHATLVSFSEEEKYQLRKFVNKSYLLDKRACRQVCYSLIDILLAYCYETRVTEGEKNVESAWNIRKLSPTLCWFETWTNVHDIMVSFGRRVLCYPLYRHFKLVMKAYRDTIKILQLGKSAVLKCLLDIHKIFQENDPAYILNDLYISDYCVWIQKVKSKKLAALAEALKEVSLTKAQLGLELEELEAAALLVQEEETALKAAHSVSGQQTLCSSSEASDSEDSDSSVSSGNEDSGSDSEQDELKDSPSETVSSLQGPFLEESSAFLIVDGGVRRNTAIQESDASQGKPLASSWPLGVSGPLIEELGEQLKTTVQVSEPKGTTAVNRSNIQERDGCQTPNN

SEQ ID NO: 78825 - protein, 50 aa, Homo sapiens
  Payload ID: 15704
  Gene Symbol: SHQ1
  Gene Name: SHQ1, H/ACA ribonucleoprotein assembly factor
  ENSP ID: ENSP00000402447
MLTPAFDLSQDPDFLTIAIRVPYARVSEFDVYFEGSDFKFYAKPYFLRTS

SEQ ID NO: 78826 - protein, 549 aa, Homo sapiens
  Payload ID: 15704
  Gene Symbol: SHQ1
  Gene Name: SHQ1, H/ACA ribonucleoprotein assembly factor
  Uniprot ID: Q6PI26
  ENSP ID: ENSP00000417452
MNKTWSLSLKNGDCSCGGPILTLPGRIVENGSEQGSYDADKGIFTIRLPKETPGQHFEGLNMLTALLAPRKSRTAKPLVEEIGASEIPEEVVDDEEFDWEIEQTPCEEVSESALNPQCHYGFGNLRSGVLQRLQDELSDVIDIKDPDFTPAAERRQKRLAAELAKFDPDHYLADFFEDEAIEQILKYNPWWTDKYSKMMAFLEKSQEQENHATLVSFSEEEKYQLRKFVNKSYLLDKRACRQVCYSLIDILLAYCYETRVTEGEKNVESAWNIRKLSPTLCWFETWTNVHDIMVSFGRRVLCYPLYRHFKLVMKAYRDTIKILQLGKSAVLKCLLDIHKIFQENDPAYILNDLYISDYCVWIQKVKSKKLAALAEALKEVSLTKAQLGLELEELEAAALLVQEEETALKAAHSVSGQQTLCSSSEASDSEDSDSSVSSGNEDSGSDSEQDELKDSPSETVSSLQGPFLEESSAFLIVDGGVRRNTAIQESDASQGKPLASSWPLGVSGPLIEELGEQLKTTVQVSEPKGTTAVNRSNIQERDGCQTPNN

SEQ ID NO: 78827 - protein, 63 aa, Homo sapiens
  Payload ID: 15704
  Gene Symbol: SHQ1
  Gene Name: SHQ1, H/ACA ribonucleoprotein assembly factor
  ENSP ID: ENSP00000417739
MLTPAFDLSQDPDFLTIAIRVPYARVSEFDVYFEGSDFKFYAKPYFLRNFYHSPAQRNPWPAF

SEQ ID NO: 78828 - protein, 110 aa, Homo sapiens
  Payload ID: 15704
  Gene Symbol: SHQ1
  Gene Name: SHQ1, H/ACA ribonucleoprotein assembly factor
  ENSP ID: ENSP00000418398
MLTALLAPRKSRTAKPLVEEIGASEIPEEVVDDEEFDWEIEQTPCEEVSESALNPQCHYGFGNLRSGVLQRLQDELSDVIDIKDPDFTPAAERRQKRLAAELAKFDPDHY

SEQ ID NO: 78829 - protein, 847 aa, Homo sapiens
  Payload ID: 15705
  Gene Symbol: SHROOM1
  Gene Name: shroom family member 1
  Uniprot ID: Q2M3G4
  ENSP ID: ENSP00000324245
MEALGPGGDRASPASSTSSLDLWHLSMRADSAYSSFSAASGGPEPRTQSPGTDLLPYLDWDYVRVVWGGPGPAPPDAALCTSPRPRPAVAARSGPQPTEVPGTPGPLNRQATPLLYALAAEAEAAAQAAEPPSPPASRAAYRQRLQGAQRRVLRETSFQRKELRMSLPARLRPTVPARPPATHPRSASLSHPGGEGEPARSRAPAPGTAGRGPLANQQRKWCFSEPGKLDRVGRGGGPARECLGEACSSSGLPGPEPLEFQHPALAKFEDHEVGWLPETQPQGSMNLDSGSLKLGDAFRPASRSRSASGEVLGSWGGSGGTIPIVQAVPQGAETPRPLFQTKLSRFLPQKEAAVMYPAELPQSSPADSEQRVSETCIVPAWLPSLPDEVFLEEAPLVRMRSPPDPHASQGPPASVHASDQPYGTGLGQRTGQVTVPTEYPLHECPGTAGADDCWQGVNGSVGISRPTSHTPTGTANDNIPTIDPTGLTTNPPTAAESDLLKPVPADALGLSGNDTPGPSHNTALARGTGQPGSRPTWPSQCLEELVQELARLDPSLCDPLASQPSPEPPLGLLDGLIPLAEVRAAMRPACGEAGEEAASTFEPGSYQFSFTQLLPAPREETRLENPATHPVLDQPCGQGLPAPNNSIQGKKVELAARLQKMLQDLHTEQERLQGEAQAWARRQAALEAAVRQACAPQELERFSRFMADLERVLGLLLLLGSRLARVRRALARAASDSDPDEQRLRLLQRQEEDAKELKEHVARRERAVREVLVRALPVEELRVYCALLAGKAAVLAQQRNLDERIRLLQDQLDAIRDDLGHHAPSPSPARPPGTCPPVQPPFPLLLT

SEQ ID NO: 78830 - protein, 783 aa, Homo sapiens
  Payload ID: 15705
  Gene Symbol: SHROOM1
  Gene Name: shroom family member 1
  ENSP ID: ENSP00000367947
MEALGPGGDRASPASSTSSLDLWHLSMRADSAYSSFSAASGGPEPRTQSPGTDLLPYLDWDYVRVVWGGPGPAPPDAALCTSPRPRPAVAARSGPQPTEVPGTPGPLNRQATPLLYALAAEAEAAAQAAEPPSPPASRAAYRQRLQGAQRRVLRETSFQRKELRMSLPARLRPTVPARPPATHPRSASLSHPGGEGEPARSRAPAPGTAGRGPLANQQRKWCFSEPGKLDRVGRGGGPARECLGEACSSSGLPGPEPLEFQHPALAKFEDHEVGWLPETQPQGSMNLDSGSLKLGDAFRPASRSRSASGEVLGSWGGSGGTIPIVQAVPQGAETPRPLFQTKLSSVHASDQPYGTGLGQRTGQVTVPTEYPLHECPGTAGADDCWQGVNGSVGISRPTSHTPTGTANDNIPTIDPTGLTTNPPTAAESDLLKPVPADALGLSGNDTPGPSHNTALARGTGQPGSRPTWPSQCLEELVQELARLDPSLCDPLASQPSPEPPLGLLDGLIPLAEVRAAMRPACGEAGEEAASTFEPGSYQFSFTQLLPAPREETRLENPATHPVLDQPCGQGLPAPNNSIQGKKVELAARLQKMLQDLHTEQERLQGEAQAWARRQAALEAAVRQACAPQELERFSRFMADLERVLGLLLLLGSRLARVRRALARAASDSDPDEQASLLQRLRLLQRQEEDAKELKEHVARRERAVREVLVRALPVEELRVYCALLAGKAAVLAQQRNLDERIRLLQDQLDAIRDDLGHHAPSPSPARPPGTCPPVQPPFPLLLT

SEQ ID NO: 78831 - protein, 852 aa, Homo sapiens
  Payload ID: 15705
  Gene Symbol: SHROOM1
  Gene Name: shroom family member 1
  Uniprot ID: Q2M3G4
  ENSP ID: ENSP00000367950
MEALGPGGDRASPASSTSSLDLWHLSMRADSAYSSFSAASGGPEPRTQSPGTDLLPYLDWDYVRVVWGGPGPAPPDAALCTSPRPRPAVAARSGPQPTEVPGTPGPLNRQATPLLYALAAEAEAAAQAAEPPSPPASRAAYRQRLQGAQRRVLRETSFQRKELRMSLPARLRPTVPARPPATHPRSASLSHPGGEGEPARSRAPAPGTAGRGPLANQQRKWCFSEPGKLDRVGRGGGPARECLGEACSSSGLPGPEPLEFQHPALAKFEDHEVGWLPETQPQGSMNLDSGSLKLGDAFRPASRSRSASGEVLGSWGGSGGTIPIVQAVPQGAETPRPLFQTKLSRFLPQKEAAVMYPAELPQSSPADSEQRVSETCIVPAWLPSLPDEVFLEEAPLVRMRSPPDPHASQGPPASVHASDQPYGTGLGQRTGQVTVPTEYPLHECPGTAGADDCWQGVNGSVGISRPTSHTPTGTANDNIPTIDPTGLTTNPPTAAESDLLKPVPADALGLSGNDTPGPSHNTALARGTGQPGSRPTWPSQCLEELVQELARLDPSLCDPLASQPSPEPPLGLLDGLIPLAEVRAAMRPACGEAGEEAASTFEPGSYQFSFTQLLPAPREETRLENPATHPVLDQPCGQGLPAPNNSIQGKKVELAARLQKMLQDLHTEQERLQGEAQAWARRQAALEAAVRQACAPQELERFSRFMADLERVLGLLLLLGSRLARVRRALARAASDSDPDEQASLLQRLRLLQRQEEDAKELKEHVARRERAVREVLVRALPVEELRVYCALLAGKAAVLAQQRNLDERIRLLQDQLDAIRDDLGHHAPSPSPARPPGTCPPVQPPFPLLLT

SEQ ID NO: 78832 - protein, 324 aa, Homo sapiens
  Payload ID: 15705
  Gene Symbol: SHROOM1
  Gene Name: shroom family member 1
  ENSP ID: ENSP00000388049
MEALGPGGDRASPASSTSSLDLWHLSMRADSAYSSFSAASGGPEPRTQSPGTDLLPYLDWDYVRVVWGGPGPAPPDAALCTSPRPRPAVAARSGPQPTEVPGTPGPLNRQATPLLYALAAEAEAAAQAAEPPSPPASRAAYRQRLQGAQRRVLRETSFQRKELRMSLPARLRPTVPARPPATHPRSASLSHPGGEGEPARSRAPAPGTAGRGPLANQQRKWCFSEPGKLDRVGRGGGPARECLGEACSSSGLPGPEPLEFQHPALAKFEDHEVGWLPETQPQGSMNLDSGSLKLGDAFRPASRSRSASGEVLGSWGGSGGTIPI

SEQ ID NO: 78833 - protein, 852 aa, Homo sapiens; identical to SEQ ID NO: 78831
  Payload ID: 15705
  Gene Symbol: SHROOM1
  Gene Name: shroom family member 1
  Uniprot ID: Q2M3G4
  ENSP ID: ENSP00000478436

SEQ ID NO: 78834 - protein, 1616 aa, Homo sapiens
  Payload ID: 15706
  Gene Symbol: SHROOM2
  Gene Name: shroom family member 2
  Uniprot ID: Q13796
  ENSP ID: ENSP00000370299
MEGAEPRARPERLAEAETRAADGGRLVEVQLSGGAPWGFTLKGGREHGEPLVITKIEEGSKAAAVDKLLAGDEIVGINDIGLSGFRQEAICLVKGSHKTLKLVVKRRSELGWRPHSWHATKFSDSHPELAASPFTSTSGCPSWSGRHHASSSSHDLSSSWEQTNLQRTLDHFSSLGSVDSLDHPSSRLSVAKSNSSIDHLGSHSKRDSAYGSFSTSSSTPDHTLSKADTSSAENILYTVGLWEAPRQGGRQAQAAGDPQGSEEKLSCFPPRVPGDSGKGPRPEYNAEPKLAAPGRSNFGPVWYVPDKKKAPSSPPPPPPPLRSDSFAATKSHEKAQGPVFSEAAAAQHFTALAQAQPRGDRRPELTDRPWRSAHPGSLGKGSGGPGCPQEAHADGSWPPSKDGASSRLQASLSSSDVRFPQSPHSGRHPPLYSDHSPLCADSLGQEPGAASFQNDSPPQVRGLSSCDQKLGSGWQGPRPCVQGDLQAAQLWAGCWPSDTALGALESLPPPTVGQSPRHHLPQPEGPPDARETGRCYPLDKGAEGCSAGAQEPPRASRAEKASQRLAASITWADGESSRICPQETPLLHSLTQEGKRRPESSPEDSATRPPPFDAHVGKPTRRSDRFATTLRNEIQMHRAKLQKSRSTVALTAAGEAEDGTGRWRAGLGGGTQEGPLAGTYKDHLKEAQARVLRATSFKRRDLDPNPGDLYPESLEHRMGDPDTVPHFWEAGLAQPPSSTSGGPHPPRIGGRRRFTAEQKLKSYSEPEKMNEVGLTRGYSPHQHPRTSEDTVGTFADRWKFFEETSKPVPQRPAQKQALHGIPRDKPERPRTAGRTCEGTEPWSRTTSLGDSLNAHSAAEKAGTSDLPRRLGTFAEYQASWKEQRKPLEARSSGRCHSADDILDVSLDPQERPQHVHGRSRSSPSTDHYKQEASVELRRQAGDPGEPREELPSAVRAEEGQSTPRQADAQCREGSPGSQQHPPSQKAPNPPTFSELSHCRGAPELPREGRGRAGTLPRDYRYSEESTPADLGPRAQSPGSPLHARGQDSWPVSSALLSKRPAPQRPPPPKREPRRYRATDGAPADAPVGVLGRPFPTPSPASLDVYVARLSLSHSPSVFSSAQPQDTPKATVCERGSQHVSGDASRPLPEALLPPKQQHLRLQTATMETSRSPSPQFAPQKLTDKPPLLIQDEDSTRIERVMDNNTTVKMVPIKIVHSESQPEKESRQSLACPAEPPALPHGLEKDQIKTLSTSEQFYSRFCLYTRQGAEPEAPHRAQPAEPQPLGTQVPPEKDRCTSPPGLSYMKAKEKTVEDLKSEELAREIVGKDKSLADILDPSVKIKTTMDLMEGIFPKDEHLLEEAQQRRKLLPKIPSPRSTEERKEEPSVPAAVSLATNSTYYSTSAPKAELLIKMKDLQEQQEHEEDSGSDLDHDLSVKKQELIESISRKLQVLREARESLLEDVQANTVLGAEVEAIVKGVCKPSEFDKFRMFIGDLDKVVNLLLSLSGRLARVENALNNLDDGASPGDRQSLLEKQRVLIQQHEDAKELKENLDRRERIVFDILANYLSEESLADYEHFVKMKSALIIEQRELEDKIHLGEEQLKCLLDSLQPERGK

SEQ ID NO: 78835 - protein, 375 aa, Homo sapiens
  Payload ID: 15706
  Gene Symbol: SHROOM2
  Gene Name: shroom family member 2
  ENSP ID: ENSP00000406724
METSRSPSPQFAPQKLTDKPPLLIQDEDSTRIERVMDNNTTVKMVPIKIVHSESQPEKESRQSLACPAEPPALPHGLEKDQIKTLSTSEQFYSRFCLYTRQGAEPEAPHRAQPAEPQPLGTQVPPEKDRCTSPPGLSYMKAKEKTVEDLKSEELAREIVGKDKSLADILDPSVKIKTTMDLMEGIFPKDEHLLEEAQQRRKLLPKIPSPRSTEERKEEPSVPAAVSLATNSTYYSTSAPKAELLIKMKDLQEQQEHEEDSGSDLDHDLSVKKQELIESISRKLQVLREARESLLEDVQANTVLGAEVEAIVKGVCKPSEFDKFRMFIGDLDKVVNLLLSLSGRLARVENALNNLDDGASPGDRQSLLEKQRVLIQ

SEQ ID NO: 78836 - protein, 450 aa, Homo sapiens
  Payload ID: 15706
  Gene Symbol: SHROOM2
  Gene Name: shroom family member 2
  ENSP ID: ENSP00000415229
METSRSPSPQFAPQKLTDKPPLLIQDEDSTRIERVMDNNTTVKMVPIKIVHSESQPEKESRQSLACPAEPPALPHGLEKDQIKTLSTSEQFYSRFCLYTRQGAEPEAPHRAQPAEPQPLGTQVPPEKDRCTSPPGLSYMKAKEKTVEDLKSEELAREIVGKDKSLADILDPSVKIKTTMDLMEGIFPKDEHLLEEAQQRRKLLPKIPSPRSTEERKEEPSVPAAVSLATNSTYYSTSAPKAELLIKMKDLQEQQEHEEDSGSDLDHDLSVKKELIESISRKLQVLREARESLLEDVQANTVLGAEVEAIVKGVCKPSEFDKFRMFIGDLDKVVNLLLSLSGRLARVENALNNLDDGASPGDRQSLLEKQRVLIQQHEDAKELKENLDRRERIVFDILANYLSEESLADYEHFVKMKSALIIEQRELEDKIHLGEEQLKCLLDSLQPERGK

SEQ ID NO: 78837 - protein, 1996 aa, Homo sapiens
  Payload ID: 15707
  Gene Symbol: SHROOM3
  Gene Name: shroom family member 3
  Uniprot ID: Q8TF72
  ENSP ID: ENSP00000296043
MMRTTEDFHKPSATLNSNTATKGRYIYLEAFLEGGAPWGFTLKGGLEHGEPLIISKVEEGGKADTLSSKLQAGDEVVHINEVTLSSSRKEAVSLVKGSYKTLRLVVRRDVCTDPGHADTGASNFVSPEHLTSGPQHRKAAWSGGVKLRLKHRRSEPAGRPHSWHTTKSGEKQPDASMMQISQGMIGPPWHQSYHSSSSTSDLSNYDHAYLRRSPDQCSSQGSMESLEPSGAYPPCHLSPAKSTGSIDQLSHFHNKRDSAYSSFSTSSSILEYPHPGISGRERSGSMDNTSARGGLLEGMRQADIRYVKTVYDTRRGVSAEYEVNSSALLLQGREARASANGQGYDKWSNIPRGKGVPPPSWSQQCPSSLETATDNLPPKVGAPLPPARSDSYAAFRHRERPSSWSSLDQKRLCRPQANSLGSLKSPFIEEQLHTVLEKSPENSPPVKPKHNYTQKAQPGQPLLPTSIYPVPSLEPHFAQVPQPSVSSNGMLYPALAKESGYIAPQGACNKMATIDENGNQNGSGRPGFAFCQPLEHDLLSPVEKKPEATAKYVPSKVHFCSVPENEEDASLKRHLTPPQGNSPHSNERKSTHSNKPSSHPHSLKCPQAQAWQAGEDKRSSRLSEPWEGDFQEDHNANLWRRLEREGLGQSLSGNFGKTKSAFSSLQNIPESLRRHSSLELGRGTQEGYPGGRPTCAVNTKAEDPGRKAAPDLGSHLDRQVSYPRPEGRTGASASFNSTDPSPEEPPAPSHPHTSSLGRRGPGPGSASALQGFQYGKPHCSVLEKVSKFEQREQGSQRPSVGGSGFGHNYRPHRTVSTSSTSGNDFEETKAHIRFSESAEPLGNGEQHFKNGELKLEEASRQPCGQQLSGGASDSGRGPQRPDARLLRSQSTFQLSSEPEREPEWRDRPGSPESPLLDAPFSRAYRNSIKDAQSRVLGATSFRRRDLELGAPVASRSWRPRPSSAHVGLRSPEASASASPHTPRERHSVTPAEGDLARPVPPAARRGARRRLTPEQKKRSYSEPEKMNEVGIVEEAEPAPLGPQRNGMRFPESSVADRRRLFERDGKACSTLSLSGPELKQFQQSALADYIQRKTGKRPTSAAGCSLQEPGPLRERAQSAYLQPGPAALEGSGLASASSLSSLREPSLQPRREATLLPATVAETQQAPRDRSSSFAGGRRLGERRRGDLLSGANGGTRGTQRGDETPREPSSWGARAGKSMSAEDLLERSDVLAGPVHVRSRSSPATADKRQDVLLGQDSGFGLVKDPCYLAGPGSRSLSCSERGQEEMLPLFHHLTPRWGGSGCKAIGDSSVPSECPGTLDHQRQASRTPCPRPPLAGTQGLVTDTRAAPLTPIGTPLPSAIPSGYCSQDGQTGRQPLPPYTPAMMHRSNGHTLTQPPGPRGCEGDGPEHGVEEGTRKRVSLPQWPPPSRAKWAHAAREDSLPEESSAPDFANLKHYQKQQSLPSLCSTSDPDTPLGAPSTPGRISLRISESVLRDSPPPHEDYEDEVFVRDPHPKATSSPTFEPLPPPPPPPPSQETPVYSMDDFPPPPPHTVCEAQLDSEDPEGPRPSFNKLSKVTIARERHMPGAAHVVGSQTLASRLQTSIKGSEAESTPPSFMSVHAQLAGSLGGQPAPIQTQSLSHDPVSGTQGLEKKVSPDPQKSSEDIRTEALAKEIVHQDKSLADILDPDSRLKTTMDLMEGLFPRDVNLLKENSVKRKAIQRTVSSSGCEGKRNEDKEAVSMLVNCPAYYSVSAPKAELLNKIKEMPAEVNEEEEQADVNEKKAELIGSLTHKLETLQEAKGSLLTDIKLNNALGEEVEALISELCKPNEFDKYRMFIGDLDKVVNLLLSLSGRLARVENVLSGLGEDASNEERSSLYEKRKILAGQHEDARELKENLDRRERVVLGILANYLSEEQLQDYQHFVKMKSTLLIEQRKLDDKIKLGQEQVKCLLESLPSDFIPKAGALALPPNLTSEPIPAGGCTFSGIFPTLTSPL

SEQ ID NO: 78838 - protein, 1493 aa, Homo sapiens
  Payload ID: 15708
  Gene Symbol: SHROOM4
  Gene Name: shroom family member 4
  Uniprot ID: Q9ULL8
  ENSP ID: ENSP00000289292
MENRPGSFQYVPVQLQGGAPWGFTLKGGLEHCEPLTVSKIEDGGKAALSQKMRTGDELVNINGTPLYGSRQEALILIKGSFRILKLIVRRRNAPVSRPHSWHVAKLLEGCPEAATTMHFPSEAFSLSWHSGCNTSDVCVQWCPLSRHCSTEKSSSIGSMESLEQPGQATYESHLLPIDQNMYPNQRDSAYSSFSASSNASDCALSLRPEEPASTDCIMQGPGPTKAPSGRPNVAETSGGSRRTNGGHLTPSSQMSSRPQEGYQSGPAKAVRGPPQPPVRRDSLQASRAQLLNGEQRRASEPVVPLPQKEKLSLEPVLPARNPNRFCCLSGHDQVTSEGHQNCEFSQPPESSQQGSEHLLMQASTKAVGSPKACDRASSVDSNPLNEASAELAKASFGRPPHLIGPTGHRHSAPEQLLASHLQHVHLDTRGSKGMELPPVQDGHQWTLSPLHSSHKGKKSPCPPTGGTHDQSSKERKTRQVDDRSLVLGHQSQSSPPHGEADGHPSEKGFLDPNRTSRAASELANQQPSASGSLVQQATDCSSTTKAASGTEAGEEGDSEPKECSRMGGRRSGGTRGRSIQNRRKSERFATNLRNEIQRRKAQLQKSKGPLSQLCDTKEPVEETQEPPESPPLTASNTSLLSSCKKPPSPRDKLFNKSMMLRARSSECLSQAPESHESRTGLEGRISPGQRPGQSSLGLNTWWKAPDPSSSDPEKAHAHCGVRGGHWRWSPEHNSQPLVAAAMEGPSNPGDNKELKASTAQAGEDAILLPFADRRKFFEESSKSLSTSHLPGLTTHSNKTFTQRPKPIDQNFQPMSSSCRELRRHPMDQSYHSADQPYHATDQSYHSMSPLQSETPTYSECFASKGLENSMCCKPLHCGDFDYHRTCSYSCSVQGALVHDPCIYCSGEICPALLKRNMMPNCYNCRCHHHQCIRCSVCYHNPQHSALEDSSLAPGNTWKPRKLTVQEFPGDKWNPITGNRKTSQSGREMAHSKTSFSWATPFHPCLENPALDLSSYRAISSLDLLGDFKHALKKSEETSVYEEGSSLASMPHPLRSRAFSESHISLAPQSTRAWGQHRRELFSKGDETQSDLLGARKKAFPPPRPPPPNWEKYRLFRAAQQQKQQQQQQKQQEEEEEEEEEEEEEEEEEEEEAEEEEEELPPQYFSSETSGSCALNPEEVLEQPQPLSFGHLEGSRQGSQSVPAEQESFALHSSDFLPPIRGHLGSQPEQAQPPCYYGIGGLWRTSGQEATESAKQEFQHFSPPSGAPGIPTSYSAYYNISVAKAELLNKLKDQPEMAEIGLGEEEVDHELAQKKIQLIESISRKLSVLREAQRGLLEDINANSALGEEVEANLKAVCKSNEFEKYHLFVGDLDKVVNLLLSLSGRLARVENALNSIDSEANQEKLVLIEKKQQLTGQLADAKELKEHVDRREKLVFGMVSRYLPQDQLQDYQHFVKMKSALIIEQRELEEKIKLGEEQLKCLRESLLLGPSNF

SEQ ID NO: 78839 - protein, 1493 aa, Homo sapiens; identical to SEQ ID NO: 78838
  Payload ID: 15708
  Gene Symbol: SHROOM4
  Gene Name: shroom family member 4
  Uniprot ID: Q9ULL8
  ENSP ID: ENSP00000365188

SEQ ID NO: 78840 - protein, 1377 aa, Homo sapiens
  Payload ID: 15708
  Gene Symbol: SHROOM4
  Gene Name: shroom family member 4
  Uniprot ID: Q9ULL8
  ENSP ID: ENSP00000421450
MHFPSEAFSLSWHSGCNTSDVCVQWCPLSRHCSTEKSSSIGSMESLEQPGQATYESHLLPIDQNMYPNQRDSAYSSFSASSNASDCALSLRPEEPASTDCIMQGPGPTKAPSGRPNVAETSGGSRRTNGGHLTPSSQMSSRPQEGYQSGPAKAVRGPPQPPVRRDSLQASRAQLLNGEQRRASEPVVPLPQKEKLSLEPVLPARNPNRFCCLSGHDQVTSEGHQNCEFSQPPESSQQGSEHLLMQASTKAVGSPKACDRASSVDSNPLNEASAELAKASFGRPPHLIGPTGHRHSAPEQLLASHLQHVHLDTRGSKGMELPPVQDGHQWTLSPLHSSHKGKKSPCPPTGGTHDQSSKERKTRQVDDRSLVLGHQSQSSPPHGEADGHPSEKGFLDPNRTSRAASELANQQPSASGSLVQQATDCSSTTKAASGTEAGEEGDSEPKECSRMGGRRSGGTRGRSIQNRRKSERFATNLRNEIQRRKAQLQKSKGPLSQLCDTKEPVEETQEPPESPPLTASNTSLLSSCKKPPSPRDKLFNKSMMLRARSSECLSQAPESHESRTGLEGRISPGQRPGQSSLGLNTWWKAPDPSSSDPEKAHAHCGVRGGHWRWSPEHNSQPLVAAAMEGPSNPGDNKELKASTAQAGEDAILLPFADRRKFFEESSKSLSTSHLPGLTTHSNKTFTQRPKPIDQNFQPMSSSCRELRRHPMDQSYHSADQPYHATDQSYHSMSPLQSETPTYSECFASKGLENSMCCKPLHCGDFDYHRTCSYSCSVQGALVHDPCIYCSGEICPALLKRNMMPNCYNCRCHHHQCIRCSVCYHNPQHSALEDSSLAPGNTWKPRKLTVQEFPGDKWNPITGNRKTSQSGREMAHSKTSFSWATPFHPCLENPALDLSSYRAISSLDLLGDFKHALKKSEETSVYEEGSSLASMPHPLRSRAFSESHISLAPQSTRAWGQHRRELFSKGDETQSDLLGARKKAFPPPRPPPPNWEKYRLFRAAQQQKQQQQQQKQQEEEEEEEEEEEEEEEEEEEEAEEEEEELPPQYFSSETSGSCALNPEEVLEQPQPLSFGHLEGSRQGSQSVPAEQESFALHSSDFLPPIRGHLGSQPEQAQPPCYYGIGGLWRTSGQEATESAKQEFQHFSPPSGAPGIPTSYSAYYNISVAKAELLNKLKDQPEMAEIGLGEEEVDHELAQKKIQLIESISRKLSVLREAQRGLLEDINANSALGEEVEANLKAVCKSNEFEKYHLFVGDLDKVVNLLLSLSGRLARVENALNSIDSEANQEKLVLIEKKQQLTGQLADAKELKEHVDRREKLVFGMVSRYLPQDQLQDYQHFVKMKSALIIEQRELEEKIKLGEEQLKCLRESLLLGPSNF

SEQ ID NO: 78841 - protein, 561 aa, Homo sapiens
  Payload ID: 15709
  Gene Symbol: SGOL1
  Gene Name: shugoshin-like 1 (S. pombe)
  Uniprot ID: Q5FBB7
  ENSP ID: ENSP00000263753
MAKERCLKKSFQDSLEDIKKRMKEKRNKNLAEIGKRRSFIAAPCQIITNTSTLLKNYQDNNKMLVLALENEKSKVKEAQDIILQLRKECYYLTCQLYALKGKLTSQQTVEPAQNQEICSSGMDPNSDDSSRNLFVKDLPQIPLEETELPGQGESFQIEDQIPTIPQDTLGVDFDSGEAKSTDNVLPRTVSVRSSLKKHCNSICQFDSLDDFETSHLAGKSFEFERVGFLDPLVNMHIPENVQHNACQWSKDQVNLSPKLIQPGTFTKTKEDILESKSEQTKSKQRDTQERKREEKRKANRRKSKRMSKYKENKSENKKTVPQKKMHKSVSSNDAYNFNLEEGVHLTPFRQKVSNDSNREENNESEVSLCESSGSGDDSDDLYLPTCKYIQNPTSNSDRPVTRPLAKRALKYTDEKETEGSKPTKTPTTTPPETQQSPHLSLKDITNVSLYPVVKIRRLSLSPKKNKASPAVALPKRRCTASVNYKEPTLASKLRRGDPFTDLCFLNSPIFKQKKDLRRSKKRALEVSPAKEAIFILYYVREFVSRFPDCRKCKLETHICLR

SEQ ID NO: 78842 - protein, 292 aa, Homo sapiens
  Payload ID: 15709
  Gene Symbol: SGOL1
  Gene Name: shugoshin-like 1 (S. pombe)
  Uniprot ID: Q5FBB7
  ENSP ID: ENSP00000306581
MAKERCLKKSFQDSLEDIKKRMKEKRNKNLAEIGKRRSFIAAPCQIITNTSTLLKNYQDNNKMLVLALENEKSKVKEAQDIILQLRKECYYLTCQLYALKGKLTSQQTVEPAQNQEICSSGMDPNSDDSSRNLFVKDLPQIPLEETELPGQGESFQIEATPPETQQSPHLSLKDITNVSLYPVVKIRRLSLSPKKNKASPAVALPKRRCTASVNYKEPTLASKLRRGDPFTDLCFLNSPIFKQKKDLRRSKKRALEVSPAKEAIFILYYVREFVSRFPDCRKCKLETHICLR

SEQ ID NO: 78843 - protein, 275 aa, Homo sapiens
  Payload ID: 15709
  Gene Symbol: SGOL1
  Gene Name: shugoshin-like 1 (S. pombe)
  Uniprot ID: Q5FBB7
  ENSP ID: ENSP00000389034
MAKERCLKKSFQDSLEDIKKRMKEKRNKNLAEIGKRRSFIAAPCQIITNTSTLLKNYQDNNKMLVLALENEKSKVKEAQDIILQLRKECYYLTCQLYALKGKLTSQQTVEPAQNQEICSSGMDPNSDDSSRNLFVKDLPQIPLEETELPGQGESFQIEDQIPTIPQDTLGVDFDSATPPETQQSPHLSLKDITNVSLYPVVKIRRLSLSPKKNKASPAVALPKRRCTASVNYKEPTLASKLRRGDPFTDLCFLNSPIFKQKKDLRRSKKSMKQIQ

SEQ ID NO: 78844 - protein, 275 aa, Homo sapiens; identical to SEQ ID NO: 78843
  Payload ID: 15709
  Gene Symbol: SGOL1
  Gene Name: shugoshin-like 1 (S. pombe)
  Uniprot ID: Q5FBB7
  ENSP ID: ENSP00000394613

SEQ ID NO: 78845 - protein, 309 aa, Homo sapiens
  Payload ID: 15709
  Gene Symbol: SGOL1
  Gene Name: shugoshin-like 1 (S. pombe)
  Uniprot ID: Q5FBB7
  ENSP ID: ENSP00000394625
MAKERCLKKSFQDSLEDIKKRMKEKRNKNLAEIGKRRSFIAAPCQIITNTSTLLKNYQDNNKMLVLALENEKSKVKEAQDIILQLRKECYYLTCQLYALKGKLTSQQTVEPAQNQEICSSGMDPNSDDSSRNLFVKDLPQIPLEETELPGQGESFQIEDQIPTIPQDTLGVDFDSATPPETQQSPHLSLKDITNVSLYPVVKIRRLSLSPKKNKASPAVALPKRRCTASVNYKEPTLASKLRRGDPFTDLCFLNSPIFKQKKDLRRSKKRALEVSPAKEAIFILYYVREFVSRFPDCRKCKLETHICLR

SEQ ID NO: 78846 - protein, 258 aa, Homo sapiens
  Payload ID: 15709
  Gene Symbol: SGOL1
  Gene Name: shugoshin-like 1 (S. pombe)
  Uniprot ID: Q5FBB7
  ENSP ID: ENSP00000394957
MAKERCLKKSFQDSLEDIKKRMKEKRNKNLAEIGKRRSFIAAPCQIITNTSTLLKNYQDNNKMLVLALENEKSKVKEAQDIILQLRKECYYLTCQLYALKGKLTSQQTVEPAQNQEICSSGMDPNSDDSSRNLFVKDLPQIPLEETELPGQGESFQIEATPPETQQSPHLSLKDITNVSLYPVVKIRRLSLSPKKNKASPAVALPKRRCTASVNYKEPTLASKLRRGDPFTDLCFLNSPIFKQKKDLRRSKKSMKQIQ

SEQ ID NO: 78847 - protein, 84 aa, Homo sapiens
  Payload ID: 15709
  Gene Symbol: SGOL1
  Gene Name: shugoshin-like 1 (S. pombe)
  ENSP ID: ENSP00000397672
MAKERCLKKSFQDSLEDIKKRMKEKRNKNLAEIGKRRSFIAAPCQIITNTSTLLKNYQDNNKITRKYVPLEWTPIVMTAPEIYL

SEQ ID NO: 78848 - protein, 527 aa, Homo sapiens
  Payload ID: 15709
  Gene Symbol: SGOL1
  Gene Name: shugoshin-like 1 (S. pombe)
  Uniprot ID: Q5FBB7
  ENSP ID: ENSP00000410458
MAKERCLKKSFQDSLEDIKKRMKEKRNKNLAEIGKRRSFIAAPCQIITNTSTLLKNYQDNNKMLVLALENEKSKVKEAQDIILQLRKECYYLTCQLYALKGKLTSQQTVEPAQNQEICSSGMDPNSDDSSRNLFVKDLPQIPLEETELPGQGESFQIEDQIPTIPQDTLGVDFDSGEAKSTDNVLPRTVSVRSSLKKHCNSICQFDSLDDFETSHLAGKSFEFERVGFLDPLVNMHIPENVQHNACQWSKDQVNLSPKLIQPGTFTKTKEDILESKSEQTKSKQRDTQERKREEKRKANRRKSKRMSKYKENKSENKKTVPQKKMHKSVSSNDAYNFNLEEGVHLTPFRQKVSNDSNREENNESEVSLCESSGSGDDSDDLYLPTCKYIQNPTSNSDRPVTRPLAKRALKYTDEKETEGSKPTKTPTTTPPETQQSPHLSLKDITNVSLYPVVKIRRLSLSPKKNKASPAVALPKRRCTASVNYKEPTLASKLRRGDPFTDLCFLNSPIFKQKKDLRRSKKSMKQIQ

SEQ ID NO: 78849 - protein, 292 aa, Homo sapiens; identical to SEQ ID NO: 78842
  Payload ID: 15709
  Gene Symbol: SGOL1
  Gene Name: shugoshin-like 1 (S. pombe)
  Uniprot ID: Q5FBB7
  ENSP ID: ENSP00000411200

SEQ ID NO: 78850 - protein, 215 aa, Homo sapiens
  Payload ID: 15709
  Gene Symbol: SGOL1
  Gene Name: shugoshin-like 1 (S. pombe)
  Uniprot ID: Q5FBB7
  ENSP ID: ENSP00000413070
MAKERCLKKSFQDSLEDIKKRMKEKRNKNLAEIGKRRSFIAAPCQIITNTSTLLKNYQDNNKMLVLALENEKSKVKEAQDIILQLRKECYYLTCQLYALKGKLTSQQTVEPAQNQEICSSGMDPNSDDSSRNLFVKDLPQIPLEETELPGQGESFQIEDQIPTIPQDTLGVDFDSGALEVSPAKEAIFILYYVREFVSRFPDCRKCKLETHICLR

SEQ ID NO: 78851 - protein, 561 aa, Homo sapiens; identical to SEQ ID NO: 78841
  Payload ID: 15709
  Gene Symbol: SGOL1
  Gene Name: shugoshin-like 1 (S. pombe)
  Uniprot ID: Q5FBB7
  ENSP ID: ENSP00000414129

SEQ ID NO: 78852 - protein, 309 aa, Homo sapiens; identical to SEQ ID NO: 78845
  Payload ID: 15709
  Gene Symbol: SGOL1
  Gene Name: shugoshin-like 1 (S. pombe)
  Uniprot ID: Q5FBB7
  ENSP ID: ENSP00000414960

SEQ ID NO: 78853 - protein, 1265 aa, Homo sapiens
  Payload ID: 15710
  Gene Symbol: SGOL2
  Gene Name: shugoshin-like 2 (S. pombe)
  Uniprot ID: Q562F6
  ENSP ID: ENSP00000350447
MECPVMETGSLFTSGIKRHLKDKRISKTTKLNVSLASKIKTKILNNSSIFKISLKHNNRALAQALSREKENSRRITTEKMLLQKEVEKLNFENTFLRLKLNNLNKKLIDIEALMNNNLITAIEMSSLSEFHQSSFLLSASKKKRISKQCKLMRLPFARVPLTSNDDEDEDKEKMQCDNNIKSKTLPDIPSSGSTTQPLSTQDNSEVLFLKENNQNVYGLDDSEHISSIVDVPPRESHSHSDQSSKTSLMSEMRNAQSIGRRWEKPSPSNVTERKKRGSSWESNNLSADTPCATVLDKQHISSPELNCNNEINGHTNETNTEMQRNKQDLPGLSSESAREPNAECMNQIEDNDDFQLQKTVYDADMDLTASEVSKIVTVSTGIKKKSNKKTNEHGMKTFRKVKDSSSEKKRERSKRQFKNSSDVDIGEKIENRTERSDVLDGKRGAEDPGFIFNNEQLAQMNEQLAQVNELKKMTLQTGFEQGDRENVLCNKKEKRITNEQEETYSLSQSSGKFHQESKFDKGQNSLTCNKSKASRQTFVIHKLEKDNLLPNQKDKVTIYENLDVTNEFHTANLSTKDNGNLCDYGTHNILDLKKYVTDIQPSEQNESNINKLRKKVNRKTEIISGMNHMYEDNDKDVVHGLKKGNFFFKTQEDKEPISENIEVSKELQIPALSTRDNENQCDYRTQNVLGLQKQITNMYPVQQNESKVNKKLRQKVNRKTEIISEVNHLDNDKSIEYTVKSHSLFLTQKDKEIIPGNLEDPSEFETPALSTKDSGNLYDSEIQNVLGVKHGHDMQPACQNDSKIGKKPRLNVCQKSEIIPETNQIYENDNKGVHDLEKDNFFSLTPKDKETISENLQVTNEFQTVDLLIKDNGNLCDYDTQNILELKKYVTDRKSAEQNESKINKLRNKVNWKTEIISEMNQIYEDNDKDAHVQESYTKDLDFKVNKSKQKLECQDIINKHYMEVNSNEKESCDQILDSYKVVKKRKKESSCKAKNILTKAKNKLASQLTESSQTSISLESDLKHITSEADSDPGNPVELCKTQKQSTTTLNKKDLPFVEEIKEGECQVKKVNKMTSKSKKRKTSIDPSPESHEVMERILDSVQGKSTVSEQADKENNLENEKMVKNKPDFYTKAFRSLSEIHSPNIQDSSFDSVREGLVPLSVSSGKNVIIKENFALECSPAFQVSDDEHEKMNKMKFKVNRRTQKSGIGDRPLQDLSNTSFVSNNTAESENKSEDLSSERTSRRRRCTPFYFKEPSLRDKMRR

SEQ ID NO: 78854 - protein, 247 aa, Homo sapiens
  Payload ID: 15710
  Gene Symbol: SGOL2
  Gene Name: shugoshin-like 2 (S. pombe)
  Uniprot ID: Q562F6
  ENSP ID: ENSP00000386249
MECPVMETGSLFTSGIKRHLKDKRISKTTKLNVSLASKIKTKILNNSSIFKISLKHNNRALAQALSREKENSRRITTEKMLLQKEVEKLNFENTFLRLKLNNLNKKLIDIEALMNNNLITAIEMSSLSEFHQSSFLLSASKKKRISKQCKLMRLPFARVPLTSNDDEDEDKEKMQCDNNIKSKTLPDIPSSGSTTQPLSTQDNSEVLFLKENNQNVYGLDDSEHISSIVDVPPRGEIVLKIHFEYLY

SEQ ID NO: 78855 - protein, 87 aa, Homo sapiens
  Payload ID: 15710
  Gene Symbol: SGOL2
  Gene Name: shugoshin-like 2 (S. pombe)
  ENSP ID: ENSP00000393325
MECPVMETGSLFTSGIKRHLKDKRISKTTKLNVSLASKIKTKILNNSSIFKISLKHNNRALAQALSREKENSRRITTEKMLLQKEVE

SEQ ID NO: 78856 - protein, 250 aa, Homo sapiens
  Payload ID: 15711
  Gene Symbol: SBDS
  Gene Name: Shwachman-Bodian-Diamond syndrome
  Uniprot ID: Q9Y3A5
  ENSP ID: ENSP00000246868
MSIFTPTNQIRLTNVAVVRMKRAGKRFEIACYKNKVVGWRSGVEKDLDEVLQTHSVFVNVSKGQVAKKEDLISAFGTDDQTEICKQILTKGEVQVSDKERHTQLEQMFRDIATIVADKCVNPETKRPYTVILIERAMKDIHYSVKTNKSTKQQALEVIKQLKEKMKIERAHMRLRFILPVNEGKKLKEKLKPLIKVIESEDYGQQLEIVCLIDPGCFREIDELIKKETKGKGSLEVLNLKDVEEGDEKFE

SEQ ID NO: 78857 - protein, 86 aa, Homo sapiens
  Payload ID: 15711
  Gene Symbol: SBDS
  Gene Name: Shwachman-Bodian-Diamond syndrome
  ENSP ID: ENSP00000394586
MSIFTPTNQIRLTNVAVVRMKRAGKRFEIACYKNKVVGWRSGVEKDLDEVLQTHSVFVNVSKGQVAKKEDLISAFGTDDQTEIYFD

SEQ ID NO: 78858 - protein, 250 aa, Homo sapiens [sequence omitted]

SEQ ID NO: 78859 - protein, 313 aa, Homo sapiens
  Payload ID: 15712
  Gene Symbol: SIAH1
  Gene Name: siah E3 ubiquitin protein ligase 1
  Uniprot ID: Q8IUQ4
  ENSP ID: ENSP00000349156
MTGKATPPSLYSWRGVLFTCLPAARTRKRKEMSRQTATALPTGTSKCPPSQRVPALTGTTASNNDLASLFECPVCFDYVLPPILQCQSGHLVCSNCRPKLTCCPTCRGPLGSIRNLAMEKVANSVLFPCKYASSGCEITLPHTEKADHEELCEFRPYSCPCPGASCKWQGSLDAVMPHLMHQHKSITTLQGEDIVFLATDINLPGAVDWVMMQSCFGFHFMLVLEKQEKYDGHQQFFAIVQLIGTRKQAENFAYRLELNGHRRRLTWEATPRSIHEGIATAIMNSDCLVFDTSIAQLFAENGNLGINVTISMC

SEQ ID NO: 78860 - protein, 282 aa, Homo sapiens
  Payload ID: 15712
  Gene Symbol: SIAH1
  Gene Name: siah E3 ubiquitin protein ligase 1
  Uniprot ID: Q8IUQ4
  ENSP ID: ENSP00000369343
MSRQTATALPTGTSKCPPSQRVPALTGTTASNNDLASLFECPVCFDYVLPPILQCQSGHLVCSNCRPKLTCCPTCRGPLGSIRNLAMEKVANSVLFPCKYASSGCEITLPHTEKADHEELCEFRPYSCPCPGASCKWQGSLDAVMPHLMHQHKSITTLQGEDIVFLATDINLPGAVDWVMMQSCFGFHFMLVLEKQEKYDGHQQFFAIVQLIGTRKQAENFAYRLELNGHRRRLTWEATPRSIHEGIATAIMNSDCLVFDTSIAQLFAENGNLGINVTISMC

SEQ ID NO: 78861 - protein, 282 aa, Homo sapiens; identical to SEQ ID NO: 78860
  Payload ID: 15712
  Gene Symbol: SIAH1
  Gene Name: siah E3 ubiquitin protein ligase 1
  Uniprot ID: Q8IUQ4
  ENSP ID: ENSP00000378214

SEQ ID NO: 78862 - protein, 282 aa, Homo sapiens; identical to SEQ ID NO: 78860
  Payload ID: 15712
  Gene Symbol: SIAH1
  Gene Name: siah E3 ubiquitin protein ligase 1
  Uniprot ID: Q8IUQ4
  ENSP ID: ENSP00000456421

SEQ ID NO: 78863 - protein, 98 aa, Homo sapiens
  Payload ID: 15712
  Gene Symbol: SIAH1
  Gene Name: siah E3 ubiquitin protein ligase 1
  ENSP ID: ENSP00000457415
MSRQTATALPTGTSKCPPSQRVPALTGTTASNNDLASLFECPVCFDYVLPPILQCQSGHLVCSNCRPKLTCCPTCRGPLGSIRNLAMEKVANSVLFPC

SEQ ID NO: 78864 - protein, 324 aa, Homo sapiens
  Payload ID: 15713
  Gene Symbol: SIAH2
  Gene Name: siah E3 ubiquitin protein ligase 2
  Uniprot ID: O43255
  ENSP ID: ENSP00000322457
MSRPSSTGPSANKPCSKQPPPQPQHTPSPAAPPAAATISAAGPGSSAVPAAAAVISGPGGGGGAGPVSPQHHELTSLFECPVCFDYVLPPILQCQAGHLVCNQCRQKLSCCPTCRGALTPSIRNLAMEKVASAVLFPCKYATTGCSLTLHHTEKPEHEDICEYRPYSCPCPGASCKWQGSLEAVMSHLMHAHKSITTLQGEDIVFLATDINLPGAVDWVMMQSCFGHHFMLVLEKQEKYEGHQQFFAIVLLIGTRKQAENFAYRLELNGNRRRLTWEATPRSIHDGVAAAIMNSDCLVFDTAIAHLFADNGNLGINVTISTCCP

SEQ ID NO: 78865 - protein, 83 aa, Homo sapiens
  Payload ID: 15713
  Gene Symbol: SIAH2
  Gene Name: siah E3 ubiquitin protein ligase 2
  ENSP ID: ENSP00000417619
MEKVASAVLFPCKYATTGCSLTLHHTEKPEHEDICEYRPYSCPCPGASCKWQGSLEAVMSHLMHAHKSITTLQGEDIVFLATD

SEQ ID NO: 78866 - protein, 269 aa, Homo sapiens
  Payload ID: 15714
  Gene Symbol: SIAH3
  Gene Name: siah E3 ubiquitin protein ligase family member 3
  Uniprot ID: Q8IW03
  ENSP ID: ENSP00000383256
MLFFTQCFGAVLDLIHLRFQHYKAKRVFSAAGQLVCVVNPTHNLKYVSSRRAVTQSAPEQGSFHPHHLSHHHCHHRHHHHLRHHAHPHHLHHQEAGLHANPVTPCLCMCPLFSCQWEGRLEVVVPHLRQIHRVDILQGAEIVFLATDMHLPAPADWIIMHSCLGHHFLLVLRKQERHEGHPQFFATMMLIGTPTQADCFTYRLELNRNHRRLKWEATPRSVLECVDSVITDGDCLVLNTSLAQLFSDNGSLAIGIAITATEVLPSEAEM

SEQ ID NO: 78867 - protein, 523 aa, Homo sapiens
  Payload ID: 15715
  Gene Symbol: SIAE
  Gene Name: sialic acid acetylesterase
  Uniprot ID: Q9HAT2
  ENSP ID: ENSP00000263593
MVAPGLVLGLVLPLILWADRSAGIGFRFASYINNDMVLQKEPAGAVIWGFGTPGATVTVTLRQGQETIMKKVTSVKAHSDTWMVVLDPMKPGGPFEVMAQQTLEKINFTLRVHDVLFGDVWLCSGQSNMQMTVLQIFNATRELSNTAAYQSVRILSVSPIQAEQELEDLVAVDLQWSKPTSENLGHGYFKYMSAVCWLFGRHLYDTLQYPIGLIASSWGGTPIEAWSSGRSLKACGVPKQGSIPYDSVTGPSKHSVLWNAMIHPLCNMTLKGVVWYQGESNINYNTDLYNCTFPALIEDWRETFHRGSQGQTERFFPFGLVQLSSDLSKKSSDDGFPQIRWHQTADFGYVPNPKMPNTFMAVAMDLCDRDSPFGSIHPRDKQTVAYRLHLGARALAYGEKNLTFEGPLPEKIELLAHKGLLNLTYYQQIQVQKKDNKIFEISCCSDHRCKWLPASMNTVSTQSLTLAIDSCHGTVVALRYAWTTWPCEYKQCPLYHPSSALPAPPFIAFITDQGPGHQSNVAK

SEQ ID NO: 78868 - protein, 488 aa, Homo sapiens
  Payload ID: 15715
  Gene Symbol: SIAE
  Gene Name: sialic acid acetylesterase
  Uniprot ID: Q9HAT2
  ENSP ID: ENSP00000437877
MVLQKEPAGAVIWGFGTPGATVTVTLRQGQETIMKKVTSVKAHSDTWMVVLDPMKPGGPFEVMAQQTLEKINFTLRVHDVLFGDVWLCSGQSNMQMTVLQIFNATRELSNTAAYQSVRILSVSPIQAEQELEDLVAVDLQWSKPTSENLGHGYFKYMSAVCWLFGRHLYDTLQYPIGLIASSWGGTPIEAWSSGRSLKACGVPKQGSIPYDSVTGPSKHSVLWNAMIHPLCNMTLKGVVWYQGESNINYNTDLYNCTFPALIEDWRETFHRGSQGQTERFFPFGLVQLSSDLSKKSSDDGFPQIRWHQTADFGYVPNPKMPNTFMAVAMDLCDRDSPFGSIHPRDKQTVAYRLHLGARALAYGEKNLTFEGPLPEKIELLAHKGLLNLTYYQQIQVQKKDNKIFEISCCSDHRCKWLPASMNTVSTQSLTLAIDSCHGTVVALRYAWTTWPCEYKQCPLYHPSSALPAPPFIAFITDQGPGHQSNVAK

SEQ ID NO: 78869 - protein, 488 aa, Homo sapiens; identical to SEQ ID NO: 78868
  Payload ID: 15715
  Gene Symbol: SIAE
  Gene Name: sialic acid acetylesterase
  Uniprot ID: Q9HAT2
  ENSP ID: ENSP00000478211

SEQ ID NO: 78870 - protein, 1709 aa, Homo sapiens
  Payload ID: 15716
  Gene Symbol: SIGLEC1
  Gene Name: sialic acid binding Ig-like lectin 1, sialoadhesin
  Uniprot ID: Q9BZZ2
  ENSP ID: ENSP00000341141
MGFLPKLLLLASFFPAGQASWGVSSPQDVQGVKGSCLLIPCIFSFPADVEVPDGITAIWYYDYSGQRQVVSHSADPKLVEARFRGRTEFMGNPEHRVCNLLLKDLQPEDSGSYNFRFEISEVNRWSDVKGTLVTVTEEPRVPTIASPVELLEGTEVDFNCSTPYVCLQEQVRLQWQGQDPARSVTFNSQKFEPTGVGHLETLHMAMSWQDHGRILRCQLSVANHRAQSEIHLQVKYAPKGVKILLSPSGRNILPGELVTLTCQVNSSYPAVSSIKWLKDGVRLQTKTGVLHLPQAAWSDAGVYTCQAENGVGSLVSPPISLHIFMAEVQVSPAGPILENQTVTLVCNTPNEAPSDLRYSWYKNHVLLEDAHSHTLRLHLATRADTGFYFCEVQNVHGSERSGPVSVVVNHPPLTPVLTAFLETQAGLVGILHCSVVSEPLATLVLSHGGHILASTSGDSDHSPRFSGTSGPNSLRLEIRDLEETDSGEYKCSATNSLGNATSTLDFHANAARLLISPAAEVVEGQAVTLSCRSGLSPTPDARFSWYLNGALLHEGPGSSLLLPAASSTDAGSYHCRARDGHSASGPSSPAVLTVLYPPRQPTFTTRLDLDAAGAGAGRRGLLLCRVDSDPPARLQLLHKDRVVATSLPSGGGCSTCGGCSPRMKVTKAPNLLRVEIHNPLLEEEGLYLCEASNALGNASTSATFNGQATVLAIAPSHTLQEGTEANLTCNVSREAAGSPANFSWFRNGVLWAQGPLETVTLLPVARTDAALYACRILTEAGAQLSTPVLLSVLYPPDRPKLSALLDMGQGHMALFICTVDSRPLALLALFHGEHLLATSLGPQVPSHGRFQAKAEANSLKLEVRELGLGDSGSYRCEATNVLGSSNTSLFFQVRGAWVQVSPSPELQEGQAVVLSCQVHTGVPEGTSYRWYRDGQPLQESTSATLRFAAITLTQAGAYHCQAQAPGSATTSLAAPISLHVSYAPRHVTLTTLMDTGPGRLGLLLCRVDSDPPAQLRLLHGDRLVASTLQGVGGPEGSSPRLHVAVAPNTLRLEIHGAMLEDEGVYICEASNTLGQASASADFDAQAVNVQVWPGATVREGQLVNLTCLVWTTHPAQLTYTWYQDGQQRLDAHSIPLPNVTVRDATSYRCGVGPPGRAPRLSRPITLDVLYAPRNLRLTYLLESHGGQLALVLCTVDSRPPAQLALSHAGRLLASSTAASVPNTLRLELRGPQPRDEGFYSCSARSPLGQANTSLELRLEGVRVILAPEAAVPEGAPITVTCADPAAHAPTLYTWYHNGRWLQEGPAASLSFLVATRAHAGAYSCQAQDAQGTRSSRPAALQVLYAPQDAVLSSFRDSRARSMAVIQCTVDSEPPAELALSHDGKVLATSSGVHSLASGTGHVQVARNALRLQVQDVPAGDDTYVCTAQNLLGSISTIGRLQVEGARVVAEPGLDVPEGAALNLSCRLLGGPGPVGNSTFAWFWNDRRLHAEPVPTLAFTHVARAQAGMYHCLAELPTGAAASAPVMLRVLYPPKTPTMMVFVEPEGGLRGILDCRVDSEPLASLTLHLGSRLVASSQPQGAPAEPHIHVLASPNALRVDIEALRPSDQGEYICSASNVLGSASTSTYFGVRALHRLHQFQQLLWVLGLLVGLLLLLLGLGACYTWRRRRVCKQSMGENSVEMAFQKETTQLIDPDAATCETSTCAPPLG

SEQ ID NO: 78871 - protein, 463 aa, Homo sapiens
  Payload ID: 15716
  Gene Symbol: SIGLEC1
  Gene Name: sialic acid binding Ig-like lectin 1, sialoadhesin
  ENSP ID: ENSP00000395778
  MOD_RES (1)..(1): Any amino acid
XLALVLCTVDSRPPAQLALSHAGRLLASSTAASVPNTLRLELRGPQPRDEGFYSCSARSPLGQANTSLELRLEGVRVILAPEAAVPEGAPITVTCADPAAHAPTLYTWYHNGRWLQEGPAASLSFLVATRAHAGAYSCQAQDAQGTRSSRPAALQVLYAPQDAVLSSFRDSRARSMAVIQCTVDSEPPAELALSHDGKVLATSSGVHSLASGTGHVQVARNALRLQVQDVPAGDDTYVCTAQNLLGSISTIGRLQVEGARVVAEPGLDVPEGAALNLSCRLLGGPGPVGNSTFAWFWNDRRLHAEPVPTLAFTHVARAQAGMYHCLAELPTGAAASAPVMLRVLYPPKTPTMMVFVEPEGGLRGILDCRVDSEPLASLTLHLGSRLVASSQPQGAPAEPHIHVLASPNALRVDIEALRPSDQGEYICSASNVLGSASTSTYFGVRGEGRGLHLPGHSAQKPSS

SEQ ID NO: 78872 - protein, 602 aa, Homo sapiens
  Payload ID: 15717
  Gene Symbol: SIGLEC10
  Gene Name: sialic acid binding Ig-like lectin 10
  Uniprot ID: Q96LC7
  ENSP ID: ENSP00000342389
MLLPLLLSSLLGGSQAMDGRFWIRVQESVMVPEGLCISVPCSFSYPRQDWTGSTPAYGYWFKAVTETTKGAPVATNHQSREVEMSTRGRFQLTGDPAKGNCSLVIRDAQMQDESQYFFRVERGSYVRYNFMNDGFFLKVTALTQKPDVYIPETLEPGQPVTVICVFNWAFEECPPPSFSWTGAALSSQGTKPTTSHFSVLSFTPRPQDHNTDLTCHVDFSRKGVSAQRTVRLRVAYAPRDLVISISRDNTPALEPQPQGNVPYLEAQKGQFLRLLCAADSQPPATLSWVLQNRVLSSSHPWGPRPLGLELPGVKAGDSGRYTCRAENRLGSQQRALDLSVQYPPENLRVMVSQANRTVLENLGNGTSLPVLEGQSLCLVCVTHSSPPARLSWTQRGQVLSPSQPSDPGVLELPRVQVEHEGEFTCHARHPLGSQHVSLSLSVHYKKGLISTAFSNGAFLGIGITALLFLCLALIIMKILPKRRTQTETPRPRFSRHSTILDYINVVPTAGPLAQKRNQKATPNSPRTPLPPGAPSPESKKNQKKQYQLPSFPEPKSSTQAPESQESQEELHYATLNFPGVRPRPEARMPKGTQADYAEVKFQ

SEQ ID NO: 78873 - protein, 697 aa, Homo sapiens
  Payload ID: 15717
  Gene Symbol: SIGLEC10
  Gene Name: sialic acid binding Ig-like lectin 10
  Uniprot ID: Q96LC7
  ENSP ID: ENSP00000345243
MLLPLLLSSLLGGSQAMDGRFWIRVQESVMVPEGLCISVPCSFSYPRQDWTGSTPAYGYWFKAVTETTKGAPVATNHQSREVEMSTRGRFQLTGDPAKGNCSLVIRDAQMQDESQYFFRVERGSYVRYNFMNDGFFLKVTALTQKPDVYIPETLEPGQPVTVICVFNWAFEECPPPSFSWTGAALSSQGTKPTTSHFSVLSFTPRPQDHNTDLTCHVDFSRKGVSAQRTVRLRVAYAPRDLVISISRDNTPALEPQPQGNVPYLEAQKGQFLRLLCAADSQPPATLSWVLQNRVLSSSHPWGPRPLGLELPGVKAGDSGRYTCRAENRLGSQQRALDLSVQYPPENLRVMVSQANRTVLENLGNGTSLPVLEGQSLCLVCVTHSSPPARLSWTQRGQVLSPSQPSDPGVLELPRVQVEHEGEFTCHARHPLGSQHVSLSLSVHYSPKLLGPSCSWEAEGLHCSCSSQASPAPSLRWWLGEELLEGNSSQDSFEVTPSSAGPWANSSLSLHGGLSSGLRLRCEAWNVHGAQSGSILQLPDKKGLISTAFSNGAFLGIGITALLFLCLALIIMKILPKRRTQTETPRPRFSRHSTILDYINVVPTAGPLAQKRNQKATPNSPRTPLPPGAPSPESKKNQKKQYQLPSFPEPKSSTQAPESQESQEELHYATLNFPGVRPRPEARMPKGTQADYAEVKFQ

SEQ ID NO: 78874 - protein, 639 aa, Homo sapiens
  Payload ID: 15717
  Gene Symbol: SIGLEC10
  Gene Name: sialic acid binding Ig-like lectin 10
  Uniprot ID: Q96LC7
  ENSP ID: ENSP00000389132
MLLPLLLSSLLGGSQAMDGRFWIRVQESVMVPEGLCISVPCSFSYPRQDWTGSTPAYGYWFKAVTETTKGAPVATNHQSREVEMSTRGRFQLTGDPAKGNCSLVIRDAQMQDESQYFFRVERGSYVRYNFMNDGFFLKVTVLSFTPRPQDHNTDLTCHVDFSRKGVSAQRTVRLRVAYAPRDLVISISRDNTPALEPQPQGNVPYLEAQKGQFLRLLCAADSQPPATLSWVLQNRVLSSSHPWGPRPLGLELPGVKAGDSGRYTCRAENRLGSQQRALDLSVQYPPENLRVMVSQANRTVLENLGNGTSLPVLEGQSLCLVCVTHSSPPARLSWTQRGQVLSPSQPSDPGVLELPRVQVEHEGEFTCHARHPLGSQHVSLSLSVHYSPKLLGPSCSWEAEGLHCSCSSQASPAPSLRWWLGEELLEGNSSQDSFEVTPSSAGPWANSSLSLHGGLSSGLRLRCEAWNVHGAQSGSILQLPDKKGLISTAFSNGAFLGIGITALLFLCLALIIMKILPKRRTQTETPRPRFSRHSTILDYINVVPTAGPLAQKRNQKATPNSPRTPLPPGAPSPESKKNQKKQYQLPSFPEPKSSTQAPESQESQEELHYATLNFPGVRPRPEARMPKGTQADYAEVKFQ

SEQ ID NO: 78875 - protein, 454 aa, Homo sapiens
  Payload ID: 15717
  Gene Symbol: SIGLEC10
  Gene Name: sialic acid binding Ig-like lectin 10
  Uniprot ID: Q96LC7
  ENSP ID: ENSP00000395475
MLLPLLLSSLLGGSQAMDGRFWIRVQESVMVPEGLCISVPCSFSYPRQDWTGSTPAYGYWFKAVTETTKGAPVATNHQSREVEMSTRGRFQLTGDPAKGNCSLVIRDAQMQDESQYFFRVERGSYVRYNFMNDGFFLKVTVLSFTPRPQDHNTDLTCHVDFSRKGVSAQRTVRLRVAYAPRDLVISISRDNTPDPPENLRVMVSQANRTVLENLGNGTSLPVLEGQSLCLVCVTHSSPPARLSWTQRGQVLSPSQPSDPGVLELPRVQVEHEGEFTCHARHPLGSQHVSLSLSVHYKKGLISTAFSNGAFLGIGITALLFLCLALIIMKILPKRRTQTETPRPRFSRHSTILDYINVVPTAGPLAQKRNQKATPNSPRTPLPPGAPSPESKKNQKKQYQLPSFPEPKSSTQAPESQESQEELHYATLNFPGVRPRPEARMPKGTQADYAEVKFQ

SEQ ID NO: 78876 - protein, 544 aa, Homo sapiens
  Payload ID: 15717
  Gene Symbol: SIGLEC10
  Gene Name: sialic acid binding Ig-like lectin 10
  Uniprot ID: Q96LC7
  ENSP ID: ENSP00000408387
MLLPLLLSSLLGGSQAMDGRFWIRVQESVMVPEGLCISVPCSFSYPRQDWTGSTPAYGYWFKAVTETTKGAPVATNHQSREVEMSTRGRFQLTGDPAKGNCSLVIRDAQMQDESQYFFRVERGSYVRYNFMNDGFFLKVTVLSFTPRPQDHNTDLTCHVDFSRKGVSAQRTVRLRVAYAPRDLVISISRDNTPALEPQPQGNVPYLEAQKGQFLRLLCAADSQPPATLSWVLQNRVLSSSHPWGPRPLGLELPGVKAGDSGRYTCRAENRLGSQQRALDLSVQYPPENLRVMVSQANRTVLENLGNGTSLPVLEGQSLCLVCVTHSSPPARLSWTQRGQVLSPSQPSDPGVLELPRVQVEHEGEFTCHARHPLGSQHVSLSLSVHYKKGLISTAFSNGAFLGIGITALLFLCLALIIMKILPKRRTQTETPRPRFSRHSTILDYINVVPTAGPLAQKRNQKATPNSPRTPLPPGAPSPESKKNQKKQYQLPSFPEPKSSTQAPESQESQEELHYATLNFPGVRPRPEARMPKGTQADYAEVKFQ

SEQ ID NO: 78877 - protein, 554 aa, Homo sapiens
  Payload ID: 15717
  Gene Symbol: SIGLEC10
  Gene Name: sialic acid binding Ig-like lectin 10
  Uniprot ID: Q96LC7
  ENSP ID: ENSP00000414324
MLLPLLLSSLLGGSQAMDGRFWIRVQESVMVPEGLCISVPCSFSYPRQDWTGSTPAYGYWFKAVTETTKGAPVATNHQSREVEMSTRGRFQLTGDPAKGNCSLVIRDAQMQDESQYFFRVERGSYVRYNFMNDGFFLKVTGTKPTTSHFSVLSFTPRPQDHNTDLTCHVDFSRKGVSAQRTVRLRVAYAPRDLVISISRDNTPALEPQPQGNVPYLEAQKGQFLRLLCAADSQPPATLSWVLQNRVLSSSHPWGPRPLGLELPGVKAGDSGRYTCRAENRLGSQQRALDLSVQYPPENLRVMVSQANRTVLENLGNGTSLPVLEGQSLCLVCVTHSSPPARLSWTQRGQVLSPSQPSDPGVLELPRVQVEHEGEFTCHARHPLGSQHVSLSLSVHYKKGLISTAFSNGAFLGIGITALLFLCLALIIMKILPKRRTQTETPRPRFSRHSTILDYINVVPTAGPLAQKRNQKATPNSPRTPLPPGAPSPESKKNQKKQYQLPSFPEPKSSTQAPESQESQEELHYATLNFPGVRPRPEARMPKGTQADYAEVKFQ

SEQ ID NO: 78878 - protein, 512 aa, Homo sapiens
  Payload ID: 15717
  Gene Symbol: SIGLEC10
  Gene Name: sialic acid binding Ig-like lectin 10
  ENSP ID: ENSP00000431444
MLLPLLLSSLLGGSQAMDGRFWIRVQESVMVPEGLCISVPCSFSYPRQDWTGSTPAYGYWFKAVTETTKGAPVATNHQSREVEMSTRGRFQLTGDPAKGNCSLVIRDAQMQDESQYFFRVERGSYVRYNFMNDGFFLKVTALTQKPDVYIPETLEPGQPVTVICVFNWAFEECPPPSFSWTGAALSSQGTKPTTSHFSVLSFTPRPQDHNTDLTCHVDFSRKGVSAQRTVRLRVAYAPRDLVISISRDNTPDPPENLRVMVSQANRTVLENLGNGTSLPVLEGQSLCLVCVTHSSPPARLSWTQRGQVLSPSQPSDPGVLELPRVQVEHEGEFTCHARHPLGSQHVSLSLSVHYKKGLISTAFSNGAFLGIGITALLFLCLALIIMKILPKRRTQTETPRPRFSRHSTILDYINVVPTAGPLAQKRNQKATPNSPRTPLPPGAPSPESKKNQKKQYQLPSFPEPKSSTQAPESQESQEELHYATLNFPGVRPRPEARMPKGTQADYAEVKFQ

SEQ ID NO: 78879 - protein, 186 aa, Homo sapiens
  Payload ID: 15717
  Gene Symbol: SIGLEC10
  Gene Name: sialic acid binding Ig-like lectin 10
  ENSP ID: ENSP00000433838
MRRCYCHCCCPRCWADWTGSTPAYGYWFKAVTETTKGAPVATNHQSREVEMSTRGRFQLTGDPAKGNCSLVIRDAQMQDESQYFFRVERGSYVRYNFMNDGFFLKVTALTQKPDVYIPETLEPGQPVTVICVFNWAFEECPPPSFSWTGAALSSQGTKPTTSHFSVLSFTPRPQDHNTDLTCHVDF

SEQ ID NO: 78880 - protein, 155 aa, Homo sapiens
  Payload ID: 15717
  Gene Symbol: SIGLEC10
  Gene Name: sialic acid binding Ig-like lectin 10
  ENSP ID: ENSP00000435281
MLLPLLLSSLLGVLSFTPRPQDHNTDLTCHVDFSRKGVSAQRTVRLRVAYAPRDLVISISRDNTPALEPQPQGNVPYLEAQKGQFLRLLCAADSQPPATLSWVLQNRVLSSSHPWGPRPLGLELPGVKAGDSGRYTCRAENRLGSQQRALDLSVQ

SEQ ID NO: 78881 - protein, 602 aa, Homo sapiens
  Payload ID: 15718
  Gene Symbol: SIGLEC11
  Gene Name: sialic acid binding Ig-like lectin 11
  Uniprot ID: Q96RL6
  ENSP ID: ENSP00000398891
MVPGQAQPQSPEMLLLPLLLPVLGAGSLNKDPSYSLQVQRQVPVPEGLCVIVSCNLSYPRDGWDESTAAYGYWFKGRTSPKTGAPVATNNQSREVEMSTRDRFQLTGDPGKGSCSLVIRDAQREDEAWYFFRVERGSRVRHSFLSNAFFLKVTALTKKPDVYIPETLEPGQPVTVICVFNWAFKKCPAPSFSWTGAALSPRRTRPSTSHFSVLSFTPSPQDHDTDLTCHVDFSRKGVSAQRTVRLRVAYAPKDLIISISHDNTSALELQGNVIYLEVQKGQFLRLLCAADSQPPATLSWVLQDRVLSSSHPWGPRTLGLELRGVRAGDSGRYTCRAENRLGSQQQALDLSVQYPPENLRVMVSQANRTVLENLGNGTSLPVLEGQSLRLVCVTHSSPPARLSWTRWGQTVGPSQPSDPGVLELPPIQMEHEGEFTCHAQHPLGSQHVSLSLSVHWKLEHGGGLGLGAALGAGVAALLAFCSCLVVFRVKICRKEARKRAAAEQDVPSTLGPISQGHQHECSAGSSQDHPPPGAATYTPGKGEEQELHYASLSFQGLRLWEPADQEAPSTTEYSEIKIHTGQPLRGPGFGLQLEREMSGMVPK

SEQ ID NO: 78882 - protein, 60 aa, Homo sapiens
  Payload ID: 15718
  Gene Symbol: SIGLEC11
  Gene Name: sialic acid binding Ig-like lectin 11
  ENSP ID: ENSP00000407387
  MOD_RES (1)..(1): Any amino acid
XLLEGNSSQGSFEVTPSSAGPWANSSLSLHGGLSSGLRLRCKAWNVHGAQSGSVFQLLPG

SEQ ID NO: 78883 - protein, 698 aa, Homo sapiens
  Payload ID: 15718
  Gene Symbol: SIGLEC11
  Gene Name: sialic acid binding Ig-like lectin 11
  Uniprot ID: Q96RL6
  ENSP ID: ENSP00000412361
MVPGQAQPQSPEMLLLPLLLPVLGAGSLNKDPSYSLQVQRQVPVPEGLCVIVSCNLSYPRDGWDESTAAYGYWFKGRTSPKTGAPVATNNQSREVEMSTRDRFQLTGDPGKGSCSLVIRDAQREDEAWYFFRVERGSRVRHSFLSNAFFLKVTALTKKPDVYIPETLEPGQPVTVICVFNWAFKKCPAPSFSWTGAALSPRRTRPSTSHFSVLSFTPSPQDHDTDLTCHVDFSRKGVSAQRTVRLRVAYAPKDLIISISHDNTSALELQGNVIYLEVQKGQFLRLLCAADSQPPATLSWVLQDRVLSSSHPWGPRTLGLELRGVRAGDSGRYTCRAENRLGSQQQALDLSVQYPPENLRVMVSQANRTVLENLGNGTSLPVLEGQSLRLVCVTHSSPPARLSWTRWGQTVGPSQPSDPGVLELPPIQMEHEGEFTCHAQHPLGSQHVSLSLSVHYPPQLLGPSCSWEAEGLHCSCSSQASPAPSLRWWLGEELLEGNSSQGSFEVTPSSAGPWANSSLSLHGGLSSGLRLRCKAWNVHGAQSGSVFQLLPGKLEHGGGLGLGAALGAGVAALLAFCSCLVVFRVKICRKEARKRAAAEQDVPSTLGPISQGHQHECSAGSSQDHPPPGAATYTPGKGEEQELHYASLSFQGLRLWEPADQEAPSTTEYSEIKIHTGQPLRGPGFGLQLEREMSGMVPK

SEQ ID NO: 78884 - protein, 595 aa, Homo sapiens
  Payload ID: 15719
  Gene Symbol: SIGLEC12
  Gene Name: sialic acid binding Ig-like lectin 12 (gene/pseudogene)
  Uniprot ID: Q96PQ1
  ENSP ID: ENSP00000291707
MLLLLLLLPPLLCGRVGAKEQKDYLLTMQKSVTVQEGLCVSVLCSFSYPQNGWTASDPVHGYWFRAGDHVSRNIPVATNNPARAVQEETRDRFHLLGDPQNKDCTLSIRDTRESDAGTYVFCVERGNMKWNYKYDQLSVNVTASQDLLSRYRLEVPESVTVQEGLCVSVPCSVLYPHYNWTASSPVYGSWFKEGADIPWDIPVATNTPSGKVQEDTHGRFLLLGDPQTNNCSLSIRDARKGDSGKYYFQVERGSRKWNYIYDKLSVHVTALTHMPTFSIPGTLESGHPRNLTCSVPWACEQGTPPTITWMGASVSSLDPTITRSSMLSLIPQPQDHGTSLTCQVTLPGAGVTMTRAVRLNISYPPQNLTMTVFQGDGTASTTLRNGSALSVLEGQSLHLVCAVDSNPPARLSWTWGSLTLSPSQSSNLGVLELPRVHVKDEGEFTCRAQNPLGSQHISLSLSLQNEYTGKMRPISGVTLGAFGGAGATALVFLYFCIIFVVVRSCRKKSARPAVGVGDTGMEDANAVRGSASQGPLIESPADDSPPHHAPPALATPSPEEGEIQYASLSFHKARPQYPQEQEAIGYEYSEINIPK

SEQ ID NO: 78885 - protein, 154 aa, Homo sapiens
  Payload ID: 15719
  Gene Symbol: SIGLEC12
  Gene Name: sialic acid binding Ig-like lectin 12 (gene/pseudogene)
  ENSP ID: ENSP00000469791
MLLLLLLLPPLLCGRVGAKEQKDYLLTMQKSVTVQEGLCVSVLCSFSYPQNGWTASDPVHGYWFRAGDHVSRNIPVATNNPARAVQEETRDRFHLLGDPQNKDCTLSIRDTRESDAGTYVFCVERGNMKWNYKYDQLSVNVTGGERKQEMELHI

SEQ ID NO: 78886 - protein, 477 aa, Homo sapiens
  Payload ID: 15719
  Gene Symbol: SIGLEC12
  Gene Name: sialic acid binding Ig-like lectin 12 (gene/pseudogene)
  Uniprot ID: Q96PQ1
  ENSP ID: ENSP00000472873
MLLPLLWANEERDSGGWADPRFSTASQDLLSRYRLEVPESVTVQEGLCVSVPCSVLYPHYNWTASSPVYGSWFKEGADIPWDIPVATNTPSGKVQEDTHGRFLLLGDPQTNNCSLSIRDARKGDSGKYYFQVERGSRKWNYIYDKLSVHVTALTHMPTFSIPGTLESGHPRNLTCSVPWACEQGTPPTITWMGASVSSLDPTITRSSMLSLIPQPQDHGTSLTCQVTLPGAGVTMTRAVRLNISYPPQNLTMTVFQGDGTASTTLRNGSALSVLEGQSLHLVCAVDSNPPARLSWTWGSLTLSPSQSSNLGVLELPRVHVKDEGEFTCRAQNPLGSQHISLSLSLQNEYTGKMRPISGVTLGAFGGAGATALVFLYFCIIFVVVRSCRKKSARPAVGVGDTGMEDANAVRGSASQGPLIESPADDSPPHHAPPALATPSPEEGEIQYASLSFHKARPQYPQEQEAIGYEYSEINIPK

SEQ ID NO: 78887 - protein, 396 aa, Homo sapiens
  Payload ID: 15720
  Gene Symbol: SIGLEC14
  Gene Name: sialic acid binding Ig-like lectin 14
  Uniprot ID: Q08ET2
  ENSP ID: ENSP00000354090
MLPLLLLPLLWGGSLQEKPVYELQVQKSVTVQEGLCVLVPCSFSYPWRSWYSSPPLYVYWFRDGEIPYYAEVVATNNPDRRVKPETQGRFRLLGDVQKKNCSLSIGDARMEDTGSYFFRVERGRDVKYSYQQNKLNLEVTALIEKPDIHFLEPLESGRPTRLSCSLPGSCEAGPPLTFSWTGNALSPLDPETTRSSELTLTPRPEDHGTNLTCQVKRQGAQVTTERTVQLNVSYAPQNLAISIFFRNGTGTALRILSNGMSVPIQEGQSLFLACTVDSNPPASLSWFREGKALNPSQTSMSGTLELPNIGAREGGEFTCRVQHPLGSQHLSFILSVQRSSSSCICVTEKQQGSWPLVLTLIRGALMGAGFLLTYGLTWIYYTRCGGPQQSRAERPG

SEQ ID NO: 78888 - protein, 328 aa, Homo sapiens
  Payload ID: 15721
  Gene Symbol: SIGLEC15
  Gene Name: sialic acid binding Ig-like lectin 15
  Uniprot ID: Q6ZMC9
  ENSP ID: ENSP00000374125
MEKSIWLLACLAWVLPTGSFVRTKIDTTENLLNTEVHSSPAQRWSMQVPPEVSAEAGDAAVLPCTFTHPHRHYDGPLTAIWRAGEPYAGPQVFRCAAARGSELCQTALSLHGRFRLLGNPRRNDLSLRVERLALADDRRYFCRVEFAGDVHDRYESRHGVRLHVTAAPRIVNISVLPSPAHAFRALCTAEGEPPPALAWSGPALGNSLAAVRSPREGHGHLVTAELPALTHDGRYTCTAANSLGRSEASVYLFRFHGASGASTVALLLGALGFKALLLLGVLAARAARRRPEHLDTPDTPPRSQAQESNYENLSQMNPRSPPATMCSP

SEQ ID NO: 78889 - protein, 174 aa, Homo sapiens
  Payload ID: 15721
  Gene Symbol: SIGLEC15
  Gene Name: sialic acid binding Ig-like lectin 15
  Uniprot ID: Q6ZMC9
  ENSP ID: ENSP00000443509
MTATRAATASGSAPRIVNISVLPSPAHAFRALCTAEGEPPPALAWSGPALGNSLAAVRSPREGHGHLVTAELPALTHDGRYTCTAANSLGRSEASVYLFRFHGASGASTVALLLGALGFKALLLLGVLAARAARRRPEHLDTPDTPPRSQAQESNYENLSQMNPRSPPATMCSP

SEQ ID NO: 78890 - protein, 174 aa, Homo sapiens
  Payload ID: 15721
  Gene Symbol: SIGLEC15
  Gene Name: sialic acid binding Ig-like lectin 15
  ENSP ID: ENSP00000466774
  MOD_RES (1)..(1): Any amino acid
XGDVHDRYESRHGVRLHVTAAPRIVNISVLPSPAHAFRALCTAEGEPPPALAWSGPALGNSLAAVRSPREGHGHLVTAELPALTHDGRYTCTAANSLGRSEASVYLFRFHGASGASTVALLLGALGFKALLLLGVLAARAARRRPEHLDTPDTPPRPTTCPVSLFADLLSHQRP

SEQ ID NO: 78891 - protein, 551 aa, Homo sapiens; identical to SEQ ID NO: 1068
  Payload ID: 15722
  Gene Symbol: SIGLEC5
  Gene Name: sialic acid binding Ig-like lectin 5
  Uniprot ID: O15389
  ENSP ID: ENSP00000455510

SEQ ID NO: 78892 - protein, 551 aa, Homo sapiens; identical to SEQ ID NO: 1068
  Payload ID: 15722
  Gene Symbol: SIGLEC5
  Gene Name: sialic acid binding Ig-like lectin 5
  Uniprot ID: O15389
  ENSP ID: ENSP00000473238

SEQ ID NO: 78893 - protein, 437 aa, Homo sapiens
  Payload ID: 15723
  Gene Symbol: SIGLEC6
  Gene Name: sialic acid binding Ig-like lectin 6
  Uniprot ID: O43699
  ENSP ID: ENSP00000344064
MQGAQEASASEMLPLLLPLLWAGALAQERRFQLEGPESLTVQEGLCVLVPCRLPTTLPASYYGYGYWFLEGADVPVATNDPDEEVQEETRGRFHLLWDPRRKNCSLSIRDARRRDNAAYFFRLKSKWMKYGYTSSKLSVRVMALTHRPNISIPGTLESGHPSNLTCSVPWVCEQGTPPIFSWMSAAPTSLGPRTTQSSVLTITPRPQDHSTNLTCQVTFPGAGVTMERTIQLNVSSFKILQNTSSLPVLEGQALRLLCDADGNPPAHLSWFQGFPALNATPISNTGVLELPQVGSAEEGDFTCRAQHPLGSLQISLSLFVHWKPEGRAGGVLGAVWGASITTLVFLCVCFIFRVKTRRKKAAQPVQNTDDVNPVMVSGSRGHQHQFQTGIVSDHPAEAGPISEDEQELHYAVLHFHKVQPQEPKVTDTEYSEIKIHK

SEQ ID NO: 78894 - protein, 353 aa, Homo sapiens
  Payload ID: 15723
  Gene Symbol: SIGLEC6
  Gene Name: sialic acid binding Ig-like lectin 6
  Uniprot ID: O43699
  ENSP ID: ENSP00000345907
MQGAQEASASEMLPLLLPLLWAGALAQERRFQLEGPESLTVQEGLCVLVPCRLPTTLPASYYGYGYWFLEGADVPVATNDPDEEVQEETRGRFHLLWDPRRKNCSLSIRDARRRDNAAYFFRLKSKWMKYGYTSSKLSVRVMALTHRPNISIPGTLESGHPSNLTCSVPWVCEQGTPPIFSWMSAAPTSLGPRTTQSSVLTITPRPQDHSTNLTCQVTFPGAGVTMERTIQLNVSYAPQKVAISIFQGNSAAFKILQNTSSLPVLEGQALRLLCDADGNPPAHLSWFQGFPALNATPISNTGVLELPQVGSAEEGDFTCRAQHPLGSLQISLSLFVHWSSAPVPDRHSFRPPC

SEQ ID NO: 78895 - protein, 389 aa, Homo sapiens
  Payload ID: 15723
  Gene Symbol: SIGLEC6
  Gene Name: sialic acid binding Ig-like lectin 6
  Uniprot ID: O43699
  ENSP ID: ENSP00000353071
MQGAQEASASEMLPLLLPLLWAGALAQERRFQLEGPESLTVQEGLCVLVPCRLPTTLPASYYGYGYWFLEGADVPVATNDPDEEVQEETRGRFHLLWDPRRKNCSLSIRDARRRDNAAYFFRLKSKWMKYGYTSSKLSVRVMALTHRPNISIPGTLESGHPSNLTCSVPWVCEQGTPPIFSWMSAAPTSLGPRTTQSSVLTITPRPQDHSTNLTCQVTFPGAGVTMERTIQLNVSWMLRRPPLSTPDAPQKVAISIFQGNSAAFKILQNTSSLPVLEGQALRLLCDADGNPPAHLSWFQGFPALNATPISNTGVLELPQVGSAEEGDFTCRAQHPLGSLQISLSLFVHWKPEGRAGGVLGAVWGASITTLVFLCVCFIFRVISTSSRQA

SEQ ID NO: 78896 - protein, 342 aa, Homo sapiens
  Payload ID: 15723
  Gene Symbol: SIGLEC6
  Gene Name: sialic acid binding Ig-like lectin 6
  Uniprot ID: O43699
  ENSP ID: ENSP00000375674
MQGAQEASASEMLPLLLPLLWAGALAQERRFQLEGPESLTVQEGLCVLVPCRLPTTLPASYYGYGYWFLEGADVPVATNDPDEEVQEETRGRFHLLWDPRRKNCSLSIRDARRRDNAAYFFRLKSKWMKYGYTSSKLSVRVMGTLESGHPSNLTCSVPWVCEQGTPPIFSWMSAAPTSLGPRTTQSSVLTITPRPQDHSTNLTCQVTFPGAGVTMERTIQLNVSYAPQKVAISIFQGNSAAFKILQNTSSLPVLEGQALRLLCDADGNPPAHLSWFQGFPALNATPISNTGVLELPQVGSAEEGDFTCRAQHPLGSLQISLSLFVHWSSAPVPDRHSFRPPC

SEQ ID NO: 78897 - protein, 453 aa, Homo sapiens
  Payload ID: 15723
  Gene Symbol: SIGLEC6
  Gene Name: sialic acid binding Ig-like lectin 6
  Uniprot ID: O43699
  ENSP ID: ENSP00000401502
MQGAQEASASEMLPLLLPLLWAGALAQERRFQLEGPESLTVQEGLCVLVPCRLPTTLPASYYGYGYWFLEGADVPVATNDPDEEVQEETRGRFHLLWDPRRKNCSLSIRDARRRDNAAYFFRLKSKWMKYGYTSSKLSVRVMALTHRPNISIPGTLESGHPSNLTCSVPWVCEQGTPPIFSWMSAAPTSLGPRTTQSSVLTITPRPQDHSTNLTCQVTFPGAGVTMERTIQLNVSYAPQKVAISIFQGNSAAFKILQNTSSLPVLEGQALRLLCDADGNPPAHLSWFQGFPALNATPISNTGVLELPQVGSAEEGDFTCRAQHPLGSLQISLSLFVHWKPEGRAGGVLGAVWGASITTLVFLCVCFIFRVKTRRKKAAQPVQNTDDVNPVMVSGSRGHQHQFQTGIVSDHPAEAGPISEDEQELHYAVLHFHKVQPQEPKVTDTEYSEIKIHK

SEQ ID NO: 78898 - protein, 401 aa, Homo sapiens
  Payload ID: 15723
  Gene Symbol: SIGLEC6
  Gene Name: sialic acid binding Ig-like lectin 6
  Uniprot ID: O43699
  ENSP ID: ENSP00000410679
MQGAQEASASEMLPLLLPLLWAASYYGYGYWFLEGADVPVATNDPDEEVQEETRGRFHLLWDPRRKNCSLSIRDARRRDNAAYFFRLKSKWMKYGYTSSKLSVRVMALTHRPNISIPGTLESGHPSNLTCSVPWVCEQGTPPIFSWMSAAPTSLGPRTTQSSVLTITPRPQDHSTNLTCQVTFPGAGVTMERTIQLNVSSFKILQNTSSLPVLEGQALRLLCDADGNPPAHLSWFQGFPALNATPISNTGVLELPQVGSAEEGDFTCRAQHPLGSLQISLSLFVHWKPEGRAGGVLGAVWGASITTLVFLCVCFIFRVKTRRKKAAQPVQNTDDVNPVMVSGSRGHQHQFQTGIVSDHPAEAGPISEDEQELHYAVLHFHKVQPQEPKVTDTEYSEIKIHK

SEQ ID NO: 78899 - protein, 374 aa, Homo sapiens
  Payload ID: 15724
  Gene Symbol: SIGLEC7
  Gene Name: sialic acid binding Ig-like lectin 7
  Uniprot ID: Q9Y286
  ENSP ID: ENSP00000306757
MLLLLLLPLLWGRERVEGQKSNRKDYSLTMQSSVTVQEGMCVHVRCSFSYPVDSQTDSDPVHGYWFRAGNDISWKAPVATNNPAWAVQEETRDRFHLLGDPQTKNCTLSIRDARMSDAGRYFFRMEKGNIKWNYKYDQLSVNVTDPPQNLTVTVFQGEGTASTALGNSSSLSVLEGQSLRLVCAVDSNPPARLSWTWRSLTLYPSQPSNPLVLELQVHLGDEGEFTCRAQNSLGSQHVSLNLSLQQEYTGKMRPVSGVLLGAVGGAGATALVFLSFCVIFIVVRSCRKKSARPAADVGDIGMKDANTIRGSASQGNLTESWADDNPRHHGLAAHSSGEEREIQYAPLSFHKGEPQDLSGQEATNNEYSEIKIPK

SEQ ID NO: 78900 - protein, 467 aa, Homo sapiens
  Payload ID: 15724
  Gene Symbol: SIGLEC7
  Gene Name: sialic acid binding Ig-like lectin 7
  Uniprot ID: Q9Y286
  ENSP ID: ENSP00000323328
MLLLLLLPLLWGRERVEGQKSNRKDYSLTMQSSVTVQEGMCVHVRCSFSYPVDSQTDSDPVHGYWFRAGNDISWKAPVATNNPAWAVQEETRDRFHLLGDPQTKNCTLSIRDARMSDAGRYFFRMEKGNIKWNYKYDQLSVNVTALTHRPNILIPGTLESGCFQNLTCSVPWACEQGTPPMISWMGTSVSPLHPSTTRSSVLTLIPQPQHHGTSLTCQVTLPGAGVTTNRTIQLNVSYPPQNLTVTVFQGEGTASTALGNSSSLSVLEGQSLRLVCAVDSNPPARLSWTWRSLTLYPSQPSNPLVLELQVHLGDEGEFTCRAQNSLGSQHVSLNLSLQQEYTGKMRPVSGVLLGAVGGAGATALVFLSFCVIFIVVRSCRKKSARPAADVGDIGMKDANTIRGSASQGNLTESWADDNPRHHGLAAHSSGEEREIQYAPLSFHKGEPQDLSGQEATNNEYSEIKIPK

SEQ ID NO: 78901 - protein, 145 aa, Homo sapiens
  Payload ID: 15724
  Gene Symbol: SIGLEC7
  Gene Name: sialic acid binding Ig-like lectin 7
  Uniprot ID: Q9Y286
  ENSP ID: ENSP00000437609
MLLLLLLPLLWGRERVEGQKSNRKDYSLTMQSSVTVQEGMCVHVRCSFSYPVDSQTDSDPVHGYWFRAGNDISWKAPVATNNPAWAVQEETRDRFHLLGDPQTKNCTLSIRDARMSDAGRYFFRMEKGNIKWNYKYDQLSVNVTE

SEQ ID NO: 78902 - protein, 185 aa, Homo sapiens
  Payload ID: 15724
  Gene Symbol: SIGLEC7
  Gene Name: sialic acid binding Ig-like lectin 7
  ENSP ID: ENSP00000469626
MLLLLLLPLLWGRERVEGQKSNRKDYSLTMQSSVTVQEGMCVHVRCSFSYPVDSQTDSDPVHGYWFRAGNDISWKAPVATNNPAWAVQEETRDRFHLLGDPQTKNCTLSIRDARMSDAGRYFFRMEKGNIKWNYKYDQLSVNVTAPAPRHQPHLSGDLAWGRRDHEQDHPTQCVLSPCLSVPDPP

SEQ ID NO: 78903 - protein, 145 aa, Homo sapiens
  Payload ID: 15724
  Gene Symbol: SIGLEC7
  Gene Name: sialic acid binding Ig-like lectin 7
  Uniprot ID: Q9Y286
  ENSP ID: ENSP00000472529
MLLLLLLPLLWGRERVEGQKSNRKDYSLTMQSSVTVQEGMCVHVRCSFSYPVDSQTDSDPVHGYWFRAGNDISWKAPVATNNPAWAVQEETRDRFHLLGDPQTKNCTLSIRDARMSDAGRYFFRMEKGNIKWNYKYDQLSVNVTG

SEQ ID NO: 78904 - protein, 499 aa, Homo sapiens
  Payload ID: 15725
  Gene Symbol: SIGLEC8
  Gene Name: sialic acid binding Ig-like lectin 8
  Uniprot ID: Q9NYZ4
  ENSP ID: ENSP00000321077
MLLLLLLLPLLWGTKGMEGDRQYGDGYLLQVQELVTVQEGLCVHVPCSFSYPQDGWTDSDPVHGYWFRAGDRPYQDAPVATNNPDREVQAETQGRFQLLGDIWSNDCSLSIRDARKRDKGSYFFRLERGSMKWSYKSQLNYKTKQLSVFVTALTHRPDILILGTLESGHSRNLTCSVPWACKQGTPPMISWIGASVSSPGPTTARSSVLTLTPKPQDHGTSLTCQVTLPGTGVTTTSTVRLDVSYPPWNLTMTVFQGDATASTALGNGSSLSVLEGQSLRLVCAVNSNPPARLSWTRGSLTLCPSRSSNPGLLELPRVHVRDEGEFTCRAQNAQGSQHISLSLSLQNEGTGTSRPVSQVTLAAVGGAGATALAFLSFCIIFIIVRSCRKKSARPAAGVGDTGMEDAKAIRGSASQGPLTESWKDGNPLKKPPPAVAPSSGEEGELHYATLSFHKVKPQDPQGQEATDSEYSEIKIHKRETAETQACLRNHNPSSKEVRG

SEQ ID NO: 78905 - protein, 406 aa, Homo sapiens
  Payload ID: 15725
  Gene Symbol: SIGLEC8
  Gene Name: sialic acid binding Ig-like lectin 8
  Uniprot ID: Q9NYZ4
  ENSP ID: ENSP00000339448
MLLLLLLLPLLWGTKGMEGDRQYGDGYLLQVQELVTVQEGLCVHVPCSFSYPQDGWTDSDPVHGYWFRAGDRPYQDAPVATNNPDREVQAETQGRFQLLGDIWSNDCSLSIRDARKRDKGSYFFRLERGSMKWSYKSQLNYKTKQLSVFVTDPPWNLTMTVFQGDATASTALGNGSSLSVLEGQSLRLVCAVNSNPPARLSWTRGSLTLCPSRSSNPGLLELPRVHVRDEGEFTCRAQNAQGSQHISLSLSLQNEGTGTSRPVSQVTLAAVGGAGATALAFLSFCIIFIIVRSCRKKSARPAAGVGDTGMEDAKAIRGSASQGPLTESWKDGNPLKKPPPAVAPSSGEEGELHYATLSFHKVKPQDPQGQEATDSEYSEIKIHKRETAETQACLRNHNPSSKEVRG

SEQ ID NO: 78906 - protein, 390 aa, Homo sapiens
  Payload ID: 15725
  Gene Symbol: SIGLEC8
  Gene Name: sialic acid binding Ig-like lectin 8
  ENSP ID: ENSP00000389142
MLLLLLLLPLLWGTKGMEGDRQYGDGYLLQVQELVTVQEGLCVHVPCSFSYPQDGWTDSDPVHGYWFRAGDRPYQDAPVATNNPDREVQAETQGRFQLLGDIWSNDCSLSIRDARKRDKGSYFFRLERGSMKWSYKSQLNYKTKQLSVFVTASTALGNGSSLSVLEGQSLRLVCAVNSNPPARLSWTRGSLTLCPSRSSNPGLLELPRVHVRDEGEFTCRAQNAQGSQHISLSLSLQNEGTGTSRPVSQVTLAAVGGAGATALAFLSFCIIFIIVRSCRKKSARPAAGVGDTGMEDAKAIRGSASQGPLTESWKDGNPLKKPPPAVAPSSGEEGELHYATLSFHKVKPQDPQGQEATDSEYSEIKIHKRETAETQACLRNHNPSSKEVRG

SEQ ID NO: 78907 - protein, 463 aa, Homo sapiens
  Payload ID: 15726
  Gene Symbol: SIGLEC9
  Gene Name: sialic acid binding Ig-like lectin 9
  Uniprot ID: Q9Y336
  ENSP ID: ENSP00000250360
MLLLLLPLLWGRERAEGQTSKLLTMQSSVTVQEGLCVHVPCSFSYPSHGWIYPGPVVHGYWFREGANTDQDAPVATNNPARAVWEETRDRFHLLGDPHTKNCTLSIRDARRSDAGRYFFRMEKGSIKWNYKHHRLSVNVTALTHRPNILIPGTLESGCPQNLTCSVPWACEQGTPPMISWIGTSVSPLDPSTTRSSVLTLIPQPQDHGTSLTCQVTFPGASVTTNKTVHLNVSYPPQNLTMTVFQGDGTVSTVLGNGSSLSLPEGQSLRLVCAVDAVDSNPPARLSLSWRGLTLCPSQPSNPGVLELPWVHLRDAAEFTCRAQNPLGSQQVYLNVSLQSKATSGVTQGVVGGAGATALVFLSFCVIFVVVRSCRKKSARPAAGVGDTGIEDANAVRGSASQGPLTEPWAEDSPPDQPPPASARSSVGEGELQYASLSFQMVKPWDSRGQEATDTEYSEIKIHR

SEQ ID NO: 78908 - protein, 479 aa, Homo sapiens
  Payload ID: 15726
  Gene Symbol: SIGLEC9
  Gene Name: sialic acid binding Ig-like lectin 9
  Uniprot ID: Q9Y336
  ENSP ID: ENSP00000413861
MLLLLLPLLWGRERAEGQTSKLLTMQSSVTVQEGLCVHVPCSFSYPSHGWIYPGPVVHGYWFREGANTDQDAPVATNNPARAVWEETRDRFHLLGDPHTKNCTLSIRDARRSDAGRYFFRMEKGSIKWNYKHHRLSVNVTALTHRPNILIPGTLESGCPQNLTCSVPWACEQGTPPMISWIGTSVSPLDPSTTRSSVLTLIPQPQDHGTSLTCQVTFPGASVTTNKTVHLNVSYPPQNLTMTVFQGDGTVSTVLGNGSSLSLPEGQSLRLVCAVDAVDSNPPARLSLSWRGLTLCPSQPSNPGVLELPWVHLRDAAEFTCRAQNPLGSQQVYLNVSLQSKATSGVTQGVVGGAGATALVFLSFCVIFVVVRSCRKKSARPAAGVGDTGIEDANAVRGSASQILNHFIGFPTFLGLGFEFLLNLRDLCCHPDSEFYVYHFSHFRLIKNIAGEIVWSLEGKILWLLDVSDFFHWFFLICVG

SEQ ID NO: 78909 - protein, 205 aa, Homo sapiens
  Payload ID: 15726
  Gene Symbol: SIGLEC9
  Gene Name: sialic acid binding Ig-like lectin 9
  ENSP ID: ENSP00000472483
  MOD_RES (1)..(1): Any amino acid
XSTVLGNGSSLSLPEGQSLRLVCAVDAVDSNPPARLSLSWRGLTLCPSQPSNPGVLELPWVHLRDAAEFTCRAQNPLGSQQVYLNVSLQSKATSGVTQGVVGGAGATALVFLSFCVIFVVVRSCRKKSARPAAGVGDTGIEDANAVRGSASQKTSSSSSSAFEQLFPHPSIPFRAEASKYYLSGTDRNYFRLHGPHSLIAAPQIC

SEQ ID NO: 78910 - protein, 415 aa, Homo sapiens
  Payload ID: 15727
  Gene Symbol: NEU1
  Gene Name: sialidase 1 (lysosomal sialidase)
  Uniprot ID: Q99519
  ENSP ID: ENSP00000229725
MTGERPSTALPDRRWGPRILGFWGGCRVWVFAAIFLLLSLAASWSKAENDFGLVQPLVTMEQLLWVSGRQIGSVDTFRIPLITATPRGTLLAFAEARKMSSSDEGAKFIALRRSMDQGSTWSPTAFIVNDGDVPDGLNLGAVVSDVETGVVFLFYSLCAHKAGCQVASTMLVWSKDDGVSWSTPRNLSLDIGTEVFAPGPGSGIQKQREPRKGRLIVCGHGTLERDGVFCLLSDDHGASWRYGSGVSGIPYGQPKQENDFNPDECQPYELPDGSVVINARNQNNYHCHCRIVLRSYDACDTLRPRDVTFDPELVDPVVAAGAVVTSSGIVFFSNPAHPEFRVNLTLRWSFSNGTSWRKETVQLWPGPSGYSSLATLEGSMDGEEQAPQLYVLYEKGRNHYTESISVAKISVYGTL

SEQ ID NO: 78911 - protein, 415 aa, Homo sapiens; identical to SEQ ID NO: 78910
  Payload ID: 15727
  Gene Symbol: NEU1
  Gene Name: sialidase 1 (lysosomal sialidase)
  Uniprot ID: Q99519
  ENSP ID: ENSP00000364782

SEQ ID NO: 78912 - protein, 415 aa, Homo sapiens; identical to SEQ ID NO: 78910
  Payload ID: 15727
  Gene Symbol: NEU1
  Gene Name: sialidase 1 (lysosomal sialidase)
  Uniprot ID: Q99519
  ENSP ID: ENSP00000399309

SEQ ID NO: 78913 - protein, 415 aa, Homo sapiens; identical to SEQ ID NO: 78910
  Payload ID: 15727
  Gene Symbol: NEU1
  Gene Name: sialidase 1 (lysosomal sialidase)
  Uniprot ID: Q99519
  ENSP ID: ENSP00000401067

SEQ ID NO: 78914 - protein, 415 aa, Homo sapiens; identical to SEQ ID NO: 78910
  Payload ID: 15727
  Gene Symbol: NEU1
  Gene Name: sialidase 1 (lysosomal sialidase)
  Uniprot ID: Q99519
  ENSP ID: ENSP00000403720

SEQ ID NO: 78915 - protein, 415 aa, Homo sapiens; identical to SEQ ID NO: 78910
  Payload ID: 15727
  Gene Symbol: NEU1
  Gene Name: sialidase 1 (lysosomal sialidase)
  Uniprot ID: Q99519
  ENSP ID: ENSP00000408207

SEQ ID NO: 78916 - protein, 415 aa, Homo sapiens; identical to SEQ ID NO: 78910
  Payload ID: 15727
  Gene Symbol: NEU1
  Gene Name: sialidase 1 (lysosomal sialidase)
  Uniprot ID: Q99519
  ENSP ID: ENSP00000408957

SEQ ID NO: 78917 - protein, 415 aa, Homo sapiens; identical to SEQ ID NO: 78910
  Payload ID: 15727
  Gene Symbol: NEU1
  Gene Name: sialidase 1 (lysosomal sialidase)
  Uniprot ID: Q99519
  ENSP ID: ENSP00000409489

SEQ ID NO: 78918 - protein, 267 aa, Homo sapiens
  Payload ID: 15727
  Gene Symbol: NEU1
  Gene Name: sialidase 1 (lysosomal sialidase)
  ENSP ID: ENSP00000431628
MTGERPSTALPDRRWGPRILGFWGGCRVWVFAAIFLLLSLAASWSKAENDFGLVQPLVTMEQLLWVSGRQIGSVDTFRIPLITATPRGTLLAFAEARKMSSSDEGAKFIALRRSMDQGSTWSPTAFIVNDGDVPDGLNLGAVVSDVETGVVFLFYSLCAHKAGCQVASTMLVWSKDDGVSWSTPRNLSLDIGTEVFAPGPGSGIQKQREPRKGRLIVCGHGTLERDGVFCLLSDDHGASWRYGSGVSGIPYGQPKQENDFNPDECQL

SEQ ID NO: 78919 - protein, 267 aa, Homo sapiens; identical to SEQ ID NO: 78918
  Payload ID: 15727
  Gene Symbol: NEU1
  Gene Name: sialidase 1 (lysosomal sialidase)
  ENSP ID: ENSP00000432028

SEQ ID NO: 78920 - protein, 267 aa, Homo sapiens; identical to SEQ ID NO: 78918
  Payload ID: 15727
  Gene Symbol: NEU1
  Gene Name: sialidase 1 (lysosomal sialidase)
  ENSP ID: ENSP00000432513

SEQ ID NO: 78921 - protein, 72 aa, Homo sapiens
  Payload ID: 15727
  Gene Symbol: NEU1
  Gene Name: sialidase 1 (lysosomal sialidase)
  ENSP ID: ENSP00000432761
MTGERPSTALPDRRWGPRILGFWGGCRVWVFAAIFLLLSLAASWSKAENDFGLAAHGLLQRSLSMMGMSPMG

SEQ ID NO: 78922 - protein, 267 aa, Homo sapiens; identical to SEQ ID NO: 78918
  Payload ID: 15727
  Gene Symbol: NEU1
  Gene Name: sialidase 1 (lysosomal sialidase)
  ENSP ID: ENSP00000432824

SEQ ID NO: 78923 - protein, 72 aa, Homo sapiens; identical to SEQ ID NO: 78921
  Payload ID: 15727
  Gene Symbol: NEU1
  Gene Name: sialidase 1 (lysosomal sialidase)
  ENSP ID: ENSP00000432864

SEQ ID NO: 78924 - protein, 72 aa, Homo sapiens; identical to SEQ ID NO: 78921
  Payload ID: 15727
  Gene Symbol: NEU1
  Gene Name: sialidase 1 (lysosomal sialidase)
  ENSP ID: ENSP00000432995

SEQ ID NO: 78925 - protein, 267 aa, Homo sapiens; identical to SEQ ID NO: 78918
  Payload ID: 15727
  Gene Symbol: NEU1
  Gene Name: sialidase 1 (lysosomal sialidase)
  ENSP ID: ENSP00000433127

SEQ ID NO: 78926 - protein, 267 aa, Homo sapiens; identical to SEQ ID NO: 78918
  Payload ID: 15727
  Gene Symbol: NEU1
  Gene Name: sialidase 1 (lysosomal sialidase)
  ENSP ID: ENSP00000433185

SEQ ID NO: 78927 - protein, 267 aa, Homo sapiens; identical to SEQ ID NO: 78918
  Payload ID: 15727
  Gene Symbol: NEU1
  Gene Name: sialidase 1 (lysosomal sialidase)
  ENSP ID: ENSP00000433943

SEQ ID NO: 78928 - protein, 72 aa, Homo sapiens; identical to SEQ ID NO: 78921
  Payload ID: 15727
  Gene Symbol: NEU1
  Gene Name: sialidase 1 (lysosomal sialidase)
  ENSP ID: ENSP00000434436

SEQ ID NO: 78929 - protein, 72 aa, Homo sapiens; identical to SEQ ID NO: 78921
  Payload ID: 15727
  Gene Symbol: NEU1
  Gene Name: sialidase 1 (lysosomal sialidase)
  ENSP ID: ENSP00000435525

SEQ ID NO: 78930 - protein, 72 aa, Homo sapiens; identical to SEQ ID NO: 78921
  Payload ID: 15727
  Gene Symbol: NEU1
  Gene Name: sialidase 1 (lysosomal sialidase)
  ENSP ID: ENSP00000435814

SEQ ID NO: 78931 - protein, 72 aa, Homo sapiens; identical to SEQ ID NO: 78921
  Payload ID: 15727
  Gene Symbol: NEU1
  Gene Name: sialidase 1 (lysosomal sialidase)
  ENSP ID: ENSP00000436207

SEQ ID NO: 78932 - protein, 267 aa, Homo sapiens; identical to SEQ ID NO: 78918
  Payload ID: 15727
  Gene Symbol: NEU1
  Gene Name: sialidase 1 (lysosomal sialidase)
  ENSP ID: ENSP00000436889

SEQ ID NO: 78933 - protein, 380 aa, Homo sapiens
  Payload ID: 15728
  Gene Symbol: NEU2
  Gene Name: sialidase 2 (cytosolic sialidase)
  Uniprot ID: Q9Y3R4
  ENSP ID: ENSP00000233840
MASLPVLQKESVFQSGAHAYRIPALLYLPGQQSLLAFAEQRASKKDEHAELIVLRRGDYDAPTHQVQWQAQEVVAQARLDGHRSMNPCPLYDAQTGTLFLFFIAIPGQVTEQQQLQTRANVTRLCQVTSTDHGRTWSSPRDLTDAAIGPAYREWSTFAVGPGHCLQLHDRARSLVVPAYAYRKLHPIQRPIPSAFCFLSHDHGRTWARGHFVAQDTLECQVAEVETGEQRVVTLNARSHLRARVQAQSTNDGLDFQESQLVKKLVEPPPQGCQGSVISFPSPRSGPGSPAQWLLYTHPTHSWQRADLGAYLNPRPPAPEAWSEPVLLAKGSCAYSDLQSMGTGPDGSPLFGCLYEANDYEEIVFLMFTLKQAFPAEYLPQ

SEQ ID NO: 78934 - protein, 461 aa, Homo sapiens
  Payload ID: 15729
  Gene Symbol: NEU3
  Gene Name: sialidase 3 (membrane sialidase)
  Uniprot ID: Q9UQ49
  ENSP ID: ENSP00000294064
MRPADLPPRPMEESPASSSAPTETEEPGSSAEVMEEVTTCSFNSPLFRQEDDRGITYRIPALLYIPPTHTFLAFAEKRSTRRDEDALHLVLRRGLRIGQLVQWGPLKPLMEATLPGHRTMNPCPVWEQKSGCVFLFFICVRGHVTERQQIVSGRNAARLCFIYSQDAGCSWSEVRDLTEEVIGSELKHWATFAVGPGHGIQLQSGRLVIPAYTYYIPSWFFCFQLPCKTRPHSLMIYSDDLGVTWHHGRLIRPMVTVECEVAEVTGRAGHPVLYCSARTPNRCRAEALSTDHGEGFQRLALSRQLCEPPHGCQGSVVSFRPLEIPHRCQDSSSKDAPTIQQSSPGSSLRLEEEAGTPSESWLLYSHPTSRKQRVDLGIYLNQTPLEAACWSRPWILHCGPCGYSDLAALEEEGLFGCLFECGTKQECEQIAFRLFTHREILSHLQGDCTSPGRNPSQFKSN

SEQ ID NO: 78935 - protein, 461 aa, Homo sapiens; identical to SEQ ID NO: 78934
  Payload ID: 15729
  Gene Symbol: NEU3
  Gene Name: sialidase 3 (membrane sialidase)
  Uniprot ID: Q9UQ49
  ENSP ID: ENSP00000432097

SEQ ID NO: 78936 - protein, 101 aa, Homo sapiens
  Payload ID: 15729
  Gene Symbol: NEU3
  Gene Name: sialidase 3 (membrane sialidase)
  ENSP ID: ENSP00000434474
MRPADLPPRPMEESPASSSAPTETEEPGSSAVGAPEATDGSHTTGASDHEPLSCMGAEEWLCVPVLHLCAGPCHRASTDCVRQECCPPLLHLQSGCWMFME

SEQ ID NO: 78937 - protein, 170 aa, Homo sapiens
  Payload ID: 15729
  Gene Symbol: NEU3
  Gene Name: sialidase 3 (membrane sialidase)
  ENSP ID: ENSP00000434754
MRPADLPPRPMEESPASSSAPTETEEPGSSAEVMEEVTTCSFNSPLFRQEDDRGITYRIPALLYIPPTHTFLAFAEKRSTRRDEDALHLVLRRGLRIGQLVQVTLHPRSESGPQFLFTKLRALQDLCLFSSVQESPVWGAEAEKTAKTMALTECLLCARGTLGPHSHSVS

SEQ ID NO: 78938 - protein, 101 aa, Homo sapiens; identical to SEQ ID NO: 78936
  Payload ID: 15729
  Gene Symbol: NEU3
  Gene Name: sialidase 3 (membrane sialidase)
  ENSP ID: ENSP00000434907

SEQ ID NO: 78939 - protein, 139 aa, Homo sapiens
  Payload ID: 15729
  Gene Symbol: NEU3
  Gene Name: sialidase 3 (membrane sialidase)
  ENSP ID: ENSP00000436118
MRPADLPPRPMEESPASSSAPTETEEPGSSAEVMEEVTTCSFNSPLFRQEDDRGITYRIPALLYIPPTHTFLAFAEKRSTRRDEDALHLVLRRGLRIGQLVQRWGFAMLPRLVSNSWTQAILKCWDYSMSHCAWPFGGP

SEQ ID NO: 78940 - protein, 58 aa, Homo sapiens
  Payload ID: 15729
  Gene Symbol: NEU3
  Gene Name: sialidase 3 (membrane sialidase)
  ENSP ID: ENSP00000436540
MRPADLPPRPMEESPASSSAPTETEEPGSSAAPDLCETFWVAMPESPSILLLSSTRSA

SEQ ID NO: 78941 - protein, 497 aa, Homo sapiens
  Payload ID: 15730
  Gene Symbol: NEU4
  Gene Name: sialidase 4
  Uniprot ID: Q8WWR8
  ENSP ID: ENSP00000320318
MMSSAAFPRWLQSMGVPRTPSRTVLFERERTGLTYRVPSLLPVPPGPTLLAFVEQRLSPDDSHAHRLVLRRGTLAGGSVRWGALHVLGTAALAEHRSMNPCPVHDAGTGTVFLFFIAVLGHTPEAVQIATGRNAARLCCVASRDAGLSWGSARDLTEEAIGGAVQDWATFAVGPGHGVQLPSGRLLVPAYTYRVDRRECFGKICRTSPHSFAFYSDDHGRTWRCGGLVPNLRSGECQLAAVDGGQAGSFLYCNARSPLGSRVQALSTDEGTSFLPAERVASLPETAWGCQGSIVGFPAPAPNRPRDDSWSVGPGSPLQPPLLGPGVHEPPEEAAVDPRGGQVPGGPFSRLQPRGDGPRQPGPRPGVSGDVGSWTLALPMPFAAPPQSPTWLLYSHPVGRRARLHMGIRLSQSPLDPRSWTEPWVIYEGPSGYSDLASIGPAPEGGLVFACLYESGARTSYDEISFCTFSLREVLENVPASPKPPNLGDKPRGCCWPS

SEQ ID NO: 78942 - protein, 484 aa, Homo sapiens
  Payload ID: 15730
  Gene Symbol: NEU4
  Gene Name: sialidase 4
  Uniprot ID: Q8WWR8
  ENSP ID: ENSP00000375830
MGVPRTPSRTVLFERERTGLTYRVPSLLPVPPGPTLLAFVEQRLSPDDSHAHRLVLRRGTLAGGSVRWGALHVLGTAALAEHRSMNPCPVHDAGTGTVFLFFIAVLGHTPEAVQIATGRNAARLCCVASRDAGLSWGSARDLTEEAIGGAVQDWATFAVGPGHGVQLPSGRLLVPAYTYRVDRRECFGKICRTSPHSFAFYSDDHGRTWRCGGLVPNLRSGECQLAAVDGGQAGSFLYCNARSPLGSRVQALSTDEGTSFLPAERVASLPETAWGCQGSIVGFPAPAPNRPRDDSWSVGPGSPLQPPLLGPGVHEPPEEAAVDPRGGQVPGGPFSRLQPRGDGPRQPGPRPGVSGDVGSWTLALPMPFAAPPQSPTWLLYSHPVGRRARLHMGIRLSQSPLDPRSWTEPWVIYEGPSGYSDLASIGPAPEGGLVFACLYESGARTSYDEISFCTFSLREVLENVPASPKPPNLGDKPRGCCWPS

SEQ ID NO: 78943 - protein, 484 aa, Homo sapiens; identical to SEQ ID NO: 78942
  Payload ID: 15730
  Gene Symbol: NEU4
  Gene Name: sialidase 4
  Uniprot ID: Q8WWR8
  ENSP ID: ENSP00000384804

SEQ ID NO: 78944 - protein, 496 aa, Homo sapiens
  Payload ID: 15730
  Gene Symbol: NEU4
  Gene Name: sialidase 4
  Uniprot ID: Q8WWR8
  ENSP ID: ENSP00000385149
MMSSAAFPRWLSMGVPRTPSRTVLFERERTGLTYRVPSLLPVPPGPTLLAFVEQRLSPDDSHAHRLVLRRGTLAGGSVRWGALHVLGTAALAEHRSMNPCPVHDAGTGTVFLFFIAVLGHTPEAVQIATGRNAARLCCVASRDAGLSWGSARDLTEEAIGGAVQDWATFAVGPGHGVQLPSGRLLVPAYTYRVDRRECFGKICRTSPHSFAFYSDDHGRTWRCGGLVPNLRSGECQLAAVDGGQAGSFLYCNARSPLGSRVQALSTDEGTSFLPAERVASLPETAWGCQGSIVGFPAPAPNRPRDDSWSVGPGSPLQPPLLGPGVHEPPEEAAVDPRGGQVPGGPFSRLQPRGDGPRQPGPRPGVSGDVGSWTLALPMPFAAPPQSPTWLLYSHPVGRRARLHMGIRLSQSPLDPRSWTEPWVIYEGPSGYSDLASIGPAPEGGLVFACLYESGARTSYDEISFCTFSLREVLENVPASPKPPNLGDKPRGCCWPS

SEQ ID NO: 78945 - protein, 484 aa, Homo sapiens; identical to SEQ ID NO: 78942
  Payload ID: 15730
  Gene Symbol: NEU4
  Gene Name: sialidase 4
  Uniprot ID: Q8WWR8
  ENSP ID: ENSP00000385402

SEQ ID NO: 78946 - protein, 260 aa, Homo sapiens
  Payload ID: 15730
  Gene Symbol: NEU4
  Gene Name: sialidase 4
  ENSP ID: ENSP00000388707
MGVPRTPSRTVLFERERTGLTYRVPSLLPVPPGPTLLAFVEQRLSPDDSHAHRLVLRRGTLAGGSVRWGALHVLGTAALAEHRSMNPCPVHDAGTGTVFLFFIAVLGHTPEAVQIATGRNAARLCCVASRDAGLSWGSARDLTEEAIGGAVQDWATFAVGPGHGVQLPSGRLLVPAYTYRVDRRECFGKICRTSPHSFAFYSDDHGRTWRCGGLVPNLRSGECQLAAVDGGQAGSFLYCNARSPLGSRVQALSTDEGTSF

SEQ ID NO: 78947 - protein, 158 aa, Homo sapiens
  Payload ID: 15730
  Gene Symbol: NEU4
  Gene Name: sialidase 4
  ENSP ID: ENSP00000394769
MGVPRTPSRTVLFERERTGLTYRVPSLLPVPPGPTLLAFVEQRLSPDDSHAHRLVLRRGTLAGGSVRWGALHVLGTAALAEHRSMNPCPVHDAGTGTVFLFFIAVLGHTPEAVQIATGRNAARLCCVASRDAGLSWGSARDLTEEAIGGAVQEEKAGR

SEQ ID NO: 78948 - protein, 144 aa, Homo sapiens
  Payload ID: 15730
  Gene Symbol: NEU4
  Gene Name: sialidase 4
  ENSP ID: ENSP00000396197
MTSCWANSGMTLCPGHMAGRVPGALWPASPAPWHQPAWPRSMGVPRTPSRTVLFERERTGLTYRVPSLLPVPPGPTLLAFVEQRLSPDDSHAHRLVLRRGTLAGGSVRWGALHVLGTAALAEHRSMNPCPVHDAGTGTVFLFFI

SEQ ID NO: 78949 - protein, 214 aa, Homo sapiens
  Payload ID: 15730
  Gene Symbol: NEU4
  Gene Name: sialidase 4
  ENSP ID: ENSP00000397167
MGVPRTPSRTVLFERERTGLTYRVPSLLPVPPGPTLLAFVEQRLSPDDSHAHRLVLRRGTLAGGSVRTGPHSLWVPATVCSCPQAACWYPPTPTAWTAESVLARSAGPALTPSPSTAMTTAAPGAVEASCPTCAQASASWQRWTVGRPAASSTAMPGAHWAAVCRRSALTRAPPSCPQSAWLPCPRLPGAARAASWASQPPPPTGHGMTVGQWA

SEQ ID NO: 78950 - protein, 188 aa, Homo sapiens
  Payload ID: 15730
  Gene Symbol: NEU4
  Gene Name: sialidase 4
  ENSP ID: ENSP00000397860
MGVPRTPSRTVLFERERTGLTYRVPSLLPVPPGPTLLAFVEQRLSPDDSHAHRLVLRRGTLAGGSVRWGALHVLGTAALAEHRSMNPCPVHDAGTGTVFLFFIAVLGHTPEAVQIATGRNAARLCCVASRDAGLSWGSARDLTEEAIGGAVQDWATFAVGPGHGVQLPSGRLLVPAYTYRVDRRECFG

SEQ ID NO: 78951 - protein, 77 aa, Homo sapiens
  Payload ID: 15730
  Gene Symbol: NEU4
  Gene Name: sialidase 4
  ENSP ID: ENSP00000398571
MGVPRTPSRTVLFERERTGLTYRVPSLLPVPPGPTLLAFVEQRLSPDDSHAHRLVLRRGTLAGGSVRWGALHVLGTA

SEQ ID NO: 78952 - protein, 214 aa, Homo sapiens
  Payload ID: 15730
  Gene Symbol: NEU4
  Gene Name: sialidase 4
  ENSP ID: ENSP00000406678
MMSSAAFPRWLSMGVPRTPSRTVLFERERTGLTYRVPSLLPVPPGPTLLAFVEQRLSPDDSHAHRLVLRRGTLAGGSVRTGPHSLWVPATVCSCPQAACWYPPTPTAWTAESVLARSAGPALTPSPSTAMTTAAPGAVEASCPTCAQASASWQRWTVGRPAASSTAMPGAHWAAVCRRSALTRAPPSCPQSAWLPCPRLPGAARAASWASQPPP

SEQ ID NO: 78953 - protein, 52 aa, Homo sapiens
  Payload ID: 15730
  Gene Symbol: NEU4
  Gene Name: sialidase 4
  ENSP ID: ENSP00000412688
MPPHPGPALVGVAWEQTPRMAAGPHSALELLIPVGASQSMGVPRTPSRTVLF

SEQ ID NO: 78954 - protein, 484 aa, Homo sapiens; identical to SEQ ID NO: 78942
  Payload ID: 15730
  Gene Symbol: NEU4
  Gene Name: sialidase 4
  Uniprot ID: Q8WWR8
  ENSP ID: ENSP00000478409

SEQ ID NO: 78955 - protein, 496 aa, Homo sapiens; identical to SEQ ID NO: 78944
  Payload ID: 15730
  Gene Symbol: NEU4
  Gene Name: sialidase 4
  Uniprot ID: Q8WWR8
  ENSP ID: ENSP00000482722

SEQ ID NO: 78956 - protein, 484 aa, Homo sapiens; identical to SEQ ID NO: 78942
  Payload ID: 15730
  Gene Symbol: NEU4
  Gene Name: sialidase 4
  Uniprot ID: Q8WWR8
  ENSP ID: ENSP00000483726

SEQ ID NO: 78957 - protein, 497 aa, Homo sapiens; identical to SEQ ID NO: 78941
  Payload ID: 15730
  Gene Symbol: NEU4
  Gene Name: sialidase 4
  Uniprot ID: Q8WWR8
  ENSP ID: ENSP00000485701

SEQ ID NO: 78958 - protein, 188 aa, Homo sapiens; identical to SEQ ID NO: 78950
  Payload ID: 15730
  Gene Symbol: NEU4
  Gene Name: sialidase 4
  ENSP ID: ENSP00000485788

SEQ ID NO: 78959 - protein, 214 aa, Homo sapiens; identical to SEQ ID NO: 78952
  Payload ID: 15730
  Gene Symbol: NEU4
  Gene Name: sialidase 4
  ENSP ID: ENSP00000485934

SEQ ID NO: 78960 - protein, 144 aa, Homo sapiens; identical to SEQ ID NO: 78948
  Payload ID: 15730
  Gene Symbol: NEU4
  Gene Name: sialidase 4
  ENSP ID: ENSP00000485992

SEQ ID NO: 78961 - protein, 52 aa, Homo sapiens; identical to SEQ ID NO: 78953
  Payload ID: 15730
  Gene Symbol: NEU4
  Gene Name: sialidase 4
  ENSP ID: ENSP00000486118

SEQ ID NO: 78962 - protein, 214 aa, Homo sapiens; identical to SEQ ID NO: 78949
  Payload ID: 15730
  Gene Symbol: NEU4
  Gene Name: sialidase 4
  ENSP ID: ENSP00000486591

SEQ ID NO: 78963 - protein, 484 aa, Homo sapiens; identical to SEQ ID NO: 78942
  Payload ID: 15730
  Gene Symbol: NEU4
  Gene Name: sialidase 4
  Uniprot ID: Q8WWR8
  ENSP ID: ENSP00000486602

SEQ ID NO: 78964 - protein, 260 aa, Homo sapiens; identical to SEQ ID NO: 78946
  Payload ID: 15730
  Gene Symbol: NEU4
  Gene Name: sialidase 4
  ENSP ID: ENSP00000487103

SEQ ID NO: 78965 - protein, 158 aa, Homo sapiens; identical to SEQ ID NO: 78947
  Payload ID: 15730
  Gene Symbol: NEU4
  Gene Name: sialidase 4
  ENSP ID: ENSP00000487192

SEQ ID NO: 78966 - protein, 77 aa, Homo sapiens; identical to SEQ ID NO: 78951
  Payload ID: 15730
  Gene Symbol: NEU4
  Gene Name: sialidase 4
  ENSP ID: ENSP00000487199

SEQ ID NO: 78967 - protein, 400 aa, Homo sapiens
  Payload ID: 15731
  Gene Symbol: SPN
  Gene Name: sialophorin
  Uniprot ID: P16150
  ENSP ID: ENSP00000353238
MATLLLLLGVLVVSPDALGSTTAVQTPTSGEPLVSTSEPLSSKMYTTSITSDPKADSTGDQTSALPPSTSINEGSPLWTSIGASTGSPLPEPTTYQEVSIKMSSVPQETPHATSHPAVPITANSLGSHTVTGGTITTNSPETSSRTSGAPVTTAASSLETSRGTSGPPLTMATVSLETSKGTSGPPVTMATDSLETSTGTTGPPVTMTTGSLEPSSGASGPQVSSVKLSTMMSPTTSTNASTVPFRNPDENSRGMLPVAVLVALLAVIVLVALLLLWRRRQKRRTGALVLSRGGKRNGVVDAWAGPAQVPEEGAVTVTVGGSGGDKGSGFPDGEGSSRRPTLTTFFGRRKSRQGSLAMEELKSGSGPSLKGEEEPLVASEDGAVDAPAPDEPEGGDGAAP

SEQ ID NO: 78968 - protein, 400 aa, Homo sapiens; identical to SEQ ID NO: 78967
  Payload ID: 15731
  Gene Symbol: SPN
  Gene Name: sialophorin
  Uniprot ID: P16150
  ENSP ID: ENSP00000378787

SEQ ID NO: 78969 - protein, 355 aa, Homo sapiens
  Payload ID: 15731
  Gene Symbol: SPN
  Gene Name: sialophorin
  ENSP ID: ENSP00000412907
MATLLLLLGVLVVSPDALGSTTAVQTPTSGEPLVSTSEPLSSKMYTTSITSDPKADSTGDQTSALPPSTSINEGSPLWTSIGASTGSPLPEPTTYQEVSIKMSSVPQETPHATSHPAVPITANSLGSHTVTGGTITTNSPETSSRTSGAPVTTAASSLETSRGTSGPPLTMATVSLETSKGTSGPPVTMATDSLETSTGTTGPPVTMTTGSLEPSSGASGPQVSSVKLSTMMSPTTSTNASTVPFRNPDENSRGMLPVAVLVALLAVIVLVALLLLWRRRQKRRTGALVLSRGGKRNGVVDAWAGPAQVPEEGAVTVTVGGSGGDKGSGFPDGEGSSRRPTLTTFFGRRKSRQGS

SEQ ID NO: 78970 - protein, 400 aa, Homo sapiens; identical to SEQ ID NO: 78967
  Payload ID: 15731
  Gene Symbol: SPN
  Gene Name: sialophorin
  Uniprot ID: P16150
  ENSP ID: ENSP00000455266

SEQ ID NO: 78971 - protein, 827 aa, Homo sapiens
  Payload ID: 15732
  Gene Symbol: SIDT1
  Gene Name: SID1 transmembrane family, member 1
  Uniprot ID: Q9NXL6
  ENSP ID: ENSP00000264852
MRGCLRLALLCALPWLLLAASPGHPAKSPRQPPAPRRDPFDAARGADFDHVYSGVVNLSTENIYSFNYTSQPDQVTAVRVYVNSSSENLNYPVLVVVRQQKEVLSWQVPLLFQGLYQRSYNYQEVSRTLCPSEATNETGPLQQLIFVDVASMAPLGAQYKLLVTKLKHFQLRTNVAFHFTASPSQPQYFLYKFPKDVDSVIIKVVSEMAYPCSVVSVQNIMCPVYDLDHNVEFNGVYQSMTKKAAITLQKKDFPGEQFFVVFVIKPEDYACGGSFFIQEKENQTWNLQRKKNLEVTIVPSIKESVYVKSSLFSVFIFLSFYLGCLLVGFVHYLRFQRKSIDGSFGSNDGSGNMVASHPIAASTPEGSNYGTIDESSSSPGRQMSSSDGGPPGQSDTDSSVEESDFDTMPDIESDKNIIRTKMFLYLSDLSRKDRRIVSKKYKIYFWNIITIAVFYALPVIQLVITYQTVVNVTGNQDICYYNFLCAHPLGVLSAFNNILSNLGHVLLGFLFLLIVLRRDILHRRALEAKDIFAVEYGIPKHFGLFYAMGIALMMEGVLSACYHVCPNYSNFQFDTSFMYMIAGLCMLKLYQTRHPDINASAYSAYASFAVVIMVTVLGVVFGKNDVWFWVIFSAIHVLASLALSTQIYYMGRFKIDLGIFRRAAMVFYTDCIQQCSRPLYMDRMVLLVVGNLVNWSFALFGLIYRPRDFASYMLGIFICNLLLYLAFYIIMKLRSSEKVLPVPLFCIVATAVMWAAALYFFFQNLSSWEGTPAESREKNRECILLDFFDDHDIWHFLSATALFFSFLVLLTLDDDLDVVRRDQIPVF

SEQ ID NO: 78972 - protein, 832 aa, Homo sapiens
  Payload ID: 15732
  Gene Symbol: SIDT1
  Gene Name: SID1 transmembrane family, member 1
  Uniprot ID: Q9NXL6
  ENSP ID: ENSP00000377416
MRGCLRLALLCALPWLLLAASPGHPAKSPRQPPAPRRDPFDAARGADFDHVYSGVVNLSTENIYSFNYTSQPDQVTAVRVYVNSSSENLNYPVLVVVRQQKEVLSWQVPLLFQGLYQRSYNYQEVSRTLCPSEATNETGPLQQLIFVDVASMAPLGAQYKLLVTKLKHFQLRTNVAFHFTASPSQPQYFLYKFPKDVDSVIIKVVSEMAYPCSVVSVQNIMCPVYDLDHNVEFNGVYQSMTKKAAITLQKKDFPGEQFFVVFVIKPEDYACGGSFFIQEKENQTWNLQRKKNLEVTIVPSIKESVYVKSSLFSVFIFLSFYLGCLLVGFVHYLRFQRKSIDGSFGSNDGSGNMVASHPIAASTPEGSNYGTIDESSSSPGRQMSSSDGGPPGQSDTDSSVEESDFDTMPDIESDKNIIRTKMFLYLSDLSRKDRRIVSKKYKIYFWNIITIAVFYALPVIQLVITYQTVVNVTGNQDICYYNFLCAHPLGVLSAFNNILSNLGHVLLGFLFLLIVLRRDILHRRALEAKDIFAVEYGIPKHFGLFYAMGIALMMEGVLSACYHVCPNYSNFQFDTSFMYMIAGLCMLKLYQTRHPDINASAYSAYASFAVVIMVTVLGVVFGKNDVWFWVIFSAIHVLASLALSTQIYYMGRFKIDVSDTDLGIFRRAAMVFYTDCIQQCSRPLYMDRMVLLVVGNLVNWSFALFGLIYRPRDFASYMLGIFICNLLLYLAFYIIMKLRSSEKVLPVPLFCIVATAVMWAAALYFFFQNLSSWEGTPAESREKNRECILLDFFDDHDIWHFLSATALFFSFLVLLTLDDDLDVVRRDQIPVF

SEQ ID NO: 78973 - protein, 855 aa, Homo sapiens
  Payload ID: 15733
  Gene Symbol: SIDT2
  Gene Name: SID1 transmembrane family, member 2
  ENSP ID: ENSP00000278951
MFALGLPFLVLLVASVESHLGVLGPKNVSQKDAEFERTYVDEVNSELVNIYTFNHTVTRNRTEGVRVSVNVLNKQKGAPLLFVVRQKEAVVSFQVPLILRGMFQRKYLYQKVERTLCQPPTKNESEIQFFYVDVSTLSPVNTTYQLRVSRMDDFVLRTGEQFSFNTTAAQPQYFKYEFPEGVDSVIVKVTSNKAFPCSVISIQDVLCPVYDLDNNVAFIGMYQTMTKKAAITVQRKDFPSNSFYVVVVVKTEDQACGGSLPFYPFAEDEPVDQGHRQKTLSVLVSQAVTSEAYVSGMLFCLGIFLSFYLLTVLLACWENWRQKKKTLLVAIDRACPESGHPRVLADSFPGSSPYEGYNYGSFENVSGSTDGLVDSAGTGDLSYGYQGHDQFKRRLPSGQMRQLCIAMGRSFEPVGTRPRVDSMSSVEEDDYDTLTDIDSDKNVIRTKQYLYVADLARKDKRVLRKKYQIYFWNIATIAVFYALPVVQLVITYQTVVNVTGNQDICYYNFLCAHPLGNLSAFNNILSNLGYILLGLLFLLIILQREINHNRALLRNDLCALECGIPKHFGLFYAMGTALMMEGLLSACYHVCPNYTNFQFDTSFMYMIAGLCMLKLYQKRHPDINASAYSAYACLAIVIFFSVLGVVFGKGNTAFWIVFSIIHIIATLLLSTQLYYMGRWKLDSGIFRRILHVLYTDCIRQCSGPLYVDRMVLLVMGNVINWSLAAYGLIMRPNDFASYLLAIGICNLLLYFAFYIIMKLRSGERIKLIPLLCIVCTSVVWGFALFFFFQGLSTWQKTPAESREHNRDCILLDFFDDHDIWHFLSSIAMFGSFLVSGPPGRAGWVREGSSCLLLCG

SEQ ID NO: 78974 - protein, 832 aa, Homo sapiens
  Payload ID: 15733
  Gene Symbol: SIDT2
  Gene Name: SID1 transmembrane family, member 2
  Uniprot ID: Q8NBJ9
  ENSP ID: ENSP00000314023
MFALGLPFLVLLVASVESHLGVLGPKNVSQKDAEFERTYVDEVNSELVNIYTFNHTVTRNRTEGVRVSVNVLNKQKGAPLLFVVRQKEAVVSFQVPLILRGMFQRKYLYQKVERTLCQPPTKNESEIQFFYVDVSTLSPVNTTYQLRVSRMDDFVLRTGEQFSFNTTAAQPQYFKYEFPEGVDSVIVKVTSNKAFPCSVISIQDVLCPVYDLDNNVAFIGMYQTMTKKAAITVQRKDFPSNSFYVVVVVKTEDQACGGSLPFYPFAEDEPVDQGHRQKTLSVLVSQAVTSEAYVSGMLFCLGIFLSFYLLTVLLACWENWRQKKKTLLVAIDRACPESGHPRVLADSFPGSSPYEGYNYGSFENVSGSTDGLVDSAGTGDLSYGYQGRSFEPVGTRPRVDSMSSVEEDDYDTLTDIDSDKNVIRTKQYLYVADLARKDKRVLRKKYQIYFWNIATIAVFYALPVVQLVITYQTVVNVTGNQDICYYNFLCAHPLGNLSAFNNILSNLGYILLGLLFLLIILQREINHNRALLRNDLCALECGIPKHFGLFYAMGTALMMEGLLSACYHVCPNYTNFQFDTSFMYMIAGLCMLKLYQKRHPDINASAYSAYACLAIVIFFSVLGVVFGKGNTAFWIVFSIIHIIATLLLSTQLYYMGRWKLDSGIFRRILHVLYTDCIRQCSGPLYVDRMVLLVMGNVINWSLAAYGLIMRPNDFASYLLAIGICNLLLYFAFYIIMKLRSGERIKLIPLLCIVCTSVVWGFALFFFFQGLSTWQKTPAESREHNRDCILLDFFDDHDIWHFLSSIAMFGSFLVLLTLDDDLDTVQRDKIYVF

SEQ ID NO: 78975 - protein, 829 aa, Homo sapiens
  Payload ID: 15733
  Gene Symbol: SIDT2
  Gene Name: SID1 transmembrane family, member 2
  ENSP ID: ENSP00000399635
MFALGLPFLVLLVASVESHLGVLGPKNVSQKDAEFERTYVDEVNSELVNIYTFNHTVTRNRTEGVRVSVNVLNKQKGAPLLFVVRQKEAVVSFQVPLILRGMFQRKYLYQKVERTLCQPPTKNESEIQFFYVDVSTLSPVNTTYQLRVSRMDDFVLRTGEQFSFNTTAAQPQYFKYEFPEGVDSVIVKVTSNKAFPCSVISIQDVLCPVYDLDNNVAFIGMYQTMTKKAAITVQRKDFPSNSFYVVVVVKTEDQACGGSLPFYPFAEDEPVDQGHRQKTLSVLVSQAVTSEAYVSGMLFCLGIFLSFYLLTVLLACWENWRQKKKTLLVAIDRACPESASLLGHPRVLADSFPGSSPYEGYNYGSFENVSGSTDGLVDSAGTGDLSYGYQGTRPRVDSMSSVEEDDYDTLTDIDSDKNVIRTKQYLYVADLARKDKRVLRKKYQIYFWNIATIAVFYALPVVQLVITYQTVVNVTGNQDICYYNFLCAHPLGNLSAFNNILSNLGYILLGLLFLLIILQREINHNRALLRNDLCALECGIPKHFGLFYAMGTALMMEGLLSACYHVCPNYTNFQFDTSFMYMIAGLCMLKLYQKRHPDINASAYSAYACLAIVIFFSVLGVVFGKGNTAFWIVFSIIHIIATLLLSTQLYYMGRWKLDSGIFRRILHVLYTDCIRQCSGPLYVDRMVLLVMGNVINWSLAAYGLIMRPNDFASYLLAIGICNLLLYFAFYIIMKLRSGERIKLIPLLCIVCTSVVWGFALFFFFQGLSTWQKTPAESREHNRDCILLDFFDDHDIWHFLSSIAMFGSFLVLLTLDDDLDTVQRDKIYVF

SEQ ID NO: 78976 - protein, 110 aa, Homo sapiens
  Payload ID: 15733
  Gene Symbol: SIDT2
  Gene Name: SID1 transmembrane family, member 2
  ENSP ID: ENSP00000431176
MFALGLPFLVLLVASVESHLGVLGPKNVSQKDAEFERTYVDEVNSELVNIYTFNHTVTRNRTEGVRVSVNVLNKQKGAPLLFVVRQKEAVVSFQVPLILRGMFQRKYLYQ

SEQ ID NO: 78977 - protein, 124 aa, Homo sapiens
  Payload ID: 15733
  Gene Symbol: SIDT2
  Gene Name: SID1 transmembrane family, member 2
  ENSP ID: ENSP00000432432
MRPNDFASYLLAIGICNLLLYFAFYIIMKLRSGERIKLIPLLCIVCTSVVWGFALFFFFQGLSTWQKTPAESREHNRDCILLDFFDDHDIWHFLSSIAMFGSFLVLLTLDDDLDTVQRDKIYVF

SEQ ID NO: 78978 - protein, 97 aa, Homo sapiens
  Payload ID: 15733
  Gene Symbol: SIDT2
  Gene Name: SID1 transmembrane family, member 2
  ENSP ID: ENSP00000435004
MFQRKYLYQKVERTLCQPPTKNESEIQFFYVDVSTLSPVNTTYQLRVSRMDDFVLRTGEQFSFNTTAAQPQYFKYEFPEGVDSVIVKVTSNKAFPCS

SEQ ID NO: 78979 - protein, 133 aa, Homo sapiens
  Payload ID: 15733
  Gene Symbol: SIDT2
  Gene Name: SID1 transmembrane family, member 2
  ENSP ID: ENSP00000435890
GIFRRILHVLYTDCIRQCSGPLYVDRMVLLVMGNVINWSLAAYGLIMRPNDFASYLLAIGICNLLLYFAFYIIMKKTPAESREHNRDCILLDFFDDHDIWHFLSSIAMFGSFLVLLTLDDDLDTVQRDKIYVF

SEQ ID NO: 78980 - protein, 170 aa, Homo sapiens
  Payload ID: 15733
  Gene Symbol: SIDT2
  Gene Name: SID1 transmembrane family, member 2
  ENSP ID: ENSP00000436983
MDDFVLRTGEQFSFNTTAAQPQYFKYEFPEGVDSVIVKVTSNKAFPCSVISIQDVLCPVYDLDNNVAFIGMYQTMTKKAAITVQRKDFPSNSFYVVVVVKTEDQACGGSLPFYPFAEDEPVDQGHRQKTLSVLVSQAVTSEAYVSGMLFCLGIFLSFYLLTVLLACWENW

SEQ ID NO: 78981 - protein, 832 aa, Homo sapiens; identical to SEQ ID NO: 78974
  Payload ID: 15733
  Gene Symbol: SIDT2
  Gene Name: SID1 transmembrane family, member 2
  Uniprot ID: Q8NBJ9
  ENSP ID: ENSP00000482762

SEQ ID NO: 78982 - protein, 855 aa, Homo sapiens; identical to SEQ ID NO: 78973
  Payload ID: 15733
  Gene Symbol: SIDT2
  Gene Name: SID1 transmembrane family, member 2
  ENSP ID: ENSP00000486114

SEQ ID NO: 78983 - protein, 2193 aa, Homo sapiens
  Payload ID: 15734
  Gene Symbol: SDK1
  Gene Name: sidekick cell adhesion molecule 1
  ENSP ID: ENSP00000374182
MARGARPSAAGGGGGGAEPPERAGPGRPRGSPPGRARPSLAPRPGPEPSRPRAAPETSGGDTAGAGRCGGRRAAKLGPGRRGWWALLALQLHLLRALAQDDVAPYFKTEPGLPQIHLEGNRLVLTCLAEGSWPLEFKWMRDDSELTTYSSEYKYIIPSLQKLDAGFYRCVVRNRMGALLQRKSEVQVAYMGSFMDTDQRKTVSQGRAAILNLLPITSYPRPQVTWFREGHKIIPSNRIAITLENQLVILATTTSDAGAYYVQAVNEKNGENKTSPFIHLSIARDVGTPETMAPTIVVPPGNRSVVAGSSETTLECIASARPVEDLSVTWKRNGVRITSGLHSFGRRLTISNPTSADTGPYVCEAALPGSAFEPARATAFLFIIEPPYFTAEPESRISAEVEETVDIGCQAMGVPLPTLQWYKDAISISRLQNPRYKVLASGGLRIQKLRPEDSGIFQCFASNEGGEIQTHTYLDVTNIAPVFTQRPVDTTVTDGMTAILRCEVSGAPKPAITWKRENHILASGSVRIPRFMLLESGGLQIAPVFIQDAGNYTCYAANTEGSLNASATLTVWNRTSIVHPPEDHVVIKGTTATLHCGATHDPRVSLRYVWKKDNVALTPSSTSRIVVEKDGSLLISQTWSGDIGDYSCEIVSEGGNDSRMARLEVIELPHSPQNLLVSPNSSHSHAVVLSWVRPFDGNSPILYYIVELSENNSPWKVHLSNVGPEMTGVTVSGLTPARTYQFRVCAVNEVGRGQYSAETSRLMLPEEPPSAPPKNIVASGRTNQSIMVQWQPPPETEHNGVLRGYILRYRLAGLPGEYQQRNITSPEVNYCLVTDLIIWTQYEIQVAAYNGAGLGVFSRAVTEYTLQGVPTAPPQNVQTEAVNSTTIQFLWNPPPQQFINGINQGYKLLAWPADAPEAVTVVTIAPDFHGVHHGHITNLKKFTAYFTSVLCFTTPGDGPPSTPQLVWTQEDKPGAVGHLSFTEILDTSLKVSWQEPLEKNGIITGYQISWEVYGRNDSRLTHTLNSTTHEYKIQGLSSLTTYTIDVAAVTAVGTGLVTSSTISSGVPPDLPGAPSNLVISNISPRSATLQFRPGYDGKTSISRWIVEGQVGAIGDEEEWVTLYEEENEPDAQMLEIPNLTPYTHYRFRMKQVNIVGPSPYSPSSRVIQTLQAPPDVAPTSVTVRTASETSLRLRWVPLPDSQYNGNPESVGYRIKYWRSDLQSSAVAQVVSDRLEREFTIEELEEWMEYELQMQAFNAVGAGPWSEVVRGRTRESVPSAAPENVSAEAVSSTQILLTWTSVPEQDQNGLILGYKILFRAKDLDPEPRSHIVRGNHTQSALLAGLRKFVLYELQVLAFTRIGNGVPSTPLILERTKDDAPGPPVRLVFPEVRLTSVRIVWQPPEEPNGIILGYQIAYRLASSSPHTFTTVEVGATVRQFTATDLAPESAYIFRLSAKTRQGWGEPLEATVITTEKRERPAPPRELLVPQAEVTARSLRLQWVPGSDGASPIRYFTMQVRELPRGEWQTYSSSISHEATACVVDRLRPFTSYKLRLKATNDIGDSDFSSETEAVTTLQDVPGEPPGSVSATPHTTSSVLIQWQPPRDESLNGLLQGYRIYYRELEYEAGSGTEAKTLKNPIALHAELTDLKKYRRYEVIMTAYNIIGESPASAPVEVFVGEAAPAMAPQNVQVTPLTASQLEVTWDPPPPESQNGNIQGYKIYYWEADSQNETEKMKVLFLPEPVVRLKNLTSHTKYLVSISAFNAAGDGPKSDPQQGRTHQAAPGAPSFLAFSEITSTTLNVSWGEPAAANGILQGYRVVYEPLAPVQGVSKVVTVEVRGNWQRWLKVRDLTKGVTYFFRVQARTITYGPELQANITAGPAEGSPGSPRDVLVTKSASELTLQWTEGHSGDTPTTGYVIEARPSDEGLWDMFVKDIPRSATSYTLSLDKLRQGVTYEFRVVAVNEAGYGEPSNPSTAVSAQVEAPFYEEWWFLLVMALSSLIVILLVVFALVLHGQNKKYKNCSTGKGISTMEESVTLDNGGFAALELSSRHLNVKSTFSKKNGTRSPPRPSPGGLHYSDEDICNKYNGAVLTESVSLKEKSADASESEATDSDYEDALPKHSFVNHYMSDPTYYNSWKRRAQGRAPAPHRYEAVAGSEAGAQLHPVITTQSAGGVYTPAGPGARTPLTGFSSFV

SEQ ID NO: 78984 - protein, 2213 aa, Homo sapiens
  Payload ID: 15734
  Gene Symbol: SDK1
  Gene Name: sidekick cell adhesion molecule 1
  Uniprot ID: Q7Z5N4
  ENSP ID: ENSP00000385899
MARGARPSAAGGGGGGAEPPERAGPGRPRGSPPGRARPSLAPRPGPEPSRPRAAPETSGGDTAGAGRCGGRRAAKLGPGRRGWWALLALQLHLLRALAQDDVAPYFKTEPGLPQIHLEGNRLVLTCLAEGSWPLEFKWMRDDSELTTYSSEYKYIIPSLQKLDAGFYRCVVRNRMGALLQRKSEVQVAYMGSFMDTDQRKTVSQGRAAILNLLPITSYPRPQVTWFREGHKIIPSNRIAITLENQLVILATTTSDAGAYYVQAVNEKNGENKTSPFIHLSIARDVGTPETMAPTIVVPPGNRSVVAGSSETTLECIASARPVEDLSVTWKRNGVRITSGLHSFGRRLTISNPTSADTGPYVCEAALPGSAFEPARATAFLFIIEPPYFTAEPESRISAEVEETVDIGCQAMGVPLPTLQWYKDAISISRLQNPRYKVLASGGLRIQKLRPEDSGIFQCFASNEGGEIQTHTYLDVTNIAPVFTQRPVDTTVTDGMTAILRCEVSGAPKPAITWKRENHILASGSVRIPRFMLLESGGLQIAPVFIQDAGNYTCYAANTEGSLNASATLTVWNRTSIVHPPEDHVVIKGTTATLHCGATHDPRVSLRYVWKKDNVALTPSSTSRIVVEKDGSLLISQTWSGDIGDYSCEIVSEGGNDSRMARLEVIELPHSPQNLLVSPNSSHSHAVVLSWVRPFDGNSPILYYIVELSENNSPWKVHLSNVGPEMTGVTVSGLTPARTYQFRVCAVNEVGRGQYSAETSRLMLPEEPPSAPPKNIVASGRTNQSIMVQWQPPPETEHNGVLRGYILRYRLAGLPGEYQQRNITSPEVNYCLVTDLIIWTQYEIQVAAYNGAGLGVFSRAVTEYTLQGVPTAPPQNVQTEAVNSTTIQFLWNPPPQQFINGINQGYKLLAWPADAPEAVTVVTIAPDFHGVHHGHITNLKKFTAYFTSVLCFTTPGDGPPSTPQLVWTQEDKPGAVGHLSFTEILDTSLKVSWQEPLEKNGIITGYQISWEVYGRNDSRLTHTLNSTTHEYKIQGLSSLTTYTIDVAAVTAVGTGLVTSSTISSGVPPDLPGAPSNLVISNISPRSATLQFRPGYDGKTSISRWIVEGQVGAIGDEEEWVTLYEEENEPDAQMLEIPNLTPYTHYRFRMKQVNIVGPSPYSPSSRVIQTLQAPPDVAPTSVTVRTASETSLRLRWVPLPDSQYNGNPESVGYRIKYWRSDLQSSAVAQVVSDRLEREFTIEELEEWMEYELQMQAFNAVGAGPWSEVVRGRTRESVPSAAPENVSAEAVSSTQILLTWTSVPEQDQNGLILGYKILFRAKDLDPEPRSHIVRGNHTQSALLAGLRKFVLYELQVLAFTRIGNGVPSTPLILERTKDDAPGPPVRLVFPEVRLTSVRIVWQPPEEPNGIILGYQIAYRLASSSPHTFTTVEVGATVRQFTATDLAPESAYIFRLSAKTRQGWGEPLEATVITTEKRERPAPPRELLVPQAEVTARSLRLQWVPGSDGASPIRYFTMQVRELPRGEWQTYSSSISHEATACVVDRLRPFTSYKLRLKATNDIGDSDFSSETEAVTTLQDVPGEPPGSVSATPHTTSSVLIQWQPPRDESLNGLLQGYRIYYRELEYEAGSGTEAKTLKNPIALHAELTAQSSFKTVNSSSTSTMCELTHLKKYRRYEVIMTAYNIIGESPASAPVEVFVGEAAPAMAPQNVQVTPLTASQLEVTWDPPPPESQNGNIQGYKIYYWEADSQNETEKMKVLFLPEPVVRLKNLTSHTKYLVSISAFNAAGDGPKSDPQQGRTHQAAPGAPSFLAFSEITSTTLNVSWGEPAAANGILQGYRVVYEPLAPVQGVSKVVTVEVRGNWQRWLKVRDLTKGVTYFFRVQARTITYGPELQANITAGPAEGSPGSPRDVLVTKSASELTLQWTEGHSGDTPTTGYVIEARPSDEGLWDMFVKDIPRSATSYTLSLDKLRQGVTYEFRVVAVNEAGYGEPSNPSTAVSAQVEAPFYEEWWFLLVMALSSLIVILLVVFALVLHGQNKKYKNCSTGKGISTMEESVTLDNGGFAALELSSRHLNVKSTFSKKNGTRSPPRPSPGGLHYSDEDICNKYNGAVLTESVSLKEKSADASESEATDSDYEDALPKHSFVNHYMSDPTYYNSWKRRAQGRAPAPHRYEAVAGSEAGAQLHPVITTQSAGGVYTPAGPGARTPLTGFSSFV

SEQ ID NO: 78985 - protein, 107 aa, Homo sapiens
  Payload ID: 15734
  Gene Symbol: SDK1
  Gene Name: sidekick cell adhesion molecule 1
  ENSP ID: ENSP00000404118
  MOD_RES (1)..(1): Any amino acid
XGDVGTPETMAPTIVVPPGNRSVVAGSSETTLECIASARPVEDLSVTWKRNGVRITSGLHSFGRRLTISNPTSADTGPYVCEAALPGSAFEPARATAFLFIIGPTLF

SEQ ID NO: 78986 - protein, 2213 aa, Homo sapiens
  Payload ID: 15734
  Gene Symbol: SDK1
  Gene Name: sidekick cell adhesion molecule 1
  ENSP ID: ENSP00000478062
MARGARPSAAGGGGGGAEPPERAGPGRPRGSPPGRARPSLAPRPGPEPSRPRAAPETSGGDTAGAGRCGGRRAAKLGPGRRGWWALLALQLHLLRALAQGRCAPYFKTEPGLPQIHLEGNRLVLTCLAEGSWPLEFKWMRDDSELTTYSSEYKYIIPSLQKLDAGFYRCVVRNRMGALLQRKSEVQVAYMGSFMDTDQRKTVSQGRAAILNLLPITSYPRPQVTWFREGHKIIPSNRIAITLENQLVILATTTSDAGAYYVQAVNEKNGENKTSPFIHLSIARDVGTPETMAPTIVVPPGNRSVVAGSSETTLECIASARPVEDLSVTWKRNGVRITSGLHSFGRRLTISNPTSADTGPYVCEAALPGSAFEPARATAFLFIIEPPYFTAEPESRISAEVEETVDIGCQAMGVPLPTLQWYKDAISISRLQNPRYKVLASGGLRIQKLRPEDSGIFQCFASNEGGEIQTHTYLDVTNIAPVFTQRPVDTTVTDGMTAILRCEVSGAPKPAITWKRENHILASGSVRIPRFMLLESGGLQIAPVFIQDAGNYTCYAANTEGSLNASATLTVWNRTSIVHPPEDHVVIKGTTATLHCGATHDPRVSLRYVWKKDNVALTPSSTSRIVVEKDGSLLISQTWSGDIGDYSCEIVSEGGNDSRMARLEVIELPHSPQNLLVSPNSSHSHAVVLSWVRPFDGNSPILYYIVELSENNSPWKVHLSNVGPEMTGVTVSGLTPARTYQFRVCAVNEVGRGQYSAETSRLMLPEEPPSAPPKNIVASGRTNQSIMVQWQPPPETEHNGVLRGYILRYRLAGLPGEYQQRNITSPEVNYCLVTDLIIWTQYEIQVAAYNGAGLGVFSRAVTEYTLQGVPTAPPQNVQTEAVNSTTIQFLWNPPPQQFINGINQGYKLLAWPADAPEAVTVVTIAPDFHGVHHGHITNLKKFTAYFTSVLCFTTPGDGPPSTPQLVWTQEDKPGAVGHLSFTEILDTSLKVSWQEPLEKNGIITGYQISWEVYGRNDSRLTHTLNSTTHEYKIQGLSSLTTYTIDVAAVTAVGTGLVTSSTISSGVPPDLPGAPSNLVISNISPRSATLQFRPGYDGKTSISRWIVEGQVGAIGDEEEWVTLYEEENEPDAQMLEIPNLTPYTHYRFRMKQVNIVGPSPYSPSSRVIQTLQAPPDVAPTSVTVRTASETSLRLRWVPLPDSQYNGNPESVGYRIKYWRSDLQSSAVAQVVSDRLEREFTIEELEEWMEYELQMQAFNAVGAGPWSEVVRGRTRESVPSAAPENVSAEAVSSTQILLTWTSVPEQDQNGLILGYKILFRAKDLDPEPRSHIVRGNHTQSALLAGLRKFVLYELQVLAFTRIGNGVPSTPLILERTKDDAPGPPVRLVFPEVRLTSVRIVWQPPEEPNGIILGYQIAYRLASSSPHTFTTVEVGATVRQFTATDLAPESAYIFRLSAKTRQGWGEPLEATVITTEKRERPAPPRELLVPQAEVTARSLRLQWVPGSDGASPIRYFTMQVRELPRGEWQTYSSSISHEATACVVDRLRPFTSYKLRLKATNDIGDSDFSSETEAVTTLQDVPGEPPGSVSATPHTTSSVLIQWQPPRDESLNGLLQGYRIYYRELEYEAGSGTEAKTLKNPIALHAELTAQSSFKTVNSSSTSTMCELTHLKKYRRYEVIMTAYNIIGESPASAPVEVFVGEAAPAMAPQNVQVTPLTASQLEVTWDPPPPESQNGNIQGYKIYYWEADSQNETEKMKVLFLPEPVVRLKNLTSHTKYLVSISAFNAAGDGPKSDPQQGRTHQAAPGAPSFLAFSEITSTTLNVSWGEPAAANGILQGYRVVYEPLAPVQGVSKVVTVEVRGNWQRWLKVRDLTKGVTYFFRVQARTITYGPELQANITAGPAEGSPGSPRDVLVTKSASELTLQWTEGHSGDTPTTGYVIEARPSDEGLWDMFVKDIPRSATSYTLSLDKLRQGVTYEFRVVAVNEAGYGEPSNPSTAVSAQVEAPFYEEWWFLLVMALSSLIVILLVVFALVLHGQNKKYKNCSTGKGISTMEESVTLDNGGFAALELSSRHLNVKSTFSKKNGTRSPPRPSPGGLHYSDEDICNKYNGAVLTESVSLKEKSADASESEATDSDYEDALPKHSFVNHYMSDPTYYNSWKRRAQGRAPAPHRYEAVAGSEAGAQLHPVITTQSAGGVYTPAGPGARTPLTGFSSFV

SEQ ID NO: 78987 - protein, 2172 aa, Homo sapiens
  Payload ID: 15735
  Gene Symbol: SDK2
  Gene Name: sidekick cell adhesion molecule 2
  Uniprot ID: Q58EX2
  ENSP ID: ENSP00000376421
MWGLLIWTLLALHQIRAARAQDDVSPYFKTEPVRTQVHLEGNRLVLTCMAEGSWPLEFKWLHNNRELTKFSLEYRYMITSLDRTHAGFYRCIVRNRMGALLQRQTEVQVAYMGSFEEGEKHQSVSHGEAAVIRAPRIASFPQPQVTWFRDGRKIPPSSRIAITLENTLVILSTVAPDAGRYYVQAVNDKNGDNKTSQPITLTVENVGGPADPIAPTIIIPPKNTSVVAGTSEVTLECVANARPLIKLHIIWKKDGVLLSGGISDHNRRLTIPNPTGSDAGYYECEAVLRSSSVPSVVRGAYLSVLEPPQFVKEPERHITAEMEKVVDIPCQAKGVPPPSITWYKDAAVVEVEKLTRFRQRNDGGLQISGLVPDDTGMFQCFARNAAGEVQTSTYLAVTSIAPNITRGPLDSTVIDGMSVVLACETSGAPRPAITWQKGERILASGSVQLPRFTPLESGSLLISPTHISDAGTYTCLATNSRGVDEASADLVVWARTRITKPPQDQSVIKGTQASMVCGVTHDPRVTIRYIWEKDGATLGTESHPRIRLDRNGSLHISQTWSGDIGTYTCRVISAGGNDSRSAHLRVRQLPHAPEHPVATLSTVERRAINLTWTKPFDGNSPLIRYILEMSENNAPWTVLLASVDPKATSVTVKGLVPARSYQFRLCAVNDVGKGQFSKDTERVSLPEEPPTAPPQNVIASGRTNQSIMIQWQPPPESHQNGILKGYIIRYCLAGLPVGYQFKNITDADVNNLLLEDLIIWTNYEIEVAAYNSAGLGVYSSKVTEWTLQGVPTVPPGNVHAEATNSTTIRFTWNAPSPQFINGINQGYKLIAWEPEQEEEVTMVTARPNFQDSIHVGFVSGLKKFTEYFTSVLCFTTPGDGPRSTPQLVRTHEDVPGPVGHLSFSEILDTSLKVSWQEPGEKNGILTGYRISWEEYNRTNTRVTHYLPNVTLEYRVTGLTALTTYTIEVAAMTSKGQGQVSASTISSGVPPELPGPPTNLGISNIGPRSVTLQFRPGYDGKTSISRWLVEAQVGVVGEGEEWLLIHQLSNEPDARSMEVPDLNPFTCYSFRMRQVNIVGTSPPSQPSRKIQTLQAPPDMAPANVSLRTASETSLWLRWMPLPEMEYNGNPESVGYKIKYSRSDGHGKTLSHVVQDRVERDYTIEDLEEWTEYRVQVQAFNAIGSGPWSQTVVGRTRESVPSSGPTNVSALATTSSSMLVRWSEVPEADRNGLVLGYKVMYKEKDSDTQPRFWLVEGNSSRSAQLTGLGKYVLYEVQVLAFTRIGDGSPSHPPILERTLDDVPGPPMGILFPEVRTTSVRLIWQPPAAPNGIILAYQITHRLNTTTANTATVEVLAPSARQYTATGLKPESVYLFRITAQTRKGWGEAAEALVVTTEKRDRPQPPSRPMVQQEDVRARSVLLSWEPGSDGLSPVRYYTIQTRELPSGRWALHSASVSHNASSFIVDRLKPFTSYKFRVKATNDIGDSEFSEESESLTTLQAAPDEAPTILSVTPHTTTSVLIRWQPPAEDKINGILLGFRIRYRELLYEGLRGFTLRGINNPGATWAELTSMYSMRNLSRPSLTQYELDNLNKHRRYEIRMSVYNAVGEGPSSPPQEVFVGEAVPTAAPRNVVVHGATATQLDVTWEPPPLDSQNGDIQGYKIYFWEAQRGNLTERVKTLFLAENSVKLKNLTGYTAYMVSVAAFNAAGDGPRSTPTQGQTQQAAPSAPSSVKFSELTTTSVNVSWEAPQFPNGILEGYRLVYEPCSPVDGVSKIVTVDVKGNSPLWLKVKDLAEGVTYRFRIRAKTFTYGPEIEANVTTGPGEGAPGPPGVPIIVRYSSAIAIHWSSGDPGKGPITRYVIEARPSDEGLWDILIKDIPKEVSSYTFSMDILKPGVSYDFRVIAVNDYGFGTPSSPSQSVPAQKANPFYEEWWFLVVIALVGLIFILLLVFVLIIRGQSKKYAKKTDSGNSAKSGALGHSEMMSLDESSFPALELNNRRLSVKNSFCRKNGLYTRSPPRPSPGSLHYSDEDVTKYNDLIPAESSSLTEKPSEISDSQGSDSEYEVDSNHQKAHSFVNHYISDPTYYNSWRRQQKGISRAQAYSYTESDSGEPDHTTVTNSTSTQQGSLFRPKASRTPTPQNPPNPPSQQSTLYRPPSSLAPGSRAPIAGFSSFV

SEQ ID NO: 78988 - protein, 1329 aa, Homo sapiens
  Payload ID: 15735
  Gene Symbol: SDK2
  Gene Name: sidekick cell adhesion molecule 2
  ENSP ID: ENSP00000407098
QGYKLIAWEPEQEEEVTMVTARPNFQDSIHVGFVSGLKKFTEYFTSVLCFTTPGDGPRSTPQLVRTHEDVPGPVGHLSFSEILDTSLKVSWQEPGEKNGILTGYRISWEEYNRTNTRVTHYLPNVTLEYRVTGLTALTTYTIEVAAMTSKGQGQVSASTISSGVPPELPGPPTNLGISNIGPRSVTLQFRPGYDGKTSISRWLVEAQVGVVGEGEEWLLIHQLSNEPDARSMEVPDLNPFTCYSFRMRQVNIVGTSPPSQPSRKIQTLQAPPDMAPANVSLRTASETSLWLRWMPLPEMEYNGNPESVGYKIKYSRSDGHGKTLSHVVQDRVERDYTIEDLEEWTEYRVQVQAFNAIGSGPWSQTVVGRTRESVPSSGPTNVSALATTSSSMLVRWSEVPEADRNGLVLGYKVMYKEKDSDTQPRFWLVEGNSSRSAQLTGLGKYVLYEVQVLAFTRIGDGSPSHPPILERTLDDVPGPPMGILFPEVRTTSVRLIWQPPAAPNGIILAYQITHRLNTTTANTATVEVLAPSARQYTATGLKPESVYLFRITAQTRKGWGEAAEALVVTTEKRDRPQPPSRPMVQQEDVRARSVLLSWEPGSDGLSPVRYYTIQTRELPSGRWALHSASVSHNASSFIVDRLKPFTSYKFRVKATNDIGDSEFSEESESLTTLQAAPDEAPTILSVTPHTTTSVLIRWQPPAEDKINGILLGFRIRYRELLYEGLRGFTLRGINNPGATWAELTYLNKHRRYEIRMSVYNAVGEGPSSPPQEVFVGEAVPTAAPRNVVVHGATATQLDVTWEPPPLDSQNGDIQGYKIYFWEAQRGNLTERVKTLFLAENSVKLKNLTGYTAYMVSVAAFNAAGDGPRSTPTQGQTQQAAPSAPSSVKFSELTTTSVNVSWEAPQFPNGILEGYRLVYEPCSPVDGVSKIVTVDVKGNSPLWLKVKDLAEGVTYRFRIRAKTFTYGPEIEANVTTGPGEGAPGPPGVPIIVRYSSAIAIHWSSGDPGKGPITRYVIEARPSDEGLWDILIKDIPKEVSSYTFSMDILKPGVSYDFRVIAVNDYGFGTPSSPSQSVPAQKANPFYEEWWFLVVIALVGLIFILLLVFVLIIRGQSKKYAKKTDSGNSAKSGALGHSEMMSLDESSFPALELNNRRLSVKNSFCRKNGLYTRSPPRPSPGSLHYSDEDVTKYNDLIPAESSSLTEKPSEISDSQGSDSEYEVDSNHQKAHSFVNHYISDPTYYNSWRRQQKGISRAQAYSYTESDSGEPDHTTVTNSTSTQQGSLFRPKASRTPTPQNPPNPPSQQSTLYRPPSSLAPGSRAPIAGFSSFV

SEQ ID NO: 78989 - protein, 322 aa, Homo sapiens
  Payload ID: 15736
  Gene Symbol: SFXN1
  Gene Name: sideroflexin 1
  Uniprot ID: Q9H9B4
  ENSP ID: ENSP00000316905
MSGELPPNINIKEPRWDQSTFIGRANHFFTVTDPRNILLTNEQLESARKIVHDYRQGIVPPGLTENELWRAKYIYDSAFHPDTGEKMILIGRMSAQVPMNMTITGCMMTFYRTTPAVLFWQWINQSFNAVVNYTNRSGDAPLTVNELGTAYVSATTGAVATALGLNALTKHVSPLIGRFVPFAAVAAANCINIPLMRQRELKVGIPVTDENGNRLGESANAAKQAITQVVVSRILMAAPGMAIPPFIMNTLEKKAFLKRFPWMSAPIQVGLVGFCLVFATPLCCALFPQKSSMSVTSLEAELQAKIQESHPELRRVYFNKGL

SEQ ID NO: 78990 - protein, 144 aa, Homo sapiens
  Payload ID: 15736
  Gene Symbol: SFXN1
  Gene Name: sideroflexin 1
  ENSP ID: ENSP00000420961
MSGELPPNINIKEPRWDQSTFIGRANHFFTVTDPRNILLTNEQLESARKIVHDYRQGIVPPGLTENELWRAKYIYDSAFHPDTGEKMILIGRMSAQVPMNMTITGCMMTFYRTTPAVLFWQWINQSFNAVVNYTNRSGDAPLTV

SEQ ID NO: 78991 - protein, 193 aa, Homo sapiens
  Payload ID: 15736
  Gene Symbol: SFXN1
  Gene Name: sideroflexin 1
  ENSP ID: ENSP00000421467
MSGELPPNINIKEPRWDQSTFIGRANHFFTVTDPRNILLTNEQLESARKIVHDYRQGIVPPGLTENELWRAKYIYDSAFHPDTGEKMILIGRMSAQVPMNMTITGCMMTFYRTTPAVLFWQWINQSFNAVVNYTNRSGDAPLTVNELGTAYVSATTGAVATALGLNALTKHVSPLIGRFVPFAAVAAANCINI

SEQ ID NO: 78992 - protein, 56 aa, Homo sapiens
  Payload ID: 15736
  Gene Symbol: SFXN1
  Gene Name: sideroflexin 1
  ENSP ID: ENSP00000421982
MSGELPPNINIKEPRWDQSTFIGRANHFFTVTDPRNILLTNEQLESARKIVHDYRK

SEQ ID NO: 78993 - protein, 22 aa, Homo sapiens
  Payload ID: 15736
  Gene Symbol: SFXN1
  Gene Name: sideroflexin 1
  ENSP ID: ENSP00000424270
  MOD_RES (1)..(1): Any amino acid
XNILLTNEQLESARKIVHDYRK

SEQ ID NO: 78994 - protein, 177 aa, Homo sapiens
  Payload ID: 15736
  Gene Symbol: SFXN1
  Gene Name: sideroflexin 1
  ENSP ID: ENSP00000473710
MSGELPPNINIKEPRWDQSTFIGRANHFFTVTDPRNILLTNEQLESARKIVHDYRQGIVPPGLTENELWRAKYIYDSAFHPDTGEKMILIGRMSAQVPMNMTITGCMMTFYRTTPAVLFWQWINQSFNAVVNYTNRSGDAPLTVNELGTAYVSATTGAVATALGLNALTKVLRFLFP

SEQ ID NO: 78995 - protein, 322 aa, Homo sapiens
  Payload ID: 15737
  Gene Symbol: SFXN2
  Gene Name: sideroflexin 2
  Uniprot ID: Q96NB2
  ENSP ID: ENSP00000358909
MEADLSGFNIDAPRWDQRTFLGRVKHFLNITDPRTVFVSERELDWAKVMVEKSRMGVVPPGTQVEQLLYAKKLYDSAFHPDTGEKMNVIGRMSFQLPGGMIITGFMLQFYRTMPAVIFWQWVNQSFNALVNYTNRNAASPTSVRQMALSYFTATTTAVATAVGMNMLTKKAPPLVGRWVPFAAVAAANCVNIPMMRQQELIKGICVKDRNENEIGHSRRAAAIGITQVVISRITMSAPGMILLPVIMERLEKLHFMQKVKVLHAPLQVMLSGCFLIFMVPVACGLFPQKCELPVSYLEPKLQDTIKAKYGELEPYVYFNKGL

SEQ ID NO: 78996 - protein, 112 aa, Homo sapiens
  Payload ID: 15737
  Gene Symbol: SFXN2
  Gene Name: sideroflexin 2
  ENSP ID: ENSP00000473316
MEADLSGFNIDAPRWDQRTFLGRVKHFLNITDPRTVFVSERELDWAKVMVEKSRMGVVPPGTQVEQLLYAKKLYDSAFHPDTGEKMNVIGRMSFQLPGGMIITGFMLQFYSY

SEQ ID NO: 78997 - protein, 186 aa, Homo sapiens
  Payload ID: 15737
  Gene Symbol: SFXN2
  Gene Name: sideroflexin 2
  ENSP ID: ENSP00000473325
MMYPVRGTEGSTVLCVSKMEADLSGFNIDAPRWDQRTFLGRVKHFLNITDPRTVFVSERELDWAKVMVEKSRMGVVPPGTQVEQLLYAKKLYDSAFHPDTGEKMNVIGRMSFQLPGGMIITGFMLQFYRTMPAVIFWQWVNQSFNALVNYTNRNAASPTSVRKRRPWWAAGCPLPLWLRLTVSISP

SEQ ID NO: 78998 - protein, 67 aa, Homo sapiens
  Payload ID: 15737
  Gene Symbol: SFXN2
  Gene Name: sideroflexin 2
  ENSP ID: ENSP00000473329
MEADLSGFNIDAPRWDQRTFLGRVKHFLNITDPRTVFVSERELDWAKDGGCAPRHPSGAAAVCQEAV

SEQ ID NO: 78999 - protein, 168 aa, Homo sapiens
  Payload ID: 15737
  Gene Symbol: SFXN2
  Gene Name: sideroflexin 2
  ENSP ID: ENSP00000473374
MEADLSGFNIDAPRWDQRTFLGRVKHFLNITDPRTVFVSERELDWAKVMVEKSRMGVVPPGTQVEQLLYAKKLYDSAFHPDTGEKMNVIGRMSFQLPGGMIITGFMLQFYRTMPAVIFWQWVNQSFNALVNYTNRNAASPTSVRQMALSYFTATTTAVATAVGMNMLT

SEQ ID NO: 79000 - protein, 19 aa, Homo sapiens
  Payload ID: 15737
  Gene Symbol: SFXN2
  Gene Name: sideroflexin 2
  ENSP ID: ENSP00000473392
MHFRSTVLCVSKMEADLSG

SEQ ID NO: 79001 - protein, 153 aa, Homo sapiens
  Payload ID: 15737
  Gene Symbol: SFXN2
  Gene Name: sideroflexin 2
  ENSP ID: ENSP00000473504
MEADLSGFNIDAPRWDQRTFLGRVKHFLNITDPRTVFVSERELDWAKVMVEKSRMGVVPPGTQVEQLLYAKKLYDSAFHPDTGEKMNVIGRMSFQLPGGMIITGFMLQFYRTMPAVIFWQWVNQSFNALVNYTNRNAASPTSVSLAASHHGKA

SEQ ID NO: 79002 - protein, 135 aa, Homo sapiens
  Payload ID: 15737
  Gene Symbol: SFXN2
  Gene Name: sideroflexin 2
  ENSP ID: ENSP00000473518
MEADLSGFNIDAPRWDQRTFLGRVKHFLNITDPRTVFVSERELDWAKVMVEKSRMGVVPPGTQVEQLLYAKKLYDSAFHPDTGEKMNVIGRMSFQLPGGMIITGFMLQFYRTMPAVIFWQWVNQSFNALVNYTNR

SEQ ID NO: 79003 - protein, 167 aa, Homo sapiens
  Payload ID: 15737
  Gene Symbol: SFXN2
  Gene Name: sideroflexin 2
  ENSP ID: ENSP00000473573
MEADLSGFNIDAPRWDQRTFLGRVKHFLNITDPRTVFVSERELDWAKVMVEKSRMGVVPPGTQVEQLLYAKKLYDSAFHPDTGEKMNVIGRMSFQLPGGMIITGFMLQFYRTMPAVIFWQWVNQSFNALVNYTNRNAASPTSVRQMALSYFTATTTAVATAVGMNML

SEQ ID NO: 79004 - protein, 138 aa, Homo sapiens
  Payload ID: 15737
  Gene Symbol: SFXN2
  Gene Name: sideroflexin 2
  ENSP ID: ENSP00000473578
MSTVLCVSKMEADLSGFNIDAPRWDQRTFLGRVKHFLNITDPRTVFVSERELDWAKVMVEKSRMGVVPPGTQVEQLLYAKKLYDSAFHPDTGEKMNVIGRMSFQLPGGMIITGFMLQFYRTMPAVIFWQWVNQSFNAL

SEQ ID NO: 79005 - protein, 325 aa, Homo sapiens
  Payload ID: 15738
  Gene Symbol: SFXN3
  Gene Name: sideroflexin 3
  Uniprot ID: Q9BWM7
  ENSP ID: ENSP00000224807
MESKMGELPLDINIQEPRWDQSTFLGRARHFFTVTDPRNLLLSGAQLEASRNIVQNYRAGVVTPGITEDQLWRAKYVYDSAFHPDTGEKVVLIGRMSAQVPMNMTITGCMLTFYRKTPTVVFWQWVNQSFNAIVNYSNRSGDTPITVRQLGTAYVSATTGAVATALGLKSLTKHLPPLVGRFVPFAAVAAANCINIPLMRQRELQVGIPVADEAGQRLGYSVTAAKQGIFQVVISRICMAIPAMAIPPLIMDTLEKKDFLKRRPWLGAPLQVGLVGFCLVFATPLCCALFPQKSSIHISNLEPELRAQIHEQNPSVEVVYYNKGL

SEQ ID NO: 79006 - protein, 321 aa, Homo sapiens
  Payload ID: 15738
  Gene Symbol: SFXN3
  Gene Name: sideroflexin 3
  ENSP ID: ENSP00000377103
MGELPLDINIQEPRWDQSTFLGRARHFFTVTDPRNLLLSGAQLEASRNIVQNYRAGVVTPGITEDQLWRAKYVYDSAFHPDTGEKVVLIGRMSAQVPMNMTITGCMLTFYRKTPTVVFWQWVNQSFNAIVNYSNRSGDTPITVRQLGTAYVSATTGAVATALGLKSLTKHLPPLVGRFVPFAAVAAANCINIPLMRQRELQVGIPVADEAGQRLGYSVTAAKQGIFQVVISRICMAIPAMAIPPLIMDTLEKKDFLKRRPWLGAPLQVGLVGFCLVFATPLCCALFPQKSSIHISNLEPELRAQIHEQNPSVEVVYYNKGL

SEQ ID NO: 79007 - protein, 177 aa, Homo sapiens
  Payload ID: 15738
  Gene Symbol: SFXN3
  Gene Name: sideroflexin 3
  ENSP ID: ENSP00000474564
MGELPLDINIQEPRWDQSTFLGRARHFFTVTDPRNLLLSGAQLEASRNIVQNYRAGVVTPGITEDQLWRAKYVYDSAFHPDTGEKVVLIGRMSAQVPMNMTITGCMLTFYRKTPTVVFWQWVNQSFNAIVNYSNRSGDTPITVRQLGTAYVSATTGAVATALGLKSLTKSPSPPHGP

SEQ ID NO: 79008 - protein, 337 aa, Homo sapiens
  Payload ID: 15739
  Gene Symbol: SFXN4
  Gene Name: sideroflexin 4
  Uniprot ID: Q6P4A7
  ENSP ID: ENSP00000347924
MSLEQEEETQPGRLLGRRDAVPAFIEPNVRFWITERQSFIRRFLQWTELLDPTNVFISVESIENSRQLLCTNEDVSSPASADQRIQEAWKRSLATVHPDSSNLIPKLFRPAAFLPFMAPTVFLSMTPLKGIKSVILPQVFLCAYMAAFNSINGNRSYTCKPLERSLLMAGAVASSTFLGVIPQFVQMKYGLTGPWIKRLLPVIFLVQASGMNVYMSRSLESIKGIAVMDKEGNVLGHSRIAGTKAVRETLASRIVLFGTSALIPEVFTYFFKRTQYFRKNPGSLWILKLSCTVLAMGLMVPFSFSIFPQIGQIQYCSLEEKIQSPTEETEIFYHRGV

SEQ ID NO: 79009 - protein, 178 aa, Homo sapiens
  Payload ID: 15739
  Gene Symbol: SFXN4
  Gene Name: sideroflexin 4
  ENSP ID: ENSP00000358127
MAPTVFLSMTPLKGIKSVILPQVFLCAYMAAFNSINGNRSYTCKPLERSLLMAGAVASSTFLGVIPQFVQMKYGLTGPWIKRLLPVIFLVQASGMNVYMSRSLESIKGIAVMDKEGNVLGHSRIAGTKAVRETLASRIVLFGTSALIPEVFTYFFKRTQYFRKNPGSLWILKLSCTVL

SEQ ID NO: 79010 - protein, 62 aa, Homo sapiens
  Payload ID: 15739
  Gene Symbol: SFXN4
  Gene Name: sideroflexin 4
  ENSP ID: ENSP00000414193
MAPTVFLSMTPLKGIKSVILPQVFLCAYMAAFNSINGNRSYTCKPLERSLLMAGAVASSTFL

SEQ ID NO: 79011 - protein, 340 aa, Homo sapiens
  Payload ID: 15740
  Gene Symbol: SFXN5
  Gene Name: sideroflexin 5
  Uniprot ID: Q8TD22
  ENSP ID: ENSP00000272433
MADTATTASAAAASAASASSDAPPFQLGKPRFQQTSFYGRFRHFLDIIDPRTLFVTERRLREAVQLLEDYKHGTLRPGVTNEQLWSAQKIKQAILHPDTNEKIFMPFRMSGYIPFGTPIVVGLLLPNQTLASTVFWQWLNQSHNACVNYANRNATKPSPASKFIQGYLGAVISAVSIAVGLNVLVQKANKFTPATRLLIQRFVPFPAVASANICNVVLMRYGELEEGIDVLDSDGNLVGSSKIAARHALLETALTRVVLPMPILVLPPIVMSMLEKTALLQARPRLLLPVQSLVCLAAFGLALPLAISLFPQMSEIETSQLEPEIAQATSSRTVVYNKGL

SEQ ID NO: 79012 - protein, 253 aa, Homo sapiens
  Payload ID: 15740
  Gene Symbol: SFXN5
  Gene Name: sideroflexin 5
  ENSP ID: ENSP00000387076
MADTATTASAAAASAASASSDAPPFQLGKPRFQQTSFYGRFRHFLDIIDPRTLFVTERRLREAVQLLEDYKHGTLRPGVTNEQLWSAQKIKQAILHPDTNEKIFMPFRMSGYIPFGTPIVVGLLLPNQTLASTVFWQWLNQSHNACVNYANRNATKPSPASKFIQGYLGAVISAVSIAVGLNVLVQKANKFTPATRLLIQRFVPFPAVGRLSCRHAPGCSSLCKASCAWQPSAWPCRWPSASSRKCQRLKHPN

SEQ ID NO: 79013 - protein, 156 aa, Homo sapiens
  Payload ID: 15740
  Gene Symbol: SFXN5
  Gene Name: sideroflexin 5
  ENSP ID: ENSP00000396825
MADTATTASAAAASAASASSDAPPFQLGKPRFQQTSFYGRFRHFLDIIDPRTLFVTERRLREAVQLLEDYKHGTLRPGVTNEQLWSAQKIKQVIFLLGRQFRSSLAQPDTGIHCLLWLNQSHNACVNYANRNATKPSPASKFIQGYLGAVISAVSI

SEQ ID NO: 79014 - protein, 88 aa, Homo sapiens
  Payload ID: 15740
  Gene Symbol: SFXN5
  Gene Name: sideroflexin 5
  ENSP ID: ENSP00000398580
MADTATTASAAAASAASASSDAPPFQLGKPRFQQTSFYGRFRHFLDIIDPRTLFVTEMESCTVPQAHCNPCLLGSETSQRGCAAAGGL

SEQ ID NO: 79015 - protein, 252 aa, Homo sapiens
  Payload ID: 15740
  Gene Symbol: SFXN5
  Gene Name: sideroflexin 5
  ENSP ID: ENSP00000402141
  MOD_RES (1)..(1): Any amino acid
XAASAASASSDAPPFQLGKPRFQQTSFYGRFRHFLDIIDPRTLFVTERRLREAVQLLEDYKHGTLRPGVTNEQLWSAQKIKQAILHPDTNEKIFMPFRMSGYIPFGTPIVVGLLLPNQTLASTVFWQWLNQSHNACVNYANRNATKPSPASKFIQGYLGAVISAVSIAVGLNVLVQKANKFTPATRLLIQRFVPFPAVGPAGDGADASGPAHAHPGATPDRHVHAGEIETSQLEPEIAQATSSRTVVYNKGL

SEQ ID NO: 79016 - protein, 197 aa, Homo sapiens
  Payload ID: 15741
  Gene Symbol: SIGLECL1
  Gene Name: SIGLEC family like 1
  Uniprot ID: Q8N7X8
  ENSP ID: ENSP00000321249
MLPLLQLVPAKLLNSSCSLEKTLQCSCSFHGIPTPSVQWWMGGVPVGVDGMDGSLQVTSTMLGPWANSTISLTEEPEMGMRLLCEGKNQNGTHALSILLMSRKSSLAAQAFVKGLIQGAIYAGIVIALLFLCLLPLIVKHIRKKQAKKAAAIRAKKSSKVRASQELEMSLKPEEPGKPVVATFSESRILEKQDKRAS

SEQ ID NO: 79017 - protein, 140 aa, Homo sapiens
  Payload ID: 15741
  Gene Symbol: SIGLECL1
  Gene Name: SIGLEC family like 1
  ENSP ID: ENSP00000469589
MLPLLQLVPAKLLNSSCSLEKTLQCSCSFHGIPTPSVQWWMGGVPVGVDGMDGSLQVTSTMLGPWANSTISLTEEPEMGMRLLCEGKNQNGTHALSILLMSRKSSLAAQAFVKGLIQGAIYAGIVIALLFLCLLPLIVKH

SEQ ID NO: 79018 - protein, 84 aa, Homo sapiens
  Payload ID: 15741
  Gene Symbol: SIGLECL1
  Gene Name: SIGLEC family like 1
  ENSP ID: ENSP00000469601
MLPLLQLVPAKLLNSSCSLEKTLQCSCSFHGIPTPSVQWWMGGVPVGVDGMDGSLQVTSTMLGPWANSTISLTEEPEMGMRLLC

SEQ ID NO: 79019 - protein, 13 aa, Homo sapiens
  Payload ID: 15741
  Gene Symbol: SIGLECL1
  Gene Name: SIGLEC family like 1
  ENSP ID: ENSP00000472701
MLPLLQLGGKDNS

SEQ ID NO: 79020 - protein, 103 aa, Homo sapiens
  Payload ID: 15741
  Gene Symbol: SIGLECL1
  Gene Name: SIGLEC family like 1
  ENSP ID: ENSP00000472702
MLPLLQLGKSSLAAQAFVKGLIQGAIYAGIVIALLFLCLLPLIVKHIRKKQAKKAAAIRAKKSSKVRASQELEMSLKPEEPGKPVVATFSESRILEKQDKRAS

SEQ ID NO: 79021 - protein, 197 aa, Homo sapiens; identical to SEQ ID NO: 79016
  Payload ID: 15741
  Gene Symbol: SIGLECL1
  Gene Name: SIGLEC family like 1
  Uniprot ID: Q8N7X8
  ENSP ID: ENSP00000480286

SEQ ID NO: 79022 - protein, 223 aa, Homo sapiens
  Payload ID: 15742
  Gene Symbol: SIGMAR1
  Gene Name: sigma non-opioid intracellular receptor 1
  Uniprot ID: Q99720
  ENSP ID: ENSP00000277010
MQWAVGRRWAWAALLLAVAAVLTQVVWLWLGTQSFVFQREEIAQLARQYAGLDHELAFSRLIVELRRLHPGHVLPDEELQWVFVNAGGWMGAMCLLHASLSEYVLLFGTALGSRGHSGRYWAEISDTIISGTFHQWREGTTKSEVFYPGETVVHGPGEATAVEWGPNTWMVEYGRGVIPSTLAFALADTVFSTQDFLTLFYTLRSYARGLRLELTTYLFGQDP

SEQ ID NO: 79023 - protein, 134 aa, Homo sapiens
  Payload ID: 15742
  Gene Symbol: SIGMAR1
  Gene Name: sigma non-opioid intracellular receptor 1
  ENSP ID: ENSP00000368170
MGAMCLLHASLSEYVLLFGTALGSRGHSGRYWAEISDTIISGTFHQWREGTTKSEVFYPGETVVHGPGEATAVEWGPNTWMVEYGRGVIPSTLAFALADTVFSTQDFLTLFYTLRSYARGLRLELTTYLFGQDP

SEQ ID NO: 79024 - protein, 192 aa, Homo sapiens
  Payload ID: 15742
  Gene Symbol: SIGMAR1
  Gene Name: sigma non-opioid intracellular receptor 1
  Uniprot ID: Q99720
  ENSP ID: ENSP00000420022
MQWAVGRRWAWAALLLAVAAVLTQVVWLWLGTQSFVFQREEIAQLARQYAGLDHELAFSRLIVELRRLHPGHVLPDEELQWVFVNAGGWMGAMCLLHASLSEYVLLFGTALGSRGHSGETVVHGPGEATAVEWGPNTWMVEYGRGVIPSTLAFALADTVFSTQDFLTLFYTLRSYARGLRLELTTYLFGQDP

SEQ ID NO: 79025 - protein, 106 aa, Homo sapiens
  Payload ID: 15742
  Gene Symbol: SIGMAR1
  Gene Name: sigma non-opioid intracellular receptor 1
  Uniprot ID: Q99720
  ENSP ID: ENSP00000434453
MQWAVGRRWAWAALLLAVAAVLTQVVWLWLGTQSFVFQREEIAQLARQYAGLDHELAFSRLIVELRRLHPGHVLPDEELQWVFVNAGGWMGAMCLLHASLSEALLG

SEQ ID NO: 79026 - protein, 169 aa, Homo sapiens
  Payload ID: 15743
  Gene Symbol: SPCS1
  Gene Name: signal peptidase complex subunit 1
  ENSP ID: ENSP00000233025
MARGGDTGCTGPSETSASGAAAIALPGLEGPATDAQCQTLPLTVLKSRSPSPRSLPPALSCPPPQPAMLEHLSSLPTQMDYKGQKLAEQMFQGIILFSAIVGFIYGYVAEQFGWTVYIVMAGFAFSCLLTLPPWPIYRRHPLKWLPVQESSTDDKKPGERKIKRHAKNN

SEQ ID NO: 79027 - protein, 80 aa, Homo sapiens
  Payload ID: 15743
  Gene Symbol: SPCS1
  Gene Name: signal peptidase complex subunit 1
  ENSP ID: ENSP00000391610
MFQGIILFSAIVGFIYGYVAEQFGWTVYIVMAGFAFSCLLTLPPWPIYRRHPLKWLPVQESSTDDKKPGERKIKRHAKNN

SEQ ID NO: 79028 - protein, 102 aa, Homo sapiens
  Payload ID: 15743
  Gene Symbol: SPCS1
  Gene Name: signal peptidase complex subunit 1
  Uniprot ID: Q9Y6A9
  ENSP ID: ENSP00000473265
MLEHLSSLPTQMDYKGQKLAEQMFQGIILFSAIVGFIYGYVAEQFGWTVYIVMAGFAFSCLLTLPPWPIYRRHPLKWLPVQESSTDDKKPGERKIKRHAKNN

SEQ ID NO: 79029 - protein, 169 aa, Homo sapiens; identical to SEQ ID NO: 79026
  Payload ID: 15743
  Gene Symbol: SPCS1
  Gene Name: signal peptidase complex subunit 1
  ENSP ID: ENSP00000478310

SEQ ID NO: 79030 - protein, 226 aa, Homo sapiens
  Payload ID: 15744
  Gene Symbol: SPCS2
  Gene Name: signal peptidase complex subunit 2
  Uniprot ID: Q15005
  ENSP ID: ENSP00000263672
MAAAAVQGGRSGGSGGCSGAGGASNCGTGSGRSGLLDKWKIDDKPVKIDKWDGSAVKNSLDDSAKKVLLEKYKYVENFGLIDGRLTICTISCFFAIVALIWDYMHPFPESKPVLALCVISYFVMMGILTIYTSYKEKSIFLVAHRKDPTGMDPDDIWQLSSSLKRFDDKYTLKLTFISGRTKQQREAEFTKSIAKFFDHSGTLVMDAYEPEISRLHDSLAIERKIK

SEQ ID NO: 79031 - protein, 157 aa, Homo sapiens
  Payload ID: 15744
  Gene Symbol: SPCS2
  Gene Name: signal peptidase complex subunit 2
  ENSP ID: ENSP00000433439
MAAAAVQGGRSGGSGGCSGAGGASNCGTGSGRSGLLDKWKIDDKPVKIDKWDGSAVKNSLDDSAKKEKSIFLVAHRKDPTGMDPDDIWQLSSSLKRFDDKYTLKLTFISGRTKQQREAEFTKSIAKFFDHSGTLVMDAYEPEISRLHDSLAIERKIK

SEQ ID NO: 79032 - protein, 87 aa, Homo sapiens
  Payload ID: 15744
  Gene Symbol: SPCS2
  Gene Name: signal peptidase complex subunit 2
  ENSP ID: ENSP00000434248
MILPKRKDPTGMDPDDIWQLSSSLKRFDDKYTLKLTFISGRTKQQREAEFTKSIAKFFDHSGTLVMDAYEPEISRLHDSLAIERKIK

SEQ ID NO: 79033 - protein, 166 aa, Homo sapiens
  Payload ID: 15744
  Gene Symbol: SPCS2
  Gene Name: signal peptidase complex subunit 2
  ENSP ID: ENSP00000434706
ITTLRTLGACPCPHHTSNLDPVLFRTSSFLASVLVLVATPFSWKIDDKPVKIDKWDGSAVKNSLDDSAKKVLLEKYKYVENFGLIDGRLTICTISCFFAIVALIWDYMHPFPESKPVLALCVISYFVMMGILTIYTSYKEKSIFLVAHRKDPTGMDPDDIWQLSSS

SEQ ID NO: 79034 - protein, 257 aa, Homo sapiens
  Payload ID: 15744
  Gene Symbol: SPCS2
  Gene Name: signal peptidase complex subunit 2
  ENSP ID: ENSP00000436759
MAAAAVQGGRSGGSGGCSGAGGASNCGTGSGRSGLLDKRQALTILPRLDSSSWAQAVLPPQPPKYLGWQWKIDDKPVKIDKWDGSAVKNSLDDSAKKVLLEKYKYVENFGLIDGRLTICTISCFFAIVALIWDYMHPFPESKPVLALCVISYFVMMGILTIYTSYKEKSIFLVAHRKDPTGMDPDDIWQLSSSLKRFDDKYTLKLTFISGRTKQQREAEFTKSIAKFFDHSGTLVMDAYEPEISRLHDSLAIERKIK

SEQ ID NO: 79035 - protein, 227 aa, Homo sapiens
  Payload ID: 15744
  Gene Symbol: SPCS2
  Gene Name: signal peptidase complex subunit 2
  ENSP ID: ENSP00000478550
MAAAAVQGGRSGGSGGCSGAGGASNCGTGSGRSGLLDKWKIDDKPVKIDKWDGSAVKNSLDDSAKKVLLEKYKYVENFGLIDGRLTICTISCFFAIVALIWDYMHPFPESKPVLALCVISSYFVMMGILTIYTSYKEKSIFLVAHRKDPTGMDPDDIWQLSSSLKRFDDKYTLKLTFISGRTKQQREAEFTKSIAKFFDHSGTLVMDAYEPEISRLHDSLAIERKIK

SEQ ID NO: 79036 - protein, 180 aa, Homo sapiens
  Payload ID: 15745
  Gene Symbol: SPCS3
  Gene Name: signal peptidase complex subunit 3
  Uniprot ID: P61009
  ENSP ID: ENSP00000427463
MNTVLSRANSLFAFSLSVMAALTFGCFITTAFKDRSVPVRLHVSRIMLKNVEDFTGPRERSDLGFITFDITADLENIFDWNVKQLFLYLSAEYSTKNNALNQVVLWDKIVLRGDNPKLLLKDMKTKYFFFDDGNGLKGNRNVTLTLSWNVVPNAGILPLVTGSGHVSVPFPDTYEITKSY

SEQ ID NO: 79037 - protein, 520 aa, Homo sapiens
  Payload ID: 15746
  Gene Symbol: SPPL2A
  Gene Name: signal peptide peptidase like 2A
  Uniprot ID: Q8TCT8
  ENSP ID: ENSP00000261854
MGPQRRLSPAGAALLWGFLLQLTAAQEAILHASGNGTTKDYCMLYNPYWTALPSTLENATSISLMNLTSTPLCNLSDIPPVGIKSKAVVVPWGSCHFLEKARIAQKGGAEAMLVVNNSVLFPPSGNRSEFPDVKILIAFISYKDFRDMNQTLGDNITVKMYSPSWPNFDYTMVVIFVIAVFTVALGGYWSGLVELENLKAVTTEDREMRKKKEEYLTFSPLTVVIFVVICCVMMVLLYFFYKWLVYVMIAIFCIASAMSLYNCLAALIHKIPYGQCTIACRGKNMEVRLIFLSGLCIAVAVVWAVFRNEDRWAWILQDILGIAFCLNLIKTLKLPNFKSCVILLGLLLLYDVFFVFITPFITKNGESIMVELAAGPFGNNEKLPVVIRVPKLIYFSVMSVCLMPVSILGFGDIIVPGLLIAYCRRFDVQTGSSYIYYVSSTVAYAIGMILTFVVLVLMKKGQPALLYLVPCTLITASVVAWRRKEMKKFWKGNSYQMMDHLDCATNEENPVISGEQIVQQ

SEQ ID NO: 79038 - protein, 356 aa, Homo sapiens
  Payload ID: 15746
  Gene Symbol: SPPL2A
  Gene Name: signal peptide peptidase like 2A
  ENSP ID: ENSP00000453927
  MOD_RES (1)..(1): Any amino acid
XALGGYWSGLVELENLKAVTTEDREMRKKKEEYLTFSPLTVVIFVVICCVMMVLLYFFYKWLVYVMIAIFCIASAMSLYNCLAALIHKIPYGQCTIACRGKNMEVRLIFLSGLCIAVAVVWAVFRNEDRWAWILQDILGIAFCLNLIKTLKLPNFKSCVILLGLLLLYDVFFVFITPFITKNGESIMVELAAGPFGNNEKNDGNLVEATGQPSAPHEKLPVVIRVPKLIYFSVMSVCLMPVSILGFGDIIVPGLLIAYCRRFDVQTGSSYIYYVSSTVAYAIGMILTFVVLVLMKKGQPALLYLVPCTLITASVVAWRRKEMKKFWKGNSYQMMDHLDCATNEENPVISGEQIVQQ

SEQ ID NO: 79039 - protein, 149 aa, Homo sapiens
  Payload ID: 15746
  Gene Symbol: SPPL2A
  Gene Name: signal peptide peptidase like 2A
  ENSP ID: ENSP00000453932
MLYNPYWTALPSTLENATSISLMNLTSTPLCNLSDIPPVGIKSKAVVVPWGSCHFLEKARIAQKGGAEAMLVVNNSVLFPPSGNRSEFPDVKILIAFISYKDFRDMNQTLGDNITVKMYSPSWPNFDYTMVVIFVIAVFTVALGGYWSG

SEQ ID NO: 79040 - protein, 165 aa, Homo sapiens
  Payload ID: 15747
  Gene Symbol: SPPL2B
  Gene Name: signal peptide peptidase like 2B
  ENSP ID: ENSP00000477658
  MOD_RES (1)..(1): Any amino acid
XGTVAIGGYWAGSRDVKKYMKHKRDDGPEKQEDEAVDVTPVMTCVFVVMCCSMLVLLYYFYDLLVYVVIGIFCLASATGLYSCLAPCVRRLPFGKCRIPNNSLPYFHKRPQARMLLLALFCVAVSVVWGVFRNEDQWAWVLQDALGIAFCLYMLKTIRLPTFKAC

SEQ ID NO: 79041 - protein, 592 aa, Homo sapiens
  Payload ID: 15747
  Gene Symbol: SPPL2B
  Gene Name: signal peptide peptidase like 2B
  Uniprot ID: Q8TCT7
  ENSP ID: ENSP00000478298
MAAAVAAALARLLAAFLLLAAQVACEYGMVHVVSQAGGPEGKDYCILYNPQWAHLPHDLSKASFLQLRNWTASLLCSAADLPARGFSNQIPLVARGNCTFYEKVRLAQGSGARGLLIVSRERLVPPGGNKTQYDEIGIPVALLSYKDMLDIFTRFGRTVRAALYAPKEPVLDYNMVIIFIMAVGTVAIGGYWAGSRDVKKRYMKHKRDDGPEKQEDEAVDVTPVMTCVFVVMCCSMLVLLYYFYDLLVYVVIGIFCLASATGLYSCLAPCVRRLPFGKCRIPNNSLPYFHKRPQARMLLLALFCVAVSVVWGVFRNEDQWAWVLQDALGIAFCLYMLKTIRLPTFKACTLLLLVLFLYDIFFVFITPFLTKSGSSIMVEVATGPSDSATREKLPMVLKVPRLNSSPLALCDRPFSLLGFGDILVPGLLVAYCHRFDIQVQSSRVYFVACTIAYGVGLLVTFVALALMQRGQPALLYLVPCTLVTSCAVALWRRELGVFWTGSGFAKVLPPSPWAPAPADGPQPPKDSATPLSPQPPSEEPATSPWPAEQSPKSRTSEEMGAGAPMREPGSPAESEGRDQAQPSPVTQPGASA

SEQ ID NO: 79042 - protein, 511 aa, Homo sapiens
  Payload ID: 15747
  Gene Symbol: SPPL2B
  Gene Name: signal peptide peptidase like 2B
  Uniprot ID: Q8TCT7
  ENSP ID: ENSP00000478510
MAAAVAAALARLLAAFLLLAAQVACEYGMVHVVSQAGGPEGKDYCILYNPQWAHLPHDLSKASFLQLRNWTASLLCSAADLPARGFSNQIPLVARGNCTFYEKVRLAQGSGARGLLIVSRERLVPPGGNKTQYDEIGIPVALLSYKDMLDIFTRFGRTVRAALYAPKEPVLDYNMVIIFIMAVGTVAIGGYWAGSRDVKKRYMKHKRDDGPEKQEDEAVDVTPVMTCVFVVMCCSMLVLLYYFYDLLVYVVIGIFCLASATGLYSCLAPCVRRLPFGKCRIPNNSLPYFHKRPQARMLLLALFCVAVSVVWGVFRNEDQWAWVLQDALGIAFCLYMLKTIRLPTFKACTLLLLVLFLYDIFFVFITPFLTKSGSSIMVEVATGPSDSATREKLPMVLKVPRLNSSPLALCDRPFSLLGFGDILVPGLLVAYCHRFDIQVQSSRVYFVACTIAYGVGLLVTFVALALMQRGQPALLYLVPCTLVTSCAVALWRRELGVFWTGSGFAVNTSLL

SEQ ID NO: 79043 - protein, 81 aa, Homo sapiens
  Payload ID: 15747
  Gene Symbol: SPPL2B
  Gene Name: signal peptide peptidase like 2B
  ENSP ID: ENSP00000480311
MAAAVAAALARLLAAFLLLAAQVACEYGMVHVVSQAGGPEGKDYCILYNPQWAHLPHDLSKAMPGRGGAAVGTHLVLLSDL

SEQ ID NO: 79044 - protein, 319 aa, Homo sapiens
  Payload ID: 15747
  Gene Symbol: SPPL2B
  Gene Name: signal peptide peptidase like 2B
  Uniprot ID: Q8TCT7
  ENSP ID: ENSP00000480813
MAAAVAAALARLLAAFLLLAAQVACEYGMVHVVSQAGGPEGKDYCILYNPQWAHLPHDLSKASFLQLRNWTASLLCSAADLPARGFSNQIPLVARGNCTFYEKVRLAQGSGARGLLIVSRERLVPPGGNKTQYDEIGIPVALLSYKDMLDIFTRFGRTVRAALYAPKEPVLDYNMVIIFIMAVGTVAIGGYWAGSRDVKKRYMKHKRDDGPEKQEDEAVDVTPVMTCVFVVMCCSMLVLLYYFYDLLVYVVIGIFCLASATGLYSCLAPCVRRLPFGKCRIPNNSLPYFHKRPQARMLLLALFCVAVSVVWGVFRNEDQ

SEQ ID NO: 79045 - protein, 291 aa, Homo sapiens
  Payload ID: 15747
  Gene Symbol: SPPL2B
  Gene Name: signal peptide peptidase like 2B
  ENSP ID: ENSP00000482362
MVHVVSQAGGPEGKDYCILYNPQWAHLPHDLSKASFLQLRNWTASLLCSAADLPARGFSNQIPLVARGNCTFYEKVRLAQGSGARGLLIVSRERLVPPGGNKTQYDEIGIPVALLSYKDMLDIFTRFGRTVRAALYAPKEPVLDYNMVIIFIMAVGTVAIGGYWAGSRDVKKRYMKHKRDDGPEKQEDEAVDVTPVMTCVFVVMCCSMLVLLYYFYDLLVYVVIGIFCLASATGLYSCLAPCVRRLPFGKCRIPNNSLPYFHKRPQARMLLLALFCVAVSVVWGVFRNEDQ

SEQ ID NO: 79046 - protein, 139 aa, Homo sapiens
  Payload ID: 15747
  Gene Symbol: SPPL2B
  Gene Name: signal peptide peptidase like 2B
  ENSP ID: ENSP00000482470
MAAAVAAALARLLAAFLLLAAQVACEYGMVHVVSQAGGPEGKDYCILYNPQWAHLPHDLSKASFLQLRNWTASLLCSAADLPARGFSNQIPLVARGNCTFYEKVRLAQGSGARGLLIVSRERLLQRHAGHLHGSVSAAR

SEQ ID NO: 79047 - protein, 684 aa, Homo sapiens
  Payload ID: 15748
  Gene Symbol: SPPL2C
  Gene Name: signal peptide peptidase like 2C
  Uniprot ID: Q8IUH8
  ENSP ID: ENSP00000332488
MACLGFLLPVGFLLLISTVAGGKYGVAHVVSENWSKDYCILFSSDYITLPRDLHHAPLLPLYDGTKAPWCPGEDSPHQAQLRSPSQRPLRQTTAMVMRGNCSFHTKGWLAQGQGAHGLLIVSRVSDQQCSDTTLAPQDPRQPLADLTIPVAMLHYADMLDILSHTRGEAVVRVAMYAPPEPIIDYNMLVIFILAVGTVAAGGYWAGLTEANRLQRRRARRGGGSGGHHQLQEAAAAEGAQKEDNEDIPVDFTPAMTGVVVTLSCSLMLLLYFFYDHFVYVTIGIFGLGAGIGLYSCLSPLVCRLSLRQYQRPPHSLWASLPLPLLLLASLCATVIIFWVAYRNEDRWAWLLQDTLGISYCLFVLHRVRLPTLKNCSSFLLALLAFDVFFVFVTPFFTKTGESIMAQVALGPAESSSHERLPMVLKVPRLRVSALTLCSQPFSILGFGDIVVPGFLVAYCCRFDVQVCSRQIYFVACTVAYAVGLLVTFMAMVLMQMGQPALLYLVSSTLLTSLAVAACRQELSLFWTGQGRAKMCGLGCAPSAGSRQKQEGAADAHTASTLERGTSRGAGDLDSNPGEDTTEIVTISENEATNPEDRSDSSEGWSDAHLDPNELPFIPPGASEELMPLMPMAMLIPLMPLMPPPSELGHVHAQAQAHETGLPWAGLHKRKGLKVRKSMSTQAPL

SEQ ID NO: 79048 - protein, 684 aa, Homo sapiens
  Payload ID: 15748
  Gene Symbol: SPPL2C
  Gene Name: signal peptide peptidase like 2C
  ENSP ID: ENSP00000481353
MACLGFLLPVGFLLLISTVAGGKYGVAHVVSENWSKDYCILFSSDYITLPRDLHHAPLLPLYDGTKAPWCPGEDSPHQAQLRSPSQRPLRQTTAMVMRGNCSFHTKGWLAQGQGAHGLLIVSRVSDQQCSDTTLAPQDPRQPLADLTIPVAMLHYADMLDILSHTRGEAVVRVAMYAPPEPIIDYNMLVIFILAVGTVAAGGYWAGLTEANRLQRRRARRGGGPGGHHQLQEAAAAEGAQKEDNEDIPVDFTPAMTGVVVTLSCSLMLLLYFFYDHFVYVTIGIFGLGAGIGLYSCLSPLVCRLSLRQYQRPPHSLWASLPLPLLLLASLCTTVIIFWVAYRNEDRWAWLLQDTLGISYCLFVLHRVRLPTLKNCSSFLLALLAFDVFFVFVTPFFTKTGESIMAQVALGPAESSSHERLPMVLKVPRLRVSALTLCSQPFSILGFGDIVVPGFLVAYCCPFDVQVCSRQVYFVACTVAYAVGLLVTFMAMVLMQMGQPALLYLVSSTLLTSLAVAACRQELSLFWTGQGRAKMCGLGCAPSAGSRQKQEGAADAHTASTLERGTSRGAGDLDSNPGEDTTEIVTISENEATNPEDRSDSPEGWSDAHLDPNELPFIPPRASEELMPLMPMAMLIPLMPLMPRPSELGHVHAQAQAHETGLPWAGLHKRKGLKVRKSMSTQAPL

SEQ ID NO: 79049 - protein, 684 aa, Homo sapiens
  Payload ID: 15748
  Gene Symbol: SPPL2C
  Gene Name: signal peptide peptidase like 2C
  ENSP ID: ENSP00000483514
MACLGFLLPVGFLLLISTVAGGKYGVAHVVSENWSKDYCILFSSDYITLPRDLHHAPLLPLYDGTKAPWCPGEDSPHQAQLRSPSQRPLRQTTAMVMRGNCSFHTKGWLAQGQGAHGLLIVSRVSDQQCSDTTLAPQDPRQPLADLTIPVAMLHYADMLDILSHTRGEAVVRVAMYAPPEPIIDYNMLVIFILAVGTVAAGGYWAGLTEANRLQRRRARRGGGSGGHHQLQEAAAAEGAQKEDNEDIPVDFTPAMTGVVVTLSCSLMLLLYFFYDHFVYVTIGIFGLGAGIGLYSCLSPLVCHLSLRQYQRPPHSLWASLPLPLLLLASLCATVIIFWVAYRNEDRWAWLLQDTLGISYCLFVLHRVRLPTLKNCSSFLLALLAFDVFFVFVTPFFTKTGESIMAQVALGPAESSSHERLPMVLKVPRLRVSALTLCSQPFSILGFGDIVVPGFLVAYCCRFDVQVCSRQIYFVACTVAYAVGLLVTFMAMVLMQMGQPALLYLVSSTLLTSLAVAACRQELSLFWTGQGRAKMCGLGCAPSAGSRQKQEGAADAHTASTLERGTSRGAGDLDSNPGEDTTEIVTISENEATNPEDRSDSSEGWSDAHLDPNELPFIPPGASEELMPLMPMAMLIPLMPLMPPPSELGHVHAQAQAHETGLPWAGLHKRKGLKVRKSMSTQAPL

SEQ ID NO: 79050 - protein, 384 aa, Homo sapiens
  Payload ID: 15749
  Gene Symbol: SPPL3
  Gene Name: signal peptide peptidase like 3
  Uniprot ID: Q8TCT6
  ENSP ID: ENSP00000288680
MAEQTYSWAYSLVDSSQVSTFLISILLIVYGSFRSLNMDFENQDKEKDSNSSSGSFNGNSTNNSIQTIDSTQALFLPIGASVSLLVMFFFFDSVQVVFTICTAVLATIAFAFLLLPMCQYLTRPCSPQNKISFGCCGRFTAAELLSFSLSVMLVLIWVLTGHWLLMDALAMGLCVAMIAFVRLPSLKVSCLLLSGLLIYDVFWVFFSAYIFNSNVMVKVATQPADNPLDVLSRKLHLGPNVGRDVPRLSLPGKLVFPSSTGSHFSMLGIGDIVMPGLLLCFVLRYDNYKKQASGDSCGAPGPANISGRMQKVSYFHCTLIGYFVGLLTATVASRIHRAAQPALLYLVPFTLLPLLTMAYLKGDLRRMWSEPFHSKSSSSRFLEV

SEQ ID NO: 79051 - protein, 164 aa, Homo sapiens
  Payload ID: 15749
  Gene Symbol: SPPL3
  Gene Name: signal peptide peptidase like 3
  ENSP ID: ENSP00000437603
MDFENQDKEKDSNSSSGSFNGNSTNNSIQTIDSTQALFLPIGASVSLLVMFFFFDSVQVVFTICTAVLATIAFAFLLLPMCQYLTRPCSPQNKISFGCCGRFTAAELLSFSLSVMLVLIWVLTGHWLLMDALAMGLCVAMIAFVRLPSLKVSCLLLSGLLIYDV

SEQ ID NO: 79052 - protein, 102 aa, Homo sapiens
  Payload ID: 15749
  Gene Symbol: SPPL3
  Gene Name: signal peptide peptidase like 3
  ENSP ID: ENSP00000439390
MFFFFDSVQVVFTICTAVLATIAFAFLLLPMCQYLTRPCSPQNKISFGCCGRFTAAELLSFSLSVMLVLIWVLTGHWLLMDALAMGLCVAMIAFVRLPSLKV

SEQ ID NO: 79053 - protein, 183 aa, Homo sapiens
  Payload ID: 15749
  Gene Symbol: SPPL3
  Gene Name: signal peptide peptidase like 3
  ENSP ID: ENSP00000442484
MDFENQDKEKDSNSSSGSFNGNSTNNSIQTIDSTQALFLPIGASVSLLVMFFFFDSVQVVFTICTAVLATIAFAFLLLPMCQYLTRPCSPQNKISFGCCGRFTAAELLSFSLSVMLVLIWVLTGHWLLMDALAMGLCVAMIAFVRLPSLKVSCLLLSGLLIYDVFWVFFSAYIFNSNVMVKVA

SEQ ID NO: 79054 - protein, 66 aa, Homo sapiens
  Payload ID: 15749
  Gene Symbol: SPPL3
  Gene Name: signal peptide peptidase like 3
  ENSP ID: ENSP00000444821
MDFENQDKEKDSNSSSGSFNGNSTNNSIQTIDSTQALFLPIGASVSLLVMFFFFDSVQVVFTICTA

SEQ ID NO: 79055 - protein, 118 aa, Homo sapiens
  Payload ID: 15749
  Gene Symbol: SPPL3
  Gene Name: signal peptide peptidase like 3
  ENSP ID: ENSP00000446088
MDFENQDKEKDSNSSSGSFNGNSTNNSIQTIDSTQALFLPIGASVSLLVMFFFFDSVQVVFTICTAVLATIAFAFLLLPMCQYLTRPCSPQNKISFGCCGRFTAAELLSFSLSVMLVL

SEQ ID NO: 79056 - protein, 347 aa, Homo sapiens
  Payload ID: 15750
  Gene Symbol: SCUBE1
  Gene Name: signal peptide, CUB domain, EGF-like 1
  ENSP ID: ENSP00000290460
MGAAAVRWHLCVLLALGTRGRLAGGSGLPGSVDVDECSEGTDDCHIDAICQNTPKSYKCLCKPGYKGEGKQCEDIDECENDYYNGGCVHECINIPGNYRCTCFDGFMLAHDGHNCLDVDECQDNNGGCQQICVNAMGSYECQCHSGFFLSDNQHTCIHRSNEGMNCMNKDHGCAHICRETPKGGVACDCRPGFDLAQNQKDCTLTCNYGNGGCQHSCEDTDTGPTCGCHQKYALHSDGRTCIEKDEAAIERSQFNATSVADVDKRVKRRLLMETCAVNNGGCDRTCKDTATGVRCSCPVGFTLQPDGKTCKGQHVELCGCPCLYWPGQEPPCACIAGPRAGLNGGHV

SEQ ID NO: 79057 - protein, 988 aa, Homo sapiens
  Payload ID: 15750
  Gene Symbol: SCUBE1
  Gene Name: signal peptide, CUB domain, EGF-like 1
  Uniprot ID: Q8IWY4
  ENSP ID: ENSP00000354080
MGAAAVRWHLCVLLALGTRGRLAGGSGLPGSVDVDECSEGTDDCHIDAICQNTPKSYKCLCKPGYKGEGKQCEDIDECENDYYNGGCVHECINIPGNYRCTCFDGFMLAHDGHNCLDVDECQDNNGGCQQICVNAMGSYECQCHSGFFLSDNQHTCIHRSNEGMNCMNKDHGCAHICRETPKGGVACDCRPGFDLAQNQKDCTLTCNYGNGGCQHSCEDTDTGPTCGCHQKYALHSDGRTCIETCAVNNGGCDRTCKDTATGVRCSCPVGFTLQPDGKTCKDINECLVNNGGCDHFCRNTVGSFECGCRKGYKLLTDERTCQDIDECSFERTCDHICINSPGSFQCLCHRGYILYGTTHCGDVDECSMSNGSCDQGCVNTKGSYECVCPPGRRLHWNGKDCVETGKCLSRAKTSPRAQLSCSKAGGVESCFLSCPAHTLFVPDSENSYVLSCGVPGPQGKALQKRNGTSSGLGPSCSDAPTTPIKQKARFKIRDAKCHLRPHSQARAKETARQPLLDHCHVTFVTLKCDSSKKRRRGRKSPSKEVSHITAEFEIETKMEEASDTCEADCLRKRAEQSLQAAIKTLRKSIGRQQFYVQVSGTEYEVAQRPAKALEGQGACGAGQVLQDSKCVACGPGTHFGGELGQCVSCMPGTYQDMEGQLSCTPCPSSDGLGLPGARNVSECGGQCSPGFFSADGFKPCQACPVGTYQPEPGRTGCFPCGGGLLTKHEGTTSFQDCEAKVHCSPGHHYNTTTHRCIRCPVGTYQPEFGQNHCITCPGNTSTDFDGSTNVTHCKNQHCGGELGDYTGYIESPNYPGDYPANAECVWHIAPPPKRRILIVVPEIFLPIEDECGDVLVMRKSASPTSITTYETCQTYERPIAFTSRSRKLWIQFKSNEGNSGKGFQVPYVTYDEDYQQLIEDIVRDGRLYASENHQEILKDKKLIKALFDVLAHPQNYFKYTAQESKEMFPRSFIKLLRSKVSRFLRPYK

SEQ ID NO: 79058 - protein, 175 aa, Homo sapiens
  Payload ID: 15750
  Gene Symbol: SCUBE1
  Gene Name: signal peptide, CUB domain, EGF-like 1
  ENSP ID: ENSP00000395327
  MOD_RES (1)..(1): Any amino acid
XRETPKGGVACDCRPGFDLAQNQKDCTLTCNYGNGGCQHSCEDTDTGPTCGCHQKYALHSDGRTCIEKDEAAIERSQFNATSVADVDKRVKRRLLMETCAVNNGGCDRTCKDTATGVRCSCPVGFTLQPDGKTCKDINECLVNNGGCDHFCRNTVGSFECGCRKGYKLLTDERTC

SEQ ID NO: 79059 - protein, 363 aa, Homo sapiens [sequence omitted]

SEQ ID NO: 79060 - protein, 999 aa, Homo sapiens
  Payload ID: 15751
  Gene Symbol: SCUBE2
  Gene Name: signal peptide, CUB domain, EGF-like 2
  Uniprot ID: Q9NQ36
  ENSP ID: ENSP00000310658
MGVAGRNRPGAAWAVLLLLLLLPPLLLLAGAVPPGRGRAAGPQEDVDECAQGLDDCHADALCQNTPTSYKCSCKPGYQGEGRQCEDIDECGNELNGGCVHDCLNIPGNYRCTCFDGFMLAHDGHNCLDVDECLENNGGCQHTCVNVMGSYECCCKEGFFLSDNQHTCIHRSEEGLSCMNKDHGCSHICKEAPRGSVACECRPGFELAKNQRDCILTCNHGNGGCQHSCDDTADGPECSCHPQYKMHTDGRSCLEREDTVLEVTESNTTSVVDGDKRVKRRLLMETCAVNNGGCDRTCKDTSTGVHCSCPVGFTLQLDGKTCKDIDECQTRNGGCDHFCKNIVGSFDCGCKKGFKLLTDEKSCQDVDECSLDRTCDHSCINHPGTFACACNRGYTLYGFTHCGDTNECSINNGGCQQVCVNTVGSYECQCHPGYKLHWNKKDCVEVKGLLPTSVSPRVSLHCGKSGGGDGCFLRCHSGIHLSSDVTTIRTSVTFKLNEGKCSLKNAELFPEGLRPALPEKHSSVKESFRYVNLTCSSGKQVPGAPGRPSTPKEMFITVEFELETNQKEVTASCDLSCIVKRTEKRLRKAIRTLRKAVHREQFHLQLSGMNLDVAKKPPRTSERQAESCGVGQGHAENQCVSCRAGTYYDGARERCILCPNGTFQNEEGQMTCEPCPRPGNSGALKTPEAWNMSECGGLCQPGEYSADGFAPCQLCALGTFQPEAGRTSCFPCGGGLATKHQGATSFQDCETRVQCSPGHFYNTTTHRCIRCPVGTYQPEFGKNNCVSCPGNTTTDFDGSTNITQCKNRRCGGELGDFTGYIESPNYPGNYPANTECTWTINPPPKRRILIVVPEIFLPIEDDCGDYLVMRKTSSSNSVTTYETCQTYERPIAFTSRSKKLWIQFKSNEGNSARGFQVPYVTYDEDYQELIEDIVRDGRLYASENHQEILKDKKLIKALFDVLAHPQNYFKYTAQESREMFPRSFIRLLRSKVSRFLRPYK

SEQ ID NO: 79061 - protein, 807 aa, Homo sapiens
  Payload ID: 15751
  Gene Symbol: SCUBE2
  Gene Name: signal peptide, CUB domain, EGF-like 2
  Uniprot ID: Q9NQ36
  ENSP ID: ENSP00000415187
MGVAGRNRPGAAWAVLLLLLLLPPLLLLAGAVPPGRGRAAGPQEDVDECAQGLDDCHADALCQNTPTSYKCSCKPGYQGEGRQCEDIDECGNELNGGCVHDCLNIPGNYRCTCFDGFMLAHDGHNCLDVDECLENNGGCQHTCVNVMGSYECCCKEGFFLSDNQHTCIHRSEEGLSCMNKDHGCSHICKEAPRGSVACECRPGFELAKNQRDCILTCNHGNGGCQHSCDDTADGPECSCHPQYKMHTDGRSCLEREDTVLEVTESNTTSVVDGDKRVKRRLLMETCAVNNGGCDRTCKDTSTGVHCSCPVGFTLQLDGKTCKDIDECQTRNGGCDHFCKNIVGSFDCGCKKGFKLLTDEKSCQDVDECSLDRTCDHSCINHPGTFACACNRGYTLYGFTHCGDTNECSINNGGCQQVCVNTVGSYECQCHPGYKLHWNKKDCVASCDLSCIVKRTEKRLRKAIRTLRKAVHREQFHLQLSGMNLDVAKKPPRTSERQAESCGVGQGHAENQCVSCRAGTYYDGARERCILCPNGTFQNEEGQMTCEPCPRPGNSGALKTPEAWNMSECGGLCQPGEYSADGFAPCQLCALGTFQPEAGRTSCFPCGGGLATKHQGATSFQDCETRVQCSPGHFYNTTTHRCIRCPVGTYQPEFGKNNCVSCPGNTTTDFDGSTNITQCKTSSNSVTTYETCQTYERPIAFTSRSKKLWIQFKSNEGNSARGFQVPYVTYDEDYQELIEDIVRDGRLYASENHQEILKDKKLIKALFDVLAHPQNYFKYTAQESREMFPRSFIRLLRSKVSRFLRPYK

SEQ ID NO: 79062 - protein, 971 aa, Homo sapiens
  Payload ID: 15751
  Gene Symbol: SCUBE2
  Gene Name: signal peptide, CUB domain, EGF-like 2
  ENSP ID: ENSP00000429969
MGVAGRNRPGAAWAVLLLLLLLPPLLLLAGAVPPGRGRAAGPQEDVDECAQGLDDCHADALCQNTPTSYKCSCKPGYQGEGRQCEDIDECGNELNGGCVHDCLNIPGNYRCTCFDGFMLAHDGHNCLDVDECLENNGGCQHTCVNVMGSYECCCKEGFFLSDNQHTCIHRSEEGLSCMNKDHGCSHICKEAPRGSVACECRPGFELAKNQRDCILTCNHGNGGCQHSCDDTADGPECSCHPQYKMHTDGRSCLEREDTVLEVTESNTTSVVDGDKRVKRRLLMETCAVNNGGCDRTCKDTSTGVHCSCPVGFTLQLDGKTCKDIDECQTRNGGCDHFCKNIVGSFDCGCKKGFKLLTDEKSCQDVDECSLDRTCDHSCINHPGTFACACNRGYTLYGFTHCGDTNECSINNGGCQQVCVNTVGSYECQCHPGYKLHWNKKDCVEVKGLLPTSVSPRVSLHCGKSGGGDGCFLRCHSGIHLSSGLQGAYSVTCGSSSPLRNKQQKSNDSAFGDVTTIRTSVTFKLNEGKCSLKNAELFPEGLRPALPEKHSSVKESFRYVNLTCSSGKQVPGAPGRPSTPKEMFITVEFELETNQKEVTASCDLSCIVKRTEKRLRKAIRTLRKAVHREQFHLQLSGMNLDVAKKPPRTSERQAESCGVGQGHAENQCGLCQPGEYSADGFAPCQLCALGTFQPEAGRTSCFPCGGGLATKHQGATSFQDCETRVQCSPGHFYNTTTHRCIRCPVGTYQPEFGKNNCVSCPGNTTTDFDGSTNITQCKNRRCGGELGDFTGYIESPNYPGNYPANTECTWTINPPPKRRILIVVPEIFLPIEDDCGDYLVMRKTSSSNSVTTYETCQTYERPIAFTSRSKKLWIQFKSNEGNSARGFQVPYVTYDEDYQELIEDIVRDGRLYASENHQEILKDKKLIKALFDVLAHPQNYFKYTAQESREMFPRSFIRLLRSKVSRFLRPYK

SEQ ID NO: 79063 - protein, 119 aa, Homo sapiens
  Payload ID: 15751
  Gene Symbol: SCUBE2
  Gene Name: signal peptide, CUB domain, EGF-like 2
  ENSP ID: ENSP00000432828
  MOD_RES (1)..(1): Any amino acid
XYIESPNYPGNYPANTECTWTINPPPKRRILIVVPEIFLPIEDDCGDYLVMRKTSSSNSVTTYETCQTYERPIAFTSRSKKLWIQFKSNEGNSARGFQVPYVTYDGKHSLQHMERASLL

SEQ ID NO: 79064 - protein, 171 aa, Homo sapiens
  Payload ID: 15751
  Gene Symbol: SCUBE2
  Gene Name: signal peptide, CUB domain, EGF-like 2
  ENSP ID: ENSP00000434000
  MOD_RES (1)..(1): Any amino acid
XCSCHPQYKMHTDGRSCLEREDTVLEVTESNTTSVVDGDKRVKRRLLMETCAVNNGGCDRTCKDTSTGVHCSCPVGFTLQLDGKTCKDIDECQTRNGGCDHFCKNIVGSFDCGCKKGFKLLTDEKSCQDVDECSLDRTCDHSCINHPGTFACACNRGYTLYGFTHCGEVKG

SEQ ID NO: 79065 - protein, 192 aa, Homo sapiens
  Payload ID: 15751
  Gene Symbol: SCUBE2
  Gene Name: signal peptide, CUB domain, EGF-like 2
  ENSP ID: ENSP00000435415
  MOD_RES (1)..(1): Any amino acid
XKRRLLMETCAVNNGGCDRTCKDTSTGVHCSCPVGFTLQLDGKTCKDIDECQTRNGGCDHFCKNIVGSFDCGCKKGFKLLTDEKSCQDVDECSLDRTCDHSCINHPGTFACACNRGYTLYGFTHCGDTNECSINNGGCQQVCVNTVGSYECQCHPGYKLHWNKKDCVVKGLLPTSVSPRVSLHCGKSGGGDG

SEQ ID NO: 79066 - protein, 112 aa, Homo sapiens
  Payload ID: 15751
  Gene Symbol: SCUBE2
  Gene Name: signal peptide, CUB domain, EGF-like 2
  ENSP ID: ENSP00000435902
  MOD_RES (1)..(1): Any amino acid
XGDFTGYIESPNYPGNYPANTECTWTINPPPKRRILIVVPEIFLPIEDDCGDYLVMRKTSSSNSVTTYETCQTYERPIAFTSRSKKLWIQFKSNEGNSARGFQVPYVTYDDA

SEQ ID NO: 79067 - protein, 993 aa, Homo sapiens
  Payload ID: 15752
  Gene Symbol: SCUBE3
  Gene Name: signal peptide, CUB domain, EGF-like 3
  Uniprot ID: Q8IX30
  ENSP ID: ENSP00000274938
MGSGRVPGLCLLVLLVHARAAQYSKAAQDVDECVEGTDNCHIDAICQNTPRSYKCICKSGYTGDGKHCKDVDECEREDNAGCVHDCVNIPGNYRCTCYDGFHLAHDGHNCLDVDECAEGNGGCQQSCVNMMGSYECHCREGFFLSDNQHTCIQRPEEGMNCMNKNHGCAHICRETPKGGIACECRPGFELTKNQRDCKLTCNYGNGGCQHTCDDTEQGPRCGCHIKFVLHTDGKTCIETCAVNNGGCDSKCHDAATGVHCTCPVGFMLQPDRKTCKDIDECRLNNGGCDHICRNTVGSFECSCKKGYKLLINERNCQDIDECSFDRTCDHICVNTPGSFQCLCHRGYLLYGITHCGDVDECSINRGGCRFGCINTPGSYQCTCPAGQGRLHWNGKDCTEPLKCQGSPGASKAMLSCNRSGKKDTCALTCPSRARFLPESENGFTVSCGTPSPRAAPARAGHNGNSTNSNHCHEAAVLSIKQRASFKIKDAKCRLHLRNKGKTEEAGRITGPGGAPCSECQVTFIHLKCDSSRKGKGRRARTPPGKEVTRLTLELEAEVRAEETTASCGLPCLRQRMERRLKGSLKMLRKSINQDRFLLRLAGLDYELAHKPGLVAGERAEPMESCRPGQHRAGTKCVSCPQGTYYHGQTEQCVPCPAGTFQEREGQLSCDLCPGSDAHGPLGATNVTTCAGQCPPGQHSVDGFKPCQPCPRGTYQPEAGRTLCFPCGGGLTTKHEGAISFQDCDTKVQCSPGHYYNTSIHRCIRCAMGSYQPDFRQNFCSRCPGNTSTDFDGSTSVAQCKNRQCGGELGEFTGYIESPNYPGNYPAGVECIWNINPPPKRKILIVVPEIFLPSEDECGDVLVMRKNSSPSSITTYETCQTYERPIAFTARSRKLWINFKTSEANSARGFQIPYVTYDEDYEQLVEDIVRDGRLYASENHQEILKDKKLIKAFFEVLAHPQNYFKYTEKHKEMLPKSFIKLLRSKVSSFLRPYK

SEQ ID NO: 79068 - protein, 136 aa, Homo sapiens
  Payload ID: 15753
  Gene Symbol: SRP14
  Gene Name: signal recognition particle 14kDa (homologous Alu RNA binding protein)
  Uniprot ID: P37108
  ENSP ID: ENSP00000267884
MVLLESEQFLTELTRLFQKCRTSGSVYITLKKYDGRTKPIPKKGTVEGFEPADNKCLLRATDGKKKISTVVSSKEVNKFQMAYSNLLRANMDGLKKRDKKNKTKKTKAAAAAAAAAPAAAATAPTTAATTAATAAQ

SEQ ID NO: 79069 - protein, 56 aa, Homo sapiens
  Payload ID: 15753
  Gene Symbol: SRP14
  Gene Name: signal recognition particle 14kDa (homologous Alu RNA binding protein)
  ENSP ID: ENSP00000452756
MAYSNLLRANMDGLKKRDKKNKTKKTKAAAAAAAAAPAAAATAPTTAATTAATAAQ

SEQ ID NO: 79070 - protein, 115 aa, Homo sapiens
  Payload ID: 15753
  Gene Symbol: SRP14
  Gene Name: signal recognition particle 14kDa (homologous Alu RNA binding protein)
  ENSP ID: ENSP00000453120
MVLLESEQFLTELTRLFQKCRTSGSVYITLKKYDGRTKPIPKKGTVEGFEPADNKCLLRATDGKKKISTVVSSKEVNKFQMVSFGCSLCFPSQGKSQYDSEHWVRLILGFTALRR

SEQ ID NO: 79071 - protein, 56 aa, Homo sapiens; identical to SEQ ID NO: 79069
  Payload ID: 15753
  Gene Symbol: SRP14
  Gene Name: signal recognition particle 14kDa (homologous Alu RNA binding protein)
  ENSP ID: ENSP00000453361

SEQ ID NO: 79072 - protein, 110 aa, Homo sapiens
  Payload ID: 15754
  Gene Symbol: SRP19
  Gene Name: signal recognition particle 19kDa
  Uniprot ID: P09132
  ENSP ID: ENSP00000282999
MACAAARSPADQDRFICIYPAYLNNKKTIAEGRRIPISKAVENPTATEIQDVCSAVGLNVFLEKNKMYSREWNRDVQYRGRVRVQLKQEDGSLCLVQFPSHYTLSLTSGS

SEQ ID NO: 79073 - protein, 144 aa, Homo sapiens
  Payload ID: 15754
  Gene Symbol: SRP19
  Gene Name: signal recognition particle 19kDa
  Uniprot ID: P09132
  ENSP ID: ENSP00000424870
MACAAARSPADQDRFICIYPAYLNNKKTIAEGRRIPISKAVENPTATEIQDVCSAVGLNVFLEKNKMYSREWNRDVQYRGRVRVQLKQEDGSLCLVQFPSRKSVMLYAAEMIPKLKTRTQKTGGADQSLQQGEGSKKGKGKKKK

SEQ ID NO: 79074 - protein, 78 aa, Homo sapiens
  Payload ID: 15754
  Gene Symbol: SRP19
  Gene Name: signal recognition particle 19kDa
  Uniprot ID: P09132
  ENSP ID: ENSP00000425562
MACAAARSPADQDRLLKILQLQRFKMYVQQLDLTYFLRKIKCTLENGIVMSNTEAESGSSSNRKMGASALYSSHHVSQ

SEQ ID NO: 79075 - protein, 104 aa, Homo sapiens
  Payload ID: 15754
  Gene Symbol: SRP19
  Gene Name: signal recognition particle 19kDa
  ENSP ID: ENSP00000480521
MACAAARSPADQDRFICIYPAYLNNKKTIAEGRRIPISKAVENPTATEIQDVCSAVGLNVFLEKNKMYSREWNRDVQYRGRVRVQLKQEDGSLCLVQFPSRKLV

SEQ ID NO: 79076 - protein, 120 aa, Homo sapiens
  Payload ID: 15754
  Gene Symbol: SRP19
  Gene Name: signal recognition particle 19kDa
  ENSP ID: ENSP00000482018
MACAAARSPADQDRFICIYPAYLNNKKTIAEGRRIPISKKNKMYSREWNRDVQYRGRVRVQLKQEDGSLCLVQFPSRKSVMLYAAEMIPKLKTRTQKTGGADQSLQQGEGSKKGKGKKKK

SEQ ID NO: 79077 - protein, 504 aa, Homo sapiens
  Payload ID: 15755
  Gene Symbol: SRP54
  Gene Name: signal recognition particle 54kDa
  Uniprot ID: P61011
  ENSP ID: ENSP00000216774
MVLADLGRKITSALRSLSNATIINEEVLNAMLKEVCTALLEADVNIKLVKQLRENVKSAIDLEEMASGLNKRKMIQHAVFKELVKLVDPGVKAWTPTKGKQNVIMFVGLQGSGKTTTCSKLAYYYQRKGWKTCLICADTFRAGAFDQLKQNATKARIPFYGSYTEMDPVIIASEGVEKFKNENFEIIIVDTSGRHKQEDSLFEEMLQVANAIQPDNIVYVMDASIGQACEAQAKAFKDKVDVASVIVTKLDGHAKGGGALSAVAATKSPIIFIGTGEHIDDFEPFKTQPFISKLLGMGDIEGLIDKVNELKLDDNEALIEKLKHGQFTLRDMYEQFQNIMKMGPFSQILGMIPGFGTDFMSKGNEQESMARLKKLMTIMDSMNDQELDSTDGAKVFSKQPGRIQRVARGSGVSTRDVQELLTQYTKFAQMVKKMGGIKGLFKGGDMSKNVSQSQMAKLNQQMAKMMDPRVLHHMGGMAGLQSMMRQFQQGAAGNMKGMMGFNNM

SEQ ID NO: 79078 - protein, 455 aa, Homo sapiens
  Payload ID: 15755
  Gene Symbol: SRP54
  Gene Name: signal recognition particle 54kDa
  Uniprot ID: P61011
  ENSP ID: ENSP00000440629
MPPLSMKRSAIDLEEMASGLNKRKMIQHAVFKELVKLVDPGVKAWTPTKGKQNVIMFVGLQGSGKTTTCSKLAYYYQRKGWKTCLICADTFRAGAFDQLKQNATKARIPFYGSYTEMDPVIIASEGVEKFKNENFEIIIVDTSGRHKQEDSLFEEMLQVANAIQPDNIVYVMDASIGQACEAQAKAFKDKVDVASVIVTKLDGHAKGGGALSAVAATKSPIIFIGTGEHIDDFEPFKTQPFISKLLGMGDIEGLIDKVNELKLDDNEALIEKLKHGQFTLRDMYEQFQNIMKMGPFSQILGMIPGFGTDFMSKGNEQESMARLKKLMTIMDSMNDQELDSTDGAKVFSKQPGRIQRVARGSGVSTRDVQELLTQYTKFAQMVKKMGGIKGLFKGGDMSKNVSQSQMAKLNQQMAKMMDPRVLHHMGGMAGLQSMMRQFQQGAAGNMKGMMGFNNM

SEQ ID NO: 79079 - protein, 43 aa, Homo sapiens
  Payload ID: 15755
  Gene Symbol: SRP54
  Gene Name: signal recognition particle 54kDa
  ENSP ID: ENSP00000451037
MVLADLGRKITSALRSLSNATIINEEVLNAMLKEVCTALLEAD

SEQ ID NO: 79080 - protein, 55 aa, Homo sapiens
  Payload ID: 15755
  Gene Symbol: SRP54
  Gene Name: signal recognition particle 54kDa
  ENSP ID: ENSP00000451313
MVLADLGRKITSALRSLSNATIINEEVLNAMLKEVCTALLEDLFNMCRHIQSRGF

SEQ ID NO: 79081 - protein, 74 aa, Homo sapiens
  Payload ID: 15755
  Gene Symbol: SRP54
  Gene Name: signal recognition particle 54kDa
  ENSP ID: ENSP00000451647
MVLADLGRKITSALRSLSNATIINEEVLNAMLKEVCTALLEADVNIKLVKQLRENVKSAIDLEEMASGLNKRKM

SEQ ID NO: 79082 - protein, 440 aa, Homo sapiens
  Payload ID: 15755
  Gene Symbol: SRP54
  Gene Name: signal recognition particle 54kDa
  ENSP ID: ENSP00000451775
MASGLNKRKMIQHAVFKELVKLVDPGVKAWTPTKGKQNVIMFVGLQGSGKTTTCSKLAYYYQRKGWKTCLICADTFRAGAFDQLKQNATKARIPFYGSYTEMDPVIIASEGVEKFKNENFEIIIVDTSGRHKQEDSLFEEMLQVANAIQPDNIVYVMDASIGQACEAQAKAFKDKVDVASVIVTKLDGHAKGGGALSAVAATKSPIIFIGTGEHIDDFEPFKTQPFISKLLGMGDIEGLIDKVNELKLDDNEALIEKLKHGQFTLRDMYEQFQNIMKMGPFSQILGMIPGFGTDFMSKGNEQESMARLKKLMTIMDSMNDQELDSTDGAKVFSKQPGRIQRVARGSGVSTRDVQELLTQYTKFAQMVKKMGGIKGLFKGGDMSKNVSQSQMAKLNQQMAKMMDPRVLHHMGGMAGLQSMMRQFQQGAAGNMKGMMGFNNM

SEQ ID NO: 79083 - protein, 504 aa, Homo sapiens; identical to SEQ ID NO: 79077
  Payload ID: 15755
  Gene Symbol: SRP54
  Gene Name: signal recognition particle 54kDa
  Uniprot ID: P61011
  ENSP ID: ENSP00000451818

SEQ ID NO: 79084 - protein, 53 aa, Homo sapiens
  Payload ID: 15755
  Gene Symbol: SRP54
  Gene Name: signal recognition particle 54kDa
  ENSP ID: ENSP00000486764
MVLADLGRKITSALRSLSNATIINEEVLNAMLKEVCTALLEDLFNMCRHIQSR

SEQ ID NO: 79085 - protein, 627 aa, Homo sapiens
  Payload ID: 15756
  Gene Symbol: SRP68
  Gene Name: signal recognition particle 68kDa
  Uniprot ID: Q9UHB9
  ENSP ID: ENSP00000312066
MAAEKQVPGGGGGGGSGGGGGSGGGGSGGGRGAGGEENKENERPSAGSKANKEFGDSLSLEILQIIKESQQQHGLRHGDFQRYRGYCSRRQRRLRKTLNFKMGNRHKFTGKKVTEELLTDNRYLLLVLMDAERAWSYAMQLKQEANTEPRKRFHLLSRLRKAVKHAEELERLCESNRVDAKTKLEAQAYTAYLSGMLRFEHQEWKAAIEAFNKCKTIYEKLASAFTEEQAVLYNQRVEEISPNIRYCAYNIGDQSAINELMQMRLRSGGTEGLLAEKLEALITQTRAKQAATMSEVEWRGRTVPVKIDKVRIFLLGLADNEAAIVQAESEETKERLFESMLSECRDAIQVVREELKPDQKQRDYILEGEPGKVSNLQYLHSYLTYIKLSTAIKRNENMAKGLQRALLQQQPEDDSKRSPRPQDLIRLYDIILQNLVELLQLPGLEEDKAFQKEIGLKTLVFKAYRCFFIAQSYVLVKKWSEALVLYDRVLKYANEVNSDAGAFKNSLKDLPDVQELITQVRSEKCSLQAAAILDANDAHQTETSSSQVKDNKPLVERFETFCLDPSLVTKQANLVHFPPGFQPIPCKPLFFDLALNHVAFPPLEDKLEQKTKSGLTGYIKGIFGFRS

SEQ ID NO: 79086 - protein, 589 aa, Homo sapiens
  Payload ID: 15756
  Gene Symbol: SRP68
  Gene Name: signal recognition particle 68kDa
  Uniprot ID: Q9UHB9
  ENSP ID: ENSP00000446136
MAAEKQVPGGGGGGGSGGGGGSGGGGSGGGRGAGGEENKENERPSAGSKANKEFGDSLSLEILQIIKESQQQHGLRHGDFQRYRYLLLVLMDAERAWSYAMQLKQEANTEPRKRFHLLSRLRKAVKHAEELERLCESNRVDAKTKLEAQAYTAYLSGMLRFEHQEWKAAIEAFNKCKTIYEKLASAFTEEQAVLYNQRVEEISPNIRYCAYNIGDQSAINELMQMRLRSGGTEGLLAEKLEALITQTRAKQAATMSEVEWRGRTVPVKIDKVRIFLLGLADNEAAIVQAESEETKERLFESMLSECRDAIQVVREELKPDQKQRDYILEGEPGKVSNLQYLHSYLTYIKLSTAIKRNENMAKGLQRALLQQQPEDDSKRSPRPQDLIRLYDIILQNLVELLQLPGLEEDKAFQKEIGLKTLVFKAYRCFFIAQSYVLVKKWSEALVLYDRVLKYANEVNSDAGAFKNSLKDLPDVQELITQVRSEKCSLQAAAILDANDAHQTETSSSQVKDNKPLVERFETFCLDPSLVTKQANLVHFPPGFQPIPCKPLFFDLALNHVAFPPLEDKLEQKTKSGLTGYIKGIFGFRS

SEQ ID NO: 79087 - protein, 54 aa, Homo sapiens
  Payload ID: 15756
  Gene Symbol: SRP68
  Gene Name: signal recognition particle 68kDa
  ENSP ID: ENSP00000466791
MAAEKQVPGGGGGGGSGGGGGSGGGGSGGGRGAGGEENKENERPSAGSKGLLFP

SEQ ID NO: 79088 - protein, 63 aa, Homo sapiens
  Payload ID: 15756
  Gene Symbol: SRP68
  Gene Name: signal recognition particle 68kDa
  ENSP ID: ENSP00000467765
MAAEKQVPGGGGGGGSGGGGGSGGGGSGGGRGAGGEENKENERPSAGSKANKEFGDSLSLENY

SEQ ID NO: 79089 - protein, 288 aa, Homo sapiens
  Payload ID: 15756
  Gene Symbol: SRP68
  Gene Name: signal recognition particle 68kDa
  Uniprot ID: Q9UHB9
  ENSP ID: ENSP00000473613
MLSECRDAIQVVREELKPDQKQRDYILEGEPGKVSNLQYLHSYLTYIKLSTAIKRNENMAKGLQRALLQQQPEDDSKRSPRPQDLIRLYDIILQNLVELLQLPGLEEDKAFQKEIGLKTLVFKAYRCFFIAQSYVLVKKWSEALVLYDRVLKYANEVNSDAGAFKNSLKDLPDVQELITQVRSEKCSLQAAAILDANDAHQTETSSSQVKDNKPLVERFETFCLDPSLVTKQANLVHFPPGFQPIPCKPLFFDLALNHVAFPPLEDKLEQKTKSGLTGYIKGIFGFRS

SEQ ID NO: 79090 - protein, 54 aa, Homo sapiens; identical to SEQ ID NO: 79087
  Payload ID: 15756
  Gene Symbol: SRP68
  Gene Name: signal recognition particle 68kDa
  ENSP ID: ENSP00000486633

SEQ ID NO: 79091 - protein, 671 aa, Homo sapiens
  Payload ID: 15757
  Gene Symbol: SRP72
  Gene Name: signal recognition particle 72kDa
  Uniprot ID: O76094
  ENSP ID: ENSP00000342181
MASGGSGGVSVPALWSEVNRYGQNGDFTRALKTVNKILQINKDDVTALHCKVVCLIQNGSFKEALNVINTHTKVLANNSLSFEKAYCEYRLNRIENALKTIESANQQTDKLKELYGQVLYRLERYDECLAVYRDLVRNSQDDYDEERKTNLSAVVAAQSNWEKVVPENLGLQEGTHELCYNTACALIGQGQLNQAMKILQKAEDLCRRSLSEDTDGTEEDPQAELAIIHGQMAYILQLQGRTEEALQLYNQIIKLKPTDVGLLAVIANNIITINKDQNVFDSKKKVKLTNAEGVEFKLSKKQLQAIEFNKALLAMYTNQAEQCRKISASLQSQSPEHLLPVLIQAAQLCREKQHTKAIELLQEFSDQHPENAAEIKLTMAQLKISQGNISKACLILRSIEELKHKPGMVSALVTMYSHEEDIDSAIEVFTQAIQWYQNHQPKSPAHLSLIREAANFKLKYGRKKEAISDLQQLWKQNPKDIHTLAQLISAYSLVDPEKAKALSKHLPSSDSMSLKVDVEALENSAGATYIRKKGGKVTGDSQPKEQGQGDLKKKKKKKKGKLPKNYDPKVTPDPERWLPMRERSYYRGRKKGKKKDQIGKGTQGATAGASSELDASKTVSSPPTSPRPGSAATVSASTSNIIPPRHQKPAGAPATKKKQQQKKKKGGKGGW

SEQ ID NO: 79092 - protein, 610 aa, Homo sapiens
  Payload ID: 15757
  Gene Symbol: SRP72
  Gene Name: signal recognition particle 72kDa
  Uniprot ID: O76094
  ENSP ID: ENSP00000424576
MASGGSGGVSVPALWSEVNRYGQNGDFTRALKTVNKILQINKDDVTALHCKVVCLIQNGSFKEALNVINTHTKVLANNSLSFEKAYCEYRLNRIENALKTIESANQQTDKLKELYGQVLYRLERYDECLAVYRDLVRNSQDDYDEERKTNLSAVVAAQSNWEKVVPENLGLQEGTHELCYNTACALIGQGQLNQAMKILQKAEDLCRRSLSEDTDQNVFDSKKKVKLTNAEGVEFKLSKKQLQAIEFNKALLAMYTNQAEQCRKISASLQSQSPEHLLPVLIQAAQLCREKQHTKAIELLQEFSDQHPENAAEIKLTMAQLKISQGNISKACLILRSIEELKHKPGMVSALVTMYSHEEDIDSAIEVFTQAIQWYQNHQPKSPAHLSLIREAANFKLKYGRKKEAISDLQQLWKQNPKDIHTLAQLISAYSLVDPEKAKALSKHLPSSDSMSLKVDVEALENSAGATYIRKKGGKVTGDSQPKEQGQGDLKKKKKKKKGKLPKNYDPKVTPDPERWLPMRERSYYRGRKKGKKKDQIGKGTQGATAGASSELDASKTVSSPPTSPRPGSAATVSASTSNIIPPRHQKPAGAPATKKKQQQKKKKGGKGGW

SEQ ID NO: 79093 - protein, 357 aa, Homo sapiens
  Payload ID: 15757
  Gene Symbol: SRP72
  Gene Name: signal recognition particle 72kDa
  ENSP ID: ENSP00000425190
  MOD_RES (1)..(1): Any amino acid
XERKTNLSAVVAAQSNWEKVVPENLGLQEGTHELCYNTACALIGQGQLNQAMKILQKAEDLCRRSLSEDTDGTEEDPQAELAIIHGQMAYILQLQGRTEEALQLYNQIIKLKPTDVGLLAVIANNIITINKAEQCRKISASLQSQSPEHLLPVLIQAAQLCREKQHTKAIELLQEFSDQHPENAAEIKLTMAQLKISQGNISKACLILRSIEELKHKPGMVSALVTMYSHEEDIDSAIEVFTQAIQWYQNHQPKSPAHLSLIREAANFKLKYGRKKEAISDLQQLWKQNPKDIHTLAQLISAYSLVDPEKAKALSKHLPSSDSMSLKVDVEALENSAGATYIRKKGGKVTGDSQPKE

SEQ ID NO: 79094 - protein, 220 aa, Homo sapiens
  Payload ID: 15757
  Gene Symbol: SRP72
  Gene Name: signal recognition particle 72kDa
  ENSP ID: ENSP00000473576
MASGGSGGVSVPALWSEVNRYGQNGDFTRALKTVNKILQINKDDVTALHCKVVCLIQNGSFKEALNVINTHTKVLANNSLSFEKAYCEYRLNRIENALKTIESANQQTDKLKELYGQVLYRLERYDECLAVYRDLVRNSQDDYDEERKTNLSAVVAAQSNWEKVVPENLGLQEGTHELCYNTACALIGQGQLNQAMKILQKAEGWKFVKLICKYNVHITL

SEQ ID NO: 79095 - protein, 86 aa, Homo sapiens
  Payload ID: 15758
  Gene Symbol: SRP9
  Gene Name: signal recognition particle 9kDa
  Uniprot ID: P49458
  ENSP ID: ENSP00000305230
MPQYQTWEEFSRAAEKLYLADPMKARVVLKYRHSDGNLCVKVTDDLVCLVYKTDQAQDVKKIEKFHSQLMRLMVAKEARNVTMETE

SEQ ID NO: 79096 - protein, 66 aa, Homo sapiens
  Payload ID: 15758
  Gene Symbol: SRP9
  Gene Name: signal recognition particle 9kDa
  ENSP ID: ENSP00000355803
MPQYQTWEEFSRAAEKLYLADPMKARVVLKYRHSDGNLCVKVTDDLVQWHLNYCTLRHGIAGGLET

SEQ ID NO: 79097 - protein, 82 aa, Homo sapiens
  Payload ID: 15758
  Gene Symbol: SRP9
  Gene Name: signal recognition particle 9kDa
  Uniprot ID: P49458
  ENSP ID: ENSP00000355804
MPQYQTWEEFSRAAEKLYLADPMKARVVLKYRHSDGNLCVKVTDDLVRQCLALLLRLQCSGMIIAHCILDLLGSSGPLASAS

SEQ ID NO: 79098 - protein, 82 aa, Homo sapiens; identical to SEQ ID NO: 79097
  Payload ID: 15758
  Gene Symbol: SRP9
  Gene Name: signal recognition particle 9kDa
  Uniprot ID: P49458
  ENSP ID: ENSP00000485002

SEQ ID NO: 79099 - protein, 66 aa, Homo sapiens; identical to SEQ ID NO: 79096
  Payload ID: 15758
  Gene Symbol: SRP9
  Gene Name: signal recognition particle 9kDa
  ENSP ID: ENSP00000485985

SEQ ID NO: 79100 - protein, 638 aa, Homo sapiens
  Payload ID: 15759
  Gene Symbol: SRPR
  Gene Name: signal recognition particle receptor (docking protein)
  Uniprot ID: P08240
  ENSP ID: ENSP00000328023
MLDFFTIFSKGGLVLWCFQGVSDSCTGPVNALIRSVLLQERGGNNSFTHEALTLKYKLDNQFELVFVVGFQKILTLTYVDKLIDDVHRLFRDKYRTEIQQQSALSLLNGTFDFQNDFLRLLREAEESSKIRAPTTMKKFEDSEKAKKPVRSMIETRGEKPKEKAKNSKKKGAKKEGSDGPLATSKPVPAEKSGLPVGPENGVELSKEELIRRKREEFIQKHGRGMEKSNKSTKSDAPKEKGKKAPRVWELGGCANKEVLDYSTPTTNGTPEAALSEDINLIRGTGSGGQLQDLDCSSSDDEGAAQNSTKPSATKGTLGGMFGMLKGLVGSKSLSREDMESVLDKMRDHLIAKNVAADIAVQLCESVANKLEGKVMGTFSTVTSTVKQALQESLVQILQPQRRVDMLRDIMDAQRRQRPYVVTFCGVNGVGKSTNLAKISFWLLENGFSVLIAACDTFRAGAVEQLRTHTRRLSALHPPEKHGGRTMVQLFEKGYGKDAAGIAMEAIAFARNQGFDVVLVDTAGRMQDNAPLMTALAKLITVNTPDLVLFVGEALVGNEAVDQLVKFNRALADHSMAQTPRLIDGIVLTKFDTIDDKVGAAISMTYITSKPIVFVGTGQTYCDLRSLNAKAVVAALMKA

SEQ ID NO: 79101 - protein, 610 aa, Homo sapiens
  Payload ID: 15759
  Gene Symbol: SRPR
  Gene Name: signal recognition particle receptor (docking protein)
  Uniprot ID: P08240
  ENSP ID: ENSP00000435508
MLDFFTIFSKGGLVLWCFQGVSDSCTGPVNALIRSVLLQVGFQKILTLTYVDKLIDDVHRLFRDKYRTEIQQQSALSLLNGTFDFQNDFLRLLREAEESSKIRAPTTMKKFEDSEKAKKPVRSMIETRGEKPKEKAKNSKKKGAKKEGSDGPLATSKPVPAEKSGLPVGPENGVELSKEELIRRKREEFIQKHGRGMEKSNKSTKSDAPKEKGKKAPRVWELGGCANKEVLDYSTPTTNGTPEAALSEDINLIRGTGSGGQLQDLDCSSSDDEGAAQNSTKPSATKGTLGGMFGMLKGLVGSKSLSREDMESVLDKMRDHLIAKNVAADIAVQLCESVANKLEGKVMGTFSTVTSTVKQALQESLVQILQPQRRVDMLRDIMDAQRRQRPYVVTFCGVNGVGKSTNLAKISFWLLENGFSVLIAACDTFRAGAVEQLRTHTRRLSALHPPEKHGGRTMVQLFEKGYGKDAAGIAMEAIAFARNQGFDVVLVDTAGRMQDNAPLMTALAKLITVNTPDLVLFVGEALVGNEAVDQLVKFNRALADHSMAQTPRLIDGIVLTKFDTIDDKVGAAISMTYITSKPIVFVGTGQTYCDLRSLNAKAVVAALMKA

SEQ ID NO: 79102 - protein, 92 aa, Homo sapiens
  Payload ID: 15760
  Gene Symbol: SRPRB
  Gene Name: signal recognition particle receptor, B subunit
  ENSP ID: ENSP00000417096
MASADSRRVADGGGAGGTFQPYLDTLRQELQQTDPTLLSVVVAVLAVLLTLVFWKLIRSRRSSQRAVLLVGLCDSGKTLLFVRLLTGLYRDT

SEQ ID NO: 79103 - protein, 160 aa, Homo sapiens
  Payload ID: 15760
  Gene Symbol: SRPRB
  Gene Name: signal recognition particle receptor, B subunit
  ENSP ID: ENSP00000417316
  MOD_RES (1)..(1): Any amino acid
XLTLIDLPGHESLRLQFLERFKSSARAIVFVVDSAAFQREVKDVAEFLYQVLIDSMGLKNTPSFLIACNKQDIAMAKSAKLIQQQLEKELNTLRVTRSAAPSTLDSSSTAPAQLGKKGKEFEFSQLPLKVEFLECSAKGGRGDVGSADIQDLEKWLAKIA

SEQ ID NO: 79104 - protein, 271 aa, Homo sapiens
  Payload ID: 15760
  Gene Symbol: SRPRB
  Gene Name: signal recognition particle receptor, B subunit
  Uniprot ID: Q9Y5M8
  ENSP ID: ENSP00000418401
MASADSRRVADGGGAGGTFQPYLDTLRQELQQTDPTLLSVVVAVLAVLLTLVFWKLIRSRRSSQRAVLLVGLCDSGKTLLFVRLLTGLYRDTQTSITDSCAVYRVNNNRGNSLTLIDLPGHESLRLQFLERFKSSARAIVFVVDSAAFQREVKDVAEFLYQVLIDSMGLKNTPSFLIACNKQDIAMAKSAKLIQQQLEKELNTLRVTRSAAPSTLDSSSTAPAQLGKKGKEFEFSQLPLKVEFLECSAKGGRGDVGSADIQDLEKWLAKIA

SEQ ID NO: 79105 - protein, 286 aa, Homo sapiens
  Payload ID: 15761
  Gene Symbol: SSR1
  Gene Name: signal sequence receptor, alpha
  Uniprot ID: P43307
  ENSP ID: ENSP00000244763
MRLLPRLLLLLLLVFPATVLFRGGPRGLLAVAQDLTEDEETVEDSIIEDEDDEAEVEEDEPTDLVEDKEEEDVSGEPEASPSADTTILFVKGEDFPANNIVKFLVGFTNKGTEDFIVESLDASFRYPQDYQFYIQNFTALPLNTVVPPQRQATFEYSFIPAEPMGGRPFGLVINLNYKDLNGNVFQDAVFNQTVTVIEREDGLDGETIFMYMFLAGLGLLVIVGLHQLLESRKRKRPIQKVEMGTSSQNDVDMSWIPQETLNQINKASPRRLPRKRAQKRSVGSDE

SEQ ID NO: 79106 - protein, 291 aa, Homo sapiens
  Payload ID: 15761
  Gene Symbol: SSR1
  Gene Name: signal sequence receptor, alpha
  ENSP ID: ENSP00000380647
MRLLPRLLLLLLLVFPATVLFRGGPRGLLAVAQDLTEDEETVEDSIIEDEDDEAEVEEDEPTDLVEDKEEEDVSGEPEASPSADTTILFVKGEDFPANNIVKFLVGFTNKGTEDFIVESLDASFRYPQDYQFYIQNFTALPLNTVVPPQRQATFEYSFIPAEPMGGRPFGLVINLNYKDLNGNVFQDAVFNQTVTVIEREDGLDGETIFMYMFLAGLGLLVIVGLHQLLESRKRKRPIQKVEMGTSSQNDVDMSWIPQETLNQIMQSRRDKASPRRLPRKRAQKRSVGSDE

SEQ ID NO: 79107 - protein, 265 aa, Homo sapiens
  Payload ID: 15761
  Gene Symbol: SSR1
  Gene Name: signal sequence receptor, alpha
  ENSP ID: ENSP00000417290
MRLLPRLLLLLLLVFPATVLFRGGPRGLLAVAQDLTEDEETVEDSIIEDEDDEAEVEEDEPTDLVEDKEEEDVSGEPEASPSADTTILFVKGEDFPANNIVKFLVGFTNKGTEDFIVESLDASFRYPQDYQFYIQNFTALPLNTVVPPQRQATFEYSFIPAEPMGGRPFGLVINLNYKDLNGNVFQDAVFNQTVTVIEREDGLDGETIFMYMFLAGLGLLVIVGLHQLLESRKSGSFIQDGVQWHNLAYCNLRLRGSSHPPTSAS

SEQ ID NO: 79108 - protein, 266 aa, Homo sapiens
  Payload ID: 15761
  Gene Symbol: SSR1
  Gene Name: signal sequence receptor, alpha
  ENSP ID: ENSP00000417911
MRLLPRLLLLLLLVFPATVLFRGGPRGLLAVAQDLTEDEETVEDSIIEDEDDEAEVEEDEPTDLVEDKEEEDVSGEPEASPSADTTILFVKGEDFPANNIVKFLVGFTNKGTEDFIVESLDASFRYPQDYQFYIQNFTALPLNTVVPPQRQATFEYSFIPAEPMGGRPFGLVINLNYKDLNGNVFQDAVFNQTVTVIEREDGLDGETIFMYMFLAGLGLLVIVGLHQLLESRKRKRPIQKVEMGTSSQNDVDMSWIPQETLNQISK

SEQ ID NO: 79109 - protein, 298 aa, Homo sapiens
  Payload ID: 15761
  Gene Symbol: SSR1
  Gene Name: signal sequence receptor, alpha
  ENSP ID: ENSP00000418617
MRLLPRLLLLLLLVFPATVLFRGGPRGLLAVAQDLTEDEETVEDSIIEDEDDEAEVEEDEPTDLVEDKEEEDVSGEPEASPSADTTILFVKGEDFPANNIVKFLVGFTNKGTEDFIVESLDASFRYPQDYQFYIQNFTALPLNTVVPPQRQATFEYSFIPAEPMGGRPFGLVINLNYKDLNGNVFQDAVFNQTVTVIEREDGLDGETIFMYMFLAGLGLLVIVGLHQLLESRKRKRPIQKVEMGTSSQNDVDMSWIPQETLNQIMQSRRDKASPRRLPRKRAQKRSVGSDERRRRETH

SEQ ID NO: 79110 - protein, 103 aa, Homo sapiens
  Payload ID: 15761
  Gene Symbol: SSR1
  Gene Name: signal sequence receptor, alpha
  ENSP ID: ENSP00000419953
MGGRPFGLVINLNYKDLNGNVFQDAVFNQTVTVIEREDGLDGETIFMYMFLAGLGLLVIVGLHQLLESRKRKRPIQKVEMGTSSQNDVDMSWIPQETLNQISK

SEQ ID NO: 79111 - protein, 218 aa, Homo sapiens
  Payload ID: 15761
  Gene Symbol: SSR1
  Gene Name: signal sequence receptor, alpha
  ENSP ID: ENSP00000420730
MRLLPRLLLLLLLVFPATVLFRGGPRGLLAVAQDLTEDEETVEDSIIEDEDDEAEVEEDEPTDLVEDKEEEDVSGEPEASPSADTTILFVKGEEPMGGRPFGLVINLNYKDLNGNVFQDAVFNQTVTVIEREDGLDGETIFMYMFLAGLGLLVIVGLHQLLESRKRKRPIQKVEMGTSSQNDVDMSWIPQETLNQINKASPRRLPRKRAQKRSVGSDE

SEQ ID NO: 79112 - protein, 183 aa, Homo sapiens
  Payload ID: 15762
  Gene Symbol: SSR2
  Gene Name: signal sequence receptor, beta (translocon-associated protein beta)
  Uniprot ID: P43308
  ENSP ID: ENSP00000295702
MRLLSFVVLALFAVTQAEEGARLLASKSLLNRYAVEGRDLTLQYNIYNVGSSAALDVELSDDSFPPEDFGIVSGMLNVKWDRIAPASNVSHTVVLRPLKAGYFNFTSATITYLAQEDGPVVIGSTSAPGQGGILAQREFDRRFSPHFLDWAAFGVMTLPSIGIPLLLWYSSKRKYDTPKTKKN

SEQ ID NO: 79113 - protein, 90 aa, Homo sapiens
  Payload ID: 15762
  Gene Symbol: SSR2
  Gene Name: signal sequence receptor, beta (translocon-associated protein beta)
  ENSP ID: ENSP00000431366
MRLLSFVVLALFAVTQAEEGARLLASKSLLNRYAVEGRDLTLQYNIYNVGSSAALDVELSDDSFPPEDFGIVSGMLNVKWDRIAPYPLGT

SEQ ID NO: 79114 - protein, 62 aa, Homo sapiens
  Payload ID: 15762
  Gene Symbol: SSR2
  Gene Name: signal sequence receptor, beta (translocon-associated protein beta)
  ENSP ID: ENSP00000432831
MRLLSFVVLALFAVTQAEEGARLLASKSLLNRYAVEGRDLTLQYNIYNVGSRHVHEEKLRQG

SEQ ID NO: 79115 - protein, 183 aa, Homo sapiens; identical to SEQ ID NO: 79112
  Payload ID: 15762
  Gene Symbol: SSR2
  Gene Name: signal sequence receptor, beta (translocon-associated protein beta)
  Uniprot ID: P43308
  ENSP ID: ENSP00000434306

SEQ ID NO: 79116 - protein, 114 aa, Homo sapiens
  Payload ID: 15762
  Gene Symbol: SSR2
  Gene Name: signal sequence receptor, beta (translocon-associated protein beta)
  ENSP ID: ENSP00000434532
MPTGEDGRRVWRTGLLWWLMDYSVEGAAVLMRLLSFVVLALFAVTQAEEGARLLASKSLLNRYAVEGRDLTLQYNIYNVGSSAALDVELSDDSFPPEDFGIVSGMLNVKWDRIA

SEQ ID NO: 79117 - protein, 93 aa, Homo sapiens
  Payload ID: 15762
  Gene Symbol: SSR2
  Gene Name: signal sequence receptor, beta (translocon-associated protein beta)
  ENSP ID: ENSP00000434870
MRLLSFVVLALFAVTQAEEGARLLASKSLLNRYAVEGRDLTLQYNIYNVGSSAALDVELSDDSFPPEDFGIVSGMLNVKWDRIAPWTGQPLGS

SEQ ID NO: 79118 - protein, 133 aa, Homo sapiens
  Payload ID: 15762
  Gene Symbol: SSR2
  Gene Name: signal sequence receptor, beta (translocon-associated protein beta)
  ENSP ID: ENSP00000435692
MRLLSFVVLALFAVTQAEEGARLLASKSLLNRYAVEGRDLTLQYNIYNVGSSAALDVELSDDSFPPEDFGIVSGMLNVKWDRIAPASNVSHTVVLRPLKAGYFNFTSATITYLAQEDGPVVNQPQDSLVLPGS

SEQ ID NO: 79119 - protein, 86 aa, Homo sapiens
  Payload ID: 15762
  Gene Symbol: SSR2
  Gene Name: signal sequence receptor, beta (translocon-associated protein beta)
  ENSP ID: ENSP00000436201
MRLLSFVVLALFAVTQAEEGARLLASKSLLNRYAVEGRDLTLQYNIYNVGSRLALPVHLDREESWLSGSLTGDSPLIFWTGQPLGS

SEQ ID NO: 79120 - protein, 147 aa, Homo sapiens
  Payload ID: 15762
  Gene Symbol: SSR2
  Gene Name: signal sequence receptor, beta (translocon-associated protein beta)
  ENSP ID: ENSP00000436228
MRLLSFVVLALFAVTQAEEGARLLASKSLLNRYAVEGRDLTLQYNIYNVGSSAALDVELSDDSFPPEDFGIVSGMLNVKWDRIAPASNVSHTVVLRPLKAGYFNFTSATITYLAQEDGPVVIGSTSAPGQGGILAQREFDRRFSPHF

SEQ ID NO: 79121 - protein, 133 aa, Homo sapiens; identical to SEQ ID NO: 79118
  Payload ID: 15762
  Gene Symbol: SSR2
  Gene Name: signal sequence receptor, beta (translocon-associated protein beta)
  ENSP ID: ENSP00000437239

SEQ ID NO: 79122 - protein, 173 aa, Homo sapiens
  Payload ID: 15763
  Gene Symbol: SSR4
  Gene Name: signal sequence receptor, delta
  Uniprot ID: P51571
  ENSP ID: ENSP00000317331
MAAMASLGALALLLLSSLSRCSAEACLEPQITPSYYTTSDAVISTETVFIVEISLTCKNRVQNMALYADVGGKQFPVTRGQDVGRYQVSWSLDHKSAHAGTYEVRFFDEESYSLLRKAQRNNEDISIIPPLFTVSVDHRGTWNGPWVSTEVLAAAIGLVIYYLAFSAKSHIQA

SEQ ID NO: 79123 - protein, 148 aa, Homo sapiens
  Payload ID: 15763
  Gene Symbol: SSR4
  Gene Name: signal sequence receptor, delta
  ENSP ID: ENSP00000359102
MAAMASLGALALLLLSSLSRCSAEACLEPQITPSYYTTSDAVISTETVFIVEISLTCKNRVQVSWSLDHKSAHAGTYEVRFFDEESYSLLRKAQRNNEDISIIPPLFTVSVDHRGTWNGPWVSTEVLAAAIGLVIYYLAFSAKSHIQA

SEQ ID NO: 79124 - protein, 173 aa, Homo sapiens; identical to SEQ ID NO: 79122
  Payload ID: 15763
  Gene Symbol: SSR4
  Gene Name: signal sequence receptor, delta
  Uniprot ID: P51571
  ENSP ID: ENSP00000359103

SEQ ID NO: 79125 - protein, 173 aa, Homo sapiens; identical to SEQ ID NO: 79122
  Payload ID: 15763
  Gene Symbol: SSR4
  Gene Name: signal sequence receptor, delta
  Uniprot ID: P51571
  ENSP ID: ENSP00000359104

SEQ ID NO: 79126 - protein, 185 aa, Homo sapiens
  Payload ID: 15764
  Gene Symbol: SSR3
  Gene Name: signal sequence receptor, gamma (translocon-associated protein gamma)
  Uniprot ID: Q9UNL2
  ENSP ID: ENSP00000265044
MAPKGSSKQQSEEDLLLQDFSRNLSAKSSALFFGNAFIVSAIPIWLYWRIWHMDLIQSAVLYSVMTLVSTYLVAFAYKNVKFVLKHKVAQKREDAVSKEVTRKLSEADNRKMSRKEKDERILWKKNEVADYEATTFSIFYNNTLFLVVVIVASFFILKNFNPTVNYILSISASSGLIALLSTGSK

SEQ ID NO: 79127 - protein, 133 aa, Homo sapiens
  Payload ID: 15764
  Gene Symbol: SSR3
  Gene Name: signal sequence receptor, gamma (translocon-associated protein gamma)
  ENSP ID: ENSP00000417306
MDLIQSAVLYSVMTLVSTYLVAFAYKNVKFVLKHKVAQKREDAVSKEVTRKLSEADNRKMSRKEKDERILWKKNEVADYEATTFSIFYNNTLFLVVVIVASFFILKNFNPTVNYILSISASSGLIALLSTGSK

SEQ ID NO: 79128 - protein, 174 aa, Homo sapiens
  Payload ID: 15764
  Gene Symbol: SSR3
  Gene Name: signal sequence receptor, gamma (translocon-associated protein gamma)
  ENSP ID: ENSP00000417530
MAPKGSSKQQSEEDLLLQDFSRNLSAKSSALFFGNAFIVSAIPIWLYWRIWHMDLIQSAVLYSVMTLVSTYLVAFAYKNVKFVLKHKVAQKREDAVSKEVTRKLSEADNRKMSRKEKDERILWKKNEVADYEATTFSIFYNNTLFLVVVIVASFFILKNFNPTVYPFQGTTYCP

SEQ ID NO: 79129 - protein, 133 aa, Homo sapiens; identical to SEQ ID NO: 79127
  Payload ID: 15764
  Gene Symbol: SSR3
  Gene Name: signal sequence receptor, gamma (translocon-associated protein gamma)
  ENSP ID: ENSP00000420087

SEQ ID NO: 79130 - protein, 198 aa, Homo sapiens
  Payload ID: 15764
  Gene Symbol: SSR3
  Gene Name: signal sequence receptor, gamma (translocon-associated protein gamma)
  Uniprot ID: Q9UNL2
  ENSP ID: ENSP00000420641
MAPKGSSKQQSEEDLLLQDFSRNLSAKSSALFFGNAFIVSAIPIWLYWRIWHMDLIQSAVLYSVMTLVSTYLVAFAYKNVKFVLKHKVAQKREDAVSKEVTRKLSEADNRKMSRKEKDERFDSCLKYGHHKRGILWKKNEVADYEATTFSIFYNNTLFLVVVIVASFFILKNFNPTVNYILSISASSGLIALLSTGSK

SEQ ID NO: 79131 - protein, 750 aa, Homo sapiens
  Payload ID: 15765
  Gene Symbol: STAT1
  Gene Name: signal transducer and activator of transcription 1, 91kDa
  Uniprot ID: P42224
  ENSP ID: ENSP00000354394
MSQWYELQQLDSKFLEQVHQLYDDSFPMEIRQYLAQWLEKQDWEHAANDVSFATIRFHDLLSQLDDQYSRFSLENNFLLQHNIRKSKRNLQDNFQEDPIQMSMIIYSCLKEERKILENAQRFNQAQSGNIQSTVMLDKQKELDSKVRNVKDKVMCIEHEIKSLEDLQDEYDFKCKTLQNREHETNGVAKSDQKQEQLLLKKMYLMLDNKRKEVVHKIIELLNVTELTQNALINDELVEWKRRQQSACIGGPPNACLDQLQNWFTIVAESLQQVRQQLKKLEELEQKYTYEHDPITKNKQVLWDRTFSLFQQLIQSSFVVERQPCMPTHPQRPLVLKTGVQFTVKLRLLVKLQELNYNLKVKVLFDKDVNERNTVKGFRKFNILGTHTKVMNMEESTNGSLAAEFRHLQLKEQKNAGTRTNEGPLIVTEELHSLSFETQLCQPGLVIDLETTSLPVVVISNVSQLPSGWASILWYNMLVAEPRNLSFFLTPPCARWAQLSEVLSWQFSSVTKRGLNVDQLNMLGEKLLGPNASPDGLIPWTRFCKENINDKNFPFWLWIESILELIKKHLLPLWNDGCIMGFISKERERALLKDQQPGTFLLRFSESSREGAITFTWVERSQNGGEPDFHAVEPYTKKELSAVTFPDIIRNYKVMAAENIPENPLKYLYPNIDKDHAFGKYYSRPKEAPEPMELDGPKGTGYIKTELISVSEVHPSRLQTTDNLLPMSPEEFDEVSRIVGSVEFDSMMNTV

SEQ ID NO: 79132 - protein, 712 aa, Homo sapiens
  Payload ID: 15765
  Gene Symbol: STAT1
  Gene Name: signal transducer and activator of transcription 1, 91kDa
  Uniprot ID: P42224
  ENSP ID: ENSP00000376136
MSQWYELQQLDSKFLEQVHQLYDDSFPMEIRQYLAQWLEKQDWEHAANDVSFATIRFHDLLSQLDDQYSRFSLENNFLLQHNIRKSKRNLQDNFQEDPIQMSMIIYSCLKEERKILENAQRFNQAQSGNIQSTVMLDKQKELDSKVRNVKDKVMCIEHEIKSLEDLQDEYDFKCKTLQNREHETNGVAKSDQKQEQLLLKKMYLMLDNKRKEVVHKIIELLNVTELTQNALINDELVEWKRRQQSACIGGPPNACLDQLQNWFTIVAESLQQVRQQLKKLEELEQKYTYEHDPITKNKQVLWDRTFSLFQQLIQSSFVVERQPCMPTHPQRPLVLKTGVQFTVKLRLLVKLQELNYNLKVKVLFDKDVNERNTVKGFRKFNILGTHTKVMNMEESTNGSLAAEFRHLQLKEQKNAGTRTNEGPLIVTEELHSLSFETQLCQPGLVIDLETTSLPVVVISNVSQLPSGWASILWYNMLVAEPRNLSFFLTPPCARWAQLSEVLSWQFSSVTKRGLNVDQLNMLGEKLLGPNASPDGLIPWTRFCKENINDKNFPFWLWIESILELIKKHLLPLWNDGCIMGFISKERERALLKDQQPGTFLLRFSESSREGAITFTWVERSQNGGEPDFHAVEPYTKKELSAVTFPDIIRNYKVMAAENIPENPLKYLYPNIDKDHAFGKYYSRPKEAPEPMELDGPKGTGYIKTELISVSEV

SEQ ID NO: 79133 - protein, 714 aa, Homo sapiens
  Payload ID: 15765
  Gene Symbol: STAT1
  Gene Name: signal transducer and activator of transcription 1, 91kDa
  ENSP ID: ENSP00000376137
MWMSQWYELQQLDSKFLEQVHQLYDDSFPMEIRQYLAQWLEKQDWEHAANDVSFATIRFHDLLSQLDDQYSRFSLENNFLLQHNIRKSKRNLQDNFQEDPIQMSMIIYSCLKEERKILENAQRFNQAQSGNIQSTVMLDKQKELDSKVRNVKDKVMCIEHEIKSLEDLQDEYDFKCKTLQNREHETNGVAKSDQKQEQLLLKKMYLMLDNKRKEVVHKIIELLNVTELTQNALINDELVEWKRRQQSACIGGPPNACLDQLQNWFTIVAESLQQVRQQLKKLEELEQKYTYEHDPITKNKQVLWDRTFSLFQQLIQSSFVVERQPCMPTHPQRPLVLKTGVQFTVKLRLLVKLQELNYNLKVKVLFDKDVNERNTVKGFRKFNILGTHTKVMNMEESTNGSLAAEFRHLQLKEQKNAGTRTNEGPLIVTEELHSLSFETQLCQPGLVIDLETTSLPVVVISNVSQLPSGWASILWYNMLVAEPRNLSFFLTPPCARWAQLSEVLSWQFSSVTKRGLNVDQLNMLGEKLLGPNASPDGLIPWTRFCKENINDKNFPFWLWIESILELIKKHLLPLWNDGCIMGFISKERERALLKDQQPGTFLLRFSESSREGAITFTWVERSQNGGEPDFHAVEPYTKKELSAVTFPDIIRNYKVMAAENIPENPLKYLYPNIDKDHAFGKYYSRPKEAPEPMELDGPKGTGYIKTELISVSEV

SEQ ID NO: 79134 - protein, 750 aa, Homo sapiens; identical to SEQ ID NO: 79131
  Payload ID: 15765
  Gene Symbol: STAT1
  Gene Name: signal transducer and activator of transcription 1, 91kDa
  Uniprot ID: P42224
  ENSP ID: ENSP00000386244

SEQ ID NO: 79135 - protein, 40 aa, Homo sapiens
  Payload ID: 15765
  Gene Symbol: STAT1
  Gene Name: signal transducer and activator of transcription 1, 91kDa
  ENSP ID: ENSP00000388240
  MOD_RES (1)..(1): Any amino acid
XSHPSRLQTTDNLLPMSPEEFDEVSRIVGSVEFDSMMNTV

SEQ ID NO: 79136 - protein, 58 aa, Homo sapiens
  Payload ID: 15765
  Gene Symbol: STAT1
  Gene Name: signal transducer and activator of transcription 1, 91kDa
  ENSP ID: ENSP00000388772
  MOD_RES (1)..(1): Any amino acid
XPENPLKYLYPNIDKDHAFGKYYSRPKEAPEPMELDGPKGTGYIKTELISVSEVTVLG

SEQ ID NO: 79137 - protein, 193 aa, Homo sapiens
  Payload ID: 15765
  Gene Symbol: STAT1
  Gene Name: signal transducer and activator of transcription 1, 91kDa
  ENSP ID: ENSP00000394512
MSQWYELQQLDSKFLEQVHQLYDDSFPMEIRQYLAQWLEKQDWEHAANDVSFATIRFHDLLSQLDDQYSRFSLENNFLLQHNIRKSKRNLQDNFQEDPIQMSMIIYSCLKEERKILENAQRFNQAQSGNIQSTVMLDKQKELDSKVRNVKDKVMCIEHEIKSLEDLQDEYDFKCKTLQNRGSSSQNNRVAECH

SEQ ID NO: 79138 - protein, 180 aa, Homo sapiens
  Payload ID: 15765
  Gene Symbol: STAT1
  Gene Name: signal transducer and activator of transcription 1, 91kDa
  ENSP ID: ENSP00000402548
MSQWYELQQLDSKFLEQVHQLYDDSFPMEIRQYLAQWLEKQDWEHAANDVSFATIRFHDLLSQLDDQYSRFSLENNFLLQHNIRKSKRNLQDNFQEDPIQMSMIIYSCLKEERKILENAQRFNQAQSGNIQSTVMLDKQKELDSKVRNVKDKVMCIEHEIKSLEDLQDEYDFKCKTLQNR

SEQ ID NO: 79139 - protein, 150 aa, Homo sapiens
  Payload ID: 15765
  Gene Symbol: STAT1
  Gene Name: signal transducer and activator of transcription 1, 91kDa
  ENSP ID: ENSP00000411398
MSQWYELQQLDSKFLEQVHQLYDDSFPMEIRQYLAQWLEKQDWEHAANDVSFATIRFHDLLSQLDDQYSRFSLENNFLLQHNIRKSKRNLQDNFQEDPIQMSMIIYSCLKEERKILENAQRFNQAQSGNIQSTVMLDKQKELDSKVRNVK

SEQ ID NO: 79140 - protein, 69 aa, Homo sapiens
  Payload ID: 15765
  Gene Symbol: STAT1
  Gene Name: signal transducer and activator of transcription 1, 91kDa
  ENSP ID: ENSP00000416019
MSQWYELQQLDSKFLEQVHQLYDDSFPMEIRQYLAQWLEKQDWEHAANDVSFATIRFHDLLSQLDDQYS

SEQ ID NO: 79141 - protein, 193 aa, Homo sapiens; identical to SEQ ID NO: 79137
  Payload ID: 15765
  Gene Symbol: STAT1
  Gene Name: signal transducer and activator of transcription 1, 91kDa
  ENSP ID: ENSP00000438703

SEQ ID NO: 79142 - protein, 851 aa, Homo sapiens
  Payload ID: 15766
  Gene Symbol: STAT2
  Gene Name: signal transducer and activator of transcription 2, 113kDa
  Uniprot ID: P52630
  ENSP ID: ENSP00000315768
MAQWEMLQNLDSPFQDQLHQLYSHSLLPVDIRQYLAVWIEDQNWQEAALGSDDSKATMLFFHFLDQLNYECGRCSQDPESLLLQHNLRKFCRDIQPFSQDPTQLAEMIFNLLLEEKRILIQAQRAQLEQGEPVLETPVESQQHEIESRILDLRAMMEKLVKSISQLKDQQDVFCFRYKIQAKGKTPSLDPHQTKEQKILQETLNELDKRRKEVLDASKALLGRLTTLIELLLPKLEEWKAQQQKACIRAPIDHGLEQLETWFTAGAKLLFHLRQLLKELKGLSCLVSYQDDPLTKGVDLRNAQVTELLQRLLHRAFVVETQPCMPQTPHRPLILKTGSKFTVRTRLLVRLQEGNESLTVEVSIDRNPPQLQGFRKFNILTSNQKTLTPEKGQSQGLIWDFGYLTLVEQRSGGSGKGSNKGPLGVTEELHIISFTVKYTYQGLKQELKTDTLPVVIISNMNQLSIAWASVLWFNLLSPNLQNQQFFSNPPKAPWSLLGPALSWQFSSYVGRGLNSDQLSMLRNKLFGQNCRTEDPLLSWADFTKRESPPGKLPFWTWLDKILELVHDHLKDLWNDGRIMGFVSRSQERRLLKKTMSGTFLLRFSESSEGGITCSWVEHQDDDKVLIYSVQPYTKEVLQSLPLTEIIRHYQLLTEENIPENPLRFLYPRIPRDEAFGCYYQEKVNLQERRKYLKHRLIVVSNRQVDELQQPLELKPEPELESLELELGLVPEPELSLDLEPLLKAGLDLGPELESVLESTLEPVIEPTLCMVSQTVPEPDQGPVSQPVPEPDLPCDLRHLNTEPMEIFRNCVKIEEIMPNGDPLLAGQNTVDEVYVSRPSHFYTDGPLMPSDF

SEQ ID NO: 79143 - protein, 460 aa, Homo sapiens
  Payload ID: 15766
  Gene Symbol: STAT2
  Gene Name: signal transducer and activator of transcription 2, 113kDa
  ENSP ID: ENSP00000387354
MAQWEMLQNLDSPFQDQLHQLYSHSLLPVDIRQYLAVWIEDQNWQEAALGSDDSKATMLFFHFLDQLNYECGRCSQDPESLLLQHNLRKFCRDIQDPTQLAEMIFNLLLEEKRILIQAQRAQLEQGEPVLETPVESQQHEIESRILDLRAMMEKLVKSISQLKDQQDVFCFRYKIQAKGKTPSLDPHQTKEQKILQETLNELDKRRKEVLDASKALLGRLTTLIELLLPKLEEWKAQQQKACIRAPIDHGLEQLETWFTAGAKLLFHLRQLLKELKGLSCLVSYQDDPLTKGVDLRNAQVTELLQRLLHRAFVVETQPCMPQTPHRPLILKTGSKFTVRTRLLVRLQEGNESLTVEVSIDRNPPQLQGFRKFNILTSNQKTLTPEKGQSQGLIWDFGYLTLVEQRSGGSGKGSNKGPLGVTEELHIISFTVKYTYQGLKQELKVSENGGQGERKQLWKKA

SEQ ID NO: 79144 - protein, 847 aa, Homo sapiens
  Payload ID: 15766
  Gene Symbol: STAT2
  Gene Name: signal transducer and activator of transcription 2, 113kDa
  Uniprot ID: P52630
  ENSP ID: ENSP00000450751
MAQWEMLQNLDSPFQDQLHQLYSHSLLPVDIRQYLAVWIEDQNWQEAALGSDDSKATMLFFHFLDQLNYECGRCSQDPESLLLQHNLRKFCRDIQDPTQLAEMIFNLLLEEKRILIQAQRAQLEQGEPVLETPVESQQHEIESRILDLRAMMEKLVKSISQLKDQQDVFCFRYKIQAKGKTPSLDPHQTKEQKILQETLNELDKRRKEVLDASKALLGRLTTLIELLLPKLEEWKAQQQKACIRAPIDHGLEQLETWFTAGAKLLFHLRQLLKELKGLSCLVSYQDDPLTKGVDLRNAQVTELLQRLLHRAFVVETQPCMPQTPHRPLILKTGSKFTVRTRLLVRLQEGNESLTVEVSIDRNPPQLQGFRKFNILTSNQKTLTPEKGQSQGLIWDFGYLTLVEQRSGGSGKGSNKGPLGVTEELHIISFTVKYTYQGLKQELKTDTLPVVIISNMNQLSIAWASVLWFNLLSPNLQNQQFFSNPPKAPWSLLGPALSWQFSSYVGRGLNSDQLSMLRNKLFGQNCRTEDPLLSWADFTKRESPPGKLPFWTWLDKILELVHDHLKDLWNDGRIMGFVSRSQERRLLKKTMSGTFLLRFSESSEGGITCSWVEHQDDDKVLIYSVQPYTKEVLQSLPLTEIIRHYQLLTEENIPENPLRFLYPRIPRDEAFGCYYQEKVNLQERRKYLKHRLIVVSNRQVDELQQPLELKPEPELESLELELGLVPEPELSLDLEPLLKAGLDLGPELESVLESTLEPVIEPTLCMVSQTVPEPDQGPVSQPVPEPDLPCDLRHLNTEPMEIFRNCVKIEEIMPNGDPLLAGQNTVDEVYVSRPSHFYTDGPLMPSDF

SEQ ID NO: 79145 - protein, 65 aa, Homo sapiens
  Payload ID: 15766
  Gene Symbol: STAT2
  Gene Name: signal transducer and activator of transcription 2, 113kDa
  ENSP ID: ENSP00000450985
MAQWEMLQNLDSPFQDQLHQLYSHSLLPVDIRQYLAVWIEDQNWKLHLGVMIPRLPCYSSTSWIS

SEQ ID NO: 79146 - protein, 770 aa, Homo sapiens
  Payload ID: 15767
  Gene Symbol: STAT3
  Gene Name: signal transducer and activator of transcription 3 (acute-phase response factor)
  Uniprot ID: P40763
  ENSP ID: ENSP00000264657
MAQWNQLQQLDTRYLEQLHQLYSDSFPMELRQFLAPWIESQDWAYAASKESHATLVFHNLLGEIDQQYSRFLQESNVLYQHNLRRIKQFLQSRYLEKPMEIARIVARCLWEESRLLQTAATAAQQGGQANHPTAAVVTEKQQMLEQHLQDVRKRVQDLEQKMKVVENLQDDFDFNYKTLKSQGDMQDLNGNNQSVTRQKMQQLEQMLTALDQMRRSIVSELAGLLSAMEYVQKTLTDEELADWKRRQQIACIGGPPNICLDRLENWITSLAESQLQTRQQIKKLEELQQKVSYKGDPIVQHRPMLEERIVELFRNLMKSAFVVERQPCMPMHPDRPLVIKTGVQFTTKVRLLVKFPELNYQLKIKVCIDKDSGDVAALRGSRKFNILGTNTKVMNMEESNNGSLSAEFKHLTLREQRCGNGGRANCDASLIVTEELHLITFETEVYHQGLKIDLETHSLPVVVISNICQMPNAWASILWYNMLTNNPKNVNFFTKPPIGTWDQVAEVLSWQFSSTTKRGLSIEQLTTLAEKLLGPGVNYSGCQITWAKFCKENMAGKGFSFWVWLDNIIDLVKKYILALWNEGYIMGFISKERERAILSTKPPGTFLLRFSESSKEGGVTFTWVEKDISGKTQIQSVEPYTKQQLNNMSFAEIIMGYKIMDATNILVSPLVYLYPDIPKEEAFGKYCRPESQEHPEADPGSAAPYLKTKFICVTPTTCSNTIDLPMSPRTLDSLMQFGNNGEGAEPSAGGQFESLTFDMELTSECATSPM

SEQ ID NO: 79147 - protein, 672 aa, Homo sapiens
  Payload ID: 15767
  Gene Symbol: STAT3
  Gene Name: signal transducer and activator of transcription 3 (acute-phase response factor)
  ENSP ID: ENSP00000373923
MEIARIVARCLWEESRLLQTAATAAQQGGQANHPTAAVVTEKQQMLEQHLQDVRKRVQDLEQKMKVVENLQDDFDFNYKTLKSQGDMQDLNGNNQSVTRQKMQQLEQMLTALDQMRRSIVSELAGLLSAMEYVQKTLTDEELADWKRRQQIACIGGPPNICLDRLENWITSLAESQLQTRQQIKKLEELQQKVSYKGDPIVQHRPMLEERIVELFRNLMKSAFVVERQPCMPMHPDRPLVIKTGVQFTTKVRLLVKFPELNYQLKIKVCIDKDSGDVAALRGSRKFNILGTNTKVMNMEESNNGSLSAEFKHLTLREQRCGNGGRANCDASLIVTEELHLITFETEVYHQGLKIDLETHSLPVVVISNICQMPNAWASILWYNMLTNNPKNVNFFTKPPIGTWDQVAEVLSWQFSSTTKRGLSIEQLTTLAEKLLGPGVNYSGCQITWAKFCKENMAGKGFSFWVWLDNIIDLVKKYILALWNEGYIMGFISKERERAILSTKPPGTFLLRFSESSKEGGVTFTWVEKDISGKTQIQSVEPYTKQQLNNMSFAEIIMGYKIMDATNILVSPLVYLYPDIPKEEAFGKYCRPESQEHPEADPGSAAPYLKTKFICVTPTTCSNTIDLPMSPRTLDSLMQFGNNGEGAEPSAGGQFESLTFDMELTSECATSPM

SEQ ID NO: 79148 - protein, 769 aa, Homo sapiens
  Payload ID: 15767
  Gene Symbol: STAT3
  Gene Name: signal transducer and activator of transcription 3 (acute-phase response factor)
  Uniprot ID: P40763
  ENSP ID: ENSP00000384943
MAQWNQLQQLDTRYLEQLHQLYSDSFPMELRQFLAPWIESQDWAYAASKESHATLVFHNLLGEIDQQYSRFLQESNVLYQHNLRRIKQFLQSRYLEKPMEIARIVARCLWEESRLLQTAATAAQQGGQANHPTAAVVTEKQQMLEQHLQDVRKRVQDLEQKMKVVENLQDDFDFNYKTLKSQGDMQDLNGNNQSVTRQKMQQLEQMLTALDQMRRSIVSELAGLLSAMEYVQKTLTDEELADWKRRQQIACIGGPPNICLDRLENWITSLAESQLQTRQQIKKLEELQQKVSYKGDPIVQHRPMLEERIVELFRNLMKSAFVVERQPCMPMHPDRPLVIKTGVQFTTKVRLLVKFPELNYQLKIKVCIDKDSGDVAALRGSRKFNILGTNTKVMNMEESNNGSLSAEFKHLTLREQRCGNGGRANCDASLIVTEELHLITFETEVYHQGLKIDLETHSLPVVVISNICQMPNAWASILWYNMLTNNPKNVNFFTKPPIGTWDQVAEVLSWQFSSTTKRGLSIEQLTTLAEKLLGPGVNYSGCQITWAKFCKENMAGKGFSFWVWLDNIIDLVKKYILALWNEGYIMGFISKERERAILSTKPPGTFLLRFSESSKEGGVTFTWVEKDISGKTQIQSVEPYTKQQLNNMSFAEIIMGYKIMDATNILVSPLVYLYPDIPKEEAFGKYCRPESQEHPEADPGAAPYLKTKFICVTPTTCSNTIDLPMSPRTLDSLMQFGNNGEGAEPSAGGQFESLTFDMELTSECATSPM

SEQ ID NO: 79149 - protein, 722 aa, Homo sapiens
  Payload ID: 15767
  Gene Symbol: STAT3
  Gene Name: signal transducer and activator of transcription 3 (acute-phase response factor)
  Uniprot ID: P40763
  ENSP ID: ENSP00000467000
MAQWNQLQQLDTRYLEQLHQLYSDSFPMELRQFLAPWIESQDWAYAASKESHATLVFHNLLGEIDQQYSRFLQESNVLYQHNLRRIKQFLQSRYLEKPMEIARIVARCLWEESRLLQTAATAAQQGGQANHPTAAVVTEKQQMLEQHLQDVRKRVQDLEQKMKVVENLQDDFDFNYKTLKSQGDMQDLNGNNQSVTRQKMQQLEQMLTALDQMRRSIVSELAGLLSAMEYVQKTLTDEELADWKRRQQIACIGGPPNICLDRLENWITSLAESQLQTRQQIKKLEELQQKVSYKGDPIVQHRPMLEERIVELFRNLMKSAFVVERQPCMPMHPDRPLVIKTGVQFTTKVRLLVKFPELNYQLKIKVCIDKDSGDVAALRGSRKFNILGTNTKVMNMEESNNGSLSAEFKHLTLREQRCGNGGRANCDASLIVTEELHLITFETEVYHQGLKIDLETHSLPVVVISNICQMPNAWASILWYNMLTNNPKNVNFFTKPPIGTWDQVAEVLSWQFSSTTKRGLSIEQLTTLAEKLLGPGVNYSGCQITWAKFCKENMAGKGFSFWVWLDNIIDLVKKYILALWNEGYIMGFISKERERAILSTKPPGTFLLRFSESSKEGGVTFTWVEKDISGKTQIQSVEPYTKQQLNNMSFAEIIMGYKIMDATNILVSPLVYLYPDIPKEEAFGKYCRPESQEHPEADPGSAAPYLKTKFICVTPFIDAVWK

SEQ ID NO: 79150 - protein, 84 aa, Homo sapiens
  Payload ID: 15767
  Gene Symbol: STAT3
  Gene Name: signal transducer and activator of transcription 3 (acute-phase response factor)
  ENSP ID: ENSP00000467173
MRMAQWNQLQQLDTRYLEQLHQLYSDSFPMELRQFLAPWIESQDWAYAASKESHATLVFHNLLGEIDQQYSRFLQESNVLYQHN

SEQ ID NO: 79151 - protein, 770 aa, Homo sapiens; identical to SEQ ID NO: 79146
  Payload ID: 15767
  Gene Symbol: STAT3
  Gene Name: signal transducer and activator of transcription 3 (acute-phase response factor)
  Uniprot ID: P40763
  ENSP ID: ENSP00000467985

SEQ ID NO: 79152 - protein, 748 aa, Homo sapiens
  Payload ID: 15768
  Gene Symbol: STAT4
  Gene Name: signal transducer and activator of transcription 4
  Uniprot ID: Q14765
  ENSP ID: ENSP00000351255
MSQWNQVQQLEIKFLEQVDQFYDDNFPMEIRHLLAQWIENQDWEAASNNETMATILLQNLLIQLDEQLGRVSKEKNLLLIHNLKRIRKVLQGKFHGNPMHVAVVISNCLREERRILAAANMPVQGPLEKSLQSSSVSERQRNVEHKVAAIKNSVQMTEQDTKYLEDLQDEFDYRYKTIQTMDQSDKNSAMVNQEVLTLQEMLNSLDFKRKEALSKMTQIIHETDLLMNTMLIEELQDWKRRQQIACIGGPLHNGLDQLQNCFTLLAESLFQLRRQLEKLEEQSTKMTYEGDPIPMQRTHMLERVTFLIYNLFKNSFVVERQPCMPTHPQRPLVLKTLIQFTVKLRLLIKLPELNYQVKVKASIDKNVSTLSNRRFVLCGTNVKAMSIEESSNGSLSVEFRHLQPKEMKSSAGGKGNEGCHMVTEELHSITFETQICLYGLTIDLETSSLPVVMISNVSQLPNAWASIIWYNVSTNDSQNLVFFNNPPPATLSQLLEVMSWQFSSYVGRGLNSDQLHMLAEKLTVQSSYSDGHLTWAKFCKEHLPGKSFTFWTWLEAILDLIKKHILPLWIDGYVMGFVSKEKERLLLKDKMPGTFLLRFSESHLGGITFTWVDHSESGEVRFHSVEPYNKGRLSALPFADILRDYKVIMAENIPENPLKYLYPDIPKDKAFGKHYSSQPCEVSRPTERGDKGYVPSVFIPISTIRSDSTEPHSPSDLLPMSPSVYAVLRENLSPTTIETAMKSPYSAE

SEQ ID NO: 79153 - protein, 748 aa, Homo sapiens; identical to SEQ ID NO: 79152
  Payload ID: 15768
  Gene Symbol: STAT4
  Gene Name: signal transducer and activator of transcription 4
  Uniprot ID: Q14765
  ENSP ID: ENSP00000376134

SEQ ID NO: 79154 - protein, 117 aa, Homo sapiens
  Payload ID: 15768
  Gene Symbol: STAT4
  Gene Name: signal transducer and activator of transcription 4
  ENSP ID: ENSP00000386288
MSQWNQVQQLEIKFLEQVDQFYDDNFPMEIRHLLAQWIENQDWEAASNNETMATILLQNLLIQLDEQLGRVSKEKNLLLIHNLKRIRKVLQSPGLATAQLPLDRHGETCIQRSKSCP

SEQ ID NO: 79155 - protein, 97 aa, Homo sapiens
  Payload ID: 15768
  Gene Symbol: STAT4
  Gene Name: signal transducer and activator of transcription 4
  ENSP ID: ENSP00000403238
MEIRHLLAQWIENQDWEAASNNETMATILLQNLLIQLDEQLGRVSKEKNLLLIHNLKRIRKVLQGKFHGNPMHVAVVISNCLREERRILAAANMPVQ

SEQ ID NO: 79156 - protein, 79 aa, Homo sapiens
  Payload ID: 15768
  Gene Symbol: STAT4
  Gene Name: signal transducer and activator of transcription 4
  ENSP ID: ENSP00000412397
MSQWNQVQQLEIKFLEQVDQFYDDNFPMEIRHLLAQWIENQDWEAASNNETMATILLQNLLIQLDEQLGRVSKEKNLLL

SEQ ID NO: 79157 - protein, 25 aa, Homo sapiens
  Payload ID: 15768
  Gene Symbol: STAT4
  Gene Name: signal transducer and activator of transcription 4
  ENSP ID: ENSP00000414322
MSQWNQVQQLEIKFLEQVDQFYDDN

SEQ ID NO: 79158 - protein, 794 aa, Homo sapiens
  Payload ID: 15769
  Gene Symbol: STAT5A
  Gene Name: signal transducer and activator of transcription 5A
  Uniprot ID: P42229
  ENSP ID: ENSP00000341208
MAGWIQAQQLQGDALRQMQVLYGQHFPIEVRHYLAQWIESQPWDAIDLDNPQDRAQATQLLEGLVQELQKKAEHQVGEDGFLLKIKLGHYATQLQKTYDRCPLELVRCIRHILYNEQRLVREANNCSSPAGILVDAMSQKHLQINQTFEELRLVTQDTENELKKLQQTQEYFIIQYQESLRIQAQFAQLAQLSPQERLSRETALQQKQVSLEAWLQREAQTLQQYRVELAEKHQKTLQLLRKQQTIILDDELIQWKRRQQLAGNGGPPEGSLDVLQSWCEKLAEIIWQNRQQIRRAEHLCQQLPIPGPVEEMLAEVNATITDIISALVTSTFIIEKQPPQVLKTQTKFAATVRLLVGGKLNVHMNPPQVKATIISEQQAKSLLKNENTRNECSGEILNNCCVMEYHQATGTLSAHFRNMSLKRIKRADRRGAESVTEEKFTVLFESQFSVGSNELVFQVKTLSLPVVVIVHGSQDHNATATVLWDNAFAEPGRVPFAVPDKVLWPQLCEALNMKFKAEVQSNRGLTKENLVFLAQKLFNNSSSHLEDYSGLSVSWSQFNRENLPGWNYTFWQWFDGVMEVLKKHHKPHWNDGAILGFVNKQQAHDLLINKPDGTFLLRFSDSEIGGITIAWKFDSPERNLWNLKPFTTRDFSIRSLADRLGDLSYLIYVFPDRPKDEVFSKYYTPVLAKAVDGYVKPQIKQVVPEFVNASADAGGSSATYMDQAPSPAVCPQAPYNMYPQNPDHVLDQDGEFDLDETMDVARHVEELLRRPMDSLDSRLSPPAGLFTSARGSLS

SEQ ID NO: 79159 - protein, 125 aa, Homo sapiens
  Payload ID: 15769
  Gene Symbol: STAT5A
  Gene Name: signal transducer and activator of transcription 5A
  ENSP ID: ENSP00000407327
MAGWIQAQQLQGDALRQMQVLYGQHFPIEVRHYLAQWIESQPWDAIDLDNPQDRAQATQLLEGLVQELQKKAEHQVGEDGFLLKIKLGHYATQLQKTYDRCPLELVRCIRHILYNEQRLVREANN

SEQ ID NO: 79160 - protein, 764 aa, Homo sapiens
  Payload ID: 15769
  Gene Symbol: STAT5A
  Gene Name: signal transducer and activator of transcription 5A
  Uniprot ID: P42229
  ENSP ID: ENSP00000443107
MAGWIQAQQLQGDALRQMQVLYGQHFPIEVRHYLAQWIESQPWDAIDLDNPQDRAQATQLLEGLVQELQKKAEHQVGEDGFLLKIKLGHYATQLQCSSPAGILVDAMSQKHLQINQTFEELRLVTQDTENELKKLQQTQEYFIIQYQESLRIQAQFAQLAQLSPQERLSRETALQQKQVSLEAWLQREAQTLQQYRVELAEKHQKTLQLLRKQQTIILDDELIQWKRRQQLAGNGGPPEGSLDVLQSWCEKLAEIIWQNRQQIRRAEHLCQQLPIPGPVEEMLAEVNATITDIISALVTSTFIIEKQPPQVLKTQTKFAATVRLLVGGKLNVHMNPPQVKATIISEQQAKSLLKNENTRNECSGEILNNCCVMEYHQATGTLSAHFRNMSLKRIKRADRRGAESVTEEKFTVLFESQFSVGSNELVFQVKTLSLPVVVIVHGSQDHNATATVLWDNAFAEPGRVPFAVPDKVLWPQLCEALNMKFKAEVQSNRGLTKENLVFLAQKLFNNSSSHLEDYSGLSVSWSQFNRENLPGWNYTFWQWFDGVMEVLKKHHKPHWNDGAILGFVNKQQAHDLLINKPDGTFLLRFSDSEIGGITIAWKFDSPERNLWNLKPFTTRDFSIRSLADRLGDLSYLIYVFPDRPKDEVFSKYYTPVLAKAVDGYVKPQIKQVVPEFVNASADAGGSSATYMDQAPSPAVCPQAPYNMYPQNPDHVLDQDGEFDLDETMDVARHVEELLRRPMDSLDSRLSPPAGLFTSARGSLS

SEQ ID NO: 79161 - protein, 141 aa, Homo sapiens
  Payload ID: 15769
  Gene Symbol: STAT5A
  Gene Name: signal transducer and activator of transcription 5A
  ENSP ID: ENSP00000464730
MSQKHLQINQTFEELRLVTQDTENELKKLQQTQEYFIIQYQESLRIQAQFAQLAQLSPQERLSRETALQQKQVSLEAWLQREAQTLQQYRVELAEKHQKTLQLLRKQQTIILDDELIQWKRRQQLAGNGGPPEGSLDVLQS

SEQ ID NO: 79162 - protein, 763 aa, Homo sapiens
  Payload ID: 15769
  Gene Symbol: STAT5A
  Gene Name: signal transducer and activator of transcription 5A
  ENSP ID: ENSP00000465437
MAGWIQAQQLQGDALRQMQVLYGQHFPIEVRHYLAQWIESQPWDAIDLDNPQDRAQATQLLEGLVQELQKKAEHQVGEDGFLLKIKLGHYATQLQKTYDRCPLELVRCIRHILYNEQRLVREANNCSSPAGILVDAMSQKHLQINQTFEELRLVTQDTENELKKLQQTQEYFIIQYQESLRIQAQFAQLAQLSPQERLSRETALQQKQVSLEAWLQREAQTLQQYRVELAEKHQKTLQLLRKQQTIILDDELIQWKRRQQLAGNGGPPEGSLDVLQSWCEKLAEIIWQNRQQIRRAEHLCQQLPIPGPVEEMLAEVNATITDIISALVTSTFIIEKQPPQVLKTQTKFAATVRLLVGGKLNVHMNPPQVKATIISEQQAKSLLKNENTRNECSGEILNNCCVMEYHQATGTLSAHFRNMSLKRIKRADRRGAESVTEEKFTVLFESQFSVGSNELVFQVKGRVPFAVPDKVLWPQLCEALNMKFKAEVQSNRGLTKENLVFLAQKLFNNSSSHLEDYSGLSVSWSQFNRENLPGWNYTFWQWFDGVMEVLKKHHKPHWNDGAILGFVNKQQAHDLLINKPDGTFLLRFSDSEIGGITIAWKFDSPERNLWNLKPFTTRDFSIRSLADRLGDLSYLIYVFPDRPKDEVFSKYYTPVLAKAVDGYVKPQIKQVVPEFVNASADAGGSSATYMDQAPSPAVCPQAPYNMYPQNPDHVLDQDGEFDLDETMDVARHVEELLRRPMDSLDSRLSPPAGLFTSARGSLS

SEQ ID NO: 79163 - protein, 229 aa, Homo sapiens
  Payload ID: 15769
  Gene Symbol: STAT5A
  Gene Name: signal transducer and activator of transcription 5A
  ENSP ID: ENSP00000466320
MKFKAEVQSNRGLTKENLVFLAQKLFNNSSSHLEDYSGLSVSWSQFNRENLPGWNYTFWQWFDGVMEVLKKHHKPHWNDGAILGFVNKQQAHDLLINKPDGTFLLRFSDSEIGGITIAWKFDSPERNLWNLKPFTTRDFSIRSLADRLGDLSYLIYVFPDRPKDEVFSKYYTPVLAKAVDGYVKPQIKQVVPEFVNASADAGGSSATYMDQAPSPAVCPQAPYNMYPQK

SEQ ID NO: 79164 - protein, 794 aa, Homo sapiens; identical to SEQ ID NO: 79158
  Payload ID: 15769
  Gene Symbol: STAT5A
  Gene Name: signal transducer and activator of transcription 5A
  Uniprot ID: P42229
  ENSP ID: ENSP00000468749

SEQ ID NO: 79165 - protein, 787 aa, Homo sapiens
  Payload ID: 15770
  Gene Symbol: STAT5B
  Gene Name: signal transducer and activator of transcription 5B
  Uniprot ID: P51692
  ENSP ID: ENSP00000293328
MAVWIQAQQLQGEALHQMQALYGQHFPIEVRHYLSQWIESQAWDSVDLDNPQENIKATQLLEGLVQELQKKAEHQVGEDGFLLKIKLGHYATQLQNTYDRCPMELVRCIRHILYNEQRLVREANNGSSPAGSLADAMSQKHLQINQTFEELRLVTQDTENELKKLQQTQEYFIIQYQESLRIQAQFGPLAQLSPQERLSRETALQQKQVSLEAWLQREAQTLQQYRVELAEKHQKTLQLLRKQQTIILDDELIQWKRRQQLAGNGGPPEGSLDVLQSWCEKLAEIIWQNRQQIRRAEHLCQQLPIPGPVEEMLAEVNATITDIISALVTSTFIIEKQPPQVLKTQTKFAATVRLLVGGKLNVHMNPPQVKATIISEQQAKSLLKNENTRNDYSGEILNNCCVMEYHQATGTLSAHFRNMSLKRIKRSDRRGAESVTEEKFTILFESQFSVGGNELVFQVKTLSLPVVVIVHGSQDNNATATVLWDNAFAEPGRVPFAVPDKVLWPQLCEALNMKFKAEVQSNRGLTKENLVFLAQKLFNNSSSHLEDYSGLSVSWSQFNRENLPGRNYTFWQWFDGVMEVLKKHLKPHWNDGAILGFVNKQQAHDLLINKPDGTFLLRFSDSEIGGITIAWKFDSQERMFWNLMPFTTRDFSIRSLADRLGDLNYLIYVFPDRPKDEVYSKYYTPVPCESATAKAVDGYVKPQIKQVVPEFVNASADAGGGSATYMDQAPSPAVCPQAHYNMYPQNPDSVLDTDGDFDLEDTMDVARRVEELLGRPMDSQWIPHAQS

SEQ ID NO: 79166 - protein, 156 aa, Homo sapiens
  Payload ID: 15770
  Gene Symbol: STAT5B
  Gene Name: signal transducer and activator of transcription 5B
  ENSP ID: ENSP00000398379
MAVWIQAQQLQGEALHQMQALYGQHFPIEVRHYLSQWIESQAWDSVDLDNPQENIKATQLLEGLVQELQKKAEHQVGEDGFLLKIKLGHYATQLQNTYDRCPMELVRCIRHILYNEQRLVREANNGSSPAGSLADAMSQKHLQINQTFEELRLVTQ

SEQ ID NO: 79167 - protein, 847 aa, Homo sapiens
  Payload ID: 15771
  Gene Symbol: STAT6
  Gene Name: signal transducer and activator of transcription 6, interleukin-4 induced
  Uniprot ID: P42226
  ENSP ID: ENSP00000300134
MSLWGLVSKMPPEKVQRLYVDFPQHLRHLLGDWLESQPWEFLVGSDAFCCNLASALLSDTVQHLQASVGEQGEGSTILQHISTLESIYQRDPLKLVATFRQILQGEKKAVMEQFRHLPMPFHWKQEELKFKTGLRRLQHRVGEIHLLREALQKGAEAGQVSLHSLIETPANGTGPSEALAMLLQETTGELEAAKALVLKRIQIWKRQQQLAGNGAPFEESLAPLQERCESLVDIYSQLQQEVGAAGGELEPKTRASLTGRLDEVLRTLVTSCFLVEKQPPQVLKTQTKFQAGVRFLLGLRFLGAPAKPPLVRADMVTEKQARELSVPQGPGAGAESTGEIINNTVPLENSIPGNCCSALFKNLLLKKIKRCERKGTESVTEEKCAVLFSASFTLGPGKLPIQLQALSLPLVVIVHGNQDNNAKATILWDNAFSEMDRVPFVVAERVPWEKMCETLNLKFMAEVGTNRGLLPEHFLFLAQKIFNDNSLSMEAFQHRSVSWSQFNKEILLGRGFTFWQWFDGVLDLTKRCLRSYWSDRLIIGFISKQYVTSLLLNEPDGTFLLRFSDSEIGGITIAHVIRGQDGSPQIENIQPFSAKDLSIRSLGDRIRDLAQLKNLYPKKPKDEAFRSHYKPEQMGKDGRGYVPATIKMTVERDQPLPTPELQMPTMVPSYDLGMAPDSSMSMQLGPDMVPQVYPPHSHSIPPYQGLSPEESVNVLSAFQEPHLQMPPSLGQMSLPFDQPHPQGLLPCQPQEHAVSSPDPLLCSDVTMVEDSCLSQPVTAFPQGTWIGEDIFPPLLPPTEQDLTKLLLEGQGESGGGSLGAQPLLQPSHYGQSGISMSHMDLRANPSW

SEQ ID NO: 79168 - protein, 847 aa, Homo sapiens; identical to SEQ ID NO: 79167
  Payload ID: 15771
  Gene Symbol: STAT6
  Gene Name: signal transducer and activator of transcription 6, interleukin-4 induced
  Uniprot ID: P42226
  ENSP ID: ENSP00000401486

SEQ ID NO: 79169 - protein, 847 aa, Homo sapiens; identical to SEQ ID NO: 79167
  Payload ID: 15771
  Gene Symbol: STAT6
  Gene Name: signal transducer and activator of transcription 6, interleukin-4 induced
  Uniprot ID: P42226
  ENSP ID: ENSP00000438451

SEQ ID NO: 79170 - protein, 737 aa, Homo sapiens
  Payload ID: 15771
  Gene Symbol: STAT6
  Gene Name: signal transducer and activator of transcription 6, interleukin-4 induced
  Uniprot ID: P42226
  ENSP ID: ENSP00000444530
MEQFRHLPMPFHWKQEELKFKTGLRRLQHRVGEIHLLREALQKGAEAGQVSLHSLIETPANGTGPSEALAMLLQETTGELEAAKALVLKRIQIWKRQQQLAGNGAPFEESLAPLQERCESLVDIYSQLQQEVGAAGGELEPKTRASLTGRLDEVLRTLVTSCFLVEKQPPQVLKTQTKFQAGVRFLLGLRFLGAPAKPPLVRADMVTEKQARELSVPQGPGAGAESTGEIINNTVPLENSIPGNCCSALFKNLLLKKIKRCERKGTESVTEEKCAVLFSASFTLGPGKLPIQLQALSLPLVVIVHGNQDNNAKATILWDNAFSEMDRVPFVVAERVPWEKMCETLNLKFMAEVGTNRGLLPEHFLFLAQKIFNDNSLSMEAFQHRSVSWSQFNKEILLGRGFTFWQWFDGVLDLTKRCLRSYWSDRLIIGFISKQYVTSLLLNEPDGTFLLRFSDSEIGGITIAHVIRGQDGSPQIENIQPFSAKDLSIRSLGDRIRDLAQLKNLYPKKPKDEAFRSHYKPEQMGKDGRGYVPATIKMTVERDQPLPTPELQMPTMVPSYDLGMAPDSSMSMQLGPDMVPQVYPPHSHSIPPYQGLSPEESVNVLSAFQEPHLQMPPSLGQMSLPFDQPHPQGLLPCQPQEHAVSSPDPLLCSDVTMVEDSCLSQPVTAFPQGTWIGEDIFPPLLPPTEQDLTKLLLEGQGESGGGSLGAQPLLQPSHYGQSGISMSHMDLRANPSW

SEQ ID NO: 79171 - protein, 737 aa, Homo sapiens; identical to SEQ ID NO: 79170
  Payload ID: 15771
  Gene Symbol: STAT6
  Gene Name: signal transducer and activator of transcription 6, interleukin-4 induced
  Uniprot ID: P42226
  ENSP ID: ENSP00000445409

SEQ ID NO: 79172 - protein, 155 aa, Homo sapiens
  Payload ID: 15771
  Gene Symbol: STAT6
  Gene Name: signal transducer and activator of transcription 6, interleukin-4 induced
  ENSP ID: ENSP00000450428
IAHVIRGQDGSPQIENIQPFSAKDLSIRSLGDRIRDLAQLKNLYPKKPKDEAFRSHYKPEQMGKDGRGYVPATIKMTVERDQPLPTPELQMPTMVPSYDLGMAPDSSMSMQLGPDMVCTHHTLTPSPRIKASPQKNQSTCCQPSRSLTCRCPPAW

SEQ ID NO: 79173 - protein, 38 aa, Homo sapiens
  Payload ID: 15771
  Gene Symbol: STAT6
  Gene Name: signal transducer and activator of transcription 6, interleukin-4 induced
  ENSP ID: ENSP00000450510
MSLWGLVSKMPPEKVQRLYVDFPQHLRHLLGDWLESQP

SEQ ID NO: 79174 - protein, 104 aa, Homo sapiens
  Payload ID: 15771
  Gene Symbol: STAT6
  Gene Name: signal transducer and activator of transcription 6, interleukin-4 induced
  ENSP ID: ENSP00000450665
MSLWGLVSKMPPEKVQRLYVDFPQHLRHLLGDWLESQPWEFLVGSDAFCCNLASALLSDTVQHLQASVGEQGEGSTILQHISTLESIYQRDPLKLVATFRQILQ

SEQ ID NO: 79175 - protein, 64 aa, Homo sapiens
  Payload ID: 15771
  Gene Symbol: STAT6
  Gene Name: signal transducer and activator of transcription 6, interleukin-4 induced
  ENSP ID: ENSP00000450732
MSLWGLVSKMPPEKVQRLYVDFPQHLRHLLGDWLESQPWEFLVGSDAFCCNLASALLSDTVQHL

SEQ ID NO: 79176 - protein, 74 aa, Homo sapiens
  Payload ID: 15771
  Gene Symbol: STAT6
  Gene Name: signal transducer and activator of transcription 6, interleukin-4 induced
  ENSP ID: ENSP00000450747
MSLWGLVSKMPPEKVQRLYVDFPQHLRHLLGDWLESQPWEFLVGSDAFCCNLASALLSDTVQHLQASVGEQGEG

SEQ ID NO: 79177 - protein, 154 aa, Homo sapiens
  Payload ID: 15771
  Gene Symbol: STAT6
  Gene Name: signal transducer and activator of transcription 6, interleukin-4 induced
  ENSP ID: ENSP00000450921
MDRVPFVVAERVPWEKMCETLNLKFMAEVGTNRGLLPEHFLFLAQKIFNDNSLSMEAFQHRSVSWSQFNKEILLGRGFTFWQWFDGVLDLTKRCLRSYWSDRLIIGFISKQYVTSLLLNEPDGTFLLRFSDSEIGGITIAHVIRGQDGSPQIEN

SEQ ID NO: 79178 - protein, 154 aa, Homo sapiens
  Payload ID: 15771
  Gene Symbol: STAT6
  Gene Name: signal transducer and activator of transcription 6, interleukin-4 induced
  ENSP ID: ENSP00000451074
MSLWGLVSKMPPEKVQRLYVDFPQHLRHLLGDWLESQPWEFLVGSDAFCCNLASALLSDTVQHLQASVGEQGEGSTILQHISTLESIYQRDPLKLVATFRQILQGEKKAVMEQFRHLPMPFHWKQEELKFKTGLRRLQHRVGEIHLLREALQKG

SEQ ID NO: 79179 - protein, 103 aa, Homo sapiens
  Payload ID: 15771
  Gene Symbol: STAT6
  Gene Name: signal transducer and activator of transcription 6, interleukin-4 induced
  ENSP ID: ENSP00000451209
MSLWGLVSKMPPEKVQRLYVDFPQHLRHLLGDWLESQPWEFLVGSDAFCCNLASALLSDTVQHLQASVGEQGEGSTILQHISTLESIYQRDPLKLVATFRQIL

SEQ ID NO: 79180 - protein, 290 aa, Homo sapiens
  Payload ID: 15771
  Gene Symbol: STAT6
  Gene Name: signal transducer and activator of transcription 6, interleukin-4 induced
  ENSP ID: ENSP00000451546
  MOD_RES (1)..(1): Any amino acid
XFLGAPAKPPLVRADMVTEKQARELSVPQGPGAGAESTGEIINNTVPLENSIPGNCCSALFKNLLLKKIKRCERKGTESVTEEKCAVLFSASFTLGPGKLPIQLQALSLPLVVIVHGNQDNNAKATILWDNAFSEMDRVPFVVAERVPWEKMCETLNLKFMAEVGTNRGLLPEHFLFLAQKIFNDNSLSMEAFQHRSVSWSQFNKMRNLMLRGLCSLFKFPKQEILLGRGFTFWQWFDGVLDLTKRCLRSYWSDRLIIGFISKQYVTSLLLNEPDGTFLLRFSDSEIGGI

SEQ ID NO: 79181 - protein, 847 aa, Homo sapiens; identical to SEQ ID NO: 79167
  Payload ID: 15771
  Gene Symbol: STAT6
  Gene Name: signal transducer and activator of transcription 6, interleukin-4 induced
  Uniprot ID: P42226
  ENSP ID: ENSP00000451742

SEQ ID NO: 79182 - protein, 38 aa, Homo sapiens; identical to SEQ ID NO: 79173
  Payload ID: 15771
  Gene Symbol: STAT6
  Gene Name: signal transducer and activator of transcription 6, interleukin-4 induced
  ENSP ID: ENSP00000451909

SEQ ID NO: 79183 - protein, 144 aa, Homo sapiens
  Payload ID: 15771
  Gene Symbol: STAT6
  Gene Name: signal transducer and activator of transcription 6, interleukin-4 induced
  ENSP ID: ENSP00000452203
MSLWGLVSKMPPEKVQRLYVDFPQHLRHLLGDWLESQPWEFLVGSDAFCCNLASALLSDTVQHLQASVGEQGEGSTILQHISTLESIYQRDPLKLVATFRQILQGEKKAVMEQFRHLPMPFHWKQEELKFKTGLRRLQHRVGEI

SEQ ID NO: 79184 - protein, 141 aa, Homo sapiens
  Payload ID: 15771
  Gene Symbol: STAT6
  Gene Name: signal transducer and activator of transcription 6, interleukin-4 induced
  ENSP ID: ENSP00000452373
MSLWGLVSKMPPEKVQRLYVDFPQHLRHLLGDWLESQPWEFLVGSDAFCCNLASALLSDTVQHLQASSIYQRDPLKLVATFRQILQGEKKAVMEQFRHLPMPFHWKQEELKFKTGLRRLQHRVGEIHLLREALQKGAEAGQ

SEQ ID NO: 79185 - protein, 159 aa, Homo sapiens
  Payload ID: 15771
  Gene Symbol: STAT6
  Gene Name: signal transducer and activator of transcription 6, interleukin-4 induced
  ENSP ID: ENSP00000452394
MSLWGLVSKMPPEKVQRLYVDFPQHLRHLLGDWLESQPWEFLVGSDAFCCNLASALLSDTVQHLQASVGEQGEGSTILQHISTLESIYQRDPLKLVATFRQILQGEKKAVMEQFRHLPMPFHWKQEELKFKTGLRRLQHRVGEIHLLREALQKGAEAGQ

SEQ ID NO: 79186 - protein, 295 aa, Homo sapiens
  Payload ID: 15772
  Gene Symbol: STAP1
  Gene Name: signal transducing adaptor family member 1
  Uniprot ID: Q9ULZ2
  ENSP ID: ENSP00000265404
MMAKKPPKPAPRRIFQERLKITALPLYFEGFLLIKRSGYREYEHYWTELRGTTLFFYTDKKSIIYVDKLDIVDLTCLTEQNSTEKNCAKFTLVLPKEEVQLKTENTESGEEWRGFILTVTELSVPQNVSLLPGQVIKLHEVLEREKKRRIETEQSTSVEKEKEPTEDYVDVLNPMPACFYTVSRKEATEMLQKNPSLGNMILRPGSDSRNYSITIRQEIDIPRIKHYKVMSVGQNYTIELEKPVTLPNLFSVIDYFVKETRGNLRPFICSTDENTGQEPSMEGRSEKLKKNPHIA

SEQ ID NO: 79187 - protein, 295 aa, Homo sapiens; identical to SEQ ID NO: 79186
  Payload ID: 15772
  Gene Symbol: STAP1
  Gene Name: signal transducing adaptor family member 1
  Uniprot ID: Q9ULZ2
  ENSP ID: ENSP00000379527

SEQ ID NO: 79188 - protein, 449 aa, Homo sapiens
  Payload ID: 15773
  Gene Symbol: STAP2
  Gene Name: signal transducing adaptor family member 2
  Uniprot ID: Q9UGK3
  ENSP ID: ENSP00000468927
MASALRPPRVPKPKGVLPSHYYESFLEKKGPCDRDYKKFWAGLQGLTIYFYNSNRDFQHVEKLNLGAFEKLTDEIPWGSSRDPGTHFSLILRDQEIKFKVETLECREMWKGFILTVVELRVPTDLTLLPGHLYMMSEVLAKEEARRALETPSCFLKVSRLEAQLLLERYPECGNLLLRPSGDGADGVSVTTRQMHNGTHVVRHYKVKREGPKYVIDVEQPFSCTSLDAVVNYFVSHTKKALVPFLLDEDYEKVLGYVEADKENGENVWVAPSAPGPGPAPCTGGPKPLSPASSQDKLPPLPPLPNQEENYVTPIGDGPAVDYENQDVASSSWPVILKPKKLPKPPAKLPKPPVGPKPVEKGFHHVAQAGLELLTSSDPPTSASQSAGITGVSHHTWPHLSSLPEPKVFNGGLGRKLPVSSAQPLFPTAGLADMTAELQKKLEKRRALEH

SEQ ID NO: 79189 - protein, 106 aa, Homo sapiens
  Payload ID: 15773
  Gene Symbol: STAP2
  Gene Name: signal transducing adaptor family member 2
  ENSP ID: ENSP00000469657
  MOD_RES (1)..(1): Any amino acid
XPGPGPAPCTGGPKPLSPASSQDKLPPLPPLPNQEENYVTPIGDGPAVDYENQDVASSSWPVILKPKKLPKPPAKLPKPPVGPKPGLADMTAELQKKLEKRRALEH

SEQ ID NO: 79190 - protein, 105 aa, Homo sapiens
  Payload ID: 15773
  Gene Symbol: STAP2
  Gene Name: signal transducing adaptor family member 2
  ENSP ID: ENSP00000470321
MASALRPPRVPKPKGVLPSHYYESFLEKKGPCDRPRKNSVNLSCWGEGQDRITRSSGQACRVSPFISTIAIGTSSTWRSSTWEHLRNSQMRFPGEAHVTLAPTSA

SEQ ID NO: 79191 - protein, 403 aa, Homo sapiens
  Payload ID: 15773
  Gene Symbol: STAP2
  Gene Name: signal transducing adaptor family member 2
  Uniprot ID: Q9UGK3
  ENSP ID: ENSP00000471052
MASALRPPRVPKPKGVLPSHYYESFLEKKGPCDRDYKKFWAGLQGLTIYFYNSNRDFQHVEKLNLGAFEKLTDEIPWGSSRDPGTHFSLILRDQEIKFKVETLECREMWKGFILTVVELRVPTDLTLLPGHLYMMSEVLAKEEARRALETPSCFLKVSRLEAQLLLERYPECGNLLLRPSGDGADGVSVTTRQMHNGTHVVRHYKVKREGPKYVIDVEQPFSCTSLDAVVNYFVSHTKKALVPFLLDEDYEKVLGYVEADKENGENVWVAPSAPGPGPAPCTGGPKPLSPASSQDKLPPLPPLPNQEENYVTPIGDGPAVDYENQDVASSSWPVILKPKKLPKPPAKLPKPPVGPKPEPKVFNGGLGRKLPVSSAQPLFPTAGLADMTAELQKKLEKRRALEH

SEQ ID NO: 79192 - protein, 159 aa, Homo sapiens
  Payload ID: 15773
  Gene Symbol: STAP2
  Gene Name: signal transducing adaptor family member 2
  ENSP ID: ENSP00000471281
  MOD_RES (1)..(1): Any amino acid
XLLERYPECGNLLLRPSGDGADGVSVTTRQMHNGTHVVRHYKVKREGPKYVIDVEQPFSCTSLDAVVNYFVSHTKKALVPFLLDEDYEKVLGYVEADKENGENVWVAPSAPGPEPKVFNGGLGRKLPVSSAQPLFPTAGLADMTAELQKKLEKRRALEH

SEQ ID NO: 79193 - protein, 260 aa, Homo sapiens
  Payload ID: 15773
  Gene Symbol: STAP2
  Gene Name: signal transducing adaptor family member 2
  ENSP ID: ENSP00000472851
MASALRPPRVPKPKGVLPSHYYESFLEKKGPCDRDYKKFWAGLQGLTIYFYNSNRDFQHVEKLNLGAFEKLTDEIPWGSSRDPGTHFSLILRDQEIKFKVETLECREMWKGFILTVVELRVPTDLTLLPGHLYMMSEVLAKEEARRALETPSTHVVRHYKVKREGPKYVIDVEQPFSCTSLDAVVNYFVSHTKKALVPFLLDEDYEKVLGYVEADKENGENVWVAPSAPGPGPAPCTGGPKPLSPASSQDKLPPLPPLPN

SEQ ID NO: 79194 - protein, 173 aa, Homo sapiens
  Payload ID: 15774
  Gene Symbol: STAM
  Gene Name: signal transducing adaptor molecule (SH3 domain and ITAM motif) 1
  ENSP ID: ENSP00000366721
MVEWTDEFKNDPQLSLISAMIKNLKEQGVTFPAIGSQAAEQAKASPALVAKDPGTVANKKEEEDLAKAIELSLKEQRQQSTTLSTLYPSTSSLLTNHQHEGRKVRAIYDFEAAEDNELTFKAGEIITVLDDSDPNWWKGETHQGIGLFPSNFVTADLTAEPEMIKTEKKTVQF

SEQ ID NO: 79195 - protein, 540 aa, Homo sapiens
  Payload ID: 15774
  Gene Symbol: STAM
  Gene Name: signal transducing adaptor molecule (SH3 domain and ITAM motif) 1
  Uniprot ID: Q92783
  ENSP ID: ENSP00000366746
MPLFATNPFDQDVEKATSEMNTAEDWGLILDICDKVGQSRTGPKDCLRSIMRRVNHKDPHVAMQALTLLGACVSNCGKIFHLEVCSRDFASEVSNVLNKGHPKVCEKLKALMVEWTDEFKNDPQLSLISAMIKNLKEQGVTFPAIGSQAAEQAKASPALVAKDPGTVANKKEEEDLAKAIELSLKEQRQQSTTLSTLYPSTSSLLTNHQHEGRKVRAIYDFEAAEDNELTFKAGEIITVLDDSDPNWWKGETHQGIGLFPSNFVTADLTAEPEMIKTEKKTVQFSDDVQVETIEPEPEPAFIDEDKMDQLLQMLQSTDPSDDQPDLPELLHLEAMCHQMGPLIDEKLEDIDRKHSELSELNVKVMEALSLYTKLMNEDPMYSMYAKLQNQPYYMQSSGVSGSQVYAGPPPSGAYLVAGNAQMSHLQSYSLPPEQLSSLSQAVVPPSANPALPSQQTQAAYPNTMVSSVQGNTYPSQAPVYSPPPAATAAAATADVTLYQNAGPNMPQVPNYNLTSSTLPQPGGSQQPPQPQQPYSQKALL

SEQ ID NO: 79196 - protein, 42 aa, Homo sapiens
  Payload ID: 15774
  Gene Symbol: STAM
  Gene Name: signal transducing adaptor molecule (SH3 domain and ITAM motif) 1
  ENSP ID: ENSP00000400025
MPLFATNPFDQDVEKATSEMNTAEDWGLILDICDKVGQSRTG

SEQ ID NO: 79197 - protein, 525 aa, Homo sapiens [sequence omitted]

SEQ ID NO: 79198 - protein, 1042 aa, Homo sapiens
  Payload ID: 15776
  Gene Symbol: SIPA1
  Gene Name: signal-induced proliferation-associated 1
  Uniprot ID: Q96FS4
  ENSP ID: ENSP00000377771
MPMWAGGVGSPRRGMAPASTDDLFARKLRQPARPPLTPHTFEPRPVRGPLLRSGSDAGEARPPTPASPRARAHSHEEASRPAATSTRLFTDPLALLGLPAEEPEPAFPPVLEPRWFAHYDVQSLLFDWAPRSQGMGSHSEASSGTLASAEDQAASSDLLHGAPGFVCELGGEGELGLGGPASPPVPPALPNAAVSILEEPQNRTSAYSLEHADLGAGYYRKYFYGKEHQNFFGMDESLGPVAVSLRREEKEGSGGGTLHSYRVIVRTTQLRTLRGTISEDALPPGPPRGLSPRKLLEHVAPQLSPSCLRLGSASPKVPRTLLTLDEQVLSFQRKVGILYCRAGQGSEEEMYNNQEAGPAFMQFLTLLGDVVRLKGFESYRAQLDTKTDSTGTHSLYTTYQDHEIMFHVSTMLPYTPNNQQQLLRKRHIGNDIVTIVFQEPGSKPFCPTTIRSHFQHVFLVVRAHTPCTPHTTYRVAVSRTQDTPAFGPALPAGGGPFAANADFRAFLLAKALNGEQAAGHARQFHAMATRTRQQYLQDLATNEVTTTSLDSASRFGLPSLGGRRRAAPRGPGAELQAAGSLVWGVRAAPGARVAAGAQASGPEGIEVPCLLGISAEALVLVAPRDGRVVFNCACRDVLAWTFSEQQLDLYHGRGEAITLRFDGSPGQAVGEVVARLQLVSRGCETRELALPRDGQGRLGFEVDAEGFVTHVERFTFAETAGLRPGARLLRVCGQTLPSLRPEAAAQLLRSAPKVCVTVLPPDESGRPRRSFSELYTLSLQEPSRRGAPDPVQDEVQGVTLLPTTKQLLHLCLQDGGSPPGPGDLAEERTEFLHSQNSLSPRSSLSDEAPVLPNTTPDLLLATTAKPSVPSADSETPLTQDRPGSPSGSEDKGNPAPELRASFLPRTLSLRNSISRIMSEAGSGTLEDEWQAISEIASTCNTILESLSREGQPIPESGDPKGTPKSDAEPEPGNLSEKVSHLESMLRKLQEDLQKEKADRAALEEEVRSLRHNNRRLQAESESAATRLLLASKQLGSPTADLA

SEQ ID NO: 79199 - protein, 1042 aa, Homo sapiens; identical to SEQ ID NO: 79198
  Payload ID: 15776
  Gene Symbol: SIPA1
  Gene Name: signal-induced proliferation-associated 1
  Uniprot ID: Q96FS4
  ENSP ID: ENSP00000377774

SEQ ID NO: 79200 - protein, 940 aa, Homo sapiens
  Payload ID: 15776
  Gene Symbol: SIPA1
  Gene Name: signal-induced proliferation-associated 1
  ENSP ID: ENSP00000433686
MPMWAGGVGSPRRGMAPASTDDLFARKLRQPARPPLTPHTFEPRPVRGPLLRSGSDAGEARPPTPASPRARAHSHEEASRPAATSTRLFTDPLALLGLPAEEPEPAFPPVLEPRWFAHYDVQSLLFDWAPRSQGMGSHSEASSGTLASAEDQAASSDLLHGAPGFVCELGGEGELGLGGPASPPVPPALPNAAVSILEEPQNRTSAYSLEHADLGAGYYRKYFYGKEHQNFFGMDESLGPVAVSLRREEKEGSGGGTLHSYRVIVRTTQLRTLRGTISEDALPPGPPRGLSPRKLLEHVAPQLSPSCLRLGSASPKVPRTLLTLDEQVLSFQRKVGILYCRAGQGSEEEMYNNQEAGPAFMQFLTLLGDVVRLKGFESYRAQLDTKTDSTGTHSLYTTYQDHEIMFHVSTMLPYTPNNQQQLLRKRHIGNDIVTIVFQEPGSKPFCPTTIRSHFQHVFLVVRAHTPCTPHTTYRVAVSRTQDTPAFGPALPAGGGPFAANADFRAFLLAKALNGEQAAGHARQFHAMATRTRQQYLQDLATNEQLDLYHGRGEAITLRFDGSPGQAVGEVVARLQLVSRGCETRELALPRDGQGRLGFEVDAEGFVTHVERFTFAETAGLRPGARLLRVCGQTLPSLRPEAAAQLLRSAPKVCVTVLPPDESGRPRRSFSELYTLSLQEPSRRGAPDPVQDEVQGVTLLPTTKQLLHLCLQDGGSPPGPGDLAEERTEFLHSQNSLSPRSSLSDEAPVLPNTTPDLLLATTAKPSVPSADSETPLTQDRPGSPSGSEDKGNPAPELRASFLPRTLSLRNSISRIMSEAGSGTLEDEWQAISEIASTCNTILESLSREGQPIPESGDPKGTPKSDAEPEPGNLSEKVSHLESMLRKLQEDLQKEKADRAALEEEVRSLRHNNRRLQAESESAATRLLLASKQLGSPTADLA

SEQ ID NO: 79201 - protein, 6 aa, Homo sapiens
  Payload ID: 15776
  Gene Symbol: SIPA1
  Gene Name: signal-induced proliferation-associated 1
  ENSP ID: ENSP00000434362
MPMWAG

SEQ ID NO: 79202 - protein, 1042 aa, Homo sapiens; identical to SEQ ID NO: 79198
  Payload ID: 15776
  Gene Symbol: SIPA1
  Gene Name: signal-induced proliferation-associated 1
  Uniprot ID: Q96FS4
  ENSP ID: ENSP00000436269

SEQ ID NO: 79203 - protein, 102 aa, Homo sapiens
  Payload ID: 15776
  Gene Symbol: SIPA1
  Gene Name: signal-induced proliferation-associated 1
  ENSP ID: ENSP00000436683
MPMWAGGVGSPRRGMAPASTDDLFARKLRQPARPPLTPHTFEPRPVRGPLLRSGSDAGEARPPTPASPRARAHSHEEASRPAATSTRLFTDPLALLGLPAEE

SEQ ID NO: 79204 - protein, 940 aa, Homo sapiens; identical to SEQ ID NO: 79200
  Payload ID: 15776
  Gene Symbol: SIPA1
  Gene Name: signal-induced proliferation-associated 1
  ENSP ID: ENSP00000485899

SEQ ID NO: 79205 - protein, 1782 aa, Homo sapiens
  Payload ID: 15777
  Gene Symbol: SIPA1L1
  Gene Name: signal-induced proliferation-associated 1 like 1
  Uniprot ID: O43166
  ENSP ID: ENSP00000351352
MTSLKRSQTERPLATDRASVVGTDGTPKVHTDDFYMRRFRSQNGSLGSSVMAPVGPPRSEGSHHITSTPGVPKMGVRARIADWPPRKENIKESSRSSQEIETSSCLDSLSSKSSPVSQGSSVSLNSNDSAMLKSIQNTLKNKTRPSENMDSRFLMPEAYPSSPRKALRRIRQRSNSDITISELDVDSFDECISPTYKTGPSLHREYGSTSSIDKQGTSGESFFDLLKGYKDDKSDRGPTPTKLSDFLITGGGKGSGFSLDVIDGPISQRENLRLFKEREKPLKRRSKSETGDSSIFRKLRNAKGEELGKSSDLEDNRSEDSVRPWTCPKCFAHYDVQSILFDLNEAIMNRHNVIKRRNTTTGASAAAVASLVSGPLSHSASFSSPMGSTEDLNSKGSLSMDQGDDKSNELVMSCPYFRNEIGGEGERKISLSKSNSGSFSGCESASFESTLSSHCTNAGVAVLEVPKENLVLHLDRVKRYIVEHVDLGAYYYRKFFYQKEHWNYFGADENLGPVAVSIRREKPDEMKENGSPYNYRIIFRTSELMTLRGSVLEDAIPSTAKHSTARGLPLKEVLEHVVPELNVQCLRLAFNTPKVTEQLMKLDEQGLNYQQKVGIMYCKAGQSTEEEMYNNESAGPAFEEFLQLLGERVRLKGFEKYRAQLDTKTDSTGTHSLYTTYKDYEIMFHVSTMLPYTPNNKQQLLRKRHIGNDIVTIVFQEPGAQPFSPKNIRSHFQHVFVIVRVHNPCSDSVCYSVAVTRSRDVPSFGPPIPKGVTFPKSNVFRDFLLAKVINAENAAHKSEKFRAMATRTRQEYLKDLAEKNVTNTPIDPSGKFPFISLASKKKEKSKPYPGAELSSMGAIVWAVRAEDYNKAMELDCLLGISNEFIVLIEQETKSVVFNCSCRDVIGWTSTDTSLKIFYERGECVSVGSFINIEEIKEIVKRLQFVSKGCESVEMTLRRNGLGQLGFHVNYEGIVADVEPYGYAWQAGLRQGSRLVEICKVAVATLSHEQMIDLLRTSVTVKVVIIPPHDDCTPRRSCSETYRMPVMEYKMNEGVSYEFKFPFRNNNKWQRNASKGPHSPQVPSQVQSPMTSRLNAGKGDGKMPPPERAANIPRSISSDGRPLERRLSPGSDIYVTVSSMALARSQCRNSPSNLSSSSDTGSVGGTYRQKSMPEGFGVSRRSPASIDRQNTQSDIGGSGKSTPSWQRSEDSIADQMEPTCHLPAVSKVLPAFRESPSGRLMRQDPVVHLSPNKQGHSDSHYSSHSSSNTLSSNASSAHSDEKWYDGDRTESELNSYNYLQGTSADSGIDTTSYGPSHGSTASLGAATSSPRSGPGKEKVAPLWHSSSEVISMADRTLETESHGLDRKTESSLSLDIHSKSQAGSTPLTRENSTFSINDAASHTSTMSSRHSASPVVFTSARSSPKEELHPAAPSQLAPSFSSSSSSSSGPRSFYPRQGATSKYLIGWKKPEGTINSVGFMDTRKRHQSDGNEIAHTRLRASTRDLRASPKPTSKSTIEEDLKKLIDLESPTPESQKSFKFHALSSPQSPFPSTPTSRRALHRTLSDESIYNSQREHFFTSRASLLDQALPNDVLFSSTYPSLPKSLPLRRPSYTLGMKSLHGEFSASDSSLTDIQETRRQPMPDPGLMPLPDTAADLDWSNLVDAAKAYEVQRASFFAASDENHRPLSAASNSDQLEDQALAQMKPYSSKDSSPTLASKVDQLEGMLKMLREDLKKEKEDKAHLQAEVQHLREDNLRLQEESQNASDKLKKFTEWVFNTIDMS

SEQ ID NO: 79206 - protein, 1783 aa, Homo sapiens
  Payload ID: 15777
  Gene Symbol: SIPA1L1
  Gene Name: signal-induced proliferation-associated 1 like 1
  Uniprot ID: O43166
  ENSP ID: ENSP00000370630
MTSLKRSQTERPLATDRASVVGTDGTPKVHTDDFYMRRFRSQNGSLGSSVMAPVGPPRSEGSHHITSTPGVPKMGVRARIADWPPRKENIKESSRSSQEIETSSCLDSLSSKSSPVSQGSSVSLNSNDSAMLKSIQNTLKNKTRPSENMDSRFLMPEAYPSSPRKALRRIRQRSNSDITISELDVDSFDECISPTYKTGPSLHREYGSTSSIDKQGTSGESFFDLLKGYKDDKSDRGPTPTKLSDFLITGGGKGSGFSLDVIDGPISQRENLRLFKEREKPLKRRSKSETGDSSIFRKLRNAKGEELGKSSDLEDNRSEDSVRPWTCPKCFAHYDVQSILFDLNEAIMNRHNVIKRRNTTTGASAAAVASLVSGPLSHSASFSSPMGSTEDLNSKGSLSMDQGDDKSNELVMSCPYFRNEIGGEGERKISLSKSNSGSFSGCESASFESTLSSHCTNAGVAVLEVPKENLVLHLDRVKRYIVEHVDLGAYYYRKFFYQKEHWNYFGADENLGPVAVSIRREKPDEMKENGSPYNYRIIFRTSELMTLRGSVLEDAIPSTAKHSTARGLPLKEVLEHVVPELNVQCLRLAFNTPKVTEQLMKLDEQGLNYQQKVGIMYCKAGQSTEEEMYNNESAGPAFEEFLQLLGERVRLKGFEKYRAQLDTKTDSTGTHSLYTTYKDYEIMFHVSTMLPYTPNNKQQLLRKRHIGNDIVTIVFQEPGAQPFSPKNIRSHFQHVFVIVRVHNPCSDSVCYSVAVTRSRDVPSFGPPIPKGVTFPKSNVFRDFLLAKVINAENAAHKSEKFRAMATRTRQEYLKDLAEKNVTNTPIDPSGKFPFISLASKKKEKSKPYPGAELSSMGAIVWAVRAEDYNKAMELDCLLGISNEFIVLIEQETKSVVFNCSCRDVIGWTSTDTSLKIFYERGECVSVGSFINIEEIKEIVKRLQFVSKGCESVEMTLRRNGLGQLGFHVNYEGIVADVEPYGYAWQAGLRQGSRLVEICKVAVATLSHEQMIDLLRTSVTVKVVIIPPHDDCTPRRSCSETYRMPVMEYKMNEGVSYEFKFPFRNNNKWQRNASKGPHSPQVPSQVQSPMTSRLNAGKGDGKMPPPERAANIPRSISSDGRPLERRLSPGSDIYVTVSSMALARSQCRNSPSNLSSSSDTGSVGGTYRQKSMPEGFGVSRRSPASIDRQNTQSDIGGSGKSTPSWQRSEDSIADQMEPTCHLPAVSKVLPAFRESPSGRLMRQDPVVHLSPNKQGHSDSHYSSHSSSNTLSSNASSAHSDEKWYDGDRTESELNSYNYLQGTSADSGIDTTSYGPSHGSTASLGAATSSPRSGPGKEKVAPLWHSSSEVISMADRTLETESHGLDRKTESSLSLDIHSKSQAGSTPLTRENSTFSINDAASHTSTMSSRHSASPVVFTSARSSPKEELHPAAPSQLAPSFSSSSSSSSGPRSFYPRQGATSKYLIGWKKPEGTINSVGFMDTRKRHQSDGNEIAHTRLRASTRDLRASPKPTSKSTIEEDLKKLIDLESPTPESQKSFKFHALSSPQSPFPSTPTSRRALHRTLSDESIYNSQREHFFTSRASLLDQALPNDVLFSSTYPSLPKSLPLRRPSYTLGMKSLHGEFSASDSSLTDIQETRRQPMPDPGLMPLPDTAADLDWSNLVDAAKAYEVQRASFFAASDENHRPLSAASNSDQLEDQALAQMKPYSSSKDSSPTLASKVDQLEGMLKMLREDLKKEKEDKAHLQAEVQHLREDNLRLQEESQNASDKLKKFTEWVFNTIDMS

SEQ ID NO: 79207 - protein, 1257 aa, Homo sapiens
  Payload ID: 15777
  Gene Symbol: SIPA1L1
  Gene Name: signal-induced proliferation-associated 1 like 1
  ENSP ID: ENSP00000440682
MKENGSPYNYRIIFRTSELMTLRGSVLEDAIPSTAKHSTARGLPLKEVLEHVVPELNVQCLRLAFNTPKVTEQLMKLDEQGLNYQQKVGIMYCKAGQSTEEEMYNNESAGPAFEEFLQLLGERVRLKGFEKYRAQLDTKTDSTGTHSLYTTYKDYEIMFHVSTMLPYTPNNKQQLLRKRHIGNDIVTIVFQEPGAQPFSPKNIRSHFQHVFVIVRVHNPCSDSVCYSVAVTRSRDVPSFGPPIPKGVTFPKSNVFRDFLLAKVINAENAAHKSEKFRAMATRTRQEYLKDLAEKNVTNTPIDPSGKFPFISLASKKKEKSKPYPGAELSSMGAIVWAVRAEDYNKAMELDCLLGISNEFIVLIEQETKSVVFNCSCRDVIGWTSTDTSLKIFYERGECVSVGSFINIEEIKEIVKRLQFVSKGCESVEMTLRRNGLGQLGFHVNYEGIVADVEPYGYAWQAGLRQGSRLVEICKVAVATLSHEQMIDLLRTSVTVKVVIIPPHDDCTPRRSCSETYRMPVMEYKMNEGVSYEFKFPFRNNNKWQRNASKGPHSPQVPSQVQSPMTSRLNAGKGDGKMPPPERAANIPRSISSDGRPLERRLSPGSDIYVTVSSMALARSQCRNSPSNLSSSSDTGSVGGTYRQKSMPEGFGVSRRSPASIDRQNTQSDIGGSGKSTPSWQRSEDSIADQMEPTCHLPAVSKVLPAFRESPSGRLMRQDPVVHLSPNKQGHSDSHYSSHSSSNTLSSNASSAHSDEKWYDGDRTESELNSYNYLQGTSADSGIDTTSYGPSHGSTASLGAATSSPRSGPGKEKVAPLWHSSSEVISMADRTLETESHGLDRKTESSLSLDIHSKSQAGSTPLTRENSTFSINDAASHTSTMSSRHSASPVVFTSARSSPKEELHPAAPSQLAPSFSSSSSSSSGPRSFYPRQGATSKYLIGWKKPEGTINSVGFMDTRKRHQSDGNEIAHTRLRASTRDLRASPKPTSKSTIEEDLKKLIDLESPTPESQKSFKFHALSSPQSPFPSTPTSRRALHRTLSDESIYNSQREHFFTSRASLLDQALPNDVLFSSTYPSLPKSLPLRRPSYTLGMKSLHGEFSASDSSLTDIQETRRQPMPDPGLMPLPDTAADLDWSNLVDAAKAYEVQRASFFAASDENHRPLSAASNSDQLEDQALAQMKPYSSKDSSPTLASKVDQLEGMLKMLREDLKKEKEDKAHLQAEVQHLREDNLRLQEESQNASDKLKKFTEWVFNTIDMS

SEQ ID NO: 79208 - protein, 1804 aa, Homo sapiens
  Payload ID: 15777
  Gene Symbol: SIPA1L1
  Gene Name: signal-induced proliferation-associated 1 like 1
  Uniprot ID: O43166
  ENSP ID: ENSP00000450832
MTSLKRSQTERPLATDRASVVGTDGTPKVHTDDFYMRRFRSQNGSLGSSVMAPVGPPRSEGSHHITSTPGVPKMGVRARIADWPPRKENIKESSRSSQEIETSSCLDSLSSKSSPVSQGSSVSLNSNDSAMLKSIQNTLKNKTRPSENMDSRFLMPEAYPSSPRKALRRIRQRSNSDITISELDVDSFDECISPTYKTGPSLHREYGSTSSIDKQGTSGESFFDLLKGYKDDKSDRGPTPTKLSDFLITGGGKGSGFSLDVIDGPISQRENLRLFKEREKPLKRRSKSETGDSSIFRKLRNAKGEELGKSSDLEDNRSEDSVRPWTCPKCFAHYDVQSILFDLNEAIMNRHNVIKRRNTTTGASAAAVASLVSGPLSHSASFSSPMGSTEDLNSKGSLSMDQGDDKSNELVMSCPYFRNEIGGEGERKISLSKSNSGSFSGCESASFESTLSSHCTNAGVAVLEVPKENLVLHLDRVKRYIVEHVDLGAYYYRKFFYQKEHWNYFGADENLGPVAVSIRREKPDEMKENGSPYNYRIIFRTSELMTLRGSVLEDAIPSTAKHSTARGLPLKEVLEHVVPELNVQCLRLAFNTPKVTEQLMKLDEQGLNYQQKVGIMYCKAGQSTEEEMYNNESAGPAFEEFLQLLGERVRLKGFEKYRAQLDTKTDSTGTHSLYTTYKDYEIMFHVSTMLPYTPNNKQQLLRKRHIGNDIVTIVFQEPGAQPFSPKNIRSHFQHVFVIVRVHNPCSDSVCYSVAVTRSRDVPSFGPPIPKGVTFPKSNVFRDFLLAKVINAENAAHKSEKFRAMATRTRQEYLKDLAEKNVTNTPIDPSGKFPFISLASKKKEKSKPYPGAELSSMGAIVWAVRAEDYNKAMELDCLLGISNEFIVLIEQETKSVVFNCSCRDVIGWTSTDTSLKIFYERGECVSVGSFINIEEIKEIVKRLQFVSKGCESVEMTLRRNGLGQLGFHVNYEGIVADVEPYGYAWQAGLRQGSRLVEICKVAVATLSHEQMIDLLRTSVTVKVVIIPPHDDCTPRRSCSETYRMPVMEYKMNEGVSYEFKFPFRNNNKWQRNASKGPHSPQVPSQVQSPMTSRLNAGKGDGKMPPPERAANIPRSISSDGRPLERRLSPGSDIYVTVSSMALARSQCRNSPSNLSSSSDTGSVGGTYRQKSMPEGFGVSRRSPASIDRQNTQSDIGGSGKSTPSWQRSEDSIADQMAYSYRGPQDFNSFVLEQHEYTEPTCHLPAVSKVLPAFRESPSGRLMRQDPVVHLSPNKQGHSDSHYSSHSSSNTLSSNASSAHSDEKWYDGDRTESELNSYNYLQGTSADSGIDTTSYGPSHGSTASLGAATSSPRSGPGKEKVAPLWHSSSEVISMADRTLETESHGLDRKTESSLSLDIHSKSQAGSTPLTRENSTFSINDAASHTSTMSSRHSASPVVFTSARSSPKEELHPAAPSQLAPSFSSSSSSSSGPRSFYPRQGATSKYLIGWKKPEGTINSVGFMDTRKRHQSDGNEIAHTRLRASTRDLRASPKPTSKSTIEEDLKKLIDLESPTPESQKSFKFHALSSPQSPFPSTPTSRRALHRTLSDESIYNSQREHFFTSRASLLDQALPNDVLFSSTYPSLPKSLPLRRPSYTLGMKSLHGEFSASDSSLTDIQETRRQPMPDPGLMPLPDTAADLDWSNLVDAAKAYEVQRASFFAASDENHRPLSAASNSDQLEDQALAQMKPYSSSKDSSPTLASKVDQLEGMLKMLREDLKKEKEDKAHLQAEVQHLREDNLRLQEESQNASDKLKKFTEWVFNTIDMS

SEQ ID NO: 79209 - protein, 32 aa, Homo sapiens
  Payload ID: 15777
  Gene Symbol: SIPA1L1
  Gene Name: signal-induced proliferation-associated 1 like 1
  ENSP ID: ENSP00000452080
MTSLKRSQTERPLATDRASVVGTDGTPKVHTD

SEQ ID NO: 79210 - protein, 261 aa, Homo sapiens
  Payload ID: 15777
  Gene Symbol: SIPA1L1
  Gene Name: signal-induced proliferation-associated 1 like 1
  ENSP ID: ENSP00000452450
EHWNYFGADENLGPVAVSIRREKPDEMKENGSPYNYRIIFRTSELMTLRGSVLEDAIPSTAKHSTARGLPLKEVLEHVVPELNVQCLRLAFNTPKVTEQLMKLDEQGWICLYLYASYYLPSQLNYQQKVGIMYCKAGQSTEEEMYNNESAGPAFEEFLQLLGERVRLKGFEKYRAQLDTKTDSTGTHSLYTTYKDYEIMFHVSTMLPYTPNNKQQLLRKRHIGNDIVTIVFQEPGAQPFSPKNIRSHFQHVFVIVRVHNPC

SEQ ID NO: 79211 - protein, 1722 aa, Homo sapiens
  Payload ID: 15778
  Gene Symbol: SIPA1L2
  Gene Name: signal-induced proliferation-associated 1 like 2
  Uniprot ID: Q9P2F8
  ENSP ID: ENSP00000262861
MSDPRQSQEEKHKLGRASSKFKDPPRIMQSDDYFARKFKAINGNMGPTTSLNASNSNETGGGGPANGTPAVPKMGVRARVSEWPPKKDCSKELTCKALWESRSQTSYESITSVLQNGQSDQSEGQQDEQLDLDFVEAKYTIGDIFVHSPQRGLHPIRQRSNSDVTISDIDAEDVLDQNAVNPNTGAALHREYGSTSSIDRQGLSGENFFAMLRGYRVENYDHKAMVPFGFPEFFRCDPAISPSLHAAAQISRGEFVRISGLDYVDSALLMGRDRDKPFKRRLKSESVETSLFRKLRTVKSEHETFKFTSELEESRLERGIRPWNCQRCFAHYDVQSILFNINEAMATRANVGKRKNITTGASAASQTQMPTGQTGNCESPLGSKEDLNSKENLDADEGDGKSNDLVLSCPYFRNETGGEGDRRIALSRANSSSFSSGESCSFESSLSSHCTNAGVSVLEVPRENQPIHREKVKRYIIEHIDLGAYYYRKFFYGKEHQNYFGIDENLGPVAVSIRREKVEDAKEKEGSQFNYRVAFRTSELTTLRGAILEDAIPSTARHGTARGLPLKEVLEYVIPELSIQCLRQASNSPKVSEQLLKLDEQGLSFQHKIGILYCKAGQSTEEEMYNNETAGPAFEEFLDLLGQRVRLKGFSKYRAQLDNKTDSTGTHSLYTTYKDYELMFHVSTLLPYMPNNRQQLLRKRHIGNDIVTIVFQEPGALPFTPKSIRSHFQHVFVIVKVHNPCTENVCYSVGVSRSKDVPPFGPPIPKGVTFPKSAVFRDFLLAKVINAENAAHKSEKFRAMATRTRQEYLKDLAENFVTTATVDTSVKFSFITLGAKKKEKVKPRKDAHLFSIGAIMWHVIARDFGQSADIECLLGISNEFIMLIEKDSKNVVFNCSCRDVIGWTSGLVSIKVFYERGECVLLSSVDNCAEDIREIVQRLVIVTRGCETVEMTLRRNGLGQLGFHVNFEGIVADVEPFGFAWKAGLRQGSRLVEICKVAVATLTHEQMIDLLRTSVTVKVVIIQPHDDGSPRRGCSELCRIPMVEYKLDSEGTPCEYKTPFRRNTTWHRVPTPALQPLSRASPIPGTPDRLPCQQLLQQAQAAIPRSTSFDRKLPDGTRSSPSNQSSSSDPGPGGSGPWRPQVGYDGCQSPLLLEHQGSGPLECDGAREREDTMEASRHPETKWHGPPSKVLGSYKERALQKDGSCKDSPNKLSHIGDKSCSSHSSSNTLSSNTSSNSDDKHFGSGDLMDPELLGLTYIKGASTDSGIDTAPCMPATILGPVHLAGSRSLIHSRAEQWADAADVSGPDDEPAKLYSVHGYASTISAGSAAEGSMGDLSEISSHSSGSHHSGSPSAHCSKSSGSLDSSKVYIVSHSSGQQVPGSMSKPYHRQGAVNKYVIGWKKSEGSPPPEEPEVTECPGMYSEMDVMSTATQHQTVVGDAVAETQHVLSKEDFLKLMLPDSPLVEEGRRKFSFYGNLSPRRSLYRTLSDESICSNRRGSSFGSSRSSVLDQALPNDILFSTTPPYHSTLPPRAHPAPSMGSLRNEFWFSDGSLSDKSKCADPGLMPLPDTATGLDWTHLVDAARAFEGLDSDEELGLLCHHTSYLDQRVASFCTLTDMQHGQDLEGAQELPLCVDPGSGKEFMDTTGERSPSPLTGKVNQLELILRQLQTDLRKEKQDKAVLQAEVQHLRQDNMRLQEESQTATAQLRKFTEWFFTTIDKKS

SEQ ID NO: 79212 - protein, 778 aa, Homo sapiens
  Payload ID: 15778
  Gene Symbol: SIPA1L2
  Gene Name: signal-induced proliferation-associated 1 like 2
  Uniprot ID: Q9P2F8
  ENSP ID: ENSP00000309102
MSPCFSFIGCKLCSIVTRGCETVEMTLRRNGLGQLGFHVNFEGIVADVEPFGFAWKAGLRQGSRLVEICKVAVATLTHEQMIDLLRTSVTVKVVIIQPHDDGSPRRGCSELCRIPMVEYKLDSEGTPCEYKTPFRRNTTWHRVPTPALQPLSRASPIPGTPDRLPCQQLLQQAQAAIPRSTSFDRKLPDGTRSSPSNQSSSSDPGPGGSGPWRPQVGYDGCQSPLLLEHQGSGPLECDGAREREDTMEASRHPETKWHGPPSKVLGSYKERALQKDGSCKDSPNKLSHIGDKSCSSHSSSNTLSSNTSSNSDDKHFGSGDLMDPELLGLTYIKGASTDSGIDTAPCMPATILGPVHLAGSRSLIHSRAEQWADAADVSGPDDEPAKLYSVHGYASTISAGSAAEGSMGDLSEISSHSSGSHHSGSPSAHCSKSSGSLDSSKVYIVSHSSGQQVPGSMSKPYHRQGAVNKYVIGWKKSEGSPPPEEPEVTECPGMYSEMDVMSTATQHQTVVGDAVAETQHVLSKEDFLKLMLPDSPLVEEGRRKFSFYGNLSPRRSLYRTLSDESICSNRRGSSFGSSRSSVLDQALPNDILFSTTPPYHSTLPPRAHPAPSMGSLRNEFWFSDGSLSDKSKCADPGLMPLPDTATGLDWTHLVDAARAFEDQRVASFCTLTDMQHGQDLEGAQELPLCVDPGSGKEFMDTTGERSPSPLTGKVNQLELILRQLQTDLRKEKQDKAVLQAEVQHLRQDNMRLQEESQTATAQLRKFTEWFFTTIDKKS

SEQ ID NO: 79213 - protein, 1722 aa, Homo sapiens; identical to SEQ ID NO: 79211
  Payload ID: 15778
  Gene Symbol: SIPA1L2
  Gene Name: signal-induced proliferation-associated 1 like 2
  Uniprot ID: Q9P2F8
  ENSP ID: ENSP00000355589

SEQ ID NO: 79214 - protein, 1781 aa, Homo sapiens
  Payload ID: 15779
  Gene Symbol: SIPA1L3
  Gene Name: signal-induced proliferation-associated 1 like 3
  Uniprot ID: O60292
  ENSP ID: ENSP00000222345
MTTYRAIPSDGVDLAASCGARVGDVLPGPHTGDYAPLGFWAQNGSMSQPLGESPATATATATATTRPSPTTPAMPKMGVRARVADWPPKREALREHSNPSPSQDTDGTKATKMAHSMRSIQNGQPPTSTPASSGSKAFHRLSRRRSKDVEFQDGWPRSPGRAFLPLRHRSSSEITLSECDAEDAGEPRGARHTGALPLFREYGSTSSIDVQGMPEQSFFDILNEFRSEQPDARGCQALTELLRADPGPHLMGGGGGAKGDSHNGQPAKDSLLPLQPTKEKEKARKKPARGLGGGDTVDSSIFRKLRSSKPEGEAGRSPGEADEGRSPPEASRPWVCQKSFAHFDVQSMLFDLNEAAANRVSVSQRRNTTTGASAASAASAMASLTASRAHSLGGLDPAFTSTEDLNCKENLEQDLGDDNSNDLLLSCPHFRNEIGGECERNVSFSRASVGSPSSGEGHLAEPALSAYRTNASISVLEVPKEQQRTQSRPRQYSIEHVDLGARYYQDYFVGKEHANYFGVDEKLGPVAVSIKREKLEDHKEHGPQYQYRIIFRTRELITLRGSILEDATPTATKHGTGRGLPLKDALEYVIPELNIHCLRLALNTPKVTEQLLKLDEQGLCRKHKVGILYCKAGQSSEEEMYNNEEAGPAFEEFLSLIGEKVCLKGFTKYAAQLDVKTDSTGTHSLYTMYQDYEIMFHVSTLLPYTPNNRQQLLRKRHIGNDIVTIIFQEPGALPFTPKNIRSHFQHVFIIVRVHNPCTDNVCYSMAVTRSKDAPPFGPPIPSGTTFRKSDVFRDFLLAKVINAENAAHKSDKFHTMATRTRQEYLKDLAENCVSNTPIDSTGKFNLISLTSKKKEKTKARAGAEQHSAGAIAWRVVAQDYAQGVEIDCILGISNEFVVLLDLRTKEVVFNCYCGDVIGWTPDSSTLKIFYGRGDHIFLQATEGSVEDIREIVQRLKVMTSGWETVDMTLRRNGLGQLGFHVKYDGTVAEVEDYGFAWQAGLRQGSRLVEICKVAVVTLTHDQMIDLLRTSVTVKVVIIPPFEDGTPRRGWPETYDMNTSEPKTEQESITPGGRPPYRSNAPWQWSGPASHNSLPASKWATPTTPGHAQSLSRPLKQTPIVPFRESQPLHSKRPVSFPETPYTVSPAGADRVPPYRQPSGSFSTPGSATYVRYKPSPERYTAAPHPLLSLDPHFSHDGTSSGDSSSGGLTSQESTMERQKPEPLWHVPAQARLSAIAGSSGNKHPSRQDAAGKDSPNRHSKGEPQYSSHSSSNTLSSNASSSHSDDRWFDPLDPLEPEQDPLSKGGSSDSGIDTTLYTSSPSCMSLAKAPRPAKPHKPPGSMGLCGGGREAAGRSHHADRRREVSPAPAVAGQSKGYRPKLYSSGSSTPTGLAGGSRDPPRQPSDMGSRVGYPAQVYKTASAETPRPSQLAQPSPFQLSASVPKSFFSKQPVRNKHPTGWKRTEEPPPRPLPFSDPKKQVDTNTKNVFGQPRLRASLRDLRSPRKNYKSTIEDDLKKLIIMDNLGPEQERDTGQSPQKGLQRTLSDESLCSGRREPSFASPAGLEPGLPSDVLFTSTCAFPSSTLPARRQHQHPHPPVGPGATPAAGSGFPEKKSTISASELSLADGRDRPLRRLDPGLMPLPDTAAGLEWSSLVNAAKAYEVQRAVSLFSLNDPALSPDIPPAHSPVHSHLSLERGPPTPRTTPTMSEEPPLDLTGKVYQLEVMLKQLHTDLQKEKQDKVVLQSEVASLRQNNQRLQEESQAASEQLRKFAEIFCREKKEL

SEQ ID NO: 79215 - protein, 165 aa, Homo sapiens
  Payload ID: 15779
  Gene Symbol: SIPA1L3
  Gene Name: signal-induced proliferation-associated 1 like 3
  ENSP ID: ENSP00000468981
  MOD_RES (1)..(1): Any amino acid
XILEDATPTATKHGTGRGLPLKDALEYVIPELNIHCLRLALNTPKVTEQLLKLDEQGLCRKHKVGILYCKAGQSSEEEMYNNEEAGPAFEEFLSLIGEKVCLKGFTKYAAQLDVKIETGFHHVGQAGLELLTSDDPPASASQSAGIIGVNHQAWPVYLIFKSRLK

SEQ ID NO: 79216 - protein, 184 aa, Homo sapiens
  Payload ID: 15779
  Gene Symbol: SIPA1L3
  Gene Name: signal-induced proliferation-associated 1 like 3
  ENSP ID: ENSP00000472734
MPFWGHSPESDMGSRVGYPAQVYKTASAETPRPSQLAQPSPFQLSASVPKSFFSKQPVRNKHPTGWKRTEEPPPRPLPFSDPKKQVDTNTKNVFGQPRLRASLRDLRSPRKNYKSTIEDDLKKLIIMDNLGPEQERDTGSPQKGLQRTLSDESLCSGRREPSFASPAGLEPGLPSDVLFTSTCA

SEQ ID NO: 79217 - protein, 144 aa, Homo sapiens
  Payload ID: 15780
  Gene Symbol: SLAMF1
  Gene Name: signaling lymphocytic activation molecule family member 1
  ENSP ID: ENSP00000235739
MDPKGLLSLTFVLFLSLAFGASYGTGGRMMNCPKILRQLGSKVLLPLTYERINKSMNKSIHIVVTMAKSLENSVENKIVSLDPSEAGPPRYLGDRYKFYLENLTLGIRESRKEDEGWYLMTLEKSLHFGYLYFVLGADHDNLQT

SEQ ID NO: 79218 - protein, 335 aa, Homo sapiens
  Payload ID: 15780
  Gene Symbol: SLAMF1
  Gene Name: signaling lymphocytic activation molecule family member 1
  Uniprot ID: Q13291
  ENSP ID: ENSP00000306190
MDPKGLLSLTFVLFLSLAFGASYGTGGRMMNCPKILRQLGSKVLLPLTYERINKSMNKSIHIVVTMAKSLENSVENKIVSLDPSEAGPPRYLGDRYKFYLENLTLGIRESRKEDEGWYLMTLEKNVSVQRFCLQLRLYEQVSTPEIKVLNKTQENGTCTLILGCTVEKGDHVAYSWSEKAGTHPLNPANSSHLLSLTLGPQHADNIYICTVSNPISNNSQTFSPWPGCRTDPSETKPWAVYAGLLGGVIMILIMVVILQLRRRGKTNHYQTTVEKKSLTIYAQVQKPGPLQKKLDSFPAQDPCTTIYVAATEPVPESVQETNSITVYASVTLPES

SEQ ID NO: 79219 - protein, 357 aa, Homo sapiens
  Payload ID: 15780
  Gene Symbol: SLAMF1
  Gene Name: signaling lymphocytic activation molecule family member 1
  ENSP ID: ENSP00000438406
MDPKGLLSLTFVLFLSLAFGASYGTGGRMMNCPKILRQLGSKVLLPLTYERINKSMNKSIHIVVTMAKSLENSVENKIVSLDPSEAGPPRYLGDRYKFYLENLTLGIRESRKEDEGWYLMTLEKNVSVQRFCLQLRLYEQVSTPEIKVLNKTQENGTCTLILGCTVEKGDHVAYSWSEKAGTHPLNPANSSHLLSLTLGPQHADNIYICTVSNPISNNSQTFSPWPGCRTDPSETKPWAVYAGLLGGVIMILIMVVILQLRRRATLTTTNQYWSQNVLTQDQERCPGCLPMVKRTITRQQWKKKALRSMPKSRNQVLFRRNLTPSQLRTLAPPYMLLPQSLSQSLSRKQIPSQSMLV

SEQ ID NO: 79220 - protein, 196 aa, Homo sapiens
  Payload ID: 15781
  Gene Symbol: SIT1
  Gene Name: signaling threshold regulating transmembrane adaptor 1
  Uniprot ID: Q9Y3P8
  ENSP ID: ENSP00000259608
MNQADPRLRAVCLWTLTSAAMSRGDNCTDLLALGIPSITQAWGLWVLLGAVTLLFLISLAAHLSQWTRGRSRSHPGQGRSGESVEEVPLYGNLHYLQTGRLSQDPEPDQQDPTLGGPARAAEEVMCYTSLQLRPPQGRIPGPGTPVKYSEVVLDSEPKSQASGPEPELYASVCAQTRRARASFPDQAYANSQPAAS

SEQ ID NO: 79221 - protein, 224 aa, Homo sapiens
  Payload ID: 15781
  Gene Symbol: SIT1
  Gene Name: signaling threshold regulating transmembrane adaptor 1
  ENSP ID: ENSP00000481347
MNQADPRLRAVCLWTLTSAAMSRGDNCTDLLALGIPSITQAWGLWVLLGAVTLLFLISLAAHLSQWTRGRSRSHPGQGRWVKDNRDGLTESSLLPRSPHSSPKLCVASGESVEEVPLYGNLHYLQTGRLSQDPEPDQQDPTLGGPARAAEEVMCYTSLQLRPPQGRIPGPGTPVKYSEVVLDSEPKSQASGPEPELYASVCAQTRRARASFPDQAYANSQPAAS

SEQ ID NO: 79222 - protein, 504 aa, Homo sapiens
  Payload ID: 15782
  Gene Symbol: SIRPA
  Gene Name: signal-regulatory protein alpha
  Uniprot ID: P78324
  ENSP ID: ENSP00000348307
MEPAGPAPGRLGPLLCLLLAASCAWSGVAGEEELQVIQPDKSVLVAAGETATLRCTATSLIPVGPIQWFRGAGPGRELIYNQKEGHFPRVTTVSDLTKRNNMDFSIRIGNITPADAGTYYCVKFRKGSPDDVEFKSGAGTELSVRAKPSAPVVSGPAARATPQHTVSFTCESHGFSPRDITLKWFKNGNELSDFQTNVDPVGESVSYSIHSTAKVVLTREDVHSQVICEVAHVTLQGDPLRGTANLSETIRVPPTLEVTQQPVRAENQVNVTCQVRKFYPQRLQLTWLENGNVSRTETASTVTENKDGTYNWMSWLLVNVSAHRDDVKLTCQVEHDGQPAVSKSHDLKVSAHPKEQGSNTAAENTGSNERNIYIVVGVVCTLLVALLMAALYLVRIRQKKAQGSTSSTRLHEPEKNAREITQDTNDITYADLNLPKGKKPAPQAAEPNNHTEYASIQTSPQPASEDTLTYADLDMVHLNRTPKQPAPKPEPSFSEYASVQVPRK

SEQ ID NO: 79223 - protein, 504 aa, Homo sapiens; identical to SEQ ID NO: 79222
  Payload ID: 15782
  Gene Symbol: SIRPA
  Gene Name: signal-regulatory protein alpha
  Uniprot ID: P78324
  ENSP ID: ENSP00000351621

SEQ ID NO: 79224 - protein, 504 aa, Homo sapiens; identical to SEQ ID NO: 79222
  Payload ID: 15782
  Gene Symbol: SIRPA
  Gene Name: signal-regulatory protein alpha
  Uniprot ID: P78324
  ENSP ID: ENSP00000382941

SEQ ID NO: 79225 - protein, 508 aa, Homo sapiens
  Payload ID: 15782
  Gene Symbol: SIRPA
  Gene Name: signal-regulatory protein alpha
  Uniprot ID: P78324
  ENSP ID: ENSP00000478763
MEPAGPAPGRLGPLLCLLLAASCAWSGVAGEEELQVIQPDKSVLVAAGETATLRCTATSLIPVGPIQWFRGAGPGRELIYNQKEGHFPRVTTVSDLTKRNNMDFSIRIGNITPADAGTYYCVKFRKGSPDDVEFKSGAGTELSVRAKPSAPVVSGPAARATPQHTVSFTCESHGFSPRDITLKWFKNGNELSDFQTNVDPVGESVSYSIHSTAKVVLTREDVHSQVICEVAHVTLQGDPLRGTANLSETIRVPPTLEVTQQPVRAENQVNVTCQVRKFYPQRLQLTWLENGNVSRTETASTVTENKDGTYNWMSWLLVNVSAHRDDVKLTCQVEHDGQPAVSKSHDLKVSAHPKEQGSNTAAENTGSNERNIYIVVGVVCTLLVALLMAALYLVRIRQKKAQGSTSSTRLHEPEKNAREITQVQSLDTNDITYADLNLPKGKKPAPQAAEPNNHTEYASIQTSPQPASEDTLTYADLDMVHLNRTPKQPAPKPEPSFSEYASVQVPRK

SEQ ID NO: 79226 - protein, 180 aa, Homo sapiens
  Payload ID: 15783
  Gene Symbol: SIRPB1
  Gene Name: signal-regulatory protein beta 1
  ENSP ID: ENSP00000262929
MPVPASWPHPPCPFLLLTLLLGLTGVAGEDELQVIQPEKSVSVAAGESATLRCAMTSLIPVGPIMWFRGAGAGRELIYNQKEGHFPRVTTVSELTKRNNLDFSISISNITPADAGTYYCVKFRKGSPDDVEFKSGAGTELSVREAALAPTAPLLVALLLGPKLLLVVGVSAIYICWKQKA

SEQ ID NO: 79227 - protein, 398 aa, Homo sapiens
  Payload ID: 15783
  Gene Symbol: SIRPB1
  Gene Name: signal-regulatory protein beta 1
  Uniprot ID: Q5TFQ8
  ENSP ID: ENSP00000279477
MPVPASWPHLPSPFLLMTLLLGRLTGVAGEEELQVIQPDKSISVAAGESATLHCTVTSLIPVGPIQWFRGAGPGRELIYNQKEGHFPRVTTVSDLTKRNNMDFSIRISNITPADAGTYYCVKFRKGSPDHVEFKSGAGTELSVRAKPSAPVVSGPAARATPQHTVSFTCESHGFSPRDITLKWFKNGNELSDFQTNVDPAGDSVSYSIHSTAKVVLTREDVHSQVICEVAHVTLQGDPLRGTANLSETIRVPPTLEVTQQPVRAENQVNVTCQVRKFYPQRLQLTWLENGNVSRTETASTLTENKDGTYNWMSWLLVNVSAHRDDVKLTCQVEHDGQPAVSKSHDLKVSAHPKEQGSNTAPGPALASAAPLLIAFLLGPKVLLVVGVSVIYVYWKQKA

SEQ ID NO: 79228 - protein, 181 aa, Homo sapiens
  Payload ID: 15783
  Gene Symbol: SIRPB1
  Gene Name: signal-regulatory protein beta 1
  Uniprot ID: O00241
  ENSP ID: ENSP00000371016
MPVPASWPHLPSPFLLMTLLLGRLTGVAGEDELQVIQPEKSVSVAAGESATLRCAMTSLIPVGPIMWFRGAGAGRELIYNQKEGHFPRVTTVSELTKRNNLDFSISISNITPADAGTYYCVKFRKGSPDDVEFKSGAGTELSVREAALAPTAPLLVALLLGPKLLLVVGVSAIYICWKQKA

SEQ ID NO: 79229 - protein, 398 aa, Homo sapiens
  Payload ID: 15783
  Gene Symbol: SIRPB1
  Gene Name: signal-regulatory protein beta 1
  Uniprot ID: O00241
  ENSP ID: ENSP00000371018
MPVPASWPHLPSPFLLMTLLLGRLTGVAGEDELQVIQPEKSVSVAAGESATLRCAMTSLIPVGPIMWFRGAGAGRELIYNQKEGHFPRVTTVSELTKRNNLDFSISISNITPADAGTYYCVKFRKGSPDDVEFKSGAGTELSVRAKPSAPVVSGPAVRATPEHTVSFTCESHGFSPRDITLKWFKNGNELSDFQTNVDPAGDSVSYSIHSTARVVLTRGDVHSQVICEIAHITLQGDPLRGTANLSEAIRVPPTLEVTQQPMRAENQANVTCQVSNFYPRGLQLTWLENGNVSRTETASTLIENKDGTYNWMSWLLVNTCAHRDDVVLTCQVEHDGQQAVSKSYALEISAHQKEHGSDITHEAALAPTAPLLVALLLGPKLLLVVGVSAIYICWKQKA

SEQ ID NO: 79230 - protein, 236 aa, Homo sapiens
  Payload ID: 15783
  Gene Symbol: SIRPB1
  Gene Name: signal-regulatory protein beta 1
  ENSP ID: ENSP00000455568
HTVSFTCESHGFSPRDITLKWFKNGNELSDFQTNVDPAGDSVSYSIHSTAKVVLTREDVHSQVICEVAHVTLQGDPLRGTANLSETIRVPPTLEVTQQPVRAENQVNVTCQVRKFYPQRLQLTWLENGNVSRTETASTLTENKDGTYNWMSWLLVNVSAHRDDVKLTCQVEHDGQPAVSKSHDLKVSAHPKEQGSNTAPGPALASAAPLLIAFLLGPKVLLVVGVSVIYVYWKQKA

SEQ ID NO: 79231 - protein, 156 aa, Homo sapiens
  Payload ID: 15783
  Gene Symbol: SIRPB1
  Gene Name: signal-regulatory protein beta 1
  ENSP ID: ENSP00000456351
MPVPASWPHPPCPFLLLTLLLGLTGVAGEDELQVIQPEKSVSVAAGESATLRCAMTSLIPVGPIMWFRGAGAGRELIYNQKEGHFPRVTTVSELTKRNNLDFSISISNITPADAGTYYCVKFRKGSPDDVEFKSGAGTELSVREAALAPTAPLLVA

SEQ ID NO: 79232 - protein, 77 aa, Homo sapiens
  Payload ID: 15783
  Gene Symbol: SIRPB1
  Gene Name: signal-regulatory protein beta 1
  ENSP ID: ENSP00000456519
HRDDVKLTCQVEHDGQPAVSKSHDLKVSAHPKEQGSNTAPGPALASAAPLLIAFLLGPKVLLVVGVSVIYVYWKQKA

SEQ ID NO: 79233 - protein, 131 aa, Homo sapiens
  Payload ID: 15783
  Gene Symbol: SIRPB1
  Gene Name: signal-regulatory protein beta 1
  ENSP ID: ENSP00000456747
  MOD_RES (1)..(1): Any amino acid
XPPTLEVTQQPVRAENQVNVTCQVRKFYPQRLQLTWLENGNVSRTETASTLTENKDGTYNWMSWLLVNVSAHRDDVKLTCQVEHDGQPAVSKSHDLKVSAHPKEQGSNTAPVSLEFYRRGNQDLGSNGGYC

SEQ ID NO: 79234 - protein, 398 aa, Homo sapiens; identical to SEQ ID NO: 79227
  Payload ID: 15783
  Gene Symbol: SIRPB1
  Gene Name: signal-regulatory protein beta 1
  Uniprot ID: Q5TFQ8
  ENSP ID: ENSP00000456826

SEQ ID NO: 79235 - protein, 58 aa, Homo sapiens
  Payload ID: 15783
  Gene Symbol: SIRPB1
  Gene Name: signal-regulatory protein beta 1
  ENSP ID: ENSP00000457323
RKGSPDHVEFKSGAGTELSVREAALAPTAPLLVALLLGPKLLLVVGVSAIYICWKQKA

SEQ ID NO: 79236 - protein, 77 aa, Homo sapiens; identical to SEQ ID NO: 79232
  Payload ID: 15783
  Gene Symbol: SIRPB1
  Gene Name: signal-regulatory protein beta 1
  ENSP ID: ENSP00000457458

SEQ ID NO: 79237 - protein, 182 aa, Homo sapiens
  Payload ID: 15783
  Gene Symbol: SIRPB1
  Gene Name: signal-regulatory protein beta 1
  ENSP ID: ENSP00000457829
GNELSDFQTNVDPAGDSVSYSIHSTARVVLTRGDVHSQVICEIAHITLQGDPLRGTANLSEAIRVPPTLEVTQQPMRAENQANVTCQVSNFYPRGLQLTWLENGNVSRTETASTLIENKDGTYNWMSWLLVNTCAHRDDVVLTCQVEHDGQQAVSKSYALEISAHQKEHGSDITHGAVTSHF

SEQ ID NO: 79238 - protein, 77 aa, Homo sapiens; identical to SEQ ID NO: 79232
  Payload ID: 15783
  Gene Symbol: SIRPB1
  Gene Name: signal-regulatory protein beta 1
  ENSP ID: ENSP00000457855

SEQ ID NO: 79239 - protein, 342 aa, Homo sapiens
  Payload ID: 15784
  Gene Symbol: SIRPB2
  Gene Name: signal-regulatory protein beta 2
  Uniprot ID: Q5JXA9
  ENSP ID: ENSP00000352849
MCSTMSAPTCLAHLPPCFLLLALVLVPSDASGQSSRNDWQVLQPEGPMLVAEGETLLLRCMVVGSCTDGMIKWVKVSTQDQQEIYNFKRGSFPGVMPMIQRTSEPLNCDYSIYIHNVTREHTGTYHCVRFDGLSEHSEMKSDEGTSVLVKGAGDPEPDLWIIQPQELVLGTTGDTVFLNCTVLGDGPPGPIRWFQGAGLSREAIYNFGGISHPKETAVQASNNDFSILLQNVSSEDAGTYYCVKFQRKPNRQYLSGQGTSLKVKAKSTSSKEAEFTSEPATEMSPTGLLVVFAPVVLGLKAITLAALLLALATSRRSPGQEDVKTTGPAGAMNTLAWSKGQE

SEQ ID NO: 79240 - protein, 244 aa, Homo sapiens
  Payload ID: 15784
  Gene Symbol: SIRPB2
  Gene Name: signal-regulatory protein beta 2
  Uniprot ID: Q5JXA9
  ENSP ID: ENSP00000402438
MCSTMSAPTCLAHLPPCFLLLALVLVPSDASGQSSRNDWQVLQPEGPMLVAEGAGDPEPDLWIIQPQELVLGTTGDTVFLNCTVLGDGPPGPIRWFQGAGLSREAIYNFGGISHPKETAVQASNNDFSILLQNVSSEDAGTYYCVKFQRKPNRQYLSGQGTSLKVKAKSTSSKEAEFTSEPATEMSPTGLLVVFAPVVLGLKAITLAALLLALATSRRSPGQEDVKTTGPAGAMNTLAWSKGQE

SEQ ID NO: 79241 - protein, 289 aa, Homo sapiens
  Payload ID: 15784
  Gene Symbol: SIRPB2
  Gene Name: signal-regulatory protein beta 2
  ENSP ID: ENSP00000432656
MCSTMSAPTCLAHLPPCFLLLALVLVPSDASGQSSRNDWQVLQPEGPMLVAEGETLLLRCMVVGSCTDGMIKWVKVSTQDQQEIYNFKRGSFPGVMPMIQRTSEPLNCDYSIYIHNVTREHTGTYHCVRFDGLSEHSEMKSDEGTSVLVKGAGDPEPDLWIIQPQELVLGTTGDTVFLNCTVLGDGPPGPIRWFQGAGLSREAIYNFGGISHPKETAVQASNNDFSILLQNVSSEDAGTYYCVKFQRKPNRQYLSGQGTSLKVKAKSTSSKEAEFTSEPATEMSPTGLQ

SEQ ID NO: 79242 - protein, 289 aa, Homo sapiens; identical to SEQ ID NO: 79241
  Payload ID: 15784
  Gene Symbol: SIRPB2
  Gene Name: signal-regulatory protein beta 2
  ENSP ID: ENSP00000435045

SEQ ID NO: 79243 - protein, 86 aa, Homo sapiens
  Payload ID: 15784
  Gene Symbol: SIRPB2
  Gene Name: signal-regulatory protein beta 2
  ENSP ID: ENSP00000477149
MCSTMSAPTCLAHLPPCFLLLALVLVPSDASGQSSRNDWQVLQPEGPMLVAEGETLLLRCMVVGSCTDGMIKWVKGAHWNLPLCEV

SEQ ID NO: 79244 - protein, 198 aa, Homo sapiens
  Payload ID: 15785
  Gene Symbol: SIRPD
  Gene Name: signal-regulatory protein delta
  ENSP ID: ENSP00000371034
MPIPASPLHPPLPSLLLYLLLELAGVTHVFHVQQTEMSQTVSTGESIILSCSVPNTLPNGPVLWFKGTGPNRKLIYNFKQGNFPRVKEIGDTTKPGNTDFSTRIREISLADAGTYYCVKFIKGRAIKEYQSGRGTQVFVTAEQNPRPPKNRPAGRAGSRAHHDAHTCLSALPERNSTNYFVQPCCCLRLLGLTGLLSK

SEQ ID NO: 79245 - protein, 197 aa, Homo sapiens
  Payload ID: 15785
  Gene Symbol: SIRPD
  Gene Name: signal-regulatory protein delta
  Uniprot ID: Q9H106
  ENSP ID: ENSP00000371036
MPIPASPLHPPLPSLLLYLLLELAGVTHVFHVQQTEMSQTVSTGESIILSCSVPNTLPNGPVLWFKGTGPNRKLIYNFKQGNFPRVKEIGDTTKPGNTDFSTRIREISLADAGTYYCVKFIKGRAIKEYQSGRGTQVFVTEQNPRPPKNRPAGRAGSRAHHDAHTCLSALPERNSTNYFVQPCCCLRLLGLTGLLSK

SEQ ID NO: 79246 - protein, 80 aa, Homo sapiens
  Payload ID: 15785
  Gene Symbol: SIRPD
  Gene Name: signal-regulatory protein delta
  ENSP ID: ENSP00000410072
  MOD_RES (1)..(1): Any amino acid
XNGPVLWFKGTGPNRKLIYNFKQEQNPRPPKNRPAGRAGSRAHHDAHTCLSALPERNSTNYFVQPCCCLRLLGLTGLLSK

SEQ ID NO: 79247 - protein, 276 aa, Homo sapiens
  Payload ID: 15786
  Gene Symbol: SIRPG
  Gene Name: signal-regulatory protein gamma
  Uniprot ID: Q9P1W8
  ENSP ID: ENSP00000216927
MPVPASWPHPPGPFLLLTLLLGLTEVAGEEELQMIQPEKLLLVTVGKTATLHCTVTSLLPVGPVLWFRGVGPGRELIYNQKEGHFPRVTTVSDLTKRNNMDFSIRISSITPADVGTYYCVKFRKGSPENVEFKSGPGTEMALGAKPSAPVVLGPAARTTPEHTVSFTCESHGFSPRDITLKWFKNGNELSDFQTNVDPTGQSVAYSIRSTARVVLDPWDVRSQVICEVAHVTLQGDPLRGTANLSEAIRGPASSLTALLLIAVLLGPIYVPWKQKT

SEQ ID NO: 79248 - protein, 387 aa, Homo sapiens
  Payload ID: 15786
  Gene Symbol: SIRPG
  Gene Name: signal-regulatory protein gamma
  Uniprot ID: Q9P1W8
  ENSP ID: ENSP00000305529
MPVPASWPHPPGPFLLLTLLLGLTEVAGEEELQMIQPEKLLLVTVGKTATLHCTVTSLLPVGPVLWFRGVGPGRELIYNQKEGHFPRVTTVSDLTKRNNMDFSIRISSITPADVGTYYCVKFRKGSPENVEFKSGPGTEMALGAKPSAPVVLGPAARTTPEHTVSFTCESHGFSPRDITLKWFKNGNELSDFQTNVDPTGQSVAYSIRSTARVVLDPWDVRSQVICEVAHVTLQGDPLRGTANLSEAIRVPPTLEVTQQPMRVGNQVNVTCQVRKFYPQSLQLTWSENGNVCQRETASTLTENKDGTYNWTSWFLVNISDQRDDVVLTCQVKHDGQLAVSKRLALEVTVHQKDQSSDATPGPASSLTALLLIAVLLGPIYVPWKQKT

SEQ ID NO: 79249 - protein, 170 aa, Homo sapiens
  Payload ID: 15786
  Gene Symbol: SIRPG
  Gene Name: signal-regulatory protein gamma
  Uniprot ID: Q9P1W8
  ENSP ID: ENSP00000342759
MPVPASWPHPPGPFLLLTLLLGLTEVAGEEELQMIQPEKLLLVTVGKTATLHCTVTSLLPVGPVLWFRGVGPGRELIYNQKEGHFPRVTTVSDLTKRNNMDFSIRISSITPADVGTYYCVKFRKGSPENVEFKSGPGTEMALGGPASSLTALLLIAVLLGPIYVPWKQKT

SEQ ID NO: 79250 - protein, 354 aa, Homo sapiens
  Payload ID: 15786
  Gene Symbol: SIRPG
  Gene Name: signal-regulatory protein gamma
  Uniprot ID: Q9P1W8
  ENSP ID: ENSP00000370992
MIQPEKLLLVTVGKTATLHCTVTSLLPVGPVLWFRGVGPGRELIYNQKEGHFPRVTTVSDLTKRNNMDFSIRISSITPADVGTYYCVKFRKGSPENVEFKSGPGTEMALGAKPSAPVVLGPAARTTPEHTVSFTCESHGFSPRDITLKWFKNGNELSDFQTNVDPTGQSVAYSIRSTARVVLDPWDVRSQVICEVAHVTLQGDPLRGTANLSEAIRVPPTLEVTQQPMRVGNQVNVTCQVRKFYPQSLQLTWSENGNVCQRETASTLTENKDGTYNWTSWFLVNISDQRDDVVLTCQVKHDGQLAVSKRLALEVTVHQKDQSSDATPGPASSLTALLLIAVLLGPIYVPWKQKT

SEQ ID NO: 79251 - protein, 276 aa, Homo sapiens; identical to SEQ ID NO: 79247
  Payload ID: 15786
  Gene Symbol: SIRPG
  Gene Name: signal-regulatory protein gamma
  Uniprot ID: Q9P1W8
  ENSP ID: ENSP00000370995

SEQ ID NO: 79252 - protein, 1321 aa, Homo sapiens
  Payload ID: 15787
  Gene Symbol: SIK3
  Gene Name: SIK family kinase 3
  ENSP ID: ENSP00000364449
MAAAAASGAGGAAGAGTGGAGPAGRLLPPPAPGSPAAPAAVSPAAGQPRPPAPASRGPMPARIGYYEIDRTIGKGNFAVVKRATHLVTKAKVAIKIIDKTQLDEENLKKIFREVQIMKMLCHPHIIRLYQVMETERMIYLVTEYASGGEIFDHLVAHGRMAEKEARRKFKQIVTAVYFCHCRNIVHRDLKAENLLLDANLNIKIADFGFSNLFTPGQLLKTWCGSPPYAAPELFEGKEYDGPKVDIWSLGVVLYVLVCGALPFDGSTLQNLRARVLSGKFRIPFFMSTECEHLIRHMLVLDPNKRLSMEQICKHKWMKLGDADPNFDRLIAECQQLKEERQVDPLNEDVLLAMEDMGLDKEQTLQSLRSDAYDHYSAIYSLLCDRHKRHKTLRLGALPSMPRALAFQAPVNIQAEQAGTAMNISVPQVQLINPENQIVEPDGTLNLDSDEGEEPSPEALVRYLSMRRHTVGVADPRTEVMEDLQKLLPGFPGVNPQAPFLQVAPNVNFMHNLLPMQNLQPTGQLEYKEQSLLQPPTLQLLNGMGPLGRRASDGGANIQLHAQQLLKRPRGPSPLVTMTPAVPAVTPVDEESSDGEPDQEAVQSSTYKDSNTLHLPTERFSPVRRFSDGAASIQAFKAHLEKMGNNSSIKQLQQECEQLQKMYGGQIDERTLEKTQQQHMLYQQEQHHQILQQQIQDSICPPQPSPPLQAACENQPALLTHQLQRLRIQPSSPPPNHPNNHLFRQPSNSPPPMSSAMIQPHGAASSSQFQGLPSRSAIFQQQPENCSSPPNVALTCLGMQQPAQSQQVTIQVQEPVDMLSNMPGTAAGSSGRGISISPSAGQMQMQHRTNLMATLSYGHRPLSKQLSADSAEAHSLNVNRFSPANYDQAHLHPHLFSDQSRGSPSSYSPSTGVGFSPTQALKVPPLDQFPTFPPSAHQQPPHYTTSALQQALLSPTPPDYTRHQQVPHILQGLLSPRHSLTGHSDIRLPPTEFAQLIKRQQQQRQQQQQQQQQQEYQELFRHMNQGDAGSLAPSLGGQSMTERQALSYQNADSYHHHTSPQHLLQIRAQECVSQASSPTPPHGYAHQPALMHSESMEEDCSCEGAKDGFQDSKSSSTLTKGCHDSPLLLSTGGPGDPESLLGTVSHAQELGIHPYGHQPTAAFSKNKVPSREPVIGNCMDRSSPGQAVELPDHNGLGYPARPSVHEHHRPRALQRHHTIQNSDDAYVQLDNLPGMSLVAGKALSSARMSDAVLSQSSLMGSQQFQDGENEECGASLGGHEHPDLSDGSQHLNSSCYPSTCITDILLSYKHPEVSFSMEQAGV

SEQ ID NO: 79253 - protein, 1261 aa, Homo sapiens
  Payload ID: 15787
  Gene Symbol: SIK3
  Gene Name: SIK family kinase 3
  ENSP ID: ENSP00000390442
MAAAAASGAGGAAGAGTGGAGPAGRLLPPPAPGSPAAPAAVSPAAGQPRPPAPASRGPMPARIGYYEIDRTIGKGNFAVVKRATHLVTKAKVAIKIIDKTQLDEENLKKIFREVQIMKMLCHPHIIRLYQVMETERMIYLVTEYASGGEIFDHLVAHGRMAEKEARRKFKQIVTAVYFCHCRNIVHRDLKAENLLLDANLNIKIADFGFSNLFTPGQLLKTWCGSPPYAAPELFEGKEYDGPKVDIWSLGVVLYVLVCGALPFDGSTLQNLRARVLSGKFRIPFFMSTECEHLIRHMLVLDPNKRLSMEQICKHKWMKLGDADPNFDRLIAECQQLKEERQVDPLNEDVLLAMEDMGLDKEQTLQAEQAGTAMNISVPQVQLINPENQIVEPDGTLNLDSDEGEEPSPEALVRYLSMRRHTVGVADPRTEVMEDLQKLLPGFPGVNPQAPFLQVAPNVNFMHNLLPMQNLQPTGQLEYKEQSLLQPPTLQLLNGMGPLGRRASDGGANIQLHAQQLLKRPRGPSPLVTMTPAVPAVTPVDEESSDGEPDQEAVQRYLANRSKRHTLAMTNPTAEIPPDLQRQLGQQPFRSRVWPPHLVPDQHRSTYKDSNTLHLPTERFSPVRRFSDGAASIQAFKAHLEKMGNNSSIKQLQQECEQLQKMYGGQIDERTLEKTQQQHMLYQQEQHHQILQQQIQDSICPPQPSPPLQAACENQPALLTHQLQRLRIQPSSPPPNHPNNHLFRQPSNSPPPMSSAMIQPHGAASSSQFQGLPSRSAIFQQQPENCSSPPNVALTCLGMQQPAQSQQVTIQVQEPVDMLSNMPGTAAGSSGRGISISPSAGQMQMQHRTNLMATLSYGHRPLSKQLSADSAEAHSAHQQPPHYTTSALQQALLSPTPPDYTRHQQVPHILQGLLSPRHSLTGHSDIRLPPTEFAQLIKRQQQQRQQQQQQQQQQEYQELFRHMNQGDAGSLAPSLGGQSMTERQALSYQNADSYHHHTSPQHLLQIRAQECVSQASSPTPPHGYAHQPALMHSESMEEDCSCEGAKDGFQDSKSSSTLTKGCHDSPLLLSTGGPGDPESLLGTVSHAQELGIHPYGHQPTAAFSKNKVPSREPVIGNCMDRSSPGQAVELPDHNGLGYPARPSVHEHHRPRALQRHHTIQNSDDAYVQLDNLPGMSLVAGKALSSARMSDAVLSQSSLMGSQQFQDGENEECGASLGGHEHPDLSDGSQHLNSSCYPSTCITDILLSYKHPEVSFSMEQAGV

SEQ ID NO: 79254 - protein, 1363 aa, Homo sapiens
  Payload ID: 15787
  Gene Symbol: SIK3
  Gene Name: SIK family kinase 3
  ENSP ID: ENSP00000391295
  MOD_RES (1)..(1): Any amino acid
XGAGGAAGAGTGGAGPAGRLLPPPAPGSPAAPAAVSPAAGQPRPPAPASRGPMPARIGYYEIDRTIGKGNFAVVKRATHLVTKAKVAIKIIDKTQLDEENLKKIFREVQIMKMLCHPHIIRLYQVMETERMIYLVTEYASGGEIFDHLVAHGRMAEKEARRKFKQIVTAVYFCHCRNIVHRDLKAENLLLDANLNIKIADFGFSNLFTPGQLLKTWCGSPPYAAPELFEGKEYDGPKVDIWSLGVVLYVLVCGALPFDGSTLQNLRARVLSGKFRIPFFMSTECEHLIRHMLVLDPNKRLSMEQICKHKWMKLGDADPNFDRLIAECQQLKEERQVDPLNEDVLLAMEDMGLDKEQTLQSLRSDAYDHYSAIYSLLCDRHKRHKTLRLGALPSMPRALAFQAPVNIQAEQAGTAMNISVPQVQLINPENQIVEPDGTLNLDSDEGEEPSPEALVRYLSMRRHTVGVADPRTEVMEDLQKLLPGFPGVNPQAPFLQVAPNVNFMHNLLPMQNLQPTGQLEYKEQSLLQPPTLQLLNGMGPLGRRASDGGANIQLHAQQLLKRPRGPSPLVTMTPAVPAVTPVDEESSDGEPDQEAVQRYLANRSKRHTLAMTNPTAEIPPDLQRQLGQQPFRSRVWPPHLVPDQHRSTYKDSNTLHLPTERFSPVRRFSDGAASIQAFKAHLEKMGNNSSIKQLQQECEQLQKMYGGQIDERTLEKTQQQHMLYQQEQHHQILQQQIQDSICPPQPSPPLQAACENQPALLTHQLQRLRIQPSSPPPNHPNNHLFRQPSNSPPPMSSAMIQPHGAASSSQFQGLPSRSAIFQQQPENCSSPPNVALTCLGMQQPAQSQQVTIQVQEPVDMLSNMPGTAAGSSGRGISISPSAGQMQMQHRTNLMATLSYGHRPLSKQLSADSAEAHSLNVNRFSPANYDQAHLHPHLFSDQSRGSPSSYSPSTGVGFSPTQALKVPPLDQFPTFPPSAHQQPPHYTTSALQQALLSPTPPDYTRHQQVPHILQGLLSPRHSLTGHSDIRLPPTEFAQLIKRQQQQRQQQQQQQQQQEYQELFRHMNQGDAGSLAPSLGGQSMTERQALSYQNADSYHHHTSPQHLLQIRAQECVSQASSPTPPHGYAHQPALMHSESMEEDCSCEGAKDGFQDSKSSSTLTKGCHDSPLLLSTGGPGDPESLLGTVSHAQELGIHPYGHQPTAAFSKNKVPSREPVIGNCMDRSSPGQAVELPDHNGLGYPARPSVHEHHRPRALQRHHTIQNSDDAYVQLDNLPGMSLVAGKALSSARMSDAVLSQSSLMGSQQFQDGENEECGASLGGHEHPDLSDGSQHLNSSCYPSTCITDILLSYKHPEVSFSMEQAGV

SEQ ID NO: 79255 - protein, 151 aa, Homo sapiens
  Payload ID: 15787
  Gene Symbol: SIK3
  Gene Name: SIK family kinase 3
  ENSP ID: ENSP00000392761
RPPAPASRGPMPARIGYYEIDRTIGKGNFAVVKRATHLVTKAKVAIKIIDKTQLDEENLKKIFREVQIMKMLCHPHIIRLYQVMETERMIYLVTEYASGGEIFGGFGHQQFSFCPELPIAESWRSAVKRWGPLLLLSPHLWNLIRPPGGPW

SEQ ID NO: 79256 - protein, 71 aa, Homo sapiens
  Payload ID: 15787
  Gene Symbol: SIK3
  Gene Name: SIK family kinase 3
  ENSP ID: ENSP00000392849
  MOD_RES (1)..(1): Any amino acid
XNSDDAYVQLDNLPGMSLVAGKALSSARMSDAVLSQSSLMGSQQFQDGENEDILLSYKHPEVSFSMEQAGV

SEQ ID NO: 79257 - protein, 506 aa, Homo sapiens
  Payload ID: 15787
  Gene Symbol: SIK3
  Gene Name: SIK family kinase 3
  ENSP ID: ENSP00000414347
  MOD_RES (1)..(1): Any amino acid
XKTQLDEENLKKIFREVQIMKMLCHPHIIRLYQVMETERMIYLVTEYASGGEIFDHLVAHGRMAEKEARRKFKQIVTAVYFCHCRNIVHRDLKAENLLLDANLNIKIADFGFSNLFTPGQLLKTWCGSPPYAAPELFEGKEYDGPKVDIWSLGVVLYVLVCGALPFDGSTLQNLRARVLSGKFRIPFFMSTECEHLIRHMLVLDPNKRLSMEQICKHKWMKLGDADPNFDRLIAECQQLKEERQVDPLNEDVLLAMEDMGLDKEQTLQSLRSDAYDHYSAIYSLLCDRHKRHKTLRLGALPSMPRALAFQAPVNIQAEQAGTAMNISVPQVQLINPENQIVEPDGTLNLDSDEGEEPSPEALVRYLSMRRHTVGVADPRTEVMEDLQKLLPGFPGVNPQAPFLQVAPNVNFMHNLLPMQNLQPTGQLEYKEQSLLQPPTLQLLNGMGPLGRRASDGGANIQLHAQQLLKRPRGPSPLVTMTPAVPAVTPVDEESSDGEPDQEAVQR

SEQ ID NO: 79258 - protein, 461 aa, Homo sapiens
  Payload ID: 15788
  Gene Symbol: SIL1
  Gene Name: SIL1 nucleotide exchange factor
  Uniprot ID: Q9H173
  ENSP ID: ENSP00000265195
MAPQSLPSSRMAPLGMLLGLLMAACFTFCLSHQNLKEFALTNPEKSSTKETERKETKAEEELDAEVLEVFHPTHEWQALQPGQAVPAGSHVRLNLQTGEREAKLQYEDKFRNNLKGKRLDINTNTYTSQDLKSALAKFKEGAEMESSKEDKARQAEVKRLFRPIEELKKDFDELNVVIETDMQIMVRLINKFNSSSSSLEEKIAALFDLEYYVHQMDNAQDLLSFGGLQVVINGLNSTEPLVKEYAAFVLGAAFSSNPKVQVEAIEGGALQKLLVILATEQPLTAKKKVLFALCSLLRHFPYAQRQFLKLGGLQVLRTLVQEKGTEVLAVRVVTLLYDLVTEKMFAEEEAELTQEMSPEKLQQYRQVHLLPGLWEQGWCEITAHLLALPEHDAREKVLQTLGVLLTTCRDRYRQDPQLGRTLASLQAEYQVLASLELQDGEDEGYFQELLGSVNSLLKELR

SEQ ID NO: 79259 - protein, 461 aa, Homo sapiens; identical to SEQ ID NO: 79258
  Payload ID: 15788
  Gene Symbol: SIL1
  Gene Name: SIL1 nucleotide exchange factor
  Uniprot ID: Q9H173
  ENSP ID: ENSP00000378294

SEQ ID NO: 79260 - protein, 125 aa, Homo sapiens
  Payload ID: 15788
  Gene Symbol: SIL1
  Gene Name: SIL1 nucleotide exchange factor
  ENSP ID: ENSP00000421890
MQEMSDMSLTMAPQSLPSSRMAPLGMLLGLLMAACFTFCLSHQNLKEFALTNPEKSSTKETERKETKAEEELDAEVLEVFHPTHEWQALQPGQAVPAGSHVRLNLQTGEREAKLQYEDKFRNNLK

SEQ ID NO: 79261 - protein, 94 aa, Homo sapiens
  Payload ID: 15788
  Gene Symbol: SIL1
  Gene Name: SIL1 nucleotide exchange factor
  ENSP ID: ENSP00000423662
MAPQSLPSSRMAPLGMLLGLLMAACFTFCLSHQNLKEFALTNPEKSSTKETERKETKAEEELDAEVLEVFHPTHEWQALQPGQAVPAGSHVRLN

SEQ ID NO: 79262 - protein, 123 aa, Homo sapiens
  Payload ID: 15788
  Gene Symbol: SIL1
  Gene Name: SIL1 nucleotide exchange factor
  ENSP ID: ENSP00000424014
MAPQSLPSSRMAPLGMLLGLLMAACFTFCLSHQNLKEFALTNPEKSSTKETERKETKAEEELDAEVLEVFHPTHEWQALQPGQAVPAGSHVRLNLQTGEREAKLQYEDKFRNNLKGKRLDINT

SEQ ID NO: 79263 - protein, 83 aa, Homo sapiens
  Payload ID: 15788
  Gene Symbol: SIL1
  Gene Name: SIL1 nucleotide exchange factor
  ENSP ID: ENSP00000425136
LKSALAKFKEGAEMESSKEDKMDNAQDLLSFGGLQVVINGLNSTEPLVKEYAAFVLGAAFSSNPKVQVEAIEGGALQKLLVIL

SEQ ID NO: 79264 - protein, 123 aa, Homo sapiens
  Payload ID: 15788
  Gene Symbol: SIL1
  Gene Name: SIL1 nucleotide exchange factor
  ENSP ID: ENSP00000426460
MQEMSDMSLTMAPQSLPSSRMAPLGMLLGLLMAACFTFCLSHQNLKEFALTNPEKSSTKETERKETKAEEELDAEVLEVFHPTHEWQALQPGQAVPAGSHVRLNLQTGEREAKLQYEDKFRNN

SEQ ID NO: 79265 - protein, 468 aa, Homo sapiens
  Payload ID: 15788
  Gene Symbol: SIL1
  Gene Name: SIL1 nucleotide exchange factor
  ENSP ID: ENSP00000426858
MNSGTSLTMAPQSLPSSRMAPLGMLLGLLMAACFTFCLSHQNLEFALTNPEKSSTKETERKETKAEEELDAEVLEVFHPTHEWQALQPGQAVPAGSHVRLNLQTGEREAKLQYEDKFRNNLKGKRLDINTNTYTSQDLKSALAKFKEGAEMESSKEDKARQAEVKRLFRPIEELKKDFDELNVVIETDMQIMVRLINKFNSSSSSLEEKIAALFDLEYYVHQMDNAQDLLSFGGLQVVINGLNSTEPLVKEYAAFVLGAAFSSNPKVQVEAIEGGALQKLLVILATEQPLTAKKKVLFALCSLLRHFPYAQRQFLKLGGLQVLRTLVQEKGTEVLAVRVVTLLYDLVTEKMFAEEEAELTQEMSPEKLQQYRQVHLLPGLWEQGWCEITAHLLALPEHDAREKVLQTLGVLLTTCRDRYRQDPQLGRTLASLQAEYQVLASLELQDGEDEGYFQELLGSVNSLLKELR

SEQ ID NO: 79266 - protein, 163 aa, Homo sapiens
  Payload ID: 15788
  Gene Symbol: SIL1
  Gene Name: SIL1 nucleotide exchange factor
  ENSP ID: ENSP00000427371
MAPQSLPSSRMAPLGMLLGLLMAACFTFCLSHQNLKEFALTNPEKSSTKETERKETKAEEELDAEVLEVFHPTHEWQALQPGQAVPAGSHVRLNLQTGEREAKLQYEDKFRNNLKGKRLDINTNTYTSQDLKSALAKFKEGAEMESSKEDKARQAEVKRLFRP

SEQ ID NO: 79267 - protein, 1273 aa, Homo sapiens
  Payload ID: 15789
  Gene Symbol: SIN3A
  Gene Name: SIN3 transcription regulator family member A
  Uniprot ID: Q96ST3
  ENSP ID: ENSP00000353622
MKRRLDDQESPVYAAQQRRIPGSTEAFPHQHRVLAPAPPVYEAVSETMQSATGIQYSVTPSYQVSAMPQSSGSHGPAIAAVHSSHHHPTAVQPHGGQVVQSHAHPAPPVAPVQGQQQFQRLKVEDALSYLDQVKLQFGSQPQVYNDFLDIMKEFKSQSIDTPGVISRVSQLFKGHPDLIMGFNTFLPPGYKIEVQTNDMVNVTTPGQVHQIPTHGIQPQPQPPPQHPSQPSAQSAPAPAQPAPQPPPAKVSKPSQLQAHTPASQQTPPLPPYASPRSPPVQPHTPVTISLGTAPSLQNNQPVEFNHAINYVNKIKNRFQGQPDIYKAFLEILHTYQKEQRNAKEAGGNYTPALTEQEVYAQVARLFKNQEDLLSEFGQFLPDANSSVLLSKTTAEKVDSVRNDHGGTVKKPQLNNKPQRPSQNGCQIRRHPTGTTPPVKKKPKLLNLKDSSMADASKHGGGTESLFFDKVRKALRSAEAYENFLRCLVIFNQEVISRAELVQLVSPFLGKFPELFNWFKNFLGYKESVHLETYPKERATEGIAMEIDYASCKRLGSSYRALPKSYQQPKCTGRTPLCKEVLNDTWVSFPSWSEDSTFVSSKKTQYEEHIYRCEDERFELDVVLETNLATIRVLEAIQKKLSRLSAEEQAKFRLDNTLGGTSEVIHRKALQRIYADKAADIIDGLRKNPSIAVPIVLKRLKMKEEEWREAQRGFNKVWREQNEKYYLKSLDHQGINFKQNDTKVLRSKSLLNEIESIYDERQEQATEENAGVPVGPHLSLAYEDKQILEDAAALIIHHVKRQTGIQKEDKYKIKQIMHHFIPDLLFAQRGDLSDVEEEEEEEMDVDEATGAVKKHNGVGGSPPKSKLLFSNTAAQKLRGMDEVYNLFYVNNNWYIFMRLHQILCLRLLRICSQAERQIEEENREREWEREVLGIKRDKSDSPAIQLRLKEPMDVDVEDYYPAFLDMVRSLLDGNIDSSQYEDSLREMFTIHAYIAFTMDKLIQSIVRQLQHIVSDEICVQVTDLYLAENNNGATGGQLNTQNSRSLLESTYQRKAEQLMSDENCFKLMFIQSQGQVQLTIELLDTEEENSDDPVEAERWSDYVERYMNSDTTSPELREHLAQKPVFLPRNLRRIRKCQRGREQQEKEGKEGNSKKTMENVDSLDKLECRFKLNSYKMVYVIKSEDYMYRRTALLRAHQSHERVSKRLHQRFQAWVDKWTKEHVPREMAAETSKWLMGEGLEGLVPCTTTCDTETLHFVSINKYRVKYGTVFKAP

SEQ ID NO: 79268 - protein, 1273 aa, Homo sapiens; identical to SEQ ID NO: 79267
  Payload ID: 15789
  Gene Symbol: SIN3A
  Gene Name: SIN3 transcription regulator family member A
  Uniprot ID: Q96ST3
  ENSP ID: ENSP00000378402

SEQ ID NO: 79269 - protein, 1273 aa, Homo sapiens; identical to SEQ ID NO: 79267
  Payload ID: 15789
  Gene Symbol: SIN3A
  Gene Name: SIN3 transcription regulator family member A
  Uniprot ID: Q96ST3
  ENSP ID: ENSP00000378403

SEQ ID NO: 79270 - protein, 18 aa, Homo sapiens
  Payload ID: 15789
  Gene Symbol: SIN3A
  Gene Name: SIN3 transcription regulator family member A
  ENSP ID: ENSP00000454296
MKRRLDDQESPVYAAQQR

SEQ ID NO: 79271 - protein, 130 aa, Homo sapiens
  Payload ID: 15789
  Gene Symbol: SIN3A
  Gene Name: SIN3 transcription regulator family member A
  ENSP ID: ENSP00000454750
MKRRLDDQESPVYAAQQRRIPGSTEAFPHQHRVLAPAPPVYEAVSETMQSATGIQYSVTPSYQVSAMPQSSGSHGPAIAAVHSSHHHPTAVQPHGGQVVQSHAHPAPPVAPVQGQQQFQRLKVEDALSYL

SEQ ID NO: 79272 - protein, 142 aa, Homo sapiens
  Payload ID: 15789
  Gene Symbol: SIN3A
  Gene Name: SIN3 transcription regulator family member A
  ENSP ID: ENSP00000455072
MKRRLDDQESPVYAAQQRRIPGSTEAFPHQHRVLAPAPPVYEAVSETMQSATGIQYSVTPSYQVSAMPQSSGSHGPAIAAVHSSHHHPTAVQPHGGQVVQSHAHPAPPVAPVQGQQQFQRLKVEDALSYLDQVKLQFGSQPQ

SEQ ID NO: 79273 - protein, 176 aa, Homo sapiens
  Payload ID: 15789
  Gene Symbol: SIN3A
  Gene Name: SIN3 transcription regulator family member A
  ENSP ID: ENSP00000455204
MKRRLDDQESPVYAAQQRRIPGSTEAFPHQHRVLAPAPPVYEAVSETMQSATGIQYSVTPSYQVSAMPQSSGSHGPAIAAVHSSHHHPTAVQPHGGQVVQSHAHPAPPVAPVQGQQQFQRLKVEDALSYLDQVKLQFGSQPQVYNDFLDIMKEFKSQSIDTPGVISRVSQLFKGHP

SEQ ID NO: 79274 - protein, 107 aa, Homo sapiens
  Payload ID: 15789
  Gene Symbol: SIN3A
  Gene Name: SIN3 transcription regulator family member A
  ENSP ID: ENSP00000455644
MKRRLDDQESPVYAAQQRRIPGSTEAFPHQHRVLAPAPPVYEAVSETMQSATGIQYSVTPSYQVSAMPQSSGSHGPAIAAVHSSHHHPTAVQPHGGQVVQSHAHPAP

SEQ ID NO: 79275 - protein, 123 aa, Homo sapiens
  Payload ID: 15789
  Gene Symbol: SIN3A
  Gene Name: SIN3 transcription regulator family member A
  ENSP ID: ENSP00000455662
MKRRLDDQESPVYAAQQRRIPGSTEAFPHQHRVLAPAPPVYEAVSETMQSATGIQYSVTPSYQVSAMPQSSGSHGPAIAAVHSSHHHPTAVQPHGGQVVQSHAHPAPPVAPVQGQQQFQRLKV

SEQ ID NO: 79276 - protein, 156 aa, Homo sapiens
  Payload ID: 15789
  Gene Symbol: SIN3A
  Gene Name: SIN3 transcription regulator family member A
  ENSP ID: ENSP00000455834
MKRRLDDQESPVYAAQQRRIPGSTEAFPHQHRVLAPAPPVYEAVSETMQSATGIQYSVTPSYQVSAMPQSSGSHGPAIAAVHSSHHHPTAVQPHGGQVVQSHAHPAPPVAPVQGQQQFQRLKVVFSSFSWVKKFIFSRKYWLQLVGCGGTTSNLRY

SEQ ID NO: 79277 - protein, 98 aa, Homo sapiens
  Payload ID: 15789
  Gene Symbol: SIN3A
  Gene Name: SIN3 transcription regulator family member A
  ENSP ID: ENSP00000456997
MKRRLDDQESPVYAAQQRRIPGSTEAFPHQHRVLAPAPPVYEAVSETMQSATGIQYSVTPSYQVSAMPQSSGSHGPAIAAVHSSHHHPTAVQPHGGQV

SEQ ID NO: 79278 - protein, 1130 aa, Homo sapiens
  Payload ID: 15790
  Gene Symbol: SIN3B
  Gene Name: SIN3 transcription regulator family member B
  Uniprot ID: O75182
  ENSP ID: ENSP00000248054
MAHAGGGSGGSGAGGPAGRGLSGARWGRSGSAGHEKLPVHVEDALTYLDQVKIRFGSDPATYNGFLEIMKEFKSQSIDTPGVIRRVSQLFHEHPDLIVGFNAFLPLGYRIDIPKNGKLNIQSPLTSQENSHNHGDGAEDFKQQVPYKEDKPQVPLESDSVEFNNAISYVNKIKTRFLDHPEIYRSFLEILHTYQKEQLNTRGRPFRGMSEEEVFTEVANLFRGQEDLLSEFGQFLPEAKRSLFTGNGPCEMHSVQKNEHDKTPEHSRKRSRPSLLRPVSAPAKKKMKLRGTKDLSIAAVGKYGTLQEFSFFDKVRRVLKSQEVYENFLRCIALFNQELVSGSELLQLVSPFLGKFPELFAQFKSFLGVKELSFAPPMSDRSGDGISREIDYASCKRIGSSYRALPKTYQQPKCSGRTAICKEVLNDTWVSFPSWSEDSTFVSSKKTPYEEQLHRCEDERFELDVVLETNLATIRVLESVQKKLSRMAPEDQEKFRLDDSLGGTSEVIQRRAIYRIYGDKAPEIIESLKKNPVTAVPVVLKRLKAKEEEWREAQQGFNKIWREQYEKAYLKSLDHQAVNFKQNDTKALRSKSLLNEIESVYDEHQEQHSEGRSAPSSEPHLIFVYEDRQILEDAAALISYYVKRQPAIQKEDQGTIHQLLHQFVPSLFFSQQLDLGASEESADEDRDSPQGQTTDPSERKKPAPGPHSSPPEEKGAFGDAPATEQPPLPPPAPHKPLDDVYSLFFANNNWYFFLRLHQTLCSRLLKIYRQAQKQLLEYRTEKEREKLLCEGRREKGSDPAMELRLKQPSEVELEEYYPAFLDMVRSLLEGSIDPTQYEDTLREMFTIHAYVGFTMDKLVQNIARQLHHLVSDDVCLKVVELYLNEKKRGAAGGNLSSRCVRAARETSYQWKAERCMADENCFKVMFLQRKGQVIMTIELLDTEEAQTEDPVEVQHLARYVEQYVGTEGASSSPTEGFLLKPVFLQRNLKKFRRRWQSEQARALRGEARSSWKRLVGVESACDVDCRFKLSTHKMVFIVNSEDYMYRRGTLCRAKQVQPLVLLRHHQHFEEWHSRWLEDNVTVEAASLVQDWLMGEEDEDMVPCKTLCETVHVHGLPVTRYRVQYSRRPASP

SEQ ID NO: 79279 - protein, 1162 aa, Homo sapiens
  Payload ID: 15790
  Gene Symbol: SIN3B
  Gene Name: SIN3 transcription regulator family member B
  Uniprot ID: O75182
  ENSP ID: ENSP00000369131
MAHAGGGSGGSGAGGPAGRGLSGARWGRSGSAGHEKLPVHVEDALTYLDQVKIRFGSDPATYNGFLEIMKEFKSQSIDTPGVIRRVSQLFHEHPDLIVGFNAFLPLGYRIDIPKNGKLNIQSPLTSQENSHNHGDGAEDFKQQVPYKEDKPQVPLESDSVEFNNAISYVNKIKTRFLDHPEIYRSFLEILHTYQKEQLNTRGRPFRGMSEEEVFTEVANLFRGQEDLLSEFGQFLPEAKRSLFTGNGPCEMHSVQKNEHDKTPEHSRKRSRPSLLRPVSAPAKKKMKLRGTKDLSIAAVGKYGTLQEFSFFDKVRRVLKSQEVYENFLRCIALFNQELVSGSELLQLVSPFLGKFPELFAQFKSFLGVKELSFAPPMSDRSGDGISREIDYASCKRIGSSYRALPKTYQQPKCSGRTAICKELDHWTLLQGSWTDDYCMSKFKNTCWIPGYSAGVLNDTWVSFPSWSEDSTFVSSKKTPYEEQLHRCEDERFELDVVLETNLATIRVLESVQKKLSRMAPEDQEKFRLDDSLGGTSEVIQRRAIYRIYGDKAPEIIESLKKNPVTAVPVVLKRLKAKEEEWREAQQGFNKIWREQYEKAYLKSLDHQAVNFKQNDTKALRSKSLLNEIESVYDEHQEQHSEGRSAPSSEPHLIFVYEDRQILEDAAALISYYVKRQPAIQKEDQGTIHQLLHQFVPSLFFSQQLDLGASEESADEDRDSPQGQTTDPSERKKPAPGPHSSPPEEKGAFGDAPATEQPPLPPPAPHKPLDDVYSLFFANNNWYFFLRLHQTLCSRLLKIYRQAQKQLLEYRTEKEREKLLCEGRREKGSDPAMELRLKQPSEVELEEYYPAFLDMVRSLLEGSIDPTQYEDTLREMFTIHAYVGFTMDKLVQNIARQLHHLVSDDVCLKVVELYLNEKKRGAAGGNLSSRCVRAARETSYQWKAERCMADENCFKVMFLQRKGQVIMTIELLDTEEAQTEDPVEVQHLARYVEQYVGTEGASSSPTEGFLLKPVFLQRNLKKFRRRWQSEQARALRGEARSSWKRLVGVESACDVDCRFKLSTHKMVFIVNSEDYMYRRGTLCRAKQVQPLVLLRHHQHFEEWHSRWLEDNVTVEAASLVQDWLMGEEDEDMVPCKTLCETVHVHGLPVTRYRVQYSRRPASP

SEQ ID NO: 79280 - protein, 720 aa, Homo sapiens
  Payload ID: 15790
  Gene Symbol: SIN3B
  Gene Name: SIN3 transcription regulator family member B
  ENSP ID: ENSP00000469740
MQRHSRHFLLVQVLNDTWVSFPSWSEDSTFVSSKKTPYEEQLHRCEDERFELDVVLETNLATIRVLESVQKKLSRMAPEDQEKFRLDDSLGGTSEVIQRRAIYRIYGDKAPEIIESLKKNPVTAVPVVLKRLKAKEEEWREAQQGFNKIWREQYEKAYLKSLDHQAVNFKQNDTKALRSKSLLNEIESVYDEHQEQHSEGRSAPSSEPHLIFVYEDRQILEDAAALISYYVKRQPAIQKEDQGTIHQLLHQFVPSLFFSQQLDLGASEESADEDRDSPQGQTTDPSERKKPAPGPHSSPPEEKGAFGDAPATEQPPLPPPAPHKPLDDVYSLFFANNNWYFFLRLHQTLCSRLLKIYRQAQKQLLEYRTEKEREKLLCEGRREKGSDPAMELRLKQPSEVELEEYYPAFLDMVRSLLEGSIDPTQYEDTLREMFTIHAYVGFTMDKLVQNIARQLHHLVSDDVCLKVVELYLNEKKRGAAGGNLSSRCVRAARETSYQWKAERCMADENCFKVMFLQRKGQVIMTIELLDTEEAQTEDPVEVQHLARYVEQYVGTEGASSSPTEGFLLKPVFLQRNLKKFRRRWQSEQARALRGEARSSWKRLVGVESACDVDCRFKLSTHKMVFIVNSEDYMYRRGTLCRAKQVQPLVLLRHHQHFEEWHSRWLEDNVTVEAASLVQDWLMGEEDEDMVPCKTLCETVHVHGLPVTRYRVQYSRRPASP

SEQ ID NO: 79281 - protein, 309 aa, Homo sapiens
  Payload ID: 15790
  Gene Symbol: SIN3B
  Gene Name: SIN3 transcription regulator family member B
  ENSP ID: ENSP00000472365
  MOD_RES (1)..(1): Any amino acid
XLHTYQKEQLNTRGRPFRGMSEEEVFTEVANLFRGQEDLLSEFGQFLPEAKRSLFTGNGPCEMHSVQKNEHDKTPEHSRKRSRPSLLRPVSAPAKKKMKLRGTKDLSIAAVGKYGTLQEFSFFDKVRRVLKSQEVYENFLRCIALFNQELVSGSELLQLVSPFLGKFPELFAQFKSFLGVKELSFAPPMSDRSGDGISREIDYASCKRIGSSYRALPKTYQQPKCSGRTAICKELDHWTLLQGSWTDDYCMSKFKNTCWIPGYSAGVSKLWPTGPGPLPVFVNKVLLSHRHNHSFTYCLWLLFSPQRQS

SEQ ID NO: 79282 - protein, 353 aa, Homo sapiens
  Payload ID: 15790
  Gene Symbol: SIN3B
  Gene Name: SIN3 transcription regulator family member B
  Uniprot ID: O75182
  ENSP ID: ENSP00000473039
MAHAGGGSGGSGAGGPAGRGLSGARWGRSGSAGHEKLPVHVEDALTYLDQVKIRFGSDPATYNGFLEIMKEFKSQSIDTPGVIRRVSQLFHEHPDLIVGFNAFLPLGYRIDIPKNGKLNIQSPLTSQENSHNHGDGAEDFKQQVPYKEDKPQVPLESDSVEFNNAISYVNKIKTRFLDHPEIYRSFLEILHTYQKEQLNTRGRPFRGMSEEEVFTEVANLFRGQEDLLSEFGQFLPEAKRSLFTGNGPCEMHSVQKNEHDKTPEHSRKRSRPSLLRPVSAPAKKKMKLRGTKDLSIAAVGKYGTLQEFSFFDKVRRVLKSQEVYENFLRCIALFNQELVSGSELLQLVSPFLG

SEQ ID NO: 79283 - protein, 1056 aa, Homo sapiens
  Payload ID: 15791
  Gene Symbol: SAP130
  Gene Name: Sin3A-associated protein, 130kDa
  ENSP ID: ENSP00000259234
MSSQQFPRLGAPSTGLSQAPSQIANSGSAGLINPAATVNDESGRDSEVSAREHMSSSSSLQSREEKQEPVVVRPYPQVQMLSTHHAVASATPVAVTAPPAHLTPAVPLSFSEGLMKPPPKPTMPSRPIAPAPPSTLSLPPKVPGQVTVTMESSIPQASAIPVATISGQQGHPSNLHHIMTTNVQMSIIRSNAPGPPLHIGASHLPRGAAAAAVMSSSKVTTVLRPTSQLPNAATAQPAVQHIIHQPIQSRPPVTTSNAIPPAVVATVSATRAQSPVITTTAAHATDSALSRPTLSIQHPPSAAISIQRPAQSRDVTTRITLPSHPALGTPKQQLHTMAQKTIFSTGTPVAAATVAPILATNTIPSATTAGSVSHTQAPTSTIVTMTVPSHSSHATAVTTSNIPVAKVVPQQITHTSPRIQPDYPAERSSLIPISGHRASPNPVAMETRSDNRPSVPVQFQYFLPTYPPSAYPLAAHTYTPITSSVSTIRQYPVSAQAPNSAITAQTGVGVASTVHLNPMQLMTVDASHARHIQGIQPAPISTQGIQPAPIGTPGIQPAPLGTQGIHSATPINTQGLQPAPMGTQQPQPEGKTSVVLADGATIVANPISNPFSAAPAATTVVQTHSQSASTNAPAQGSSPRPSILRKKPATDGMAVRKTLIPPQPPDVASPRVESSMRSTSGSPRPAGAKPKSEIHVSMATPVTVSMETVSNQNNDQPTIAVPPTAQQPPPTIPTMIAAASPPSQPAVALSTIPGAVPITPPITTIAAAPPPSVTVGGSLSSVLGPPVPEIKVKEEVEPMDIMRPVSAVPPLATNTVSPSLALLANNLSMPTSDLPPGASPRKKPRKQQHVISTEEGDMMETNSTDDEKSTAKSLLVKAEKRKSPPKEYIDEEGVRYVPVRPRPPITLLRHYRNPWKAAYHHFQRYSDVRVKEEKKAMLQEIANQKGVSCRAQGWKVHLCAAQLLQLTNLEHDVYERLTNLQEGIIPKKKAATDDDLHRINELIQGNMQRCKLVMDQISEARDSMLKVLDHKDRVLKLLNKNGTVKKVSKLKRKEKV

SEQ ID NO: 79284 - protein, 1048 aa, Homo sapiens
  Payload ID: 15791
  Gene Symbol: SAP130
  Gene Name: Sin3A-associated protein, 130kDa
  Uniprot ID: Q9H0E3
  ENSP ID: ENSP00000259235
MGPPRHPQAGEIEAGGAGGGRRLQVEMSSQQFPRLGAPSTGLSQAPSQIANSGSAGLINPAATVNDESGRDSEVSAREHMSSSSSLQSREEKQEPVVVRPYPQVQMLSTHHAVASATPVAVTAPPAHLTPAVPLSFSEGLMKPPPKPTMPSRPIAPAPPSTLSLPPKVPGQVTVTMESSIPQASAIPVATISGQQGHPSNLHHIMTTNVQMSIIRSNAPGPPLHIGASHLPRGAAAAAVMSSSKVTTVLRPTSQLPNAATAQPAVQHIIHQPIQSRPPVTTSNAIPPAVVATVSATRAQSPVITTTAAHATDSALSRPTLSIQHPPSAAISIQRPAQSRDVTTRITLPSHPALGTPKQQLHTMAQKTIFSTGTPVAAATVAPILATNTIPSATTAGSVSHTQAPTSTIVTMTVPSHSSHATAVTTSNIPVAKVVPQQITHTSPRIQPDYPAERSSLIPISGHRASPNPVAMETRSDNRPSVPVQFQYFLPTYPPSAYPLAAHTYTPITSSVSTIRQYPVSAQAPNSAITAQTGVGVASTVHLNPMQLMTVDASHARHIQGIQPAPISTQGIQPAPIGTPGIQPAPLGTQGIHSATPINTQGLQPAPMGTQQPQPEGKTSAVVLADGATIVANPISNPFSAAPAATTVVQTHSQSASTNAPAQGSSPRPSILRKKPATDGAKPKSEIHVSMATPVTVSMETVSNQNNDQPTIAVPPTAQQPPPTIPTMIAAASPPSQPAVALSTIPGAVPITPPITTIAAAPPPSVTVGGSLSSVLGPPVPEIKVKEEVEPMDIMRPVSAVPPLATNTVSPSLALLANNLSMPTSDLPPGASPRKKPRKQQHVISTEEGDMMETNSTDDEKSTAKSLLVKAEKRKSPPKEYIDEEGVRYVPVRPRPPITLLRHYRNPWKAAYHHFQRYSDVRVKEEKKAMLQEIANQKGVSCRAQGWKVHLCAAQLLQLTNLEHDVYERLTNLQEGIIPKKKAATDDDLHRINELIQGNMQRCKLVMDQISEARDSMLKVLDHKDRVLKLLNKNGTVKKVSKLKRKEKV

SEQ ID NO: 79285 - protein, 1083 aa, Homo sapiens
  Payload ID: 15791
  Gene Symbol: SAP130
  Gene Name: Sin3A-associated protein, 130kDa
  Uniprot ID: Q9H0E3
  ENSP ID: ENSP00000350333
MGPPRHPQAGEIEAGGAGGGRRLQVEMSSQQFPRLGAPSTGLSQAPSQIANSGSAGLINPAATVNDESGRDSEVSAREHMSSSSSLQSREEKQEPVVVRPYPQVQMLSTHHAVASATPVAVTAPPAHLTPAVPLSFSEGLMKPPPKPTMPSRPIAPAPPSTLSLPPKVPGQVTVTMESSIPQASAIPVATISGQQGHPSNLHHIMTTNVQMSIIRSNAPGPPLHIGASHLPRGAAAAAVMSSSKVTTVLRPTSQLPNAATAQPAVQHIIHQPIQSRPPVTTSNAIPPAVVATVSATRAQSPVITTTAAHATDSALSRPTLSIQHPPSAAISIQRPAQSRDVTTRITLPSHPALGTPKQQLHTMAQKTIFSTGTPVAAATVAPILATNTIPSATTAGSVSHTQAPTSTIVTMTVPSHSSHATAVTTSNIPVAKVVPQQITHTSPRIQPDYPAERSSLIPISGHRASPNPVAMETRSDNRPSVPVQFQYFLPTYPPSAYPLAAHTYTPITSSVSTIRQYPVSAQAPNSAITAQTGVGVASTVHLNPMQLMTVDASHARHIQGIQPAPISTQGIQPAPIGTPGIQPAPLGTQGIHSATPINTQGLQPAPMGTQQPQPEGKTSAVVLADGATIVANPISNPFSAAPAATTVVQTHSQSASTNAPAQGSSPRPSILRKKPATDGMAVRKTLIPPQPPDVASPRVESSMRSTSGSPRPAGAKPKSEIHVSMATPVTVSMETVSNQNNDQPTIAVPPTAQQPPPTIPTMIAAASPPSQPAVALSTIPGAVPITPPITTIAAAPPPSVTVGGSLSSVLGPPVPEIKVKEEVEPMDIMRPVSAVPPLATNTVSPSLALLANNLSMPTSDLPPGASPRKKPRKQQHVISTEEGDMMETNSTDDEKSTAKSLLVKAEKRKSPPKEYIDEEGVRYVPVRPRPPITLLRHYRNPWKAAYHHFQRYSDVRVKEEKKAMLQEIANQKGVSCRAQGWKVHLCAAQLLQLTNLEHDVYERLTNLQEGIIPKKKAATDDDLHRINELIQGNMQRCKLVMDQISEARDSMLKVLDHKDRVLKLLNKNGTVKKVSKLKRKEKV

SEQ ID NO: 79286 - protein, 262 aa, Homo sapiens
  Payload ID: 15791
  Gene Symbol: SAP130
  Gene Name: Sin3A-associated protein, 130kDa
  ENSP ID: ENSP00000411634
MSSQQFPRLGAPSTGLSQAPSQIANSGSAGLINPAATVNDESGRDSEVSAREHMSSSSSLQSREEKQEPVVVRPYPQVQMLSTHHAVASATPVAVTAPPAHLTPAVPLSFSEGLMKPPPKPTMPSRPIAPAPPSTLSLPPKVPGQVTVTMESSIPQASAIPVATISGQQGHPSNLHHIMTTNVQMSIIRSNAPGPPLHIGASHLPRGAAAAAVMSSSKVTTVLRPTSQLPNAATAQPAVQHIIHQPIQSRPPVTTSNAIPPA

SEQ ID NO: 79287 - protein, 144 aa, Homo sapiens
  Payload ID: 15791
  Gene Symbol: SAP130
  Gene Name: Sin3A-associated protein, 130kDa
  ENSP ID: ENSP00000414593
MSSQQFPRLGAPSTGLSQAPSQIANSGSAGLINPAATVNDESGRDSEVSAREHMSSSSSLQSREEKQEPVVVRPYPQVQMLSTHHAVASATPVAVTAPPAHLTPAVPLSFSEGLMKVPGQVTVTMESSIPQASAIPVATISGQQ

SEQ ID NO: 79288 - protein, 172 aa, Homo sapiens
  Payload ID: 15792
  Gene Symbol: SAP18
  Gene Name: Sin3A-associated protein, 18kDa
  ENSP ID: ENSP00000371973
MLAAGVGGQGERLAGRRRKMAVESRVTQEEIKKEPEKPIDREKTCPLLLRVFTTNNGRHHRMDEFSRGNVPSSELQIYTWMDATLKELTSLVKEVYPEARKKGTHFNFAIVFTDVKRPGYRVKEIGSTMSGRKGTDDSMTLQSQKFQIGDYLDIAITPPNRAPPPSGRMRPY

SEQ ID NO: 79289 - protein, 143 aa, Homo sapiens
  Payload ID: 15792
  Gene Symbol: SAP18
  Gene Name: Sin3A-associated protein, 18kDa
  ENSP ID: ENSP00000391846
MSSGFAAGVFNFCPSVFSLPQTCPLLLRVFTTNNGRHHRMDEFSRGNVPSSELQIYTWMDATLKELTSLVKEVYPEARKKGTHFNFAIVFTDVKRPGYRVKEIGSTMSGRKGTDDSMTLQSQKFQIGDYLDIAITPPNRAPPP

SEQ ID NO: 79290 - protein, 78 aa, Homo sapiens
  Payload ID: 15792
  Gene Symbol: SAP18
  Gene Name: Sin3A-associated protein, 18kDa
  ENSP ID: ENSP00000475358
TCPLLLRVFTTNNGRHHRMDEFSRGNVPSSELQIYTWMDATLKELTSLVKEVYPEARKKGTHFNFAIVFTDVKRPGYR

SEQ ID NO: 79291 - protein, 59 aa, Homo sapiens
  Payload ID: 15792
  Gene Symbol: SAP18
  Gene Name: Sin3A-associated protein, 18kDa
  ENSP ID: ENSP00000475435
  MOD_RES (1)..(1): Any amino acid
XVESRVTQEEIKKEPEKPIDREKTCPLLLRVFTTNNGRHHRMDEFSRGNVPSSELQIYT

SEQ ID NO: 79292 - protein, 153 aa, Homo sapiens
  Payload ID: 15792
  Gene Symbol: SAP18
  Gene Name: Sin3A-associated protein, 18kDa
  Uniprot ID: O00422
  ENSP ID: ENSP00000475925
MAVESRVTQEEIKKEPEKPIDREKTCPLLLRVFTTNNGRHHRMDEFSRGNVPSSELQIYTWMDATLKELTSLVKEVYPEARKKGTHFNFAIVFTDVKRPGYRVKEIGSTMSGRKGTDDSMTLQSQKFQIGDYLDIAITPPNRAPPPSGRMRPY

SEQ ID NO: 79293 - protein, 172 aa, Homo sapiens; identical to SEQ ID NO: 79288
  Payload ID: 15792
  Gene Symbol: SAP18
  Gene Name: Sin3A-associated protein, 18kDa
  ENSP ID: ENSP00000481842

SEQ ID NO: 79294 - protein, 199 aa, Homo sapiens
  Payload ID: 15793
  Gene Symbol: SAP25
  Gene Name: Sin3A-associated protein, 25kDa
  Uniprot ID: Q8TEE9
  ENSP ID: ENSP00000442339
MTPLAPWDPKYEAKAGPRPVWGANCSSGASFSGRTLCHPSFWPLYEAASGRGLRPVAPATGHWNGQQAPPDAGFPVVCCEDVFLSDPLLPRGQRVPLYLSKAPQQMMGSLKLLPPPPIMSARVLPRPSPSRGPSTAWLSGPELIALTGLLQMSQGEPRPSSSAVGPPDHTSDPPSPCGSPSSSQGADLSLPQTPDTHCP

SEQ ID NO: 79295 - protein, 199 aa, Homo sapiens; identical to SEQ ID NO: 79294
  Payload ID: 15793
  Gene Symbol: SAP25
  Gene Name: Sin3A-associated protein, 25kDa
  Uniprot ID: Q8TEE9
  ENSP ID: ENSP00000481351

SEQ ID NO: 79296 - protein, 297 aa, Homo sapiens
  Payload ID: 15793
  Gene Symbol: SAP25
  Gene Name: Sin3A-associated protein, 25kDa
  ENSP ID: ENSP00000481773
MLPWSPPRWGAGPEEAPEGPGLPAGKDQGEPWSAGADAPRELGTPPWDSPQPPSRSPSWIWREQLLLPHHLPGPATEQPPGAPDPRSPQVAWEVAPSRMTPLAPWDPKYEAKAGPRPVWGANCSSGASFSGRTLCHPSFWPLYEAASGRGLRPVAPATGHWNGQQAPPDAGFPVVCCEDVFLSDPLLPRGQRVPLYLSKAPQQMMGSLKLLPPPPIMSARVLPRPSPSRGPSTAWLSGPELIALTGLLQMSQGEPRPSSSAVGPPDHTSDPPSPCGSPSSSQGADLSLPQTPDTHCP

SEQ ID NO: 79297 - protein, 220 aa, Homo sapiens
  Payload ID: 15794
  Gene Symbol: SAP30
  Gene Name: Sin3A-associated protein, 30kDa
  Uniprot ID: O75446
  ENSP ID: ENSP00000296504
MNGFTPDEMSRGGDAAAAVAAVVAAAAAAASAGNGTGAGTGAEVPGAGAVSAAGPPGAAGPGPGQLCCLREDGERCGRAAGNASFSKRIQKSISQKKVKIELDKSARHLYICDYHKNLIQSVRNRRKRKGSDDDGGDSPVQDIDTPEVDLYQLQVNTLRRYKRHFKLPTRPGLNKAQLVEIVGCHFRSIPVNEKDTLTYFIYSVKNDKNKSDLKVDSGVH

SEQ ID NO: 79298 - protein, 873 aa, Homo sapiens
  Payload ID: 15795
  Gene Symbol: SOBP
  Gene Name: sine oculis binding protein homolog
  Uniprot ID: A7XYQ1
  ENSP ID: ENSP00000318900
MAEMEKEGRPPENKRSRKPAHPVKREINEEMKNFAENTMNELLGWYGYDKVELKDGEDIEFRSYPTDGESRQHISVLKENSLPKPKLPEDSVISPYNISTGYSGLATGNGLSDSPAGSKDHGSVPIIVPLIPPPFIKPPAEDDVSNVQIMCAWCQKVGIKRYSLSMGSEVKSFCSEKCFAACRRAYFKRNKARDEDGHAENFPQQHYAKETPRLAFKNNCELLVCDWCKHIRHTKEYLDFGDGERRLQFCSAKCLNQYKMDIFYKETQANLPAGLCSTLHPPMENKAEGTGVQLLTPDSWNIPLTDARRKAPSPVATAGQSQGPGPSASTTVSPSDTANCSVTKIPTPVPKSIPISETPNIPPVSVQPPASIGPPLGVPPRSPPMVMTNRGPVPLPIFMEQQIMQQIRPPFIRGPPHHASNPNSPLSNPMLPGIGPPPGGPRNLGPTSSPMHRPMLSPHIHPPSTPTMPGNPPGLLPPPPPGAPLPSLPFPPVSMMPNGPMPVPQMMNFGLPSLAPLVPPPTLLVPYPVIVPLPVPIPIPIPIPHVSDSKPPNGFSSNGENFIPNAPGDSAAAGGKPSGHSLSPRDSKQGSSKSADSPPGCSGQALSLAPTPAEHGRSEVVDLTRRAGSPPGPPGAGGQLGFPGVLQGPQDGVIDLTVGHRARLHNVIHRALHAHVKAEREPSAAERRTCGGCRDGHCSPPAAGDPGPGAPAGPEAAAACNVIVNGTRGAAAEGAKSAEPPPEQPPPPPPPAPPKKLLSPEEPAVSELESVKENNCASNCHLDGEAAKKLMGEEALAGGDKSDPNLNNPADEDHAYALRMLPKTGCVIQPVPKPAEKAAMAPCIISSPMLSAGPEDLEPPLKRRCLRIRNQNK

SEQ ID NO: 79299 - protein, 149 aa, Homo sapiens
  Payload ID: 15795
  Gene Symbol: SOBP
  Gene Name: sine oculis binding protein homolog
  ENSP ID: ENSP00000478366
MAEMEKEGRPPENKRSRKPAHPVKREINEEMKNFAENTMNELLGWYGYDKVELKDGEDIEFRSYPTDGESRQHISVLKENSLPKPKLPEDSVISPYNISTGYSGLATGNGLSDSPAGSKDHGSVPIIVPLIPPPFIKPPADEKTEAQKS

SEQ ID NO: 79300 - protein, 410 aa, Homo sapiens
  Payload ID: 15796
  Gene Symbol: SIGIRR
  Gene Name: single immunoglobulin and toll-interleukin 1 receptor (TIR) domain
  Uniprot ID: Q6IA17
  ENSP ID: ENSP00000333656
MPGVCDRAPDFLSPSEDQVLRPALGSSVALNCTAWVVSGPHCSLPSVQWLKDGLPLGIGGHYSLHEYSWVKANLSEVLVSSVLGVNVTSTEVYGAFTCSIQNISFSSFTLQRAGPTSHVAAVLASLLVLLALLLAALLYVKCRLNVLLWYQDAYGEVEINDGKLYDAYVSYSDCPEDRKFVNFILKPQLERRRGYKLFLDDRDLLPRAEPSADLLVNLSRCRRLIVVLSDAFLSRAWCSHSFREGLCRLLELTRRPIFITFEGQRRDPAHPALRLLRQHRHLVTLLLWRPGSVTPSSDFWKEVQLALPRKVQYRPVEGDPQTQLQDDKDPMLILRGRVPEGRALDSEVDPDPEGDLGVRGPVFGEPSAPPHTSGVSLGESRSSEVDVSDLGSRNYSARTDFYCLVSKDDM

SEQ ID NO: 79301 - protein, 410 aa, Homo sapiens; identical to SEQ ID NO: 79300
  Payload ID: 15796
  Gene Symbol: SIGIRR
  Gene Name: single immunoglobulin and toll-interleukin 1 receptor (TIR) domain
  Uniprot ID: Q6IA17
  ENSP ID: ENSP00000380756

SEQ ID NO: 79302 - protein, 410 aa, Homo sapiens; identical to SEQ ID NO: 79300
  Payload ID: 15796
  Gene Symbol: SIGIRR
  Gene Name: single immunoglobulin and toll-interleukin 1 receptor (TIR) domain
  Uniprot ID: Q6IA17
  ENSP ID: ENSP00000403104

SEQ ID NO: 79303 - protein, 57 aa, Homo sapiens
  Payload ID: 15796
  Gene Symbol: SIGIRR
  Gene Name: single immunoglobulin and toll-interleukin 1 receptor (TIR) domain
  ENSP ID: ENSP00000431698
MRQASWCHQGWATGVCDRAPDFLSPSEDQVLRPALGSSVALNCTAWVVSGPHCSLPS

SEQ ID NO: 79304 - protein, 504 aa, Homo sapiens
  Payload ID: 15796
  Gene Symbol: SIGIRR
  Gene Name: single immunoglobulin and toll-interleukin 1 receptor (TIR) domain
  ENSP ID: ENSP00000433022
MPGVCDRAPDFLSPSEDQVLRPALGSSVALNCTAWVVSGPHCSLPSVQWLKDGLPLGIGGHYSLHEYSWVKANLSEVLVSSVLGVNVTSTEVYGAFTCSIQNISFSSFTLQRAGPTSHVAAVLASLLVLLALLLAALLYVKCRLNVLLWYQDAYGEVEINDGKLYDAYVSYSDCPEDRKFVNFILKPQLERRRGYKLFLDDRDLLPRAEPSADLLVNLSRCRRLIVVLSDAFLSRAWCSHSFREGLCRLLELTRRPIFITFEGQRRDPAHPALRLLRQHRHLVTLLLWRPGSVTPSSDFWKEVQLALPRKVQYRPVEGDPQTQLQDDKDPMLILRGRVPEGRALDSEVDPDPEGDLGMPAQPHSPTGEAQHRAEWGQAQGTGPGGAPGVEDSSRHREPLHGLCPGGARPSVCLGTSWASQAITAGGEQGQPLAVGLGQGCGWPPQASRSPHPRCPGACLWRAISSTAHQWGLAGREPEQRSGRLGSRLAKLQCPHRLLLPGVQG

SEQ ID NO: 79305 - protein, 142 aa, Homo sapiens
  Payload ID: 15796
  Gene Symbol: SIGIRR
  Gene Name: single immunoglobulin and toll-interleukin 1 receptor (TIR) domain
  ENSP ID: ENSP00000433530
  MOD_RES (1)..(1): Any amino acid
XPLPTPHRGAFGRLPEPGLVQPQLPTPSSDFWKEVQLALPRKVQYRPVEGDPQTQLQDDKDPMLILRGRVPEGRALDSEVDPDPEGDLGVRGPVFGEPSAPPHTSGVSLGESRSSEVDVSDLGSRNYSARTDFYCLVSKDDM

SEQ ID NO: 79306 - protein, 143 aa, Homo sapiens
  Payload ID: 15796
  Gene Symbol: SIGIRR
  Gene Name: single immunoglobulin and toll-interleukin 1 receptor (TIR) domain
  ENSP ID: ENSP00000434030
MPGVCDRAPDFLSPSEDQVLRPALGSSVALNCTAWVVSGPHCSLPSVQWLKDGLPLGIGGHYSLHEYSWPYKPRGCGAGLPPGPAGPAAGRPALCQVPSQRAALVPGRVWGGGDKRDCPEDRKFVNFILKPQLERRRGYKLFL

SEQ ID NO: 79307 - protein, 130 aa, Homo sapiens
  Payload ID: 15796
  Gene Symbol: SIGIRR
  Gene Name: single immunoglobulin and toll-interleukin 1 receptor (TIR) domain
  ENSP ID: ENSP00000434164
PDPEGDLGMPAQPHSPTGEAQHRAEWGQAQGTGPGGAPGVEDSSRHREPLHGLCPGGARPSVCLGTSWASQAITAGGVRGPVFGEPSAPPHTSGVSLGESRSSEVDVSDLGSRNYSARTDFYCLVSKDDM

SEQ ID NO: 79308 - protein, 189 aa, Homo sapiens
  Payload ID: 15796
  Gene Symbol: SIGIRR
  Gene Name: single immunoglobulin and toll-interleukin 1 receptor (TIR) domain
  ENSP ID: ENSP00000435135
MGPSPAPSRTSASPPSLFRELALQATWLRCWPPSWSCWPCCWPPCSMSSAVSTCCSDGKLYDAYVSYSDCPEDRKFVNFILKPQLERRRGYKLFLDDRDLLPRAEPSADLLVNLSRCRRLIVVLSDAFLSRAWCSHSFREGLCRLLELTRRPIFITFEGQRRDPAHPALRLLRQHRHLVTLLLWRPGSV

SEQ ID NO: 79309 - protein, 368 aa, Homo sapiens
  Payload ID: 15797
  Gene Symbol: SSBP3
  Gene Name: single stranded DNA binding protein 3
  Uniprot ID: Q9BWW4
  ENSP ID: ENSP00000350067
MFAKGKGSAVPSDGQAREKLALYVYEYLLHVGAQKSAQTFLSEIRWEKNITLGEPPGFLHSWWCVFWDLYCAAPERRDTCEHSSEAKAFHDYSAAAAPSPVLGNIPPNDGMPGGPIPPGFFQGPPGSQPSPHAQPPPHNPSSMMGPHSQPPGGVPGTQPLLPNSMDPTRQQGHPNMGGSMQRMNPPRGMGPMGPGPQNYGSGMRPPPNSLGPAMPGINMGPGAGRPWPNPNSANSIPYSSSSPGTYVGPPGGGGPPGTPIMPSPADSTNSSDNIYTMINPVPPGGSRSNFPMGPGSDGPMGGMGGMEPHHMNGSLGSGDIDGLPKNSPNNISGISNPPGTPRDDGELGGNFLHSFQNDNYSPSMTMSV

SEQ ID NO: 79310 - protein, 361 aa, Homo sapiens
  Payload ID: 15797
  Gene Symbol: SSBP3
  Gene Name: single stranded DNA binding protein 3
  Uniprot ID: Q9BWW4
  ENSP ID: ENSP00000360370
MFAKGKGSAVPSDGQAREKLALYVYEYLLHVGAQKSAQTFLSEIRWEKNITLGEPPGFLHSWWCVFWDLYCAAPERRDTCEHSSEAKAFHDYSAAAAPSPVLGNIPPNDGMPGGPIPPGFFQPFMSPRYAGGPRPPIRMGNQPPGGVPGTQPLLPNSMDPTRQQGHPNMGGSMQRMNPPRGMGPMGPGPQNYGSGMRPPPNSLGPAMPGINMGPGAGRPWPNPNSANSIPYSSSSPGTYVGPPGGGGPPGTPIMPSPADSTNSSDNIYTMINPVPPGGSRSNFPMGPGSDGPMGGMGGMEPHHMNGSLGSGDIDGLPKNSPNNISGISNPPGTPRDDGELGGNFLHSFQNDNYSPSMTMSV

SEQ ID NO: 79311 - protein, 388 aa, Homo sapiens
  Payload ID: 15797
  Gene Symbol: SSBP3
  Gene Name: single stranded DNA binding protein 3
  Uniprot ID: Q9BWW4
  ENSP ID: ENSP00000360371
MFAKGKGSAVPSDGQAREKLALYVYEYLLHVGAQKSAQTFLSEIRWEKNITLGEPPGFLHSWWCVFWDLYCAAPERRDTCEHSSEAKAFHDYSAAAAPSPVLGNIPPNDGMPGGPIPPGFFQGPPGSQPSPHAQPPPHNPSSMMGPHSQPFMSPRYAGGPRPPIRMGNQPPGGVPGTQPLLPNSMDPTRQQGHPNMGGSMQRMNPPRGMGPMGPGPQNYGSGMRPPPNSLGPAMPGINMGPGAGRPWPNPNSANSIPYSSSSPGTYVGPPGGGGPPGTPIMPSPADSTNSSDNIYTMINPVPPGGSRSNFPMGPGSDGPMGGMGGMEPHHMNGSLGSGDIDGLPKNSPNNISGISNPPGTPRDDGELGGNFLHSFQNDNYSPSMTMSV

SEQ ID NO: 79312 - protein, 156 aa, Homo sapiens
  Payload ID: 15797
  Gene Symbol: SSBP3
  Gene Name: single stranded DNA binding protein 3
  ENSP ID: ENSP00000405880
PPGGVPGTQPLLPNSMDPTRQQGHPNMGGSMQRMNPPRGMGPMGPGPQNYGSGMRPPPNSLGPAMPGINMGPGAGRPWPNPNSANSIPYSSSSPGTYVGPPGGGGPPGTPIMPSPADSTNSSDNIYTMINPVPPGGSRSNVSLLSNNLHIRHHNKS

SEQ ID NO: 79313 - protein, 278 aa, Homo sapiens
  Payload ID: 15797
  Gene Symbol: SSBP3
  Gene Name: single stranded DNA binding protein 3
  ENSP ID: ENSP00000414361
MPGGPIPPGFFQGPPGSQPSPHAQPPPHNPSSMMGPHSQPFMSPRYAGGPRPPIRMGNQPPGGVPGTQPLLPNSMDPTRQQGHPNMGGSMQRMNPPRGMGPMGPGPQNYGSGMRPPPNSLGPAMPGINMGPGAGRPWPNPNSANSIPYSSSSPGTYVGPPGGGGPPGTPIMPSPADSTNSSDNIYTMINPVPPGGSRSNFPMGPGSDGPMGGMGGMEPHHMNGSLGSGDIDGLPKNSPNNISGISNPPGTPRDDGELGGNFLHSFQNDNYSPSMTMSV

SEQ ID NO: 79314 - protein, 101 aa, Homo sapiens
  Payload ID: 15797
  Gene Symbol: SSBP3
  Gene Name: single stranded DNA binding protein 3
  ENSP ID: ENSP00000431654
MPGGPIPPGFFQPFMSPRYAGGPRPPIRMGNQPPGGVPGTQPLLPNSMDPTRQQGHPNMGGSMQRMNPPRGMGPMGPGPQNYGSGMRPPPNSLGPAMPGIN

SEQ ID NO: 79315 - protein, 361 aa, Homo sapiens
  Payload ID: 15797
  Gene Symbol: SSBP3
  Gene Name: single stranded DNA binding protein 3
  ENSP ID: ENSP00000479674
AVPSDGQAREKLALYVYEYLLHVGAQKSAQTFLSEIRWEKNITLGEPPGFLHSWWCVFWDLYCAAPERRDTCEHSSEAKAFHDYSAAAAPSPVLGNIPPNDGMPGGPIPPGFFQPFMSPRYAGGPRPPIRMGNQPPGGVPGTQPLLPNSMDPTRQQGHPNMGGSMQRMNPPRGMGPMGPGPQNYGSGMRPPPNSLGPAMPGINMGPGAGRPWPNPNSANSIPYSSSSPGTYVGPPGGGGPPGTPIMPSPADSTNSSDNIYTMINPVPPGGSRSNFPMGPGSDGPMGGMGGMEPHHMNGSLGSGDIDGLPKNSPNNISGISNPPGTPRDDGELGGNFLHSFQNDNYSPSMTMSVSPLLRDAE

SEQ ID NO: 79316 - protein, 363 aa, Homo sapiens
  Payload ID: 15798
  Gene Symbol: SSBP4
  Gene Name: single stranded DNA binding protein 4
  Uniprot ID: Q9BWG4
  ENSP ID: ENSP00000252807
MYAKGGKGSAVPSDSQAREKLALYVYEYLLHIGAQKSAQTFLSEIRWEKNITLGEPPGFLHSWWCVFWDLYCAAPDRREACEHSGEAKAFQDYSAAAAPSPVMGSMAPGDTMAAGSMAAGFFQPFMSPRFPGGPRPTLRMPSQPPAGLPGSQPLLPGAMEPSPRAQGHPSMGGPMQRVTPPRGMASVGPQSYGGGMRPPPNSLAGPGLPAMNMGPGVRGPWASPSGNSIPYSSSSPGSYTGPPGGGGPPGTPIMPSPGDSTNSSENMYTIMNPIGQGAGRANFPLGPGPEGPMAAMSAMEPHHVNGSLGSGDMDGLPKSSPGAVAGLSNAPGTPRDDGEMAAAGTFLHPFPSESYSPGMTMSV

SEQ ID NO: 79317 - protein, 385 aa, Homo sapiens
  Payload ID: 15798
  Gene Symbol: SSBP4
  Gene Name: single stranded DNA binding protein 4
  Uniprot ID: Q9BWG4
  ENSP ID: ENSP00000270061
MYAKGGKGSAVPSDSQAREKLALYVYEYLLHIGAQKSAQTFLSEIRWEKNITLGEPPGFLHSWWCVFWDLYCAAPDRREACEHSGEAKAFQDYSAAAAPSPVMGSMAPGDTMAAGSMAAGFFQGPPGSQPSPHNPNAPMMGPHGQPFMSPRFPGGPRPTLRMPSQPPAGLPGSQPLLPGAMEPSPRAQGHPSMGGPMQRVTPPRGMASVGPQSYGGGMRPPPNSLAGPGLPAMNMGPGVRGPWASPSGNSIPYSSSSPGSYTGPPGGGGPPGTPIMPSPGDSTNSSENMYTIMNPIGQGAGRANFPLGPGPEGPMAAMSAMEPHHVNGSLGSGDMDGLPKSSPGAVAGLSNAPGTPRDDGEMAAAGTFLHPFPSESYSPGMTMSV

SEQ ID NO: 79318 - protein, 53 aa, Homo sapiens
  Payload ID: 15798
  Gene Symbol: SSBP4
  Gene Name: single stranded DNA binding protein 4
  ENSP ID: ENSP00000472975
MYAKGGKGSAVPSDSQAREKYCLSLSLPSRTWPPGQGPGVCTAQKALHGCWRN

SEQ ID NO: 79319 - protein, 206 aa, Homo sapiens
  Payload ID: 15798
  Gene Symbol: SSBP4
  Gene Name: single stranded DNA binding protein 4
  ENSP ID: ENSP00000475352
  MOD_RES (1)..(1): Any amino acid
XPAMNMGPGVRGPWASPSGNSIPYSSSSPGSYTGPPGGGGPPGTPIMPSPGDSTNSSENMYTIMNPIGQGAGRANFPLGPGPEGPMAAMSAMEPHHVNGSLGSGDMDGLPKSSPGAVAGLSNAPGTPRDDGEMAAAGTFLHPFPSESVSDCVDSPPAAASGRRGWRAGPGGAAGGPEQDRDRGGPVLARDDHERVMGRQPRASLRA

SEQ ID NO: 79320 - protein, 234 aa, Homo sapiens
  Payload ID: 15798
  Gene Symbol: SSBP4
  Gene Name: single stranded DNA binding protein 4
  ENSP ID: ENSP00000475538
MGLSAVVPAAGYTFAVWSAMLSVAANVCGWVYNNVGGRLHLRLALYVYEYLLHIGAQKSAQTFLSEIRWEKNITLGEPPGFLHSWWCVFWDLYCAAPDRREACEHSGEAKAFQDYSAAAAPSPVMGSMAPGDTMAAGSMAAGFFQPFMSPRFPGGPRPTLRMPSQPPAGLPGSQPLLPGAMEPSPRAQGHPSMGGPMQRVTPPRGMASVGPQSYGGGMRPPPNSLAGPGLPAMN

SEQ ID NO: 79321 - protein, 56 aa, Homo sapiens
  Payload ID: 15798
  Gene Symbol: SSBP4
  Gene Name: single stranded DNA binding protein 4
  ENSP ID: ENSP00000475668
MGSMAPGDTMAAGSMAAGFFQPFMSPRFPGGPRPTLRMPSQPPAGLPGSQPLLPGA

SEQ ID NO: 79322 - protein, 117 aa, Homo sapiens
  Payload ID: 15798
  Gene Symbol: SSBP4
  Gene Name: single stranded DNA binding protein 4
  ENSP ID: ENSP00000476084
MGSMAPGDTMAAGSMAAGFFQPFMSPRFPGGPRPTLRMPSQPPAGLPGSQPLLPGAMEPSPRAQGHPSMGGPMQRVTPPRGMASVGPQSYGGGMRPPPNSLAGPGLPAMNMGPGVRG

SEQ ID NO: 79323 - protein, 54 aa, Homo sapiens
  Payload ID: 15798
  Gene Symbol: SSBP4
  Gene Name: single stranded DNA binding protein 4
  ENSP ID: ENSP00000476092
MYAKGGKGSAVPSDSQAREKLALYVYEYLLHIGAQKSAQTFLSERLLGPVLRGA

SEQ ID NO: 79324 - protein, 71 aa, Homo sapiens
  Payload ID: 15798
  Gene Symbol: SSBP4
  Gene Name: single stranded DNA binding protein 4
  ENSP ID: ENSP00000476567
MAPARLSRCPCLSVSVGSGDMDGLPKSSPGAVAGLSNAPGTPRDDGEMAAAGTFLHPFPSESYSPGMTMSV

SEQ ID NO: 79325 - protein, 53 aa, Homo sapiens; identical to SEQ ID NO: 79318
  Payload ID: 15798
  Gene Symbol: SSBP4
  Gene Name: single stranded DNA binding protein 4
  ENSP ID: ENSP00000486132

SEQ ID NO: 79326 - protein, 766 aa, Homo sapiens
  Payload ID: 15799
  Gene Symbol: SIM1
  Gene Name: single-minded family bHLH transcription factor 1
  Uniprot ID: P81133
  ENSP ID: ENSP00000262901
MKEKSKNAARTRREKENSEFYELAKLLPLPSAITSQLDKASIIRLTTSYLKMRVVFPEGLGEAWGHSSRTSPLDNVGRELGSHLLQTLDGFIFVVAPDGKIMYISETASVHLGLSQVELTGNSIYEYIHPADHDEMTAVLTAHQPYHSHFVQEYEIERSFFLRMKCVLAKRNAGLTCGGYKVIHCSGYLKIRQYSLDMSPFDGCYQNVGLVAVGHSLPPSAVTEIKLHSNMFMFRASLDMKLIFLDSRVAELTGYEPQDLIEKTLYHHVHGCDTFHLRCAHHLLLVKGQVTTKYYRFLAKHGGWVWVQSYATIVHNSRSSRPHCIVSVNYVLTDTEYKGLQLSLDQISASKPAFSYTSSSTPTMTDNRKGAKSRLSSSKSKSRTSPYPQYSGFHTERSESDHDSQWGGSPLTDTASPQLLDPADRPGSQHDASCAYRQFSDRSSLCYGFALDHSRLVEERHFHTQACEGGRCEAGRYFLGTPQAGREPWWGSRAALPLTKASPESREAYENSMPHIASVHRIHGRGHWDEDSVVSSPDPGSASESGDRYRTEQYQSSPHEPSKIETLIRATQQMIKEEENRLQLRKAPSDQLASINGAGKKHSLCFANYQQPPPTGEVCHGSALANTSPCDHIQQREGKMLSPHENDYDNSPTALSRISSPNSDRISKSSLILAKDYLHSDISPHQTAGDHPTVSPNCFGSHRQYFDKHAYTLTGYALEHLYDSETIRNYSLGCNGSHFDVTSHLRMQPDPAQGHKGTSVIITNGS

SEQ ID NO: 79327 - protein, 766 aa, Homo sapiens; identical to SEQ ID NO: 79326
  Payload ID: 15799
  Gene Symbol: SIM1
  Gene Name: single-minded family bHLH transcription factor 1
  Uniprot ID: P81133
  ENSP ID: ENSP00000358210

SEQ ID NO: 79328 - protein, 667 aa, Homo sapiens
  Payload ID: 15800
  Gene Symbol: SIM2
  Gene Name: single-minded family bHLH transcription factor 2
  Uniprot ID: Q14190
  ENSP ID: ENSP00000290399
MKEKSKNAAKTRREKENGEFYELAKLLPLPSAITSQLDKASIIRLTTSYLKMRAVFPEGLGDAWGQPSRAGPLDGVAKELGSHLLQTLDGFVFVVASDGKIMYISETASVHLGLSQVELTGNSIYEYIHPSDHDEMTAVLTAHQPLHHHLLQEYEIERSFFLRMKCVLAKRNAGLTCSGYKVIHCSGYLKIRQYMLDMSLYDSCYQIVGLVAVGQSLPPSAITEIKLYSNMFMFRASLDLKLIFLDSRVTEVTGYEPQDLIEKTLYHHVHGCDVFHLRYAHHLLLVKGQVTTKYYRLLSKRGGWVWVQSYATVVHNSRSSRPHCIVSVNYVLTEIEYKELQLSLEQVSTAKSQDSWRTALSTSQETRKLVKPKNTKMKTKLRTNPYPPQQYSSFQMDKLECGQLGNWRASPPASAAAPPELQPHSESSDLLYTPSYSLPFSYHYGHFPLDSHVFSSKKPMLPAKFGQPQGSPCEVARFFLSTLPASGECQWHYANPLVPSSSSPAKNPPEPPANTARHSLVPSYEAPAAAVRRFGEDTAPPSFPSCGHYREEPALGPAKAARQAARDGARLALARAAPECCAPPTPEAPGAPAQLPFVLLNYHRVLARRGPLGGAAPAASGLACAPGGPEAATGALRLRHPSPAATSPPGAPLPHYLGASVIITNGR

SEQ ID NO: 79329 - protein, 480 aa, Homo sapiens
  Payload ID: 15800
  Gene Symbol: SIM2
  Gene Name: single-minded family bHLH transcription factor 2
  ENSP ID: ENSP00000392003
  MOD_RES (1)..(1): Any amino acid
XWGQPSRAGPLDGVAKELGSHLLQTLDGFVFVVASDGKIMYISETASVHLGLSQVELTGNSIYEYIHPSDHDEMTAVLTAHQPLHHHLLQEYEIERSFFLRMKCVLAKRNAGLTCSGYKVIHCSGYLKIRQYMLDMSLYDSCYQIVGLVAVGQSLPPSAITEIKLYSNMFMFRASLDLKLIFLDSRVTEVTGYEPQDLIEKTLYHHVHGCDVFHLRYAHHLLLVKGQVTTKYYRLLSKRGGWVWVQSYATVVHNSRSSRPHCIVSVNYVLTEIEYKELQLSLEQVSTAKSQDSWRTALSTSQETRKLVKPKNTKMKTKLRTNPYPPQQYSSFQMDKLECGQLGNWRASPPASAAAPPELQPHSESSDLLYTPSYSLPFSYHYGHFPLDSHVFSSKKPMLPAKFGQPQGSPCEVARFFLSTLPASGECQWHYANPLVPSSSSPAKNPPEPPANTARHSLVPSYEGKQMSSAEIPPAPQDAD

SEQ ID NO: 79330 - protein, 73 aa, Homo sapiens
  Payload ID: 15800
  Gene Symbol: SIM2
  Gene Name: single-minded family bHLH transcription factor 2
  ENSP ID: ENSP00000476273
DGKIMYISETASVHLGLSQVELTGNSIYEYIHPSDHDEMTAVLTAHQPLHHHLLQGIPSRGKKKNRLKARRHS

SEQ ID NO: 79331 - protein, 107 aa, Homo sapiens
  Payload ID: 15801
  Gene Symbol: SMDT1
  Gene Name: single-pass membrane protein with aspartate-rich tail 1
  Uniprot ID: Q9H4I9
  ENSP ID: ENSP00000327467
MASGAARWLVLAPVRSGALRSGPSLRKDGDVSAAWSGSGRSLVPSRSVIVTRSGAILPKPVKMSFGLLRVFSIVIPFLYVGTLISKNFAALLEEHDIFVPEDDDDDD

SEQ ID NO: 79332 - protein, 57 aa, Homo sapiens
  Payload ID: 15801
  Gene Symbol: SMDT1
  Gene Name: single-pass membrane protein with aspartate-rich tail 1
  ENSP ID: ENSP00000402623
MASGAARWLVLAPVRSGALRSGPSLRKDGDVSAAWSGSGRSLVPSRCPSAFSVCSPL

SEQ ID NO: 79333 - protein, 107 aa, Homo sapiens; identical to SEQ ID NO: 79331
  Payload ID: 15801
  Gene Symbol: SMDT1
  Gene Name: single-pass membrane protein with aspartate-rich tail 1
  Uniprot ID: Q9H4I9
  ENSP ID: ENSP00000459368

SEQ ID NO: 79334 - protein, 107 aa, Homo sapiens; identical to SEQ ID NO: 79331
  Payload ID: 15801
  Gene Symbol: SMDT1
  Gene Name: single-pass membrane protein with aspartate-rich tail 1
  Uniprot ID: Q9H4I9
  ENSP ID: ENSP00000475471

SEQ ID NO: 79335 - protein, 57 aa, Homo sapiens; identical to SEQ ID NO: 79332
  Payload ID: 15801
  Gene Symbol: SMDT1
  Gene Name: single-pass membrane protein with aspartate-rich tail 1
  ENSP ID: ENSP00000477174

SEQ ID NO: 79336 - protein, 107 aa, Homo sapiens; identical to SEQ ID NO: 79331
  Payload ID: 15801
  Gene Symbol: SMDT1
  Gene Name: single-pass membrane protein with aspartate-rich tail 1
  Uniprot ID: Q9H4I9
  ENSP ID: ENSP00000485029

SEQ ID NO: 79337 - protein, 57 aa, Homo sapiens; identical to SEQ ID NO: 79332
  Payload ID: 15801
  Gene Symbol: SMDT1
  Gene Name: single-pass membrane protein with aspartate-rich tail 1
  ENSP ID: ENSP00000485728

SEQ ID NO: 79338 - protein, 57 aa, Homo sapiens; identical to SEQ ID NO: 79332
  Payload ID: 15801
  Gene Symbol: SMDT1
  Gene Name: single-pass membrane protein with aspartate-rich tail 1
  ENSP ID: ENSP00000487546

SEQ ID NO: 79339 - protein, 214 aa, Homo sapiens
  Payload ID: 15802
  Gene Symbol: SMCO1
  Gene Name: single-pass membrane protein with coiled-coil domains 1
  Uniprot ID: Q147U7
  ENSP ID: ENSP00000380671
MNNETTTLISLKEAMKRVDHKLQALETQFKELDFTKDNLMQKFEHHSKALASQAAQDEMWTAVRALQLTSMELNILYSYVIEVLICLHTRVLEKLPDLVRGLPTLASVLRRKVKNKRVRVVWESILEECGLQEGDITALCTFFIARGNKAEHYTAKVRQMYIRDVTFLITNMVKNQALQDSLLRAVQVIEKGKAVRTPEKQKSSLEELIPSVKN

SEQ ID NO: 79340 - protein, 36 aa, Homo sapiens
  Payload ID: 15802
  Gene Symbol: SMCO1
  Gene Name: single-pass membrane protein with coiled-coil domains 1
  ENSP ID: ENSP00000413102
MNNETTTLISLKEAMKRLLRAIGREQAWVCYSGKME

SEQ ID NO: 79341 - protein, 293 aa, Homo sapiens
  Payload ID: 15803
  Gene Symbol: SMCO2
  Gene Name: single-pass membrane protein with coiled-coil domains 2
  ENSP ID: ENSP00000298876
MALTPTNLNNKMSLQMKMDCQEQQLTKKNNGFFQKLNVTEGAMQDLLKEIIKVDHILDRSDDEDDISSENPQTDFLHKGMLELEAEHDQDLSKQDKQETDVDEDPQASTSLQFSKKNLLELLLKDMLTLKGQIEKLEDRGLDLDQGTSTEVNTCNEVYELKKKVIERLEDLCKNVELLSAKLRMYQMEAEDTDSHSSEEIDTEEMEALLPQAPASFLVQKSPPRNTAWKRALRIFIMFDVLTVTGLLCYILFFGATFLFERVLLRMLGCRTTWDLREMREPFLNLEVEALLPS

SEQ ID NO: 79342 - protein, 343 aa, Homo sapiens
  Payload ID: 15803
  Gene Symbol: SMCO2
  Gene Name: single-pass membrane protein with coiled-coil domains 2
  Uniprot ID: A6NFE2
  ENSP ID: ENSP00000387617
MALTPTNLNNKMSLQMKMDCQEQQLTKKNNGFFQKLNVTEGAMQDLLKEIIKVDHILDRSDDEDDISSENPQTDFLHKGMLELEAEHDQDLSKQDKQETDVDEDPQASTSLQFSKKNLLELCLKGMFLKLNYWNTKIGLQVKELGADYIDGTEKIDNIIKKINVTENTVKSLLKDMLTLKGQIEKLEDRGLDLDQGTSTEVNTCNEVYELKKKVIERLEDLCKNVELLSAKLRMYQMEAEDTDSHSSEEIDTEEMEALLPQAPASFLVQKSPPRNTAWKRALRIFIMFDVLTVTGLLCYILFFGATFLFERVLLRMLGCRTTWDLREMREPFLNLEVEALLPS

SEQ ID NO: 79343 - protein, 343 aa, Homo sapiens; identical to SEQ ID NO: 79342
  Payload ID: 15803
  Gene Symbol: SMCO2
  Gene Name: single-pass membrane protein with coiled-coil domains 2
  Uniprot ID: A6NFE2
  ENSP ID: ENSP00000441688

SEQ ID NO: 79344 - protein, 225 aa, Homo sapiens
  Payload ID: 15804
  Gene Symbol: SMCO3
  Gene Name: single-pass membrane protein with coiled-coil domains 3
  Uniprot ID: A2RU48
  ENSP ID: ENSP00000381895
MAQSDFLYPENPKRREEVNRLHQQLLDCLSDSFDVTNKLTEVLNMHLGCRLASIEMKRDGTIKENCDLIIQAIMKIQKELQKVDEALKDKLEPTLYRKLQDIKEKETDKIAIVQKVISVILGEATSAASAVAVKLVGSNVTTGIINKLVTVLAQIGASLLGSIGVAVLGLGIDMIVRAILGAVEKTQLQAAIKSYEKHLVEFKSASEKYNHAITEVINTVKHQMK

SEQ ID NO: 79345 - protein, 59 aa, Homo sapiens
  Payload ID: 15805
  Gene Symbol: SMCO4
  Gene Name: single-pass membrane protein with coiled-coil domains 4
  Uniprot ID: Q9NRQ5
  ENSP ID: ENSP00000298966
MRQLKGKPKKETSKDKKERKQAMQEARQQITTVVLPTLAVVVLLIVVFVYVATRPTITE

SEQ ID NO: 79346 - protein, 59 aa, Homo sapiens; identical to SEQ ID NO: 79345
  Payload ID: 15805
  Gene Symbol: SMCO4
  Gene Name: single-pass membrane protein with coiled-coil domains 4
  Uniprot ID: Q9NRQ5
  ENSP ID: ENSP00000431781

SEQ ID NO: 79347 - protein, 52 aa, Homo sapiens
  Payload ID: 15805
  Gene Symbol: SMCO4
  Gene Name: single-pass membrane protein with coiled-coil domains 4
  ENSP ID: ENSP00000432581
MRQLKGKPKKETSKDKKERKQAMQEARQQITTVVLPTLAVVVLLIVVFVYVA

SEQ ID NO: 79348 - protein, 59 aa, Homo sapiens; identical to SEQ ID NO: 79345
  Payload ID: 15805
  Gene Symbol: SMCO4
  Gene Name: single-pass membrane protein with coiled-coil domains 4
  Uniprot ID: Q9NRQ5
  ENSP ID: ENSP00000433555

SEQ ID NO: 79349 - protein, 47 aa, Homo sapiens
  Payload ID: 15805
  Gene Symbol: SMCO4
  Gene Name: single-pass membrane protein with coiled-coil domains 4
  ENSP ID: ENSP00000435827
MRQLKGKPKKETSKDKKERKQAMQEARQQITTVVLPTLAVVVLLIVV

SEQ ID NO: 79350 - protein, 59 aa, Homo sapiens; identical to SEQ ID NO: 79345
  Payload ID: 15805
  Gene Symbol: SMCO4
  Gene Name: single-pass membrane protein with coiled-coil domains 4
  Uniprot ID: Q9NRQ5
  ENSP ID: ENSP00000479594

SEQ ID NO: 79351 - protein, 148 aa, Homo sapiens
  Payload ID: 15806
  Gene Symbol: SSBP1
  Gene Name: single-stranded DNA binding protein 1, mitochondrial
  Uniprot ID: Q04837
  ENSP ID: ENSP00000265304
MFRRPVLQVLRQFVRHESETTTSLVLERSLNRVHLLGRVGQDPVLRQVEGKNPVTIFSLATNEMWRSGDSEVYQLGDVSQKTTWHRISVFRPGLRDVAYQYVKKGSRIYLEGKIDYGEYMDKNNVRRQATTIIADNIIFLSDQTKEKE

SEQ ID NO: 79352 - protein, 135 aa, Homo sapiens
  Payload ID: 15806
  Gene Symbol: SSBP1
  Gene Name: single-stranded DNA binding protein 1, mitochondrial
  ENSP ID: ENSP00000418068
MFRRPVLQVLRQFVRHESETTTSLVLERSLNRVHLLGRVGQDPVLRQVEGKNPVTIFSLATNEMWRSGDSEVYQLGDVSQKTTWHRISVFRPGLRDVAYQYVKKGSRIYLEGKIDYGEYMDKNNVRRQATTIIAD

SEQ ID NO: 79353 - protein, 28 aa, Homo sapiens
  Payload ID: 15806
  Gene Symbol: SSBP1
  Gene Name: single-stranded DNA binding protein 1, mitochondrial
  ENSP ID: ENSP00000418181
MFRRPVLQVLRQFVRHESETTTSLVLER

SEQ ID NO: 79354 - protein, 148 aa, Homo sapiens; identical to SEQ ID NO: 79351
  Payload ID: 15806
  Gene Symbol: SSBP1
  Gene Name: single-stranded DNA binding protein 1, mitochondrial
  Uniprot ID: Q04837
  ENSP ID: ENSP00000419388

SEQ ID NO: 79355 - protein, 148 aa, Homo sapiens; identical to SEQ ID NO: 79351
  Payload ID: 15806
  Gene Symbol: SSBP1
  Gene Name: single-stranded DNA binding protein 1, mitochondrial
  Uniprot ID: Q04837
  ENSP ID: ENSP00000419541

SEQ ID NO: 79356 - protein, 121 aa, Homo sapiens
  Payload ID: 15806
  Gene Symbol: SSBP1
  Gene Name: single-stranded DNA binding protein 1, mitochondrial
  ENSP ID: ENSP00000419579
MFRRPVLQVLRQFVRHESETTTSLVLERSLNRVHLLGRVGQDPVLRQVEGKNPVTIFSLATNEMWRSGDSEVYQLGDVSQKTTWHRISVFRPGLRDVAYQYVKKGSRIYLEGKIDYGEYMD

SEQ ID NO: 79357 - protein, 148 aa, Homo sapiens; identical to SEQ ID NO: 79351
  Payload ID: 15806
  Gene Symbol: SSBP1
  Gene Name: single-stranded DNA binding protein 1, mitochondrial
  Uniprot ID: Q04837
  ENSP ID: ENSP00000419665

SEQ ID NO: 79358 - protein, 148 aa, Homo sapiens; identical to SEQ ID NO: 79351
  Payload ID: 15806
  Gene Symbol: SSBP1
  Gene Name: single-stranded DNA binding protein 1, mitochondrial
  Uniprot ID: Q04837
  ENSP ID: ENSP00000420485

SEQ ID NO: 79359 - protein, 28 aa, Homo sapiens
  Payload ID: 15806
  Gene Symbol: SSBP1
  Gene Name: single-stranded DNA binding protein 1, mitochondrial
  ENSP ID: ENSP00000458403
MFRRPVLQVLRQFVRHESETTTSLVLER

SEQ ID NO: 79360 - protein, 134 aa, Homo sapiens
  Payload ID: 15806
  Gene Symbol: SSBP1
  Gene Name: single-stranded DNA binding protein 1, mitochondrial
  Uniprot ID: Q04837
  ENSP ID: ENSP00000458815
MFRRPVLQVLRQFVRHESETTTSLVLERSLNRVHLLGRVGQDPVLRQVEGKNPVTIFSLATNEMWRSGDSEVYQLGDVSQKTTWHRISVFRPGLRDVAYQYVKKGSRIYLEGKIDYGEYMDKNNVRRQATTIIA

SEQ ID NO: 79361 - protein, 134 aa, Homo sapiens; identical to SEQ ID NO: 79360
  Payload ID: 15806
  Gene Symbol: SSBP1
  Gene Name: single-stranded DNA binding protein 1, mitochondrial
  Uniprot ID: Q04837
  ENSP ID: ENSP00000459208

SEQ ID NO: 79362 - protein, 134 aa, Homo sapiens; identical to SEQ ID NO: 79360
  Payload ID: 15806
  Gene Symbol: SSBP1
  Gene Name: single-stranded DNA binding protein 1, mitochondrial
  Uniprot ID: Q04837
  ENSP ID: ENSP00000459367

SEQ ID NO: 79363 - protein, 134 aa, Homo sapiens; identical to SEQ ID NO: 79360
  Payload ID: 15806
  Gene Symbol: SSBP1
  Gene Name: single-stranded DNA binding protein 1, mitochondrial
  Uniprot ID: Q04837
  ENSP ID: ENSP00000460028

SEQ ID NO: 79364 - protein, 134 aa, Homo sapiens; identical to SEQ ID NO: 79360
  Payload ID: 15806
  Gene Symbol: SSBP1
  Gene Name: single-stranded DNA binding protein 1, mitochondrial
  ENSP ID: ENSP00000460161

SEQ ID NO: 79365 - protein, 121 aa, Homo sapiens; identical to SEQ ID NO: 79356
  Payload ID: 15806
  Gene Symbol: SSBP1
  Gene Name: single-stranded DNA binding protein 1, mitochondrial
  ENSP ID: ENSP00000461315

SEQ ID NO: 79366 - protein, 134 aa, Homo sapiens; identical to SEQ ID NO: 79360
  Payload ID: 15806
  Gene Symbol: SSBP1
  Gene Name: single-stranded DNA binding protein 1, mitochondrial
  Uniprot ID: Q04837
  ENSP ID: ENSP00000461884

SEQ ID NO: 79367 - protein, 148 aa, Homo sapiens; identical to SEQ ID NO: 79351
  Payload ID: 15806
  Gene Symbol: SSBP1
  Gene Name: single-stranded DNA binding protein 1, mitochondrial
  Uniprot ID: Q04837
  ENSP ID: ENSP00000480488

SEQ ID NO: 79368 - protein, 361 aa, Homo sapiens
  Payload ID: 15807
  Gene Symbol: SSBP2
  Gene Name: single-stranded DNA binding protein 2
  Uniprot ID: P81877
  ENSP ID: ENSP00000322977
MYGKGKSNSSAVPSDSQAREKLALYVYEYLLHVGAQKSAQTFLSEIRWEKNITLGEPPGFLHSWWCVFWDLYCAAPERRETCEHSSEAKAFHDYSAAAAPSPVLGNIPPGDGMPVGPVPPGFFQPFMSPRYPGGPRPPLRIPNQALGGVPGSQPLLPSGMDPTRQQGHPNMGGPMQRMTPPRGMVPLGPQNYGGAMRPPLNALGGPGMPGMNMGPGGGRPWPNPTNANSIPYSSASPGNYVGPPGGGGPPGTPIMPSPADSTNSGDNMYTLMNAVPPGPNRPNFPMGPGSDGPMGGLGGMESHHMNGSLGSGDMDSISKNSPNNMSLSNQPGTPRDDGEMGGNFLNPFQSESYSPSMTMSV

SEQ ID NO: 79369 - protein, 208 aa, Homo sapiens
  Payload ID: 15807
  Gene Symbol: SSBP2
  Gene Name: single-stranded DNA binding protein 2
  ENSP ID: ENSP00000422756
MLVIPSALMYSFVLYWRLALYVYEYLLHVGAQKSAQTFLSEIRWEKNITLGEPPGFLHSWWCVFWDLYCAAPERRETCEHSSEAKAFHDYSAAAAPSPVLGNIPPGDGMPVGPVPPGFFQPFMSPRYPGGPRPPLRIPNQALGGVPGSQPLLPSGMDPTRQQGHPNMGGPMQRMTPPRGMVPLGPQNYGGAMRPPLNALGGPGMPGMN

SEQ ID NO: 79370 - protein, 298 aa, Homo sapiens
  Payload ID: 15807
  Gene Symbol: SSBP2
  Gene Name: single-stranded DNA binding protein 2
  Uniprot ID: P81877
  ENSP ID: ENSP00000422961
MYGKGKSNSSAVPSDSQAREKLALYVYEYLLHVGAQKSAQTFLSEIRWEKNITLGEPPGFLHSWWCVFWDLYCAAPERRETCEHSSEAKAFHDYPFMSPRYPGGPRPPLRIPNQALGGVPGSQPLLPSGMDPTRQQGHPNMGGPMQRMTPPRGMVPLGPQNYGGAMRPPLNALGGPGMPGMNMGPGGGRPWPNPTNANSIPYSSASPGNYVGPPGGGGPPGTPIMPSPADSTNSGDNMYTLMNAVPPGPNRPNFPMGPGSDGPMGGLGGMESHHMNGSLGSGDMDSISKYSPSMTMSV

SEQ ID NO: 79371 - protein, 341 aa, Homo sapiens
  Payload ID: 15807
  Gene Symbol: SSBP2
  Gene Name: single-stranded DNA binding protein 2
  Uniprot ID: P81877
  ENSP ID: ENSP00000423969
MYGKGKSNSSAVPSDSQAREKLALYVYEYLLHVGAQKSAQTFLSEIRWEKNITLGEPPGFLHSWWCVFWDLYCAAPERRETCEHSSEAKAFHDYSAAAAPSPVLGNIPPGDGMPVGPVPPGFFQALGGVPGSQPLLPSGMDPTRQQGHPNMGGPMQRMTPPRGMVPLGPQNYGGAMRPPLNALGGPGMPGMNMGPGGGRPWPNPTNANSIPYSSASPGNYVGPPGGGGPPGTPIMPSPADSTNSGDNMYTLMNAVPPGPNRPNFPMGPGSDGPMGGLGGMESHHMNGSLGSGDMDSISKNSPNNMSLSNQPGTPRDDGEMGGNFLNPFQSESYSPSMTMSV

SEQ ID NO: 79372 - protein, 264 aa, Homo sapiens
  Payload ID: 15807
  Gene Symbol: SSBP2
  Gene Name: single-stranded DNA binding protein 2
  ENSP ID: ENSP00000424561
SAAAAPSPVLGNIPPGDGMPVGPVPPGFFQPFMSPRYPGGPRPPLRIPNQALGGVPGSQPLLPSGMDPTRQQGHPNMGGPMQRMTPPRGMVPLGPQNYGGAMRPPLNALGGPGMPGMNMGPGGGRPWPNPTNANSIPYSSASPGNYVGPPGGGGPPGTPIMPSPADSTNSGDNMYTLMNAVPPGPNRPNFPMGPGSDGPMGGLGGMESHHMNGSLGKAFQFDNSPNNMSLSNQPGTPRDDGEMGGNFLNPFQSESYSPSMTMSV

SEQ ID NO: 79373 - protein, 339 aa, Homo sapiens
  Payload ID: 15807
  Gene Symbol: SSBP2
  Gene Name: single-stranded DNA binding protein 2
  Uniprot ID: P81877
  ENSP ID: ENSP00000424657
MYGKGKSNSSAVPSDSQAREKLALYVYEYLLHVGAQKSAQTFLSEIRWEKNITLGEPPGFLHSWWCVFWDLYCAAPERRETCEHSSEAKAFHDYPFMSPRYPGGPRPPLRIPNQALGGVPGSQPLLPSGMDPTRQQGHPNMGGPMQRMTPPRGMVPLGPQSDPWLSLQNYGGAMRPPLNALGGPGMPGMNMGPGGGRPWPNPTNANSIPYSSASPGNYVGPPGGGGPPGTPIMPSPADSTNSGDNMYTLMNAVPPGPNRPNFPMGPGSDGPMGGLGGMESHHMNGSLGSGDMDSISKNSPNNMSLSNQPGTPRDDGEMGGNFLNPFQSESYSPSMTMSV

SEQ ID NO: 79374 - protein, 275 aa, Homo sapiens
  Payload ID: 15807
  Gene Symbol: SSBP2
  Gene Name: single-stranded DNA binding protein 2
  ENSP ID: ENSP00000425146
SAAAAPSPVLGNIPPGDGMPVGPVPPGFFQPFMSPRYPGGPRPPLRIPNQALGGVPGSQPLLPSGMDPTRQQGHPNMGGPMQRMTPPRGMVPLGPQSDPWLSLQNYGGAMRPPLNALGGPGMPGMNMGPGGGRPWPNPTNANSIPYSSASPGNYVGPPGGGGPPGTPIMPSPADSTNSGDNMYTLMNAVPPGPNRPNFPMGPGSDGPMGGLGGMESHHMNGSLGSGDMDSISKNSPNNMSLSNQPGTPRDDGEMGGNFLNPFQSESYSPSMTMSV

SEQ ID NO: 79375 - protein, 331 aa, Homo sapiens
  Payload ID: 15807
  Gene Symbol: SSBP2
  Gene Name: single-stranded DNA binding protein 2
  Uniprot ID: P81877
  ENSP ID: ENSP00000426183
MYGKGKSNSSAVPSDSQAREKLALYVYEYLLHVGAQKSAQTFLSEIRWEKNITLGEPPGFLHSWWCVFWDLYCAAPERRETCEHSSEAKAFHDYPFMSPRYPGGPRPPLRIPNQALGGVPGSQPLLPSGMDPTRQQGHPNMGGPMQRMTPPRGMVPLGPQNYGGAMRPPLNALGGPGMPGMNMGPGGGRPWPNPTNANSIPYSSASPGNYVGPPGGGGPPGTPIMPSPADSTNSGDNMYTLMNAVPPGPNRPNFPMGPGSDGPMGGLGGMESHHMNGSLGSGDMDSISKNSPNNMSLSNQPGTPRDDGEMGGNFLNPFQSESYSPSMTMSV

SEQ ID NO: 79376 - protein, 369 aa, Homo sapiens
  Payload ID: 15807
  Gene Symbol: SSBP2
  Gene Name: single-stranded DNA binding protein 2
  ENSP ID: ENSP00000483921
MYGKGKSNSSAVPSDSQAREKLALYVYEYLLHVGAQKSAQTFLSEIRWEKNITLGEPPGFLHSWWCVFWDLYCAAPERRETCEHSSEAKAFHDYSAAAAPSPVLGNIPPGDGMPVGPVPPGFFQPFMSPRYPGGPRPPLRIPNQALGGVPGSQPLLPSGMDPTRQQGHPNMGGPMQRMTPPRGMVPLGPQSDPWLSLQNYGGAMRPPLNALGGPGMPGMNMGPGGGRPWPNPTNANSIPYSSASPGNYVGPPGGGGPPGTPIMPSPADSTNSGDNMYTLMNAVPPGPNRPNFPMGPGSDGPMGGLGGMESHHMNGSLGSGDMDSISKNSPNNMSLSNQPGTPRDDGEMGGNFLNPFQSESYSPSMTMSV

SEQ ID NO: 79377 - protein, 314 aa, Homo sapiens [sequence omitted]

SEQ ID NO: 79378 - protein, 177 aa, Homo sapiens
  Payload ID: 15808
  Gene Symbol: SMUG1
  Gene Name: single-strand-selective monofunctional uracil-DNA glycosylase 1
  Uniprot ID: Q53HV7
  ENSP ID: ENSP00000243112
MPQAFLLGSIHEPAGALMEPQPCPGSLAESFLEEELRLNAELSQLQFSEPVGIIYNPVEYAWEPHRNYVTRYCQGPKEVLFLGMNPGPFGMAQTGVPFGEVSMVRDWLGIVGPVLTPPQEHPKRPVLGLECPQSEGPRQSMGHEIKSELLMGGCSWIRGKIQCDRVQVRRPGFSSQL

SEQ ID NO: 79379 - protein, 270 aa, Homo sapiens
  Payload ID: 15808
  Gene Symbol: SMUG1
  Gene Name: single-strand-selective monofunctional uracil-DNA glycosylase 1
  Uniprot ID: Q53HV7
  ENSP ID: ENSP00000338606
MPQAFLLGSIHEPAGALMEPQPCPGSLAESFLEEELRLNAELSQLQFSEPVGIIYNPVEYAWEPHRNYVTRYCQGPKEVLFLGMNPGPFGMAQTGVPFGEVSMVRDWLGIVGPVLTPPQEHPKRPVLGLECPQSEVSGARFWGFFRNLCGQPEVFFHHCFVHNLCPLLFLAPSGRNLTPAELPAKQREQLLGICDAALCRQVQLLGVRLVVGVGRLAEQRARRALAGLMPEVQVEGLLHPSPRNPQANKGWEAVAKERLNELGLLPLLLK

SEQ ID NO: 79380 - protein, 270 aa, Homo sapiens; identical to SEQ ID NO: 79379
  Payload ID: 15808
  Gene Symbol: SMUG1
  Gene Name: single-strand-selective monofunctional uracil-DNA glycosylase 1
  Uniprot ID: Q53HV7
  ENSP ID: ENSP00000384828

SEQ ID NO: 79381 - protein, 177 aa, Homo sapiens; identical to SEQ ID NO: 79378
  Payload ID: 15808
  Gene Symbol: SMUG1
  Gene Name: single-strand-selective monofunctional uracil-DNA glycosylase 1
  Uniprot ID: Q53HV7
  ENSP ID: ENSP00000421139

SEQ ID NO: 79382 - protein, 177 aa, Homo sapiens; identical to SEQ ID NO: 79378
  Payload ID: 15808
  Gene Symbol: SMUG1
  Gene Name: single-strand-selective monofunctional uracil-DNA glycosylase 1
  Uniprot ID: Q53HV7
  ENSP ID: ENSP00000421206

SEQ ID NO: 79383 - protein, 95 aa, Homo sapiens
  Payload ID: 15808
  Gene Symbol: SMUG1
  Gene Name: single-strand-selective monofunctional uracil-DNA glycosylase 1
  ENSP ID: ENSP00000421790
MPQAFLLGSIHEPAGALMEPQPCPGSLAESFLEEELRLNAELSQLQFSEPVGIIYNPVEYAWEPHRNYVTRYCQGPKEVLFLGMNPGPFGMAQTG

SEQ ID NO: 79384 - protein, 126 aa, Homo sapiens
  Payload ID: 15808
  Gene Symbol: SMUG1
  Gene Name: single-strand-selective monofunctional uracil-DNA glycosylase 1
  ENSP ID: ENSP00000421894
MPQAFLLGSIHEPAGALMEPQPCPGSLAESFLEEELRLNAELSQLQFSEPVGIIYNPVEYAWEPHRNYVTRYCQGPKEVLFLGMNPGPFGMAQTGVKGLASPVGGVGGSRWMLGWVCCGEGACAWL

SEQ ID NO: 79385 - protein, 172 aa, Homo sapiens
  Payload ID: 15808
  Gene Symbol: SMUG1
  Gene Name: single-strand-selective monofunctional uracil-DNA glycosylase 1
  ENSP ID: ENSP00000423083
MPQAFLLGSIHEPAGALMEPQPCPGSLAESFLEEELRLNAELSQLQFSEPVGIIYNPVEYAWEPHRNYVTRYCQGPKEVLFLGMNPGPFGMAQTGVPFGEVSMVRDWLGIVGPVLTPPQEHPKRPVLGLECPQSEVSGARFWGFFRNLCGQPEVFFHHCFVHNLCPLLFLAP

SEQ ID NO: 79386 - protein, 108 aa, Homo sapiens
  Payload ID: 15808
  Gene Symbol: SMUG1
  Gene Name: single-strand-selective monofunctional uracil-DNA glycosylase 1
  ENSP ID: ENSP00000423457
MPQAFLLGSIHEPAGALMEPQPCPGSLAESFLEEELRLNAELSQLQFSEPVGIIYNPVEYAWEPHRNYVTRYCQGPKEVLFLGMNPGPFGMAQTGVPFGEVSMVRDWL

SEQ ID NO: 79387 - protein, 177 aa, Homo sapiens; identical to SEQ ID NO: 79378
  Payload ID: 15808
  Gene Symbol: SMUG1
  Gene Name: single-strand-selective monofunctional uracil-DNA glycosylase 1
  Uniprot ID: Q53HV7
  ENSP ID: ENSP00000423629

SEQ ID NO: 79388 - protein, 270 aa, Homo sapiens; identical to SEQ ID NO: 79379
  Payload ID: 15808
  Gene Symbol: SMUG1
  Gene Name: single-strand-selective monofunctional uracil-DNA glycosylase 1
  Uniprot ID: Q53HV7
  ENSP ID: ENSP00000424191

SEQ ID NO: 79389 - protein, 82 aa, Homo sapiens
  Payload ID: 15808
  Gene Symbol: SMUG1
  Gene Name: single-strand-selective monofunctional uracil-DNA glycosylase 1
  ENSP ID: ENSP00000425426
MPQAFLLGSIHEPAGALMEPQPCPGSLAESFLEEELRLNAELSQLQFSEPVGIIYNPVEYAWEPHRNYVTRYCQGPKEVLFL

SEQ ID NO: 79390 - protein, 159 aa, Homo sapiens
  Payload ID: 15808
  Gene Symbol: SMUG1
  Gene Name: single-strand-selective monofunctional uracil-DNA glycosylase 1
  ENSP ID: ENSP00000425974
MPQAFLLGSIHEPAGALMEPQPCPGSLAESFLEEELRLNAELSQLQFSEPVGIIYNPVEYAWEPHRNYVTRYCQGPKEVLFLGMNPGPFGMAQTGVPFGEVSMVRDWLGIVGPVLTPPQEHPKRPVLGLECPQSEANKGWEAVAKERLNELGLLPLLLK

SEQ ID NO: 79391 - protein, 143 aa, Homo sapiens
  Payload ID: 15808
  Gene Symbol: SMUG1
  Gene Name: single-strand-selective monofunctional uracil-DNA glycosylase 1
  ENSP ID: ENSP00000426440
  MOD_RES (1)..(1): Any amino acid
XAFLLGSIHEPAGALMEPQPCPGSLAESFLEEELRLNAELSQLQFSEPVGIIYNPVEYAWEPHRNYVTRYCQGPKEVLFLGMNPGPFGMAQTGVPFGEVSMVRDWLGIVGPVLTPPQEHPKRPVLGLECPQSEKILAAVLRTD

SEQ ID NO: 79392 - protein, 90 aa, Homo sapiens
  Payload ID: 15808
  Gene Symbol: SMUG1
  Gene Name: single-strand-selective monofunctional uracil-DNA glycosylase 1
  ENSP ID: ENSP00000427547
MPQAFLLGSIHEPAGALMEPQPCPGSLAESFLEEELRLNAELSQLQFSEPVGIIYNPVEYAWEPHRNYVTRYCQGPKEVLFLGMNPGPFG

SEQ ID NO: 79393 - protein, 161 aa, Homo sapiens
  Payload ID: 15808
  Gene Symbol: SMUG1
  Gene Name: single-strand-selective monofunctional uracil-DNA glycosylase 1
  ENSP ID: ENSP00000489489
MPQAFLLGSIHEPAGALMEPQPCPGSLAESFLEEELRLNAELSQLQFSEPVGIIYNPVEYAWEPHRNYVTRYCQGPKEVLFLGMNPGPFGMAQTGVPFGEVSMVRDWLGIVGPVLTPPQEHPKRPVLGLECPQSEEDIGQLFPLLPWCPREVKNFNWSMRH

SEQ ID NO: 79394 - protein, 747 aa, Homo sapiens
  Payload ID: 15809
  Gene Symbol: SIRT1
  Gene Name: sirtuin 1
  Uniprot ID: Q96EB6
  ENSP ID: ENSP00000212015
MADEAALALQPGGSPSAAGADREAASSPAGEPLRKRPRRDGPGLERSPGEPGGAAPEREVPAAARGCPGAAAAALWREAEAEAAAAGGEQEAQATAAAGEGDNGPGLQGPSREPPLADNLYDEDDDDEGEEEEEAAAAAIGYRDNLLFGDEIITNGFHSCESDEEDRASHASSSDWTPRPRIGPYTFVQQHLMIGTDPRTILKDLLPETIPPPELDDMTLWQIVINILSEPPKRKKRKDINTIEDAVKLLQECKKIIVLTGAGVSVSCGIPDFRSRDGIYARLAVDFPDLPDPQAMFDIEYFRKDPRPFFKFAKEIYPGQFQPSLCHKFIALSDKEGKLLRNYTQNIDTLEQVAGIQRIIQCHGSFATASCLICKYKVDCEAVRGDIFNQVVPRCPRCPADEPLAIMKPEIVFFGENLPEQFHRAMKYDKDEVDLLIVIGSSLKVRPVALIPSSIPHEVPQILINREPLPHLHFDVELLGDCDVIINELCHRLGGEYAKLCCNPVKLSEITEKPPRTQKELAYLSELPPTPLHVSEDSSSPERTSPPDSSVIVTLLDQAAKSNDDLDVSESKGCMEEKPQEVQTSRNVESIAEQMENPDLKNVGSSTGEKNERTSVAGTVRKCWPNRVAKEQISRRLDGNQYLFLPPNRYIFHGAEVYSDSEDDVLSSSSCGSNSDSGTCQSPSLEEPMEDESEIEEFYNGLEDEPDVPERAGGAGFGTDGDDQEAINEAISVKQEVTDMNYPSNKS

SEQ ID NO: 79395 - protein, 444 aa, Homo sapiens
  Payload ID: 15809
  Gene Symbol: SIRT1
  Gene Name: sirtuin 1
  ENSP ID: ENSP00000384063
MCLCSGRKTILEIYPGQFQPSLCHKFIALSDKEGKLLRNYTQNIDTLEQVAGIQRIIQCHGSFATASCLICKYKVDCEAVRGDIFNQVVPRCPRCPADEPLAIMKPEIVFFGENLPEQFHRAMKYDKDEVDLLIVIGSSLKVRPVALIPSSIPHEVPQILINREPLPHLHFDVELLGDCDVIINELCHRLGGEYAKLCCNPVKLSEITEKPPRTQKELAYLSELPPTPLHVSEDSSSPERTSPPDSSVIVTLLDQAAKSNDDLDVSESKGCMEEKPQEVQTSRNVESIAEQMENPDLKNVGSSTGEKNERTSVAGTVRKCWPNRVAKEQISRRLDGNQYLFLPPNRYIFHGAEVYSDSEDDVLSSSSCGSNSDSGTCQSPSLEEPMEDESEIEEFYNGLEDEPDVPERAGGAGFGTDGDDQEAINEAISVKQEVTDMNYPSNKS

SEQ ID NO: 79396 - protein, 444 aa, Homo sapiens; identical to SEQ ID NO: 79395
  Payload ID: 15809
  Gene Symbol: SIRT1
  Gene Name: sirtuin 1
  ENSP ID: ENSP00000384508

SEQ ID NO: 79397 - protein, 452 aa, Homo sapiens
  Payload ID: 15809
  Gene Symbol: SIRT1
  Gene Name: sirtuin 1
  ENSP ID: ENSP00000409208
MFDIEYFRKDPRPFFKFAKEIYPGQFQPSLCHKFIALSDKEGKLLRNYTQNIDTLEQVAGIQRIIQCHGSFATASCLICKYKVDCEAVRGDIFNQVVPRCPRCPADEPLAIMKPEIVFFGENLPEQFHRAMKYDKDEVDLLIVIGSSLKVRPVALIPSSIPHEVPQILINREPLPHLHFDVELLGDCDVIINELCHRLGGEYAKLCCNPVKLSEITEKPPRTQKELAYLSELPPTPLHVSEDSSSPERTSPPDSSVIVTLLDQAAKSNDDLDVSESKGCMEEKPQEVQTSRNVESIAEQMENPDLKNVGSSTGEKNERTSVAGTVRKCWPNRVAKEQISRRLDGNQYLFLPPNRYIFHGAEVYSDSEDDVLSSSSCGSNSDSGTCQSPSLEEPMEDESEIEEFYNGLEDEPDVPERAGGAGFGTDGDDQEAINEAISVKQEVTDMNYPSNKS

SEQ ID NO: 79398 - protein, 389 aa, Homo sapiens
  Payload ID: 15810
  Gene Symbol: SIRT2
  Gene Name: sirtuin 2
  Uniprot ID: Q8IXJ6
  ENSP ID: ENSP00000249396
MAEPDPSHPLETQAGKVQEAQDSDSDSEGGAAGGEADMDFLRNLFSQTLSLGSQKERLLDELTLEGVARYMQSERCRRVICLVGAGISTSAGIPDFRSPSTGLYDNLEKYHLPYPEAIFEISYFKKHPEPFFALAKELYPGQFKPTICHYFMRLLKDKGLLLRCYTQNIDTLERIAGLEQEDLVEAHGTFYTSHCVSASCRHEYPLSWMKEKIFSEVTPKCEDCQSLVKPDIVFFGESLPARFFSCMQSDFLKVDLLLVMGTSLQVQPFASLISKAPLSTPRLLINKEKAGQSDPFLGMIMGLGGGMDFDSKKAYRDVAWLGECDQGCLALAELLGWKKELEDLVRREHASIDAQSGAGVPNPSTSASPKKSPPPAKDEARTTEREKPQ

SEQ ID NO: 79399 - protein, 234 aa, Homo sapiens
  Payload ID: 15810
  Gene Symbol: SIRT2
  Gene Name: sirtuin 2
  ENSP ID: ENSP00000351809
MDFLRNLFSQTLSLGSQKERLLDELTLEGVARYMQSERCRRVICLVGAGISTSAGIPDFRSPSTGLYDNLEKYHLPYPEAIFEISYFKKHPEPFFALAKELYPGQFKPTICHYFMRLLKDKGLLLRCYTQNIDTLERIAGLEQEDLVEAHGTFYTSHCVSASCRHEYPLSWMKEKIFSEVTPKCEDCQSLVKPDIVFFGESLPARFFSCMQSDFLKVDLLLVMGTSLQGRGLAG

SEQ ID NO: 79400 - protein, 352 aa, Homo sapiens
  Payload ID: 15810
  Gene Symbol: SIRT2
  Gene Name: sirtuin 2
  Uniprot ID: Q8IXJ6
  ENSP ID: ENSP00000375931
MDFLRNLFSQTLSLGSQKERLLDELTLEGVARYMQSERCRRVICLVGAGISTSAGIPDFRSPSTGLYDNLEKYHLPYPEAIFEISYFKKHPEPFFALAKELYPGQFKPTICHYFMRLLKDKGLLLRCYTQNIDTLERIAGLEQEDLVEAHGTFYTSHCVSASCRHEYPLSWMKEKIFSEVTPKCEDCQSLVKPDIVFFGESLPARFFSCMQSDFLKVDLLLVMGTSLQVQPFASLISKAPLSTPRLLINKEKAGQSDPFLGMIMGLGGGMDFDSKKAYRDVAWLGECDQGCLALAELLGWKKELEDLVRREHASIDAQSGAGVPNPSTSASPKKSPPPAKDEARTTEREKPQ

SEQ ID NO: 79401 - protein, 169 aa, Homo sapiens
  Payload ID: 15810
  Gene Symbol: SIRT2
  Gene Name: sirtuin 2
  ENSP ID: ENSP00000385146
MDFLRNLFSQTLSLGSQKERLLDELTLEGVARYMQSERCRRVICLVGAGISTSAGIPDFRSPSTGLYDNLEKYHLPYPEAIFEISYFKKHPEPFFALAKELYPGQFKPTICHYFMRLLKDKGLLLRCYTQNIDTLERIAGLEQEDLVEAHGTFYTSHCVSASCRHEYPL

SEQ ID NO: 79402 - protein, 78 aa, Homo sapiens
  Payload ID: 15810
  Gene Symbol: SIRT2
  Gene Name: sirtuin 2
  ENSP ID: ENSP00000397022
MDFLRNLFSQTLSLGSQKERLLDELTLEGVARYMQSERCRRVICLVGAGISTSAGIPDFRSPSTGLYDNLEKYHLPYP

SEQ ID NO: 79403 - protein, 111 aa, Homo sapiens
  Payload ID: 15810
  Gene Symbol: SIRT2
  Gene Name: sirtuin 2
  ENSP ID: ENSP00000400338
MDFLRNLFSQTLSLGSQKERLLDELTLEGVARYMQSERCRRVICLVGAGISTSAGIPDFRSPSTGLYDNLEKYHLPYPEAIFEISYFKKHPEPFFALAKELYPGQFKFPHL

SEQ ID NO: 79404 - protein, 130 aa, Homo sapiens
  Payload ID: 15810
  Gene Symbol: SIRT2
  Gene Name: sirtuin 2
  ENSP ID: ENSP00000401203
MDFLRNLFSQTLSLGSQKERLLDELTLEGVARYMQSERCRRVICLVGAGISTSAGIPDFRSPSTGLYDNLEKYHLPYPEAIFEISYFKKHPEPFFALAKELYPGQFKPTICHYFMRLLKDKGLLLRCYTQ

SEQ ID NO: 79405 - protein, 237 aa, Homo sapiens
  Payload ID: 15810
  Gene Symbol: SIRT2
  Gene Name: sirtuin 2
  ENSP ID: ENSP00000404309
MDFLRNLFSQTLSLGSQKERLLDELTLEGVARYMQSERCRRVICLVGAGISTSAGIPDFRSPSTGLYDNLEKYHLPYPEAIFEISYFKKHPEPFFALAKELYPGQFKPTICHYFMRLLKDKGLLLRCYTQNIDTLERIAGLEQEDLVEAHGTFYTSHCVSASCRHEYPLSWMKEKIFSEVTPKCEDCQSLVKPDIVFFGESLPARFFSCMQSDFLKVDLLLVMGTSLQVQPFASLIS

SEQ ID NO: 79406 - protein, 39 aa, Homo sapiens
  Payload ID: 15810
  Gene Symbol: SIRT2
  Gene Name: sirtuin 2
  ENSP ID: ENSP00000407272
MDFLRNLFSQTLSLGSQKERLLDELTLEGVARYMQSERC

SEQ ID NO: 79407 - protein, 73 aa, Homo sapiens
  Payload ID: 15810
  Gene Symbol: SIRT2
  Gene Name: sirtuin 2
  ENSP ID: ENSP00000408023
MDFLRNLFSQTLSLGSQKERLLDELTLEGVARYMQSERCRRVICLVGAGISTSAGIPDFRSPSTGLYDNLEKY

SEQ ID NO: 79408 - protein, 52 aa, Homo sapiens
  Payload ID: 15810
  Gene Symbol: SIRT2
  Gene Name: sirtuin 2
  ENSP ID: ENSP00000409690
MDFLRNLFSQTLSLGSQKERLLDELTLEGVARYMQSERSATVSLLRQPGLLP

SEQ ID NO: 79409 - protein, 96 aa, Homo sapiens
  Payload ID: 15810
  Gene Symbol: SIRT2
  Gene Name: sirtuin 2
  ENSP ID: ENSP00000411393
MAEPDPSHPLETQAGKVQEAQATFLPQPFPQTWYHPLSSLPNPTSRAWPLHPTPSRTQIQTLREEPLVEKQTWTSCGTYSPRRSAWAARRSVCWTS

SEQ ID NO: 79410 - protein, 389 aa, Homo sapiens
  Payload ID: 15810
  Gene Symbol: SIRT2
  Gene Name: sirtuin 2
  ENSP ID: ENSP00000481932
MSDEAEDSDSDSEGGAAGGEADMDFLRNLFSQTLSLGSQKERLLDELTLEGVARYMQSERCRRVICLVGAGISTSAGIPDFRSPSTGLYDNLEKYHLPYPEAIFEISYFKKHPEPFFALAKELYPGQFKPTICHYFMRLLKDKGLLLRCYTQNIDTLERIAGLEQEDLVEAHGTFYTSHCVSASCRHEYPLSWMKEKIFSEVTPKCEDCQSLVKPDIVFFGESLPARFFSCMQSDFLKVDLLLVMGTSLQVQPFASLISKAPLSTPRLLINKEKAGQSDPFLGMIMGLGGGMDFDSKKAYRDVAWLGECDQGCLALAELLGWKKELEDLVRREHASIDAQGGGGPQPQHFSFPQEVPATCQGRGQDNREGETPVTAASPRRDAELLRDS

SEQ ID NO: 79411 - protein, 352 aa, Homo sapiens; identical to SEQ ID NO: 79400
  Payload ID: 15810
  Gene Symbol: SIRT2
  Gene Name: Sirtuin 2
  ENSP ID: ENSP00000488940

SEQ ID NO: 79412 - protein, 234 aa, Homo sapiens; identical to SEQ ID NO: 79399
  Payload ID: 15810
  Gene Symbol: SIRT2
  Gene Name: Sirtuin 2
  ENSP ID: ENSP00000488998

SEQ ID NO: 79413 - protein, 389 aa, Homo sapiens; identical to SEQ ID NO: 79410
  Payload ID: 15810
  Gene Symbol: SIRT2
  Gene Name: Sirtuin 2
  ENSP ID: ENSP00000489020

SEQ ID NO: 79414 - protein, 111 aa, Homo sapiens; identical to SEQ ID NO: 79403
  Payload ID: 15810
  Gene Symbol: SIRT2
  Gene Name: Sirtuin 2
  ENSP ID: ENSP00000489036

SEQ ID NO: 79415 - protein, 130 aa, Homo sapiens; identical to SEQ ID NO: 79404
  Payload ID: 15810
  Gene Symbol: SIRT2
  Gene Name: Sirtuin 2
  ENSP ID: ENSP00000489066

SEQ ID NO: 79416 - protein, 73 aa, Homo sapiens; identical to SEQ ID NO: 79407
  Payload ID: 15810
  Gene Symbol: SIRT2
  Gene Name: Sirtuin 2
  ENSP ID: ENSP00000489070

SEQ ID NO: 79417 - protein, 52 aa, Homo sapiens; identical to SEQ ID NO: 79408
  Payload ID: 15810
  Gene Symbol: SIRT2
  Gene Name: Sirtuin 2
  ENSP ID: ENSP00000489238

SEQ ID NO: 79418 - protein, 39 aa, Homo sapiens; identical to SEQ ID NO: 79406
  Payload ID: 15810
  Gene Symbol: SIRT2
  Gene Name: Sirtuin 2
  ENSP ID: ENSP00000489332

SEQ ID NO: 79419 - protein, 78 aa, Homo sapiens; identical to SEQ ID NO: 79402
  Payload ID: 15810
  Gene Symbol: SIRT2
  Gene Name: Sirtuin 2
  ENSP ID: ENSP00000489360

SEQ ID NO: 79420 - protein, 237 aa, Homo sapiens; identical to SEQ ID NO: 79405
  Payload ID: 15810
  Gene Symbol: SIRT2
  Gene Name: Sirtuin 2
  ENSP ID: ENSP00000489426

SEQ ID NO: 79421 - protein, 169 aa, Homo sapiens; identical to SEQ ID NO: 79401
  Payload ID: 15810
  Gene Symbol: SIRT2
  Gene Name: Sirtuin 2
  ENSP ID: ENSP00000489481

SEQ ID NO: 79422 - protein, 96 aa, Homo sapiens; identical to SEQ ID NO: 79409
  Payload ID: 15810
  Gene Symbol: SIRT2
  Gene Name: Sirtuin 2
  ENSP ID: ENSP00000489495

SEQ ID NO: 79423 - protein, 389 aa, Homo sapiens; identical to SEQ ID NO: 79398
  Payload ID: 15810
  Gene Symbol: SIRT2
  Gene Name: Sirtuin 2
  ENSP ID: ENSP00000489602

SEQ ID NO: 79424 - protein, 399 aa, Homo sapiens
  Payload ID: 15811
  Gene Symbol: SIRT3
  Gene Name: sirtuin 3
  Uniprot ID: Q9NTG7
  ENSP ID: ENSP00000372191
MAFWGWRAAAALRLWGRVVERVEAGGGVGPFQACGCRLVLGGRDDVSAGLRGSHGARGEPLDPARPLQRPPRPEVPRAFRRQPRAAAPSFFFSSIKGGRRSISFSVGASSVVGSGGSSDKGKLSLQDVAELIRARACQRVVVMVGAGISTPSGIPDFRSPGSGLYSNLQQYDLPYPEAIFELPFFFHNPKPFFTLAKELYPGNYKPNVTHYFLRLLHDKGLLLRLYTQNIDGLERVSGIPASKLVEAHGTFASATCTVCQRPFPGEDIRADVMADRVPRCPVCTGVVKPDIVFFGEPLPQRFLLHVVDFPMADLLLILGTSLEVEPFASLTEAVRSSVPRLLINRDLVGPLAWHPRSRDVAQLGDVVHGVESLVELLGWTEEMRDLVQRETGKLDGPDK

SEQ ID NO: 79425 - protein, 93 aa, Homo sapiens
  Payload ID: 15811
  Gene Symbol: SIRT3
  Gene Name: sirtuin 3
  ENSP ID: ENSP00000432857
MVGAGISTPSGIPDFRSPGSGLYSNLQQYDLPYPEAIFELPFFFHNPKPFFTLAKELYPGNYKPNVTHYFLRLLHDKGLLLRLYTQNIDGLER

SEQ ID NO: 79426 - protein, 353 aa, Homo sapiens
  Payload ID: 15811
  Gene Symbol: SIRT3
  Gene Name: sirtuin 3
  ENSP ID: ENSP00000432937
MAFWGWRAAAALRLWGRVVERVEAGGGVGPFQACGCRLVLGGRDDVSAGLRGSHGARGEPLDPARPLQRPPRPEVPRAFRRQPRAAAPSFFFSRSPGSGLYSNLQQYDLPYPEAIFELPFFFHNPKPFFTLAKELYPGNYKPNVTHYFLRLLHDKGLLLRLYTQNIDGLERVSGIPASKLVEAHGTFASATCTVCQRPFPGEDIRADVMADRVPRCPVCTGVVKPDIVFFGEPLPQRFLLHVVDFPMADLLLILGTSLEVEPFASLTEAVRSSVPRLLINRDLVGPLAWHPRSRDVAQLGDVVHGVESLVELLGWTEEMRDLVQRETGKVQTAEEDHPRGCPSHCSRLDGPDK

SEQ ID NO: 79427 - protein, 345 aa, Homo sapiens
  Payload ID: 15811
  Gene Symbol: SIRT3
  Gene Name: sirtuin 3
  ENSP ID: ENSP00000433077
MAFWGWRAAAALRLWGRVVERVEAGGGVGPFQACGCRLVLGGRDDVSAGLRGSHGARGEPLDPARPLQRPPRPEVPRAFRRQPRAAAPSFFFSSIKGGRRSISFSVGASSVVGSGGSSDKGKLSLQDVAELIRARACQRVVVMVGAGISTPSGIPDFRSPGSGLYSNLQQYDLPYPEAIFELPFFFHNPKPFFTLAKELYPGNYKPNVTHYFLRLLHDKGLLLRLYTQNIDGLERVSGIPASKLVEAHGTFASATCTVCQRPFPGEDIRVEPFASLTEAVRSSVPRLLINRDLVGPLAWHPRSRDVAQLGDVVHGVESLVELLGWTEEMRDLVQRETGKLDGPDK

SEQ ID NO: 79428 - protein, 23 aa, Homo sapiens
  Payload ID: 15811
  Gene Symbol: SIRT3
  Gene Name: sirtuin 3
  ENSP ID: ENSP00000433132
MVGAGISTPSGIPDFRSPGSGLY

SEQ ID NO: 79429 - protein, 46 aa, Homo sapiens
  Payload ID: 15811
  Gene Symbol: SIRT3
  Gene Name: sirtuin 3
  ENSP ID: ENSP00000433899
MAFWGWRAAAALRLWGRVVERVEAGGGVGPFQACGCRLVLGGRDDY

SEQ ID NO: 79430 - protein, 134 aa, Homo sapiens
  Payload ID: 15811
  Gene Symbol: SIRT3
  Gene Name: sirtuin 3
  ENSP ID: ENSP00000434747
MAFWGWRAAAALRLWGRVVERVEAGGGVGPFQACGCRLVLGGRDDADVMADRVPRCPVCTGVVKPDIVFFGEPLPQRFLLHVVDFPMADLLLILGTSLEVCQQACAGRRLEGRGREGYRSHLMGPSRAGATLGR

SEQ ID NO: 79431 - protein, 46 aa, Homo sapiens; identical to SEQ ID NO: 79429
  Payload ID: 15811
  Gene Symbol: SIRT3
  Gene Name: sirtuin 3
  ENSP ID: ENSP00000435014

SEQ ID NO: 79432 - protein, 318 aa, Homo sapiens
  Payload ID: 15811
  Gene Symbol: SIRT3
  Gene Name: sirtuin 3
  ENSP ID: ENSP00000435464
MAFWGWRAAAALRLWGRVVERVEAGGGVGPFQACGCRLVLGGRDDDVAELIRARACQRVVVMVGAGISTPSGIPDFRSPGSGLYSNLQQYDLPYPEAIFELPFFFHNPKPFFTLAKELYPGNYKPNVTHYFLRLLHDKGLLLRLYTQNIDGLERVSGIPASKLVEAHGTFASATCTVCQRPFPGEDIRADVMADRVPRCPVCTGVVKPDIVFFGEPLPQRFLLHVVDFPMADLLLILGTSLEVEPFASLTEAVRSSVPRLLINRDLVGPLAWHPRSRDVAQLGDVVHGVESLVELLGWTEEMRDLVQRETGKLDGPDK

SEQ ID NO: 79433 - protein, 95 aa, Homo sapiens
  Payload ID: 15811
  Gene Symbol: SIRT3
  Gene Name: sirtuin 3
  ENSP ID: ENSP00000435505
MAFWGWRAAAALRLWGRVVERVEAGGGVGPFQACGCRLVLGGRDDVSAGLRGSHGARGEPLDPARPLQRPPRPEVPRAFRRQPRAAAPSFFFSRM

SEQ ID NO: 79434 - protein, 18 aa, Homo sapiens
  Payload ID: 15811
  Gene Symbol: SIRT3
  Gene Name: sirtuin 3
  ENSP ID: ENSP00000436085
MVGAGISTPSGIPDFRSP

SEQ ID NO: 79435 - protein, 46 aa, Homo sapiens; identical to SEQ ID NO: 79429
  Payload ID: 15811
  Gene Symbol: SIRT3
  Gene Name: sirtuin 3
  ENSP ID: ENSP00000437179

SEQ ID NO: 79436 - protein, 257 aa, Homo sapiens
  Payload ID: 15811
  Gene Symbol: SIRT3
  Gene Name: sirtuin 3
  Uniprot ID: Q9NTG7
  ENSP ID: ENSP00000437216
MVGAGISTPSGIPDFRSPGSGLYSNLQQYDLPYPEAIFELPFFFHNPKPFFTLAKELYPGNYKPNVTHYFLRLLHDKGLLLRLYTQNIDGLERVSGIPASKLVEAHGTFASATCTVCQRPFPGEDIRADVMADRVPRCPVCTGVVKPDIVFFGEPLPQRFLLHVVDFPMADLLLILGTSLEVEPFASLTEAVRSSVPRLLINRDLVGPLAWHPRSRDVAQLGDVVHGVESLVELLGWTEEMRDLVQRETGKLDGPDK

SEQ ID NO: 79437 - protein, 314 aa, Homo sapiens
  Payload ID: 15812
  Gene Symbol: SIRT4
  Gene Name: sirtuin 4
  Uniprot ID: Q9Y6E7
  ENSP ID: ENSP00000202967
MKMSFALTFRSAKGRWIANPSQPCSKASIGLFVPASPPLDPEKVKELQRFITLSKRLLVMTGAGISTESGIPDYRSEKVGLYARTDRRPIQHGDFVRSAPIRQRYWARNFVGWPQFSSHQPNPAHWALSTWEKLGKLYWLVTQNVDALHTKAGSRRLTELHGCMDRVLCLDCGEQTPRGVLQERFQVLNPTWSAEAHGLAPDGDVFLSEEQVRSFQVPTCVQCGGHLKPDVVFFGDTVNPDKVDFVHKRVKEADSLLVVGSSLQVYSGYRFILTAWEKKLPIAILNIGPTRSDDLACLKLNSRCGELLPLIDPC

SEQ ID NO: 79438 - protein, 106 aa, Homo sapiens
  Payload ID: 15812
  Gene Symbol: SIRT4
  Gene Name: sirtuin 4
  ENSP ID: ENSP00000444838
MTGAGISTESGIPDYRSEKVGLYARTDRRPIQHGDFVRSAPIRQRYWARNFVGWPQFSSHQPNPAHWALSTWEKLGKLYWLVTQNVDALHTKAGSRRLTELHGCMD

SEQ ID NO: 79439 - protein, 292 aa, Homo sapiens
  Payload ID: 15813
  Gene Symbol: SIRT5
  Gene Name: sirtuin 5
  Uniprot ID: Q9NXA8
  ENSP ID: ENSP00000352830
MRPLQIVPSRLISQLYCGLKPPASTRNQICLKMARPSSSMADFRKFFAKAKHIVIISGAGVSAESGVPTFRGAGGYWRKWQAQDLATPLAFAHNPSRVWEFYHYRREVMGSKEPNAGHRAIAECETRLGKQGRRVVVITQNIDELHRKAGTKNLLEIHGSLFKTRCTSCGVVAENYKSPICPALSGKGCEEAGCGGLLRPHVVWFGENLDPAILEEVDRELAHCDLCLVVGTSSVVYPAAMFAPQVAARGVPVAEFNTETTPATNRFRFHFQGPCGTTLPEALACHENETVS

SEQ ID NO: 79440 - protein, 79 aa, Homo sapiens
  Payload ID: 15813
  Gene Symbol: SIRT5
  Gene Name: sirtuin 5
  ENSP ID: ENSP00000368552
MRPLQIVPSRLISQLYCGLKPPASTRNQICLKMARPSSRPGDSPGLCPQPVPGVGVLPLPAGGHGEQGAQRRAPRHSRV

SEQ ID NO: 79441 - protein, 299 aa, Homo sapiens
  Payload ID: 15813
  Gene Symbol: SIRT5
  Gene Name: sirtuin 5
  Uniprot ID: Q9NXA8
  ENSP ID: ENSP00000368564
MRPLQIVPSRLISQLYCGLKPPASTRNQICLKMARPSSSMADFRKFFAKAKHIVIISGAGVSAESGVPTFRGAGGYWRKWQAQDLATPLAFAHNPSRVWEFYHYRREVMGSKEPNAGHRAIAECETRLGKQGRRVVVITQNIDELHRKAGTKNLLEIHGSLFKTRCTSCGVVAENYKSPICPALSGKGAPEPGTQDASIPVEKLPRCEEAGCGGLLRPHVVWFGENLDPAILEEVDRELAHCDLCLVVGTSSVVYPAAMFAPQVAARGVPVAEFNTETTPATNRFSHLISISSLIIIKN

SEQ ID NO: 79442 - protein, 202 aa, Homo sapiens
  Payload ID: 15813
  Gene Symbol: SIRT5
  Gene Name: sirtuin 5
  Uniprot ID: Q9NXA8
  ENSP ID: ENSP00000380509
MGSKEPNAGHRAIAECETRLGKQGRRVVVITQNIDELHRKAGTKNLLEIHGSLFKTRCTSCGVVAENYKSPICPALSGKGAPEPGTQDASIPVEKLPRCEEAGCGGLLRPHVVWFGENLDPAILEEVDRELAHCDLCLVVGTSSVVYPAAMFAPQVAARGVPVAEFNTETTPATNRFRFHFQGPCGTTLPEALACHENETVS

SEQ ID NO: 79443 - protein, 41 aa, Homo sapiens
  Payload ID: 15813
  Gene Symbol: SIRT5
  Gene Name: sirtuin 5
  ENSP ID: ENSP00000476211
MRPLQIVPSRLISQLYCGLKPPASTRNQICLKMARPSSTQG

SEQ ID NO: 79444 - protein, 310 aa, Homo sapiens
  Payload ID: 15813
  Gene Symbol: SIRT5
  Gene Name: sirtuin 5
  Uniprot ID: Q9NXA8
  ENSP ID: ENSP00000476228
MRPLQIVPSRLISQLYCGLKPPASTRNQICLKMARPSSSMADFRKFFAKAKHIVIISGAGVSAESGVPTFRGAGGYWRKWQAQDLATPLAFAHNPSRVWEFYHYRREVMGSKEPNAGHRAIAECETRLGKQGRRVVVITQNIDELHRKAGTKNLLEIHGSLFKTRCTSCGVVAENYKSPICPALSGKGAPEPGTQDASIPVEKLPRCEEAGCGGLLRPHVVWFGENLDPAILEEVDRELAHCDLCLVVGTSSVVYPAAMFAPQVAARGVPVAEFNTETTPATNRFRFHFQGPCGTTLPEALACHENETVS

SEQ ID NO: 79445 - protein, 328 aa, Homo sapiens
  Payload ID: 15814
  Gene Symbol: SIRT6
  Gene Name: sirtuin 6
  Uniprot ID: Q8N6T7
  ENSP ID: ENSP00000305310
MSVNYAAGLSPYADKGKCGLPEIFDPPEELERKVWELARLVWQSSSVVFHTGAGISTASGIPDFRGPHGVWTMEERGLAPKFDTTFESARPTQTHMALVQLERVGLLRFLVSQNVDGLHVRSGFPRDKLAELHGNMFVEECAKCKTQYVRDTVVGTMGLKATGRLCTVAKARGLRACRNADLSITLGTSLQIRPSGNLPLATKRRGGRLVIVNLQPTKHDRHADLRIHGYVDEVMTRLMKHLGLEIPAWDGPRVLERALPPLPRPPTPKLEPKEESPTRINGSIPAGPKQEPCAQHNGSEPASPKRERPTSPAPHRPPKRVKAKAVPS

SEQ ID NO: 79446 - protein, 355 aa, Homo sapiens
  Payload ID: 15814
  Gene Symbol: SIRT6
  Gene Name: sirtuin 6
  Uniprot ID: Q8N6T7
  ENSP ID: ENSP00000337332
MSVNYAAGLSPYADKGKCGLPEIFDPPEELERKVWELARLVWQSSSVVFHTGAGISTASGIPDFRGPHGVWTMEERGLAPKFDTTFESARPTQTHMALVQLERVGLLRFLVSQNVDGLHVRSGFPRDKLAELHGNMFVEECAKCKTQYVRDTVVGTMGLKATGRLCTVAKARGLRACRGELRDTILDWEDSLPDRDLALADEASRNADLSITLGTSLQIRPSGNLPLATKRRGGRLVIVNLQPTKHDRHADLRIHGYVDEVMTRLMKHLGLEIPAWDGPRVLERALPPLPRPPTPKLEPKEESPTRINGSIPAGPKQEPCAQHNGSEPASPKRERPTSPAPHRPPKRVKAKAVPS

SEQ ID NO: 79447 - protein, 187 aa, Homo sapiens
  Payload ID: 15814
  Gene Symbol: SIRT6
  Gene Name: sirtuin 6
  ENSP ID: ENSP00000469001
MSVNYAAGLSPYADKGKCGLPEIFDPPEELERKVWELARLVWQSSSVVFHTGAGISTASGIPDFRDKLAELHGNMFVEECAKCKTQYVRDTVVGTMGLKATGRLCTVAKARGLRACRGELRDTILDWEDSLPDRDLALADEASRSGPAGTCRWLPSAGEAAWSSSTCSPPSTTAMLTSASMATLTRS

SEQ ID NO: 79448 - protein, 275 aa, Homo sapiens
  Payload ID: 15814
  Gene Symbol: SIRT6
  Gene Name: sirtuin 6
  ENSP ID: ENSP00000470215
DKGKCGLPEIFDPPEELERKVWELARLVWQSSSVVFHTGAGISTASGIPDFRDKLAELHGNMFVEECAKCKTQYVRDTVVGTMGLKATGRLCTVAKARGLRACRGELRDTILDWEDSLPDRDLALADEASRNADLSITLGTSLQIRPSGNLPLATKRRGGRLVIVNLQPTKHDRHADLRIHGYVDEVMTRLMKHLGLEIPAWDGPRVLERALPPLPRPPTPKLEPKEESPTRINGSIPAGPKQEPCAQHNGSEPASPKRERPTSPAPHRPPKRVK

SEQ ID NO: 79449 - protein, 43 aa, Homo sapiens
  Payload ID: 15814
  Gene Symbol: SIRT6
  Gene Name: sirtuin 6
  ENSP ID: ENSP00000471123
MSVNYAAGLSPYADKGKCGLPEGSPRSLDHGGARSGPQVRHHL

SEQ ID NO: 79450 - protein, 186 aa, Homo sapiens
  Payload ID: 15814
  Gene Symbol: SIRT6
  Gene Name: sirtuin 6
  ENSP ID: ENSP00000471837
VNYAAGLSPYADKGKCGLPEIFDPPEELERKVWELARLVWQSSSVVFHTGAGISTASGIPDFRDKLAELHGNMFVEECAKCKTQYVRDTVVGTMGLKATGRLCTVAKARGLRACRGELRDTILDWEDSLPDRDLALADEASRNADLSITLGTSLQIRPSGNLPLATKRRGGRLVIVNLQPTKHVGV

SEQ ID NO: 79451 - protein, 176 aa, Homo sapiens
  Payload ID: 15814
  Gene Symbol: SIRT6
  Gene Name: sirtuin 6
  ENSP ID: ENSP00000472023
MEERGLAPKFDTTFESARPTQTHMALVQLERVGLLRFLVSQNVDGLHVRSGFPRDKLAELHGNMFVEECAKCKTQYVRDTVVGTMGLKATGRLCTVAKARGLRACRGELRDTILDWEDSLPDRDLALADEASRSGPAGTCRWLPSAGEAAWSSSTCSPPSTTAMLTSASMATLTRS

SEQ ID NO: 79452 - protein, 43 aa, Homo sapiens; identical to SEQ ID NO: 79449
  Payload ID: 15814
  Gene Symbol: SIRT6
  Gene Name: sirtuin 6
  ENSP ID: ENSP00000473085

SEQ ID NO: 79453 - protein, 400 aa, Homo sapiens
  Payload ID: 15815
  Gene Symbol: SIRT7
  Gene Name: sirtuin 7
  Uniprot ID: Q9NRC8
  ENSP ID: ENSP00000329466
MAAGGLSRSERKAAERVRRLREEQQRERLRQVSRILRKAAAERSAEEGRLLAESADLVTELQGRSRRREGLKRRQEEVCDDPEELRGKVRELASAVRNAKYLVVYTGAGISTAASIPDYRGPNGVWTLLQKGRSVSAADLSEAEPTLTHMSITRLHEQKLVQHVVSQNCDGLHLRSGLPRTAISELHGNMYIEVCTSCVPNREYVRVFDVTERTALHRHQTGRTCHKCGTQLRDTIVHFGERGTLGQPLNWEAATEAASRADTILCLGSSLKVLKKYPRLWCMTKPPSRRPKLYIVNLQWTPKDDWAALKLHGKCDDVMRLLMAELGLEIPAYSRWQDPIFSLATPLRAGEEGSHSRKSLCRSREEAPPGDRGAPLSSAPILGGWFGRGCTKRTKRKKVT

SEQ ID NO: 79454 - protein, 116 aa, Homo sapiens
  Payload ID: 15815
  Gene Symbol: SIRT7
  Gene Name: sirtuin 7
  ENSP ID: ENSP00000459524
MAAGGLSRSERKAAERVRRLREEQQRERLRQVSRILRKAAAERSAEEGRLLAESADLVTELQGRSRRREGLKRRQEEVCDDPEELRGKVRELASAVRNAKYLVVYTGAGISTVERE

SEQ ID NO: 79455 - protein, 150 aa, Homo sapiens
  Payload ID: 15815
  Gene Symbol: SIRT7
  Gene Name: sirtuin 7
  ENSP ID: ENSP00000461044
MSITRLHEQKLVQHVVSQNCDGLHLRSGLPRTAISELHGNMYIEVCTSCVPNREYVRVFDVTERTALHRHQTGRTCHKCGTQLRDTIVHFGERGTLGQPLNWEAATEAASRADTILCLGSSLKVLKKYPRLWCMTKPPSRRPKLYIVNLQ

SEQ ID NO: 79456 - protein, 175 aa, Homo sapiens
  Payload ID: 15816
  Gene Symbol: SIVA1
  Gene Name: SIVA1, apoptosis-inducing factor
  Uniprot ID: O15304
  ENSP ID: ENSP00000329213
MPKRSCPFADVAPLQLKVRVSQRELSRGVCAERYSQEVFEKTKRLLFLGAQAYLDHVWDEGCAVVHLPESPKPGPTGAPRAARGQMLIGPDGRLIRSLGQASEADPSGVASIACSSCVRAVDGKAVCGQCERALCGQCVRTCWGCGSVACTLCGLVDCSDMYEKVLCTSCAMFET

SEQ ID NO: 79457 - protein, 110 aa, Homo sapiens
  Payload ID: 15816
  Gene Symbol: SIVA1
  Gene Name: SIVA1, apoptosis-inducing factor
  Uniprot ID: O15304
  ENSP ID: ENSP00000329447
MPKRSCPFADVAPLQLKVRVSQRELSRGVCAERYSQEVFDPSGVASIACSSCVRAVDGKAVCGQCERALCGQCVRTCWGCGSVACTLCGLVDCSDMYEKVLCTSCAMFET

SEQ ID NO: 79458 - protein, 169 aa, Homo sapiens
  Payload ID: 15816
  Gene Symbol: SIVA1
  Gene Name: SIVA1, apoptosis-inducing factor
  ENSP ID: ENSP00000451427
MPKRSCPFADVAPLQLKVRVSQRELSRGVCAERYSQEVFEKTKRLLFLGAQAYLDHVWDEGCAVVHLPESPKPGPTGAPRAARGQMLIGPDGRLIRSLGQASEADPSGVASIACSSCVRAVDGKAVCGQCERALCGQCVRTCWGCGSVACTLCGLVEPALCWKEHDVGM

SEQ ID NO: 79459 - protein, 169 aa, Homo sapiens
  Payload ID: 15816
  Gene Symbol: SIVA1
  Gene Name: SIVA1, apoptosis-inducing factor
  ENSP ID: ENSP00000451570
MPKRSCPFADVAPLQLKVRVSQRELSRGVCAERYSQEVFEKTKRLLFLGAQAYLDHVWDEGCAVVHLPESPKPGPTGAPRAARGQMLIGPDGRLIRSLGQASEADPSGVASIACSSCVRAVDGKAVCGQCERALCGQCVRTCWGCGSVACTLCGLVEGYSPGGWEWTVW

SEQ ID NO: 79460 - protein, 90 aa, Homo sapiens
  Payload ID: 15816
  Gene Symbol: SIVA1
  Gene Name: SIVA1, apoptosis-inducing factor
  ENSP ID: ENSP00000451823
MLIGPDGRLIRSLGQASEADPSGVASIACSSCVRAVDGKAVCGQCERALCGQCVRTCWGCGSVACTLCGLVDCSDMYEKVLCTSCAMFET

SEQ ID NO: 79461 - protein, 157 aa, Homo sapiens
  Payload ID: 15816
  Gene Symbol: SIVA1
  Gene Name: SIVA1, apoptosis-inducing factor
  ENSP ID: ENSP00000485991
MPKRSCPFADVAPLQLKVRVSQRELSRGVCAERYSQEVFEKTKRLLFLGAQAYLDHVWDEGCAVVHLPESPKPGPTGAPRAARGQMLIGPDGRLIRSLGQASEADPSGVASIACSSCVRAVDGKAVCGQCERALCGQCVRTCWGCGSVACTLCGLVE

SEQ ID NO: 79462 - protein, 284 aa, Homo sapiens
  Payload ID: 15817
  Gene Symbol: SIX1
  Gene Name: SIX homeobox 1
  Uniprot ID: Q15475
  ENSP ID: ENSP00000247182
MSMLPSFGFTQEQVACVCEVLQQGGNLERLGRFLWSLPACDHLHKNESVLKAKAVVAFHRGNFRELYKILESHQFSPHNHPKLQQLWLKAHYVEAEKLRGRPLGAVGKYRVRRKFPLPRTIWDGEETSYCFKEKSRGVLREWYAHNPYPSPREKRELAEATGLTTTQVSNWFKNRRQRDRAAEAKERENTENNNSSSNKQNQLSPLEGGKPLMSSSEEEFSPPQSPDQNSVLLLQGNMGHARSSNYSLPGLTASQPSHGLQTHQHQLQDSLLGPLTSSLVDLGS

SEQ ID NO: 79463 - protein, 111 aa, Homo sapiens
  Payload ID: 15817
  Gene Symbol: SIX1
  Gene Name: SIX homeobox 1
  ENSP ID: ENSP00000452700
MSMNPERPFKAEDKENTENNNSSSNKQNQLSPLEGGKPLMSSSEEEFSPPQSPDQNSVLLLQGNMGHARSSNYSLPGLTASQPSHGLQTHQHQLQDSLLGPLTSSLVDLGS

SEQ ID NO: 79464 - protein, 291 aa, Homo sapiens
  Payload ID: 15818
  Gene Symbol: SIX2
  Gene Name: SIX homeobox 2
  Uniprot ID: Q9NPC8
  ENSP ID: ENSP00000304502
MSMLPTFGFTQEQVACVCEVLQQGGNIERLGRFLWSLPACEHLHKNESVLKAKAVVAFHRGNFRELYKILESHQFSPHNHAKLQQLWLKAHYIEAEKLRGRPLGAVGKYRVRRKFPLPRSIWDGEETSYCFKEKSRSVLREWYAHNPYPSPREKRELAEATGLTTTQVSNWFKNRRQRDRAAEAKERENNENSNSNSHNPLNGSGKSVLGSSEDEKTPSGTPDHSSSSPALLLSPPPPGLPSLHSLGHPPGPSAVPVPVPGGGGADPLQHHHGLQDSILNPMSANLVDLGS

SEQ ID NO: 79465 - protein, 332 aa, Homo sapiens
  Payload ID: 15819
  Gene Symbol: SIX3
  Gene Name: SIX homeobox 3
  Uniprot ID: O95343
  ENSP ID: ENSP00000260653
MVFRSPLDLYSSHFLLPNFADSHHRSILLASSGGGNGAGGGGGAGGGSGGGNGAGGGGAGGAGGGGGGGSRAPPEELSMFQLPTLNFSPEQVASVCETLEETGDIERLGRFLWSLPVAPGACEAINKHESILRARAVVAFHTGNFRDLYHILENHKFTKESHGKLQAMWLEAHYQEAEKLRGRPLGPVDKYRVRKKFPLPRTIWDGEQKTHCFKERTRSLLREWYLQDPYPNPSKKRELAQATGLTPTQVGNWFKNRRQRDRAAAAKNRLQHQAIGPSGMRSLAEPGCPTHGSAESPSTAASPTTSVSSLTERADTGTSILSVTSSDSECDV

SEQ ID NO: 79466 - protein, 781 aa, Homo sapiens
  Payload ID: 15820
  Gene Symbol: SIX4
  Gene Name: SIX homeobox 4
  Uniprot ID: Q9UIU6
  ENSP ID: ENSP00000216513
MSSSSPTGQIASAADIKQENGMESASEGQEAHREVAGGAAVGLSPPAPAPFPLEPGDAATAAARVSGEEGAVAAAAAGAAADQVQLHSELLGRHHHAAAAAAQTPLAFSPDHVACVCEALQQGGNLDRLARFLWSLPQSDLLRGNESLLKARALVAFHQGIYPELYSILESHSFESANHPLLQQLWYKARYTEAERARGRPLGAVDKYRLRRKFPLPRTIWDGEETVYCFKEKSRNALKELYKQNRYPSPAEKRHLAKITGLSLTQVSNWFKNRRQRDRNPSETQSKSESDGNPSTEDESSKGHEDLSPHPLSSSSDGITNLSLSSHMEPVYMQQIGNAKISLSSSGVLLNGSLVPASTSPVFLNGNSFIQGPSGVILNGLNVGNTQAVALNPPKMSSNIVSNGISMTDILGSTSQDVKEFKVLQSSANSATTTSYSPSVPVSFPGLIPSTEVKREGIQTVASQDGGSVVTFTTPVQINQYGIVQIPNSGANSQFLNGSIGFSPLQLPPVSVAASQGNISVSSSTSDGSTFTSESTTVQQGKVFLSSLAPSAVVYTVPNTGQTIGSVKQEGLERSLVFSQLMPVNQNAQVNANLSSENISGSGLHPLASSLVNVSPTHNFSLSPSTLLNPTELNRDIADSQPMSAPVASKSTVTSVSNTNYATLQNCSLITGQDLLSVPMTQAALGEIVPTAEDQVGHPSPAVHQDFVQEHRLVLQSVANMKENFLSNSESKATSSLMMLDSKSKYVLDGMVDTVCEDLETDKKELAKLQTVQLDEDMQDL

SEQ ID NO: 79467 - protein, 494 aa, Homo sapiens
  Payload ID: 15820
  Gene Symbol: SIX4
  Gene Name: SIX homeobox 4
  ENSP ID: ENSP00000450761
MIASAADIKQENGMESASEGQEAHREVAGGAAVGLSPPAPAPFPLEPGDAATAAARVSGEEGAVAAAAAGAAADQVQLHSELLGRHHHAAAAAAQTPLAFSPDHVACVCEALQQGGNLDRLARFLWSLPQSDLLRGNESLLKARALVAFHQGIYPELYSILESHSFESANHPLLQQLWYKARYTEAERARGRPLGAVDKYRLRRKFPLPRTIWDGEETVYCFKEKSRNALKELYKQNRYPSPAEKRHLAKITGLSLTQVSNWFKNRRQRDRNPSETQSKSESDGNPSTEDESSKGHEDLSPHPLSSSSDGITNLSLSSHMEPVYMQQIGNAKISLSSSGVLLNGSLVPASTSPVFLNGNSFIQGPSGVILNGLNVGNTQAVALNPPKMSSNIVSNGISMTDILGSTSQDVKEFKVLQSSANSATTTSYSPSVPVSFPGLIPSTEVKREGIQTVASQDGGSVVTFTTPVQINQYGIVQIPNSGANSQFLNGSIGF

SEQ ID NO: 79468 - protein, 739 aa, Homo sapiens
  Payload ID: 15821
  Gene Symbol: SIX5
  Gene Name: SIX homeobox 5
  Uniprot ID: Q8N196
  ENSP ID: ENSP00000316842
MATLPAEPSAGPAAGGEAVAAAAATEEEEEEARQLLQTLQAAEGEAAAAAGAGAGAAAAGAEGPGSPGVPGSPPEAASEPPTGLRFSPEQVACVCEALLQAGHAGRLSRFLGALPPAERLRGSDPVLRARALVAFQRGEYAELYRLLESRPFPAAHHAFLQDLYLRARYHEAERARGRALGAVDKYRLRKKFPLPKTIWDGEETVYCFKERSRAALKACYRGNRYPTPDEKRRLATLTGLSLTQVSNWFKNRRQRDRTGAGGGAPCKSESDGNPTTEDESSRSPEDLERGAAPVSAEAAAQGSIFLAGTGPPAPCPASSSILVNGSFLAASGSPAVLLNGGPVIINGLALGEASSLGPLLLTGGGGAPPPQPSPQGASETKTSLVLDPQTGEVRLEEAQSEAPETKGAQVAAPGPALGEEVLGPLAQVVPGPPTAATFPLPPGPVPAVAAPQVVPLSPPPGYPTGLSPTSPLLNLPQVVPTSQVVTLPQAVGPLQLLAAGPGSPVKVAAAAGPANVHLINSGVGVTALQLPSATAPGNFLLANPVSGSPIVTGVALQQGKIILTATFPTSMLVSQVLPPAPGLALPLKPETAISVPEGGLPVAPSPALPEAHALGTLSAQQPPPAAATTSSTSLPFSPDSPGLLPNFPAPPPEGLMLSPAAVPVWSAGLELSAGTEGLLEAEKGLGTQAPHTVLRLPDPDPEGLLLGATAGGEVDEGLEAEAKVLTQLQSVPVEEPLEL

SEQ ID NO: 79469 - protein, 69 aa, Homo sapiens
  Payload ID: 15821
  Gene Symbol: SIX5
  Gene Name: SIX homeobox 5
  ENSP ID: ENSP00000453189
MATLPAEPSAGPAAGGEAVAAAAATEEEEEEARQLLQTLQAAEGQQLVQEPATARPDRGRRRRALQERV

SEQ ID NO: 79470 - protein, 255 aa, Homo sapiens
  Payload ID: 15821
  Gene Symbol: SIX5
  Gene Name: SIX homeobox 5
  ENSP ID: ENSP00000453239
  MOD_RES (1)..(1): Any amino acid
XPEAASEPPTGLRFSPEQVACVCEALLQAGHAGRLSRFLGALPPAERLRGSDPVLRARALVAFQRGEYAELYRLLESRPFPAAHHAFLQDLYLRARYHEAERARGRALGAVDKYRLRKKFPLPKTIWDGEETVYCFKERSRAALKACYRGNRYPTPDEKRRLATLTGLSLTQVSNWFKNRRQRDRTGAGGGAPCKRKLPPGQPCVWQPHRDGCGPAAGQDHPHRHLPHQHARLPGPAASPRPGPATEARDGHLRA

SEQ ID NO: 79471 - protein, 158 aa, Homo sapiens
  Payload ID: 15821
  Gene Symbol: SIX5
  Gene Name: SIX homeobox 5
  ENSP ID: ENSP00000481365
MATLPLKPETAISVPEGGLPVAPSPALPEAHALGTLSAQQPPPAAATTSSTSLPFSPDSPGLLPNFPAPPPEGLMLSPAAVPVWSAGLELSAGTEGLLEAEKGLGTQAPHTVLRLPDPDPEGLLLGATAGGEVDEGLEAEAKVLTQLQSVPVEEPLEL

SEQ ID NO: 79472 - protein, 246 aa, Homo sapiens
  Payload ID: 15822
  Gene Symbol: SIX6
  Gene Name: SIX homeobox 6
  Uniprot ID: O95475
  ENSP ID: ENSP00000328596
MFQLPILNFSPQQVAGVCETLEESGDVERLGRFLWSLPVAPAACEALNKNESVLRARAIVAFHGGNYRELYHILENHKFTKESHAKLQALWLEAHYQEAEKLRGRPLGPVDKYRVRKKFPLPRTIWDGEQKTHCFKERTRHLLREWYLQDPYPNPSKKRELAQATGLTPTQVGNWFKNRRQRDRAAAAKNRLQQQVLSQGSGRALRAEGDGTPEVLGVATSPAASLSSKAATSAISITSSDSECDI

SEQ ID NO: 79473 - protein, 339 aa, Homo sapiens
  Payload ID: 15823
  Gene Symbol: STEAP1
  Gene Name: six transmembrane epithelial antigen of the prostate 1
  Uniprot ID: Q9UHE8
  ENSP ID: ENSP00000297205
MESRKDITNQEELWKMKPRRNLEEDDYLHKDTGETSMLKRPVLLHLHQTAHADEFDCPSELQHTQELFPQWHLPIKIAAIIASLTFLYTLLREVIHPLATSHQQYFYKIPILVINKVLPMVSITLLALVYLPGVIAAIVQLHNGTKYKKFPHWLDKWMLTRKQFGLLSFFFAVLHAIYSLSYPMRRSYRYKLLNWAYQQVQQNKEDAWIEHDVWRMEIYVSLGIVGLAILALLAVTSIPSVSDSLTWREFHYIQSKLGIVSLLLGTIHALIFAWNKWIDIKQFVWYTPPTFMIAVFLPIVVLIFKSILFLPCLRKKILKIRHGWEDVTKINKTEICSQL

SEQ ID NO: 79474 - protein, 101 aa, Homo sapiens
  Payload ID: 15823
  Gene Symbol: STEAP1
  Gene Name: six transmembrane epithelial antigen of the prostate 1
  ENSP ID: ENSP00000394402
  MOD_RES (1)..(1): Any amino acid
XPMRRSYRYKLLNWAYQQVQQNKEDAWIEHDVWRMEIYVSLGIVGLAILALLAVTSIPSVSDSLTWREFHYIQIIHKKSDVPESLWDPCLTRFKGLNLIQS

SEQ ID NO: 79475 - protein, 408 aa, Homo sapiens
  Payload ID: 15824
  Gene Symbol: SSB
  Gene Name: Sjogren syndrome antigen B (autoantigen La)
  Uniprot ID: P05455
  ENSP ID: ENSP00000260956
MAENGDNEKMAALEAKICHQIEYYFGDFNLPRDKFLKEQIKLDEGWVPLEIMIKFNRLNRLTTDFNVIVEALSKSKAELMEISEDKTKIRRSPSKPLPEVTDEYKNDVKNRSVYIKGFPTDATLDDIKEWLEDKGQVLNIQMRRTLHKAFKGSIFVVFDSIESAKKFVETPGQKYKETDLLILFKDDYFAKKNEERKQNKVEAKLRAKQEQEAKQKLEEDAEMKSLEEKIGCLLKFSGDLDDQTCREDLHILFSNHGEIKWIDFVRGAKEGIILFKEKAKEALGKAKDANNGNLQLRNKEVTWEVLEGEVEKEALKKIIEDQQESLNKWKSKGRRFKGKGKGNKAAQPGSGKGKVQFQGKKTKFASDDEHDEHDENGATGPVKRAREETDKEEPASKQQKTENGAGDQ

SEQ ID NO: 79476 - protein, 408 aa, Homo sapiens; identical to SEQ ID NO: 79475
  Payload ID: 15824
  Gene Symbol: SSB
  Gene Name: Sjogren syndrome antigen B (autoantigen La)
  Uniprot ID: P05455
  ENSP ID: ENSP00000386636

SEQ ID NO: 79477 - protein, 134 aa, Homo sapiens
  Payload ID: 15824
  Gene Symbol: SSB
  Gene Name: Sjogren syndrome antigen B (autoantigen La)
  ENSP ID: ENSP00000395758
MAENGDNEKMAALEAKICHQIEYYFGDFNLPRDKFLKEQIKLDEGWVPLEIMIKFNRLNRLTTDFNVIVEALSKSKAELMEISEDKTKIRRSPSKPLPEVTDEYKNDVKNRSVYISHPVAHVGVQWCDHGPLQS

SEQ ID NO: 79478 - protein, 120 aa, Homo sapiens
  Payload ID: 15824
  Gene Symbol: SSB
  Gene Name: Sjogren syndrome antigen B (autoantigen La)
  ENSP ID: ENSP00000396890
MIKFNRLNRLTTDFNVIVEALSKSKAELMEISEDKTKIRRSPSKPLPEVTDEYKNDVKNRSVYIKGFPTDATLDDIKEWLEDKGQVLNIQMRRTLHKAFKGSIFVVFDSIESAKKFVETP

SEQ ID NO: 79479 - protein, 184 aa, Homo sapiens
  Payload ID: 15824
  Gene Symbol: SSB
  Gene Name: Sjogren syndrome antigen B (autoantigen La)
  ENSP ID: ENSP00000397029
MAENGDNEKMAALEAKICHQIEYYFGDFNLPRDKFLKEQIKLDEGWVPLEIMIKFNRLNRLTTDFNVIVEALSKSKAELMEISEDKTKIRRSPSKPLPEVTDEYKNDVKNRSVYIKGFPTDATLDDIKEWLEDKGQVLNIQMRRTLHKAFKGSIFVVFDSIESAKKFVETPGQKYKETDLLILF

SEQ ID NO: 79480 - protein, 119 aa, Homo sapiens
  Payload ID: 15825
  Gene Symbol: SSNA1
  Gene Name: Sjogren syndrome nuclear autoantigen 1
  Uniprot ID: O43805
  ENSP ID: ENSP00000313752
MTQQGAALQNYNNELVKCIEELCQKREELCRQIQEEEDEKQRLQNEVRQLTEKLARVNENLARKIASRNEFDRTIAETEAAYLKILESSQTLLSVLKREAGNLTKATAPDQKSSGGRDS

SEQ ID NO: 79481 - protein, 81 aa, Homo sapiens
  Payload ID: 15825
  Gene Symbol: SSNA1
  Gene Name: Sjogren syndrome nuclear autoantigen 1
  ENSP ID: ENSP00000479123
MTQQGAALQNYNNELVKCIEELCQKREELCRQIQEEEDEKQRLQNEILESSQTLLSVLKREAGNLTKATAPDQKSSGGRDS

SEQ ID NO: 79482 - protein, 199 aa, Homo sapiens
  Payload ID: 15826
  Gene Symbol: SSSCA1
  Gene Name: Sjogren syndrome/scleroderma autoantigen 1
  Uniprot ID: O60232
  ENSP ID: ENSP00000312318
MALNGAEVDDFSWEPPTEAETKVLQARRERQDRISRLMGDYLLRGYRMLGETCADCGTILLQDKQRKIYCVACQELDSDVDKDNPALNAQAALSQAREHQLASASELPLGSRPAPQPPVPRPEHCEGAAAGLKAAQGPPAPAVPPNTDVMACTQTALLQKLTWASAELGSSTSLETSIQLCGLIRACAEALRSLQQLQH

SEQ ID NO: 79483 - protein, 81 aa, Homo sapiens
  Payload ID: 15826
  Gene Symbol: SSSCA1
  Gene Name: Sjogren syndrome/scleroderma autoantigen 1
  ENSP ID: ENSP00000431666
MALNGAEVDDFSWEPPTEAETKVLQARRERQDRISRLMGDYLLRGYRMLGETRSSSKTNSGKSTAWLVRNSTQTWIKIIPL

SEQ ID NO: 79484 - protein, 60 aa, Homo sapiens
  Payload ID: 15826
  Gene Symbol: SSSCA1
  Gene Name: Sjogren syndrome/scleroderma autoantigen 1
  ENSP ID: ENSP00000432938
MGDYLLRGYRMLGETCADCGTILLQDKQRKIYCVACQELDSDVDKDNPALRDVVPQPLPF

SEQ ID NO: 79485 - protein, 162 aa, Homo sapiens
  Payload ID: 15826
  Gene Symbol: SSSCA1
  Gene Name: Sjogren syndrome/scleroderma autoantigen 1
  ENSP ID: ENSP00000434381
MGDYLLRGYRMLGETCADCGTILLQDKQRKIYCVACQELDSDVDKDNPALNAQAALSQAREHQLASASELPLGSRPAPQPPVPRPEHCEGAAAGLKAAQGPPAPAVPPNTDVMACTQTALLQKLTWASAELGSSTSLETSIQLCGLIRACAEALRSLQQLQH

SEQ ID NO: 79486 - protein, 193 aa, Homo sapiens
  Payload ID: 15826
  Gene Symbol: SSSCA1
  Gene Name: Sjogren syndrome/scleroderma autoantigen 1
  ENSP ID: ENSP00000435432
EVDDFSWEPPTEAETKVLQARRERQDRISRLMGDYLLRGYRMLGETCADCGTILLQDKQRKIYCVACQELDSDVDKDNPALNAQAALSQAREHQLASASELPLGSRPAPQPPVPRPEHCEGAAAGLKAAQGPPAPAVPPNTDVMACTQTALLQKLTWASAELGSSTSLETSIQLCGLIRACAEALRSLQQLQH

SEQ ID NO: 79487 - protein, 107 aa, Homo sapiens
  Payload ID: 15826
  Gene Symbol: SSSCA1
  Gene Name: Sjogren syndrome/scleroderma autoantigen 1
  ENSP ID: ENSP00000435982
  MOD_RES (1)..(1): Any amino acid
XISRLMGDYLLRGYRMLGETCADCGTILLQDKQRKIYCVACQELDSDVDKDNPGGAAAVGHVLVVPAVGPVRVNPGLQTPVPRPELLPGPVILPPFGQLLPTGCGPV

SEQ ID NO: 79488 - protein, 868 aa, Homo sapiens
  Payload ID: 15827
  Gene Symbol: SKOR1
  Gene Name: SKI family transcriptional corepressor 1
  Uniprot ID: P84550
  ENSP ID: ENSP00000343200
MIPKSLVQAAETQRGLCEPGGKGREGRSGGKGETRPRGVGTQEGKGTIPGSPREKRGERGEGDPALLPAEDLWRLPGSKDRLRSSLLPPPGPPSSDSGPGPPSSHSGKTAQGPRTLNWARKQSARTSSNLCAWSLAMATKMAEIPSSPYEPGQRGMKDTQRGDAPQRGSPEPRILQLARVGNVYLKEESSRSGRLEAKKWIPTKFLENLSVPHVDLGGNQLWSGGMEALTTQLGPGREGSSSPNSKQELQPYSGSSALKPNQVGETSLYGVPIVSLVIDGQERLCLAQISNTLLKNYSYNEIHNRRVALGITCVQCTPVQLEILRRAGAMPISSRRCGMITKREAERLCKSFLGEHKPPKLPENFAFDVVHECAWGSRGSFIPARYNSSRAKCIKCGYCSMYFSPNKFIFHSHRTPDAKYTQPDAANFNSWRRHLKLSDKSATDELSHAWEDRGLGLATGASGPAGPGGPGGGAGVRSYPVIPVPSKGFGLLQKLPPPLFPHPYGFPTAFGLCPKKDDPVLGAGEPKGGSYVSAFRPVVKDTESIAKLYGSAREAYGAGPARGPGPGAGSGGYVSPDFLSEGSSSYNSASPDVDTADEPEVDVESNRFPDDEDAQEETEPSAPSAGGGPDAGRPAFGDLAAEDLVRRPERSPPSGGGGYELREPCGPLGGPAPAKVFAPERDEHVKSAAVALGPAASYVCTPEAHEPDKEDNHSPADDLETRKSYPDQRSISQPSPANTDRGEDGLTLDVTGTHLVEKDIENLAREELQKLLLEQMELRKKLEREFQSLKDNFQDQMKRELAYREEMVQQLQIVRDTLCNELDQERKARYAIQQKLKEAHDALHHFSCKMLTPRHCTGNCSFKPPLLP

SEQ ID NO: 79489 - protein, 965 aa, Homo sapiens
  Payload ID: 15827
  Gene Symbol: SKOR1
  Gene Name: SKI family transcriptional corepressor 1
  Uniprot ID: P84550
  ENSP ID: ENSP00000369374
MALLCGLGQVTLRIWVSLPSQSENGIGFLAARAFLRSGGMEALTTQLGPGREGSSSPNSKQELQPYSGSSALKPNQVGETSLYGVPIVSLVIDGQERLCLAQISNTLLKNYSYNEIHNRRVALGITCVQCTPVQLEILRRAGAMPISSRRCGMITKREAERLCKSFLGEHKPPKLPENFAFDVVHECAWGSRGSFIPARYNSSRAKCIKCGYCSMYFSPNKFIFHSHRTPDAKYTQPDAANFNSWRRHLKLSDKSATDELSHAWEDVKAMFNGGTRKRTFSLQGGGGGGANGGSGGQGKGGAGGGGGGGPGCGAEMAPGPPPHKSLRCGEDEAAGPPGPPPPHPQRGLGLATGASGPAGPGGPGGGAGVRSYPVIPVPSKGFGLLQKLPPPLFPHPYGFPTAFGLCPKKDDPVLGAGEPKGGPGTGSGGGGAGTGGGAGGPGASHLPPGAGAGPGGGAMFWGHQPSGAAKDAAAVAAAAAAATVYPTFPMFWPAAGSLPVPSYPAAQSQAKAVAAAVAAAAAAAAAAAGSGAPEPLDGAEPAKESGLGAEERCPSALSRGPLDEDGTDEALPPPLAPLPPPPPPPARKGSYVSAFRPVVKDTESIAKLYGSAREAYGAGPARGPGPGAGSGGYVSPDFLSEGSSSYNSASPDVDTADEPEVDVESNRFPDDEDAQEETEPSAPSAGGGPDGEQPTGPPSATSSGADGPANSPDGGSPRPRRRLGPPPAGRPAFGDLAAEDLVRRPERSPPSGGGGYELREPCGPLGGPAPAKVFAPERDEHVKSAAVALGPAASYVCTPEAHEPDKEDNHSPADDLETRKSYPDQRSISQPSPANTDRGEDGLTLDVTGTHLVEKDIENLAREELQKLLLEQMELRKKLEREFQSLKDNFQDQMKRELAYREEMVQQLQIVRDTLCNELDQERKARYAIQQKLKEAHDALHHFSCKMLTPRHCTGNCSFKPPLLP

SEQ ID NO: 79490 - protein, 926 aa, Homo sapiens
  Payload ID: 15827
  Gene Symbol: SKOR1
  Gene Name: SKI family transcriptional corepressor 1
  ENSP ID: ENSP00000451193
MEALTTQLGPGREGSSSPNSKQELQPYSGSSALKPNQVGETSLYGVPIVSLVIDGQERLCLAQISNTLLKNYSYNEIHNRRVALGITCVQCTPVQLEILRRAGAMPISSRRCGMITKREAERLCKSFLGEHKPPKLPENFAFDVVHECAWGSRGSFIPARYNSSRAKCIKCGYCSMYFSPNKFIFHSHRTPDAKYTQPDAANFNSWRRHLKLSDKSATDELSHAWEDVKAMFNGGTRKRTFSLQGGGGGGANGGSGGQGKGGAGGGGGGGPGCGAEMAPGPPPHKSLRCGEDEAAGPPGPPPPHPQRGLGLATGASGPAGPGGPGGGAGVRSYPVIPVPSKGFGLLQKLPPPLFPHPYGFPTAFGLCPKKDDPVLGAGEPKGGPGTGSGGGGAGTGGGAGGPGASHLPPGAGAGPGGGAMFWGHQPSGAAKDAAAVAAAAAAATVYPTFPMFWPAAGSLPVPSYPAAQSQAKAVAAAVAAAAAAAAAAAGSGAPEPLDGAEPAKESGLGAEERCPSALSRGPLDEDGTDEALPPPLAPLPPPPPPPARKGSYVSAFRPVVKDTESIAKLYGSAREAYGAGPARGPGPGAGSGGYVSPDFLSEGSSSYNSASPDVDTADEPEVDVESNRFPDDEDAQEETEPSAPSAGGGPDGEQPTGPPSATSSGADGPANSPDGGSPRPRRRLGPPPAGRPAFGDLAAEDLVRRPERSPPSGGGGYELREPCGPLGGPAPAKVFAPERDEHVKSAAVALGPAASYVCTPEAHEPDKEDNHSPADDLETRKSYPDQRSISQPSPANTDRGEDGLTLDVTGTHLVEKDIENLAREELQKLLLEQMELRKKLEREFQSLKDNFQDQMKRELAYREEMVQQLQIVRDTLCNELDQERKARYAIQQKLKEAHDALHHFSCKMLTPRHCTGNCSFKPPLLP

SEQ ID NO: 79491 - protein, 937 aa, Homo sapiens
  Payload ID: 15827
  Gene Symbol: SKOR1
  Gene Name: SKI family transcriptional corepressor 1
  ENSP ID: ENSP00000452361
MALLCGLGSGGMEALTTQLGPGREGSSSPNSKQELQPYSGSSALKPNQVGETSLYGVPIVSLVIDGQERLCLAQISNTLLKNYSYNEIHNRRVALGITCVQCTPVQLEILRRAGAMPISSRRCGMITKREAERLCKSFLGEHKPPKLPENFAFDVVHECAWGSRGSFIPARYNSSRAKCIKCGYCSMYFSPNKFIFHSHRTPDAKYTQPDAANFNSWRRHLKLSDKSATDELSHAWEDVKAMFNGGTRKRTFSLQGGGGGGANGGSGGQGKGGAGGGGGGGPGCGAEMAPGPPPHKSLRCGEDEAAGPPGPPPPHPQRGLGLATGASGPAGPGGPGGGAGVRSYPVIPVPSKGFGLLQKLPPPLFPHPYGFPTAFGLCPKKDDPVLGAGEPKGGPGTGSGGGGAGTGGGAGGPGASHLPPGAGAGPGGGAMFWGHQPSGAAKDAAAVAAAAAAATVYPTFPMFWPAAGSLPVPSYPAAQSQAKAVAAAVAAAAAAAAAAAGSGAPEPLDGAEPAKESGLGAEERCPSALSRGPLDEDGTDEALPPPLAPLPPPPPPPARKGSYVSAFRPVVKDTESIAKLYGSAREAYGAGPARGPGPGAGSGGYVSPDFLSEGSSSYNSASPDVDTADEPEVDVESNRFPDDEDAQEETEPSAPSAGGGPDGEQPTGPPSATSSGADGPANSPDGGSPRPRRRLGPPPAGRPAFGDLAAEDLVRRPERSPPSGGGGYELREPCGPLGGPAPAKVFAPERDEHVKSAAVALGPAASYVCTPEAHEPDKEDNHSPADDLETRKSYPDQRSISQPSPANTDRGEDGLTLDVTGTHLVEKDIENLAREELQKLLLEQMELRKKLEREFQSLKDNFQDQMKRELAYREEMVQQLQIVRDTLCNELDQERKARYAIQQKLKEAHDALHHFSCKMLTPRHCTGNCSFKPPLLP

SEQ ID NO: 79492 - protein, 296 aa, Homo sapiens
  Payload ID: 15828
  Gene Symbol: SKOR2
  Gene Name: SKI family transcriptional corepressor 2
  Uniprot ID: Q2VWA4
  ENSP ID: ENSP00000383255
MASSPLPGPNDILLASPSSAFQPDTLSQPRPGHANLKPNQVGQVILYGIPIVSLVIDGQERLCLAQISNTLLKNFSYNEIHNRRVALGITCVQCTPVQLEILRRAGAMPISSRRCGMITKREAERLCKSFLGENRPPKLPDNFAFDVSHECAWGCRGSFIPARYNSSRAKCIKCSYCNMYFSPNKFIFHSHRTPDAKYTQPDAANFNSWRRHLKLTDKSPQDELVFAWEDVKAMFNGGSRKRALPQPGAHPACHPLSSIRTRSIAFSSQTLMLLEEIFGEKDQEDYMRINEDNIWL

SEQ ID NO: 79493 - protein, 1001 aa, Homo sapiens
  Payload ID: 15828
  Gene Symbol: SKOR2
  Gene Name: SKI family transcriptional corepressor 2
  Uniprot ID: Q2VWA4
  ENSP ID: ENSP00000414750
MASSPLPGPNDILLASPSSAFQPDTLSQPRPGHANLKPNQVGQVILYGIPIVSLVIDGQERLCLAQISNTLLKNFSYNEIHNRRVALGITCVQCTPVQLEILRRAGAMPISSRRCGMITKREAERLCKSFLGENRPPKLPDNFAFDVSHECAWGCRGSFIPARYNSSRAKCIKCSYCNMYFSPNKFIFHSHRTPDAKYTQPDAANFNSWRRHLKLTDKSPQDELVFAWEDVKAMFNGGSRKRALPQPGAHPACHPLSSVKAAAVAAAAAVAGGGGLLGPHLLGAPPPPPPPPPPLAELAGAPHAHHKRPRFDDDDDSLQEAAVVAAASLSAAAASLSVAAASGGAGTGGGGAGGGCVAGVGVGAGAGAGAGAGAKGPRSYPVIPVPSKGSFGGVLQKFPGCGGLFPHPYTFPAAAAAFSLCHKKEDAGAAAEALGGAGAGGAGAAPKAGLSGLFWPAGRKDAFYPPFCMFWPPRTPGGLPVPTYLQPPPQPPSALGCALGESPALLRQAFLDLAEPGGAAGSAEAAPPPGQPPQVVANGPGSGPPPPAGGAGSRDALFESPPGGSGGDCSAGSTPPADSVAAAGAGAAAAGSGPAGSRVPAPHHPHLLEGRKAGGGSYHHSSAFRPVGGKDDAESLAKLHGASAGAPHSAQTHPHHHHHPHHHHHHHHPPQPPSPLLLLPPQPDEPGSERHHPAPPPPPPPPPPPPLAQHPHHRGLLSPGGTSCCYPSEDSSEDEDDEEEEQEVDVEGHKPPEGEEEEEGRDPDDDEEEDEETEVLLGDPLVGGGRFLQGRGPSEKGSSRDRAPAVAGAFPLGLNSSRLLQEDGKLGDPGSDLPPPPPPPLAPQKASGGGSSSPGSPVHHPSLEEQPSYKDSQKTKENNQVIVSTKDDNSFSDKNKEHSFFITDSDASGGDFWRERSGEHTQETNSPHSLKKDVENMGKEELQKVLFEQIDLRRRLEQEFQVLKGNTSFPVFNNFQDQMKRELAYREEMVQQLQIVSCIST

SEQ ID NO: 79494 - protein, 1015 aa, Homo sapiens
  Payload ID: 15828
  Gene Symbol: SKOR2
  Gene Name: SKI family transcriptional corepressor 2
  ENSP ID: ENSP00000483333
MASSPLPGPNDILLASPSSAFQPDTLSQPRPGHANLKPNQVGQVILYGIPIVSLVIDGQERLCLAQISNTLLKNFSYNEIHNRRVALGITCVQCTPVQLEILRRAGAMPISSRRCGMITKREAERLCKSFLGENRPPKLPDNFAFDVSHECAWGCRGSFIPARYNSSRAKCIKCSYCNMYFSPNKFIFHSHRTPDAKYTQPDAANFNSWRRHLKLTDKSPQDELVFAWEDVKAMFNGGSRKRALPQPGAHPACHPLSSVKAAAVAAAAAVAGGGGLLGPHLLGAPPPPPPPPPPLAELAGAPHAHHKRPRFDDDDDSLQEAAVVAAASLSAAAASLSVAAASGGAGTGGGGAGGGCVAGVGVGAGAGAGAGAGAKGPRSYPVIPVPSKGSFGGVLQKFPGCGGLFPHPYTFPAAAAAFSLCHKKEDAGAAAEALGGAGAGGAGAAPKAGLSGLFWPAGRKDAFYPPFCMFWPPRTPGGLPVPTYLQPPPQPPSALGCALGESPALLRQAFLDLAEPGGAAGSAEAAPPPGQPPQVVANGPGSGPPPPAGGAGSRDALFESPPGGSGGDCSAGSTPPADSVAAAGAGAAAAGSGPAGSRVPAPHHPHLLEGRKAGGGSYHHSSAFRPVGGKDDAESLAKLHGASAGAPHSAQTHPHHHHHPHHHHHHHHPPQPPSPLLLLPPQPDEPGSERHHPAPPPPPPPPPPPPLAQHPHHRGLLSPGGTSCCYPSEDSSEDEDDEEEEQEVDVEGHKPPEGEEEEEGRDPDDDEEEDEETEVLLGDPLVGGGRFLQGRGPSEKGSSRDRAPAVAGAFPLGLNSSRLLQEDGKLGDPGSDLPPPPPPPLAPQKASGGGSSSPGSPVHHPSLEEQPSYKDSQKTKENNQVIVSTKDDNSFSDKNKEHSFFITDSDASGGDFWRERSGEHTQETNSPHSLKKDVENMGKEELQKVLFEQIDLRRRLEQEFQVLKGNTSFPVFNNFQDQMKRELAYREEMVQQLQIIPYAASLIRKEKLGAHLSKS

SEQ ID NO: 79495 - protein, 728 aa, Homo sapiens
  Payload ID: 15829
  Gene Symbol: SKI
  Gene Name: SKI proto-oncogene
  Uniprot ID: P12755
  ENSP ID: ENSP00000367797
MEAAAGGRGCFQPHPGLQKTLEQFHLSSMSSLGGPAAFSARWAQEAYKKESAKEAGAAAVPAPVPAATEPPPVLHLPAIQPPPPVLPGPFFMPSDRSTERCETVLEGETISCFVVGGEKRLCLPQILNSVLRDFSLQQINAVCDELHIYCSRCTADQLEILKVMGILPFSAPSCGLITKTDAERLCNALLYGGAYPPPCKKELAASLALGLELSERSVRVYHECFGKCKGLLVPELYSSPSAACIQCLDCRLMYPPHKFVVHSHKALENRTCHWGFDSANWRAYILLSQDYTGKEEQARLGRCLDDVKEKFDYGNKYKRRVPRVSSEPPASIRPKTDDTSSQSPAPSEKDKPSSWLRTLAGSSNKSLGCVHPRQRLSAFRPWSPAVSASEKELSPHLPALIRDSFYSYKSFETAVAPNVALAPPAQQKVVSSPPCAAAVSRAPEPLATCTQPRKRKLTVDTPGAPETLAPVAAPEEDKDSEAEVEVESREEFTSSLSSLSSPSFTSSSSAKDLGSPGARALPSAVPDAAAPADAPSGLEAELEHLRQALEGGLDTKEAKEKFLHEVVKMRVKQEEKLSAALQAKRSLHQELEFLRVAKKEKLREATEAKRNLRKEIERLRAENEKKMKEANESRLRLKRELEQARQARVCDKGCEAGRLRAKYSAQIEDLQVKLQHAEADREQLRADLLREREAREHLEKVVKELQEQLWPRARPEAAGSEGAAELEP

SEQ ID NO: 79496 - protein, 908 aa, Homo sapiens
  Payload ID: 15830
  Gene Symbol: SKIDA1
  Gene Name: SKI/DACH domain containing 1
  ENSP ID: ENSP00000410041
MGDLKSGFEEVDGVRLGYLIIKGKQMFALSQVFTDLLKNIPRTTVHKRMDHLKVKKHHCDLEELRKLKAINSIAFHAAKCTLISREDVEALYTSCKTERVLKTKRRRVGRALATKAPPPERAAAASPRPGFWKDKHQLWRGLSGAARPLPISAQSQRPGAAAARPAAHLPQIFSKYPGSHYPEIVRSPCKPPLNYETAPLQGNYVAFPSDPAYFRSLLCSKHPAAAAAAAAAAAAAAAAAAAAAYYQVSAAGPQPKAAAGAGGPGSLSYRCKRKRGGAKDCLLAPHAGARRLLLLPRSYKAKAAAAAAAAAAAAAAAAGATCLERFHLVNGFCPPPHHHHHHHHHHHHHHHRAQPPQQSHHPPHHHRPQPHLGSFPESCSSDSESSSYSDHAANDSDFGSSLSSSSNSVSSEEEEEEGEEEEEEEEEEGGSGASDSSEVSSEEEDSSTESDSSSGSSQVSVQSIRFRRTSFCKPPSVQAQANFLYHLASAAAATKPAAFEDAGRLPDLKSSVKAESPAEWNLQSWAPKASPVYCPASLGSCFAEIRNDRVSEITFPHSEISNAVKRTDLTINCLAEGASSPSPKTNNAFPQQRILREARKCLQTTPTTHCADNNTIAARFLNNDSSGAEANSEKYSKILHCPEFATDLPSSQTDPEVNAAGAAATKAENPCTDTGDKTLPFLHNIKIKVEDSSANEEYEPHLFTNKLKCECNDTKGEFYSVTESKEEDALLTTAKEGFACPEKETPSLNPLAQSQGLSCTLGSPKPEDGEYKFGARVRKNYRTLVLGKRPVLQTPPVKPNLKSARSPRPTGKTETNEGTLDDFTVINRRKKVASNVASAVKRPFHFMANFPCPPSLIIGRDGDLWPAYSLNTTKDSQTPHKAHPIWKWQLGGSAIPLPPSHKFRKFNS

SEQ ID NO: 79497 - protein, 829 aa, Homo sapiens
  Payload ID: 15830
  Gene Symbol: SKIDA1
  Gene Name: SKI/DACH domain containing 1
  ENSP ID: ENSP00000442432
MGDLKSGFEEVDGVRLGYLIIKGKQMFALSQVFTDLLKNIPRTTVHKRMDHLKVKKHHCDLEELRKLKAINSIAFHAAKCTLISREDVEALYTSCKTERVLKTKRRRVGRALATKAPPPERAAAASPRPGFWKDKHQLWRGLSGAARPLPISAQSQRPGAAAARPAAHLPQIFSKYPGSHYPEIVRSPCKPPLNYETAPLQGNYVAFPSDPAYFRSLLCSKHPAAAAAAAAAAAAAAAAGATCLERFHLVNGFCPPPHHHHHHHHHHHHHHHRAQPPQQSHHPPHHHRPQPHLGSFPESCSSDSESSSYSDHAANDSDFGSSLSSSSNSVSSEEEEEEGEEEEEEEEEEGGSGASDSSEVSSEEEDSSTESDSSSGSSQVSVQSIRFRRTSFCKPPSVQAQANFLYHLASAAAATKPAAFEDAGRLPDLKSSVKAESPAEWNLQSWAPKASPVYCPASLGSCFAEIRNDRVSEITFPHSEISNAVKRTDLTINCLAEGASSPSPKTNNAFPQQRILREARKCLQTTPTTHCADNNTIAARFLNNDSSGAEANSEKYSKILHCPEFATDLPSSQTDPEVNAAGAAATKAENPCTDTGDKTLPFLHNIKIKVEDSSANEEYEPHLFTNKLKCECNDTKGEFYSVTESKEEDALLTTAKEGFACPEKETPSLNPLAQSQGLSCTLGSPKPEDGEYKFGARVRKNYRTLVLGKRPVLQTPPVKPNLKSARSPRPTGKTETNEGTLDDFTVINRRKKVASNVASAVKRPFHFMANFPCPPSLIIGRDGDLWPAYSLNTTKDSQTPHKAHPIWKWQLGGSAIPLPPSHKFRKFNS

SEQ ID NO: 79498 - protein, 1246 aa, Homo sapiens
  Payload ID: 15831
  Gene Symbol: SKIV2L
  Gene Name: SKI2 homolog, superkiller viralicidic activity 2-like
  Uniprot ID: Q15477
  ENSP ID: ENSP00000364543
MMETERLVLPPPDPLDLPLRAVELGCTGHWELLNLPGAPESSLPHGLPPCAPDLQQEAEQLFLSSPAWLPLHGVEHSARKWQRKTDPWSLLAVLGAPVPSDLQAQRHPTTGQILGYKEVLLENTNLSATTSLSLRRPPGPASQSLWGNPTQYPFWPGGMDEPTITDLNTREEAEEEIDFEKDLLTIPPGFKKGMDFAPKDCPTPAPGLLSLSCMLEPLDLGGGDEDENEAVGQPGGPRGDTVSASPCSAPLARASSLEDLVLKEASTAVSTPEAPEPPSQEQWAIPVDATSPVGDFYRLIPQPAFQWAFEPDVFQKQAILHLERHDSVFVAAHTSAGKTVVAEYAIALAQKHMTRTIYTSPIKALSNQKFRDFRNTFGDVGLLTGDVQLHPEASCLIMTTEILRSMLYSGSDVIRDLEWVIFDEVHYINDVERGVVWEEVLIMLPDHVSIILLSATVPNALEFADWIGRLKRRQIYVISTVTRPVPLEHYLFTGNSSKTQGELFLLLDSRGAFHTKGYYAAVEAKKERMSKHAQTFGAKQPTHQGGPAQDRGVYLSLLASLRTRAQLPVVVFTFSRGRCDEQASGLTSLDLTTSSEKSEIHLFLQRCLARLRGSDRQLPQVLHMSELLNRGLGVHHSGILPILKEIVEMLFSRGLVKVLFATETFAMGVNMPARTVVFDSMRKHDGSTFRDLLPGEYVQMAGRAGRRGLDPTGTVILLCKGRVPEMADLHRMMMGKPSQLQSQFRLTYTMILNLLRVDALRVEDMMKRSFSEFPSRKDSKAHEQALAELTKRLGALEEPDMTGQLVDLPEYYSWGEELTETQHMIQRRIMESVNGLKSLSAGRVVVVKNQEHHNALGVILQVSSNSTSRVFTTLVLCDKPLSQDPQDRGPATAEVPYPDDLVGFKLFLPEGPCDHTVVKLQPGDMAAITTKVLRVNGEKILEDFSKRQQPKFKKDPPLAAVTTAVQELLRLAQAHPAGPPTLDPVNDLQLKDMSVVEGGLRARKLEELIQGAQCVHSPRFPAQYLKLRERMQIQKEMERLRFLLSDQSLLLLPEYHQRVEVLRTLGYVDEAGTVKLAGRVACAMSSHELLLTELMFDNALSTLRPEEIAALLSGLVCQSPGDAGDQLPNTLKQGIERVRAVAKRIGEVQVACGLNQTVEEFVGELNFGLVEVVYEWARGMPFSELAGLSGTPEGLVVRCIQRLAEMCRSLRGAARLVGEPVLGAKMETAATLLRRDIVFAASLYTQ

SEQ ID NO: 79499 - protein, 1246 aa, Homo sapiens
  Payload ID: 15831
  Gene Symbol: SKIV2L
  Gene Name: SKI2 homolog, superkiller viralicidic activity 2-like
  Uniprot ID: Q15477
  ENSP ID: ENSP00000372827
MMETERLVLPPPDPLDLPLRAVELGCTGHWELLNLPGAPESSLPHGLPPCAPDLQQEAEQLFLSSPAWLPLHGVEHSARKWQRKTDPWSLLAVLGAPVPSDLQAQRHPTTGQILGYKEVLLENTNLSATTSLSLRRPPGPASQSLWGNPTQYPFWPGGMDEPTITDLNTREEAEEEIDFEKDLLTIPPGFKKGMDFAPKDCPTPAPGLLSLSCLLEPLDLGGGDEDENEAVGQPGGPRGDTVSASPCSAPLARASSLEDLVLKEASTAVSTPEAPEPPSQEQWAIPVDATSPVGDFYRLIPQPAFQWAFEPDVFQKQAILHLERHDSVFVAAHTSAGKTVVAEYAIALAQKHMTRTIYTSPIKALSNQKFRDFRNTFGDVGLLTGDVQLHPEASCLIMTTEILRSMLYSGSDVIRDLEWVIFDEVHYINDVERGVVWEEVLIMLPDHVSIILLSATVPNALEFADWIGRLKRRQIYVISTVTRPVPLEHYLFTGNSSKTQGELFLLLDSRGAFHTKGYYAAVEAKKERMSKHAQTFGAKQPTHQGGPAQDRGVYLSLLASLRTRAQLPVVVFTFSRGRCDEQASGLTSLDLTTSSEKSEIHLFLQRCLARLRGSDRQLPQVLHMSELLNRGLGVHHSGILPILKEIVEMLFSRGLVKVLFATETFAMGVNMPARTVVFDSMRKHDGSTFRDLLPGEYVQMAGRAGRRGLDPTGTVILLCKGRVPEMADLHRMMMGKPSQLQSQFRLTYTMILNLLRVDALRVEDMMKRSFSEFPSRKDSKAHEQALAELTKRLGALEEPDMTGQLVDLPEYYSWGEELTETQHMIQRRIMESVNGLKSLSAGRVVVVKNQEHHNALGVILQVSSNSTSRVFTTLVLCDKPLSQDPQDRGPATAEVPYPDDLVGFKLFLPEGPCDHTVVKLQPGDMAAITTKVLRVNGEKILEDFSKRQQPKFKKDPPLAAVTTAVQELLRLAQAHPAGPPTLDPVNDLQLKDMSVVEGGLRARKLEELIQGAQCVHSPRFPAQYLKLRERMQIQKEMERLRFLLSDQSLLLLPEYHQRVEVLRTLGYVDEAGTVKLAGRVACAMSSHELLLTELMFDNALSTLRPEEIAALLSGLVCQSPGDAGDQLPNTLKQGIERVRAVAKRIGEVQVACGLNQTVEEFVGELNFGLVEVVYEWARGMPFSELAGLSGTPEGLVVRCIQRLAEMCRSLRGAARLVGEPVLGAKMETAATLLRRDIVFAASLYTQ

SEQ ID NO: 79500 - protein, 1246 aa, Homo sapiens; identical to SEQ ID NO: 79498
  Payload ID: 15831
  Gene Symbol: SKIV2L
  Gene Name: SKI2 homolog, superkiller viralicidic activity 2-like
  Uniprot ID: Q15477
  ENSP ID: ENSP00000394400

SEQ ID NO: 79501 - protein, 1246 aa, Homo sapiens; identical to SEQ ID NO: 79499
  Payload ID: 15831
  Gene Symbol: SKIV2L
  Gene Name: SKI2 homolog, superkiller viralicidic activity 2-like
  Uniprot ID: Q15477
  ENSP ID: ENSP00000399530

SEQ ID NO: 79502 - protein, 1246 aa, Homo sapiens; identical to SEQ ID NO: 79499
  Payload ID: 15831
  Gene Symbol: SKIV2L
  Gene Name: SKI2 homolog, superkiller viralicidic activity 2-like
  Uniprot ID: Q15477
  ENSP ID: ENSP00000400626

SEQ ID NO: 79503 - protein, 1246 aa, Homo sapiens; identical to SEQ ID NO: 79499
  Payload ID: 15831
  Gene Symbol: SKIV2L
  Gene Name: SKI2 homolog, superkiller viralicidic activity 2-like
  Uniprot ID: Q15477
  ENSP ID: ENSP00000412310

SEQ ID NO: 79504 - protein, 182 aa, Homo sapiens
  Payload ID: 15831
  Gene Symbol: SKIV2L
  Gene Name: SKI2 homolog, superkiller viralicidic activity 2-like
  ENSP ID: ENSP00000417586
  MOD_RES (1)..(1): Any amino acid
XRKLEELIQGAQCVHSPRFPAQYLKLRERMQIQKEMERLRFLLSDQSLLLLPEYHQRVEVLRTLGYVDEAGTVKLAGRVACAMSSHELLLTELMFDNALSTLRPEEIAALLSGLVCQSPGDAGDQLPNTLKQGIERVRAVAKRIGEVQVACGLNQTVEEFVGELNFGLVEVVYEWARGMVST

SEQ ID NO: 79505 - protein, 230 aa, Homo sapiens
  Payload ID: 15831
  Gene Symbol: SKIV2L
  Gene Name: SKI2 homolog, superkiller viralicidic activity 2-like
  ENSP ID: ENSP00000419905
MMETERLVLPPPDPLDLPLRAVELGCTGHWELLNLPGAPESSLPHGLPPCAPDLQQEAEQLFLSSPAWLPLHGVEHSARKWQRKTDPWSLLAVLGAPVPSDLQAQRHPTTGQILGYKEVLLENTNLSATTSLSLRRPPGPASQSLWGNPTQYPFWPGGMDEPTITDLNTREEAEEEIDFEKDLLTIPPGFKKGMDFAPKGSVHSCIHPRGPRASISGAVGHPCGRHLPCW

SEQ ID NO: 79506 - protein, 156 aa, Homo sapiens
  Payload ID: 15831
  Gene Symbol: SKIV2L
  Gene Name: SKI2 homolog, superkiller viralicidic activity 2-like
  ENSP ID: ENSP00000420332
  MOD_RES (1)..(1): Any amino acid
XCDKPLSQDPQDRGPATAEVPYPDDLVGFKLFLPEGPCDHTVVKLQPGDMAAITTKVLRVNGEKILEDFSKRQQPKFKKDPPLAAVTTAVQELLRLAQAHPAGPPTLDPVNDLQLKDMSVVEGGLRARKLEELIQGAQCVHSPRFPAQPLSSVHPC

SEQ ID NO: 79507 - protein, 69 aa, Homo sapiens
  Payload ID: 15831
  Gene Symbol: SKIV2L
  Gene Name: SKI2 homolog, superkiller viralicidic activity 2-like
  ENSP ID: ENSP00000420470
MMETERLVLPPPDPLDLPLRAVELGCTGHWELLNLPGAPESSIFLLFHLVSRKAWTLHQKIVQLQLLDY

SEQ ID NO: 79508 - protein, 69 aa, Homo sapiens; identical to SEQ ID NO: 79507
  Payload ID: 15831
  Gene Symbol: SKIV2L
  Gene Name: SKI2 homolog, superkiller viralicidic activity 2-like
  ENSP ID: ENSP00000485707

SEQ ID NO: 79509 - protein, 69 aa, Homo sapiens; identical to SEQ ID NO: 79507
  Payload ID: 15831
  Gene Symbol: SKIV2L
  Gene Name: SKI2 homolog, superkiller viralicidic activity 2-like
  ENSP ID: ENSP00000486288

SEQ ID NO: 79510 - protein, 69 aa, Homo sapiens; identical to SEQ ID NO: 79507
  Payload ID: 15831
  Gene Symbol: SKIV2L
  Gene Name: SKI2 homolog, superkiller viralicidic activity 2-like
  ENSP ID: ENSP00000486387

SEQ ID NO: 79511 - protein, 69 aa, Homo sapiens; identical to SEQ ID NO: 79507
  Payload ID: 15831
  Gene Symbol: SKIV2L
  Gene Name: SKI2 homolog, superkiller viralicidic activity 2-like
  ENSP ID: ENSP00000486559

SEQ ID NO: 79512 - protein, 69 aa, Homo sapiens; identical to SEQ ID NO: 79507
  Payload ID: 15831
  Gene Symbol: SKIV2L
  Gene Name: SKI2 homolog, superkiller viralicidic activity 2-like
  ENSP ID: ENSP00000486630

SEQ ID NO: 79513 - protein, 69 aa, Homo sapiens; identical to SEQ ID NO: 79507
  Payload ID: 15831
  Gene Symbol: SKIV2L
  Gene Name: SKI2 homolog, superkiller viralicidic activity 2-like
  ENSP ID: ENSP00000486656

SEQ ID NO: 79514 - protein, 684 aa, Homo sapiens
  Payload ID: 15832
  Gene Symbol: SKIL
  Gene Name: SKI-like proto-oncogene
  Uniprot ID: P12757
  ENSP ID: ENSP00000259119
MENLQTNFSLVQGSTKKLNGMGDDGSPPAKKMITDIHANGKTINKVPTVKKEHLDDYGEAPVETDGEHVKRTCTSVPETLHLNPSLKHTLAQFHLSSQSSLGGPAAFSARHSQESMSPTVFLPLPSPQVLPGPLLIPSDSSTELTQTVLEGESISCFQVGGEKRLCLPQVLNSVLREFTLQQINTVCDELYIYCSRCTSDQLHILKVLGILPFNAPSCGLITLTDAQRLCNALLRPRTFPQNGSVLPAKSSLAQLKETGSAFEVEHECLGKCQGLFAPQFYVQPDAPCIQCLECCGMFAPQTFVMHSHRSPDKRTCHWGFESAKWHCYLHVNQKYLGTPEEKKLKIILEEMKEKFSMRSGKRNQSKTDAPSGMELQSWYPVIKQEGDHVSQTHSFLHPSYYLYMCDKVVAPNVSLTSAVSQSKELTKTEASKSISRQSEKAHSSGKLQKTVSYPDVSLEEQEKMDLKTSRELCSRLDASISNNSTSKRKSESATCNLVRDINKVGIGLVAAASSPLLVKDVICEDDKGKIMEEVMRTYLKQQEKLNLILQKKQQLQMEVKMLSSSKSMKELTEEQQNLQKELESLQNEHAQRMEEFYVEQKDLEKKLEQIMKQKCTCDSNLEKDKEAEYAGQLAELRQRLDHAEADRQELQDELRQEREARQKLEMMIKELKLQILKSSKTAKE

SEQ ID NO: 79515 - protein, 638 aa, Homo sapiens
  Payload ID: 15832
  Gene Symbol: SKIL
  Gene Name: SKI-like proto-oncogene
  Uniprot ID: P12757
  ENSP ID: ENSP00000400193
MENLQTNFSLVQGSTKKLNGMGDDGSPPAKKMITDIHANGKTINKVPTVKKEHLDDYGEAPVETDGEHVKRTCTSVPETLHLNPSLKHTLAQFHLSSQSSLGGPAAFSARHSQESMSPTVFLPLPSPQVLPGPLLIPSDSSTELTQTVLEGESISCFQVGGEKRLCLPQVLNSVLREFTLQQINTVCDELYIYCSRCTSDQLHILKVLGILPFNAPSCGLITLTDAQRLCNALLRPRTFPQNGSVLPAKSSLAQLKETGSAFEVEHECLGKCQGLFAPQFYVQPDAPCIQCLECCGMFAPQTFVMHSHRSPDKRTCHWGFESAKWHCYLHVNQKYLGTPEEKKLKIILEEMKEKFSMRSGKRNQSKTDAPSGMELQSWYPVIKQEGDHVSQTHSFLHPSYYLYMCDKVVAPNVSLTSAVSQSKELTKTEANASISNNSTSKRKSESATCNLVRDINKVGIGLVAAASSPLLVKDVICEDDKGKIMEEVMRTYLKQQEKLNLILQKKQQLQMEVKMLSSSKSMKELTEEQQNLQKELESLQNEHAQRMEEFYVEQKDLEKKLEQIMKQKCTCDSNLEKDKEAEYAGQLAELRQRLDHAEADRQELQDELRQEREARQKLEMMIKELKLQILKSSKTAKE

SEQ ID NO: 79516 - protein, 664 aa, Homo sapiens
  Payload ID: 15832
  Gene Symbol: SKIL
  Gene Name: SKI-like proto-oncogene
  Uniprot ID: P12757
  ENSP ID: ENSP00000406520
MGDDGSPPAKKMITDIHANGKTINKVPTVKKEHLDDYGEAPVETDGEHVKRTCTSVPETLHLNPSLKHTLAQFHLSSQSSLGGPAAFSARHSQESMSPTVFLPLPSPQVLPGPLLIPSDSSTELTQTVLEGESISCFQVGGEKRLCLPQVLNSVLREFTLQQINTVCDELYIYCSRCTSDQLHILKVLGILPFNAPSCGLITLTDAQRLCNALLRPRTFPQNGSVLPAKSSLAQLKETGSAFEVEHECLGKCQGLFAPQFYVQPDAPCIQCLECCGMFAPQTFVMHSHRSPDKRTCHWGFESAKWHCYLHVNQKYLGTPEEKKLKIILEEMKEKFSMRSGKRNQSKTDAPSGMELQSWYPVIKQEGDHVSQTHSFLHPSYYLYMCDKVVAPNVSLTSAVSQSKELTKTEASKSISRQSEKAHSSGKLQKTVSYPDVSLEEQEKMDLKTSRELCSRLDASISNNSTSKRKSESATCNLVRDINKVGIGLVAAASSPLLVKDVICEDDKGKIMEEVMRTYLKQQEKLNLILQKKQQLQMEVKMLSSSKSMKELTEEQQNLQKELESLQNEHAQRMEEFYVEQKDLEKKLEQIMKQKCTCDSNLEKDKEAEYAGQLAELRQRLDHAEADRQELQDELRQEREARQKLEMMIKELKLQILKSSKTAKE

SEQ ID NO: 79517 - protein, 684 aa, Homo sapiens; identical to SEQ ID NO: 79514
  Payload ID: 15832
  Gene Symbol: SKIL
  Gene Name: SKI-like proto-oncogene
  Uniprot ID: P12757
  ENSP ID: ENSP00000415243

SEQ ID NO: 79518 - protein, 123 aa, Homo sapiens
  Payload ID: 15832
  Gene Symbol: SKIL
  Gene Name: SKI-like proto-oncogene
  ENSP ID: ENSP00000417670
MENLQTNFSLVQGSTKKLNGMGDDGSPPAKKMITDIHANGKTINKVPTVKKEHLDDYGEAPVETDGEHVKRTCTSVPETLHLNPSLKHTLAQFHLSSQSSLGGPAAFSARHSQESMSPTVFLP

SEQ ID NO: 79519 - protein, 111 aa, Homo sapiens
  Payload ID: 15832
  Gene Symbol: SKIL
  Gene Name: SKI-like proto-oncogene
  ENSP ID: ENSP00000418237
  MOD_RES (1)..(1): Any amino acid
XCGMFAPQTFVMHSHRSPDKRTCHWGFESAKWHCYLHVNQKYLGTPEEKKLKIILEEMKEKFSMRSGKRNQSKTDAPSGMELQSWYPVIKQEGDHVSQTHSFLHPRCINLK

SEQ ID NO: 79520 - protein, 349 aa, Homo sapiens
  Payload ID: 15833
  Gene Symbol: SLAIN1
  Gene Name: SLAIN motif family, member 1
  ENSP ID: ENSP00000267219
MEAARRSLCFRLEQGYTSRGSPLSPQSSIDSELSTSELEDDSISMGYKLQDLTDVQIMARLQEESLRQDYASTSASVSRHSSSVSLSSGKKGTCSDQEYDQYSLEDEEEFDHLPPPQPRLPRCSPFQRGIPHSQTFSSIRECRRSPSSQYFPSNNYQQQQYYSPQAQTPDQQPNRTNGDKLRRSMPNLARMPSTTAISSNISSPVTVRNSQSFDSSLHGAGNGISRIQSCIPSPGQLQHRVHSVGHFPVSIRQPLKATAYVSPTVQGSSNMPLSNGLQLYSNTGIPTPNKAAASGIMGRSALPRPSLAINGSNLPRSKIAQPVRSFLQPPKPLSSLSTLRDGNWRDGCY

SEQ ID NO: 79521 - protein, 191 aa, Homo sapiens
  Payload ID: 15833
  Gene Symbol: SLAIN1
  Gene Name: SLAIN motif family, member 1
  Uniprot ID: Q8ND83
  ENSP ID: ENSP00000314443
MGYKLQDLTDVQIMARLQEENKLRRSMPNLARMPSTTAISSNISSPVTVRNSQSFDSSLHGAGNGISRIQSCIPSPGQLQHRVHSVGHFPVSIRQPLKATAYVSPTVQGSSNMPLSNGLQLYSNTGIPTPNKAAASGIMGRSALPRPSLAINGSNLPRSKIAQPVRSFLQPPKPLSSLSTLRDGNWRDGCY

SEQ ID NO: 79522 - protein, 304 aa, Homo sapiens
  Payload ID: 15833
  Gene Symbol: SLAIN1
  Gene Name: SLAIN motif family, member 1
  ENSP ID: ENSP00000314546
MRLPLGIYRQRGRFRHFSPGLRQDYASTSASVSRHSSSVSLSSGKKGTCSDQEYDQYSLEDEEEFDHLPPPQPRLPRCSPFQRGIPHSQTFSSIRECRRSPSSQYFPSNNYQQQQYYSPQAQTPDQQPNRTNGDKLRRSMPNLARMPSTTAISSNISSPVTVRNSQSFDSSLHGAGNGISRIQSCIPSPGQLQHRVHSVGHFPVSIRQPLKATAYVSPTVQGSSNMPLSNGLQLYSNTGIPTPNKAAASGIMGRSALPRPSLAINGSNLPRSKIAQPVRSFLQPPKPLSSLSTLRDGNWRDGCY

SEQ ID NO: 79523 - protein, 305 aa, Homo sapiens
  Payload ID: 15833
  Gene Symbol: SLAIN1
  Gene Name: SLAIN motif family, member 1
  Uniprot ID: Q8ND83
  ENSP ID: ENSP00000351507
MGYKLQDLTDVQIMARLQEESLRQDYASTSASVSRHSSSVSLSSGKKGTCSDQEYDQYSLEDEEEFDHLPPPQPRLPRCSPFQRGIPHSQTFSSIRECRRSPSSQYFPSNNYQQQQYYSPQAQTPDQQPNRTNGDKLRRSMPNLARMPSTTAISSNISSPVTVRNSQSFDSSLHGAGNGISRIQSCIPSPGQLQHRVHSVGHFPVSIRQPLKATAYVSPTVQGSSNMPLSNGLQLYSNTGIPTPNKAAASGIMGRSALPRPSLAINGSNLPRSKIAQPVRSFLQPPKPLSSLSTLRDGNWRDGCY

SEQ ID NO: 79524 - protein, 79 aa, Homo sapiens
  Payload ID: 15833
  Gene Symbol: SLAIN1
  Gene Name: SLAIN motif family, member 1
  ENSP ID: ENSP00000366444
MNRLYIGSSKTFTSSEKSLTPLQWCRHVLDNPTPEMEAARRSLCFRLEQGYTSRGSPLSPQSSIDSELSTSELEDDSIS

SEQ ID NO: 79525 - protein, 111 aa, Homo sapiens
  Payload ID: 15833
  Gene Symbol: SLAIN1
  Gene Name: SLAIN motif family, member 1
  ENSP ID: ENSP00000389195
MEAARRSLCFRLEQGYTSRGSPLSPQSSIDSELSTSELEDDSISMGYKLQDLTDVQIMARLQEESLRQDYASTSASVSRHSSSVSLSSGKKGTCSDQEYDQYSLEDEEEFD

SEQ ID NO: 79526 - protein, 205 aa, Homo sapiens
  Payload ID: 15833
  Gene Symbol: SLAIN1
  Gene Name: SLAIN motif family, member 1
  ENSP ID: ENSP00000393990
MEAARRSLCFRLEQGYTSRGSPLSPQSSIDSELSTSELEDDSISMGYKLQDLTDVQIMARLQEESLRQDYASTSASVSRHSSSVSLSSGKKGTCSDQEYDQYSLEDEEEFDHLPPPQPRLPRCSPFQRGIPHSQTFSSIRECRRSPSSQYFPSNNYQQQQYYSPQAQTPDQQPNRTNGDKLRRSMPNLARMPSTTAISSNISSPV

SEQ ID NO: 79527 - protein, 590 aa, Homo sapiens
  Payload ID: 15833
  Gene Symbol: SLAIN1
  Gene Name: SLAIN motif family, member 1
  ENSP ID: ENSP00000400921
MMAEQVKCASAGVSSGAGSGPVVNAELEVKKLQELVRKLEKQNEQLRSRAASAAAAPHLLLLPPPPPAAPPPAGLQPLGPRSPPAATATAAASGGLGLGLALGAGGGGGSGSGSGGGSSPAFPGTFCLPSPAPSLLCSLAQPPEAPFVYFKPAAGFFGAGGGGPEPGGAGTPPGAAAAPPSPPPTLLDEVELLDLESVAAWRDEDDYTWLYIGSSKTFTSSEKSLTPLQWCRHVLDNPTPEMEAARRSLCFRLEQGYTSRGSPLSPQSSIDSELSTSELEDDSISMGYKLQDLTDVQIMARLQEESLRQDYASTSASVSRHSSSVSLSSGKKGTCSDQEYDQYSLEDEEEFDHLPPPQPRLPRCSPFQRGIPHSQTFSSIRECRRSPSSQYFPSNNYQQQQYYSPQAQTPDQQPNRTNGDKLRRSMPNLARMPSTTAISSNISSPVTVRNSQSFDSSLHGAGNGISRIQSCIPSPGQLQHRVHSVGHFPVSIRQPLKATAYVSPTVQGSSNMPLSNGLQLYSNTGIPTPNKAAASGIMGRSALPRPSLAINGSNLPRSKIAQPVRSFLQPPKPLSSLSTLRDGNWRDGCY

SEQ ID NO: 79528 - protein, 228 aa, Homo sapiens
  Payload ID: 15833
  Gene Symbol: SLAIN1
  Gene Name: SLAIN motif family, member 1
  ENSP ID: ENSP00000403049
MEAARRSLCFRLEQASRWRSLFSSTASLAFPYSPVARLSPYSNGINTPSFSKTSNKAILTPEKTGYTSRGSPLSPQSSIDSELSTSELEDDSISMGYKLQDLTDVQIMARLQEESLRQDYASTSASVSRHSSSVSLSSGKKGTCSDQEYDQYSLEDEEEFDHLPPPQPRLPRCSPFQRGIPHSQTFSSIRECRRSPSSQYFPSNNYQQQQYYSPQAQTPDQQPNRTNG

SEQ ID NO: 79529 - protein, 240 aa, Homo sapiens
  Payload ID: 15833
  Gene Symbol: SLAIN1
  Gene Name: SLAIN motif family, member 1
  ENSP ID: ENSP00000403056
MGYKLQDLTDVQIMARLQEESLRQDYASTSASVSRHSSSVSLSSGKKGTCSDQEYDQYSLEDEEEFDHLPPPQPRLPRCSPFQRGIPHSQTFSSIRECRRSPSSQYFPSNNYQQQQYYSPQAQTPDQQPNRTNGDKLRRSMPNLARMPSTTAISSNISSPVTVRNSQSFDSSLHGAGNGISRIQSCIPSPGQLQHRVHSVGHFPVSIRQPLKATAYVSPTVQGSSNMPLSNGLQLYSNTG

SEQ ID NO: 79530 - protein, 12 aa, Homo sapiens
  Payload ID: 15833
  Gene Symbol: SLAIN1
  Gene Name: SLAIN motif family, member 1
  ENSP ID: ENSP00000418053
MGYKLQDLTDVQ

SEQ ID NO: 79531 - protein, 426 aa, Homo sapiens
  Payload ID: 15833
  Gene Symbol: SLAIN1
  Gene Name: SLAIN motif family, member 1
  Uniprot ID: Q8ND83
  ENSP ID: ENSP00000418707
MVGVGLCLRLLLFFRFKRTLDRICVLFLLGWHRKPRSDGSLFIERLYIGSSKTFTSSEKSLTPLQWCRHVLDNPTPEMEAARRSLCFRLEQGYTSRGSPLSPQSSIDSELSTSELEDDSISMGYKLQDLTDVQIMARLQEESLRQDYASTSASVSRHSSSVSLSSGKKGTCSDQEYDQYSLEDEEEFDHLPPPQPRLPRCSPFQRGIPHSQTFSSIRECRRSPSSQYFPSNNYQQQQYYSPQAQTPDQQPNRTNGDKLRRSMPNLARMPSTTAISSNISSPVTVRNSQSFDSSLHGAGNGISRIQSCIPSPGQLQHRVHSVGHFPVSIRQPLKATAYVSPTVQGSSNMPLSNGLQLYSNTGIPTPNKAAASGIMGRSALPRPSLAINGSNLPRSKIAQPVRSFLQPPKPLSSLSTLRDGNWRDGCY

SEQ ID NO: 79532 - protein, 147 aa, Homo sapiens
  Payload ID: 15833
  Gene Symbol: SLAIN1
  Gene Name: SLAIN motif family, member 1
  ENSP ID: ENSP00000419436
MGYKLQDLTDVQIMARLQEESLRQDYASTSASVSRHSSSVSLSSGKKGTCSDQEYDQYSLEDEEEFDHLPPPQPRLPRCSPFQRGIPHSQTFSSIRECRRSPSSQYFPSNNYQQQQYYSPQAQTPDQQPNRTNGDKLRRSMPNLARM

SEQ ID NO: 79533 - protein, 568 aa, Homo sapiens
  Payload ID: 15833
  Gene Symbol: SLAIN1
  Gene Name: SLAIN motif family, member 1
  Uniprot ID: Q8ND83
  ENSP ID: ENSP00000419730
MMAEQVKCASAGVSSGAGSGPVVNAELEVKKLQELVRKLEKQNEQLRSRAASAAAAPHLLLLPPPPPAAPPPAGLQPLGPRSPPAATATAAASGGLGPAFPGTFCLPSPAPSLLCSLAQPPEAPFVYFKPAAGFFGAGGGGPEPGGAGTPPGAAAAPPSPPPTLLDEVELLDLESVAAWRDEDDYTWLYIGSSKTFTSSEKSLTPLQWCRHVLDNPTPEMEAARRSLCFRLEQGYTSRGSPLSPQSSIDSELSTSELEDDSISMGYKLQDLTDVQIMARLQEESLRQDYASTSASVSRHSSSVSLSSGKKGTCSDQEYDQYSLEDEEEFDHLPPPQPRLPRCSPFQRGIPHSQTFSSIRECRRSPSSQYFPSNNYQQQQYYSPQAQTPDQQPNRTNGDKLRRSMPNLARMPSTTAISSNISSPVTVRNSQSFDSSLHGAGNGISRIQSCIPSPGQLQHRVHSVGHFPVSIRQPLKATAYVSPTVQGSSNMPLSNGLQLYSNTGIPTPNKAAASGIMGRSALPRPSLAINGSNLPRSKIAQPVRSFLQPPKPLSSLSTLRDGNWRDGCY

SEQ ID NO: 79534 - protein, 99 aa, Homo sapiens
  Payload ID: 15833
  Gene Symbol: SLAIN1
  Gene Name: SLAIN motif family, member 1
  ENSP ID: ENSP00000420320
MGYKLQDLTDVQIMARLQEESLRQDYASTSASVSRHSSSVSLSSGKKGTCSDQEYDQYSLEDEEEFDHLPPPQPRLPRCSPFQRGIPHSQTFSSIRECR

SEQ ID NO: 79535 - protein, 135 aa, Homo sapiens
  Payload ID: 15833
  Gene Symbol: SLAIN1
  Gene Name: SLAIN motif family, member 1
  ENSP ID: ENSP00000420619
MGYKLQDLTDVQIMARLQEESLRQDYASTSASVSRHSSSVSLSSGKKGTCSDQEYDQYSLEDEEEFDHLPPPQPRLPRCSPFQRGIPHSQTFSSIRECRRSPSSQYFPSNNYQQQQYYSPQAQTPDQQPNRTNGG

SEQ ID NO: 79536 - protein, 581 aa, Homo sapiens [sequence omitted]

SEQ ID NO: 79537 - protein, 169 aa, Homo sapiens
  Payload ID: 15834
  Gene Symbol: SLAIN2
  Gene Name: SLAIN motif family, member 2
  ENSP ID: ENSP00000424473
  MOD_RES (1)..(1): Any amino acid
XRTSNTQVDSVKSSRSDSNFQVPNGGIPRMQPQASATSQRLKNLPRTSLKAKQLLQTSSTKRVPSPGKFRSPAAPSPLALRQPVKAFSNHGSGSPGSQEITQLTQTTSSPGPPMVQSTVSANPPSNINSATLTRPAGTTAMRSGLPRPSAPSAGGIPVPRSKLAQPVRR

SEQ ID NO: 79538 - protein, 414 aa, Homo sapiens
  Payload ID: 15834
  Gene Symbol: SLAIN2
  Gene Name: SLAIN motif family, member 2
  ENSP ID: ENSP00000425923
MSYTSPYSPNASSPYSSGFNSPSSTPVRPPIVKQLILPGNSGNLKSSDRNPPLSPQSSIDSELSASELDEDSIGSNYKLNDVTDVQILARMQEESLRQEYAATTSRRSSGSSCNSTRRGTFSDQELDAQSLDDEDDNMHHAVYPAVNRFSPSPRNSPRPSPKQSPRNSPRSRSPARGIEYSRVSPQPMISRLQQPRLSLQGHPTDLQTSNVKNEEKLRRSLPNLSRTSNTQVDSVKSSRSDSNFQVPNGGIPRMQPQASATSQRLKNLPRTSLKAKQLLQTSSTKRVPSPGKFRSPAAPSPLALRQPVKAFSNHGSGSPGSQEITQLTQTTSSPGPPMVQSTVSANPPSNINSATLTRPAGTTAMRSGLPRPSAPSAGGIPVPRSKLAQPVRRSLPAPKTYGSMKDDSWKDGCY

SEQ ID NO: 79539 - protein, 58 aa, Homo sapiens
  Payload ID: 15834
  Gene Symbol: SLAIN2
  Gene Name: SLAIN motif family, member 2
  ENSP ID: ENSP00000426744
MQEESLRQEYAATTSRRSSGSSCNSTRRGFHHHHAIHLDRHLSSHPEIHLVHDLLLGE

SEQ ID NO: 79540 - protein, 221 aa, Homo sapiens
  Payload ID: 15835
  Gene Symbol: SLAMF6
  Gene Name: SLAM family member 6
  Uniprot ID: Q96DU3
  ENSP ID: ENSP00000357034
MLWLFQSLLFVFCFGPGQLRNIQVTNHSQLFQNMTCELHLTCSVEDADDNVSFRWEALGNTLSSQPNLTVSWDPRISSEQDYTCIAENAVSNLSFSVSAQKLCEDVKIQYTDTKMILFMVSGICIVFGFIILLLLVLRKRRDSLSLSTQRTQGPAESARNLEYVSVSPTNNTVYASVTHSNRETEIWTPRENDTITIYSTINHSKESKPTFSRATALDNVV

SEQ ID NO: 79541 - protein, 332 aa, Homo sapiens
  Payload ID: 15835
  Gene Symbol: SLAMF6
  Gene Name: SLAM family member 6
  Uniprot ID: Q96DU3
  ENSP ID: ENSP00000357036
MLWLFQSLLFVFCFGPGNVVSQSSLTPLMVNGILGESVTLPLEFPAGEKVNFITWLFNETSLAFIVPHETKSPEIHVTNPKQGKRLNFTQSYSLQLSNLKMEDTGSYRAQISTKTSAKLSSYTLRILRQLRNIQVTNHSQLFQNMTCELHLTCSVEDADDNVSFRWEALGNTLSSQPNLTVSWDPRISSEQDYTCIAENAVSNLSFSVSAQKLCEDVKIQYTDTKMILFMVSGICIVFGFIILLLLVLRKRRDSLSLSTQRTQGPAESARNLEYVSVSPTNNTVYASVTHSNRETEIWTPRENDTITIYSTINHSKESKPTFSRATALDNVV

SEQ ID NO: 79542 - protein, 331 aa, Homo sapiens
  Payload ID: 15835
  Gene Symbol: SLAMF6
  Gene Name: SLAM family member 6
  Uniprot ID: Q96DU3
  ENSP ID: ENSP00000357038
MLWLFQSLLFVFCFGPGNVVSQSSLTPLMVNGILGESVTLPLEFPAGEKVNFITWLFNETSLAFIVPHETKSPEIHVTNPKQGKRLNFTQSYSLQLSNLKMEDTGSYRAQISTKTSAKLSSYTLRILRQLRNIQVTNHSQLFQNMTCELHLTCSVEDADDNVSFRWEALGNTLSSQPNLTVSWDPRISSEQDYTCIAENAVSNLSFSVSAQKLCEDVKIQYTDTKMILFMVSGICIVFGFIILLLLVLRKRRDSLSLSTQRTQGPESARNLEYVSVSPTNNTVYASVTHSNRETEIWTPRENDTITIYSTINHSKESKPTFSRATALDNVV

SEQ ID NO: 79543 - protein, 296 aa, Homo sapiens
  Payload ID: 15836
  Gene Symbol: SLAMF7
  Gene Name: SLAM family member 7
  Uniprot ID: Q9NQ25
  ENSP ID: ENSP00000352281
MAGSPTCLTLIYILWQLTGSAASGPVKELVGSVGGAVTFPLKSKVKQVDSIVWTFNTTPLVTIQPEGGTIIVTQNRNRERVDFPDGGYSLKLSKLKKNDSGIYYVGIYSSSLQQPSTQEYVLHVYEHLSKPKVTMGLQSNKNGTCVTNLTCCMEHGEEDVIYTWKALGQAANESHNGSILPISWRWGESDMTFICVARNPVSRNFSSPILARKLCEGAADDPDSSMVLLCLLLVPLLLSLFVLGLFLWFLKRERQEENNPKGRSSKYGLLHCGNTEKDGKSPLTAHDARHTKAICL

SEQ ID NO: 79544 - protein, 228 aa, Homo sapiens
  Payload ID: 15836
  Gene Symbol: SLAMF7
  Gene Name: SLAM family member 7
  Uniprot ID: Q9NQ25
  ENSP ID: ENSP00000357021
MAGSPTCLTLIYILWQLTEHLSKPKVTMGLQSNKNGTCVTNLTCCMEHGEEDVIYTWKALGQAANESHNGSILPISWRWGESDMTFICVARNPVSRNFSSPILARKLCEGAADDPDSSMVLLCLLLVPLLLSLFVLGLFLWFLKRERQEEYIEEKKRVDICRETPNICPHSGENTEYDTIPHTNRTILKEDPANTVYSTVEIPKKMENPHSLLTMPDTPRLFAYENVI

SEQ ID NO: 79545 - protein, 335 aa, Homo sapiens
  Payload ID: 15836
  Gene Symbol: SLAMF7
  Gene Name: SLAM family member 7
  Uniprot ID: Q9NQ25
  ENSP ID: ENSP00000357022
MAGSPTCLTLIYILWQLTGSAASGPVKELVGSVGGAVTFPLKSKVKQVDSIVWTFNTTPLVTIQPEGGTIIVTQNRNRERVDFPDGGYSLKLSKLKKNDSGIYYVGIYSSSLQQPSTQEYVLHVYEHLSKPKVTMGLQSNKNGTCVTNLTCCMEHGEEDVIYTWKALGQAANESHNGSILPISWRWGESDMTFICVARNPVSRNFSSPILARKLCEGAADDPDSSMVLLCLLLVPLLLSLFVLGLFLWFLKRERQEEYIEEKKRVDICRETPNICPHSGENTEYDTIPHTNRTILKEDPANTVYSTVEIPKKMENPHSLLTMPDTPRLFAYENVI

SEQ ID NO: 79546 - protein, 149 aa, Homo sapiens
  Payload ID: 15836
  Gene Symbol: SLAMF7
  Gene Name: SLAM family member 7
  ENSP ID: ENSP00000403294
MAGSPTCLTLIYILWQLTEHLSKPKVTMGLQSNKNGTCVTNLTCCMEHGEEDVIYTWKALGQAANESHNGSILPISWRWGESDMTFICVARNPVSRNFSSPILARKLCEENNPKGRSSKYGLLHCGNTEKDGKSPLTAHDARHTKAICL

SEQ ID NO: 79547 - protein, 204 aa, Homo sapiens
  Payload ID: 15836
  Gene Symbol: SLAMF7
  Gene Name: SLAM family member 7
  Uniprot ID: Q9NQ25
  ENSP ID: ENSP00000405605
MAGSPTCLTLIYILWQLTGSAASGPVKELVGSVGGAVTFPLKSKVKQVDSIVWTFNTTPLVTIQPEGGTIIVTQNRNRERVDFPDGGYSLKLSKLKKNDSGIYYVGIYSSSLQQPSTQEYVLHVYEYIEEKKRVDICRETPNICPHSGENTEYDTIPHTNRTILKEDPANTVYSTVEIPKKMENPHSLLTMPDTPRLFAYENVI

SEQ ID NO: 79548 - protein, 188 aa, Homo sapiens
  Payload ID: 15836
  Gene Symbol: SLAMF7
  Gene Name: SLAM family member 7
  Uniprot ID: Q9NQ25
  ENSP ID: ENSP00000409965
MAGSPTCLTLIYILWQLTEHLSKPKVTMGLQSNKNGTCVTNLTCCMEHGEEDVIYTWKALGQAANESHNGSILPISWRWGESDMTFICVARNPVSRNFSSPILARKLCEEYIEEKKRVDICRETPNICPHSGENTEYDTIPHTNRTILKEDPANTVYSTVEIPKKMENPHSLLTMPDTPRLFAYENVI

SEQ ID NO: 79549 - protein, 165 aa, Homo sapiens
  Payload ID: 15836
  Gene Symbol: SLAMF7
  Gene Name: SLAM family member 7
  Uniprot ID: Q9NQ25
  ENSP ID: ENSP00000416592
MAGSPTCLTLIYILWQLTGSAASGPVKELVGSVGGAVTFPLKSKVKQVDSIVWTFNTTPLVTIQPEGGTIIVTQNRNRERVDFPDGGYSLKLSKLKKNDSGIYYVGIYSSSLQQPSTQEYVLHVYENNPKGRSSKYGLLHCGNTEKDGKSPLTAHDARHTKAICL

SEQ ID NO: 79550 - protein, 236 aa, Homo sapiens
  Payload ID: 15836
  Gene Symbol: SLAMF7
  Gene Name: SLAM family member 7
  ENSP ID: ENSP00000473590
  MOD_RES (1)..(1): Any amino acid
XAGSPTCLTLIYILWQLTGSAASGPVKELVGSVGGAVTFPLKSKVKQVDSIVWTFNTTPLVTIQPEGGTIIVTQNRNRERVDFPDGGYSLKLSKLKKNDSGIYYVGIYSSSLQQPSTQEYVLHVYEHLSKPKVTMGLQSNKNGTCVTNLTCCMEHGEEDVIYTWKALGQAANESHNGSILPISWRWGESDMTFICVARNPVSRNFSSPILARKLCEENNPKGRSSKYGLLHCGNTE

SEQ ID NO: 79551 - protein, 241 aa, Homo sapiens
  Payload ID: 15836
  Gene Symbol: SLAMF7
  Gene Name: SLAM family member 7
  ENSP ID: ENSP00000483774
MAGSPTCLTLIYILWQLTEHLSKPKVTMGLQSNKNGTCVTNLTCCMEHGEEDVIYTWKALGQAANESHNGSILPISWRWGESDMTFICVARNPVSRNFSSPILARKLCEGDCLSPLHRRLCPGAADDPDSSMVLLCLLLVPLLLSLFVLGLFLWFLKRERQEEYIEEKKRVDICRETPNICPHSGENTEYDTIPHTNRTILKEDPANTVYSTVEIPKKMENPHSLLTMPDTPRLFAYENVI

SEQ ID NO: 79552 - protein, 285 aa, Homo sapiens
  Payload ID: 15837
  Gene Symbol: SLAMF8
  Gene Name: SLAM family member 8
  Uniprot ID: Q9P0V8
  ENSP ID: ENSP00000289707
MVMRPLWSLLLWEALLPITVTGAQVLSKVGGSVLLVAARPPGFQVREAIWRSLWPSEELLATFFRGSLETLYHSRFLGRAQLHSNLSLELGPLESGDSGNFSVLMVDTRGQPWTQTLQLKVYDAVPRPVVQVFIAVERDAQPSKTCQVFLSCWAPNISEITYSWRRETTMDFGMEPHSLFTDGQVLSISLGPGDRDVAYSCIVSNPVSWDLATVTPWDSCHHEAAPGKASYKDVLLVVVPVSLLLMLVTLFSAWHWCPCSGKKKKDVHADRVGPETENPLVQDLP

SEQ ID NO: 79553 - protein, 176 aa, Homo sapiens
  Payload ID: 15837
  Gene Symbol: SLAMF8
  Gene Name: SLAM family member 8
  Uniprot ID: Q9P0V8
  ENSP ID: ENSP00000357084
MVMRPLWSLLLWEDAVPRPVVQVFIAVERDAQPSKTCQVFLSCWAPNISEITYSWRRETTMDFGMEPHSLFTDGQVLSISLGPGDRDVAYSCIVSNPVSWDLATVTPWDSCHHEAAPGKASYKDVLLVVVPVSLLLMLVTLFSAWHWCPCSGKKKKDVHADRVGPETENPLVQDLP

SEQ ID NO: 79554 - protein, 198 aa, Homo sapiens
  Payload ID: 15838
  Gene Symbol: SLAMF9
  Gene Name: SLAM family member 9
  Uniprot ID: Q96A28
  ENSP ID: ENSP00000357071
MCAFPWLLLLLLLQEGSQRRLWRWCGSEEVVAVLQESISLPLEIPPDEEVENIIWSSHKSLATVVPGKEGHPATIMVTNPHYQGQVSFLDPSYSLHISNLSWEDSGLYQAQVNLRTSQISTMQQYNICVYHPNYASEKPSTAFCLLAKGLLIFLLLVILAMGLWVIRVQKRHKMPRMKKLMRNRMKLRKEAKPGSSPA

SEQ ID NO: 79555 - protein, 289 aa, Homo sapiens
  Payload ID: 15838
  Gene Symbol: SLAMF9
  Gene Name: SLAM family member 9
  Uniprot ID: Q96A28
  ENSP ID: ENSP00000357072
MCAFPWLLLLLLLQEGSQRRLWRWCGSEEVVAVLQESISLPLEIPPDEEVENIIWSSHKSLATVVPGKEGHPATIMVTNPHYQGQVSFLDPSYSLHISNLSWEDSGLYQAQVNLRTSQISTMQQYNICVYRWLSEPQITVNFESSGEGACSMSLVCSVEKAGMDMTYSWLSRGDSTYTFHEGPVLSTSWRPGDSALSYTCRANNPISNVSSCPIPDGPFYADPNYASEKPSTAFCLLAKGLLIFLLLVILAMGLWVIRVQKRHKMPRMKKLMRNRMKLRKEAKPGSSPA

SEQ ID NO: 79556 - protein, 387 aa, Homo sapiens
  Payload ID: 15839
  Gene Symbol: SLC2A4RG
  Gene Name: SLC2A4 regulator
  Uniprot ID: Q9NR83
  ENSP ID: ENSP00000266077
MERPPPRAAGRDPSALRAEAPWLRAEGPGPRAAPVTVPTPPQGSSVGGGFAGLEFARPQESEPRASDLGAPRTWTGAAAGPRTPSAHIPVPAQRATPGKARLDEVMAAAALTSLSTSPLLLGAPVAAFSPEPGLEPWKEALVRPPGSYSSSSNSGDWGWDLASDQSSPSTPSPPLPPEAAHFLFGEPTLRKRKSPAQVMFQCLWKSCGKVLSTASAMQRHIRLVHLGRQAEPEQSDGEEDFYYTELDVGVDTLTDGLSSLTPVSPTASMPPAFPRLELPELLEPPALPSPLRPPAPPLPPPPVLSTVANPQSCHSDRVYQGCLTPARLEPQPTEVGACPPALSSRIGVTLRKPRGDAKKCRKVYGMERRDLWCTACRWKKACQRFLD

SEQ ID NO: 79557 - protein, 1049 aa, Homo sapiens
  Payload ID: 15840
  Gene Symbol: SSH1
  Gene Name: slingshot protein phosphatase 1
  Uniprot ID: Q8WYL5
  ENSP ID: ENSP00000315713
MALVTLQRSPTPSAASSSASNSELEAGSEEDRKLNLSLSESFFMVKGAALFLQQGSSPQGQRSLQHPHKHAGDLPQHLQVMINLLRCEDRIKLAVRLESAWADRVRYMVVVYSSGRQDTEENILLGVDFSSKESKSCTIGMVLRLWSDTKIHLDGDGGFSVSTAGRMHIFKPVSVQAMWSALQVLHKACEVARRHNYFPGGVALIWATYYESCISSEQSCINEWNAMQDLESTRPDSPALFVDKPTEGERTERLIKAKLRSIMMSQDLENVTSKEIRNELEKQMNCNLKELKEFIDNEMLLILGQMDKPSLIFDHLYLGSEWNASNLEELQGSGVDYILNVTREIDNFFPGLFAYHNIRVYDEETTDLLAHWNEAYHFINKAKRNHSKCLVHCKMGVSRSASTVIAYAMKEFGWPLEKAYNYVKQKRSITRPNAGFMRQLSEYEGILDASKQRHNKLWRQQTDSSLQQPVDDPAGPGDFLPETPDGTPESQLPFLDDAAQPGLGPPLPCCFRRLSDPLLPSPEDETGSLVHLEDPEREALLEEAAPPAEVHRPARQPQQGSGLCEKDVKKKLEFGSPKGRSGSLLQVEETEREEGLGAGRWGQLPTQLDQNLLNSENLNNNSKRSCPNGMEDDAIFGILNKVKPSYKSCADCMYPTASGAPEASRERCEDPNAPAICTQPAFLPHITSSPVAHLASRSRVPEKPASGPTEPPPFLPPAGSRRADTSGPGAGAALEPPASLLEPSRETPKVLPKSLLLKNSHCDKNPPSTEVVIKEESSPKKDMKPAKDLRLLFSNESEKPTTNSYLMQHQESIIQLQKAGLVRKHTKELERLKSVPADPAPPSRDGPASRLEASIPEESQDPAALHELGPLVMPSQAGSDEKSEAAPASLEGGSLKSPPPFFYRLDHTSSFSKDFLKTICYTPTSSSMSSNLTRSSSSDSIHSVRGKPGLVKQRTQEIETRLRLAGLTVSSPLKRSHSLAKLGSLTFSTEDLSSEADPSTVADSQDTTLSESSFLHEPQGTPRDPAATSKPSGKPAPENLKSPSWMSKS

SEQ ID NO: 79558 - protein, 703 aa, Homo sapiens
  Payload ID: 15840
  Gene Symbol: SSH1
  Gene Name: slingshot protein phosphatase 1
  Uniprot ID: Q8WYL5
  ENSP ID: ENSP00000326107
MARARRAVVGSVRDVSTAATNLFYFTDFCIFLQPTHCFCCPEVSSSNYLSESFFMVKGAALFLQQGSSPQGQRSLQHPHKHAGDLPQHLQVMINLLRCEDRIKLAVRLESAWADRVRYMVVVYSSGRQDTEENILLGVDFSSKESKSCTIGMVLRLWSDTKIHLDGDGGFSVSTAGRMHIFKPVSVQAMWSALQVLHKACEVARRHNYFPGGVALIWATYYESCISSEQSCINEWNAMQDLESTRPDSPALFVDKPTEGERTERLIKAKLRSIMMSQDLENVTSKEIRNELEKQMNCNLKELKEFIDNEMLLILGQMDKPSLIFDHLYLGSEWNASNLEELQGSGVDYILNVTREIDNFFPGLFAYHNIRVYDEETTDLLAHWNEAYHFINKAKRNHSKCLVHCKMGVSRSASTVIAYAMKEFGWPLEKAYNYVKQKRSITRPNAGFMRQLSEYEGILDASKQRHNKLWRQQTDSSLQQPVDDPAGPGDFLPETPDGTPESQLPFLDDAAQPGLGPPLPCCFRRLSDPLLPSPEDETGSLVHLEDPEREALLEEAAPPAEVHRPARQPQQGSGLCEKDVKKKLEFGSPKGRSGSLLQVEETEREEGLGAGRWGQLPTQLDQNLLNSENLNNNSKRSCPNGMEVGRARPAGWHTPSLPSHSNWPTSASVVGTTGTRHHTQLIFFYCLLWAPSSHLQGPEGSFTG

SEQ ID NO: 79559 - protein, 154 aa, Homo sapiens
  Payload ID: 15840
  Gene Symbol: SSH1
  Gene Name: slingshot protein phosphatase 1
  ENSP ID: ENSP00000446652
MVSKAKVIVNGWLFPACLGFCLSESFFMVKGAALFLQQGSSPQGQRSLQHPHKHAGDLPQHLQVMINLLRCEDRIKLAVRLESAWADRVRYMVVVYSSGRQDTEENILLGVDFSSKESKSCTIGMVLRLWSDTKIHLDGDGGFSVSTAGRMHIF

SEQ ID NO: 79560 - protein, 95 aa, Homo sapiens
  Payload ID: 15840
  Gene Symbol: SSH1
  Gene Name: slingshot protein phosphatase 1
  ENSP ID: ENSP00000447629
  MOD_RES (1)..(1): Any amino acid
XAMQDLESTRPDSPALFVDKPTEGERTERLIKAKLRSIMMSQDLENVTSKEIRNELEKQMNCNLKELKEFIDNEMLLILGQMDKPSLIFDHLYLG

SEQ ID NO: 79561 - protein, 37 aa, Homo sapiens
  Payload ID: 15840
  Gene Symbol: SSH1
  Gene Name: slingshot protein phosphatase 1
  ENSP ID: ENSP00000448586
MALVTLQRSPTPSAASSSASNSELEAGSEEDRKLNLR

SEQ ID NO: 79562 - protein, 692 aa, Homo sapiens
  Payload ID: 15840
  Gene Symbol: SSH1
  Gene Name: slingshot protein phosphatase 1
  Uniprot ID: Q8WYL5
  ENSP ID: ENSP00000448824
MALVTLQRSPTPSAASSSASNSELEAGSEEDRKLNLSLSESFFMVKGAALFLQQGSSPQGQRSLQHPHKHAGDLPQHLQVMINLLRCEDRIKLAVRLESAWADRVRYMVVVYSSGRQDTEENILLGVDFSSKESKSCTIGMVLRLWSDTKIHLDGDGGFSVSTAGRMHIFKPVSVQAMWSALQVLHKACEVARRHNYFPGGVALIWATYYESCISSEQSCINEWNAMQDLESTRPDSPALFVDKPTEGERTERLIKAKLRSIMMSQDLENVTSKEIRNELEKQMNCNLKELKEFIDNEMLLILGQMDKPSLIFDHLYLGSEWNASNLEELQGSGVDYILNVTREIDNFFPGLFAYHNIRVYDEETTDLLAHWNEAYHFINKAKRNHSKCLVHCKMGVSRSASTVIAYAMKEFGWPLEKAYNYVKQKRSITRPNAGFMRQLSEYEGILDASKQRHNKLWRQQTDSSLQQPVDDPAGPGDFLPETPDGTPESQLPFLDDAAQPGLGPPLPCCFRRLSDPLLPSPEDETGSLVHLEDPEREALLEEAAPPAEVHRPARQPQQGSGLCEKDVKKKLEFGSPKGRSGSLLQVEETEREEGLGAGRWGQLPTQLDQNLLNSENLNNNSKRSCPNGMEVGRARPAGWHTPSLPSHSNWPTSASVVGTTGTRHHTQLIFFYCLLWAPSSHLQGPEGSFTG

SEQ ID NO: 79563 - protein, 1423 aa, Homo sapiens
  Payload ID: 15841
  Gene Symbol: SSH2
  Gene Name: slingshot protein phosphatase 2
  Uniprot ID: Q76I76
  ENSP ID: ENSP00000269033
MALVTVQRSPTPSTTSSPCASEADSGEEECRSQPRSISESFLTVKGAALFLPRGNGSSTPRISHRRNKHAGDLQQHLQAMFILLRPEDNIRLAVRLESTYQNRTRYMVVVSTNGRQDTEESIVLGMDFSSNDSSTCTMGLVLPLWSDTLIHLDGDGGFSVSTDNRVHIFKPVSVQAMWSALQSLHKACEVARAHNYYPGSLFLTWVSYYESHINSDQSSVNEWNAMQDVQSHRPDSPALFTDIPTERERTERLIKTKLREIMMQKDLENITSKEIRTELEMQMVCNLREFKEFIDNEMIVILGQMDSPTQIFEHVFLGSEWNASNLEDLQNRGVRYILNVTREIDNFFPGVFEYHNIRVYDEEATDLLAYWNDTYKFISKAKKHGSKCLVHCKMGVSRSASTVIAYAMKEYGWNLDRAYDYVKERRTVTKPNPSFMRQLEEYQGILLASKQRHNKLWRSHSDSDLSDHHEPICKPGLELNKKDITTSADQIAEVKTMESHPPIPPVFVEHMVPQDANQKGLCTKERMICLEFTSREFHAGQIEDELNLNDINGCSSGCCLNESKFPLDNCHASKALIQPGHVPEMANKFPDLTVEDLETDALKADMNVHLLPMEELTSPLKDPPMSPDPESPSPQPSCQTEISDFSTDRIDFFSALEKFVELSQETRSRSFSHSRMEELGGGRNESCRLSVVEVAPSKVTADDQRSSSLSNTPHASEESSMDEEQSKAISELVSPDIFMQSHSENAISVKEIVTEIESISQGVGQIQLKGDILPNPCHTPKKNSIHELLLERAQTPENKPGHMEQDEDSCTAQPELAKDSGMCNPEGCLTTHSSIADLEEGEPAEGEQELQGSGMHPGAKWYPGSVRRATLEFEERLRQEQEHHGAAPTCTSLSTRKNSKNDSSVADLAPKGKSDEAPPEHSFVLKEPEMSKGKGKYSGSEAGSLSHSEQNATVPAPRVLEFDHLPDPQEGPGSDTGTQQEGVLKDLRTVIPYQESETQAVPLPLPKRVEIIEYTHIVTSPNHTGPGSEIATSEKSGEQGLRKVNMEKSVTVLCTLDENLNRTLDPNQVSLHPQVLPLPHSSSPEHNRPTDHPTSILSSPEDRGSSLSTALETAAPFVSHTTHLLSASLDYLHPQTMVHLEGFTEQSSTTDEPSAEQVSWEESQESPLSSGSEVPYKDSQLSSADLSLISKLGDNTGELQEKMDPLPVACRLPHSSSSENIKSLSHSPGVVKERAKEIESRVVFQAGLTKPSQMRRSASLAKLGYLDLCKDCLPEREPASCESPHLKLLQPFLRTDSGMHAMEDQESLENPGAPHNPEPTKSFVEQLTTTECIVQSKPVERPLVQYAKEFGSSQQYLLPRAGLELTSSEGGLPVLQTQGLQCACPAPGLAVAPRQQHGRTHPLRRLKKANDKKRTTNPFYNTM

SEQ ID NO: 79564 - protein, 1450 aa, Homo sapiens
  Payload ID: 15841
  Gene Symbol: SSH2
  Gene Name: slingshot protein phosphatase 2
  ENSP ID: ENSP00000444743
MALVTVQRSPTPSTTSSPCASSSHLEDSESAALLCCECEESEIFTDSNEADSGEEECRSQPRSISESFLTVKGAALFLPRGNGSSTPRISHRRNKHAGDLQQHLQAMFILLRPEDNIRLAVRLESTYQNRTRYMVVVSTNGRQDTEESIVLGMDFSSNDSSTCTMGLVLPLWSDTLIHLDGDGGFSVSTDNRVHIFKPVSVQAMWSALQSLHKACEVARAHNYYPGSLFLTWVSYYESHINSDQSSVNEWNAMQDVQSHRPDSPALFTDIPTERERTERLIKTKLREIMMQKDLENITSKEIRTELEMQMVCNLREFKEFIDNEMIVILGQMDSPTQIFEHVFLGSEWNASNLEDLQNRGVRYILNVTREIDNFFPGVFEYHNIRVYDEEATDLLAYWNDTYKFISKAKKHGSKCLVHCKMGVSRSASTVIAYAMKEYGWNLDRAYDYVKERRTVTKPNPSFMRQLEEYQGILLASKQRHNKLWRSHSDSDLSDHHEPICKPGLELNKKDITTSADQIAEVKTMESHPPIPPVFVEHMVPQDANQKGLCTKERMICLEFTSREFHAGQIEDELNLNDINGCSSGCCLNESKFPLDNCHASKALIQPGHVPEMANKFPDLTVEDLETDALKADMNVHLLPMEELTSPLKDPPMSPDPESPSPQPSCQTEISDFSTDRIDFFSALEKFVELSQETRSRSFSHSRMEELGGGRNESCRLSVVEVAPSKVTADDQRSSSLSNTPHASEESSMDEEQSKAISELVSPDIFMQSHSENAISVKEIVTEIESISQGVGQIQLKGDILPNPCHTPKKNSIHELLLERAQTPENKPGHMEQDEDSCTAQPELAKDSGMCNPEGCLTTHSSIADLEEGEPAEGEQELQGSGMHPGAKWYPGSVRRATLEFEERLRQEQEHHGAAPTCTSLSTRKNSKNDSSVADLAPKGKSDEAPPEHSFVLKEPEMSKGKGKYSGSEAGSLSHSEQNATVPAPRVLEFDHLPDPQEGPGSDTGTQQEGVLKDLRTVIPYQESETQAVPLPLPKRVEIIEYTHIVTSPNHTGPGSEIATSEKSGEQGLRKVNMEKSVTVLCTLDENLNRTLDPNQVSLHPQVLPLPHSSSPEHNRPTDHPTSILSSPEDRGSSLSTALETAAPFVSHTTHLLSASLDYLHPQTMVHLEGFTEQSSTTDEPSAEQVSWEESQESPLSSGSEVPYKDSQLSSADLSLISKLGDNTGELQEKMDPLPVACRLPHSSSSENIKSLSHSPGVVKERAKEIESRVVFQAGLTKPSQMRRSASLAKLGYLDLCKDCLPEREPASCESPHLKLLQPFLRTDSGMHAMEDQESLENPGAPHNPEPTKSFVEQLTTTECIVQSKPVERPLVQYAKEFGSSQQYLLPRAGLELTSSEGGLPVLQTQGLQCACPAPGLAVAPRQQHGRTHPLRRLKKANDKKRTTNPFYNTM

SEQ ID NO: 79565 - protein, 48 aa, Homo sapiens
  Payload ID: 15841
  Gene Symbol: SSH2
  Gene Name: slingshot protein phosphatase 2
  ENSP ID: ENSP00000462583
MALVTVQRSPTPSTTSSPCASRWGLAWGLAAQAGLELVASRDPPVSAS

SEQ ID NO: 79566 - protein, 112 aa, Homo sapiens
  Payload ID: 15841
  Gene Symbol: SSH2
  Gene Name: slingshot protein phosphatase 2
  ENSP ID: ENSP00000462605
MALVTVQRSPTPSTTSSPCASEADSGEEECRSQPRSISESFLTVKGAALFLPRGNGSSTPRISHRRNKHAGDLQQHLQAMFILLRPEDNIRLAVRLESTYQNRTRYMVVVST

SEQ ID NO: 79567 - protein, 116 aa, Homo sapiens
  Payload ID: 15841
  Gene Symbol: SSH2
  Gene Name: slingshot protein phosphatase 2
  ENSP ID: ENSP00000465703
  MOD_RES (1)..(1): Any amino acid
XRLPHSSSSENIKSLSHSPGVVKERAKEIESRVVFQAGLTKPSQMRRSASLAKLGYLDLCKDCLPEREPASCESPHLKLLQPFLRTDSGMHAMEDQESLENPGVICKEHALYWLIL

SEQ ID NO: 79568 - protein, 48 aa, Homo sapiens; identical to SEQ ID NO: 79565
  Payload ID: 15841
  Gene Symbol: SSH2
  Gene Name: slingshot protein phosphatase 2
  ENSP ID: ENSP00000466607

SEQ ID NO: 79569 - protein, 120 aa, Homo sapiens
  Payload ID: 15841
  Gene Symbol: SSH2
  Gene Name: slingshot protein phosphatase 2
  ENSP ID: ENSP00000467164
MEADSGEEECRSQPRSISESFLTVKGAALFLPRGNGSSTPRISHRRNKHAGDLQQHLQAMFILLRPEDNIRLAVRLESTYQNRTRYMVVVSTNGRQDTEESIVLGMDFSSNDSSTCTMGL

SEQ ID NO: 79570 - protein, 42 aa, Homo sapiens
  Payload ID: 15841
  Gene Symbol: SSH2
  Gene Name: slingshot protein phosphatase 2
  ENSP ID: ENSP00000468037
MALVTVQRSPTPSTTSSPCASRAELGFLVQGGRFPVIVRKNL

SEQ ID NO: 79571 - protein, 394 aa, Homo sapiens
  Payload ID: 15842
  Gene Symbol: SSH3
  Gene Name: slingshot protein phosphatase 3
  ENSP ID: ENSP00000310055
MALVTVSRSPPGSGASTPVGPWDQAVQRRSRLQRRQSFAVLRGAVLGLQDGGDNDDAAEASSEPTEKAPSEEELHGDQTDFGQGSQSPQKQEEQRQHLHLMVQLLRPQDDIRLAAQLEAPRPPRLRYLLVVSTREGEGLSQDETVLLGVDFPDSSSPSCTLGLVLPLWSDTQVYLDGDGGFSVTSGGQSRIFKPISIQTMWATLQVLHQACEAALGSGLVPGGSALTWASHYQERLNSEQSCLNEWTAMADLESLRPPSAEPGGSSEQEQMEQAIRAELWKVLDLESTSETSDMPEVFSSHESSHEEPLQPFPQLARTKGGQQVDRGPQPALKSRQSVVTLQGSAVVANRTQAFQEQEQGQGQGQGEPCISSTPRFRKVVRQASVHDSGEEGEA

SEQ ID NO: 79572 - protein, 659 aa, Homo sapiens
  Payload ID: 15842
  Gene Symbol: SSH3
  Gene Name: slingshot protein phosphatase 3
  Uniprot ID: Q8TE77
  ENSP ID: ENSP00000312081
MALVTVSRSPPGSGASTPVGPWDQAVQRRSRLQRRQSFAVLRGAVLGLQDGGDNDDAAEASSEPTEKAPSEEELHGDQTDFGQGSQSPQKQEEQRQHLHLMVQLLRPQDDIRLAAQLEAPRPPRLRYLLVVSTREGEGLSQDETVLLGVDFPDSSSPSCTLGLVLPLWSDTQVYLDGDGGFSVTSGGQSRIFKPISIQTMWATLQVLHQACEAALGSGLVPGGSALTWASHYQERLNSEQSCLNEWTAMADLESLRPPSAEPGGSSEQEQMEQAIRAELWKVLDVSDLESVTSKEIRQALELRLGLPLQQYRDFIDNQMLLLVAQRDRASRIFPHLYLGSEWNAANLEELQRNRVTHILNMAREIDNFYPERFTYHNVRLWDEESAQLLPHWKETHRFIEAARAQGTHVLVHCKMGVSRSAATVLAYAMKQYECSLEQALRHVQELRPIARPNPGFLRQLQIYQGILTASRQSHVWEQKVGGVSPEEHPAPEVSTPFPPLPPEPEGGGEEKVVGMEESQAAPKEEPGPRPRINLRGVMRSISLLEPSLELESTSETSDMPEVFSSHESSHEEPLQPFPQLARTKGGQQVDRGPQPALKSRQSVVTLQGSAVVANRTQAFQEQEQGQGQGQGEPCISSTPRFRKVVRQASVHDSGEEGEA

SEQ ID NO: 79573 - protein, 513 aa, Homo sapiens
  Payload ID: 15842
  Gene Symbol: SSH3
  Gene Name: slingshot protein phosphatase 3
  Uniprot ID: Q8TE77
  ENSP ID: ENSP00000365948
MAFPLSPASSPSCTLGLVLPLWSDTQVYLDGDGGFSVTSGGQSRIFKPISIQTMWATLQVLHQACEAALGSGLVPGGSALTWASHYQERLNSEQSCLNEWTAMADLESLRPPSAEPGGSSEQEQMEQAIRAELWKVLDVSDLESVTSKEIRQALELRLGLPLQQYRDFIDNQMLLLVAQRDRASRIFPHLYLGSEWNAANLEELQRNRVTHILNMAREIDNFYPERFTYHNVRLWDEESAQLLPHWKETHRFIEAARAQGTHVLVHCKMGVSRSAATVLAYAMKQYECSLEQALRHVQELRPIARPNPGFLRQLQIYQGILTASRQSHVWEQKVGGVSPEEHPAPEVSTPFPPLPPEPEGGGEEKVVGMEESQAAPKEEPGPRPRINLRGVMRSISLLEPSLELESTSETSDMPEVFSSHESSHEEPLQPFPQLARTKGGQQVDRGPQPALKSRQSVVTLQGSAVVANRTQAFQEQEQGQGQGQGEPCISSTPRFRKVVRQASVHDSGEEGEA

SEQ ID NO: 79574 - protein, 471 aa, Homo sapiens
  Payload ID: 15842
  Gene Symbol: SSH3
  Gene Name: slingshot protein phosphatase 3
  Uniprot ID: Q8TE77
  ENSP ID: ENSP00000431788
MALVTVSRSPPGSGASTPVGPWDQAVQRRSRLQRRQSFAVLRGAVLGLQDGGDNDDAAEASSEPTEKAPSEEELHGDQTDFGQGSQSPQKQEEQRQHLHLMVQLLRPQDDIRLAAQLEAPRPPRLRYLLVVSTREGEGLSQDETVLLGVDFPDSSSPSCTLGLVLPLWSDTQVYLDGDGGFSVTSGGQSRIFKPISIQTMWATLQVLHQACEAALGSGLVPGGSALTWASHYQERLNSEQSCLNEWTAMADLESLRPPSAEPGGSSEQEQMEQAIRAELWKVLDVSDLESVTSKEIRQALELRLGLPLQQYRDFIDNQMLLLVAQRDRASRIFPHLYLGSEWNAANLEELQRNRVTHILNMAREIDNFYPERFTYHNVRLWDEESAQLLPHWKETHRFIEAARAQGTHVLVHCKMGVSRSAATVLAYAMKQYECSLEQALRHVQELRPIARPNPGFLRQLQIYQGILTART

SEQ ID NO: 79575 - protein, 41 aa, Homo sapiens
  Payload ID: 15842
  Gene Symbol: SSH3
  Gene Name: slingshot protein phosphatase 3
  ENSP ID: ENSP00000432974
MALVTVSRSPPGSGASTPVGPWAELCGAPWGCPGTAGWRGQ

SEQ ID NO: 79576 - protein, 219 aa, Homo sapiens
  Payload ID: 15842
  Gene Symbol: SSH3
  Gene Name: slingshot protein phosphatase 3
  ENSP ID: ENSP00000433902
  MOD_RES (1)..(1): Any amino acid
XSEQSCLNEWTAMADLESLRPPSAEPGGSSEQEQMEQAIRAELWKVLDVSDLESVTSKEIRQALELRLGLPLQQYRDFIDNQMLLLVAQRDRASRIFPHLYLGSEWNAANLEELQRNRAQGTHVLVHCKMGVSRSAATVLAYAMKQYECSLEQALRHVQELRPIARPNPGFLRQLQIYQGILTASRQSHVWEQKVGGVSPEEHPAPEVSTPFPPLPPEP

SEQ ID NO: 79577 - protein, 316 aa, Homo sapiens
  Payload ID: 15842
  Gene Symbol: SSH3
  Gene Name: slingshot protein phosphatase 3
  ENSP ID: ENSP00000480198
  MOD_RES (1)..(1): Any amino acid
XAVQRRSRLQRRQSFAVLRGAVLGLQDGGDNDDAAEASSEPTEKAPSEEELHGDQTDFGQGSQSPQKQEEQRQHLHLMVQLLRPQDDIRLAAQLEAPRPPRLRYLLVVSTREGEGLSQDETVLLGVDFPDSSSPSCTLGLVLPLWSDTQVYLDGDGGFSVTSGGQSRIFKPISIQTMWSSEQEQMEQAIRAELWKVLDVSDLESVTSKEIRQALELRLGLPLQQYRDFIDNQMLLLVAQRDRASRIFPHLYLGSEWNAANLEELQRNRVTHILNMAREIDNFYPERFTYHNVRLWDEESAQLLPHWKETHRFIEAA

SEQ ID NO: 79578 - protein, 696 aa, Homo sapiens
  Payload ID: 15843
  Gene Symbol: SLITRK1
  Gene Name: SLIT and NTRK-like family, member 1
  Uniprot ID: Q96PX8
  ENSP ID: ENSP00000366288
MLLWILLLETSLCFAAGNVTGDVCKEKICSCNEIEGDLHVDCEKKGFTSLQRFTAPTSQFYHLFLHGNSLTRLFPNEFANFYNAVSLHMENNGLHEIVPGAFLGLQLVKRLHINNNKIKSFRKQTFLGLDDLEYLQADFNLLRDIDPGAFQDLNKLEVLILNDNLISTLPANVFQYVPITHLDLRGNRLKTLPYEEVLEQIPGIAEILLEDNPWDCTCDLLSLKEWLENIPKNALIGRVVCEAPTRLQGKDLNETTEQDLCPLKNRVDSSLPAPPAQEETFAPGPLPTPFKTNGQEDHATPGSAPNGGTKIPGNWQIKIRPTAAIATGSSRNKPLANSLPCPGGCSCDHIPGSGLKMNCNNRNVSSLADLKPKLSNVQELFLRDNKIHSIRKSHFVDYKNLILLDLGNNNIATVENNTFKNLLDLRWLYMDSNYLDTLSREKFAGLQNLEYLNVEYNAIQLILPGTFNAMPKLRILILNNNLLRSLPVDVFAGVSLSKLSLHNNYFMYLPVAGVLDQLTSIIQIDLHGNPWECSCTIVPFKQWAERLGSEVLMSDLKCETPVNFFRKDFMLLSNDEICPQLYARISPTLTSHSKNSTGLAETGTHSNSYLDTSRVSISVLVPGLLLVFVTSAFTVVGMLVFILRNRKRSKRRDANSSASEINSLQTVCDSSYWHNGPYNADGAHRVYDCGSHSLSD

SEQ ID NO: 79579 - protein, 724 aa, Homo sapiens
  Payload ID: 15844
  Gene Symbol: SLITRK2
  Gene Name: SLIT and NTRK-like family, member 2
  ENSP ID: ENSP00000334374
MLSGVWFLSVLTVAGILQTESRKTAKDICKIRCLCEEKENVLNINCENKGFTTVSLLQPPQYRIYQLFLNGNLLTRLYPNEFVNYSNAVTLHLGNNGLQEIRTGAFSGLKTLKRLHLNNNKLEILREDTFLGLESLEYLQADYNYISAIEAGAFSKLNKLKVLILNDNLLLSLPSNVFRFVLLTHLDLRGNRLKVMPFAGVLEHIGGIMEIQLEENPWNCTCDLLPLKAWLDTITVFVGEIVCETPFRLHGKDVTQLTRQDLCPRKSASDSSQRGSHADTHVQRLSPTMNPALNPTRAPKASRPPKMRNRPTPRVTVSKDRQSFGPIMVYQTKSPVPLTCPSSCVCTSQSSDNGLNVNCQERKFTNISDLQPKPTSPKKLYLTGNYLQTVYKNDLLEYSSLDLLHLGNNRIAVIQEGAFTNLTSLRRLYLNGNYLEVLYPSMFDGLQSLQYLYLEYNVIKEIKPLTFDALINLQLLFLNNNLLRSLPDNIFGGTALTRLNLRNNHFSHLPVKGVLDQLPAFIQIDLQENPWDCTCDIMGLKDWTEHANSPVIINEVTCESPAKHAGEILKFLGREAICPDSPNLSDGTVLSMNHNTDTPRSLSVSPSSYPELHTEVPLSVLILGLLVVFILSVCFGAGLFVFVLKRRKGVPSVPRNTNNLDVSSFQLQYGSYNTETHDKTDGHVYNYIPPPVGQMCQNPIYMQKEGDPVAYYRNLQEFSYSNLE

SEQ ID NO: 79580 - protein, 845 aa, Homo sapiens
  Payload ID: 15844
  Gene Symbol: SLITRK2
  Gene Name: SLIT and NTRK-like family, member 2
  Uniprot ID: Q9H156
  ENSP ID: ENSP00000359521
MLSGVWFLSVLTVAGILQTESRKTAKDICKIRCLCEEKENVLNINCENKGFTTVSLLQPPQYRIYQLFLNGNLLTRLYPNEFVNYSNAVTLHLGNNGLQEIRTGAFSGLKTLKRLHLNNNKLEILREDTFLGLESLEYLQADYNYISAIEAGAFSKLNKLKVLILNDNLLLSLPSNVFRFVLLTHLDLRGNRLKVMPFAGVLEHIGGIMEIQLEENPWNCTCDLLPLKAWLDTITVFVGEIVCETPFRLHGKDVTQLTRQDLCPRKSASDSSQRGSHADTHVQRLSPTMNPALNPTRAPKASRPPKMRNRPTPRVTVSKDRQSFGPIMVYQTKSPVPLTCPSSCVCTSQSSDNGLNVNCQERKFTNISDLQPKPTSPKKLYLTGNYLQTVYKNDLLEYSSLDLLHLGNNRIAVIQEGAFTNLTSLRRLYLNGNYLEVLYPSMFDGLQSLQYLYLEYNVIKEIKPLTFDALINLQLLFLNNNLLRSLPDNIFGGTALTRLNLRNNHFSHLPVKGVLDQLPAFIQIDLQENPWDCTCDIMGLKDWTEHANSPVIINEVTCESPAKHAGEILKFLGREAICPDSPNLSDGTVLSMNHNTDTPRSLSVSPSSYPELHTEVPLSVLILGLLVVFILSVCFGAGLFVFVLKRRKGVPSVPRNTNNLDVSSFQLQYGSYNTETHDKTDGHVYNYIPPPVGQMCQNPIYMQKEGDPVAYYRNLQEFSYSNLEEKKEEPATPAYTISATELLEKQATPREPELLYQNIAERVKELPSAGLVHYNFCTLPKRQFAPSYESRRQNQDRINKTVLYGTPRKCFVGQSKPNHPLLQAKPQSEPDYLEVLEKQTAISQL

SEQ ID NO: 79581 - protein, 977 aa, Homo sapiens
  Payload ID: 15845
  Gene Symbol: SLITRK3
  Gene Name: SLIT and NTRK-like family, member 3
  Uniprot ID: O94933
  ENSP ID: ENSP00000241274
MKPSIAEMLHRGRMLWIILLSTIALGWTTPIPLIEDSEEIDEPCFDPCYCEVKESLFHIHCDSKGFTNISQITEFWSRPFKLYLQRNSMRKLYTNSFLHLNNAVSINLGNNALQDIQTGAFNGLKILKRLYLHENKLDVFRNDTFLGLESLEYLQADYNVIKRIESGAFRNLSKLRVLILNDNLIPMLPTNLFKAVSLTHLDLRGNRLKVLFYRGMLDHIGRSLMELQLEENPWNCTCEIVQLKSWLERIPYTALVGDITCETPFHFHGKDLREIRKTELCPLLSDSEVEASLGIPHSSSSKENAWPTKPSSMLSSVHFTASSVEYKSSNKQPKPTKQPRTPRPPSTSQALYPGPNQPPIAPYQTRPPIPIICPTGCTCNLHINDLGLTVNCKERGFNNISELLPRPLNAKKLYLSSNLIQKIYRSDFWNFSSLDLLHLGNNRISYVQDGAFINLPNLKSLFLNGNDIEKLTPGMFRGLQSLHYLYFEFNVIREIQPAAFSLMPNLKLLFLNNNLLRTLPTDAFAGTSLARLNLRKNYFLYLPVAGVLEHLNAIVQIDLNENPWDCTCDLVPFKQWIETISSVSVVGDVLCRSPENLTHRDVRTIELEVLCPEMLHVAPAGESPAQPGDSHLIGAPTSASPYEFSPPGGPVPLSVLILSLLVLFFSAVFVAAGLFAYVLRRRRKKLPFRSKRQEGVDLTGIQMQCHRLFEDGGGGGGGSGGGGRPTLSSPEKAPPVGHVYEYIPHPVTQMCNNPIYKPREEEEVAVSSAQEAGSAERGGPGTQPPGMGEALLGSEQFAETPKENHSNYRTLLEKEKEWALAVSSSQLNTIVTVNHHHPHHPAVGGVSGVVGGTGGDLAGFRHHEKNGGVVLFPPGGGCGSGSMLLDRERPQPAPCTVGFVDCLYGTVPKLKELHVHPPGMQYPDLQQDARLKETLLFSAGKGFTDHQTQKSDYLELRAKLQTKPDYLEVLEKTTYRF

SEQ ID NO: 79582 - protein, 162 aa, Homo sapiens
  Payload ID: 15845
  Gene Symbol: SLITRK3
  Gene Name: SLIT and NTRK-like family, member 3
  ENSP ID: ENSP00000419611
MKPSIAEMLHRGRMLWIILLSTIALGWTTPIPLIEDSEEIDEPCFDPCYCEVKESLFHIHCDSKGFTNISQITEFWSRPFKLYLQRNSMRKLYTNSFLHLNNAVSINLGNNALQDIQTGAFNGLKILKRLYLHENKLDVFRNDTFLGLESLEYLQADYNVIK

SEQ ID NO: 79583 - protein, 977 aa, Homo sapiens; identical to SEQ ID NO: 79581
  Payload ID: 15845
  Gene Symbol: SLITRK3
  Gene Name: SLIT and NTRK-like family, member 3
  Uniprot ID: O94933
  ENSP ID: ENSP00000420091

SEQ ID NO: 79584 - protein, 837 aa, Homo sapiens
  Payload ID: 15846
  Gene Symbol: SLITRK4
  Gene Name: SLIT and NTRK-like family, member 4
  Uniprot ID: Q8IW52
  ENSP ID: ENSP00000336627
MFLWLFLILSALISSTNADSDISVEICNVCSCVSVENVLYVNCEKVSVYRPNQLKPPWSNFYHLNFQNNFLNILYPNTFLNFSHAVSLHLGNNKLQNIEGGAFLGLSALKQLHLNNNELKILRADTFLGIENLEYLQADYNLIKYIERGAFNKLHKLKVLILNDNLISFLPDNIFRFASLTHLDIRGNRIQKLPYIGVLEHIGRVVELQLEDNPWNCSCDLLPLKAWLENMPYNIYIGEAICETPSDLYGRLLKETNKQELCPMGTGSDFDVRILPPSQLENGYTTPNGHTTQTSLHRLVTKPPKTTNPSKISGIVAGKALSNRNLSQIVSYQTRVPPLTPCPAPCFCKTHPSDLGLSVNCQEKNIQSMSELIPKPLNAKKLHVNGNSIKDVDVSDFTDFEGLDLLHLGSNQITVIKGDVFHNLTNLRRLYLNGNQIERLYPEIFSGLHNLQYLYLEYNLIKEISAGTFDSMPNLQLLYLNNNLLKSLPVYIFSGAPLARLNLRNNKFMYLPVSGVLDQLQSLTQIDLEGNPWDCTCDLVALKLWVEKLSDGIVVKELKCETPVQFANIELKSLKNEILCPKLLNKPSAPFTSPAPAITFTTPLGPIRSPPGGPVPLSILILSILVVLILTVFVAFCLLVFVLRRNKKPTVKHEGLGNPDCGSMQLQLRKHDHKTNKKDGLSTEAFIPQTIEQMSKSHTCGLKESETGFMFSDPPGQKVVMRNVADKEKDLLHVDTRKRLSTIDELDELFPSRDSNVFIQNFLESKKEYNSIGVSGFEIRYPEKQPDKKSKKSLIGGNHSKIVVEQRKSEYFELKAKLQSSPDYLQVLEEQTALNKI

SEQ ID NO: 79585 - protein, 837 aa, Homo sapiens; identical to SEQ ID NO: 79584
  Payload ID: 15846
  Gene Symbol: SLITRK4
  Gene Name: SLIT and NTRK-like family, member 4
  Uniprot ID: Q8IW52
  ENSP ID: ENSP00000349400

SEQ ID NO: 79586 - protein, 837 aa, Homo sapiens; identical to SEQ ID NO: 79584
  Payload ID: 15846
  Gene Symbol: SLITRK4
  Gene Name: SLIT and NTRK-like family, member 4
  Uniprot ID: Q8IW52
  ENSP ID: ENSP00000469205

SEQ ID NO: 79587 - protein, 958 aa, Homo sapiens
  Payload ID: 15847
  Gene Symbol: SLITRK5
  Gene Name: SLIT and NTRK-like family, member 5
  Uniprot ID: O94991
  ENSP ID: ENSP00000366283
MHTCCPPVTLEQDLHRKMHSWMLQTLAFAVTSLVLSCAETIDYYGEICDNACPCEEKDGILTVSCENRGIISLSEISPPRFPIYHLLLSGNLLNRLYPNEFVNYTGASILHLGSNVIQDIETGAFHGLRGLRRLHLNNNKLELLRDDTFLGLENLEYLQVDYNYISVIEPNAFGKLHLLQVLILNDNLLSSLPNNLFRFVPLTHLDLRGNRLKLLPYVGLLQHMDKVVELQLEENPWNCSCELISLKDWLDSISYSALVGDVVCETPFRLHGRDLDEVSKQELCPRRLISDYEMRPQTPLSTTGYLHTTPASVNSVATSSSAVYKPPLKPPKGTRQPNKPRVRPTSRQPSKDLGYSNYGPSIAYQTKSPVPLECPTACSCNLQISDLGLNVNCQERKIESIAELQPKPYNPKKMYLTENYIAVVRRTDFLEATGLDLLHLGNNRISMIQDRAFGDLTNLRRLYLNGNRIERLSPELFYGLQSLQYLFLQYNLIREIQSGTFDPVPNLQLLFLNNNLLQAMPSGVFSGLTLLRLNLRSNHFTSLPVSGVLDQLKSLIQIDLHDNPWDCTCDIVGMKLWVEQLKVGVLVDEVICKAPKKFAETDMRSIKSELLCPDYSDVVVSTPTPSSIQVPARTSAVTPAVRLNSTGAPASLGAGGGASSVPLSVLILSLLLVFIMSVFVAAGLFVLVMKRRKKNQSDHTSTNNSDVSSFNMQYSVYGGGGGTGGHPHAHVHHRGPALPKVKTPAGHVYEYIPHPLGHMCKNPIYRSREGNSVEDYKDLHELKVTYSSNHHLQQQQQPPPPPQQPQQQPPPQLQLQPGEEERRESHHLRSPAYSVSTIEPREDLLSPVQDADRFYRGILEPDKHCSTTPAGNSLPEYPKFPCSPAAYTFSPNYDLRRPHQYLHPGAGDSRLREPVLYSPPSAVFVEPNRNEYLELKAKLNVEPDYLEVLEKQTTFSQF

SEQ ID NO: 79588 - protein, 841 aa, Homo sapiens
  Payload ID: 15848
  Gene Symbol: SLITRK6
  Gene Name: SLIT and NTRK-like family, member 6
  Uniprot ID: Q9H5Y7
  ENSP ID: ENSP00000383143
MKLWIHLFYSSLLACISLHSQTPVLSSRGSCDSLCNCEEKDGTMLINCEAKGIKMVSEISVPPSRPFQLSLLNNGLTMLHTNDFSGLTNAISIHLGFNNIADIEIGAFNGLGLLKQLHINHNSLEILKEDTFHGLENLEFLQADNNFITVIEPSAFSKLNRLKVLILNDNAIESLPPNIFRFVPLTHLDLRGNQLQTLPYVGFLEHIGRILDLQLEDNKWACNCDLLQLKTWLENMPPQSIIGDVVCNSPPFFKGSILSRLKKESICPTPPVYEEHEDPSGSLHLAATSSINDSRMSTKTTSILKLPTKAPGLIPYITKPSTQLPGPYCPIPCNCKVLSPSGLLIHCQERNIESLSDLRPPPQNPRKLILAGNIIHSLMKSDLVEYFTLEMLHLGNNRIEVLEEGSFMNLTRLQKLYLNGNHLTKLSKGMFLGLHNLEYLYLEYNAIKEILPGTFNPMPKLKVLYLNNNLLQVLPPHIFSGVPLTKVNLKTNQFTHLPVSNILDDLDLLTQIDLEDNPWDCSCDLVGLQQWIQKLSKNTVTDDILCTSPGHLDKKELKALNSEILCPGLVNNPSMPTQTSYLMVTTPATTTNTADTILRSLTDAVPLSVLILGLLIMFITIVFCAAGIVVLVLHRRRRYKKKQVDEQMRDNSPVHLQYSMYGHKTTHHTTERPSASLYEQHMVSPMVHVYRSPSFGPKHLEEEEERNEKEGSDAKHLQRSLLEQENHSPLTGSNMKYKTTNQSTEFLSFQDASSLYRNILEKERELQQLGITEYLRKNIAQLQPDMEAHYPGAHEELKLMETLMYSRPRKVLVEQTKNEYFELKANLHAEPDYLEVLEQQT

SEQ ID NO: 79589 - protein, 1534 aa, Homo sapiens
  Payload ID: 15849
  Gene Symbol: SLIT1
  Gene Name: slit guidance ligand 1
  Uniprot ID: O75093
  ENSP ID: ENSP00000266058
MALTPGWGSSAGPVRPELWLLLWAAAWRLGASACPALCTCTGTTVDCHGTGLQAIPKNIPRNTERLELNGNNITRIHKNDFAGLKQLRVLQLMENQIGAVERGAFDDMKELERLRLNRNQLHMLPELLFQNNQALSRLDLSENAIQAIPRKAFRGATDLKNLQLDKNQISCIEEGAFRALRGLEVLTLNNNNITTIPVSSFNHMPKLRTFRLHSNHLFCDCHLAWLSQWLRQRPTIGLFTQCSGPASLRGLNVAEVQKSEFSCSGQGEAGRVPTCTLSSGSCPAMCTCSNGIVDCRGKGLTAIPANLPETMTEIRLELNGIKSIPPGAFSPYRKLRRIDLSNNQIAEIAPDAFQGLRSLNSLVLYGNKITDLPRGVFGGLYTLQLLLLNANKINCIRPDAFQDLQNLSLLSLYDNKIQSLAKGTFTSLRAIQTLHLAQNPFICDCNLKWLADFLRTNPIETSGARCASPRRLANKRIGQIKSKKFRCSAKEQYFIPGTEDYQLNSECNSDVVCPHKCRCEANVVECSSLKLTKIPERIPQSTAELRLNNNEISILEATGMFKKLTHLKKINLSNNKVSEIEDGAFEGAASVSELHLTANQLESIRSGMFRGLDGLRTLMLRNNRISCIHNDSFTGLRNVRLLSLYDNQITTVSPGAFDTLQSLSTLNLLANPFNCNCQLAWLGGWLRKRKIVTGNPRCQNPDFLRQIPLQDVAFPDFRCEEGQEEGGCLPRPQCPQECACLDTVVRCSNKHLRALPKGIPKNVTELYLDGNQFTLVPGQLSTFKYLQLVDLSNNKISSLSNSSFTNMSQLTTLILSYNALQCIPPLAFQGLRSLRLLSLHGNDISTLQEGIFADVTSLSHLAIGANPLYCDCHLRWLSSWVKTGYKEPGIARCAGPQDMEGKLLLTTPAKKFECQGPPTLAVQAKCDLCLSSPCQNQGTCHNDPLEVYRCACPSGYKGRDCEVSLDSCSSGPCENGGTCHAQEGEDAPFTCSCPTGFEGPTCGVNTDDCVDHACANGGVCVDGVGNYTCQCPLQYEGKACEQLVDLCSPDLNPCQHEAQCVGTPDGPRCECMPGYAGDNCSENQDDCRDHRCQNGAQCMDEVNSYSCLCAEGYSGQLCEIPPHLPAPKSPCEGTECQNGANCVDQGNRPVCQCLPGFGGPECEKLLSVNFVDRDTYLQFTDLQNWPRANITLQVSTAEDNGILLYNGDNDHIAVELYQGHVRVSYDPGSYPSSAIYSAETINDGQFHTVELVAFDQMVNLSIDGGSPMTMDNFGKHYTLNSEAPLYVGGMPVDVNSAAFRLWQILNGTGFHGCIRNLYINNELQDFTKTQMKPGVVPGCEPCRKLYCLHGICQPNATPGPMCHCEAGWVGLHCDQPADGPCHGHKCVHGQCVPLDALSYSCQCQDGYSGALCNQAGALAEPCRGLQCLHGHCQASGTKGAHCVCDPGFSGELCEQESECRGDPVRDFHQVQRGYAICQTTRPLSWVECRGSCPGQGCCQGLRLKRRKFTFECSDGTSFAEEVEKPTKCGCALCA

SEQ ID NO: 79590 - protein, 781 aa, Homo sapiens
  Payload ID: 15849
  Gene Symbol: SLIT1
  Gene Name: slit guidance ligand 1
  ENSP ID: ENSP00000315005
LWLLLWAAAWRLGASACPALCTCTGTTVDCHGTGLQAIPKNIPRNTERLELNGNNITRIHKNDFAGLKQLRVLQLMENQIGAVERGAFDDMKELERLRLNRNQLHMLPELLFQNNQALSRLDLSENAIQAIPRKAFRGATDLKNLQLDKNQISCIEEGAFRALRGLEVLTLNNNNITTIPVSSFNHMPKLRTFRLHSNHLFCDCHLAWLSQWLRQRPTIGLFTQCSGPASLRGLNVAEVQKSEFSCSGQGEAGRVPTCTLSSGSCPAMCTCSNGIVDCRGKGLTAIPANLPETMTEIRLELNGIKSIPPGAFSPYRKLRRICPLSFCSPCRDLSNNQIAEIAPDAFQGLRSLNSLVLYGNKITDLPRGVFGGLYTLQLLLLNANKINCIRPDAFQDLQNLSLLSLYDNKIQSLAKGTFTSLRAIQTLHLAQNPFICDCNLKWLADFLRTNPIETSGARCASPRRLANKRIGQIKSKKFRCSAKEQYFIPGTEDYQLNSECNSDVVCPHKCRCEANVVECSSLKLTKIPERIPQSTAELRLNNNEISILEATGMFKKLTHLKKINLSNNKVSEIEDGAFEGAASVSELHLTANQLESIRSGMFRGLDGLRTLMLRNNRISCIHNDSFTGLRNVRLLSLYDNQITTVSPGAFDTLQSLSTLNLLANPFNCNCQLAWLGGWLRKRKIVTGNPRCQNPDFLRQIPLQDVAFPDFRCEEGQEEGGCLPRPQCPQECACLDTVVRCSNKHLRALPKGIPKNVTELYLDGNQFTLVPGQLSTFKYLQL

SEQ ID NO: 79591 - protein, 409 aa, Homo sapiens
  Payload ID: 15849
  Gene Symbol: SLIT1
  Gene Name: slit guidance ligand 1
  ENSP ID: ENSP00000360080
MALTPGWGSSAGPVRPELWLLLWAAAWRLGASACPALCTCTGTTVDCHGTGLQAIPKNIPRNTERLELNGNNITRIHKNDFAGLKQLRVLQLMENQIGAVERGAFDDMKELERLRLNRNQLHMLPELLFQNNQALSRLDLSENAIQAIPRKAFRGATDLKNLQLDKNQISCIEEGAFRALRGLEVLTLNNNNITTIPVSSFNHMPKLRTFRLHSNHLFCDCHLAWLSQWLRQRPTIGLFTQCSGPASLRGLNVAEVQKSEFSCSGQGEAGRVPTCTLSSGSCPAMCTCSNGIVDCRGKGLTAIPANLPETMTEIRLELNGIKSIPPGAFSPYRKLRRIDLSNNQIAEIAPDAFQGLRSLNSLHTGPVTCPHTTGTHSSHCRAFAVAVPHSRNDLEAMFEEEVPRIFYSA

SEQ ID NO: 79592 - protein, 1461 aa, Homo sapiens
  Payload ID: 15849
  Gene Symbol: SLIT1
  Gene Name: slit guidance ligand 1
  ENSP ID: ENSP00000360109
MALTPGWGSSAGPVRPELWLLLWAAAWRLGASACPALCTCTGTTVDCHGTGLQAIPKNIPRNTERLELNGNNITRIHKNDFAGLKQLRVLQLMENQIGAVERGAFDDMKELERLRLNRNQLHMLPELLFQNNQALSRLDLSENAIQAIPRKAFRGATDLKNLQLDKNQISCIEEGAFRALRGLEVLTLNNNNITTIPVSSFNHMPKLRTFRLHSNHLFCDCHLAWLSQWLRQRPTIGLFTQCSGPASLRGLNVAEVQKSEFSCSGQGEAGRVPTCTLSSGSCPAMCTCSNGIVDCRGKGLTAIPANLPETMTEIRLELNGIKSIPPGAFSPYRKLRRIDLSNNQIAEIAPDAFQGLRSLNSLVLYGNKITDLPRGVFGGLYTLQLLLLNANKINCIRPDAFQDLQNLSLLSLYDNKIQSLAKGTFTSLRAIQTLHLAQNPFICDCNLKWLADFLRTNPIETSGARCASPRRLANKRIGQIKSKKFRCSAKEQYFIPGTEDYQLNSECNSDVVCPHKCRCEANVVECSSLKLTKIPERIPQSTAELRLNNNEISILEATGMFKKLTHLKKINLSNNKVSEIEDGAFEGAASVSELHLTANQLESIRSGMFRGLDGLRTLMLRNNRISCIHNDSFTGLRNVRLLSLYDNQITTVSPGAFDTLQSLSTLNLLANPFNCNCQLAWLGGWLRKRKIVTGNPRCQNPDFLRQIPLQDVAFPDFRCEEGQEEGGCLPRPQCPQECACLDTVVRCSNKHLRALPKGIPKNVTELYLDGNQFTLVPGQLSTFKYLQLVDLSNNKISSLSNSSFTNMSQLTTLILSYNALQCIPPLAFQGLRSLRLLSLHGNDISTLQEGIFADVTSLSHLAIGANPLYCDCHLRWLSSWVKTGYKEPGIARCAGPQDMEGKLLLTTPAKKFECQGPPTLAVQAKCDLCLSSPCQNQGTCHNDPLEVYRCACPSGYKGRDCEVSLDSCSSGPCENGGTCHAQEGEDAPFTCSCPTGFEGPTCGVNTDDCVDHACANGGVCVDGVGNYTCQCPLQYEGKACEQLVDLCSPDLNPCQHEAQCVGTPDGPRCECMPGYAGDNCSENQDDCRDHRCQNGAQCMDEVNSYSCLCAEGYSGQLCEIPPHLPAPKSPCEGTECQNGANCVDQGNRPVCQCLPGFGGPECEKLLSVNFVDRDTYLQFTDLQNWPRANITLQVSTAEDNGILLYNGDNDHIAVELYQGHVRVSYDPGSYPSSAIYSAETINDGQFHTVELVAFDQMVNLSIDGGSPMTMDNFGKHYTLNSEAPLYVGGMPVDVNSAAFRLWQILNGTGFHGCIRNLYINNELQDFTKTQMKPGVVPGCEPCRKLYCLHGICQPNATPGPMCHCEAGWVGLHCDQPADGPCHGHKCVHGQCVPLDALSYSCQCQDGYSGALCNQSPSAGGTLSGTFTRSRGAMPSARPRAPCHGWSAGARAQARAAARAFG

SEQ ID NO: 79593 - protein, 1542 aa, Homo sapiens
  Payload ID: 15850
  Gene Symbol: SLIT2
  Gene Name: slit guidance ligand 2
  ENSP ID: ENSP00000273739
MRGVGWQMLSLSLGLVLAILNKVAPQACPAQCSCSGSTVDCHGLALRSVPRNIPRNTERLDLNGNNITRITKTDFAGLRHLRVLQLMENKISTIERGAFQDLKELERLRLNRNHLQLFPELLFLGTAKLYRLDLSENQIQAIPRKAFRGAVDIKNLQLDYNQISCIEDGAFRALRDLEVLTLNNNNITRLSVASFNHMPKLRTFRLHSNNLYCDCHLAWLSDWLRQRPRVGLYTQCMGPSHLRGHNVAEVQKREFVCSDEEEGHQSFMAPSCSVLHCPAACTCSNNIVDCRGKGLTEIPTNLPETITEIRLEQNTIKVIPPGAFSPYKKLRRIDLSNNQISELAPDAFQGLRSLNSLVLYGNKITELPKSLFEGLFSLQLLLLNANKINCLRVDAFQDLHNLNLLSLYDNKLQTIAKGTFSPLRAIQTMHLAQNPFICDCHLKWLADYLHTNPIETSGARCTSPRRLANKRIGQIKSKKFRCSAKEQYFIPGTEDYRSKLSGDCFADLACPEKCRCEGTTVDCSNQKLNKIPEHIPQYTAELRLNNNEFTVLEATGIFKKLPQLRKINFSNNKITDIEEGAFEGASGVNEILLTSNRLENVQHKMFKGLESLKTLMLRSNRITCVGNDSFIGLSSVRLLSLYDNQITTVAPGAFDTLHSLSTLNLLANPFNCNCYLAWLGEWLRKKRIVTGNPRCQKPYFLKEIPIQDVAIQDFTCDDGNDDNSCSPLSRCPTECTCLDTVVRCSNKGLKVLPKGIPRDVTELYLDGNQFTLVPKELSNYKHLTLIDLSNNRISTLSNQSFSNMTQLLTLILSYNRLRCIPPRTFDGLKSLRLLSLHGNDISVVPEGAFNDLSALSHLAIGANPLYCDCNMQWLSDWVKSEYKEPGIARCAGPGEMADKLLLTTPSKKFTCQGPVDVNILAKCNPCLSNPCKNDGTCNSDPVDFYRCTCPYGFKGQDCDVPIHACISNPCKHGGTCHLKEGEEDGFWCICADGFEGENCEVNVDDCEDNDCENNSTCVDGINNYTCLCPPEYTAANLNEVEKGELCEEKLDFCAQDLNPCQHDSKCILTPKGFKCDCTPGYVGEHCDIDFDDCQDNKCKNGAHCTDAVNGYTCICPEGYSGLFCEFSPPMVLPRTSPCDNFDCQNGAQCIVRINEPICQCLPGYQGEKCEKLVSVNFINKESYLQIPSAKVRPQTNITLQIATDEDSGILLYKGDKDHIAVELYRGRVRASYDTGSHPASAIYSVETINDGNFHIVELLALDQSLSLSVDGGNPKIITNLSKQSTLNFDSPLYVGGMPGKSNVASLRQAPGQNGTSFHGCIRNLYINSELQDFQKVPMQTGILPGCEPCHKKVCAHGTCQPSSQAGFTCECQEGWMGPLCDQRTNDPCLGNKCVHGTCLPINAFSYSCKCLEGHGGVLCDEEEDLFNPCQAIKCKHGKCRLSGLGQPYCECSSGYTGDSCDREISCRGERIRDYYQKQQGYAACQTTKKVSRLECRGGCAGGQCCGPLRSKRRKYSFECTDGSSFVDEVEKVVKCGCTRCVS

SEQ ID NO: 79594 - protein, 212 aa, Homo sapiens
  Payload ID: 15850
  Gene Symbol: SLIT2
  Gene Name: slit guidance ligand 2
  ENSP ID: ENSP00000421975
MTQLLTLILSYNRLRCIPPRTFDGLKSLRLLSLHGNDISVVPEGAFNDLSALSHLAIGANPLYCDCNMQWLSDWVKSEYKEPGIARCAGPGEMADKLLLTTPSKKFTCQGLPGPCGFLIPGPVDVNILAKCNPCLSNPCKNDGTCNSDPVDFYRCTCPYGFKGQDCDVPIHACISNPCKHGGTCHLKEGEEDGFWCICADGFEGENCEVNVD

SEQ ID NO: 79595 - protein, 1525 aa, Homo sapiens
  Payload ID: 15850
  Gene Symbol: SLIT2
  Gene Name: slit guidance ligand 2
  Uniprot ID: O94813
  ENSP ID: ENSP00000422261
MRGVGWQMLSLSLGLVLAILNKVAPQACPAQCSCSGSTVDCHGLALRSVPRNIPRNTERLDLNGNNITRITKTDFAGLRHLRVLQLMENKISTIERGAFQDLKELERLRLNRNHLQLFPELLFLGTAKLYRLDLSENQIQAIPRKAFRGAVDIKNLQLDYNQISCIEDGAFRALRDLEVLTLNNNNITRLSVASFNHMPKLRTFRLHSNNLYCDCHLAWLSDWLRQRPRVGLYTQCMGPSHLRGHNVAEVQKREFVCSDEEEGHQSFMAPSCSVLHCPAACTCSNNIVDCRGKGLTEIPTNLPETITEIRLEQNTIKVIPPGAFSPYKKLRRIDLSNNQISELAPDAFQGLRSLNSLVLYGNKITELPKSLFEGLFSLQLLLLNANKINCLRVDAFQDLHNLNLLSLYDNKLQTIAKGTFSPLRAIQTMHLAQNPFICDCHLKWLADYLHTNPIETSGARCTSPRRLANKRIGQIKSKKFRCSGTEDYRSKLSGDCFADLACPEKCRCEGTTVDCSNQKLNKIPEHIPQYTAELRLNNNEFTVLEATGIFKKLPQLRKINFSNNKITDIEEGAFEGASGVNEILLTSNRLENVQHKMFKGLESLKTLMLRSNRITCVGNDSFIGLSSVRLLSLYDNQITTVAPGAFDTLHSLSTLNLLANPFNCNCYLAWLGEWLRKKRIVTGNPRCQKPYFLKEIPIQDVAIQDFTCDDGNDDNSCSPLSRCPTECTCLDTVVRCSNKGLKVLPKGIPRDVTELYLDGNQFTLVPKELSNYKHLTLIDLSNNRISTLSNQSFSNMTQLLTLILSYNRLRCIPPRTFDGLKSLRLLSLHGNDISVVPEGAFNDLSALSHLAIGANPLYCDCNMQWLSDWVKSEYKEPGIARCAGPGEMADKLLLTTPSKKFTCQGPVDVNILAKCNPCLSNPCKNDGTCNSDPVDFYRCTCPYGFKGQDCDVPIHACISNPCKHGGTCHLKEGEEDGFWCICADGFEGENCEVNVDDCEDNDCENNSTCVDGINNYTCLCPPEYTGELCEEKLDFCAQDLNPCQHDSKCILTPKGFKCDCTPGYVGEHCDIDFDDCQDNKCKNGAHCTDAVNGYTCICPEGYSGLFCEFSPPMVLPRTSPCDNFDCQNGAQCIVRINEPICQCLPGYQGEKCEKLVSVNFINKESYLQIPSAKVRPQTNITLQIATDEDSGILLYKGDKDHIAVELYRGRVRASYDTGSHPASAIYSVETINDGNFHIVELLALDQSLSLSVDGGNPKIITNLSKQSTLNFDSPLYVGGMPGKSNVASLRQAPGQNGTSFHGCIRNLYINSELQDFQKVPMQTGILPGCEPCHKKVCAHGTCQPSSQAGFTCECQEGWMGPLCDQRTNDPCLGNKCVHGTCLPINAFSYSCKCLEGHGGVLCDEEEDLFNPCQAIKCKHGKCRLSGLGQPYCECSSGYTGDSCDREISCRGERIRDYYQKQQGYAACQTTKKVSRLECRGGCAGGQCCGPLRSKRRKYSFECTDGSSFVDEVEKVVKCGCTRCVS

SEQ ID NO: 79596 - protein, 1529 aa, Homo sapiens
  Payload ID: 15850
  Gene Symbol: SLIT2
  Gene Name: slit guidance ligand 2
  Uniprot ID: O94813
  ENSP ID: ENSP00000422591
MRGVGWQMLSLSLGLVLAILNKVAPQACPAQCSCSGSTVDCHGLALRSVPRNIPRNTERLDLNGNNITRITKTDFAGLRHLRVLQLMENKISTIERGAFQDLKELERLRLNRNHLQLFPELLFLGTAKLYRLDLSENQIQAIPRKAFRGAVDIKNLQLDYNQISCIEDGAFRALRDLEVLTLNNNNITRLSVASFNHMPKLRTFRLHSNNLYCDCHLAWLSDWLRQRPRVGLYTQCMGPSHLRGHNVAEVQKREFVCSGHQSFMAPSCSVLHCPAACTCSNNIVDCRGKGLTEIPTNLPETITEIRLEQNTIKVIPPGAFSPYKKLRRIDLSNNQISELAPDAFQGLRSLNSLVLYGNKITELPKSLFEGLFSLQLLLLNANKINCLRVDAFQDLHNLNLLSLYDNKLQTIAKGTFSPLRAIQTMHLAQNPFICDCHLKWLADYLHTNPIETSGARCTSPRRLANKRIGQIKSKKFRCSAKEQYFIPGTEDYRSKLSGDCFADLACPEKCRCEGTTVDCSNQKLNKIPEHIPQYTAELRLNNNEFTVLEATGIFKKLPQLRKINFSNNKITDIEEGAFEGASGVNEILLTSNRLENVQHKMFKGLESLKTLMLRSNRITCVGNDSFIGLSSVRLLSLYDNQITTVAPGAFDTLHSLSTLNLLANPFNCNCYLAWLGEWLRKKRIVTGNPRCQKPYFLKEIPIQDVAIQDFTCDDGNDDNSCSPLSRCPTECTCLDTVVRCSNKGLKVLPKGIPRDVTELYLDGNQFTLVPKELSNYKHLTLIDLSNNRISTLSNQSFSNMTQLLTLILSYNRLRCIPPRTFDGLKSLRLLSLHGNDISVVPEGAFNDLSALSHLAIGANPLYCDCNMQWLSDWVKSEYKEPGIARCAGPGEMADKLLLTTPSKKFTCQGPVDVNILAKCNPCLSNPCKNDGTCNSDPVDFYRCTCPYGFKGQDCDVPIHACISNPCKHGGTCHLKEGEEDGFWCICADGFEGENCEVNVDDCEDNDCENNSTCVDGINNYTCLCPPEYTGELCEEKLDFCAQDLNPCQHDSKCILTPKGFKCDCTPGYVGEHCDIDFDDCQDNKCKNGAHCTDAVNGYTCICPEGYSGLFCEFSPPMVLPRTSPCDNFDCQNGAQCIVRINEPICQCLPGYQGEKCEKLVSVNFINKESYLQIPSAKVRPQTNITLQIATDEDSGILLYKGDKDHIAVELYRGRVRASYDTGSHPASAIYSVETINDGNFHIVELLALDQSLSLSVDGGNPKIITNLSKQSTLNFDSPLYVGGMPGKSNVASLRQAPGQNGTSFHGCIRNLYINSELQDFQKVPMQTGILPGCEPCHKKVCAHGTCQPSSQAGFTCECQEGWMGPLCDQRTNDPCLGNKCVHGTCLPINAFSYSCKCLEGHGGVLCDEEEDLFNPCQAIKCKHGKCRLSGLGQPYCECSSGYTGDSCDREISCRGERIRDYYQKQQGYAACQTTKKVSRLECRGGCAGGQCCGPLRSKRRKYSFECTDGSSFVDEVEKVVKCGCTRCVS

SEQ ID NO: 79597 - protein, 82 aa, Homo sapiens
  Payload ID: 15850
  Gene Symbol: SLIT2
  Gene Name: slit guidance ligand 2
  ENSP ID: ENSP00000423179
  MOD_RES (1)..(1): Any amino acid
XSYDTGSHPASAIYSVETINDGNFHIVELLALDQSLSLSVDGGNPKIITNLSKQSTLNFDSPLYVGGMPGKSNVASLRQGAL

SEQ ID NO: 79598 - protein, 196 aa, Homo sapiens
  Payload ID: 15850
  Gene Symbol: SLIT2
  Gene Name: slit guidance ligand 2
  ENSP ID: ENSP00000425609
  MOD_RES (1)..(1): Any amino acid
XSDWVKSEYKEPGIARCAGPGEMADKLLLTTPSKKFTCQGPVDVNILAKCNPCLSNPCKNDGTCNSDPVDFYRCTCPYGFKGQDCDVPIHACISNPCKHGGTCHLKEGEEDGFWCICADGFEGENCEVNVDDCEDNDCENNSTCVDGINNYTCLCPPEYTGTNNRKYFAFHQYICLKASLELCYICLVNLFLFDKW

SEQ ID NO: 79599 - protein, 146 aa, Homo sapiens
  Payload ID: 15850
  Gene Symbol: SLIT2
  Gene Name: slit guidance ligand 2
  ENSP ID: ENSP00000426356
MEAVLFVNAEAAAPRQSGRPRDLNGNNITRITKTDFAGLRHLRVLQLMENKISTIERGAFQDLKELERLRLNRNHLQLFPELLFLGTAKLYRLDLSENQIQAIPRKAFRGAVDIKNLQLDYNQISCIEDGAFRALRDLEVLTLNNN

SEQ ID NO: 79600 - protein, 1521 aa, Homo sapiens
  Payload ID: 15850
  Gene Symbol: SLIT2
  Gene Name: slit guidance ligand 2
  Uniprot ID: O94813
  ENSP ID: ENSP00000427548
MRGVGWQMLSLSLGLVLAILNKVAPQACPAQCSCSGSTVDCHGLALRSVPRNIPRNTERLDLNGNNITRITKTDFAGLRHLRVLQLMENKISTIERGAFQDLKELERLRLNRNHLQLFPELLFLGTAKLYRLDLSENQIQAIPRKAFRGAVDIKNLQLDYNQISCIEDGAFRALRDLEVLTLNNNNITRLSVASFNHMPKLRTFRLHSNNLYCDCHLAWLSDWLRQRPRVGLYTQCMGPSHLRGHNVAEVQKREFVCSGHQSFMAPSCSVLHCPAACTCSNNIVDCRGKGLTEIPTNLPETITEIRLEQNTIKVIPPGAFSPYKKLRRIDLSNNQISELAPDAFQGLRSLNSLVLYGNKITELPKSLFEGLFSLQLLLLNANKINCLRVDAFQDLHNLNLLSLYDNKLQTIAKGTFSPLRAIQTMHLAQNPFICDCHLKWLADYLHTNPIETSGARCTSPRRLANKRIGQIKSKKFRCSGTEDYRSKLSGDCFADLACPEKCRCEGTTVDCSNQKLNKIPEHIPQYTAELRLNNNEFTVLEATGIFKKLPQLRKINFSNNKITDIEEGAFEGASGVNEILLTSNRLENVQHKMFKGLESLKTLMLRSNRITCVGNDSFIGLSSVRLLSLYDNQITTVAPGAFDTLHSLSTLNLLANPFNCNCYLAWLGEWLRKKRIVTGNPRCQKPYFLKEIPIQDVAIQDFTCDDGNDDNSCSPLSRCPTECTCLDTVVRCSNKGLKVLPKGIPRDVTELYLDGNQFTLVPKELSNYKHLTLIDLSNNRISTLSNQSFSNMTQLLTLILSYNRLRCIPPRTFDGLKSLRLLSLHGNDISVVPEGAFNDLSALSHLAIGANPLYCDCNMQWLSDWVKSEYKEPGIARCAGPGEMADKLLLTTPSKKFTCQGPVDVNILAKCNPCLSNPCKNDGTCNSDPVDFYRCTCPYGFKGQDCDVPIHACISNPCKHGGTCHLKEGEEDGFWCICADGFEGENCEVNVDDCEDNDCENNSTCVDGINNYTCLCPPEYTGELCEEKLDFCAQDLNPCQHDSKCILTPKGFKCDCTPGYVGEHCDIDFDDCQDNKCKNGAHCTDAVNGYTCICPEGYSGLFCEFSPPMVLPRTSPCDNFDCQNGAQCIVRINEPICQCLPGYQGEKCEKLVSVNFINKESYLQIPSAKVRPQTNITLQIATDEDSGILLYKGDKDHIAVELYRGRVRASYDTGSHPASAIYSVETINDGNFHIVELLALDQSLSLSVDGGNPKIITNLSKQSTLNFDSPLYVGGMPGKSNVASLRQAPGQNGTSFHGCIRNLYINSELQDFQKVPMQTGILPGCEPCHKKVCAHGTCQPSSQAGFTCECQEGWMGPLCDQRTNDPCLGNKCVHGTCLPINAFSYSCKCLEGHGGVLCDEEEDLFNPCQAIKCKHGKCRLSGLGQPYCECSSGYTGDSCDREISCRGERIRDYYQKQQGYAACQTTKKVSRLECRGGCAGGQCCGPLRSKRRKYSFECTDGSSFVDEVEKVVKCGCTRCVS

SEQ ID NO: 79601 - protein, 1439 aa, Homo sapiens
  Payload ID: 15850
  Gene Symbol: SLIT2
  Gene Name: slit guidance ligand 2
  ENSP ID: ENSP00000482129
MENKISTIERGAFQDLKELERLRLNRNHLQLFPELLFLGTAKLYRLDLSENQIQAIPRKAFRGAVDIKNLQLDYNQISCIEDGAFRALRDLEVLTLNNNNITRLSVASFNHMPKLRTFRLHSNNLYCDCHLAWLSDWLRQRPRVGLYTQCMGPSHLRGHNVAEVQKREFVCSARHGGHQSFMAPSCSVLHCPAACTCSNNIVDCRGKGLTEIPTNLPETITEIRLEQNTIKVIPPGAFSPYKKLRRIDLSNNQISELAPDAFQGLRSLNSLVLYGNKITELPKSLFEGLFSLQLLLLNANKINCLRVDAFQDLHNLNLLSLYDNKLQTIAKGTFSPLRAIQTMHLAQNPFICDCHLKWLADYLHTNPIETSGARCTSPRRLANKRIGQIKSKKFRCSGTEDYRSKLSGDCFADLACPEKCRCEGTTVDCSNQKLNKIPEHIPQYTAELRLNNNEFTVLEATGIFKKLPQLRKINFSNNKITDIEEGAFEGASGVNEILLTSNRLENVQHKMFKGLESLKTLMLRSNRITCVGNDSFIGLSSVRLLSLYDNQITTVAPGAFDTLHSLSTLNLLANPFNCNCYLAWLGEWLRKKRIVTGNPRCQKPYFLKEIPIQDVAIQDFTCDDGNDDNSCSPLSRCPTECTCLDTVVRCSNKGLKVLPKGIPRDVTELYLDGNQFTLVPKELSNYKHLTLIDLSNNRISTLSNQSFSNMTQLLTLILSYNRLRCIPPRTFDGLKSLRLLSLHGNDISVVPEGAFNDLSALSHLAIGANPLYCDCNMQWLSDWVKSEYKEPGIARCAGPGEMADKLLLTTPSKKFTCQGPVDVNILAKCNPCLSNPCKNDGTCNSDPVDFYRCTCPYGFKGQDCDVPIHACISNPCKHGGTCHLKEGEEDGFWCICADGFEGENCEVNVDDCEDNDCENNSTCVDGINNYTCLCPPEYTGELCEEKLDFCAQDLNPCQHDSKCILTPKGFKCDCTPGYVGEHCDIDFDDCQDNKCKNGAHCTDAVNGYTCICPEGYSGLFCEFSPPMVLPRTSPCDNFDCQNGAQCIVRINEPICQCLPGYQGEKCEKLVSVNFINKESYLQIPSAKVRPQTNITLQIATDEDSGILLYKGDKDHIAVELYRGRVRASYDTGSHPASAIYSVETINDGNFHIVELLALDQSLSLSVDGGNPKIITNLSKQSTLNFDSPLYVGGMPGKSNVASLRQAPGQNGTSFHGCIRNLYINSELQDFQKVPMQTGILPGCEPCHKKVCAHGTCQPSSQAGFTCECQEGWMGPLCDQRTNDPCLGNKCVHGTCLPINAFSYSCKCLEGHGGVLCDEEEDLFNPCQAIKCKHGKCRLSGLGQPYCECSSGYTGDSCDREISCRGERIRDYYQKQQGYAACQTTKKVSRLECRGGCAGGQCCGPLRSKRRKYSFECTDGSSFVDEVEKVVKCGCTRCVS

SEQ ID NO: 79602 - protein, 1530 aa, Homo sapiens
  Payload ID: 15851
  Gene Symbol: SLIT3
  Gene Name: slit guidance ligand 3
  Uniprot ID: O75094
  ENSP ID: ENSP00000332164
MAPGWAGVGAAVRARLALALALASVLSGPPAVACPTKCTCSAASVDCHGLGLRAVPRGIPRNAERLDLDRNNITRITKMDFAGLKNLRVLHLEDNQVSVIERGAFQDLKQLERLRLNKNKLQVLPELLFQSTPKLTRLDLSENQIQGIPRKAFRGITDVKNLQLDNNHISCIEDGAFRALRDLEILTLNNNNISRILVTSFNHMPKIRTLRLHSNHLYCDCHLAWLSDWLRQRRTVGQFTLCMAPVHLRGFNVADVQKKEYVCPAPHSEPPSCNANSISCPSPCTCSNNIVDCRGKGLMEIPANLPEGIVEIRLEQNSIKAIPAGAFTQYKKLKRIDISKNQISDIAPDAFQGLKSLTSLVLYGNKITEIVKGLFDGLVSLQLLLLNANKINCLRVNTFQDLQNLNLLSLYDNKLQTISKGLFAPLQSIQTLHLAQNPFVCDCHLKWLADYLQDNPIETSGARCSSPRRLANKRISQIKSKKFRCSGSEDYRSRFSSECFMDLVCPEKCRCEGTIVDCSNQKLVRIPSHLPEYVTDLRLNDNEVSVLEATGIFKKLPNLRKINLSNNKIKEVREGAFDGAASVQELMLTGNQLETVHGRVFRGLSGLKTLMLRSNLIGCVSNDTFAGLSSVRLLSLYDNRITTITPGAFTTLVSLSTINLLSNPFNCNCHLAWLGKWLRKRRIVSGNPRCQKPFFLKEIPIQDVAIQDFTCDGNEESSCQLSPRCPEQCTCMETVVRCSNKGLRALPRGMPKDVTELYLEGNHLTAVPRELSALRHLTLIDLSNNSISMLTNYTFSNMSHLSTLILSYNRLRCIPVHAFNGLRSLRVLTLHGNDISSVPEGSFNDLTSLSHLALGTNPLHCDCSLRWLSEWVKAGYKEPGIARCSSPEPMADRLLLTTPTHRFQCKVLWFCCPGPVDINIVAKCNACLSSPCKNNGTCTQDPVELYRCACPYSYKGKDCTVPINTCIQNPCQHGGTCHLSDSHKDGFSCSCPLGFEGQRCEINPDDCEDNDCENNATCVDGINNYVCICPPNYTGELCDEVIDHCVPELNLCQHEAKCIPLDKGFSCECVPGYSGKLCETDNDDCVAHKCRHGAQCVDTINGYTCTCPQGFSGPFCEHPPPMVLLQTSPCDQYECQNGAQCIVVQQEPTCRCPPGFAGPRCEKLITVNFVGKDSYVELASAKVRPQANISLQVATDKDNGILLYKGDNDPLALELYQGHVRLVYDSLSSPPTTVYSVETVNDGQFHSVELVTLNQTLNLVVDKGTPKSLGKLQKQPAVGINSPLYLGGIPTSTGLSALRQGTDRPLGGFHGCIHEVRINNELQDFKALPPQSLGVSPGCKSCTVCKHGLCRSVEKDSVVCECRPGWTGPLCDQEARDPCLGHRCHHGKCVATGTSYMCKCAEGYGGDLCDNKNDSANACSAFKCHHGQCHISDQGEPYCLCQPGFSGEHCQQENPCLGQVVREVIRRQKGYASCATASKVPIMECRGGCGPQCCQPTRSKRRKYVFQCTDGSSFVEEVERHLECGCLACS

SEQ ID NO: 79603 - protein, 1393 aa, Homo sapiens
  Payload ID: 15851
  Gene Symbol: SLIT3
  Gene Name: slit guidance ligand 3
  ENSP ID: ENSP00000384890
RDLSENQIQGIPRKAFRGITDVKNLQLDNNHISCIEDGAFRALRDLEILTLNNNNISRILVTSFNHMPKIRTLRLHSNHLYCDCHLAWLSDWLRQRRTVGQFTLCMAPVHLRGFNVADVQKKEYVCPAPHSEPPSCNANSISCPSPCTCSNNIVDCRGKGLMEIPANLPEGIVEIRLEQNSIKAIPAGAFTQYKKLKRIDISKNQISDIAPDAFQGLKSLTSLVLYGNKITEIVKGLFDGLVSLQLLLLNANKINCLRVNTFQDLQNLNLLSLYDNKLQTISKGLFAPLQSIQTLHLAQNPFVCDCHLKWLADYLQDNPIETSGARCSSPRRLANKRISQIKSKKFRCSGSEDYRSRFSSECFMDLVCPEKCRCEGTIVDCSNQKLVRIPSHLPEYVTDLRLNDNEVSVLEATGIFKKLPNLRKINLSNNKIKEVREGAFDGAASVQELMLTGNQLETVHGRVFRGLSGLKTLMLRSNLIGCVSNDTFAGLSSVRLLSLYDNRITTITPGAFTTLVSLSTINLLSNPFNCNCHLAWLGKWLRKRRIVSGNPRCQKPFFLKEIPIQDVAIQDFTCDGNEESSCQLSPRCPEQCTCMETVVRCSNKGLRALPRGMPKDVTELYLEGNHLTAVPRELSALRHLTLIDLSNNSISMLTNYTFSNMSHLSTLILSYNRLRCIPVHAFNGLRSLRVLTLHGNDISSVPEGSFNDLTSLSHLALGTNPLHCDCSLRWLSEWVKAGYKEPGIARCSSPEPMADRLLLTTPTHRFQCKVLWFCCPGPVDINIVAKCNACLSSPCKNNGTCTQDPVELYRCACPYSYKGKDCTVPINTCIQNPCQHGGTCHLSDSHKDGFSCSCPLGFEGQRCEINPDDCEDNDCENNATCVDGINNYVCICPPNYTGELCDEVIDHCVPELNLCQHEAKCIPLDKGFSCECVPGYSGKLCETDNDDCVAHKCRHGAQCVDTINGYTCTCPQGFSGPFCEHPPPMVLLQTSPCDQYECQNGAQCIVVQQEPTCRCPPGFAGPRCEKLITVNFVGKDSYVELASAKVRPQANISLQVATDKDNGILLYKGDNDPLALELYQGHVRLVYDSLSSPPTTVYSVETVNDGQFHSVELVTLNQTLNLVVDKGTPKSLGKLQKQPAVGINSPLYLGGIPTSTGLSALRQGTDRPLGGFHGCIHEVRINNELQDFKALPPQSLGVSPGCKSCTVCKHGLCRSVEKDSVVCECRPGWTGPLCDQEARDPCLGHRCHHGKCVATGTSYMCKCAEGYGGDLCDNKNDSANACSAFKCHHGQCHISDQGEPYCLCQPGFSGEHCQQENPCLGQVVREVIRRQKGYASCATASKVPIMECRGGCGPQCCQPTRSKRRKYVFQCTDGSSFVEEVERHLECGCLACS

SEQ ID NO: 79604 - protein, 1523 aa, Homo sapiens
  Payload ID: 15851
  Gene Symbol: SLIT3
  Gene Name: slit guidance ligand 3
  Uniprot ID: O75094
  ENSP ID: ENSP00000430333
MAPGWAGVGAAVRARLALALALASVLSGPPAVACPTKCTCSAASVDCHGLGLRAVPRGIPRNAERLDLDRNNITRITKMDFAGLKNLRVLHLEDNQVSVIERGAFQDLKQLERLRLNKNKLQVLPELLFQSTPKLTRLDLSENQIQGIPRKAFRGITDVKNLQLDNNHISCIEDGAFRALRDLEILTLNNNNISRILVTSFNHMPKIRTLRLHSNHLYCDCHLAWLSDWLRQRRTVGQFTLCMAPVHLRGFNVADVQKKEYVCPAPHSEPPSCNANSISCPSPCTCSNNIVDCRGKGLMEIPANLPEGIVEIRLEQNSIKAIPAGAFTQYKKLKRIDISKNQISDIAPDAFQGLKSLTSLVLYGNKITEIVKGLFDGLVSLQLLLLNANKINCLRVNTFQDLQNLNLLSLYDNKLQTISKGLFAPLQSIQTLHLAQNPFVCDCHLKWLADYLQDNPIETSGARCSSPRRLANKRISQIKSKKFRCSGSEDYRSRFSSECFMDLVCPEKCRCEGTIVDCSNQKLVRIPSHLPEYVTDLRLNDNEVSVLEATGIFKKLPNLRKINLSNNKIKEVREGAFDGAASVQELMLTGNQLETVHGRVFRGLSGLKTLMLRSNLIGCVSNDTFAGLSSVRLLSLYDNRITTITPGAFTTLVSLSTINLLSNPFNCNCHLAWLGKWLRKRRIVSGNPRCQKPFFLKEIPIQDVAIQDFTCDGNEESSCQLSPRCPEQCTCMETVVRCSNKGLRALPRGMPKDVTELYLEGNHLTAVPRELSALRHLTLIDLSNNSISMLTNYTFSNMSHLSTLILSYNRLRCIPVHAFNGLRSLRVLTLHGNDISSVPEGSFNDLTSLSHLALGTNPLHCDCSLRWLSEWVKAGYKEPGIARCSSPEPMADRLLLTTPTHRFQCKGPVDINIVAKCNACLSSPCKNNGTCTQDPVELYRCACPYSYKGKDCTVPINTCIQNPCQHGGTCHLSDSHKDGFSCSCPLGFEGQRCEINPDDCEDNDCENNATCVDGINNYVCICPPNYTGELCDEVIDHCVPELNLCQHEAKCIPLDKGFSCECVPGYSGKLCETDNDDCVAHKCRHGAQCVDTINGYTCTCPQGFSGPFCEHPPPMVLLQTSPCDQYECQNGAQCIVVQQEPTCRCPPGFAGPRCEKLITVNFVGKDSYVELASAKVRPQANISLQVATDKDNGILLYKGDNDPLALELYQGHVRLVYDSLSSPPTTVYSVETVNDGQFHSVELVTLNQTLNLVVDKGTPKSLGKLQKQPAVGINSPLYLGGIPTSTGLSALRQGTDRPLGGFHGCIHEVRINNELQDFKALPPQSLGVSPGCKSCTVCKHGLCRSVEKDSVVCECRPGWTGPLCDQEARDPCLGHRCHHGKCVATGTSYMCKCAEGYGGDLCDNKNDSANACSAFKCHHGQCHISDQGEPYCLCQPGFSGEHCQQENPCLGQVVREVIRRQKGYASCATASKVPIMECRGGCGPQCCQPTRSKRRKYVFQCTDGSSFVEEVERHLECGCLACS

SEQ ID NO: 79605 - protein, 1085 aa, Homo sapiens
  Payload ID: 15852
  Gene Symbol: SRGAP1
  Gene Name: SLIT-ROBO Rho GTPase activating protein 1
  Uniprot ID: Q7Z6B7
  ENSP ID: ENSP00000347198
MSTPSRFKKDKEIIAEYESQVKEIRAQLVEQQKCLEQQTEMRVQLLQDLQDFFRKKAEIETEYSRNLEKLAERFMAKTRSTKDHQQYKKDQNLLSPVNCWYLLLNQVRRESKDHATLSDIYLNNVIMRFMQISEDSTRMFKKSKEIAFQLHEDLMKVLNELYTVMKTYHMYHAESISAESKLKEAEKQEEKQIGRSGDPVFHIRLEERHQRRSSVKKIEKMKEKRQAKYSENKLKSIKARNEYLLTLEATNASVFKYYIHDLSDLIDCCDLGYHASLNRALRTYLSAEYNLETSRHEGLDIIENAVDNLEPRSDKQRFMEMYPAAFCPPMKFEFQSHMGDEVCQVSAQQPVQAELMLRYQQLQSRLATLKIENEEVKKTTEATLQTIQDMVTIEDYDVSECFQHSRSTESVKSTVSETYLSKPSIAKRRANQQETEQFYFMKLREYLEGSNLITKLQAKHDLLQRTLGEGHRAEYMTTRPPNVPPKPQKHRKSRPRSQYNTKLFNGDLETFVKDSGQVIPLIVESCIRFINLYGLQHQGIFRVSGSQVEVNDIKNSFERGENPLADDQSNHDINSVAGVLKLYFRGLENPLFPKERFNDLISCIRIDNLYERALHIRKLLLTLPRSVLIVMRYLFAFLNHLSQYSDENMMDPYNLAICFGPTLMPVPEIQDQVSCQAHVNEIIKTIIIHHETIFPDAKELDGPVYEKCMAGDDYCDSPYSEHGTLEEVDQDAGTEPHTSEDECEPIEAIAKFDYVGRSARELSFKKGASLLLYHRASEDWWEGRHNGIDGLVPHQYIVVQDMDDTFSDTLSQKADSEASSGPVTEDKSSSKDMNSPTDRHPDGYLARQRKRGEPPPPVRRPGRTSDGHCPLHPPHALSNSSVDLGSPSLASHPRGLLQNRGLNNDSPERRRRPGHGSLTNISRHDSLKKIDSPPIRRSTSSGQYTGFNDHKPLDPETIAQDIEETMNTALNELRELERQSTAKHAPDVVLDTLEQVKNSPTPATSTESLSPLHNVALRSSEPQIRRSTSSSSDTMSTFKPMVAPRMGVQLKPPALRPKPAVLPKTNPTIGPAPPPQGPTDKSCTM

SEQ ID NO: 79606 - protein, 1022 aa, Homo sapiens
  Payload ID: 15852
  Gene Symbol: SRGAP1
  Gene Name: SLIT-ROBO Rho GTPase activating protein 1
  ENSP ID: ENSP00000437948
MRVQLLQDLQDFFRKKAEIETEYSRNLEKLAERFMAKTRSTKDHQQYKKDQNLLSPVNCWYLLLNQVRRESKDHATLSDIYLNNVIMRFMQISEDSTRMFKKSKEIAFQLHEDLMKVLNELYTVMKTYHMYHAESISAESKLKEAEKQEEKQIGRSGDPVFHIRLEERHQRRSSVKKIEKMKEKRQAKYSENKLKSIKARNEYLLTLEATNASVFKYYIHDLSDLIDCCDLGYHASLNRALRTYLSAEYNLETSRHEGLDIIENAVDNLEPRSDKQRFMEMYPAAFCPPMKFEFQSHMGDEVCQVSAQQPVQAELMLRYQQLQSRLATLKIENEEVKKTTEATLQTIQDMVTIEDYDVSECFQHSRSTESVKSTVSETYLSKPSIAKRRANQQETEQFYFMKLREYLEGSNLITKLQAKHDLLQRTLGEGHRAEYMTTSRGRRNSHTRHQDSGQVIPLIVESCIRFINLYGLQHQGIFRVSGSQVEVNDIKNSFERGENPLADDQSNHDINSVAGVLKLYFRGLENPLFPKERFNDLISCIRIDNLYERALHIRKLLLTLPRSVLIVMRYLFAFLNHLSQYSDENMMDPYNLAICFGPTLMPVPEIQDQVSCQAHVNEIIKTIIIHHETIFPDAKELDGPVYEKCMAGDDYCDSPYSEHGTLEEVDQDAGTEPHTSEDECEPIEAIAKFDYVGRSARELSFKKGASLLLYHRASEDWWEGRHNGIDGLVPHQYIVVQDMDDTFSDTLSQKADSEASSGPVTEDKSSSKDMNSPTDRHPDGYLARQRKRGEPPPPVRRPGRTSDGHCPLHPPHALSNSSVDLGSPSLASHPRGLLQNRGLNNDSPERRRRPGHGSLTNISRHDSLKKIDSPPIRRSTSSGQYTGFNDHKPLDPETIAQDIEETMNTALNELRELERQSTAKHAPDVVLDTLEQVKNSPTPATSTESLSPLHNVALRSSEPQIRRSTSSSSDTMSTFKPMVAPRMGVQLKPPALRPKPAVLPKTNPTIGPAPPPQGPTDKSCTM

SEQ ID NO: 79607 - protein, 1022 aa, Homo sapiens; identical to SEQ ID NO: 79606
  Payload ID: 15852
  Gene Symbol: SRGAP1
  Gene Name: SLIT-ROBO Rho GTPase activating protein 1
  ENSP ID: ENSP00000485752

SEQ ID NO: 79608 - protein, 305 aa, Homo sapiens
  Payload ID: 15853
  Gene Symbol: SRGAP2
  Gene Name: SLIT-ROBO Rho GTPase activating protein 2
  ENSP ID: ENSP00000397990
MKVLNELYSVMKTYHMYNADSISAQSKLKEAEKQEEKQIGKSVKQEDRQTPRSPDSTANVRIEEKHVRRSSVKKIEKMKEKRQAKYTENKLKAIKARNEYLLALEATNASVFKYYIHDLSDLIDCCDLGYHASLNRALRTFLSAELNLEQSKHEGLDAIENAVENLDATSDKQRLMEMYNNVFCPPMKFEFQPHMGDMASQLCAQQPVQSELVQRCQQLQSRLSTLKIENEEVKKTMEATLQTIQDIVTVEDFDVSDCFQYSNSMESVKSTVSETFMSKPSIAKRRANQQETEQFYFTVRECYGF

SEQ ID NO: 79609 - protein, 118 aa, Homo sapiens
  Payload ID: 15853
  Gene Symbol: SRGAP2
  Gene Name: SLIT-ROBO Rho GTPase activating protein 2
  ENSP ID: ENSP00000459397
MKCLDQQCELRVQLLQDLQDFFRKKAEIEMDYSRNLEKLAERFLAKTRSTKDQQFKKDQNVLSPVNCWNLLLNQSKEVGQQLQDDLMKVLNELYSVMKTYHMYNADSISAQSKLKEAE

SEQ ID NO: 79610 - protein, 1071 aa, Homo sapiens
  Payload ID: 15853
  Gene Symbol: SRGAP2
  Gene Name: SLIT-ROBO Rho GTPase activating protein 2
  ENSP ID: ENSP00000459615
MTSPAKFKKDKEIIAEYDTQVKEIRAQLTEQMKCLDQQCELRVQLLQDLQDFFRKKAEIEMDYSRNLEKLAERFLAKTRSTKDQQFKKDQNVLSPVNCWNLLLNQVKRESRDHTTLSDIYLNNIIPRFVQVSEDSGRLFKKSKEVGQQLQDDLMKVLNELYSVMKTYHMYNADSISAQSKLKEAEKQEEKQIGKSVKQEDRQTPRSPDSTANVRIEEKHVRRSSVKKIEKMKEKRQAKYTENKLKAIKARNEYLLALEATNASVFKYYIHDLSDLIDQCCDLGYHASLNRALRTFLSAELNLEQSKHEGLDAIENAVENLDATSDKQRLMEMYNNVFCPPMKFEFQPHMGDMASQLCAQQPVQSELVQRCQQLQSRLSTLKIENEEVKKTMEATLQTIQDIVTVEDFDVSDCFQYSNSMESVKSTVSETFMSKPSIAKRRANQQETEQFYFTKMKEYLEGRNLITKLQAKHDLLQKTLGESQRTDCSLARRSSTVRKQDSSQAIPLVVESCIRFISRHGLQHEGIFRVSGSQVEVNDIKNAFERGEDPLAGDQNDHDMDSIAGVLKLYFRGLEHPLFPKDIFHDLMACVTMDNLQERALHIRKVLLVLPKTTLIIMRYLFAFLNHLSQFSEENMMDPYNLAICFGPSLMSVPEGHDQVSCQAHVNELIKTIIIQHENIFPSPRELEGPVYSRGGSMEDYCDSPHGETTSVEDSTQDVTAEHHTSDDECEPIEAIAKFDYVGRTARELSFKKGASLLLYQRASDDWWEGRHNGIDGLIPHQYIVVQDTEDGVVERSSPKSEIEVISEPPEEKVTARAGASCPSGGHVADIYLANINKQRKRPESGSIRKTFRSDSHGLSSSLTDSSSPGVGASCRPSSQPIMSQSLPKEGPDKCSISGHGSLNSISRHSSLKNRLDSPQIRKTATAGRSKSFNNHRPMDPEVIAQDIEATMNSALNELRELERQSSVKHTPDVVLDTLEPLKTSPVVAPTSEPSSPLHTQLLKDPEPAFQRSASTAGDIACAFRPVKSVKMAAPVKPPATRPKPTVFPKTNATSPGVNSSTSPQSTDKSCTV

SEQ ID NO: 79611 - protein, 789 aa, Homo sapiens
  Payload ID: 15853
  Gene Symbol: SRGAP2
  Gene Name: SLIT-ROBO Rho GTPase activating protein 2
  ENSP ID: ENSP00000473954
MTSPAKFKKDKEIIAEYDTQVKEIRAQLTEQMKCLDQQCELRVQLLQDLQDFFRKKAEIEMDYSRNLEKLAERFLAKTRSTKDQQFKKDQNVLSPVNCWNLLLNQVKRESRDHTTLSDIYLNNIIPRFVQVSEDSGRLFKKSKEVGQQLQDDLMKVLNELYSVMKTYHMYNADSISAQSKLKEAEKQEEKQIGKSVKQEDRQTPRSPDSTANVRIEEKHVRRSSVKKIEKMKEKRQAKYTENKLKAIKARNEYLLALEATNASVFKYYIHDLSDLIDCCDLGYHASLNRALRTFLSAELNLEQSKHEGLDAIENAVENLDATSDKQRLMEMYNNVFCPPMKFEFQPHMGDMASQLCAQQPVQSELVQRCQQLQSRLSTLKIENEEVKKTMEATLQTIQDIVTVEDFDVSDCFQYSNSMESVKSTVSETFMSKPSIAKRRANQQETEQFYFTKMKEYLEGRNLITKLQAKHDLLQKTLGESQRTDCSLARRSSTVRKQDSSQAIPLVVESCIRFISRHGLQHEGIFRVSGSQVEVNDIKNAFERGEDPLAGDQNDHDMDSIAGVLKLYFRGLEHPLFPKDIFHDLMACVTMDNLQERALHIRKVLLVLPKTTLIIMRYLFAFLNHLSQFSEENMMDPYNLAICFGPSLMSVPEGHDQVSCQAHVNELIKTIIIQHENIFPSPRELEGPVYSRGGSMEDYCDSPHGETTSVEDSTQDVTAEHHTSDDECEPIEAIAKFDYVGRTARELSFKKGASLLLYQRASDDWWEGRHNGIDGLIPHQYIVVQDTLIS

SEQ ID NO: 79612 - protein, 86 aa, Homo sapiens
  Payload ID: 15853
  Gene Symbol: SRGAP2
  Gene Name: SLIT-ROBO Rho GTPase activating protein 2
  ENSP ID: ENSP00000474255
MTSPAKFKKDKEIIAEYDTQVKEIRAQLTEQMKCLDQQCELRVQLLQDLQDFFRKKAEIEMDYSRNLEKLAERFLAKTRSTKDQQF

SEQ ID NO: 79613 - protein, 450 aa, Homo sapiens
  Payload ID: 15853
  Gene Symbol: SRGAP2
  Gene Name: SLIT-ROBO Rho GTPase activating protein 2
  ENSP ID: ENSP00000474270
VKKTMEATLQTIQDIVTVEDFDVSDCFQYSNSMESVKSTVSETFMSKPSIAKRRANQQETEQFYFTKMKEYLEGRNLITKLQAKHDLLQKTLGESQRTDCSLARRSSTVRKQDSSQAIPLVVESCIRFISRHGLQHEGIFRVSGSQVEVNDIKNAFERGEDPLAGDQNDHDMDSIAGVLKLYFRGLEHPLFPKDIFHDLMACVTMDNLQERALHIRKVLLVLPKTTLIIMRYLFAFLNHLSQFSEENMMDPYNLAICFGPSLMSVPEGHDQVSCQAHVNELIKTIIIQHENIFPSPRELEGPVYSRGGSMEDYCDSPHGETTSVEDSTQDVTAEHHTSDDECEPIEAIAKFDYVGRTARELSFKKGASLLLYQRASDDWWEGRHNGIDGLIPHQYIVVQDTEDGVVERSSPKSEIEVISEPPEEKVTARAGASCPSGGHVADIYLANINK

SEQ ID NO: 79614 - protein, 224 aa, Homo sapiens
  Payload ID: 15853
  Gene Symbol: SRGAP2
  Gene Name: SLIT-ROBO Rho GTPase activating protein 2
  ENSP ID: ENSP00000474699
  MOD_RES (1)..(1): Any amino acid
XLFAFLNHLSQFSEENMMDPYNLAICFGPSLMSVPEGHDQVSCQAHVNELIKTIIIQHENIFPSPRELEGPVYSRGGSMEDYCDSPHGETTSVEDSTQDVTAEHHTSDDECEPIEAIAKFDYVGRTARELSFKKGASLLLYQRASDDWWEGRHNGIDGLIPHQYIVVQDTEDGVVERSSPKSEIEVISEPPEEKVTARAGASCPSGGHVADIYLANINNFHCGC

SEQ ID NO: 79615 - protein, 294 aa, Homo sapiens
  Payload ID: 15853
  Gene Symbol: SRGAP2
  Gene Name: SLIT-ROBO Rho GTPase activating protein 2
  ENSP ID: ENSP00000474818
ECEPIEAIAKFDYVGRTARELSFKKGASLLLYQRASDDWWEGRHNGIDGLIPHQYIVVQDTEDGVVERSSPKSEIEVISEPPEEKVTARAGASCPSGGHVADIYLANINNNLHLDNTKPVTTKQRKRPESGSIRKTFRSDSHGLSSSLTDSSSPGVGASCRPSSQPIMSQSLPKEGPDKCSISGHGSLNSISRHSSLKNRLDSPQIRKTATAGRSKSFNNHRPMDPEVIAQDIEATMNSALNELRELERQSSVKHTPDVVLDTLEPLKTSPVVAPTSEPSSPLHTQLLKDPEPA

SEQ ID NO: 79616 - protein, 1070 aa, Homo sapiens
  Payload ID: 15853
  Gene Symbol: SRGAP2
  Gene Name: SLIT-ROBO Rho GTPase activating protein 2
  ENSP ID: ENSP00000485517
MTSPAKFKKDKEIIAEYDTQVKEIRAQLTEQMKCLDQQCELRVQLLQDLQDFFRKKAEIEMDYSRNLEKLAERFLAKTRSTKDQQFKKDQNVLSPVNCWNLLLNQVKRESRDHTTLSDIYLNNIIPRFVQVSEDSGRLFKKSKEVGQQLQDDLMKVLNELYSVMKTYHMYNADSISAQSKLKEAEKQEEKQIGKSVKQEDRQTPRSPDSTANVRIEEKHVRRSSVKKIEKMKEKRQAKYTENKLKAIKARNEYLLALEATNASVFKYYIHDLSDLIDCCDLGYHASLNRALRTFLSAELNLEQSKHEGLDAIENAVENLDATSDKQRLMEMYNNVFCPPMKFEFQPHMGDMASQLCAQQPVQSELVQRCQQLQSRLSTLKIENEEVKKTMEATLQTIQDIVTVEDFDVSDCFQYSNSMESVKSTVSETFMSKPSIAKRRANQQETEQFYFTKMKEYLEGRNLITKLQAKHDLLQKTLGESQRTDCSLARRSSTVRKQDSSQAIPLVVESCIRFISRHGLQHEGIFRVSGSQVEVNDIKNAFERGEDPLAGDQNDHDMDSIAGVLKLYFRGLEHPLFPKDIFHDLMACVTMDNLQERALHIRKVLLVLPKTTLIIMRYLFAFLNHLSQFSEENMMDPYNLAICFGPSLMSVPEGHDQVSCQAHVNELIKTIIIQHENIFPSPRELEGPVYSRGGSMEDYCDSPHGETTSVEDSTQDVTAEHHTSDDECEPIEAIAKFDYVGRTARELSFKKGASLLLYQRASDDWWEGRHNGIDGLIPHQYIVVQDTEDGVVERSSPKSEIEVISEPPEEKVTARAGASCPSGGHVADIYLANINKQRKRPESGSIRKTFRSDSHGLSSSLTDSSSPGVGASCRPSSQPIMSQSLPKEGPDKCSISGHGSLNSISRHSSLKNRLDSPQIRKTATAGRSKSFNNHRPMDPEVIAQDIEATMNSALNELRELERQSSVKHTPDVVLDTLEPLKTSPVVAPTSEPSSPLHTQLLKDPEPAFQRSASTAGDIACAFRPVKSVKMAAPVKPPATRPKPTVFPKTNATSPGVNSSTSPQSTDKSCTV

SEQ ID NO: 79617 - protein, 458 aa, Homo sapiens
  Payload ID: 15854
  Gene Symbol: SRGAP2B
  Gene Name: SLIT-ROBO Rho GTPase activating protein 2B
  Uniprot ID: P0DMP2
  ENSP ID: ENSP00000477776
MTSPAKFKKDKEIIAEYDTQVKEIRAQLTEQMKCLDQQCELRVQLLQDLQDFFRKKAEIEMDYSRNLEKLAERFLAKTCSTKDQQFKKDQNVLSPVNCWNLLLNQVKRESRDHTTLSDIYLNNIIPRFVQVSEDSGRLFKKSKEVGQQLQDDLMKVLNELYSVMKTYHMYNADSISAQSKLKEAEKQEEKQIGKSVKQEDRQTPRSPDSTANVRIEEKHVRRSSVKKIEKMKEKRQAKYTENKLKAIKARNEYLLALEATNASVFKYYIHDLSDLIDCCDLGYHASLNRALRTFLSAELNLEQSKHEGLDAIENAVENLDATSDKQRLMEMYNNVFCPPMKFEFQPHMGDMASQLCAQQPVQSELLQRCQQLQSRLSTLKIENEEVKKTMEATLQTIQDIVTVEDFDVSDCFQYSNSMESVKSTVSETFMSKPSIAKRRANQQETEQFYFTVRECYGF

SEQ ID NO: 79618 - protein, 305 aa, Homo sapiens
  Payload ID: 15854
  Gene Symbol: SRGAP2B
  Gene Name: SLIT-ROBO Rho GTPase activating protein 2B
  ENSP ID: ENSP00000479960
MKVLNELYSVMKTYHMYNADSISAQSKLKEAEKQEEKQIGKSVKQEDRQTPRSPDSTANVRIEEKHVRRSSVKKIEKMKEKRQAKYTENKLKAIKARNEYLLALEATNASVFKYYIHDLSDLIDCCDLGYHASLNRALRTFLSAELNLEQSKHEGLDAIENAVENLDATSDKQRLMEMYNNVFCPPMKFEFQPHMGDMASQLCAQQPVQSELLQRCQQLQSRLSTLKIENEEVKKTMEATLQTIQDIVTVEDFDVSDCFQYSNSMESVKSTVSETFMSKPSIAKRRANQQETEQFYFTVRECYGF

SEQ ID NO: 79619 - protein, 43 aa, Homo sapiens
  Payload ID: 15854
  Gene Symbol: SRGAP2B
  Gene Name: SLIT-ROBO Rho GTPase activating protein 2B
  ENSP ID: ENSP00000484189
  MOD_RES (1)..(1): Any amino acid
XKKSKEVGQQLQDDLMKVLNELYSHQCSEQTKGGGEAGGEANW

SEQ ID NO: 79620 - protein, 459 aa, Homo sapiens
  Payload ID: 15855
  Gene Symbol: SRGAP2C
  Gene Name: SLIT-ROBO Rho GTPase activating protein 2C
  Uniprot ID: P0DJJ0
  ENSP ID: ENSP00000478290
MTSPAKFKKDKEIIAEYDTQVKEIRAQLTEQMKCLDQQCELRVQLLQDLQDFFRKKAEIEMDYSRNLEKLAEHFLAKTRSTKDQQFKKDQNVLSPVNCWNLLLNQVKWESRDHTTLSDIYLNNIIPRFVQVSEDSGRLFKKSKEVGQQLQDDLMKVLNELYSVMKTYHMYNADSISAQSKLKEAEKQEEKQIGKSVKQEDRQTPCSPDSTANVRIEEKHVRRSSVKKIEKMKEKHQAKYTENKLKAIKAQNEYLLALEATNASVFKYYIHDLSDLIDQCCDLGYHASLNRALRTFLSAELNLEQSKHEGLDAIENAVENLDATSDKQRLMEMYNNVFCPPMKFEFQPHMGDMASQLCAQQPVQSELVQRCQQLQSRLSTLKIENEEVKKTMEATLQTIQDIVTVEDFDVSDCFQYSNSMESVKSTVSETFMSKPSIAKRRANQQETEQFYFTVRECYGF

SEQ ID NO: 79621 - protein, 305 aa, Homo sapiens
  Payload ID: 15855
  Gene Symbol: SRGAP2C
  Gene Name: SLIT-ROBO Rho GTPase activating protein 2C
  ENSP ID: ENSP00000483477
MKVLNELYSVMKTYHMYNADSISAQSKLKEAEKQEEKQIGKSVKQEDRQTPCSPDSTANVRIEEKHVRRSSVKKIEKMKEKHQAKYTENKLKAIKAQNEYLLALEATNASVFKYYIHDLSDLIDCCDLGYHASLNRALRTFLSAELNLEQSKHEGLDAIENAVENLDATSDKQRLMEMYNNVFCPPMKFEFQPHMGDMASQLCAQQPVQSELVQRCQQLQSRLSTLKIENEEVKKTMEATLQTIQDIVTVEDFDVSDCFQYSNSMESVKSTVSETFMSKPSIAKRRANQQETEQFYFTVRECYGF

SEQ ID NO: 79622 - protein, 1075 aa, Homo sapiens
  Payload ID: 15856
  Gene Symbol: SRGAP3
  Gene Name: SLIT-ROBO Rho GTPase activating protein 3
  Uniprot ID: O43295
  ENSP ID: ENSP00000353587
MSSQTKFKKDKEIIAEYEAQIKEIRTQLVEQFKCLEQQSESRLQLLQDLQEFFRRKAEIELEYSRSLEKLAERFSSKIRSSREHQFKKDQYLLSPVNCWYLVLHQTRRESRDHATLNDIFMNNVIVRLSQISEDVIRLFKKSKEIGLQMHEELLKVTNELYTVMKTYHMYHAESISAESKLKEAEKQEEKQFNKSGDLSMNLLRHEDRPQRRSSVKKIEKMKEKRQAKYSENKLKCTKARNDYLLNLAATNAAISKYYIHDVSDLIDCCDLGFHASLARTFRTYLSAEYNLETSRHEGLDVIENAVDNLDSRSDKHTVMDMCNQVFCPPLKFEFQPHMGDEVCQVSAQQPVQTELLMRYHQLQSRLATLKIENEEVRKTLDATMQTLQDMLTVEDFDVSDAFQHSRSTESVKSAASETYMSKINIAKRRANQQETEMFYFTKFKEYVNGSNLITKLQAKHDLLKQTLGEGERAECGTTRGRRNARTRNQDSGQAIPLVVESCIRYINLYGLQQQGIFRVPGSQVEVNDIKNSFERGEDPLVDDQNERDINSVAGVLKLYFRGLENPLFPKERFQDLISTIKLENPAERVHQIQQILVTLPRVVIVVMRYLFAFLNHLSQYSDENMMDPYNLAICFGPTLMHIPDGQDPVSCQAHINEVIKTIIIHHEAIFPSPRELEGPVYEKCMAGGEEYCDSPHSEPGAIDEVDHDNGTEPHTSDEEVEQIEAIAKFDYMGRSPRELSFKKGASLLLYHRASEDWWEGRHNGVDGLIPHQYIVVQDMDDAFSDSLSQKADSEASSGPLLDDKASSKNDLQSPTEHISDYGFGGVMGRVRLRSDGAAIPRRRSGGDTHSPPRGLGPSIDTPPRAAACPSSPHKIPLTRGRIESPEKRRMATFGSAGSINYPDKKALSEGHSMRSTCGSTRHSSLGDHKSLEAEALAEDIEKTMSTALHELRELERQNTVKQAPDVVLDTLEPLKNPPGPVSSEPASPLHTIVIRDPDAAMRRSSSSSTEMMTTFKPALSARLAGAQLRPPPMRPVRPVVQHRSSSSSSSGVGSPAVTPTEKMFPNSSADKSGTM

SEQ ID NO: 79623 - protein, 1099 aa, Homo sapiens
  Payload ID: 15856
  Gene Symbol: SRGAP3
  Gene Name: SLIT-ROBO Rho GTPase activating protein 3
  Uniprot ID: O43295
  ENSP ID: ENSP00000373347
MSSQTKFKKDKEIIAEYEAQIKEIRTQLVEQFKCLEQQSESRLQLLQDLQEFFRRKAEIELEYSRSLEKLAERFSSKIRSSREHQFKKDQYLLSPVNCWYLVLHQTRRESRDHATLNDIFMNNVIVRLSQISEDVIRLFKKSKEIGLQMHEELLKVTNELYTVMKTYHMYHAESISAESKLKEAEKQEEKQFNKSGDLSMNLLRHEDRPQRRSSVKKIEKMKEKRQAKYSENKLKCTKARNDYLLNLAATNAAISKYYIHDVSDLIDCCDLGFHASLARTFRTYLSAEYNLETSRHEGLDVIENAVDNLDSRSDKHTVMDMCNQVFCPPLKFEFQPHMGDEVCQVSAQQPVQTELLMRYHQLQSRLATLKIENEEVRKTLDATMQTLQDMLTVEDFDVSDAFQHSRSTESVKSAASETYMSKINIAKRRANQQETEMFYFTKFKEYVNGSNLITKLQAKHDLLKQTLGEGERAECGTTRPPCLPPKPQKMRRPRPLSVYSHKLFNGSMEAFIKDSGQAIPLVVESCIRYINLYGLQQQGIFRVPGSQVEVNDIKNSFERGEDPLVDDQNERDINSVAGVLKLYFRGLENPLFPKERFQDLISTIKLENPAERVHQIQQILVTLPRVVIVVMRYLFAFLNHLSQYSDENMMDPYNLAICFGPTLMHIPDGQDPVSCQAHINEVIKTIIIHHEAIFPSPRELEGPVYEKCMAGGEEYCDSPHSEPGAIDEVDHDNGTEPHTSDEEVEQIEAIAKFDYMGRSPRELSFKKGASLLLYHRASEDWWEGRHNGVDGLIPHQYIVVQDMDDAFSDSLSQKADSEASSGPLLDDKASSKNDLQSPTEHISDYGFGGVMGRVRLRSDGAAIPRRRSGGDTHSPPRGLGPSIDTPPRAAACPSSPHKIPLTRGRIESPEKRRMATFGSAGSINYPDKKALSEGHSMRSTCGSTRHSSLGDHKSLEAEALAEDIEKTMSTALHELRELERQNTVKQAPDVVLDTLEPLKNPPGPVSSEPASPLHTIVIRDPDAAMRRSSSSSTEMMTTFKPALSARLAGAQLRPPPMRPVRPVVQHRSSSSSSSGVGSPAVTPTEKMFPNSSADKSGTM

SEQ ID NO: 79624 - protein, 335 aa, Homo sapiens
  Payload ID: 15856
  Gene Symbol: SRGAP3
  Gene Name: SLIT-ROBO Rho GTPase activating protein 3
  ENSP ID: ENSP00000482666
MNNVIVRLSQISEDVIRLFKKSKEIGLQMHEELLKVTNELYTVMKTYHMYHAESISAESKLKEAEKQEEKQFNKSGDLSMNLLRHEDRPQRRSSVKKIEKMKEKRQAKYSENKLKCTKARNDYLLNLAATNAAISKYYIHDVSDLIDCCDLGFHASLARTFRTYLSAEYNLETSRHEGLDVIENAVDNLDSRSDKHTVMDMCNQVFCPPLKFEFQPHMGDEVCQVSAQQPVQTELLMRYHQLQSRLATLKIENEEVRKTLDATMQTLQDMLTVEDFDVSDAFQHSRSTESVKSAASETYMSKINIAKRRANQQETEMFYFTKGPDDVFPICHPRL

SEQ ID NO: 79625 - protein, 138 aa, Homo sapiens
  Payload ID: 15857
  Gene Symbol: SCIMP
  Gene Name: SLP adaptor and CSK interacting membrane protein
  Uniprot ID: Q6UWF3
  ENSP ID: ENSP00000382509
MDTFTVQDSTAMSWWRNNFWIILAVAIIVVSVGLGLILYCVCKKWEIAKPLKHKQVDEEKMYENVLNESPVQLPPLPPRNWPSLEDSSPQEAPSQPPATYSLVNKVKNKKTVSIPSYIEPEDDYDDVEIPANTEKASF

SEQ ID NO: 79626 - protein, 130 aa, Homo sapiens
  Payload ID: 15857
  Gene Symbol: SCIMP
  Gene Name: SLP adaptor and CSK interacting membrane protein
  ENSP ID: ENSP00000459153
MDTFTVQDSTAMSWWRNNFWIILAVAIIVVSVGLGLILYCVCKWQLRRGKKWEIAKPLKHKQVDEEKMYENVLNESPVQLPPLPPRNWPSLEDSYGVLLCHPGWSAMARSRLTASSASRVHAILLPQPPE

SEQ ID NO: 79627 - protein, 123 aa, Homo sapiens
  Payload ID: 15857
  Gene Symbol: SCIMP
  Gene Name: SLP adaptor and CSK interacting membrane protein
  Uniprot ID: Q6UWF3
  ENSP ID: ENSP00000459605
MDTFTVQDSTAMSWWRNNFWIILAVAIIVVSVGLGLILYCVCKKWEIAKPLKHKQVDEEKMYENVLNESPVQLPPLPPRNWPSLEDSYGVLLCHPGWSAMARSRLTASSASRVHAILLPQPPE

SEQ ID NO: 79628 - protein, 145 aa, Homo sapiens
  Payload ID: 15857
  Gene Symbol: SCIMP
  Gene Name: SLP adaptor and CSK interacting membrane protein
  Uniprot ID: Q6UWF3
  ENSP ID: ENSP00000461269
MDTFTVQDSTAMSWWRNNFWIILAVAIIVVSVGLGLILYCVCKWQLRRGKKWEIAKPLKHKQVDEEKMYENVLNESPVQLPPLPPRNWPSLEDSSPQEAPSQPPATYSLVNKVKNKKTVSIPSYIEPEDDYDDVEIPANTEKASF

SEQ ID NO: 79629 - protein, 586 aa, Homo sapiens
  Payload ID: 15858
  Gene Symbol: SLU7
  Gene Name: SLU7 homolog, splicing factor
  Uniprot ID: O95391
  ENSP ID: ENSP00000297151
MSATVVDAVNAAPLSGSKEMSLEEPKKMTREDWRKKKELEEQRKLGNAPAEVDEEGKDINPHIPQYISSVPWYIDPSKRPTLKHQRPQPEKQKQFSSSGEWYKRGVKENSIITKYRKGACENCGAMTHKKKDCFERPRRVGAKFTGTNIAPDEHVQPQLMFDYDGKRDRWNGYNPEEHMKIVEEYAKVDLAKRTLKAQKLQEELASGKLVEQANSPKHQWGEEEPNSQMEKDHNSEDEDEDKYADDIDMPGQNFDSKRRITVRNLRIREDIAKYLRNLDPNSAYYDPKTRAMRENPYANAGKNPDEVSYAGDNFVRYTGDTISMAQTQLFAWEAYDKGSEVHLQADPTKLELLYKSFKVKKEDFKEQQKESILEKYGGQEHLDAPPAELLLAQTEDYVEYSRHGTVIKGQERAVACSKYEEDVKIHNHTHIWGSYWKEGRWGYKCCHSFFKYSYCTGEAGKEIVNSEECIINEITGEESVKKPQTLMELHQEKLKEEKKKKKKKKKKHRKSSSDSDDEEKKHEKLKKALNAEEARLLHVKETMQIDERKRPYNSMYETREPTEEEMEAYRMKRQRPDDPMASFLGQ

SEQ ID NO: 79630 - protein, 101 aa, Homo sapiens
  Payload ID: 15858
  Gene Symbol: SLU7
  Gene Name: SLU7 homolog, splicing factor
  ENSP ID: ENSP00000428362
MSATVVDAVNAAPLSGSKEMSLEEPKKMTREDWRKKKELEEQRKLGNAPAEVDEEGKDINPHIPQYISSVPWYIDPSKRPTLKHQRPQPEKQKQFSSSGEW

SEQ ID NO: 79631 - protein, 143 aa, Homo sapiens
  Payload ID: 15858
  Gene Symbol: SLU7
  Gene Name: SLU7 homolog, splicing factor
  ENSP ID: ENSP00000428943
MSATVVDAVNAAPLSGSKEMSLEEPKKMTREDWRKKKELEEQRKLGNAPAEVDEEGKDINPHIPQYISSVPWYIDPSKRPTLKHQRPQPEKQKQFSSSGEWYKRGVKENSIITKYRKGACENCGAMTHKKKDCFERPRRVGAK

SEQ ID NO: 79632 - protein, 124 aa, Homo sapiens
  Payload ID: 15858
  Gene Symbol: SLU7
  Gene Name: SLU7 homolog, splicing factor
  ENSP ID: ENSP00000429990
MSATVVDAVNAAPLSGSKEMSLEEPKKMTREDWRKKKELEEQRKLGNAPAEVDEEGKDINPHIPQYISSVPWYIDPSKRPTLKHQRPQPEKQKQFSSSGEWYKRGVKENSIITKYRKGACENCG

SEQ ID NO: 79633 - protein, 275 aa, Homo sapiens
  Payload ID: 15859
  Gene Symbol: SLX1A
  Gene Name: SLX1 homolog A, structure-specific endonuclease subunit
  Uniprot ID: Q9BQ83
  ENSP ID: ENSP00000251303
MGPAGVAARPGRFFGVYLLYCLNPRYRGRVYVGFTVNTARRVQQHNGGRKKGGAWRTSGRGPWEMVLVVHGFPSSVAALRFEWAWQHPHASRRLAHVGPRLRGETAFAFHLRVLAHMLRAPPWARLPLTLRWVRPDLRQDLCLPPPPHVPLAFGPPPPQAPAPRRRAGPFDDAEPEPDQGDPGACCSLCAQTIQDEEGPLCCPHPGCLLRAHVICLAEEFLQEEPGQLLPLEGQCPCCEKSLLWGDLIWLCQMDTEKEVEDSELEEAHWTDLLET

SEQ ID NO: 79634 - protein, 161 aa, Homo sapiens
  Payload ID: 15859
  Gene Symbol: SLX1A
  Gene Name: SLX1 homolog A, structure-specific endonuclease subunit
  Uniprot ID: Q9BQ83
  ENSP ID: ENSP00000333945
MGPAGVAARPGRFFGVYLLYCLNPRYRGRVYVGFTVNTARRVQQHNGGRKKGGAWRTSGRGPWEMVLVVHGFPSSVAALRDEEGPLCCPHPGCLLRAHVICLAEEFLQEEPGQLLPLEGQCPCCEKSLLWGDLIWLCQMDTEKEVEDSELEEAHWTDLLET

SEQ ID NO: 79635 - protein, 81 aa, Homo sapiens
  Payload ID: 15859
  Gene Symbol: SLX1A
  Gene Name: SLX1 homolog A, structure-specific endonuclease subunit
  ENSP ID: ENSP00000455250
MGPAGVAARPGRFFGVYLLYCLNPRYRGRVYVGFTVNTARRVQQHNGGRKKGGAWRTSGRGPWEMVLVVHGFPSSVAALRL

SEQ ID NO: 79636 - protein, 275 aa, Homo sapiens; identical to SEQ ID NO: 79633
  Payload ID: 15860
  Gene Symbol: SLX1B
  Gene Name: SLX1 homolog B, structure-specific endonuclease subunit
  Uniprot ID: Q9BQ83
  ENSP ID: ENSP00000328940

SEQ ID NO: 79637 - protein, 161 aa, Homo sapiens; identical to SEQ ID NO: 79634
  Payload ID: 15860
  Gene Symbol: SLX1B
  Gene Name: SLX1 homolog B, structure-specific endonuclease subunit
  Uniprot ID: Q9BQ83
  ENSP ID: ENSP00000335316

SEQ ID NO: 79638 - protein, 88 aa, Homo sapiens
  Payload ID: 15860
  Gene Symbol: SLX1B
  Gene Name: SLX1 homolog B, structure-specific endonuclease subunit
  ENSP ID: ENSP00000456372
MVLVVHGFPSSVAALRFEWAWQHPHASRRLAHVGPRLRGETAFAFHLRVLAHMLRAPPWARLPLTLRWVRPDLRQDLCLPPPPHVPLA

SEQ ID NO: 79639 - protein, 408 aa, Homo sapiens
  Payload ID: 15861
  Gene Symbol: SLX4IP
  Gene Name: SLX4 interacting protein
  Uniprot ID: Q5VYV7
  ENSP ID: ENSP00000335557
MASKKFAVKCGNFAVLVDLHILPQGSNKDTSWFSEQKKEEVCLLLKETIDSRVQEYLEVRKQHRPSNAEFTRSNPLSLKGYGFQITAYFLKRGIRLRCIRSTQNAELCVFPDRFVVCVSQLAFSRDLLASQNEDLTERVLHGVSDYFAECAESSLPPSAKLRRNALKEIVKRTETKSSVTSKSQTRRDTVETSSDSVIAEIARRRNDGQASSSPPSESMGQAKDSIKAAESHWGLPVQKLEKVNQTQPEDTSGQQKPHPGERLKTGLLSRSPVCSCESASPCPKQSPRVAKTQQKRRNCSSAEDFDHHGRVSLGSDRLVPREIIVEKSKAVRVLPASELSDPGLLLKQDLAKTTSKEELHVLESLSSRHLMKNNPGQAQQTGLATNTERLSTIQNSPTKKRKKYERGH

SEQ ID NO: 79640 - protein, 78 aa, Homo sapiens
  Payload ID: 15861
  Gene Symbol: SLX4IP
  Gene Name: SLX4 interacting protein
  ENSP ID: ENSP00000432784
  MOD_RES (1)..(1): Any amino acid
XYGFQITAYFLKRGIRLRCIRSTQNAELCVFPDRFVVCVSQLAFSRDLLASQNEDLDNQSTIACFLLPEGRGKSTLHN

SEQ ID NO: 79641 - protein, 1834 aa, Homo sapiens
  Payload ID: 15862
  Gene Symbol: SLX4
  Gene Name: SLX4 structure-specific endonuclease subunit
  Uniprot ID: Q8IY92
  ENSP ID: ENSP00000294008
MKLSVNEAQLGFYLGSLSHLSACPGIDPRSSEDQPESLKTGQMMDESDEDFKELCASFFQRVKKHGIKEVSGERKTQKAASNGTQIRSKLKRTKQTATKTKTLQGPAEKKPPSGSQAPRTKKQRVTKWQASEPAHSVNGEGGVLASAPDPPVLRETAQNTQTGNQQEPSPNLSREKTRENVPNSDSQPPPSCLTTAVPSPSKPRTAQLVLQRMQQFKRADPERLRHASEECSLEAAREENVPKDPQEEMMAGNVYGLGPPAPESDAAVALTLQQEFARVGASAHDDSLEEKGLFFCQICQKNLSAMNVTRREQHVNRCLDEAEKTLRPSVPQIPECPICGKPFLTLKSRTSHLKQCAVKMEVGPQLLLQAVRLQTAQPEGSSSPPMFSFSDHSRGLKRRGPTSKKEPRKRRKVDEAPSEDLLVAMALSRSEMEPGAAVPALRLESAFSERIRPEAENKSRKKKPPVSPPLLLVQDSETTGRQIEDRVALLLSEEVELSSTPPLPASRILKEGWERAGQCPPPPERKQSFLWEGSALTGAWAMEDFYTARLVPPLVPQRPAQGLMQEPVPPLVPPEHSELSERRSPALHGTPTAGCGSRGPSPSASQREHQALQDLVDLAREGLSASPWPGSGGLAGSEGTAGLDVVPGGLPLTGFVVPSQDKHPDRGGRTLLSLGLLVADFGAMVNNPHLSDVQFQTDSGEVLYAHKFVLYARCPLLIQYVNNEGFSAVEDGVLTQRVLLGDVSTEAARTFLHYLYTADTGLPPGLSSELSSLAHRFGVSELVHLCEQVPIATDSEGKPWEEKEAENCESRAENFQELLRSMWADEEEEAETLLKSKDHEEDQENVNEAEMEEIYEFAATQRKLLQEERAAGAGEDADWLEGGSPVSGQLLAGVQVQKQWDKVEEMEPLEPGRDEAATTWEKMGQCALPPPQGQHSGARGAEAPEQEAPEEALGHSSCSSPSRDCQAERKEGSLPHSDDAGDYEQLFSSTQGEISEPSQITSEPEEQSGAVRERGLEVSHRLAPWQASPPHPCRFLLGPPQGGSPRGSHHTSGSSLSTPRSRGGTSQVGSPTLLSPAVPSKQKRDRSILTLSKEPGHQKGKERRSVLECRNKGVLMFPEKSPSIDLTQSNPDHSSSRSQKSSSKLNEEDEVILLLDSDEELELEQTKMKSISSDPLEEKKALEISPRSCELFSIIDVDADQEPSQSPPRSEAVLQQEDEGALPENRGSLGRRGAPWLFCDRESSPSEASTTDTSWLVPATPLASRSRDCSSQTQISSLRSGLAVQAVTQHTPRASVGNREGNEVAQKFSVIRPQTPPPQTPSSCLTPVSPGTSDGRRQGHRSPSRPHPGGHPHSSPLAPHPISGDRAHFSRRFLKHSPPGPSFLNQTPAGEVVEVGDSDDEQEVASHQANRSPPLDSDPPIPIDDCCWHMEPLSPIPIDHWNLERTGPLSTSSPSRRMNEAADSRDCRSPGLLDTTPIRGSCTTQRKLQEKSSGAGSLGNSRPSFLNSALWDVWDGEEQRPPETPPPAQMPSAGGAQKPEGLETPKGANRKKNLPPKVPITPMPQYSIMETPVLKKELDRFGVRPLPKRQMVLKLKEIFQYTHQTLDSDSEDESQSSQPLLQAPHCQTLASQTYKPSRAGVHAQQEATTGPGAHRPKGPAKTKGPRHQRKHHESITPPSRSPTKEAPPGLNDDAQIPASQESVATSVDGSDSSLSSQSSSSCEFGAAFESAGEEEGEGEVSASQAAVQAADTDEALRCYIRSKPALYQKVLLYQPFELRELQAELRQNGLRVSSRRLLDFLDTHCITFTTAATRREKLQGRRRQPRGKKKVERN

SEQ ID NO: 79642 - protein, 465 aa, Homo sapiens
  Payload ID: 15863
  Gene Symbol: SMAD1
  Gene Name: SMAD family member 1
  Uniprot ID: Q15797
  ENSP ID: ENSP00000305769
MNVTSLFSFTSPAVKRLLGWKQGDEEEKWAEKAVDALVKKLKKKKGAMEELEKALSCPGQPSNCVTIPRSLDGRLQVSHRKGLPHVIYCRVWRWPDLQSHHELKPLECCEFPFGSKQKEVCINPYHYKRVESPVLPPVLVPRHSEYNPQHSLLAQFRNLGQNEPHMPLNATFPDSFQQPNSHPFPHSPNSSYPNSPGSSSSTYPHSPTSSDPGSPFQMPADTPPPAYLPPEDPMTQDGSQPMDTNMMAPPLPSEINRGDVQAVAYEEPKHWCSIVYYELNNRVGEAFHASSTSVLVDGFTDPSNNKNRFCLGLLSNVNRNSTIENTRRHIGKGVHLYYVGGEVYAECLSDSSIFVQSRNCNYHHGFHPTTVCKIPSGCSLKIFNNQEFAQLLAQSVNHGFETVYELTKMCTIRMSFVKGWGAEYHRQDVTSTPCWIEIHLHGPLQWLDKVLTQMGSPHNPISSVS

SEQ ID NO: 79643 - protein, 465 aa, Homo sapiens; identical to SEQ ID NO: 79642
  Payload ID: 15863
  Gene Symbol: SMAD1
  Gene Name: SMAD family member 1
  Uniprot ID: Q15797
  ENSP ID: ENSP00000377652

SEQ ID NO: 79644 - protein, 10 aa, Homo sapiens
  Payload ID: 15863
  Gene Symbol: SMAD1
  Gene Name: SMAD family member 1
  ENSP ID: ENSP00000421601
MNVTSLFSFT

SEQ ID NO: 79645 - protein, 58 aa, Homo sapiens
  Payload ID: 15863
  Gene Symbol: SMAD1
  Gene Name: SMAD family member 1
  ENSP ID: ENSP00000422706
MNVTSLFSFTSPAVKRLLGWKQGDEEEKWAEKAVDALVKKLKKKKGAMEELEKALSCP

SEQ ID NO: 79646 - protein, 95 aa, Homo sapiens
  Payload ID: 15863
  Gene Symbol: SMAD1
  Gene Name: SMAD family member 1
  ENSP ID: ENSP00000424649
MNVTSLFSFTSPAVKRLLGWKQGDEEEKWAEKAVDALVKKLKKKKGAMEELEKALSCPGQPSNCVTIPRSLDGRLQVSHRKGLPHVIYCRVWRWP

SEQ ID NO: 79647 - protein, 106 aa, Homo sapiens
  Payload ID: 15863
  Gene Symbol: SMAD1
  Gene Name: SMAD family member 1
  ENSP ID: ENSP00000424959
MNVTSLFSFTSPAVKRLLGWKQGDEEEKWAEKAVDALVKKLKKKKGAMEELEKALSCPGQPSNCVTIPRSLDGRLQVSHRKGLPHVIYCRVWRWPDLQSHHELKPL

SEQ ID NO: 79648 - protein, 112 aa, Homo sapiens
  Payload ID: 15863
  Gene Symbol: SMAD1
  Gene Name: SMAD family member 1
  ENSP ID: ENSP00000425270
MNVTSLFSFTSPAVKRLLGWKQGDEEEKWAEKAVDALVKKLKKKKGAMEELEKALSCPGQPSNCVTIPRSLDGRLQVSHRKGLPHVIYCRVWRWPDLQSHHELKPLECCEFP

SEQ ID NO: 79649 - protein, 465 aa, Homo sapiens; identical to SEQ ID NO: 79642
  Payload ID: 15863
  Gene Symbol: SMAD1
  Gene Name: SMAD family member 1
  Uniprot ID: Q15797
  ENSP ID: ENSP00000426568

SEQ ID NO: 79650 - protein, 133 aa, Homo sapiens
  Payload ID: 15863
  Gene Symbol: SMAD1
  Gene Name: SMAD family member 1
  ENSP ID: ENSP00000427002
MNVTSLFSFTSPAVKRLLGWKQGDEEEKWAEKAVDALVKKLKKKKGAMEELEKALSCPGQPSNCVTIPRSLDGRLQVSHRKGLPHVIYCRVWRWPDLQSHHELKPLECCEFPFGSKQKEVCINPYHYKRVESP

SEQ ID NO: 79651 - protein, 467 aa, Homo sapiens
  Payload ID: 15864
  Gene Symbol: SMAD2
  Gene Name: SMAD family member 2
  Uniprot ID: Q15796
  ENSP ID: ENSP00000262160
MSSILPFTPPVVKRLLGWKKSAGGSGGAGGGEQNGQEEKWCEKAVKSLVKKLKKTGRLDELEKAITTQNCNTKCVTIPSTCSEIWGLSTPNTIDQWDTTGLYSFSEQTRSLDGRLQVSHRKGLPHVIYCRLWRWPDLHSHHELKAIENCEYAFNLKKDEVCVNPYHYQRVETPVLPPVLVPRHTEILTELPPLDDYTHSIPENTNFPAGIEPQSNYIPETPPPGYISEDGETSDQQLNQSMDTGSPAELSPTTLSPVNHSLDLQPVTYSEPAFWCSIAYYELNQRVGETFHASQPSLTVDGFTDPSNSERFCLGLLSNVNRNATVEMTRRHIGRGVRLYYIGGEVFAECLSDSAIFVQSPNCNQRYGWHPATVCKIPPGCNLKIFNNQEFAALLAQSVNQGFEAVYQLTRMCTIRMSFVKGWGAEYRRQTVTSTPCWIELHLNGPLQWLDKVLTQMGSPSVRCSSMS

SEQ ID NO: 79652 - protein, 437 aa, Homo sapiens
  Payload ID: 15864
  Gene Symbol: SMAD2
  Gene Name: SMAD family member 2
  Uniprot ID: Q15796
  ENSP ID: ENSP00000349282
MSSILPFTPPVVKRLLGWKKSAGGSGGAGGGEQNGQEEKWCEKAVKSLVKKLKKTGRLDELEKAITTQNCNTKCVTIPRSLDGRLQVSHRKGLPHVIYCRLWRWPDLHSHHELKAIENCEYAFNLKKDEVCVNPYHYQRVETPVLPPVLVPRHTEILTELPPLDDYTHSIPENTNFPAGIEPQSNYIPETPPPGYISEDGETSDQQLNQSMDTGSPAELSPTTLSPVNHSLDLQPVTYSEPAFWCSIAYYELNQRVGETFHASQPSLTVDGFTDPSNSERFCLGLLSNVNRNATVEMTRRHIGRGVRLYYIGGEVFAECLSDSAIFVQSPNCNQRYGWHPATVCKIPPGCNLKIFNNQEFAALLAQSVNQGFEAVYQLTRMCTIRMSFVKGWGAEYRRQTVTSTPCWIELHLNGPLQWLDKVLTQMGSPSVRCSSMS

SEQ ID NO: 79653 - protein, 467 aa, Homo sapiens; identical to SEQ ID NO: 79651
  Payload ID: 15864
  Gene Symbol: SMAD2
  Gene Name: SMAD family member 2
  Uniprot ID: Q15796
  ENSP ID: ENSP00000384449

SEQ ID NO: 79654 - protein, 217 aa, Homo sapiens
  Payload ID: 15864
  Gene Symbol: SMAD2
  Gene Name: SMAD family member 2
  ENSP ID: ENSP00000465355
MSSILPFTPPVVKRLLGWKKSAGGSGGAGGGEQNGQEEKWCEKAVKSLVKKLKKTGRLDELEKAITTQNCNTKCVTIPSTCSEIWGLSTPNTIDQWDTTGLYSFSEQTRSLDGRLQVSHRKGLPHVIYCRLWRWPDLHSHHELKAIENCEYAFNLKKDEVCVNPYHYQRVETPVLPPVLVPRHTEILTELPPLDDYTHSIPENTNFPAGIEPQSNYI

SEQ ID NO: 79655 - protein, 109 aa, Homo sapiens
  Payload ID: 15864
  Gene Symbol: SMAD2
  Gene Name: SMAD family member 2
  ENSP ID: ENSP00000465971
MSSILPFTPPVVKRLLGWKKSAGGSGGAGGGEQNGQEEKWCEKAVKSLVKKLKKTGRLDELEKAITTQNCNTKCVTIPSTCSEIWGLSTPNTIDQWDTTGLYSFSEQTR

SEQ ID NO: 79656 - protein, 437 aa, Homo sapiens; identical to SEQ ID NO: 79652
  Payload ID: 15864
  Gene Symbol: SMAD2
  Gene Name: SMAD family member 2
  Uniprot ID: Q15796
  ENSP ID: ENSP00000466193

SEQ ID NO: 79657 - protein, 217 aa, Homo sapiens; identical to SEQ ID NO: 79654
  Payload ID: 15864
  Gene Symbol: SMAD2
  Gene Name: SMAD family member 2
  ENSP ID: ENSP00000466254

SEQ ID NO: 79658 - protein, 431 aa, Homo sapiens
  Payload ID: 15864
  Gene Symbol: SMAD2
  Gene Name: SMAD family member 2
  ENSP ID: ENSP00000467075
MSSILPFTPPVVKRLLGWKKSAGGSGGAGGGEQNGQEEKWCEKAVKSLVKKLKKTGRLDELEKAITTQNCNTKCVTIPRSLDGRLQVSHRKGLPHVIYCRLWRWPDLHSHHELKAIENCEYAFNLKKDEVCVNPYHYQRVETPVLPPVLVPRHTEILTELPPLDDYTHSIPENTNFPAGIEPQSNYIPETPPPGYISEDGETSDQQLNQSMDTGSPAELSPTTLSPVNHSLDLQPVTYSEPAFWCSIAYYELNQRVGETFHASQPSLTVDGFTDPSNSERFCLGLLSNVNRNATVEMTRRHIGRGVRLYYIGGEVFAECLSDSAIFVQSPNCNQRYGWHPATVCKIPPGCNLKIFNNQEFAALLAQSVNQGFEAVYQLTRMCTIRMSFVKGWGAEYRYEIHIWFLNFHSVIMFHCILAYSGVHLYLFSMRL

SEQ ID NO: 79659 - protein, 137 aa, Homo sapiens
  Payload ID: 15864
  Gene Symbol: SMAD2
  Gene Name: SMAD family member 2
  ENSP ID: ENSP00000468202
MSSILPFTPPVVKRLLGWKKSAGGSGGAGGGEQNGQEEKWCEKAVKSLVKKLKKTGRLDELEKAITTQNCNTKCVTIPSTCSEIWGLSTPNTIDQWDTTGLYSFSEQTRSLDGRLQVSHRKGLPHVIYCRLWRWPDL

SEQ ID NO: 79660 - protein, 108 aa, Homo sapiens
  Payload ID: 15864
  Gene Symbol: SMAD2
  Gene Name: SMAD family member 2
  ENSP ID: ENSP00000468732
MSSILPFTPPVVKRLLGWKKSAGGSGGAGGGEQNGQEEKWCEKAVKSLVKKLKKTGRLDELEKAITTQNCNTKCVTIPSTCSEIWGLSTPNTIDQWDTTGLYSFSEQT

SEQ ID NO: 79661 - protein, 425 aa, Homo sapiens
  Payload ID: 15865
  Gene Symbol: SMAD3
  Gene Name: SMAD family member 3
  Uniprot ID: P84022
  ENSP ID: ENSP00000332973
MSSILPFTPPIVKRLLGWKKGEQNGQEEKWCEKAVKSLVKKLKKTGQLDELEKAITTQNVNTKCITIPRSLDGRLQVSHRKGLPHVIYCRLWRWPDLHSHHELRAMELCEFAFNMKKDEVCVNPYHYQRVETPVLPPVLVPRHTEIPAEFPPLDDYSHSIPENTNFPAGIEPQSNIPETPPPGYLSEDGETSDHQMNHSMDAGSPNLSPNPMSPAHNNLDLQPVTYCEPAFWCSISYYELNQRVGETFHASQPSMTVDGFTDPSNSERFCLGLLSNVNRNAAVELTRRHIGRGVRLYYIGGEVFAECLSDSAIFVQSPNCNQRYGWHPATVCKIPPGCNLKIFNNQEFAALLAQSVNQGFEAVYQLTRMCTIRMSFVKGWGAEYRRQTVTSTPCWIELHLNGPLQWLDKVLTQMGSPSIRCSSVS

SEQ ID NO: 79662 - protein, 381 aa, Homo sapiens
  Payload ID: 15865
  Gene Symbol: SMAD3
  Gene Name: SMAD family member 3
  Uniprot ID: P84022
  ENSP ID: ENSP00000401133
MSCLHPRQTWKGAALVHRKAWWMGRSLDGRLQVSHRKGLPHVIYCRLWRWPDLHSHHELRAMELCEFAFNMKKDEVCVNPYHYQRVETPVLPPVLVPRHTEIPAEFPPLDDYSHSIPENTNFPAGIEPQSNIPETPPPGYLSEDGETSDHQMNHSMDAGSPNLSPNPMSPAHNNLDLQPVTYCEPAFWCSISYYELNQRVGETFHASQPSMTVDGFTDPSNSERFCLGLLSNVNRNAAVELTRRHIGRGVRLYYIGGEVFAECLSDSAIFVQSPNCNQRYGWHPATVCKIPPGCNLKIFNNQEFAALLAQSVNQGFEAVYQLTRMCTIRMSFVKGWGAEYRRQTVTSTPCWIELHLNGPLQWLDKVLTQMGSPSIRCSSVS

SEQ ID NO: 79663 - protein, 320 aa, Homo sapiens
  Payload ID: 15865
  Gene Symbol: SMAD3
  Gene Name: SMAD family member 3
  Uniprot ID: P84022
  ENSP ID: ENSP00000437757
MELCEFAFNMKKDEVCVNPYHYQRVETPVLPPVLVPRHTEIPAEFPPLDDYSHSIPENTNFPAGIEPQSNIPETPPPGYLSEDGETSDHQMNHSMDAGSPNLSPNPMSPAHNNLDLQPVTYCEPAFWCSISYYELNQRVGETFHASQPSMTVDGFTDPSNSERFCLGLLSNVNRNAAVELTRRHIGRGVRLYYIGGEVFAECLSDSAIFVQSPNCNQRYGWHPATVCKIPPGCNLKIFNNQEFAALLAQSVNQGFEAVYQLTRMCTIRMSFVKGWGAEYRRQTVTSTPCWIELHLNGPLQWLDKVLTQMGSPSIRCSSVS

SEQ ID NO: 79664 - protein, 230 aa, Homo sapiens
  Payload ID: 15865
  Gene Symbol: SMAD3
  Gene Name: SMAD family member 3
  Uniprot ID: P84022
  ENSP ID: ENSP00000445348
MNHSMDAGSPNLSPNPMSPAHNNLDLQPVTYCEPAFWCSISYYELNQRVGETFHASQPSMTVDGFTDPSNSERFCLGLLSNVNRNAAVELTRRHIGRGVRLYYIGGEVFAECLSDSAIFVQSPNCNQRYGWHPATVCKIPPGCNLKIFNNQEFAALLAQSVNQGFEAVYQLTRMCTIRMSFVKGWGAEYRRQTVTSTPCWIELHLNGPLQWLDKVLTQMGSPSIRCSSVS

SEQ ID NO: 79665 - protein, 112 aa, Homo sapiens
  Payload ID: 15865
  Gene Symbol: SMAD3
  Gene Name: SMAD family member 3
  ENSP ID: ENSP00000452767
MNHSMDAGSPNLSPNPMSPAHNNLDLQPVTYCEPAFWCSISYYELNQRVGETFHASQPSMTVDGFTDPSNSERFCLGLLSNVNRNAAVELTRRHIGRGVRLYYIGGEVFAEC

SEQ ID NO: 79666 - protein, 92 aa, Homo sapiens
  Payload ID: 15865
  Gene Symbol: SMAD3
  Gene Name: SMAD family member 3
  ENSP ID: ENSP00000453082
MELCEFAFNMKKDEVCVNPYHYQRVETPVLPPVLVPRHTEIPAEFPPLDDYSHSIPENTNFPAGIEPQSNIPETPPPGYLSEDGETSDHQMN

SEQ ID NO: 79667 - protein, 63 aa, Homo sapiens
  Payload ID: 15865
  Gene Symbol: SMAD3
  Gene Name: SMAD family member 3
  ENSP ID: ENSP00000453684
MELCEFAFNMKKDEVCVNPYHYQRVETPVLPPVLVPRHTEIPAEFPPLDDYSHSIPENTNFPA

SEQ ID NO: 79668 - protein, 96 aa, Homo sapiens
  Payload ID: 15865
  Gene Symbol: SMAD3
  Gene Name: SMAD family member 3
  ENSP ID: ENSP00000453788
MGGWTPFLRGPVWRRVRQPMEMGQCSEMLHKCGLLPQTVDRAYVLSEDQLCPWMAGCRCPIGRGSLMSSTAACGDGQTCTATTSYGPWSCVSSPSI

SEQ ID NO: 79669 - protein, 84 aa, Homo sapiens
  Payload ID: 15865
  Gene Symbol: SMAD3
  Gene Name: SMAD family member 3
  ENSP ID: ENSP00000454165
MNHSMDAGSPNLSPNPMSPAHNNLDLQPVTYCEPAFWCSISYYELNQRVGETFHASQPSMTVDGFTDPSNSERFCLGLLSNVNR

SEQ ID NO: 79670 - protein, 114 aa, Homo sapiens
  Payload ID: 15865
  Gene Symbol: SMAD3
  Gene Name: SMAD family member 3
  ENSP ID: ENSP00000455095
MELCEFAFNMKKDEVCVNPYHYQRVETPVLPPVLVPRHTEIPAEFPPLDDYSHSIPENTNFPAGIEPQSNIPETPPPGYLSEDGETSDHQMNHSMDAGSPNLSPNPMSPAHNNL

SEQ ID NO: 79671 - protein, 156 aa, Homo sapiens
  Payload ID: 15865
  Gene Symbol: SMAD3
  Gene Name: SMAD family member 3
  ENSP ID: ENSP00000455540
  MOD_RES (1)..(1): Any amino acid
XLSDSAIFVQSPNCNQRYGWHPATVCKIPPGKAPLSTPSPYFWKPSLQTSPCSGSRSLWASLPSPLAGCNLKIFNNQEFAALLAQSVNQGFEAVYQLTRMCTIRMSFVKGWGAEYRRQTVTSTPCWIELHLNGPLQWLDKVLTQMGSPSIRCSSVS

SEQ ID NO: 79672 - protein, 213 aa, Homo sapiens
  Payload ID: 15865
  Gene Symbol: SMAD3
  Gene Name: SMAD family member 3
  ENSP ID: ENSP00000458060
MELCEFAFNMKKDEVCVNPYHYQRVETPVLPPVLVPRHTEIPAEFPPLDDYSHSIPENTNFPAGIEPQSNIPETPPPGYLSEDGETSDHQMNHSMDAGSPNLSPNPMSPAHNNLDLQPVTYCEPAFWCSISYYELNQRVGETFHASQPSMTVDGFTDPSNSERFCLGLLSNVNRNAAVELTRRHIGCNLKIFNNQEFAALLAQSVNQGFEAVY

SEQ ID NO: 79673 - protein, 552 aa, Homo sapiens
  Payload ID: 15866
  Gene Symbol: SMAD4
  Gene Name: SMAD family member 4
  Uniprot ID: Q13485
  ENSP ID: ENSP00000341551
MDNMSITNTPTSNDACLSIVHSLMCHRQGGESETFAKRAIESLVKKLKEKKDELDSLITAITTNGAHPSKCVTIQRTLDGRLQVAGRKGFPHVIYARLWRWPDLHKNELKHVKYCQYAFDLKCDSVCVNPYHYERVVSPGIDLSGLTLQSNAPSSMMVKDEYVHDFEGQPSLSTEGHSIQTIQHPPSNRASTETYSTPALLAPSESNATSTANFPNIPVASTSQPASILGGSHSEGLLQIASGPQPGQQQNGFTGQPATYHHNSTTTWTGSRTAPYTPNLPHHQNGHLQHHPPMPPHPGHYWPVHNELAFQPPISNHPAPEYWCSIAYFEMDVQVGETFKVPSSCPIVTVDGYVDPSGGDRFCLGQLSNVHRTEAIERARLHIGKGVQLECKGEGDVWVRCLSDHAVFVQSYYLDREAGRAPGDAVHKIYPSAYIKVFDLRQCHRQMQQQAATAQAAAAAQAAAVAGNIPGPGSVGGIAPAISLSAAAGIGVDDLRRLCILRMSFVKGWGPDYPRQSIKETPCWIEIHLHRALQLLDEVLHTMPIADPQPLD

SEQ ID NO: 79674 - protein, 552 aa, Homo sapiens; identical to SEQ ID NO: 79673
  Payload ID: 15866
  Gene Symbol: SMAD4
  Gene Name: SMAD family member 4
  Uniprot ID: Q13485
  ENSP ID: ENSP00000381452

SEQ ID NO: 79675 - protein, 140 aa, Homo sapiens
  Payload ID: 15866
  Gene Symbol: SMAD4
  Gene Name: SMAD family member 4
  ENSP ID: ENSP00000464772
MDNMSITNTPTSNDACLSIVHSLMCHRQGGESETFAKRAIESLVKKLKEKKDELDSLITAITTNGAHPSKCVTIQRTLDGRLQVAGRKGFPHVIYARLWRWPDLHKNELKHVKYCQYAFDLKCDSVCVNPYHYERVVSPG

SEQ ID NO: 79676 - protein, 456 aa, Homo sapiens
  Payload ID: 15866
  Gene Symbol: SMAD4
  Gene Name: SMAD family member 4
  ENSP ID: ENSP00000464901
MDNMSITNTPTSNDACLSIVHSLMCHRQGGESETFAKRAIESLVKKLKEKKDELDSLITAITTNGAHPSKCVTIQRTLDGRLQVAGRKGFPHVIYARLWRWPDLHKNELKHVKYCQYAFDLKCDSVCVNPYHYERVVSPGIDLSGLTLQSNAPSSMMVKDEYVHDFEGQPSLSTEGHSIQTIQHPPSNRASTETYSTPALLAPSESNATSTANFPNIPVASTTPEYWCSIAYFEMDVQVGETFKVPSSCPIVTVDGYVDPSGGDRFCLGQLSNVHRTEAIERARLHIGKGVQLECKGEGDVWVRCLSDHAVFVQSYYLDREAGRAPGDAVHKIYPSAYIKVFDLRQCHRQMQQQAATAQAAAAAQAAAVAGNIPGPGSVGGIAPAISLSAAAGIGVDDLRRLCILRMSFVKGWGPDYPRQSIKETPCWIEIHLHRALQLLDEVLHTMPIADPQPLD

SEQ ID NO: 79677 - protein, 120 aa, Homo sapiens
  Payload ID: 15866
  Gene Symbol: SMAD4
  Gene Name: SMAD family member 4
  ENSP ID: ENSP00000465874
MDNMSITNTPTSNDACLSIVHSLMCHRQGGESETFAKRAIESLVKKLKEKKDELDSLITAITTNGAHPSKCVTIQRTLDGRLQVAGRKGFPHVIYARLWRWPDLHKNELKHVKYCQYAFD

SEQ ID NO: 79678 - protein, 126 aa, Homo sapiens
  Payload ID: 15866
  Gene Symbol: SMAD4
  Gene Name: SMAD family member 4
  ENSP ID: ENSP00000465878
MDNMSITNTPTSNDACLSIVHSLMCHRQGGESETFAKRAIESLVKKLKEKKDELDSLITAITTNGAHPSKCVTIQRTLDGRLQVAGRKGFPHVIYARLWRWPDLHKNELKHVKYCQYAFDLKCDSV

SEQ ID NO: 79679 - protein, 82 aa, Homo sapiens
  Payload ID: 15866
  Gene Symbol: SMAD4
  Gene Name: SMAD family member 4
  ENSP ID: ENSP00000466118
YYLDREAGRAPGDAVHKIYPSAYIKVFDLRQCHRQMQQQAATAQAAAAAQAAAVAGNIPGPGSVGGIAPAISKYAFHSFLKV

SEQ ID NO: 79680 - protein, 90 aa, Homo sapiens
  Payload ID: 15866
  Gene Symbol: SMAD4
  Gene Name: SMAD family member 4
  ENSP ID: ENSP00000466934
MDNMSITNTPTSNDACLSIVHSLMCHRQGGESETFAKRAIESLVKKLKEKKDELDSLITAITTNGAHPSKCVTIQRTLDGRLQVAGRKGF

SEQ ID NO: 79681 - protein, 151 aa, Homo sapiens
  Payload ID: 15866
  Gene Symbol: SMAD4
  Gene Name: SMAD family member 4
  ENSP ID: ENSP00000466941
MDNMSITNTPTSNDACLSIVHSLMCHRQGGESETFAKRAIESLVKKLKEKKDELDSLITAITTNGAHPSKCVTIQRTLDGRLQVAGRKGFPHVIYARLWRWPDLHKNELKHVKYCQYAFDLKCDSVCVNPYHYERVVSPGIDLSGLTLQSN

SEQ ID NO: 79682 - protein, 320 aa, Homo sapiens
  Payload ID: 15866
  Gene Symbol: SMAD4
  Gene Name: SMAD family member 4
  ENSP ID: ENSP00000468611
MDNMSITNTPTSNDACLSIVHSLMCHRQGGESETFAKRAIESLVKKLKEKKDELDSLITAITTNGAHPSKCVTIQRTLDGRLQVAGRKGFPHVIYARLWRWPDLHKNELKHVKYCQYAFDLKCDSVCVNPYHYERVVSPGIDLSGLTLQSNAPSSMMVKDEYVHDFEGQPSLSTEGHSIQTIQHPPSNRASTETYSTPALLAPSESNATSTANFPNIPVASTSQPASILGGSHSEGLLQIASGPQPGQQQNGFTGQPATYHHNSTTTWTGSRTAPYTPNLPHHQNGHLQHHPPMPPHPGHYWPVHNELAFQPPISNHPGL

SEQ ID NO: 79683 - protein, 220 aa, Homo sapiens
  Payload ID: 15866
  Gene Symbol: SMAD4
  Gene Name: SMAD family member 4
  ENSP ID: ENSP00000478613
  MOD_RES (1)..(1): Any amino acid
XWTGSRTAPYTPNLPHHQNGHLQHHPPMPPHPGHYWPVHNELAFQPPISNHPAPEYWCSIAYFEMDVQVGETFKVPSSCPIVTVDGYVDPSGGDRFCLGQLSNVHRTEAIERARLHIGKGVQLECKGEGDVWVRCLSDHAVFVQSYYLDREAGRAPGDAVHKIYPSAYIKVFDLRQCHRQMQQQAATAQAAAAAQAAAVAGNIPGPGSVGGIAPAIKLNS

SEQ ID NO: 79684 - protein, 80 aa, Homo sapiens
  Payload ID: 15867
  Gene Symbol: SMAD5
  Gene Name: SMAD family member 5
  ENSP ID: ENSP00000422954
MTSMASLFSFTSPAVKRLLGWKQGDEEEKWAEKAVDALVKKLKKKKGAMEELEKALSSPGQPSKCVTIPRSLDGRLQVSH

SEQ ID NO: 79685 - protein, 134 aa, Homo sapiens
  Payload ID: 15867
  Gene Symbol: SMAD5
  Gene Name: SMAD family member 5
  ENSP ID: ENSP00000424279
MTSMASLFSFTSPAVKRLLGWKQGDEEEKWAEKAVDALVKKLKKKKGAMEELEKALSSPGQPSKCVTIPRSLDGRLQVSHRKGLPHVIYCRVWRWPDLQSHHELKPLDICEFPFGSKQKEVCINPYHYKRVESP

SEQ ID NO: 79686 - protein, 128 aa, Homo sapiens
  Payload ID: 15867
  Gene Symbol: SMAD5
  Gene Name: SMAD family member 5
  ENSP ID: ENSP00000425749
MTSMASLFSFTSPAVKRLLGWKQGDEEEKWAEKAVDALVKKLKKKKGAMEELEKALSSPGQPSKCVTIPRSLDGRLQVSHRKGLPHVIYCRVWRWPDLQSHHELKPLDICEFPFGSKQKEVCINPYHY

SEQ ID NO: 79687 - protein, 1 aa, Homo sapiens
  Payload ID: 15867
  Gene Symbol: SMAD5
  Gene Name: SMAD family member 5
  ENSP ID: ENSP00000426696
M

SEQ ID NO: 79688 - protein, 1 aa, Homo sapiens
  Payload ID: 15867
  Gene Symbol: SMAD5
  Gene Name: SMAD family member 5
  ENSP ID: ENSP00000427330
M

SEQ ID NO: 79689 - protein, 174 aa, Homo sapiens
  Payload ID: 15867
  Gene Symbol: SMAD5
  Gene Name: SMAD family member 5
  ENSP ID: ENSP00000427474
  MOD_RES (1)..(1): Any amino acid
XQPNNTPFPLSPNSPYPPSPASSTYPNSPASSGPGSPFQLPADTPPPAYMPPDDQMGQDNSQPMDTSNNMIPQIMPSISSRDVQPVAYEEPKHWCSIVYYELNNRVGEAFHASSTSVLVDGFTDPSNNKSRFCLGLLSNVNRNSTIENTRRHIGKGNLVIFLHLIEFNHLLYLP

SEQ ID NO: 79690 - protein, 60 aa, Homo sapiens
  Payload ID: 15867
  Gene Symbol: SMAD5
  Gene Name: SMAD family member 5
  ENSP ID: ENSP00000427650
  MOD_RES (1)..(1): Any amino acid
XGFHPTTVCKIPSSCSLKIFNNQEFAQLLAQSVNHGFEAVYELTKMCTIRMSFVKSLQEI

SEQ ID NO: 79691 - protein, 465 aa, Homo sapiens
  Payload ID: 15867
  Gene Symbol: SMAD5
  Gene Name: SMAD family member 5
  Uniprot ID: Q99717
  ENSP ID: ENSP00000441954
MTSMASLFSFTSPAVKRLLGWKQGDEEEKWAEKAVDALVKKLKKKKGAMEELEKALSSPGQPSKCVTIPRSLDGRLQVSHRKGLPHVIYCRVWRWPDLQSHHELKPLDICEFPFGSKQKEVCINPYHYKRVESPVLPPVLVPRHNEFNPQHSLLVQFRNLSHNEPHMPQNATFPDSFHQPNNTPFPLSPNSPYPPSPASSTYPNSPASSGPGSPFQLPADTPPPAYMPPDDQMGQDNSQPMDTSNNMIPQIMPSISSRDVQPVAYEEPKHWCSIVYYELNNRVGEAFHASSTSVLVDGFTDPSNNKSRFCLGLLSNVNRNSTIENTRRHIGKGVHLYYVGGEVYAECLSDSSIFVQSRNCNFHHGFHPTTVCKIPSSCSLKIFNNQEFAQLLAQSVNHGFEAVYELTKMCTIRMSFVKGWGAEYHRQDVTSTPCWIEIHLHGPLQWLDKVLTQMGSPLNPISSVS

SEQ ID NO: 79692 - protein, 465 aa, Homo sapiens; identical to SEQ ID NO: 79691
  Payload ID: 15867
  Gene Symbol: SMAD5
  Gene Name: SMAD family member 5
  Uniprot ID: Q99717
  ENSP ID: ENSP00000446474

SEQ ID NO: 79693 - protein, 496 aa, Homo sapiens
  Payload ID: 15868
  Gene Symbol: SMAD6
  Gene Name: SMAD family member 6
  Uniprot ID: O43541
  ENSP ID: ENSP00000288840
MFRSKRSGLVRRLWRSRVVPDREEGGSGGGGGGDEDGSLGSRAEPAPRAREGGGCGRSEVRPVAPRRPRDAVGQRGAQGAGRRRRAGGPPRPMSEPGAGAGSSLLDVAEPGGPGWLPESDCETVTCCLFSERDAAGAPRDASDPLAGAALEPAGGGRSREARSRLLLLEQELKTVTYSLLKRLKERSLDTLLEAVESRGGVPGGCVLVPRADLRLGGQPAPPQLLLGRLFRWPDLQHAVELKPLCGCHSFAAAADGPTVCCNPYHFSRLCGPESPPPPYSRLSPRDEYKPLDLSDSTLSYTETEATNSLITAPGEFSDASMSPDATKPSHWCSVAYWEHRTRVGRLYAVYDQAVSIFYDLPQGSGFCLGQLNLEQRSESVRRTRSKIGFGILLSKEPDGVWAYNRGEHPIFVNSPTLDAPGGRALVVRKVPPGYSIKVFDFERSGLQHAPEPDAADGPYDPNSVRISFAKGWGPCYSRQFITSCPCWLEILLNNPR

SEQ ID NO: 79694 - protein, 55 aa, Homo sapiens
  Payload ID: 15868
  Gene Symbol: SMAD6
  Gene Name: SMAD family member 6
  ENSP ID: ENSP00000452694
SPRDEYKPLDLSDSTLSYTETEATNSLITAPGEFSADAGIGSRGNRGLESSVPCS

SEQ ID NO: 79695 - protein, 338 aa, Homo sapiens
  Payload ID: 15868
  Gene Symbol: SMAD6
  Gene Name: SMAD family member 6
  Uniprot ID: O43541
  ENSP ID: ENSP00000452955
MFRSKRSGLVRRLWRSRVVPDREEGGSGGGGGGDEDGSLGSRAEPAPRAREGGGCGRSEVRPVAPRRPRDAVGQRGAQGAGRRRRAGGPPRPMSEPGAGAGSSLLDVAEPGGPGWLPESDCETVTCCLFSERDAAGAPRDASDPLAGAALEPAGGGRSREARSRLLLLEQELKTVTYSLLKRLKERSLDTLLEAVESRGGVPGGCVLVPRADLRLGGQPAPPQLLLGRLFRWPDLQHAVELKPLCGCHSFAAAADGPTVCCNPYHFSRLCGPESPPPPYSRLSPRDEYKPLDLSDSTLSYTETEATNSLITAPGEFSAADAGIGSRGNRGLESSVPCS

SEQ ID NO: 79696 - protein, 62 aa, Homo sapiens
  Payload ID: 15868
  Gene Symbol: SMAD6
  Gene Name: SMAD family member 6
  ENSP ID: ENSP00000453446
PPPYSRLSPRDEYKPLDLSDSTLSYTETEATNSLITAPGEFSADAGIGSRGNRGLESSVPCS

SEQ ID NO: 79697 - protein, 426 aa, Homo sapiens
  Payload ID: 15869
  Gene Symbol: SMAD7
  Gene Name: SMAD family member 7
  Uniprot ID: O15105
  ENSP ID: ENSP00000262158
MFRTKRSALVRRLWRSRAPGGEDEEEGAGGGGGGGELRGEGATDSRAHGAGGGGPGRAGCCLGKAVRGAKGHHHPHPPAAGAGAAGGAEADLKALTHSVLKKLKERQLELLLQAVESRGGTRTACLLLPGRLDCRLGPGAPAGAQPAQPPSSYSLPLLLCKVFRWPDLRHSSEVKRLCCCESYGKINPELVCCNPHHLSRLCELESPPPPYSRYPMDFLKPTADCPDAVPSSAETGGTNYLAPGGLSDSQLLLEPGDRSHWCVVAYWEEKTRVGRLYCVQEPSLDIFYDLPQGNGFCLGQLNSDNKSQLVQKVRSKIGCGIQLTREVDGVWVYNRSSYPIFIKSATLDNPDSRTLLVHKVFPGFSIKAFDYEKAYSLQRPNDHEFMQQPWTGFTVQISFVKGWGQCYTRQFISSCPCWLEVIFNSR

SEQ ID NO: 79698 - protein, 158 aa, Homo sapiens
  Payload ID: 15869
  Gene Symbol: SMAD7
  Gene Name: SMAD family member 7
  ENSP ID: ENSP00000465590
MDFLKPTADCPDAVPSSAETGGTNYLAPGGLSDSQLLLEPGDRSHWCVVAYWEEKTRVGRLYCVQEPSLDIFYDLPQGNGFCLGQLNSDNKSQLVQKVRSKIGCGIQLTREVDGVWVYNRSSYPIFIKSATLDNPDSRTLLVHKVFPGFSIKAFDYEK

SEQ ID NO: 79699 - protein, 211 aa, Homo sapiens
  Payload ID: 15869
  Gene Symbol: SMAD7
  Gene Name: SMAD family member 7
  Uniprot ID: O15105
  ENSP ID: ENSP00000466902
MDFLKPTADCPDAVPSSAETGGTNYLAPGGLSDSQLLLEPGDRSHWCVVAYWEEKTRVGRLYCVQEPSLDIFYDLPQGNGFCLGQLNSDNKSQLVQKVRSKIGCGIQLTREVDGVWVYNRSSYPIFIKSATLDNPDSRTLLVHKVFPGFSIKAFDYEKAYSLQRPNDHEFMQQPWTGFTVQISFVKGWGQCYTRQFISSCPCWLEVIFNSR

SEQ ID NO: 79700 - protein, 425 aa, Homo sapiens
  Payload ID: 15869
  Gene Symbol: SMAD7
  Gene Name: SMAD family member 7
  Uniprot ID: O15105
  ENSP ID: ENSP00000467621
MFRTKRSALVRRLWRSRAPGGEDEEEGAGGGGGGGELRGEGATDSRAHGAGGGGPGRAGCCLGKAVRGAKGHHHPHPPAAGAGAAGGAEADLKALTHSVLKKLKERQLELLLQAVESRGGTRTACLLLPGRLDCRLGPGAPAGAQPAQPPSSYSLPLLLCKVFRWPDLRHSSEVKRLCCCESYGKINPELVCCNPHHLSRLCELESPPPPYSRYPMDFLKPTDCPDAVPSSAETGGTNYLAPGGLSDSQLLLEPGDRSHWCVVAYWEEKTRVGRLYCVQEPSLDIFYDLPQGNGFCLGQLNSDNKSQLVQKVRSKIGCGIQLTREVDGVWVYNRSSYPIFIKSATLDNPDSRTLLVHKVFPGFSIKAFDYEKAYSLQRPNDHEFMQQPWTGFTVQISFVKGWGQCYTRQFISSCPCWLEVIFNSR

SEQ ID NO: 79701 - protein, 430 aa, Homo sapiens
  Payload ID: 15870
  Gene Symbol: SMAD9
  Gene Name: SMAD family member 9
  Uniprot ID: O15198
  ENSP ID: ENSP00000239885
MHSTTPISSLFSFTSPAVKRLLGWKQGDEEEKWAEKAVDSLVKKLKKKKGAMDELERALSCPGQPSKCVTIPRSLDGRLQVSHRKGLPHVIYCRVWRWPDLQSHHELKPLECCEFPFGSKQKEVCINPYHYRRVETPVLPPVLVPRHSEYNPQLSLLAKFRSASLHSEPLMPHNATYPDSFQQPPCSALPPSPSHAFSQSPCTASYPHSPGSPSEPESPYQHSDFRPVCYEEPQHWCSVAYYELNNRVGETFQASSRSVLIDGFTDPSNNRNRFCLGLLSNVNRNSTIENTRRHIGKGVHLYYVGGEVYAECVSDSSIFVQSRNCNYQHGFHPATVCKIPSGCSLKVFNNQLFAQLLAQSVHHGFEVVYELTKMCTIRMSFVKGWGAEYHRQDVTSTPCWIEIHLHGPLQWLDKVLTQMGSPHNPISSVS

SEQ ID NO: 79702 - protein, 467 aa, Homo sapiens
  Payload ID: 15870
  Gene Symbol: SMAD9
  Gene Name: SMAD family member 9
  Uniprot ID: O15198
  ENSP ID: ENSP00000369154
MHSTTPISSLFSFTSPAVKRLLGWKQGDEEEKWAEKAVDSLVKKLKKKKGAMDELERALSCPGQPSKCVTIPRSLDGRLQVSHRKGLPHVIYCRVWRWPDLQSHHELKPLECCEFPFGSKQKEVCINPYHYRRVETPVLPPVLVPRHSEYNPQLSLLAKFRSASLHSEPLMPHNATYPDSFQQPPCSALPPSPSHAFSQSPCTASYPHSPGSPSEPESPYQHSVDTPPLPYHATEASETQSGQPVDATADRHVVLSIPNGDFRPVCYEEPQHWCSVAYYELNNRVGETFQASSRSVLIDGFTDPSNNRNRFCLGLLSNVNRNSTIENTRRHIGKGVHLYYVGGEVYAECVSDSSIFVQSRNCNYQHGFHPATVCKIPSGCSLKVFNNQLFAQLLAQSVHHGFEVVYELTKMCTIRMSFVKGWGAEYHRQDVTSTPCWIEIHLHGPLQWLDKVLTQMGSPHNPISSVS

SEQ ID NO: 79703 - protein, 467 aa, Homo sapiens; identical to SEQ ID NO: 79702
  Payload ID: 15870
  Gene Symbol: SMAD9
  Gene Name: SMAD family member 9
  Uniprot ID: O15198
  ENSP ID: ENSP00000382216

SEQ ID NO: 79704 - protein, 396 aa, Homo sapiens
  Payload ID: 15871
  Gene Symbol: SNIP1
  Gene Name: Smad nuclear interacting protein 1
  Uniprot ID: Q8TAD8
  ENSP ID: ENSP00000296215
MKAVKSERERGSRRRHRDGDVVLPAGVVVKQERLSPEVAPPAHRRPDHSGGSPSPPTSEPARSGHRGNRARGVSRSPPKKKNKASGRRSKSPRSKRNRSPHHSTVKVKQEREDHPRRGREDRQHREPSEQEHRRARNSDRDRHRGHSHQRRTSNERPGSGQGQGRDRDTQNLQAQEEEREFYNARRREHRQRNDVGGGGSESQELVPRPGGNNKEKEVPAKEKPSFELSGALLEDTNTFRGVVIKYSEPPEARIPKKRWRLYPFKNDEVLPVMYIHRQSAYLLGRHRRIADIPIDHPSCSKQHAVFQYRLVEYTRADGTVGRRVKPYIIDLGSGNGTFLNNKRIEPQRYYELKEKDVLKFGFSSREYVLLHESSDTSEIDRKDDEDEEEEEEVSDS

SEQ ID NO: 79705 - protein, 757 aa, Homo sapiens
  Payload ID: 15872
  Gene Symbol: SMURF1
  Gene Name: SMAD specific E3 ubiquitin protein ligase 1
  Uniprot ID: Q9HCE7
  ENSP ID: ENSP00000354621
MSNPGTRRNGSSIKIRLTVLCAKNLAKKDFFRLPDPFAKIVVDGSGQCHSTDTVKNTLDPKWNQHYDLYVGKTDSITISVWNHKKIHKKQGAGFLGCVRLLSNAISRLKDTGYQRLDLCKLNPSDTDAVRGQIVVSLQTRDRIGTGGSVVDCRGLLENEGTVYEDSGPGRPLSCFMEEPAPYTDSTGAAAGGGNCRFVESPSQDQRLQAQRLRNPDVRGSLQTPQNRPHGHQSPELPEGYEQRTTVQGQVYFLHTQTGVSTWHDPRIPSPSGTIPGGDAAFLYEFLLQGHTSEPRDLNSVNCDELGPLPPGWEVRSTVSGRIYFVDHNNRTTQFTDPRLHHIMNHQCQLKEPSQPLPLPSEGSLEDEELPAQRYERDLVQKLKVLRHELSLQQPQAGHCRIEVSREEIFEESYRQIMKMRPKDLKKRLMVKFRGEEGLDYGGVAREWLYLLCHEMLNPYYGLFQYSTDNIYMLQINPDSSINPDHLSYFHFVGRIMGLAVFHGHYINGGFTVPFYKQLLGKPIQLSDLESVDPELHKSLVWILENDITPVLDHTFCVEHNAFGRILQHELKPNGRNVPVTEENKKEYVRLYVNWRFMRGIEAQFLALQKGFNELIPQHLLKPFDQKELELIIGGLDKIDLNDWKSNTRLKHCVADSNIVRWFWQAVETFDEERRARLLQFVTGSTRVPLQGFKALQGSTGAAGPRLFTIHLIDANTDNLPKAHTCFNRIDIPPYESYEKLYEKLLTAVEETCGFAVE

SEQ ID NO: 79706 - protein, 731 aa, Homo sapiens
  Payload ID: 15872
  Gene Symbol: SMURF1
  Gene Name: SMAD specific E3 ubiquitin protein ligase 1
  Uniprot ID: Q9HCE7
  ENSP ID: ENSP00000355326
MSNPGTRRNGSSIKIRLTVLCAKNLAKKDFFRLPDPFAKIVVDGSGQCHSTDTVKNTLDPKWNQHYDLYVGKTDSITISVWNHKKIHKKQGAGFLGCVRLLSNAISRLKDTGYQRLDLCKLNPSDTDAVRGQIVVSLQTRDRIGTGGSVVDCRGLLENEGTVYEDSGPGRPLSCFMEEPAPYTDSTGAAAGGGNCRFVESPSQDQRLQAQRLRNPDVRGSLQTPQNRPHGHQSPELPEGYEQRTTVQGQVYFLHTQTGVSTWHDPRIPRDLNSVNCDELGPLPPGWEVRSTVSGRIYFVDHNNRTTQFTDPRLHHIMNHQCQLKEPSQPLPLPSEGSLEDEELPAQRYERDLVQKLKVLRHELSLQQPQAGHCRIEVSREEIFEESYRQIMKMRPKDLKKRLMVKFRGEEGLDYGGVAREWLYLLCHEMLNPYYGLFQYSTDNIYMLQINPDSSINPDHLSYFHFVGRIMGLAVFHGHYINGGFTVPFYKQLLGKPIQLSDLESVDPELHKSLVWILENDITPVLDHTFCVEHNAFGRILQHELKPNGRNVPVTEENKKEYVRLYVNWRFMRGIEAQFLALQKGFNELIPQHLLKPFDQKELELIIGGLDKIDLNDWKSNTRLKHCVADSNIVRWFWQAVETFDEERRARLLQFVTGSTRVPLQGFKALQGSTGAAGPRLFTIHLIDANTDNLPKAHTCFNRIDIPPYESYEKLYEKLLTAVEETCGFAVE

SEQ ID NO: 79707 - protein, 748 aa, Homo sapiens
  Payload ID: 15873
  Gene Symbol: SMURF2
  Gene Name: SMAD specific E3 ubiquitin protein ligase 2
  Uniprot ID: Q9HAU4
  ENSP ID: ENSP00000262435
MSNPGGRRNGPVKLRLTVLCAKNLVKKDFFRLPDPFAKVVVDGSGQCHSTDTVKNTLDPKWNQHYDLYIGKSDSVTISVWNHKKIHKKQGAGFLGCVRLLSNAINRLKDTGYQRLDLCKLGPNDNDTVRGQIVVSLQSRDRIGTGGQVVDCSRLFDNDLPDGWEERRTASGRIQYLNHITRTTQWERPTRPASEYSSPGRPLSCFVDENTPISGTNGATCGQSSDPRLAERRVRSQRHRNYMSRTHLHTPPDLPEGYEQRTTQQGQVYFLHTQTGVSTWHDPRVPRDLSNINCEELGPLPPGWEIRNTATGRVYFVDHNNRTTQFTDPRLSANLHLVLNRQNQLKDQQQQQVVSLCPDDTECLTVPRYKRDLVQKLKILRQELSQQQPQAGHCRIEVSREEIFEESYRQVMKMRPKDLWKRLMIKFRGEEGLDYGGVAREWLYLLSHEMLNPYYGLFQYSRDDIYTLQINPDSAVNPEHLSYFHFVGRIMGMAVFHGHYIDGGFTLPFYKQLLGKSITLDDMELVDPDLHNSLVWILENDITGVLDHTFCVEHNAYGEIIQHELKPNGKSIPVNEENKKEYVRLYVNWRFLRGIEAQFLALQKGFNEVIPQHLLKTFDEKELELIICGLGKIDVNDWKVNTRLKHCTPDSNIVKWFWKAVEFFDEERRARLLQFVTGSSRVPLQGFKALQGAAGPRLFTIHQIDACTNNLPKAHTCFNRIDIPPYESYEKLYEKLLTAIEETCGFAVE

SEQ ID NO: 79708 - protein, 55 aa, Homo sapiens
  Payload ID: 15873
  Gene Symbol: SMURF2
  Gene Name: SMAD specific E3 ubiquitin protein ligase 2
  ENSP ID: ENSP00000463531
MSNPGGRRNGPVKLRLTGLPDPFAKVVVDGSGQCHSTDTVKNTLDPKWNQHYDLQ

SEQ ID NO: 79709 - protein, 561 aa, Homo sapiens
  Payload ID: 15873
  Gene Symbol: SMURF2
  Gene Name: SMAD specific E3 ubiquitin protein ligase 2
  ENSP ID: ENSP00000463804
MSNPGGRRNGPVKLRLTGLPDPFAKVVVDGSGQCHSTDTVKNTLDPKWNQHYDLYIGKSDSVTISVWNHKKIHKKQGAGFLGCVRLLSNAINRLKDTGYQRLDLCKLGPNDNDTVRGQIVVSLQSRDRIGTGGQVVDCSRLFDNDLPDGWEERRTASGRIQYLNHITRTTQWERPTRPASEYSSPGRPLSCFVDENTPISGTNGATCGQSSDPRLAERRVRSQRHRNYMSRTHLHTPPDLPEGYEQRTTQQGQVYFLHTQTGVSTWHDPRVPRDLSNINCEELGPLPPGWEIRNTATGRVYFVDHNNRTTQFTDPRLSANLHLVLNRQNQLKDQQQQQVVSLCPDDTECLTVPRYKRDLVQKLKILRQELSQQQPQAGHCRIEVSREEIFEESYRQVMKMRPKDLWKRLMIKFRGEEGLDYGGVAREWLYLLSHEMLNPYYGLFQYSRDDIYTLQINPDSAVNPEHLSYFHFVGRIMGMAVFHGHYIDGGFTLPFYKQLLGKSITLDDMELVDPDLHNSLVWILENDITGVLDHTFCVEHNAYGEIIQHELKPNGKSIPVN

SEQ ID NO: 79710 - protein, 68 aa, Homo sapiens
  Payload ID: 15873
  Gene Symbol: SMURF2
  Gene Name: SMAD specific E3 ubiquitin protein ligase 2
  ENSP ID: ENSP00000464432
MSNPGGRRNGPVKLRLTVLCAKNLVKKDFFRLPDPFAKVVVDGSGQCHSTDTVKNTLDPKWNQHYDLQ

SEQ ID NO: 79711 - protein, 440 aa, Homo sapiens
  Payload ID: 15874
  Gene Symbol: SMAP1
  Gene Name: small ArfGAP 1
  Uniprot ID: Q8IYB5
  ENSP ID: ENSP00000313382
MATRSCREKAQKLNEQHQLILSKLLREEDNKYCADCEAKGPRWASWNIGVFICIRCAGIHRNLGVHISRVKSVNLDQWTAEQIQCMQDMGNTKARLLYEANLPENFRRPQTDQAVEFFIRDKYEKKKYYDKNAIAITNKEKEKKKEEKKREKEPEKPAKPLTAEKLQKKDQQLEPKKSTSPKKAAEPTVDLLGLDGPAVAPVTNGNTTVPPLNDDLDIFGPMISNPLPATVMPPAQGTPSAPAAATLSTVTSGDLDLFTEQTTKSEEVAKKQLSKDSILSLYGTGTIQQQSTPGVFMGPTNIPFTSQAPAAFQGFPSMGVPVPAAPGLIGNVMGQSPSMMVGMPMPNGFMGNAQTGVMPLPQNVVGPQGGMVGQMGAPQSKFGLPQAQQPQWSLSQMNQQMAGMSISSATPTAGFGQPSSTTAGWSGSSSGQTLSTQLWK

SEQ ID NO: 79712 - protein, 436 aa, Homo sapiens
  Payload ID: 15874
  Gene Symbol: SMAP1
  Gene Name: small ArfGAP 1
  Uniprot ID: Q8IYB5
  ENSP ID: ENSP00000359481
MATRSCREKAQKLNEQHQLILSKLLREEDNKYCADCEAKGPRWASWNIGVFICIRCAGIHRNLGVHISRVKSVNLDQWTAEQIQCMQDMGNTKARLLYEANLPENFRRPQTDQAVEFFIRDKYEKKKYYDKNAIAITNKEKEKKKEEKKREKEPEKPAKPLTAEKLQKKDQQLEPKKSTSPKKAAEPTVDLLGLDGPAVAPVTNGNTTVPPLNDDLDIFGPMISNPLPATVMPPAQGTPSAPAAATLSTVTSGDLDLFTEQTTKSEEVAKKQLSKDSILSLYGTGTIQQQSTPGVFMGPTNIPFTSQAPAAFQGFPSMGVPVPAAPGLIGNVMGQSPSMMVGMPMPNGFMGNAQTGVMPLPQNVVGPQGGMVGQMGAPQSKFGLPQAQQPQWSLSQIMQKGDAVLQHSISAIYWPMTRWLKCPLVDESADGWHEYQ

SEQ ID NO: 79713 - protein, 467 aa, Homo sapiens
  Payload ID: 15874
  Gene Symbol: SMAP1
  Gene Name: small ArfGAP 1
  Uniprot ID: Q8IYB5
  ENSP ID: ENSP00000359484
MATRSCREKAQKLNEQHQLILSKLLREEDNKYCADCEAKGPRWASWNIGVFICIRCAGIHRNLGVHISRVKSVNLDQWTAEQIQCMQDMGNTKARLLYEANLPENFRRPQTDQAVEFFIRDKYEKKKYYDKNAIAITNISSSDAPLQPLVSSPSLQAAVDKNKLEKEKEKKKEEKKREKEPEKPAKPLTAEKLQKKDQQLEPKKSTSPKKAAEPTVDLLGLDGPAVAPVTNGNTTVPPLNDDLDIFGPMISNPLPATVMPPAQGTPSAPAAATLSTVTSGDLDLFTEQTTKSEEVAKKQLSKDSILSLYGTGTIQQQSTPGVFMGPTNIPFTSQAPAAFQGFPSMGVPVPAAPGLIGNVMGQSPSMMVGMPMPNGFMGNAQTGVMPLPQNVVGPQGGMVGQMGAPQSKFGLPQAQQPQWSLSQMNQQMAGMSISSATPTAGFGQPSSTTAGWSGSSSGQTLSTQLWK

SEQ ID NO: 79714 - protein, 125 aa, Homo sapiens
  Payload ID: 15874
  Gene Symbol: SMAP1
  Gene Name: small ArfGAP 1
  ENSP ID: ENSP00000398306
  MOD_RES (1)..(1): Any amino acid
XKYYDKNAIAITNISSSDAPLQPLVSSPSLQAAVDKNKLEKEKEKKKEEKKREKEPEKPAKPLTAEKLQKKDQQLEPKKSTSPKKAAEPTVDLLGLVWRKIEKEKSERQLVEVEELTFMYCFPKN

SEQ ID NO: 79715 - protein, 62 aa, Homo sapiens
  Payload ID: 15874
  Gene Symbol: SMAP1
  Gene Name: small ArfGAP 1
  ENSP ID: ENSP00000415426
MLFLKLSVFRAVEFFIRDKYEKKKYYDKNAIAITNISSSDAPLQPLVSSPSLQAAVDKNKLE

SEQ ID NO: 79716 - protein, 457 aa, Homo sapiens
  Payload ID: 15874
  Gene Symbol: SMAP1
  Gene Name: small ArfGAP 1
  ENSP ID: ENSP00000484538
MEPYLPAHLTAFVQGFYLCFLKKSMVVFFGPRWASWNIGVFICIRCAGIHRNLGVHISRVKSVNLDQWTAEQIQCMQDMGNTKARLLYEANLPENFRRPQTDQAVEFFIRDKYEKKKYYDKNAIAITNISSSDAPLQPLVSSPSLQAAVDKNKLEKEKEKKKEEKKREKEPEKPAKPLTAEKLQKKDQQLEPKKSTSPKKAAEPTVDLLGLDGPAVAPVTNGNTTVPPLNDDLDIFGPMISNPLPATVMPPAQGTPSAPAAATLSTVTSGDLDLFTEQTTKSEEVAKKQLSKDSILSLYGTGTIQQQSTPGVFMGPTNIPFTSQAPAAFQGFPSMGVPVPAAPGLIGNVMGQSPSMMVGMPMPNGFMGNAQTGVMPLPQNVVGPQGGMVGQMGAPQSKFGLPQAQQPQWSLSQMNQQMAGMSISSATPTAGFGQPSSTTAGWSGSSSGQTLSTQLWK

SEQ ID NO: 79717 - protein, 399 aa, Homo sapiens
  Payload ID: 15875
  Gene Symbol: SMAP2
  Gene Name: small ArfGAP2
  Uniprot ID: Q8WU79
  ENSP ID: ENSP00000361793
MIFKGPRWASWNIGVFICIRCAGIHRNLGVHISRVKSVNLDQWTQEQIQCMQEMGNGKANRLYEAYLPETFRRPQIDPAVEGFIRDKYEKKKYMDRSLDINAFRKEKDDKWKRGSEPVPEKKLEPVVFEKVKMPQKKEDPQLPRKSSPKSTAPVMDLLGLDAPVACSIANSKTSNTLEKDLDLLASVPSPSSSGSRKVVGSMPTAGSAGSVPENLNLFPEPGSKSEEIGKKQLSKDSILSLYGSQTPQMPTQAMFMAPAQMAYPTAYPSFPGVTPPNSIMGSMMPPPVGMVAQPGASGMVAPMAMPAGYMGGMQASMMGVPNGMMTTQQAGYMAGMAAMPQTVYGVQPAQQLQWNLTQMTQQMAGMNFYGANGMMNYGQSMSGGNGQAANQTLSPQMWK

SEQ ID NO: 79718 - protein, 429 aa, Homo sapiens
  Payload ID: 15875
  Gene Symbol: SMAP2
  Gene Name: small ArfGAP2
  Uniprot ID: Q8WU79
  ENSP ID: ENSP00000361803
MTGKSVKDVDRYQAVLANLLLEEDNKFCADCQSKGPRWASWNIGVFICIRCAGIHRNLGVHISRVKSVNLDQWTQEQIQCMQEMGNGKANRLYEAYLPETFRRPQIDPAVEGFIRDKYEKKKYMDRSLDINAFRKEKDDKWKRGSEPVPEKKLEPVVFEKVKMPQKKEDPQLPRKSSPKSTAPVMDLLGLDAPVACSIANSKTSNTLEKDLDLLASVPSPSSSGSRKVVGSMPTAGSAGSVPENLNLFPEPGSKSEEIGKKQLSKDSILSLYGSQTPQMPTQAMFMAPAQMAYPTAYPSFPGVTPPNSIMGSMMPPPVGMVAQPGASGMVAPMAMPAGYMGGMQASMMGVPNGMMTTQQAGYMAGMAAMPQTVYGVQPAQQLQWNLTQMTQQMAGMNFYGANGMMNYGQSMSGGNGQAANQTLSPQMWK

SEQ ID NO: 79719 - protein, 174 aa, Homo sapiens
  Payload ID: 15875
  Gene Symbol: SMAP2
  Gene Name: small ArfGAP2
  ENSP ID: ENSP00000389895
MWKPMEHSQRRRQDFEIYGPRWASWNIGVFICIRCAGIHRNLGVHISRVKSVNLDQWTQEQIQCMQEMGNGKANRLYEAYLPETFRRPQIDPAVEGFIRDKYEKKKYMDRSLDINAFRKEKDDKWKRGSEPVPEKKLEPVVFEKVKMPQKKEDPQLPRKSSPKSTAPVMDLLGL

SEQ ID NO: 79720 - protein, 349 aa, Homo sapiens
  Payload ID: 15875
  Gene Symbol: SMAP2
  Gene Name: small ArfGAP2
  Uniprot ID: Q8WU79
  ENSP ID: ENSP00000442835
MQEMGNGKANRLYEAYLPETFRRPQIDPAVEGFIRDKYEKKKYMDRSLDINAFRKEKDDKWKRGSEPVPEKKLEPVVFEKVKMPQKKEDPQLPRKSSPKSTAPVMDLLGLDAPVACSIANSKTSNTLEKDLDLLASVPSPSSSGSRKVVGSMPTAGSAGSVPENLNLFPEPGSKSEEIGKKQLSKDSILSLYGSQTPQMPTQAMFMAPAQMAYPTAYPSFPGVTPPNSIMGSMMPPPVGMVAQPGASGMVAPMAMPAGYMGGMQASMMGVPNGMMTTQQAGYMAGMAAMPQTVYGVQPAQQLQWNLTQMTQQMAGMNFYGANGMMNYGQSMSGGNGQAANQTLSPQMWK

SEQ ID NO: 79721 - protein, 424 aa, Homo sapiens
  Payload ID: 15875
  Gene Symbol: SMAP2
  Gene Name: small ArfGAP2
  ENSP ID: ENSP00000479285
MGKVGRARFAQKDVLQIEEIGPVKLFVRDWPRWASWNIGVFICIRCAGIHRNLGVHISRVKSVNLDQWTQEQIQCMQEMGNGKANRLYEAYLPETFRRPQIDPAVEGFIRDKYEKKKYMDRSLDINAFRKEKDDKWKRGSEPVPEKKLEPVVFEKVKMPQKKEDPQLPRKSSPKSTAPVMDLLGLDAPVACSIANSKTSNTLEKDLDLLASVPSPSSSGSRKVVGSMPTAGSAGSVPENLNLFPEPGSKSEEIGKKQLSKDSILSLYGSQTPQMPTQAMFMAPAQMAYPTAYPSFPGVTPPNSIMGSMMPPPVGMVAQPGASGMVAPMAMPAGYMGGMQASMMGVPNGMMTTQQAGYMAGMAAMPQTVYGVQPAQQLQWNLTQMTQQMAGMNFYGANGMMNYGQSMSGGNGQAANQTLSPQMWK

SEQ ID NO: 79722 - protein, 37 aa, Homo sapiens
  Payload ID: 15876
  Gene Symbol: SMAGP
  Gene Name: small cell adhesion glycoprotein
  ENSP ID: ENSP00000369446
MTSLLTTPSPRGSHSVTQTRVQWHNHSSLQPGPPGLQ

SEQ ID NO: 79723 - protein, 97 aa, Homo sapiens
  Payload ID: 15876
  Gene Symbol: SMAGP
  Gene Name: small cell adhesion glycoprotein
  Uniprot ID: Q0VAQ4
  ENSP ID: ENSP00000381471
MTSLLTTPSPREELMTTPILQPTEALSPEDGASTALIAVVITVVFLTLLSVVILIFFYLYKNKGSYVTYEPTEGEPSAIVQMESDLAKGSEKEEYFI

SEQ ID NO: 79724 - protein, 50 aa, Homo sapiens
  Payload ID: 15876
  Gene Symbol: SMAGP
  Gene Name: small cell adhesion glycoprotein
  ENSP ID: ENSP00000474212
MTSLLTTPSPREELMTTPILQPTEALSPEDGASTALIAVVITVVFLTLLS

SEQ ID NO: 79725 - protein, 42 aa, Homo sapiens
  Payload ID: 15876
  Gene Symbol: SMAGP
  Gene Name: small cell adhesion glycoprotein
  ENSP ID: ENSP00000474426
MTSLLTTPSPREELMTTPILQPTEALSPEDGASTALIAGNRL

SEQ ID NO: 79726 - protein, 97 aa, Homo sapiens; identical to SEQ ID NO: 79723
  Payload ID: 15876
  Gene Symbol: SMAGP
  Gene Name: small cell adhesion glycoprotein
  Uniprot ID: Q0VAQ4
  ENSP ID: ENSP00000474892

SEQ ID NO: 79727 - protein, 42 aa, Homo sapiens; identical to SEQ ID NO: 79725
  Payload ID: 15876
  Gene Symbol: SMAGP
  Gene Name: small cell adhesion glycoprotein
  ENSP ID: ENSP00000474930

SEQ ID NO: 79728 - protein, 97 aa, Homo sapiens; identical to SEQ ID NO: 79723
  Payload ID: 15876
  Gene Symbol: SMAGP
  Gene Name: small cell adhesion glycoprotein
  Uniprot ID: Q0VAQ4
  ENSP ID: ENSP00000475068

SEQ ID NO: 79729 - protein, 83 aa, Homo sapiens
  Payload ID: 15876
  Gene Symbol: SMAGP
  Gene Name: small cell adhesion glycoprotein
  ENSP ID: ENSP00000475135
MTTPILQPTEALSPEDGASTALIAVVITVVFLTLLSVVILIFFYLYKNKGSYVTYEPTEGEPSAIVQMESDLAKGSEKEEYFI

SEQ ID NO: 79730 - protein, 62 aa, Homo sapiens
  Payload ID: 15877
  Gene Symbol: SERF1A
  Gene Name: small EDRK-rich factor 1A (telomeric)
  Uniprot ID: O75920
  ENSP ID: ENSP00000321791
MARGNQRELARQKNMKKTQEISKGKRKEDSLTASQRKQRDSEIMQEKQKAANEKKSMQTREK

SEQ ID NO: 79731 - protein, 110 aa, Homo sapiens
  Payload ID: 15877
  Gene Symbol: SERF1A
  Gene Name: small EDRK-rich factor 1A (telomeric)
  Uniprot ID: O75920
  ENSP ID: ENSP00000346892
MARGNQRELARQKNMKKTQEISKGKRKEDSLTASQRKQSSGGQKSESKMSAGPHLPLKAPRENPCFPLPAAGGSRYYLAYGSITPISAFVFVVFFSVFFPSFYEDFCCWI

SEQ ID NO: 79732 - protein, 81 aa, Homo sapiens
  Payload ID: 15877
  Gene Symbol: SERF1A
  Gene Name: small EDRK-rich factor 1A (telomeric)
  ENSP ID: ENSP00000422339
MARGNQRELARQKNMKKTQEISKGKRKEDSLTASQRKQSSGGQKSESKMSAGPHLPLKAPRENPCFPLPAAGGSRFHSNLG

SEQ ID NO: 79733 - protein, 75 aa, Homo sapiens
  Payload ID: 15877
  Gene Symbol: SERF1A
  Gene Name: small EDRK-rich factor 1A (telomeric)
  ENSP ID: ENSP00000426322
MARGNQRELARQKNMKKTQEISKGKRKEDSLTASQRKQRYGVLLCDPDWSAVPQSRFTASSASQAQVTLPPQPSE

SEQ ID NO: 79734 - protein, 48 aa, Homo sapiens
  Payload ID: 15877
  Gene Symbol: SERF1A
  Gene Name: small EDRK-rich factor 1A (telomeric)
  ENSP ID: ENSP00000428386
MKKTQEISKGKRKEDSLTASQRKQRDSEIMQEKQKAANEKKSMQTREK

SEQ ID NO: 79735 - protein, 20 aa, Homo sapiens
  Payload ID: 15877
  Gene Symbol: SERF1A
  Gene Name: small EDRK-rich factor 1A (telomeric)
  ENSP ID: ENSP00000429293
MKKTQEISKGKRKEDSLTAS

SEQ ID NO: 79736 - protein, 89 aa, Homo sapiens
  Payload ID: 15877
  Gene Symbol: SERF1A
  Gene Name: small EDRK-rich factor 1A (telomeric)
  ENSP ID: ENSP00000429748
MKKTQEISKGKRKEDSLTASQRKQSSGGQKSESKMSAGPHLPLKAPRENPCFPLPAAGGSRYYLAYGSITPISAFVFVVFFSVFFPSFY

SEQ ID NO: 79737 - protein, 96 aa, Homo sapiens
  Payload ID: 15877
  Gene Symbol: SERF1A
  Gene Name: small EDRK-rich factor 1A (telomeric)
  ENSP ID: ENSP00000430582
MKKTQEISKGKRKEDSLTASQRKQSSGGQKSESKMSAGPHLPLKAPRENPCFPLPAAGGSRYYLAYGSITPISAFVFVVFFSVFFPSFYEDFCCWI

SEQ ID NO: 79738 - protein, 110 aa, Homo sapiens; identical to SEQ ID NO: 79731
  Payload ID: 15877
  Gene Symbol: SERF1A
  Gene Name: small EDRK-rich factor 1A (telomeric)
  Uniprot ID: O75920
  ENSP ID: ENSP00000479724

SEQ ID NO: 79739 - protein, 48 aa, Homo sapiens; identical to SEQ ID NO: 79734
  Payload ID: 15877
  Gene Symbol: SERF1A
  Gene Name: small EDRK-rich factor 1A (telomeric)
  ENSP ID: ENSP00000482995

SEQ ID NO: 79740 - protein, 75 aa, Homo sapiens; identical to SEQ ID NO: 79733
  Payload ID: 15877
  Gene Symbol: SERF1A
  Gene Name: small EDRK-rich factor 1A (telomeric)
  ENSP ID: ENSP00000485774

SEQ ID NO: 79741 - protein, 48 aa, Homo sapiens; identical to SEQ ID NO: 79734
  Payload ID: 15877
  Gene Symbol: SERF1A
  Gene Name: small EDRK-rich factor 1A (telomeric)
  ENSP ID: ENSP00000486307

SEQ ID NO: 79742 - protein, 89 aa, Homo sapiens; identical to SEQ ID NO: 79736
  Payload ID: 15877
  Gene Symbol: SERF1A
  Gene Name: small EDRK-rich factor 1A (telomeric)
  ENSP ID: ENSP00000486813

SEQ ID NO: 79743 - protein, 96 aa, Homo sapiens; identical to SEQ ID NO: 79737
  Payload ID: 15877
  Gene Symbol: SERF1A
  Gene Name: small EDRK-rich factor 1A (telomeric)
  ENSP ID: ENSP00000487054

SEQ ID NO: 79744 - protein, 62 aa, Homo sapiens; identical to SEQ ID NO: 79730
  Payload ID: 15877
  Gene Symbol: SERF1A
  Gene Name: small EDRK-rich factor 1A (telomeric)
  Uniprot ID: O75920
  ENSP ID: ENSP00000487374

SEQ ID NO: 79745 - protein, 81 aa, Homo sapiens; identical to SEQ ID NO: 79732
  Payload ID: 15877
  Gene Symbol: SERF1A
  Gene Name: small EDRK-rich factor 1A (telomeric)
  ENSP ID: ENSP00000487461

SEQ ID NO: 79746 - protein, 110 aa, Homo sapiens; identical to SEQ ID NO: 79731
  Payload ID: 15877
  Gene Symbol: SERF1A
  Gene Name: small EDRK-rich factor 1A (telomeric)
  Uniprot ID: O75920
  ENSP ID: ENSP00000487531

SEQ ID NO: 79747 - protein, 110 aa, Homo sapiens; identical to SEQ ID NO: 79731
  Payload ID: 15878
  Gene Symbol: SERF1B
  Gene Name: small EDRK-rich factor 1B (centromeric)
  Uniprot ID: O75920
  ENSP ID: ENSP00000370126

SEQ ID NO: 79748 - protein, 62 aa, Homo sapiens; identical to SEQ ID NO: 79730
  Payload ID: 15878
  Gene Symbol: SERF1B
  Gene Name: small EDRK-rich factor 1B (centromeric)
  Uniprot ID: O75920
  ENSP ID: ENSP00000370127

SEQ ID NO: 79749 - protein, 81 aa, Homo sapiens; identical to SEQ ID NO: 79732
  Payload ID: 15878
  Gene Symbol: SERF1B
  Gene Name: small EDRK-rich factor 1B (centromeric)
  ENSP ID: ENSP00000421563

SEQ ID NO: 79750 - protein, 75 aa, Homo sapiens; identical to SEQ ID NO: 79733
  Payload ID: 15878
  Gene Symbol: SERF1B
  Gene Name: small EDRK-rich factor 1B (centromeric)
  ENSP ID: ENSP00000423882

SEQ ID NO: 79751 - protein, 96 aa, Homo sapiens; identical to SEQ ID NO: 79737
  Payload ID: 15878
  Gene Symbol: SERF1B
  Gene Name: small EDRK-rich factor 1B (centromeric)
  ENSP ID: ENSP00000427181

SEQ ID NO: 79752 - protein, 81 aa, Homo sapiens; identical to SEQ ID NO: 79732
  Payload ID: 15878
  Gene Symbol: SERF1B
  Gene Name: small EDRK-rich factor 1B (centromeric)
  ENSP ID: ENSP00000478335

SEQ ID NO: 79753 - protein, 96 aa, Homo sapiens; identical to SEQ ID NO: 79737
  Payload ID: 15878
  Gene Symbol: SERF1B
  Gene Name: small EDRK-rich factor 1B (centromeric)
  ENSP ID: ENSP00000479417

SEQ ID NO: 79754 - protein, 110 aa, Homo sapiens; identical to SEQ ID NO: 79731
  Payload ID: 15878
  Gene Symbol: SERF1B
  Gene Name: small EDRK-rich factor 1B (centromeric)
  Uniprot ID: O75920
  ENSP ID: ENSP00000480543

SEQ ID NO: 79755 - protein, 62 aa, Homo sapiens; identical to SEQ ID NO: 79730
  Payload ID: 15878
  Gene Symbol: SERF1B
  Gene Name: small EDRK-rich factor 1B (centromeric)
  Uniprot ID: O75920
  ENSP ID: ENSP00000481118

SEQ ID NO: 79756 - protein, 24 aa, Homo sapiens
  Payload ID: 15878
  Gene Symbol: SERF1B
  Gene Name: small EDRK-rich factor 1B (centromeric)
  ENSP ID: ENSP00000482045
MKKTQEISKGKRKEDSLTASQRKQ

SEQ ID NO: 79757 - protein, 62 aa, Homo sapiens; identical to SEQ ID NO: 79730
  Payload ID: 15878
  Gene Symbol: SERF1B
  Gene Name: small EDRK-rich factor 1B (centromeric)
  Uniprot ID: O75920
  ENSP ID: ENSP00000482392

SEQ ID NO: 79758 - protein, 48 aa, Homo sapiens; identical to SEQ ID NO: 79734
  Payload ID: 15878
  Gene Symbol: SERF1B
  Gene Name: small EDRK-rich factor 1B (centromeric)
  ENSP ID: ENSP00000483645

SEQ ID NO: 79759 - protein, 110 aa, Homo sapiens; identical to SEQ ID NO: 79731
  Payload ID: 15878
  Gene Symbol: SERF1B
  Gene Name: small EDRK-rich factor 1B (centromeric)
  Uniprot ID: O75920
  ENSP ID: ENSP00000484795

SEQ ID NO: 79760 - protein, 48 aa, Homo sapiens; identical to SEQ ID NO: 79734
  Payload ID: 15878
  Gene Symbol: SERF1B
  Gene Name: small EDRK-rich factor 1B (centromeric)
  ENSP ID: ENSP00000484864

SEQ ID NO: 79761 - protein, 75 aa, Homo sapiens; identical to SEQ ID NO: 79733
  Payload ID: 15878
  Gene Symbol: SERF1B
  Gene Name: small EDRK-rich factor 1B (centromeric)
  ENSP ID: ENSP00000484959

SEQ ID NO: 79762 - protein, 20 aa, Homo sapiens
  Payload ID: 15878
  Gene Symbol: SERF1B
  Gene Name: small EDRK-rich factor 1B (centromeric)
  ENSP ID: ENSP00000485822
MKKTQEISKGKRKEDSLTAS

SEQ ID NO: 79763 - protein, 81 aa, Homo sapiens; identical to SEQ ID NO: 79732
  Payload ID: 15878
  Gene Symbol: SERF1B
  Gene Name: small EDRK-rich factor 1B (centromeric)
  ENSP ID: ENSP00000485848

SEQ ID NO: 79764 - protein, 48 aa, Homo sapiens; identical to SEQ ID NO: 79734
  Payload ID: 15878
  Gene Symbol: SERF1B
  Gene Name: small EDRK-rich factor 1B (centromeric)
  ENSP ID: ENSP00000486174

SEQ ID NO: 79765 - protein, 75 aa, Homo sapiens; identical to SEQ ID NO: 79733
  Payload ID: 15878
  Gene Symbol: SERF1B
  Gene Name: small EDRK-rich factor 1B (centromeric)
  ENSP ID: ENSP00000486523

SEQ ID NO: 79766 - protein, 89 aa, Homo sapiens; identical to SEQ ID NO: 79736
  Payload ID: 15878
  Gene Symbol: SERF1B
  Gene Name: small EDRK-rich factor 1B (centromeric)
  ENSP ID: ENSP00000486741

SEQ ID NO: 79767 - protein, 96 aa, Homo sapiens; identical to SEQ ID NO: 79737
  Payload ID: 15878
  Gene Symbol: SERF1B
  Gene Name: small EDRK-rich factor 1B (centromeric)
  ENSP ID: ENSP00000487004

SEQ ID NO: 79768 - protein, 59 aa, Homo sapiens
  Payload ID: 15879
  Gene Symbol: SERF2
  Gene Name: small EDRK-rich factor 2
  Uniprot ID: P84101
  ENSP ID: ENSP00000249786
MTRGNQRELARQKNMKKQSDSVKGKRRDDGLSAAARKQRDSEIMQQKQKKANEKKEEPK

SEQ ID NO: 79769 - protein, 133 aa, Homo sapiens
  Payload ID: 15879
  Gene Symbol: SERF2
  Gene Name: small EDRK-rich factor 2
  Uniprot ID: P84101
  ENSP ID: ENSP00000339647
MTRGNQRELARQKNMKKQSDSVKGKRRDDGLSAAARKQSAPSSLPPGTRRSCSRSRKRQTRRRRNPSSFVASCPTLLPFACVPGASPTTLAFPPVVLTGPSTDGIPFALSLQRVPFVLPSPQVASLPLGHSRG

SEQ ID NO: 79770 - protein, 59 aa, Homo sapiens; identical to SEQ ID NO: 79768
  Payload ID: 15879
  Gene Symbol: SERF2
  Gene Name: small EDRK-rich factor 2
  Uniprot ID: P84101
  ENSP ID: ENSP00000370764

SEQ ID NO: 79771 - protein, 45 aa, Homo sapiens
  Payload ID: 15879
  Gene Symbol: SERF2
  Gene Name: small EDRK-rich factor 2
  Uniprot ID: P84101
  ENSP ID: ENSP00000384300
MKKQSDSVKGKRRDDGLSAAARKQRDSEIMQQKQKKANEKKEEPK

SEQ ID NO: 79772 - protein, 45 aa, Homo sapiens; identical to SEQ ID NO: 79771
  Payload ID: 15879
  Gene Symbol: SERF2
  Gene Name: small EDRK-rich factor 2
  Uniprot ID: P84101
  ENSP ID: ENSP00000386044

SEQ ID NO: 79773 - protein, 40 aa, Homo sapiens
  Payload ID: 15879
  Gene Symbol: SERF2
  Gene Name: small EDRK-rich factor 2
  ENSP ID: ENSP00000386290
MTRGNQRELARQKNMKKQSDSVKGKRRDDGLSAAARKQSF

SEQ ID NO: 79774 - protein, 83 aa, Homo sapiens
  Payload ID: 15879
  Gene Symbol: SERF2
  Gene Name: small EDRK-rich factor 2
  ENSP ID: ENSP00000386316
MTRGNQRELARQKNMKKQSDSVKGKRRDDGLSAAARKQRKYTQTYYAAVPAGWWGSGGGPATQPAAGGRWRFLHILGTQPQSH

SEQ ID NO: 79775 - protein, 45 aa, Homo sapiens; identical to SEQ ID NO: 79771
  Payload ID: 15879
  Gene Symbol: SERF2
  Gene Name: small EDRK-rich factor 2
  Uniprot ID: P84101
  ENSP ID: ENSP00000386783

SEQ ID NO: 79776 - protein, 42 aa, Homo sapiens
  Payload ID: 15879
  Gene Symbol: SERF2
  Gene Name: small EDRK-rich factor 2
  ENSP ID: ENSP00000387041
MKKQSDSVKGKRRDDGLSAAARKQRFCFKLIPAIWDCRPLTT

SEQ ID NO: 79777 - protein, 170 aa, Homo sapiens
  Payload ID: 15879
  Gene Symbol: SERF2
  Gene Name: small EDRK-rich factor 2
  Uniprot ID: P84101
  ENSP ID: ENSP00000387187
MTRGNQRELARQKNMKKQSDSVKGKRRDDGLSAAARKQRVGVQQPNAELSPIHFHLILCALHPPASCPFCPLVPPSAPSSLPPGTRRSCSRSRKRQTRRRRNPSSFVASCPTLLPFACVPGASPTTLAFPPVVLTGPSTDGIPFALSLQRVPFVLPSPQVASLPLGHSRG

SEQ ID NO: 79778 - protein, 108 aa, Homo sapiens
  Payload ID: 15879
  Gene Symbol: SERF2
  Gene Name: small EDRK-rich factor 2
  ENSP ID: ENSP00000391027
MTRGNQRELARQKNMKKQSDSVKGKRRDDGLSAAARKQSAITSSRNFLYPAYVYFPSSVPSPPRKYTQTYYAAVPAGWWGSGGGPATQPAAGGRWRFLHILGTQPQSH

SEQ ID NO: 79779 - protein, 71 aa, Homo sapiens
  Payload ID: 15879
  Gene Symbol: SERF2
  Gene Name: small EDRK-rich factor 2
  ENSP ID: ENSP00000394660
MKKQSDSVKGKRRDDGLSAAARKQSAITSSRNFLYPAYVYFPSSVPSPPRKYTQTYYAAVPAGWWGSGGGP

SEQ ID NO: 79780 - protein, 59 aa, Homo sapiens; identical to SEQ ID NO: 79768
  Payload ID: 15879
  Gene Symbol: SERF2
  Gene Name: small EDRK-rich factor 2
  Uniprot ID: P84101
  ENSP ID: ENSP00000400178

SEQ ID NO: 79781 - protein, 108 aa, Homo sapiens; identical to SEQ ID NO: 79778
  Payload ID: 15879
  Gene Symbol: SERF2
  Gene Name: small EDRK-rich factor 2
  ENSP ID: ENSP00000486542

SEQ ID NO: 79782 - protein, 1093 aa, Homo sapiens
  Payload ID: 15880
  Gene Symbol: SGSM1
  Gene Name: small G protein signaling modulator 1
  Uniprot ID: Q2NKQ1
  ENSP ID: ENSP00000383211
MASAPAEAETRQRLLRTVKKEVKQIMEEAVTRKFVHEDSSHIISFCAAVEACVLHGLRRRAAGFLRSNKIAALFMKVGKNFPPAEDLSRKVQDLEQLIESARNQIQGLQENVRKLPKLPNLSPLAIKHLWIRTALFEKVLDKIVHYLVENSSKYYEKEALLMDPVDGPILASLLVGPCALEYTKMKTADHFWTDPSADELVQRHRIHSSHVRQDSPTKRPALCIQKRHSSGSMDDRPSLSARDYVESLHQNSRATLLYGKNNVLVQPRDDMEAVPGYLSLHQTADVMTLKWTPNQLMNGSVGDLDYEKSVYWDYAMTIRLEEIVYLHCHQQVDSGGTVVLVSQDGIQRPPFRFPKGGHLLQFLSCLENGLLPHGQLDPPLWSQRGKGKVFPKLRKRSPQGSAESTSSDKDDDEATDYVFRIIYPGMQSEFVPQDLMDVSVSNLPSLWQPSPRKSSCSSCSQSGSADGSSTNGCNHERAPLKLLCDNMKYQILSRAFYGWLAYCRHLSTVRTHLSALVNHMIVSPDLPCDAGQGLTARIWEQYLHDSTSYEEQELLRLIYYGGIQPEIRKAVWPFLLGHYQFGMTETERKEVDEQIHACYAQTMAEWLGCEAIVRQRERESHAAALAKCSSGASLDSHLHRMLHRDSTISNESSQSCSSGRQNIRLHSDSSSSTQVFESVDEVEQVEAEGRLEEKQPKIPNGNLVNGTCSPDSGHPSSHNFSSGLSEHSEPSLSTEDSVLDAQRNTPTVLRPRDGSVDDRQSSEATTSQDEAPREELAVQDSLESDLLANESMDEFMSITGSLDMALPEKDDVVMEGWRSSETEKHGQADSEDNLSEEPEMESLFPALASLAVTTSANEVSPVSSSGVTYSPELLDLYTVNLHRIEKDVQRCDRNYWYFTPANLEKLRNIMCSYIWQHIEIGYVQGMCDLLAPLLVILDDEALAFSCFTELMKRMNQNFPHGGAMDTHFANMRSLIQILDSELFELMHQNGDYTHFYFCYRWFLLDFKRELVYDDVFLVWETIWAAKHVSSAHYVLFIALALVEVYRDIILENNMDFTDIIKFFNEMAERHNTKQVLKLARDLVYKVQTLIENK

SEQ ID NO: 79783 - protein, 1148 aa, Homo sapiens
  Payload ID: 15880
  Gene Symbol: SGSM1
  Gene Name: small G protein signaling modulator 1
  Uniprot ID: Q2NKQ1
  ENSP ID: ENSP00000383212
MASAPAEAETRQRLLRTVKKEVKQIMEEAVTRKFVHEDSSHIISFCAAVEACVLHGLRRRAAGFLRSNKIAALFMKVGKNFPPAEDLSRKVQDLEQLIESARNQIQGLQENVRKLPKLPNLSPLAIKHLWIRTALFEKVLDKIVHYLVENSSKYYEKEALLMDPVDGPILASLLVGPCALEYTKMKTADHFWTDPSADELVQRHRIHSSHVRQDSPTKRPALCIQKRHSSGSMDDRPSLSARDYVESLHQNSRATLLYGKNNVLVQPRDDMEAVPGYLSLHQTADVMTLKWTPNQLMNGSVGDLDYEKSVYWDYAMTIRLEEIVYLHCHQQVDSGGTVVLVSQDGIQRPPFRFPKGGHLLQFLSCLENGLLPHGQLDPPLWSQRGKGKVFPKLRKRSPQGSAESTSSDKDDDEATDYVFRIIYPGMQSEFVAPDFLGSTSSVSVGPAWMMVPAGRSMLVVARGSQWEPARWDTTLPTPSPKEQPPMPQDLMDVSVSNLPSLWQPSPRKSSCSSCSQSGSADGSSTNGCNHERAPLKLLCDNMKYQILSRAFYGWLAYCRHLSTVRTHLSALVNHMIVSPDLPCDAGQGLTARIWEQYLHDSTSYEEQELLRLIYYGGIQPEIRKAVWPFLLGHYQFGMTETERKEVDEQIHACYAQTMAEWLGCEAIVRQRERESHAAALAKCSSGASLDSHLHRMLHRDSTISNESSQSCSSGRQNIRLHSDSSSSTQVFESVDEVEQVEAEGRLEEKQPKIPNGNLVNGTCSPDSGHPSSHNFSSGLSEHSEPSLSTEDSVLDAQRNTPTVLRPRDGSVDDRQSSEATTSQDEAPREELAVQDSLESDLLANESMDEFMSITGSLDMALPEKDDVVMEGWRSSETEKHGQADSEDNLSEEPEMESLFPALASLAVTTSANEVSPVSSSGVTYSPELLDLYTVNLHRIEKDVQRCDRNYWYFTPANLEKLRNIMCSYIWQHIEIGYVQGMCDLLAPLLVILDDEALAFSCFTELMKRMNQNFPHGGAMDTHFANMRSLIQILDSELFELMHQNGDYTHFYFCYRWFLLDFKRELVYDDVFLVWETIWAAKHVSSAHYVLFIALALVEVYRDIILENNMDFTDIIKFFNEMAERHNTKQVLKLARDLVYKVQTLIENK

SEQ ID NO: 79784 - protein, 1087 aa, Homo sapiens
  Payload ID: 15880
  Gene Symbol: SGSM1
  Gene Name: small G protein signaling modulator 1
  ENSP ID: ENSP00000484682
MASAPAEAETRQRLLRTVKKEVKQIMEEAVTRKFVHEDSSHIISFCAAVEACVLHGLRRRAAGFLRSNKIAALFMKVGKNFPPAEDLSRKVQDLEQLIESARNQIQGLQENVRKLPKLPNLSPLAIKHLWIRTALFEKVLDKIVHYLVENSSKYYEKEALLMDPVDGPILASLLVGPCALEYTKMKTADHFWTDPSADELVQRHRIHSSHVRQDSPTKRPALCIQKRHSSGSMDDRPSLSARDYVESLHQNSRATLLYGKNNVLVQPRDDMEAVPGYLSLHQTADVMTLKWTPNQLMNGSVGDLDYEKSVYWDYAMTIRLEEIVYLHCHQQVDSGGTVVLVSQDGIQRPPFRFPKGGHLLQFLSCLENGLLPHGQLDPPLWSQRGKGKVFPKLRKRSPQGSAESTSSDKDDDEATDYVFRIIYPGMQSEFVAPDFLGSTSSVSVGPAWMMVPAGRSMLVVARGSQWEPARWDTTLPTPSPKEQPPMPQDLMDVSVSNLPSLWQPSPRKSSCSSCSQSGSADGSSTNGCNHERAPLKLLCDNMKYQILSRAFYGWLAYCRHLSTVRTHLSALVNHMIVSPDLPCDAGQGLTARIWEQYLHDSTSYEEQELLRLIYYGGIQPEIRKAVWPFLLGHYQFGMTETERKESSQSCSSGRQNIRLHSDSSSSTQVFESVDEVEQVEAEGRLEEKQPKIPNGNLVNGTCSPDSGHPSSHNFSSGLSEHSEPSLSTEDSVLDAQRNTPTVLRPRDGSVDDRQSSEATTSQDEAPREELAVQDSLESDLLANESMDEFMSITGSLDMALPEKDDVVMEGWRSSETEKHGQADSEDNLSEEPEMESLFPALASLAVTTSANEVSPVSSSGVTYSPELLDLYTVNLHRIEKDVQRCDRNYWYFTPANLEKLRNIMCSYIWQHIEIGYVQGMCDLLAPLLVILDDEALAFSCFTELMKRMNQNFPHGGAMDTHFANMRSLIQILDSELFELMHQNGDYTHFYFCYRWFLLDFKRELVYDDVFLVWETIWAAKHVSSAHYVLFIALALVEVYRDIILENNMDFTDIIKFFNEMAERHNTKQVLKLARDLVYKVQTLIENK

SEQ ID NO: 79785 - protein, 1051 aa, Homo sapiens
  Payload ID: 15881
  Gene Symbol: SGSM2
  Gene Name: small G protein signaling modulator 2
  Uniprot ID: O43147
  ENSP ID: ENSP00000268989
MGSAEDAVKEKLLWNVKKEVKQIMEEAVTRKFVHEDSSHIIALCGAVEACLLHQLRRRAAGFLRSDKMAALFTKVGKTCPVAGEICHKVQELQQQAEGRKPSGVSQEALRRQGSASGKAPALSPQALKHVWVRTALIEKVLDKVVQYLAENCSKYYEKEALLADPVFGPILASLLVGPCALEYTKLKTADHYWTDPSADELVQRHRIRGPPTRQDSPAKRPALGIRKRHSSGSASEDRLAACARECVESLHQNSRTRLLYGKNHVLVQPKEDMEAVPGYLSLHQSAESLTLKWTPNQLMNGTLGDSELEKSVYWDYALVVPFSQVVCIHCHQQKSGGTLVLVSQDGIQRPPLHFPQGGHLLSFLSCLENGLLPRGQLEPPLWTQQGKGKVFPKLRKRSSIRSVDMEEMGTGRATDYVFRIIYPGHRHEHITINYHHLAASRAASVDDDEEEEDKLHAMLSMICSRNLTAPNPMKDAGDMIEMQGFGPSLPAWHLEPLCSQGSSCLSCSSSSSPHATPSHCSCIPDRLPLRLLCESMKRQIVSRAFYGWLAHCRHLSTVRTHLSALVHHSVIPPDRPPGASAGLTKDVWSKYQKDKKNYKELELLRQVYYGGIEHEIRKDVWPFLLGHYKFGMSKKEMEQVDAVVAARYQQVLAEWKACEVVVRQREREAHPATRTKFSSGSSIDSHVQRLIHRDSTISNDVFISVDDLEPPEPQDPEDSRPKPEQEAGPGTPGTAVVEQQHSVEFDSPDSGLPSSRNYSVASGIQSSLDEGQSVGFEEEDGGGEEGSSGPGPAAHTLREPQDPSQEKPQAGELEAGEELAAVCAAAYTIELLDTVALNLHRIDKDVQRCDRNYWYFTPPNLERLRDVMCSYVWEHLDVGYVQGMCDLLAPLLVTLDNDQLAYSCFSHLMKRMSQNFPNGGAMDTHFANMRSLIQILDSELFELMHQNGDYTHFYFCYRWFLLDFKRELLYEDVFAVWEVIWAARHISSEHFVLFIALALVEAYREIIRDNNMDFTDIIKFFNERAEHHDAQEILRIARDLVHKVQMLIENK

SEQ ID NO: 79786 - protein, 1006 aa, Homo sapiens
  Payload ID: 15881
  Gene Symbol: SGSM2
  Gene Name: small G protein signaling modulator 2
  Uniprot ID: O43147
  ENSP ID: ENSP00000415107
MGSAEDAVKEKLLWNVKKEVKQIMEEAVTRKFVHEDSSHIIALCGAVEACLLHQLRRRAAGFLRSDKMAALFTKVGKTCPVAGEICHKVQELQQQAEGRKPSGVSQEALRRQGSASGKAPALSPQALKHVWVRTALIEKVLDKVVQYLAENCSKYYEKEALLADPVFGPILASLLVGPCALEYTKLKTADHYWTDPSADELVQRHRIRGPPTRQDSPAKRPALGIRKRHSSGSASEDRLAACARECVESLHQNSRTRLLYGKNHVLVQPKEDMEAVPGYLSLHQSAESLTLKWTPNQLMNGTLGDSELEKSVYWDYALVVPFSQVVCIHCHQQKSGGTLVLVSQDGIQRPPLHFPQGGHLLSFLSCLENGLLPRGQLEPPLWTQQGKGKVFPKLRKRSSIRSVDMEEMGTGRATDYVFRIIYPGHRHEHNAGDMIEMQGFGPSLPAWHLEPLCSQGSSCLSCSSSSSPHATPSHCSCIPDRLPLRLLCESMKRQIVSRAFYGWLAHCRHLSTVRTHLSALVHHSVIPPDRPPGASAGLTKDVWSKYQKDKKNYKELELLRQVYYGGIEHEIRKDVWPFLLGHYKFGMSKKEMEQVDAVVAARYQQVLAEWKACEVVVRQREREAHPATRTKFSSGSSIDSHVQRLIHRDSTISNDVFISVDDLEPPEPQDPEDSRPKPEQEAGPGTPGTAVVEQQHSVEFDSPDSGLPSSRNYSVASGIQSSLDEGQSVGFEEEDGGGEEGSSGPGPAAHTLREPQDPSQEKPQAGELEAGEELAAVCAAAYTIELLDTVALNLHRIDKDVQRCDRNYWYFTPPNLERLRDVMCSYVWEHLDVGYVQGMCDLLAPLLVTLDNDQLAYSCFSHLMKRMSQNFPNGGAMDTHFANMRSLIQILDSELFELMHQNGDYTHFYFCYRWFLLDFKRELLYEDVFAVWEVIWAARHISSEHFVLFIALALVEAYREIIRDNNMDFTDIIKFFNERAEHHDAQEILRIARDLVHKVQMLIENK

SEQ ID NO: 79787 - protein, 987 aa, Homo sapiens
  Payload ID: 15881
  Gene Symbol: SGSM2
  Gene Name: small G protein signaling modulator 2
  Uniprot ID: O43147
  ENSP ID: ENSP00000459126
MGSAEDAVKEKLLWNVKKEVKQIMEEAVTRKFVHEDSSHIIALCGAVEACLLHQLRRRAAGFLRSDKMAALFTKVGKTCPVAGEICHKVQELQQQAEGRKPSGVSQEALRRQGSASGKAPALSPQALKHVWVRTALIEKVLDKVVQYLAENCSKYYEKEALLADPVFGPILASLLVGPCALEYTKLKTADHYWTDPSADELVQRHRIRGPPTRQDSPAKRPALGIRKRHSSGSASEDRLAACARECVESLHQNSRTRLLYGKNHVLVQPKEDMEAVPGYLSLHQSAESLTLKWTPNQLMNGTLGDSELEKSVYWDYALVVPFSQVVCIHCHQQKSGGTLVLVSQDGIQRPPLHFPQGGHLLSFLSCLENGLLPRGQLEPPLWTQQGKGKVFPKLRKRSSIRSVDMEEMGTGRATDYVFRIIYPGHRHEHNAGDMIEMQGFGPSLPAWHLEPLCSQGSSCLSCSSSSSPHATPSHCSCIPDRLPLRLLCESMKRQIVSRAFYGWLAHCRHLSTVRTHLSALVHHSVIPPDRPPGASAGLTKDVWSKYQKDKKNYKELELLRQVYYGGIEHEIRKDVWPFLLGHYKFGMSKKEMEQVDAVVAARYQQVLAEWKACEVVVRQREREAHPATRTKFSSGSSIDSHVQRLIHRDSTISNDVFISVDDLEPPEPQDPEDSRPKPEQEAGPGTPGTAVVEQQHSVEFDSPDSGLPSSRNYSVASGIQSSLDEGQSVGFEEEDGGGEEGSSGPGPAAHTLREPQDPSQEKPQAGELEAGEELAAVCAAAYTIELLDTVALNLHRIDKDVQRCDRNYWYFTPPNLERLRDVMCSYVWEHLDVGYVQGMCDLLAPLLVTLDNDQLAYSCFSHLMKRMSQNFPNGGAMDTHFANMRSLIQILDSELFELMHQNGDYTHFYFCYRWFLLDFKRELLYEDVFAVWEVIWAARHISSEHFVLFIALALVEAYREIIRDNNMDFTDIIKFFNGTSLKTTCKK

SEQ ID NO: 79788 - protein, 29 aa, Homo sapiens
  Payload ID: 15881
  Gene Symbol: SGSM2
  Gene Name: small G protein signaling modulator 2
  ENSP ID: ENSP00000459218
MGSAEDAVKEKLLWNVKKEVQWRLASCIS

SEQ ID NO: 79789 - protein, 95 aa, Homo sapiens
  Payload ID: 15881
  Gene Symbol: SGSM2
  Gene Name: small G protein signaling modulator 2
  ENSP ID: ENSP00000460205
MEAVPGYLSLHQSAESLTLKWTPNQLMNGTLGDSELEKSVYWDYALVVPFSQVVCIHCHQQKSGGTLVLVSQDGIQRPPLHFPQGGHLLSFLSCL

SEQ ID NO: 79790 - protein, 36 aa, Homo sapiens
  Payload ID: 15881
  Gene Symbol: SGSM2
  Gene Name: small G protein signaling modulator 2
  ENSP ID: ENSP00000461820
  MOD_RES (1)..(1): Any amino acid
XMDFTDIIKFFNERAEHHDAQEILRIARDLVHKVLP

SEQ ID NO: 79791 - protein, 114 aa, Homo sapiens
  Payload ID: 15881
  Gene Symbol: SGSM2
  Gene Name: small G protein signaling modulator 2
  ENSP ID: ENSP00000464593
  MOD_RES (1)..(1): Any amino acid
XYFCYRWFLLDFKRELLYEDVFAVWEVIWAARHISSEHFVLFIALALVEAYREIIRDNNMDFTDIIKFFNGTSWSSHPGCPEQRCGGPHLCPAHSWRVLRNPGGPSPKAGMSRI

SEQ ID NO: 79792 - protein, 70 aa, Homo sapiens
  Payload ID: 15881
  Gene Symbol: SGSM2
  Gene Name: small G protein signaling modulator 2
  ENSP ID: ENSP00000476637
LQQQAEGRKPSGVSQEALRRQGSASGKAPALSPQALKHVWVRTALIEKVLDKVVQYLAENCSGTLCLGIH

SEQ ID NO: 79793 - protein, 316 aa, Homo sapiens
  Payload ID: 15881
  Gene Symbol: SGSM2
  Gene Name: small G protein signaling modulator 2
  ENSP ID: ENSP00000476800
MGSAEDAVKEKLLWNVKKEVKQIMEEAVTRKFVHEDSSHIIALCGAVEACLLHQLRRRAAGFLRSDKMAALFTKVGKTCPVAGEICHKVQELQQQAEGRKPSGVSQEALRRQGSASGKAPALSPQALKHVWVRTALIEKVLDKVVQYLAENCSKYYEKEALLADPVFGPILASLLGEPESTGTVGTGQVLREHRLGWLSLSPQWDPVPWNTLSSRQPITTGLTPLLMSWSSGTASGVHLLARTPLQSAQPWGSGNGTQAAARRRTGWLPVPASVWSPCTRTHGRGCSMARTTCWCSRRRIWRRSLATSPCTSLQRA

SEQ ID NO: 79794 - protein, 749 aa, Homo sapiens
  Payload ID: 15882
  Gene Symbol: SGSM3
  Gene Name: small G protein signaling modulator 3
  Uniprot ID: Q96HU1
  ENSP ID: ENSP00000248929
MSGSHTPACGPFSALTPSIWPQEILAKYTQKEESAEQPEFYYDEFGFRVYKEEGDEPGSSLLANSPLMEDAPQRLRWQAHLEFTHNHDVGDLTWDKIAVSLPRSEKLRSLVLAGIPHGMRPQLWMRLSGALQKKRNSELSYREIVKNSSNDETIAAKQIEKDLLRTMPSNACFASMGSIGVPRLRRVLRALAWLYPEIGYCQGTGMVAACLLLFLEEEDAFWMMSAIIEDLLPASYFSTTLLGVQTDQRVLRHLIVQYLPRLDKLLQEHDIELSLITLHWFLTAFASVVDIKLLLRIWDLFFYEGSRVLFQLTLGMLHLKEEELIQSENSASIFNTLSDIPSQMEDAELLLGVAMRLAGSLTDVAVETQRRKHLAYLIADQGQLLGAGTLTNLSQVVRRRTQRRKSTITALLFGEDDLEALKAKNIKQTELVADLREAILRVARHFQCTDPKNCSVELTPDYSMESHQRDHENYVACSRSHRRRAKALLDFERHDDDELGFRKNDIITIVSQKDEHCWVGELNGLRGWFPAKFVEVLDERSKEYSIAGDDSVTEGVTDLVRGTLCPALKALFEHGLKKPSLLGGACHPWLFIEEAAGREVERDFASVYSRLVLCKTFRLDEDGKVLTPEELLYRAVQSVNVTHDAVHAQMDVKLRSLICVGLNEQVLHLWLEVLCSSLPTVEKWYQPWSFLRSPGWVQIKCELRVLCCFAFSLSQDWELPAKREAQQPLKEGVRDMLVKHHLFSWDVDG

SEQ ID NO: 79795 - protein, 253 aa, Homo sapiens
  Payload ID: 15882
  Gene Symbol: SGSM3
  Gene Name: small G protein signaling modulator 3
  ENSP ID: ENSP00000399249
MEDAPQRLRWQAHLEFTHNHDVGDLTWDKIAVSLPRSEKLRSLVLAGIPHGMRPQLWMRLSGALQKKRNSELSYREIVKNSSNDETIAAKQIEKDLLRTMPSNACFASMGSIGVPRLRRVLRALAWLYPEIGYCQGTGMVAACLLLFLEEEDAFWMMSAIIEDLLPASYFSTTLLGVQTDQRVLRHLIVQYLPRLDKLLQEHDIELSLITLHWFLTAFASVVDIKLLLRIWDLFFYEGSRVLFQLTLGMLHLK

SEQ ID NO: 79796 - protein, 212 aa, Homo sapiens
  Payload ID: 15882
  Gene Symbol: SGSM3
  Gene Name: small G protein signaling modulator 3
  ENSP ID: ENSP00000407286
VTDLVRGTLCPALKALFEHGLKKPSLLGGACHPWLFIEEAAGREVERDFASVYSRLVLCKTFRLDEDGKVLTPEELLYRAVQSVNVTHDAVHAQMDVKLRSLICVGLNEQVLHLWLEVLCSSLPTVEKWYQPWSFLRSPGWVQIKCELRVLCCFAFSLSQDWELPAKREVGGVGLVGPALMELPKPFAGWLRWEPEVLVSAVRNYPSHAQGL

SEQ ID NO: 79797 - protein, 102 aa, Homo sapiens
  Payload ID: 15882
  Gene Symbol: SGSM3
  Gene Name: small G protein signaling modulator 3
  ENSP ID: ENSP00000415323
  MOD_RES (1)..(1): Any amino acid
XLDEDGKVLTPEELLYRAVQSVNVTHDAVHAQMDVKLRSLICVGLNPGWVQIKCELRVLCCFAFSLSQDWELPAKREAQQPLKEGVRDMLVKHHLFSWDVDG

SEQ ID NO: 79798 - protein, 313 aa, Homo sapiens
  Payload ID: 15883
  Gene Symbol: SGTA
  Gene Name: small glutamine-rich tetratricopeptide repeat (TPR)-containing, alpha
  Uniprot ID: O43765
  ENSP ID: ENSP00000221566
MDNKKRLAYAIIQFLHDQLRHGGLSSDAQESLEVAIQCLETAFGVTVEDSDLALPQTLPEIFEAAATGKEMPQDLRSPARTPPSEEDSAEAERLKTEGNEQMKVENFEAAVHFYGKAIELNPANAVYFCNRAAAYSKLGNYAGAVQDCERAICIDPAYSKAYGRMGLALSSLNKHVEAVAYYKKALELDPDNETYKSNLKIAELKLREAPSPTGGVGSFDIAGLLNNPGFMSMASNLMNNPQIQQLMSGMISGGNNPLGTPGTSPSQNDLASLIQAGQQFAQQMQQQNPELIEQLRSQIRSRTPSASNDDQQE

SEQ ID NO: 79799 - protein, 162 aa, Homo sapiens
  Payload ID: 15883
  Gene Symbol: SGTA
  Gene Name: small glutamine-rich tetratricopeptide repeat (TPR)-containing, alpha
  ENSP ID: ENSP00000466461
MDNKKRLAYAIIQFLHDQLRHGGLSSDAQESLEVAIQCLETAFGVTVEDSDLALPQTLPEIFEAAATGKEMPQDLRSPARTPPSEEDSAEAERLKTEGNEQMKVENFEAAVHFYGKAIELNPANAVYFCNRAAAYSKLGNYAGAVQDCERAICIDPAYSKAY

SEQ ID NO: 79800 - protein, 68 aa, Homo sapiens
  Payload ID: 15883
  Gene Symbol: SGTA
  Gene Name: small glutamine-rich tetratricopeptide repeat (TPR)-containing, alpha
  ENSP ID: ENSP00000468443
MDNKKRLAYAIIQFLHDQLRHGGLSSDAQESLEVAIQCLETAFGVTVEDSDLALPQTLPEIFEAAATG

SEQ ID NO: 79801 - protein, 304 aa, Homo sapiens
  Payload ID: 15884
  Gene Symbol: SGTB
  Gene Name: small glutamine-rich tetratricopeptide repeat (TPR)-containing, beta
  Uniprot ID: Q96EQ0
  ENSP ID: ENSP00000370395
MSSIKHLVYAVIRFLREQSQMDTYTSDEQESLEVAIQCLETVFKISPEDTHLAVSQPLTEMFTSSFCKNDVLPLSNSVPEDVGKADQLKDEGNNHMKEENYAAAVDCYTQAIELDPNNAVYYCNRAAAQSKLGHYTDAIKDCEKAIAIDSKYSKAYGRMGLALTALNKFEEAVTSYQKALDLDPENDSYKSNLKIAEQKLREVSSPTGTGLSFDMASLINNPAFISMAASLMQNPQVQQLMSGMMTNAIGGPAAGVGGLTDLSSLIQAGQQFAQQIQQQNPELIEQLRNHIRSRSFSSSAEEHS

SEQ ID NO: 79802 - protein, 195 aa, Homo sapiens
  Payload ID: 15884
  Gene Symbol: SGTB
  Gene Name: small glutamine-rich tetratricopeptide repeat (TPR)-containing, beta
  ENSP ID: ENSP00000421447
MSSIKHLVYAVIRFLREQSQMDTYTSDEQESLEVAIQCLETVFKISPEDTHLAVSQPLTEMFTSSFCKNDVLPLSNSVPEDVGKADQLKDEGNNHMKEENYAAAVDCYTQAIELDPNNAVYYCNRAAAQSKLGHYTDAIKDCEKAIAIDSKYSKAYGRMGLALTALNKFEEAVTSYQKALDLDPENDSYKSNLKI

SEQ ID NO: 79803 - protein, 37 aa, Homo sapiens
  Payload ID: 15885
  Gene Symbol: SMIM1
  Gene Name: small integral membrane protein 1 (Vel blood group)
  ENSP ID: ENSP00000456559
MQPQESHVHYSRWEDGSRDGVSLGAVSSTEEASRCRR

SEQ ID NO: 79804 - protein, 78 aa, Homo sapiens
  Payload ID: 15885
  Gene Symbol: SMIM1
  Gene Name: small integral membrane protein 1 (Vel blood group)
  Uniprot ID: B2RUZ4
  ENSP ID: ENSP00000457386
MQPQESHVHYSRWEDGSRDGVSLGAVSSTEEASRCRRISQRLCTGKLGIAMKVLGGVALFWIIFILGYLTGYYVHKCK

SEQ ID NO: 79805 - protein, 5 aa, Homo sapiens
  Payload ID: 15885
  Gene Symbol: SMIM1
  Gene Name: small integral membrane protein 1 (Vel blood group)
  ENSP ID: ENSP00000457674
MQPQE

SEQ ID NO: 79806 - protein, 83 aa, Homo sapiens
  Payload ID: 15886
  Gene Symbol: SMIM10
  Gene Name: small integral membrane protein 10
  Uniprot ID: Q96HG1
  ENSP ID: ENSP00000328335
MEALGSGHYVGGSIRSMAAAALSGLAVRLSRPQGTRGSYGAFCKTLTRTLLTFFDLAWRLRKNFFYFYILASVILNVHLQVYI

SEQ ID NO: 79807 - protein, 68 aa, Homo sapiens
  Payload ID: 15887
  Gene Symbol: SMIM10L1
  Gene Name: small integral membrane protein 10 like 1
  ENSP ID: ENSP00000488907
MAPAAAPSSLAVRASSPAATPTSYGVFCKGLSRTLLAFFELAWQLRMNFPYFYVAGSVILNIRLQVHI

SEQ ID NO: 79808 - protein, 78 aa, Homo sapiens
  Payload ID: 15888
  Gene Symbol: SMIM10L2A
  Gene Name: small integral membrane protein 10 like 2A
  Uniprot ID: P0DMW4
  ENSP ID: ENSP00000488643
MAASAALSAAAAAAALSGLAVRLSRSAAARGSYGAFCKGLTRTLLTFFDLAWRLRMNFPYFYIVASVMLNVRLQVRIE

SEQ ID NO: 79809 - protein, 78 aa, Homo sapiens; identical to SEQ ID NO: 79808
  Payload ID: 15889
  Gene Symbol: SMIM10L2B
  Gene Name: small integral membrane protein 10 like 2B
  Uniprot ID: P0DMW5
  ENSP ID: ENSP00000487709

SEQ ID NO: 79810 - protein, 58 aa, Homo sapiens
  Payload ID: 15890
  Gene Symbol: SMIM11A
  Gene Name: small integral membrane protein 11A
  Uniprot ID: P58511
  ENSP ID: ENSP00000382231
MNWKVLEHVPLLLYILAAKTLILCLTFAGVKMYQRKRLEAKQQKLEAERKKQSEKKDN

SEQ ID NO: 79811 - protein, 58 aa, Homo sapiens; identical to SEQ ID NO: 79810
  Payload ID: 15890
  Gene Symbol: SMIM11A
  Gene Name: small integral membrane protein 11A
  Uniprot ID: P58511
  ENSP ID: ENSP00000382234

SEQ ID NO: 79812 - protein, 68 aa, Homo sapiens
  Payload ID: 15890
  Gene Symbol: SMIM11A
  Gene Name: small integral membrane protein 11A
  ENSP ID: ENSP00000382238
MNWKVLTGTTYSPWRVRMEFPLCGCLSLILHHFADKEGRTIGRRESCLATIWTISRPWQAGSLWITLS

SEQ ID NO: 79813 - protein, 58 aa, Homo sapiens; identical to SEQ ID NO: 79810
  Payload ID: 15891
  Gene Symbol: SMIM11B
  Gene Name: small integral membrane protein 11B
  Uniprot ID: P58511
  ENSP ID: ENSP00000482011

SEQ ID NO: 79814 - protein, 68 aa, Homo sapiens; identical to SEQ ID NO: 79812
  Payload ID: 15891
  Gene Symbol: SMIM11B
  Gene Name: small integral membrane protein 11B
  ENSP ID: ENSP00000483089

SEQ ID NO: 79815 - protein, 58 aa, Homo sapiens; identical to SEQ ID NO: 79810
  Payload ID: 15891
  Gene Symbol: SMIM11B
  Gene Name: small integral membrane protein 11B
  Uniprot ID: P58511
  ENSP ID: ENSP00000485233

SEQ ID NO: 79816 - protein, 58 aa, Homo sapiens; identical to SEQ ID NO: 79810
  Payload ID: 15891
  Gene Symbol: SMIM11B
  Gene Name: small integral membrane protein 11B
  Uniprot ID: P58511
  ENSP ID: ENSP00000485484

SEQ ID NO: 79817 - protein, 58 aa, Homo sapiens; identical to SEQ ID NO: 79810
  Payload ID: 15891
  Gene Symbol: SMIM11B
  Gene Name: small integral membrane protein 11B
  Uniprot ID: P58511
  ENSP ID: ENSP00000485596

SEQ ID NO: 79818 - protein, 58 aa, Homo sapiens; identical to SEQ ID NO: 79810
  Payload ID: 15891
  Gene Symbol: SMIM11B
  Gene Name: small integral membrane protein 11B
  Uniprot ID: P58511
  ENSP ID: ENSP00000485606

SEQ ID NO: 79819 - protein, 92 aa, Homo sapiens
  Payload ID: 15892
  Gene Symbol: SMIM12
  Gene Name: small integral membrane protein 12
  Uniprot ID: Q96EX1
  ENSP ID: ENSP00000428541
MWPVFWTVVRTYAPYVTFPVAFVVGAVGYHLEWFIRGKDPQPVEEEKSISERREDRKLDELLGKDHTQVVSLKDKLEFAPKAVLNRNRPEKN

SEQ ID NO: 79820 - protein, 92 aa, Homo sapiens; identical to SEQ ID NO: 79819
  Payload ID: 15892
  Gene Symbol: SMIM12
  Gene Name: small integral membrane protein 12
  Uniprot ID: Q96EX1
  ENSP ID: ENSP00000428585

SEQ ID NO: 79821 - protein, 92 aa, Homo sapiens; identical to SEQ ID NO: 79819
  Payload ID: 15892
  Gene Symbol: SMIM12
  Gene Name: small integral membrane protein 12
  Uniprot ID: Q96EX1
  ENSP ID: ENSP00000428984

SEQ ID NO: 79822 - protein, 74 aa, Homo sapiens
  Payload ID: 15892
  Gene Symbol: SMIM12
  Gene Name: small integral membrane protein 12
  ENSP ID: ENSP00000429902
MWPVFWTVVRTYAPYVTFPVAFVVGAVGYHLEWFIRGKDPQPVEEEKSISERREDRKLDELLGKDHTQVAGMRL

SEQ ID NO: 79823 - protein, 92 aa, Homo sapiens; identical to SEQ ID NO: 79819
  Payload ID: 15892
  Gene Symbol: SMIM12
  Gene Name: small integral membrane protein 12
  Uniprot ID: Q96EX1
  ENSP ID: ENSP00000430198

SEQ ID NO: 79824 - protein, 92 aa, Homo sapiens; identical to SEQ ID NO: 79819
  Payload ID: 15892
  Gene Symbol: SMIM12
  Gene Name: small integral membrane protein 12
  Uniprot ID: Q96EX1
  ENSP ID: ENSP00000430285

SEQ ID NO: 79825 - protein, 91 aa, Homo sapiens
  Payload ID: 15893
  Gene Symbol: SMIM13
  Gene Name: small integral membrane protein 13
  Uniprot ID: P0DJ93
  ENSP ID: ENSP00000451866
MWHSVGLTLLVFVATLLIVLLLMVCGWYFVWHLFLSKFKFLRELVGDTGSQEGDHEPSGSETEEDTSSSPHRIRSARQRRAPADEGHRPLT

SEQ ID NO: 79826 - protein, 91 aa, Homo sapiens; identical to SEQ ID NO: 79825
  Payload ID: 15893
  Gene Symbol: SMIM13
  Gene Name: small integral membrane protein 13
  Uniprot ID: P0DJ93
  ENSP ID: ENSP00000452219

SEQ ID NO: 79827 - protein, 99 aa, Homo sapiens
  Payload ID: 15894
  Gene Symbol: SMIM14
  Gene Name: small integral membrane protein 14
  Uniprot ID: Q96QK8
  ENSP ID: ENSP00000295958
MAEGGFDPCECVCSHEHAMRRLINLLRQSQSYCTDTECLQELPGPSGDNGISVTMILVAWMVIALILFLLRPPNLRGSSLPGKPTSPHNGQDPPAPPVD

SEQ ID NO: 79828 - protein, 54 aa, Homo sapiens
  Payload ID: 15894
  Gene Symbol: SMIM14
  Gene Name: small integral membrane protein 14
  ENSP ID: ENSP00000421087
MAEGGFDPCECVCSHEHAMRRLINLLRQSQSYCTDTECLQEWTRSTSSSCGLTL

SEQ ID NO: 79829 - protein, 89 aa, Homo sapiens
  Payload ID: 15894
  Gene Symbol: SMIM14
  Gene Name: small integral membrane protein 14
  ENSP ID: ENSP00000422904
MAEGGFDPCECVCSHEHAMRRLINLLRQSQSYCTDTECLQELPGPSGDNGISVTMILVAWMVIALILFLLRPPNLRGSSLPGKPTSPHN

SEQ ID NO: 79830 - protein, 38 aa, Homo sapiens
  Payload ID: 15894
  Gene Symbol: SMIM14
  Gene Name: small integral membrane protein 14
  ENSP ID: ENSP00000425371
MAEGGFDPCECVCSHEHAMRRLINLYRDPLVIMASVLQ

SEQ ID NO: 79831 - protein, 74 aa, Homo sapiens
  Payload ID: 15895
  Gene Symbol: SMIM15
  Gene Name: small integral membrane protein 15
  Uniprot ID: Q7Z3B0
  ENSP ID: ENSP00000339324
MFDIKAWAEYVVEWAAKDPYGFLTTVILALTPLFLASAVLSWKLAKMIEAREKEQKKKQKRQENIAKAKRLKKD

SEQ ID NO: 79832 - protein, 74 aa, Homo sapiens; identical to SEQ ID NO: 79831
  Payload ID: 15895
  Gene Symbol: SMIM15
  Gene Name: small integral membrane protein 15
  Uniprot ID: Q7Z3B0
  ENSP ID: ENSP00000421336

SEQ ID NO: 79833 - protein, 118 aa, Homo sapiens
  Payload ID: 15896
  Gene Symbol: SMIM17
  Gene Name: small integral membrane protein 17
  Uniprot ID: P0DL12
  ENSP ID: ENSP00000471126
MQSLRPEQTRGLLEPERTKTLLPRESRAWEKPPHPACTKDWEAVEVGASSHDSDEKDLSSQETGLSQEWSSVEEDDESEGSQGFVEWSKAPQQTTIVLVVCVLFLFLVLTGMPMMFHI

SEQ ID NO: 79834 - protein, 103 aa, Homo sapiens
  Payload ID: 15896
  Gene Symbol: SMIM17
  Gene Name: small integral membrane protein 17
  ENSP ID: ENSP00000472019
MQSLRPEQTRGLLEPERTKTLLPRESRAWEKPPHPACTKDWEAVEVGASSHDSDEKGLCGVVKSSTTNNHSLGSVRAFFVPGFNGDAYDVSHLTIMVAVVLKV

SEQ ID NO: 79835 - protein, 95 aa, Homo sapiens
  Payload ID: 15897
  Gene Symbol: SMIM18
  Gene Name: small integral membrane protein 18
  Uniprot ID: P0DKX4
  ENSP ID: ENSP00000428858
MASSHWNETTTSVYQYLGFQVQKIYPFHDNWNTACFVILLLFIFTVVSLVVLAFLYEVLDCCCCVKNKTVKDLKSEPNPLRSMMDNIRKRETEVV

SEQ ID NO: 79836 - protein, 38 aa, Homo sapiens
  Payload ID: 15897
  Gene Symbol: SMIM18
  Gene Name: small integral membrane protein 18
  ENSP ID: ENSP00000486237
NPFLLKIQKLARRRRLQSPVIEKMNKISESSSTSSEKK

SEQ ID NO: 79837 - protein, 107 aa, Homo sapiens
  Payload ID: 15898
  Gene Symbol: SMIM19
  Gene Name: small integral membrane protein 19
  Uniprot ID: Q96E16
  ENSP ID: ENSP00000390750
MAGGYGVMGDDGSIDYTVHEAWNEATNVYLIVILVSFGLFMYAKRNKRRIMRIFSVPPTEETLSEPNFYDTISKIRLRQQLEMYSISRKYDYQQPQNQADSVQLSLE

SEQ ID NO: 79838 - protein, 107 aa, Homo sapiens; identical to SEQ ID NO: 79837
  Payload ID: 15898
  Gene Symbol: SMIM19
  Gene Name: small integral membrane protein 19
  Uniprot ID: Q96E16
  ENSP ID: ENSP00000391549

SEQ ID NO: 79839 - protein, 107 aa, Homo sapiens; identical to SEQ ID NO: 79837
  Payload ID: 15898
  Gene Symbol: SMIM19
  Gene Name: small integral membrane protein 19
  Uniprot ID: Q96E16
  ENSP ID: ENSP00000405694

SEQ ID NO: 79840 - protein, 107 aa, Homo sapiens; identical to SEQ ID NO: 79837
  Payload ID: 15898
  Gene Symbol: SMIM19
  Gene Name: small integral membrane protein 19
  Uniprot ID: Q96E16
  ENSP ID: ENSP00000408997

SEQ ID NO: 79841 - protein, 107 aa, Homo sapiens; identical to SEQ ID NO: 79837
  Payload ID: 15898
  Gene Symbol: SMIM19
  Gene Name: small integral membrane protein 19
  Uniprot ID: Q96E16
  ENSP ID: ENSP00000429586

SEQ ID NO: 79842 - protein, 36 aa, Homo sapiens
  Payload ID: 15898
  Gene Symbol: SMIM19
  Gene Name: small integral membrane protein 19
  ENSP ID: ENSP00000430387
MRIFSVPPTEETLSEPNFYDTISKIRLRQQLEMYSI

SEQ ID NO: 79843 - protein, 86 aa, Homo sapiens
  Payload ID: 15898
  Gene Symbol: SMIM19
  Gene Name: small integral membrane protein 19
  ENSP ID: ENSP00000430708
MAGGYGVMGDDGSIDYTVHEAWNEATNVYLIVILVSFGLFMYAKRIFGFWRIEENHNGGTSLCCVKWMCSATFLTASYFLVKERIL

SEQ ID NO: 79844 - protein, 85 aa, Homo sapiens
  Payload ID: 15899
  Gene Symbol: SMIM2
  Gene Name: small integral membrane protein 2
  Uniprot ID: Q9BVW6
  ENSP ID: ENSP00000383270
MEAGERIDASQLPHRVLETRGHAISILFGFWTSFICDTYIVLAWISKIKGSPDVSASSDEPYARIQQSRRQCHAEEDQSQVPEAG

SEQ ID NO: 79845 - protein, 85 aa, Homo sapiens; identical to SEQ ID NO: 79844
  Payload ID: 15899
  Gene Symbol: SMIM2
  Gene Name: small integral membrane protein 2
  Uniprot ID: Q9BVW6
  ENSP ID: ENSP00000483761

SEQ ID NO: 79846 - protein, 67 aa, Homo sapiens
  Payload ID: 15900
  Gene Symbol: SMIM20
  Gene Name: small integral membrane protein 20
  Uniprot ID: Q8N5G0
  ENSP ID: ENSP00000427407
MSRNLRTALIFGGFISLIGAAFYPIYFRPLMRLEEYKKEQAINRAGIVQEDVQPPGLKVWSDPFGRK

SEQ ID NO: 79847 - protein, 48 aa, Homo sapiens
  Payload ID: 15900
  Gene Symbol: SMIM20
  Gene Name: small integral membrane protein 20
  ENSP ID: ENSP00000429820
MSRNLRTALIFGGFISLIGAAFYPIYFRPLMRLEEYRLKVWSDPFGRK

SEQ ID NO: 79848 - protein, 168 aa, Homo sapiens
  Payload ID: 15900
  Gene Symbol: SMIM20
  Gene Name: small integral membrane protein 20
  Uniprot ID: Q8N5G0
  ENSP ID: ENSP00000483831
MVKEVWRVLREEPGRRKESRQNRARGNRVQQNSSNLNPTPAPGPHSTESRGRRRAGSEAPPRPGSESLSTSSERGHGPAVGNLVSESAGRSAGQGSPGPDAMSRNLRTALIFGGFISLIGAAFYPIYFRPLMRLEEYKKEQAINRAGIVQEDVQPPGLKVWSDPFGRK

SEQ ID NO: 79849 - protein, 77 aa, Homo sapiens
  Payload ID: 15901
  Gene Symbol: SMIM21
  Gene Name: small integral membrane protein 21
  ENSP ID: ENSP00000372083
MDQYVSTAPPRFPIAQLGTFKQDSAGMGRIFKGNLLQKKALTTLSTFEVIQEHSRSRINDTTFLSHGLHTMDFPCSR

SEQ ID NO: 79850 - protein, 101 aa, Homo sapiens
  Payload ID: 15901
  Gene Symbol: SMIM21
  Gene Name: small integral membrane protein 21
  Uniprot ID: Q3B7S5
  ENSP ID: ENSP00000462106
MDQYVSTAPPRFPIAQLGTFKQDSAGMGRIFKGNLLQKKALTTFENEHHIRFFTLLVLFHVMVLLRNHSRIQGVSEDWKRANSIFRNFLRLKSSRNTAEAE

SEQ ID NO: 79851 - protein, 87 aa, Homo sapiens
  Payload ID: 15901
  Gene Symbol: SMIM21
  Gene Name: small integral membrane protein 21
  ENSP ID: ENSP00000462572
MDQYVSTAPPRFPIAQLGTFKQDSAGMGRIFKGNLLQKKALTTFENEHHIRFFTLLVLFHVMVLLRNHSRIQGVSEDWKRANSIFRK

SEQ ID NO: 79852 - protein, 83 aa, Homo sapiens
  Payload ID: 15902
  Gene Symbol: SMIM22
  Gene Name: small integral membrane protein 22
  Uniprot ID: K7EJ46
  ENSP ID: ENSP00000464737
MAVSTEELEATVQEVLGRLKSHQFFQSTWDTVAFIVFLTFMGTVLLLLLLVVAHCCCCSSPGPRRESPRKERPKGVDNLALEP

SEQ ID NO: 79853 - protein, 88 aa, Homo sapiens
  Payload ID: 15902
  Gene Symbol: SMIM22
  Gene Name: small integral membrane protein 22
  Uniprot ID: K7EJ46
  ENSP ID: ENSP00000464748
MAVSTEELEATVQEVLGRLKSHQFFQSTWDTVAFIVFLTFMGTVLLLLLLVVAHCCCCSSPGPRRESPRKVSPWKERPKGVDNLALEP

SEQ ID NO: 79854 - protein, 135 aa, Homo sapiens
  Payload ID: 15902
  Gene Symbol: SMIM22
  Gene Name: small integral membrane protein 22
  Uniprot ID: K7EJ46
  ENSP ID: ENSP00000465021
MAVSTEELEATVQEVLGRLKSHQFFQSTWDTVAFIVFLTFMGTVLLLLLLVVAHCCCCSSPGPRRESPRKVSPWKVSPAGLWDLHGTVLGVEAEGEGSGGKGAHPPREQRANLLGPAVLLVQERPKGVDNLALEP

SEQ ID NO: 79855 - protein, 88 aa, Homo sapiens; identical to SEQ ID NO: 79853
  Payload ID: 15902
  Gene Symbol: SMIM22
  Gene Name: small integral membrane protein 22
  Uniprot ID: K7EJ46
  ENSP ID: ENSP00000465037

SEQ ID NO: 79856 - protein, 83 aa, Homo sapiens; identical to SEQ ID NO: 79852
  Payload ID: 15902
  Gene Symbol: SMIM22
  Gene Name: small integral membrane protein 22
  Uniprot ID: K7EJ46
  ENSP ID: ENSP00000465660

SEQ ID NO: 79857 - protein, 83 aa, Homo sapiens; identical to SEQ ID NO: 79852
  Payload ID: 15902
  Gene Symbol: SMIM22
  Gene Name: small integral membrane protein 22
  Uniprot ID: K7EJ46
  ENSP ID: ENSP00000467010

SEQ ID NO: 79858 - protein, 88 aa, Homo sapiens; identical to SEQ ID NO: 79853
  Payload ID: 15902
  Gene Symbol: SMIM22
  Gene Name: small integral membrane protein 22
  Uniprot ID: K7EJ46
  ENSP ID: ENSP00000468237

SEQ ID NO: 79859 - protein, 88 aa, Homo sapiens; identical to SEQ ID NO: 79853
  Payload ID: 15902
  Gene Symbol: SMIM22
  Gene Name: small integral membrane protein 22
  Uniprot ID: K7EJ46
  ENSP ID: ENSP00000481592

SEQ ID NO: 79860 - protein, 135 aa, Homo sapiens; identical to SEQ ID NO: 79854
  Payload ID: 15902
  Gene Symbol: SMIM22
  Gene Name: small integral membrane protein 22
  Uniprot ID: K7EJ46
  ENSP ID: ENSP00000482700

SEQ ID NO: 79861 - protein, 156 aa, Homo sapiens
  Payload ID: 15903
  Gene Symbol: SMIM23
  Gene Name: small integral membrane protein 23
  Uniprot ID: A6NLE4
  ENSP ID: ENSP00000331214
MATQQVDSRRQVAAEQVAAQLLERRRGSHCDDEKQTLLALLILVLYLSTEIWGSSWEVSERIRECNYYQNLAVPQGLEYQTNEPSEEPIKTIRNWLKEKLHVFSEKLEEEVQQLEQLAWDLELWLDALLGEPHQEEHCSTYKSHLHLEHEVSIRDH

SEQ ID NO: 79862 - protein, 122 aa, Homo sapiens
  Payload ID: 15903
  Gene Symbol: SMIM23
  Gene Name: small integral membrane protein 23
  ENSP ID: ENSP00000430818
  MOD_RES (1)..(1): Any amino acid
XVDSRRQVAAEQVAAQLLERRRGSHCDDEKQTLLALLILVLYLSTEIWGSSWEVSERIRECNYYQNLAVPQGLEYQTNEPSEEPIKTIRNWLKEKLHVFSEKLEEEVQQLEQLAWDLELWLD

SEQ ID NO: 79863 - protein, 130 aa, Homo sapiens
  Payload ID: 15904
  Gene Symbol: SMIM24
  Gene Name: small integral membrane protein 24
  Uniprot ID: O75264
  ENSP ID: ENSP00000215531
METLGALLVLEFLLLSPVEAQQATEHRLKPWLVGLAAVVGFLFIVYLVLLANRLWCSKARAEDEEETTFRMESNLYQDQSEDKREKKEAKEKEEKRKKEKKTAKEGESNLGLDLEEKEPGDHERAKSTVM

SEQ ID NO: 79864 - protein, 60 aa, Homo sapiens
  Payload ID: 15904
  Gene Symbol: SMIM24
  Gene Name: small integral membrane protein 24
  ENSP ID: ENSP00000465692
MESNLYQDQSEDKREKKEAKEKEEKRKKEKKTAKEGESNLGLDLEEKEPGDHERAKSTVM

SEQ ID NO: 79865 - protein, 60 aa, Homo sapiens; identical to SEQ ID NO: 79864
  Payload ID: 15904
  Gene Symbol: SMIM24
  Gene Name: small integral membrane protein 24
  ENSP ID: ENSP00000467484

SEQ ID NO: 79866 - protein, 60 aa, Homo sapiens
  Payload ID: 15905
  Gene Symbol: SMIM3
  Gene Name: small integral membrane protein 3
  Uniprot ID: Q9BZL3
  ENSP ID: ENSP00000436897
MDAVSQVPMEVVLPKHILDIWVIVLIILATIVIMTSLLLCPATAVIIYRMRTHPILSGAV

SEQ ID NO: 79867 - protein, 37 aa, Homo sapiens
  Payload ID: 15906
  Gene Symbol: SMIM4
  Gene Name: small integral membrane protein 4
  ENSP ID: ENSP00000305661
MFTRAQMMSTVEKPQKDSIREGWKMNETELQQSIKSI

SEQ ID NO: 79868 - protein, 70 aa, Homo sapiens
  Payload ID: 15906
  Gene Symbol: SMIM4
  Gene Name: small integral membrane protein 4
  Uniprot ID: Q8WVI0
  ENSP ID: ENSP00000417806
MFTRAQVRRILQRVPGKQRFGIYRFLPFFFVLGGTMEWIMIKVRVGQETFYDVYRRKASERQYQRRLEDE

SEQ ID NO: 79869 - protein, 59 aa, Homo sapiens
  Payload ID: 15906
  Gene Symbol: SMIM4
  Gene Name: small integral membrane protein 4
  ENSP ID: ENSP00000418000
MFTRAQVRRILQRVPGKQRFGIYRFLPFFFVLGGTMEWIMIKVRVGQETFYSTSSSLIQ

SEQ ID NO: 79870 - protein, 77 aa, Homo sapiens
  Payload ID: 15907
  Gene Symbol: SMIM5
  Gene Name: small integral membrane protein 5
  Uniprot ID: Q71RC9
  ENSP ID: ENSP00000364363
MAATDFVQEMRAVGERLLLKLQRLPQAEPVEIVAFSVIILFTATVLLLLLIACSCCCTHCCCPERRGRKVQVQPTPP

SEQ ID NO: 79871 - protein, 77 aa, Homo sapiens; identical to SEQ ID NO: 79870
  Payload ID: 15907
  Gene Symbol: SMIM5
  Gene Name: small integral membrane protein 5
  Uniprot ID: Q71RC9
  ENSP ID: ENSP00000477017

SEQ ID NO: 79872 - protein, 62 aa, Homo sapiens
  Payload ID: 15908
  Gene Symbol: SMIM6
  Gene Name: small integral membrane protein 6
  Uniprot ID: P0DI80
  ENSP ID: ENSP00000450581
MDQLVFKETIWNDAFWQNPWDQGGLAVIILFITAVLLLILFAIVFGLLTSTENTQCEAGEEE

SEQ ID NO: 79873 - protein, 62 aa, Homo sapiens; identical to SEQ ID NO: 79872
  Payload ID: 15908
  Gene Symbol: SMIM6
  Gene Name: small integral membrane protein 6
  Uniprot ID: P0DI80
  ENSP ID: ENSP00000463361

SEQ ID NO: 79874 - protein, 103 aa, Homo sapiens
  Payload ID: 15909
  Gene Symbol: SMIM7
  Gene Name: small integral membrane protein 7
  ENSP ID: ENSP00000351569
MIGDILLFGTLLMNAGAVLNFKLKKKDTQGFGEESREPSTGDNIREFLLSLRYFRIFIALWNIFMMFCMIVLRKLKQIAFPSSTGAITLILLLTNCEICCKWI

SEQ ID NO: 79875 - protein, 75 aa, Homo sapiens
  Payload ID: 15909
  Gene Symbol: SMIM7
  Gene Name: small integral membrane protein 7
  Uniprot ID: Q9BQ49
  ENSP ID: ENSP00000417147
MIGDILLFGTLLMNAGAVLNFKLKKKDTQGFGEESREPSTGDNIREFLLSLRYFRIFIALWNIFMMFCMIVLFGS

SEQ ID NO: 79876 - protein, 49 aa, Homo sapiens; identical to SEQ ID NO: 20350
  Payload ID: 15909
  Gene Symbol: SMIM7
  Gene Name: small integral membrane protein 7
  ENSP ID: ENSP00000432842

SEQ ID NO: 79877 - protein, 75 aa, Homo sapiens; identical to SEQ ID NO: 79875
  Payload ID: 15909
  Gene Symbol: SMIM7
  Gene Name: small integral membrane protein 7
  Uniprot ID: Q9BQ49
  ENSP ID: ENSP00000433833

SEQ ID NO: 79878 - protein, 56 aa, Homo sapiens
  Payload ID: 15909
  Gene Symbol: SMIM7
  Gene Name: small integral membrane protein 7
  ENSP ID: ENSP00000435127
MIGDILLFGTLLMNAGAVLNFKLKKKDTQGFGEESREPSTGWSAVVRSWLTADSTS

SEQ ID NO: 79879 - protein, 47 aa, Homo sapiens
  Payload ID: 15909
  Gene Symbol: SMIM7
  Gene Name: small integral membrane protein 7
  ENSP ID: ENSP00000436448
MIGDILLFGTLLMNAGAVLNFKLKKKDTQGFGEESREPSTGLERESD

SEQ ID NO: 79880 - protein, 103 aa, Homo sapiens; identical to SEQ ID NO: 79874
  Payload ID: 15909
  Gene Symbol: SMIM7
  Gene Name: small integral membrane protein 7
  ENSP ID: ENSP00000437332

SEQ ID NO: 79881 - protein, 75 aa, Homo sapiens; identical to SEQ ID NO: 79875
  Payload ID: 15909
  Gene Symbol: SMIM7
  Gene Name: small integral membrane protein 7
  Uniprot ID: Q9BQ49
  ENSP ID: ENSP00000469440

SEQ ID NO: 79882 - protein, 75 aa, Homo sapiens; identical to SEQ ID NO: 79875
  Payload ID: 15909
  Gene Symbol: SMIM7
  Gene Name: small integral membrane protein 7
  Uniprot ID: Q9BQ49
  ENSP ID: ENSP00000469918

SEQ ID NO: 79883 - protein, 75 aa, Homo sapiens; identical to SEQ ID NO: 79875
  Payload ID: 15909
  Gene Symbol: SMIM7
  Gene Name: small integral membrane protein 7
  Uniprot ID: Q9BQ49
  ENSP ID: ENSP00000469962

SEQ ID NO: 79884 - protein, 49 aa, Homo sapiens; identical to SEQ ID NO: 20350
  Payload ID: 15909
  Gene Symbol: SMIM7
  Gene Name: small integral membrane protein 7
  ENSP ID: ENSP00000470601

SEQ ID NO: 79885 - protein, 49 aa, Homo sapiens; identical to SEQ ID NO: 20350
  Payload ID: 15909
  Gene Symbol: SMIM7
  Gene Name: small integral membrane protein 7
  ENSP ID: ENSP00000470899

SEQ ID NO: 79886 - protein, 63 aa, Homo sapiens; identical to SEQ ID NO: 20353
  Payload ID: 15909
  Gene Symbol: SMIM7
  Gene Name: small integral membrane protein 7
  ENSP ID: ENSP00000471293

SEQ ID NO: 79887 - protein, 75 aa, Homo sapiens; identical to SEQ ID NO: 79875
  Payload ID: 15909
  Gene Symbol: SMIM7
  Gene Name: small integral membrane protein 7
  Uniprot ID: Q9BQ49
  ENSP ID: ENSP00000471355

SEQ ID NO: 79888 - protein, 63 aa, Homo sapiens; identical to SEQ ID NO: 20353
  Payload ID: 15909
  Gene Symbol: SMIM7
  Gene Name: small integral membrane protein 7
  ENSP ID: ENSP00000471391

SEQ ID NO: 79889 - protein, 49 aa, Homo sapiens; identical to SEQ ID NO: 20350
  Payload ID: 15909
  Gene Symbol: SMIM7
  Gene Name: small integral membrane protein 7
  ENSP ID: ENSP00000472562

SEQ ID NO: 79890 - protein, 103 aa, Homo sapiens; identical to SEQ ID NO: 79874
  Payload ID: 15909
  Gene Symbol: SMIM7
  Gene Name: small integral membrane protein 7
  ENSP ID: ENSP00000486146

SEQ ID NO: 79891 - protein, 97 aa, Homo sapiens
  Payload ID: 15910
  Gene Symbol: SMIM8
  Gene Name: small integral membrane protein 8
  Uniprot ID: Q96KF7
  ENSP ID: ENSP00000229570
MSSAPEPPTFKKEPPKEKEFQSPGLRGVRTTTLFRAVNPELFIKPNKPVMAFGLVTLSLCVAYIGYLHAIQENKKDLYEAIDSEGHSYMRRKTSKWD

SEQ ID NO: 79892 - protein, 97 aa, Homo sapiens; identical to SEQ ID NO: 79891
  Payload ID: 15910
  Gene Symbol: SMIM8
  Gene Name: small integral membrane protein 8
  Uniprot ID: Q96KF7
  ENSP ID: ENSP00000376603

SEQ ID NO: 79893 - protein, 76 aa, Homo sapiens
  Payload ID: 15910
  Gene Symbol: SMIM8
  Gene Name: small integral membrane protein 8
  ENSP ID: ENSP00000476709
MSSAPEPPTFKKEPPKEKEFQSPGLRGVRTTTLFRAVNPELFIKPNVSYSLKHQHFEVSFMEVGTEMGVKMSVNKA

SEQ ID NO: 79894 - protein, 58 aa, Homo sapiens
  Payload ID: 15910
  Gene Symbol: SMIM8
  Gene Name: small integral membrane protein 8
  ENSP ID: ENSP00000476881
MSSAPEPPTFKKEPPKEKEFQSPGLRGVRTTTLFRAVNPELFIKPELSILPTFWTLRP

SEQ ID NO: 79895 - protein, 97 aa, Homo sapiens; identical to SEQ ID NO: 79891
  Payload ID: 15910
  Gene Symbol: SMIM8
  Gene Name: small integral membrane protein 8
  Uniprot ID: Q96KF7
  ENSP ID: ENSP00000476945

SEQ ID NO: 79896 - protein, 97 aa, Homo sapiens; identical to SEQ ID NO: 79891
  Payload ID: 15910
  Gene Symbol: SMIM8
  Gene Name: small integral membrane protein 8
  Uniprot ID: Q96KF7
  ENSP ID: ENSP00000477133

SEQ ID NO: 79897 - protein, 99 aa, Homo sapiens
  Payload ID: 15911
  Gene Symbol: SMIM9
  Gene Name: small integral membrane protein 9
  Uniprot ID: A6NGZ8
  ENSP ID: ENSP00000358542
MEPQKLLIIGFLLCSLTCLLLETVASSPLPLSALGIQEKTGSKPRSGGNHRSWLNNFRDYLWQLIKSALPPAAIVAFLLTSALMGILCCFTILVVDPVH

SEQ ID NO: 79898 - protein, 107 aa, Homo sapiens
  Payload ID: 15912
  Gene Symbol: SMLR1
  Gene Name: small leucine-rich protein 1
  Uniprot ID: H3BR10
  ENSP ID: ENSP00000456026
MLSKGRSPRRKQVQTQRKAALVLSVTPMVPVGSVWLAMSSVLSAFMRELPGWFLFFGVFLPVTLLLLLLIAYFRIKLIEVNEELSQNCDRQHNPKDGSSLYQRMKWT

SEQ ID NO: 79899 - protein, 65 aa, Homo sapiens
  Payload ID: 15913
  Gene Symbol: SMKR1
  Gene Name: small lysine-rich protein 1
  Uniprot ID: H3BMG3
  ENSP ID: ENSP00000454370
MPAKGKKGKGQGKSHGKKQKKPEVDILSPAAMLNLYYIAHNVADCLHLRGFHWPGAPKGKKGRSK

SEQ ID NO: 79900 - protein, 88 aa, Homo sapiens
  Payload ID: 15914
  Gene Symbol: SMPX
  Gene Name: small muscle protein, X-linked
  Uniprot ID: Q9UHP9
  ENSP ID: ENSP00000368808
MNMSKQPVSNVRAIQANINIPMGAFRPGAGQPPRRKECTPEVEEGVPPTSDEEKKPIPGAKKLPGPAVNLSEIQNIKSELKYVPKAEQ

SEQ ID NO: 79901 - protein, 2136 aa, Homo sapiens
  Payload ID: 15915
  Gene Symbol: SNRNP200
  Gene Name: small nuclear ribonucleoprotein 200kDa (U5)
  Uniprot ID: O75643
  ENSP ID: ENSP00000317123
MADVTARSLQYEYKANSNLVLQADRSLIDRTRRDEPTGEVLSLVGKLEGTRMGDKAQRTKPQMQEERRAKRRKRDEDRHDINKMKGYTLLSEGIDEMVGIIYKPKTKETRETYEVLLSFIQAALGDQPRDILCGAADEVLAVLKNEKLRDKERRKEIDLLLGQTDDTRYHVLVNLGKKITDYGGDKEIQNMDDNIDETYGVNVQFESDEEEGDEDVYGEVREEASDDDMEGDEAVVRCTLSANLVASGELMSSKKKDLHPRDIDAFWLQRQLSRFYDDAIVSQKKADEVLEILKTASDDRECENQLVLLLGFNTFDFIKVLRQHRMMILYCTLLASAQSEAEKERIMGKMEADPELSKFLYQLHETEKEDLIREERSRRERVRQSRMDTDLETMDLDQGGEALAPRQVLDLEDLVFTQGSHFMANKRCQLPDGSFRRQRKGYEEVHVPALKPKPFGSEEQLLPVEKLPKYAQAGFEGFKTLNRIQSKLYRAALETDENLLLCAPTGAGKTNVALMCMLREIGKHINMDGTINVDDFKIIYIAPMRSLVQEMVGSFGKRLATYGITVAELTGDHQLCKEEISATQIIVCTPEKWDIITRKGGERTYTQLVRLIILDEIHLLHDDRGPVLEALVARAIRNIEMTQEDVRLIGLSATLPNYEDVATFLRVDPAKGLFYFDNSFRPVPLEQTYVGITEKKAIKRFQIMNEIVYEKIMEHAGKNQVLVFVHSRKETGKTARAIRDMCLEKDTLGLFLREGSASTEVLRTEAEQCKNLELKDLLPYGFAIHHAGMTRVDRTLVEDLFADKHIQVLVSTATLAWGVNLPAHTVIIKGTQVYSPEKGRWTELGALDILQMLGRAGRPQYDTKGEGILITSHGELQYYLSLLNQQLPIESQMVSKLPDMLNAEIVLGNVQNAKDAVNWLGYAYLYIRMLRSPTLYGISHDDLKGDPLLDQRRLDLVHTAALMLDKNNLVKYDKKTGNFQVTELGRIASHYYITNDTVQTYNQLLKPTLSEIELFRVFSLSSEFKNITVREEEKLELQKLLERVPIPVKESIEEPSAKINVLLQAFISQLKLEGFALMADMVYVTQSAGRLMRAIFEIVLNRGWAQLTDKTLNLCKMIDKRMWQSMCPLRQFRKLPEEVVKKIEKKNFPFERLYDLNHNEIGELIRMPKMGKTIHKYVHLFPKLELSVHLQPITRSTLKVELTITPDFQWDEKVHGSSEAFWILVEDVDSEVILHHEYFLLKAKYAQDEHLITFFVPVFEPLPPQYFIRVVSDRWLSCETQLPVSFRHLILPEKYPPPTELLDLQPLPVSALRNSAFESLYQDKFPFFNPIQTQVFNTVYNSDDNVFVGAPTGSGKTICAEFAILRMLLQSSEGRCVYITPMEALAEQVYMDWYEKFQDRLNKKVVLLTGETSTDLKLLGKGNIIISTPEKWDILSRRWKQRKNVQNINLFVVDEVHLIGGENGPVLEVICSRMRYISSQIERPIRIVALSSSLSNAKDVAHWLGCSATSTFNFHPNVRPVPLELHIQGFNISHTQTRLLSMAKPVYHAITKHSPKKPVIVFVPSRKQTRLTAIDILTTCAADIQRQRFLHCTEKDLIPYLEKLSDSTLKETLLNGVGYLHEGLSPMERRLVEQLFSSGAIQVVVASRSLCWGMNVAAHLVIIMDTQYYNGKIHAYVDYPIYDVLQMVGHANRPLQDDEGRCVIMCQGSKKDFFKKFLYEPLPVESHLDHCMHDHFNAEIVTKTIENKQDAVDYLTWTFLYRRMTQNPNYYNLQGISHRHLSDHLSELVEQTLSDLEQSKCISIEDEMDVAPLNLGMIAAYYYINYTTIELFSMSLNAKTKVRGLIEIISNAAEYENIPIRHHEDNLLRQLAQKVPHKLNNPKFNDPHVKTNLLLQAHLSRMQLSAELQSDTEEILSKAIRLIQACVDVLSSNGWLSPALAAMELAQMVTQAMWSKDSYLKQLPHFTSEHIKRCTDKGVESVFDIMEMEDEERNALLQLTDSQIADVARFCNRYPNIELSYEVVDKDSIRSGGPVVVLVQLEREEEVTGPVIAPLFPQKREEGWWVVIGDAKSNSLISIKRLTLQQKAKVKLDFVAPATGAHNYTLYFMSDAYMGCDQEYKFSVDVKEAETDSDSD

SEQ ID NO: 79902 - protein, 595 aa, Homo sapiens
  Payload ID: 15915
  Gene Symbol: SNRNP200
  Gene Name: small nuclear ribonucleoprotein 200kDa (U5)
  ENSP ID: ENSP00000387870
MRYISSQIERPIRIVALSSSLSNAKDVAHWLGCSATSTFNFHPNVRPVPLELHIQGFNISHTQTRLLSMAKPVYHAITKHSPKKPVIVFVPSRKQTRLTAIDILTTCAADIQRQRFLHCTEKDLIPYLEKLSDSTLKETLLNGVGYLHEGLSPMERRLVEQLFSSGAIQVVVASRSLCWGMNVAAHLVIIMDTQYYNGKIHAYVDYPIYDVLQMVGHANRPLQDDEGRCVIMCQGSKKDFFKKFLYEPLPVESHLDHCMHDHFNAEIVTKTIENKQDAVDYLTWTFLYRRMTQNPNYYNLQGISHRHLSDHLSELVEQTLSDLEQSKCISIEDEMDVAPLNLGMIAAYYYINYTTIELFSMSLNAKTKVRGLIEIISNAAEYENIPIRHHEDNLLRQLAQKVPHKLNNPKFNDPHVKTNLLLQAHLSRMQLSAELQSDTEEILSKAIRLIQACVDVLSSNGWLSPALAAMELAQMVTQAMWSKDSYLKQLPHFTSEHIKRCTDKGVESVFDIMEMEDEERNALLQLTDSQIADVARFCNRYPNIELSYEVVDKDSIRSGGPVVVLVQLEREEEVTGPVIAPLFPQFRAGRSGSRL

SEQ ID NO: 79903 - protein, 123 aa, Homo sapiens
  Payload ID: 15916
  Gene Symbol: SNRNP25
  Gene Name: small nuclear ribonucleoprotein 25kDa (U11/U12)
  ENSP ID: ENSP00000293861
MVVQDPLLCDLPIQVTLEEVNSQIALEYGQAMTVRVCKMDGEVMPVVVVQSATVLDLKKAIQRYVQLKQEREGGIQHISWSYVWRTYHLTSAGEKLTEDRKKLRDYGIRNRDEVSFIKKLRQK

SEQ ID NO: 79904 - protein, 132 aa, Homo sapiens
  Payload ID: 15916
  Gene Symbol: SNRNP25
  Gene Name: small nuclear ribonucleoprotein 25kDa (U11/U12)
  Uniprot ID: Q9BV90
  ENSP ID: ENSP00000372482
MDVFQEGLAMVVQDPLLCDLPIQVTLEEVNSQIALEYGQAMTVRVCKMDGEVMPVVVVQSATVLDLKKAIQRYVQLKQEREGGIQHISWSYVWRTYHLTSAGEKLTEDRKKLRDYGIRNRDEVSFIKKLRQK

SEQ ID NO: 79905 - protein, 92 aa, Homo sapiens
  Payload ID: 15916
  Gene Symbol: SNRNP25
  Gene Name: small nuclear ribonucleoprotein 25kDa (U11/U12)
  ENSP ID: ENSP00000380974
MVVQDPLLCDLPIQVTLEEVNSQIALEYGQAMTVRVCKMDGEVMPVVVVQSATVLDLKKAIQRYVQLKQEREGGIQHISCKVCLAKPPQTAL

SEQ ID NO: 79906 - protein, 96 aa, Homo sapiens
  Payload ID: 15916
  Gene Symbol: SNRNP25
  Gene Name: small nuclear ribonucleoprotein 25kDa (U11/U12)
  ENSP ID: ENSP00000391289
MVVQDPLLCDLPIQVTLEEVNSQIALEYGQAMTVRVCKMDGESATVLDLKKAIQRYVQLKQEREGGIQHISWSYVWRTYHLTSAGEKLTEDRKKLR

SEQ ID NO: 79907 - protein, 155 aa, Homo sapiens
  Payload ID: 15917
  Gene Symbol: SNRNP27
  Gene Name: small nuclear ribonucleoprotein 27kDa (U4/U6.U5)
  Uniprot ID: Q8WVK2
  ENSP ID: ENSP00000244227
MGRSRSRSPRRERRRSRSTSRERERRRRERSRSRERDRRRSRSRSPHRRRSRSPRRHRSTSPSPSRLKERRDEEKKETKETKSKERQITEEDLEGKTEEEIEMMKLMGFASFDSTKGKKVDGSVNAYAINVSQKRKYRQYMNRKGGFNRPLDFIA

SEQ ID NO: 79908 - protein, 158 aa, Homo sapiens
  Payload ID: 15917
  Gene Symbol: SNRNP27
  Gene Name: small nuclear ribonucleoprotein 27kDa (U4/U6.U5)
  ENSP ID: ENSP00000386608
MGRSRSRSPRRERRRSRSTSRERERRRRERSRSRERDRRRSRSRSPHRRRSRSPRRHRSTSPSPSRLKERRDEEKKETKETKSKERQITEEDLEGKTEEEIEMMKLMGFASFDSTKAVHESKRWIQQTFGFHCMRIEVLKDDFFSPHLGQRVDFVFCI

SEQ ID NO: 79909 - protein, 155 aa, Homo sapiens; identical to SEQ ID NO: 79907
  Payload ID: 15917
  Gene Symbol: SNRNP27
  Gene Name: small nuclear ribonucleoprotein 27kDa (U4/U6.U5)
  Uniprot ID: Q8WVK2
  ENSP ID: ENSP00000395144

SEQ ID NO: 79910 - protein, 18 aa, Homo sapiens
  Payload ID: 15917
  Gene Symbol: SNRNP27
  Gene Name: small nuclear ribonucleoprotein 27kDa (U4/U6.U5)
  ENSP ID: ENSP00000430449
  MOD_RES (1)..(1): Any amino acid
XQYMNRKGGFNRPLDFIA

SEQ ID NO: 79911 - protein, 246 aa, Homo sapiens
  Payload ID: 15918
  Gene Symbol: SNRNP35
  Gene Name: small nuclear ribonucleoprotein 35kDa (U11/U12)
  Uniprot ID: Q16560
  ENSP ID: ENSP00000340774
MNDWMPIAKEYDPLKAGSIDGTDEDPHDRAVWRAMLARYVPNKGVIGDPLLTLFVARLNLQTKEDKLKEVFSRYGDIRRLRLVRDLVTGFSKGYAFIEYKEERAVIKAYRDADGLVIDQHEIFVDYELERTLKGWIPRRLGGGLGGKKESGQLRFGGRDRPFRKPINLPVVKNDLYREGKRERRERSRSRERHWDSRTRDRDHDRGREKRWQEREPTRVWPDNDWERERDFRDDRIKGREKKERGK

SEQ ID NO: 79912 - protein, 251 aa, Homo sapiens
  Payload ID: 15918
  Gene Symbol: SNRNP35
  Gene Name: small nuclear ribonucleoprotein 35kDa (U11/U12)
  Uniprot ID: Q16560
  ENSP ID: ENSP00000403310
MKPANMNDWMPIAKEYDPLKAGSIDGTDEDPHDRAVWRAMLARYVPNKGVIGDPLLTLFVARLNLQTKEDKLKEVFSRYGDIRRLRLVRDLVTGFSKGYAFIEYKEERAVIKAYRDADGLVIDQHEIFVDYELERTLKGWIPRRLGGGLGGKKESGQLRFGGRDRPFRKPINLPVVKNDLYREGKRERRERSRSRERHWDSRTRDRDHDRGREKRWQEREPTRVWPDNDWERERDFRDDRIKGREKKERGK

SEQ ID NO: 79913 - protein, 246 aa, Homo sapiens; identical to SEQ ID NO: 79911
  Payload ID: 15918
  Gene Symbol: SNRNP35
  Gene Name: small nuclear ribonucleoprotein 35kDa (U11/U12)
  Uniprot ID: Q16560
  ENSP ID: ENSP00000432595

SEQ ID NO: 79914 - protein, 357 aa, Homo sapiens
  Payload ID: 15919
  Gene Symbol: SNRNP40
  Gene Name: small nuclear ribonucleoprotein 40kDa (U5)
  Uniprot ID: Q96DI7
  ENSP ID: ENSP00000263694
MIEQQKRKGPELPLVPVKRQRHELLLGAGSGPGAGQQQATPGALLQAGPPRCSSLQAPIMLLSGHEGEVYCCKFHPNGSTLASAGFDRLILLWNVYGDCDNYATLKGHSGAVMELHYNTDGSMLFSASTDKTVAVWDSETGERVKRLKGHTSFVNSCYPARRGPQLVCTGSDDGTVKLWDIRKKAAIQTFQNTYQVLAVTFNDTSDQIISGGIDNDIKVWDLRQNKLTYTMRGHADSVTGLSLSSEGSYLLSNAMDNTVRVWDVRPFAPKERCVKIFQGNVHNFEKNLLRCSWSPDGSKIAAGSADRFVYVWDTTSRRILYKLPGHAGSINEVAFHPDEPIIISASSDKRLYMGEIQ

SEQ ID NO: 79915 - protein, 127 aa, Homo sapiens
  Payload ID: 15919
  Gene Symbol: SNRNP40
  Gene Name: small nuclear ribonucleoprotein 40kDa (U5)
  ENSP ID: ENSP00000362825
MILISAGCPGGLWPIVVLVGLFIWICFAVRVWDVRPFAPKERCVKIFQGNVHNFEKNLLRCSWSPDGSKIAAGSADRFVYVWDTTSRRILYKLPGHAGSINEVAFHPDEPIIISASSDKRLYMGEIQ

SEQ ID NO: 79916 - protein, 339 aa, Homo sapiens
  Payload ID: 15920
  Gene Symbol: SNRNP48
  Gene Name: small nuclear ribonucleoprotein 48kDa (U11/U12)
  Uniprot ID: Q6IEG0
  ENSP ID: ENSP00000339834
MEGEPPPVEERRRLQEELNEFVESGCRTLEEVTASLGWDLDSLDPGEEEAAEDEVVICPYDSNHHMPKSSLAKHMASCRLRKMGYTKEEEDEMYNPEFFYENVKIPSITLNKDSQFQIIKQARTAVGKDSDCYNQRIYSSLPVEVPLNHKRFVCDLTQADRLALYDFVVEETKKKRSDSQIIENDSDLFVDLAAKINQDNSRKSPKSYLEILAEVRDYKRRRQSYRAKNVHITKKSYTEVIRDVINVHMEELSNHWQEEQEKAEDDAEKNEERRSASVDSRQSGGSYLDAECSRHRRDRSRSPHKRKRNKDKDKNCESRRRKERDGERHHSHKRRKQKI

SEQ ID NO: 79917 - protein, 149 aa, Homo sapiens
  Payload ID: 15920
  Gene Symbol: SNRNP48
  Gene Name: small nuclear ribonucleoprotein 48kDa (U11/U12)
  ENSP ID: ENSP00000489245
MEGEPPPVEERRRLQEELNEFVESGCRTLEEVTASLGWDLDSLDPGEEEAAEDEVVICPYDSNHHMPKSSLAKHMASCRLRKMGYTKEEEDEMYNPEFFYENVKIPSITLNKDSQFQIIKQARTAVGKDSDCYNQIIGEFILHCLLKFL

SEQ ID NO: 79918 - protein, 428 aa, Homo sapiens
  Payload ID: 15921
  Gene Symbol: SNRNP70
  Gene Name: small nuclear ribonucleoprotein 70kDa (U1)
  Uniprot ID: P08621
  ENSP ID: ENSP00000221448
MTQFLPPNLLALFAPRDPIPYLPPLEKLPHEKHHNQPYCGIAPYIREFEDPRDAPPPTRAETREERMERKRREKIERRQQEVETELKMWDPHNDPNAQGDAFKTLFVARVNYDTTESKLRREFEVYGPIKRIHMVYSKRSGKPRGYAFIEYEHERDMHSAYKHADGKKIDGRRVLVDVERGRTVKGWRPRRLGGGLGGTRRGGADVNIRHSGRDDTSRYDERDRDRDRERERRERSRERDKERERRRSRSRDRRRRSRSRDKEERRRSRERSKDKDRDRKRRSSRSRERARRERERKEELRGGGGDMAEPSEAGDAPPDDGPPGELGPDGPDGPEEKGRDRDRERRRSHRSERERRRDRDRDRDRDREHKRGERGSERGRDEARGGGGGQDNGLEGLGNDSRDMYMESEGGDGYLAPENGYLMEAAPE

SEQ ID NO: 79919 - protein, 166 aa, Homo sapiens
  Payload ID: 15921
  Gene Symbol: SNRNP70
  Gene Name: small nuclear ribonucleoprotein 70kDa (U1)
  Uniprot ID: P08621
  ENSP ID: ENSP00000385077
MTQFLPPNLLALFAPRDPIPYLPPLEKLPHEKHHNQPYCGIAPYIREFEDPRDAPPPTRAETREERMERKRREKIERRQQEVETELKMWDPHNDPNAQGDAFKTLFVARVNYDTTESKLRREFEVYGPIKRIHMVYSKRSGKPRGYAFIEYEHERDMHSTTQLACS

SEQ ID NO: 79920 - protein, 33 aa, Homo sapiens
  Payload ID: 15921
  Gene Symbol: SNRNP70
  Gene Name: small nuclear ribonucleoprotein 70kDa (U1)
  ENSP ID: ENSP00000468828
MERKRREKIERRQQEVETELKMWDPHNDPNAQG

SEQ ID NO: 79921 - protein, 166 aa, Homo sapiens; identical to SEQ ID NO: 79919
  Payload ID: 15921
  Gene Symbol: SNRNP70
  Gene Name: small nuclear ribonucleoprotein 70kDa (U1)
  Uniprot ID: P08621
  ENSP ID: ENSP00000468952

SEQ ID NO: 79922 - protein, 94 aa, Homo sapiens
  Payload ID: 15921
  Gene Symbol: SNRNP70
  Gene Name: small nuclear ribonucleoprotein 70kDa (U1)
  ENSP ID: ENSP00000470023
MERKRREKIERRQQEVETELKMWDPHNDPNAQGDAFKTLFVARVNYDTTESKLRREFEVYGPIKRIHMVYSKRSGKPRGYAFIEYEHERDMHST

SEQ ID NO: 79923 - protein, 166 aa, Homo sapiens; identical to SEQ ID NO: 79919
  Payload ID: 15921
  Gene Symbol: SNRNP70
  Gene Name: small nuclear ribonucleoprotein 70kDa (U1)
  Uniprot ID: P08621
  ENSP ID: ENSP00000471006

SEQ ID NO: 79924 - protein, 437 aa, Homo sapiens
  Payload ID: 15921
  Gene Symbol: SNRNP70
  Gene Name: small nuclear ribonucleoprotein 70kDa (U1)
  Uniprot ID: P08621
  ENSP ID: ENSP00000472998
MTQFLPPNLLALFAPRDPIPYLPPLEKLPHEKHHNQPYCGIAPYIREFEDPRDAPPPTRAETREERMERKRREKIERRQQEVETELKMWDPHNDPNAQGDAFKTLFVARVNYDTTESKLRREFEVYGPIKRIHMVYSKRSGKPRGYAFIEYEHERDMHSAYKHADGKKIDGRRVLVDVERGRTVKGWRPRRLGGGLGGTRRGGADVNIRHSGRDDTSRYDERPGPSPLPHRDRDRDRERERRERSRERDKERERRRSRSRDRRRRSRSRDKEERRRSRERSKDKDRDRKRRSSRSRERARRERERKEELRGGGGDMAEPSEAGDAPPDDGPPGELGPDGPDGPEEKGRDRDRERRRSHRSERERRRDRDRDRDRDREHKRGERGSERGRDEARGGGGGQDNGLEGLGNDSRDMYMESEGGDGYLAPENGYLMEAAPE

SEQ ID NO: 79925 - protein, 119 aa, Homo sapiens
  Payload ID: 15922
  Gene Symbol: SNRPD1
  Gene Name: small nuclear ribonucleoprotein D1 polypeptide 16kDa
  Uniprot ID: P62314
  ENSP ID: ENSP00000300413
MKLVRFLMKLSHETVTIELKNGTQVHGTITGVDVSMNTHLKAVKMTLKNREPVQLETLSIRGNNIRYFILPDSLPLDTLLVDVEPKVKSKKREAVAGRGRGRGRGRGRGRGRGRGGPRR

SEQ ID NO: 79926 - protein, 75 aa, Homo sapiens
  Payload ID: 15922
  Gene Symbol: SNRPD1
  Gene Name: small nuclear ribonucleoprotein D1 polypeptide 16kDa
  ENSP ID: ENSP00000463568
MTLKNREPVQLETLSIRGNNIRYFILPDSLPLDTLLVDVEPKVKSKKREAVAGRGRGRGRGRGRGRGRGRGGPRR

SEQ ID NO: 79927 - protein, 44 aa, Homo sapiens
  Payload ID: 15922
  Gene Symbol: SNRPD1
  Gene Name: small nuclear ribonucleoprotein D1 polypeptide 16kDa
  ENSP ID: ENSP00000463676
MKLVRFLMKLSHETVTIELKNGTQVHGTITVYLWIHYLWMLNLR

SEQ ID NO: 79928 - protein, 118 aa, Homo sapiens
  Payload ID: 15923
  Gene Symbol: SNRPD2
  Gene Name: small nuclear ribonucleoprotein D2 polypeptide 16.5kDa
  Uniprot ID: P62316
  ENSP ID: ENSP00000342374
MSLLNKPKSEMTPEELQKREEEEFNTGPLSVLTQSVKNNTQVLINCRNNKKLLGRVKAFDRHCNMVLENVKEMWTEVPKSGKGKKKSKPVNKDRYISKMFLRGDSVIVVLRNPLIAGK

SEQ ID NO: 79929 - protein, 108 aa, Homo sapiens
  Payload ID: 15923
  Gene Symbol: SNRPD2
  Gene Name: small nuclear ribonucleoprotein D2 polypeptide 16.5kDa
  Uniprot ID: P62316
  ENSP ID: ENSP00000375798
MTPEELQKREEEEFNTGPLSVLTQSVKNNTQVLINCRNNKKLLGRVKAFDRHCNMVLENVKEMWTEVPKSGKGKKKSKPVNKDRYISKMFLRGDSVIVVLRNPLIAGK

SEQ ID NO: 79930 - protein, 54 aa, Homo sapiens
  Payload ID: 15923
  Gene Symbol: SNRPD2
  Gene Name: small nuclear ribonucleoprotein D2 polypeptide 16.5kDa
  ENSP ID: ENSP00000465101
MVLENVKEMWTEVPKSGKGKKKSKPVNKDRYISKMFLRGDSVIVVLRNPLIAGK

SEQ ID NO: 79931 - protein, 118 aa, Homo sapiens; identical to SEQ ID NO: 79928
  Payload ID: 15923
  Gene Symbol: SNRPD2
  Gene Name: small nuclear ribonucleoprotein D2 polypeptide 16.5kDa
  Uniprot ID: P62316
  ENSP ID: ENSP00000465216

SEQ ID NO: 79932 - protein, 108 aa, Homo sapiens; identical to SEQ ID NO: 79929
  Payload ID: 15923
  Gene Symbol: SNRPD2
  Gene Name: small nuclear ribonucleoprotein D2 polypeptide 16.5kDa
  Uniprot ID: P62316
  ENSP ID: ENSP00000465952

SEQ ID NO: 79933 - protein, 108 aa, Homo sapiens; identical to SEQ ID NO: 79929
  Payload ID: 15923
  Gene Symbol: SNRPD2
  Gene Name: small nuclear ribonucleoprotein D2 polypeptide 16.5kDa
  Uniprot ID: P62316
  ENSP ID: ENSP00000466152

SEQ ID NO: 79934 - protein, 78 aa, Homo sapiens
  Payload ID: 15923
  Gene Symbol: SNRPD2
  Gene Name: small nuclear ribonucleoprotein D2 polypeptide 16.5kDa
  ENSP ID: ENSP00000468247
MSLLNKPKSEMTPEELQKREEEEFNTGPLSVLTQSVKNNTQVLINCRNNKKLLGRVKAFDSASPPCSPPGTATWCWRT

SEQ ID NO: 79935 - protein, 126 aa, Homo sapiens
  Payload ID: 15924
  Gene Symbol: SNRPD3
  Gene Name: small nuclear ribonucleoprotein D3 polypeptide 18kDa
  Uniprot ID: P62318
  ENSP ID: ENSP00000215829
MSIGVPIKVLHEAEGHIVTCETNTGEVYRGKLIEAEDNMNCQMSNITVTYRDGRVAQLEQVYIRGSKIRFLILPDMLKNAPMLKSMKNKNQGSGAGRGKAAILKAQVAARGRGRGMGRGNIFQKRR

SEQ ID NO: 79936 - protein, 120 aa, Homo sapiens
  Payload ID: 15924
  Gene Symbol: SNRPD3
  Gene Name: small nuclear ribonucleoprotein D3 polypeptide 18kDa
  Uniprot ID: P62318
  ENSP ID: ENSP00000385266
MSIGVPIKVLHEAEGHIVTCETNTGEVYRGKLIEAEDNMNCQMSNITVTYRDGRVAQLEQVYIRGSKIRFLILPDMLKNAPMLKSMKNKNQGSGAGRGKAAILKAQGYLSSLEWVLVHIC

SEQ ID NO: 79937 - protein, 126 aa, Homo sapiens; identical to SEQ ID NO: 79935
  Payload ID: 15924
  Gene Symbol: SNRPD3
  Gene Name: small nuclear ribonucleoprotein D3 polypeptide 18kDa
  Uniprot ID: P62318
  ENSP ID: ENSP00000456090

SEQ ID NO: 79938 - protein, 62 aa, Homo sapiens
  Payload ID: 15924
  Gene Symbol: SNRPD3
  Gene Name: small nuclear ribonucleoprotein D3 polypeptide 18kDa
  ENSP ID: ENSP00000456969
MSIGVPIKVLHEAEGHIVTCETNTGEVYRGKLIEAEDNMNCQMSNITVTYRDGRVAQLEQVI

SEQ ID NO: 79939 - protein, 282 aa, Homo sapiens
  Payload ID: 15925
  Gene Symbol: SNRPA
  Gene Name: small nuclear ribonucleoprotein polypeptide A
  Uniprot ID: P09012
  ENSP ID: ENSP00000243563
MAVPETRPNHTIYINNLNEKIKKDELKKSLYAIFSQFGQILDILVSRSLKMRGQAFVIFKEVSSATNALRSMQGFPFYDKPMRIQYAKTDSDIIAKMKGTFVERDRKREKRKPKSQETPATKKAVQGGGATPVVGAVQGPVPGMPPMTQAPRIMHHMPGQPPYMPPPGMIPPPGLAPGQIPPGAMPPQQLMPGQMPPAQPLSENPPNHILFLTNLPEETNELMLSMLFNQFPGFKEVRLVPGRHDIAFVEFDNEVQAGAARDALQGFKITQNNAMKISFAKK

SEQ ID NO: 79940 - protein, 128 aa, Homo sapiens
  Payload ID: 15925
  Gene Symbol: SNRPA
  Gene Name: small nuclear ribonucleoprotein polypeptide A
  ENSP ID: ENSP00000469224
MAVPETRPNHTIYINNLNEKIKKDELKKSLYAIFSQFGQILDILVSRSLKMRGQAFVIFKEVSSATNALRSMQGFPFYDKPMYAKTDSDIIAKMKGTFVERDRKREKRKPKSQETPATKKAVQGGGAT

SEQ ID NO: 79941 - protein, 184 aa, Homo sapiens
  Payload ID: 15925
  Gene Symbol: SNRPA
  Gene Name: small nuclear ribonucleoprotein polypeptide A
  ENSP ID: ENSP00000470534
MRGQAFVIFKEVSSATNALRSMQGFPFYDKPMRIQYAKTDSDIIAKMKGTFVERDRKREKRKPKSQETPATKKAVQGGGATPVVGAVQGPVPGMPPMTQAPRIMHHMPGQPPYMPPPGMIPPPGLAPGQIPPGAMPPQQLMPGQMPPAQPLSENPPNHILFLTNLPEETNELMLSMLFNQFPGF

SEQ ID NO: 79942 - protein, 87 aa, Homo sapiens
  Payload ID: 15925
  Gene Symbol: SNRPA
  Gene Name: small nuclear ribonucleoprotein polypeptide A
  ENSP ID: ENSP00000471230
MAVPETRPNHTIYINNLNEKIKKDELKKSLYAIFSQFGQILDILVSRSLKMRGQAFVIFKEVSSATNALRSMQGFPFYDKPMWCHLS

SEQ ID NO: 79943 - protein, 142 aa, Homo sapiens
  Payload ID: 15925
  Gene Symbol: SNRPA
  Gene Name: small nuclear ribonucleoprotein polypeptide A
  ENSP ID: ENSP00000472258
MAVPETRPNHTIYINNLNEKIKKDELKKSLYAIFSQFGQILDILVSRSLKMRGQAFVIFKEVSSATNALRSMQGFPFYDKPMRIQYAKTDSDIIAKMKGTFVERDRKREKRKPKSQETPATKKAVQGGGATPVVGAVQGPVP

SEQ ID NO: 79944 - protein, 256 aa, Homo sapiens
  Payload ID: 15925
  Gene Symbol: SNRPA
  Gene Name: small nuclear ribonucleoprotein polypeptide A
  ENSP ID: ENSP00000472355
MAVPETRPNHTIYINNLNEKIKKDELKKSLYAIFSQFGQILDILVSRSLKMRGQAFVIFKERIQYAKTDSDIIAKMKGTFVERDRKREKRKPKSQETPATKKAVQGGGATPVVGAVQGPVPGMPPMTQAPRIMHHMPGQPPYMPPPGMIPPPGLAPGQIPPGAMPPQQLMPGQMPPAQPLSENPPNHILFLTNLPEETNELMLSMLFNQFPGFKEVRLVPGRHDIAFVEFDNEVQAGAARDALQGFKITQNNAMKI

SEQ ID NO: 79945 - protein, 148 aa, Homo sapiens
  Payload ID: 15925
  Gene Symbol: SNRPA
  Gene Name: small nuclear ribonucleoprotein polypeptide A
  ENSP ID: ENSP00000472449
MAVPETRPNHTIYINNLNEKIKKDELKKSLYAIFSQFGQILDILVSRSLKMRGQAFVIFKEVSSATNALRSMQGFPFYDKPMRIQYAKTDSDIIAKMKGTFVERDRKREKRKPKSQETPATKKAVQGGGATPVVGAVQGPVPGMPPMT

SEQ ID NO: 79946 - protein, 255 aa, Homo sapiens
  Payload ID: 15926
  Gene Symbol: SNRPA1
  Gene Name: small nuclear ribonucleoprotein polypeptide A'
  Uniprot ID: P09661
  ENSP ID: ENSP00000254193
MVKLTAELIEQAAQYTNAVRDRELDLRGYKIPVIENLGATLDQFDAIDFSDNEIRKLDGFPLLRRLKTLLVNNNRICRIGEGLDQALPCLTELILTNNSLVELGDLDPLASLKSLTYLSILRNPVTNKKHYRLYVIYKVPQVRVLDFQKVKLKERQEAEKMFKGKRGAQLAKDIARRSKTFNPGAGLPTDKKKGGPSPGDVEAIKNAIANASTLAEVERLKGLLQSGQIPGRERRSGPTDDGEEEMEEDTVTNGS

SEQ ID NO: 79947 - protein, 154 aa, Homo sapiens
  Payload ID: 15926
  Gene Symbol: SNRPA1
  Gene Name: small nuclear ribonucleoprotein polypeptide A'
  ENSP ID: ENSP00000452836
MVKLTAELIEQAAQYTNAVRDRELDLRGYKIPVIENLGATLDQFDAIDFSDNEIRKLDGFPLLRRLKTLLVNNNRICRIGEGLDQALPCLTELILTNNSLVELGDLDPLASLKSLTYLSILRNPVTNKKHYRLYVIYKVPQVRVLDFQKVKLKF

SEQ ID NO: 79948 - protein, 89 aa, Homo sapiens
  Payload ID: 15926
  Gene Symbol: SNRPA1
  Gene Name: small nuclear ribonucleoprotein polypeptide A'
  ENSP ID: ENSP00000453309
MFKGKRGAQLAKDIARRSKTFNPGAGLPTDKKKGGPSPGDVEAIKNAIANASTLAEVERLKGLLQSGQIPGRERRSGPTDDGEEEMEED

SEQ ID NO: 79949 - protein, 142 aa, Homo sapiens
  Payload ID: 15926
  Gene Symbol: SNRPA1
  Gene Name: small nuclear ribonucleoprotein polypeptide A'
  ENSP ID: ENSP00000453521
LDPLASLKSLTYLSILRNPVTNKKHYRLYVIYKVPQVRVLDFQKVKLKERQEAEKMFKGKRGAQLAKDIARRSKTFNPGAGLPTDKKKGGPSPGDVEAIKNAIANASTLAEVERLKGLLQSGQIPGRERRSGEQMVFFVCSN

SEQ ID NO: 79950 - protein, 154 aa, Homo sapiens; identical to SEQ ID NO: 79947
  Payload ID: 15926
  Gene Symbol: SNRPA1
  Gene Name: small nuclear ribonucleoprotein polypeptide A'
  ENSP ID: ENSP00000486896

SEQ ID NO: 79951 - protein, 225 aa, Homo sapiens
  Payload ID: 15927
  Gene Symbol: SNRPB2
  Gene Name: small nuclear ribonucleoprotein polypeptide B
  Uniprot ID: P08579
  ENSP ID: ENSP00000246071
MDIRPNHTIYINNMNDKIKKEELKRSLYALFSQFGHVVDIVALKTMKMRGQAFVIFKELGSSTNALRQLQGFPFYGKPMRIQYAKTDSDIISKMRGTFADKEKKKEKKKAKTVEQTATTTNKKPGQGTPNSANTQGNSTPNPQVPDYPPNYILFLNNLPEETNEMMLSMLFNQFPGFKEVRLVPGRHDIAFVEFENDGQAGAARDALQGFKITPSHAMKITYAKK

SEQ ID NO: 79952 - protein, 225 aa, Homo sapiens; identical to SEQ ID NO: 79951
  Payload ID: 15927
  Gene Symbol: SNRPB2
  Gene Name: small nuclear ribonucleoprotein polypeptide B
  Uniprot ID: P08579
  ENSP ID: ENSP00000367178

SEQ ID NO: 79953 - protein, 159 aa, Homo sapiens
  Payload ID: 15928
  Gene Symbol: SNRPC
  Gene Name: small nuclear ribonucleoprotein polypeptide C
  Uniprot ID: P09234
  ENSP ID: ENSP00000244520
MPKFYCDYCDTYLTHDSPSVRKTHCSGRKHKENVKDYYQKWMEEQAQSLIDKTTAAFQQGKIPPTPFSAPPPAGAMIPPPPSLPGPPRPGMMPAPHMGGPPMMPMMGPPPPGMMPVGPAPGMRPPMGGHMPMMPGPPMMRPPARPMMVPTRPGMTRPDR

SEQ ID NO: 79954 - protein, 180 aa, Homo sapiens
  Payload ID: 15928
  Gene Symbol: SNRPC
  Gene Name: small nuclear ribonucleoprotein polypeptide C
  ENSP ID: ENSP00000363129
MNSASVDGHLSGCRLFLFLSPLFRFYCDYCDTYLTHDSPSVRKTHCSGRKHKENVKDYYQKWMEEQAQSLIDKTTAAFQQGKIPPTPFSAPPPAGAMIPPPPSLPGPPRPGMMPAPHMGGPPMMPMMGPPPPGMMPVGPAPGMRPPMGGHMPMMPGPPMMRPPARPMMVPTRPGMTRPDR

SEQ ID NO: 79955 - protein, 118 aa, Homo sapiens
  Payload ID: 15928
  Gene Symbol: SNRPC
  Gene Name: small nuclear ribonucleoprotein polypeptide C
  ENSP ID: ENSP00000363130
MEEQAQSLIDKTTAAFQQGKIPPTPFSAPPPAGAMIPPPPSLPGPPRPGMMPAPHMGGPPMMPMMGPPPPGMMPVGPAPGMRPPMGGHMPMMPGPPMMRPPARPMMVPTRPGMTRPDR

SEQ ID NO: 79956 - protein, 52 aa, Homo sapiens
  Payload ID: 15929
  Gene Symbol: SNRPE
  Gene Name: small nuclear ribonucleoprotein polypeptide E
  ENSP ID: ENSP00000356176
MRIEGCIIGFDEYMNLVLDDAEEIHSKTKSRKQLGRIMLKGDNITLLQSVSN

SEQ ID NO: 79957 - protein, 92 aa, Homo sapiens
  Payload ID: 15929
  Gene Symbol: SNRPE
  Gene Name: small nuclear ribonucleoprotein polypeptide E
  Uniprot ID: P62304
  ENSP ID: ENSP00000400591
MAYRGQGQKVQKVMVQPINLIFRYLQNRSRIQVWLYEQVNMRIEGCIIGFDEYMNLVLDDAEEIHSKTKSRKQLGRIMLKGDNITLLQSVSN

SEQ ID NO: 79958 - protein, 86 aa, Homo sapiens
  Payload ID: 15930
  Gene Symbol: SNRPF
  Gene Name: small nuclear ribonucleoprotein polypeptide F
  Uniprot ID: P62306
  ENSP ID: ENSP00000266735
MSLPLNPKPFLNGLTGKPVMVKLKWGMEYKGYLVSVDGYMNMQLANTEEYIDGALSGHLGEVLIRCNNVLYIRGVEEEEEDGEMRE

SEQ ID NO: 79959 - protein, 127 aa, Homo sapiens
  Payload ID: 15930
  Gene Symbol: SNRPF
  Gene Name: small nuclear ribonucleoprotein polypeptide F
  ENSP ID: ENSP00000447127
MSLPLNPKPFLNGLTGKPVMVKLKWGMEYKGYLVSVDGYMNMQIFIYILGILKQNGVSLSSPRLECNGMISAHCNLCLPGSSDSPASASRVAGITARTSRTLTKRSGAVEILALFLILGGKHSVFYH

SEQ ID NO: 79960 - protein, 67 aa, Homo sapiens
  Payload ID: 15930
  Gene Symbol: SNRPF
  Gene Name: small nuclear ribonucleoprotein polypeptide F
  ENSP ID: ENSP00000447751
MSLPLNPKPFLNGLTGKPVMVKLKWGMEYKGYLVSVDGYMNMQIFIYILGILKQSKILLFQLSEDLK

SEQ ID NO: 79961 - protein, 76 aa, Homo sapiens
  Payload ID: 15931
  Gene Symbol: SNRPG
  Gene Name: small nuclear ribonucleoprotein polypeptide G
  Uniprot ID: P62308
  ENSP ID: ENSP00000272348
MSKAHPPELKKFMDKKLSLKLNGGRHVQGILRGFDPFMNLVIDECVEMATSGQQNNIGMVVIRGNSIIMLEALERV

SEQ ID NO: 79962 - protein, 64 aa, Homo sapiens
  Payload ID: 15931
  Gene Symbol: SNRPG
  Gene Name: small nuclear ribonucleoprotein polypeptide G
  ENSP ID: ENSP00000391403
MDKKLSLKLNGGRHVQGILRGFDPFMNLVIDECVEMATSGQQNNIGMVVIRGNSIIMLEALERV

SEQ ID NO: 79963 - protein, 96 aa, Homo sapiens
  Payload ID: 15931
  Gene Symbol: SNRPG
  Gene Name: small nuclear ribonucleoprotein polypeptide G
  ENSP ID: ENSP00000393388
MSKAHPPELKKFMDKKLSLKLNGGRHVQGILRGFDPFMNLVIDECVEMATSGQQNNIGMVDNIPNKAVSPKFLKKVNQKGQLTFSKLLSIKTSKEW

SEQ ID NO: 79964 - protein, 64 aa, Homo sapiens; identical to SEQ ID NO: 79962
  Payload ID: 15931
  Gene Symbol: SNRPG
  Gene Name: small nuclear ribonucleoprotein polypeptide G
  ENSP ID: ENSP00000402194

SEQ ID NO: 79965 - protein, 68 aa, Homo sapiens
  Payload ID: 15931
  Gene Symbol: SNRPG
  Gene Name: small nuclear ribonucleoprotein polypeptide G
  ENSP ID: ENSP00000416334
MCLFMDKKLSLKLNGGRHVQGILRGFDPFMNLVIDECVEMATSGQQNNIGMVVIRGNSIIMLEALERV

SEQ ID NO: 79966 - protein, 64 aa, Homo sapiens; identical to SEQ ID NO: 79962
  Payload ID: 15931
  Gene Symbol: SNRPG
  Gene Name: small nuclear ribonucleoprotein polypeptide G
  ENSP ID: ENSP00000441332

SEQ ID NO: 79967 - protein, 240 aa, Homo sapiens [sequence omitted]

SEQ ID NO: 79968 - protein, 240 aa, Homo sapiens [sequence omitted]

SEQ ID NO: 79969 - protein, 240 aa, Homo sapiens [sequence omitted]

SEQ ID NO: 79970 - protein, 240 aa, Homo sapiens [sequence omitted]

SEQ ID NO: 79971 - protein, 244 aa, Homo sapiens
  Payload ID: 15932
  Gene Symbol: SNRPN
  Gene Name: small nuclear ribonucleoprotein polypeptide N
  Uniprot ID: P63162
  ENSP ID: ENSP00000452342
MMDSQTVGKSSKMLQHIDYRMRCILQDGRIFIGTFKAFDKHMNLILCDCDEFRKIKPKNAKQPEREEKRVLGLVLLRGENLVSMTVEGPPPKDTGIARVPLAGAAGGPGVGRAAGRGVPAGVPIPQAPAGLAGPVRGVGGPSQQVMTPQGRGTVAAAAVAATASIAGAPTQYPPGRGTPPPPVGRATPPPGIMAPPPGMRPPMGPPIGLPPARGTPIGMPPPGMRPPPPGIRGPPPPGMRPPRP

SEQ ID NO: 79972 - protein, 59 aa, Homo sapiens
  Payload ID: 15932
  Gene Symbol: SNRPN
  Gene Name: small nuclear ribonucleoprotein polypeptide N
  ENSP ID: ENSP00000462211
MTVGKSSKMLQHIDYRMRCILQDGRIFIGTFKAFDKHMNLILCDCDEFRKIKPKNAKQP

SEQ ID NO: 79973 - protein, 240 aa, Homo sapiens [sequence omitted]

SEQ ID NO: 79974 - protein, 169 aa, Homo sapiens
  Payload ID: 15932
  Gene Symbol: SNRPN
  Gene Name: small nuclear ribonucleoprotein polypeptide N
  ENSP ID: ENSP00000463510
MTVGKSSKMLQHIDYRMRCILQDGRIFIGTFKAFDKHMNLILCDCDEFRKIKPKNAKQPEREEKRVLGLVLLRGENLVSMTVEGPPPKDTGIARVPLAGAAGGPGVGRAAGRGVPAGVPIPQAPAGLAGPVRGVGGPSQQVMTPQGRGTVAAAAVAATASIAGAPTQYP

SEQ ID NO: 79975 - protein, 288 aa, Homo sapiens
  Payload ID: 15933
  Gene Symbol: SNRPB
  Gene Name: small nuclear ribonucleoprotein polypeptides B and B1
  ENSP ID: ENSP00000342305
MTVGKSSKMLQHIDYRMRCILQDGRIFIGTFKAFDKHMNLILCDCDEFRKIKPKNSKQAEREEKRVLGLVLLRGENLVSMTVEGPPPKDTGIARVPLAGAAGGPGIGRAAGRGIPAGVPMPQAPAGLAGPVRGVGGPSQQVMTPQGRGTVAAAAAAATASIAGAPTQYPPGRGGPPPPMGRGAPPPGMMGPPPGMRPPMGPPMGIPPGRGTPMGMPPPGMRPPPPGCEAFFDPWPQSMEVAPQRRGLDSSGPRYHRPVCFLCCCSWSLMGLSGFLTGPPPPGMRPPRP

SEQ ID NO: 79976 - protein, 231 aa, Homo sapiens
  Payload ID: 15933
  Gene Symbol: SNRPB
  Gene Name: small nuclear ribonucleoprotein polypeptides B and B1
  Uniprot ID: P14678
  ENSP ID: ENSP00000370746
MTVGKSSKMLQHIDYRMRCILQDGRIFIGTFKAFDKHMNLILCDCDEFRKIKPKNSKQAEREEKRVLGLVLLRGENLVSMTVEGPPPKDTGIARVPLAGAAGGPGIGRAAGRGIPAGVPMPQAPAGLAGPVRGVGGPSQQVMTPQGRGTVAAAAAAATASIAGAPTQYPPGRGGPPPPMGRGAPPPGMMGPPPGMRPPMGPPMGIPPGRGTPMGMPPPGMRPPPPGMRGLL

SEQ ID NO: 79977 - protein, 240 aa, Homo sapiens
  Payload ID: 15933
  Gene Symbol: SNRPB
  Gene Name: small nuclear ribonucleoprotein polypeptides B and B1
  Uniprot ID: P14678
  ENSP ID: ENSP00000412566
MTVGKSSKMLQHIDYRMRCILQDGRIFIGTFKAFDKHMNLILCDCDEFRKIKPKNSKQAEREEKRVLGLVLLRGENLVSMTVEGPPPKDTGIARVPLAGAAGGPGIGRAAGRGIPAGVPMPQAPAGLAGPVRGVGGPSQQVMTPQGRGTVAAAAAAATASIAGAPTQYPPGRGGPPPPMGRGAPPPGMMGPPPGMRPPMGPPMGIPPGRGTPMGMPPPGMRPPPPGMRGPPPPGMRPPRP

SEQ ID NO: 79978 - protein, 70 aa, Homo sapiens
  Payload ID: 15933
  Gene Symbol: SNRPB
  Gene Name: small nuclear ribonucleoprotein polypeptides B and B1
  ENSP ID: ENSP00000474579
MTVGKSSKMLQHIDYRMRCILQDGRIFIGTFKAFDKHMNLILCDCDEFRKIKCVRGESLSFWPHCLFVKL

SEQ ID NO: 79979 - protein, 368 aa, Homo sapiens
  Payload ID: 15934
  Gene Symbol: SNAPC1
  Gene Name: small nuclear RNA activating complex, polypeptide 1, 43kDa
  Uniprot ID: Q16533
  ENSP ID: ENSP00000216294
MGTPPGLQTDCEALLSRFQETDSVRFEDFTELWRNMKFGTIFCGRMRNLEKNMFTKEALALAWRYFLPPYTFQIRVGALYLLYGLYNTQLCQPKQKIRVALKDWDEVLKFQQDLVNAQHFDAAYIFRKLRLDRAFHFTAMPKLLSYRMKKKIHRAEVTEEFKDPSDRVMKLITSDVLEEMLNVHDHYQNMKHVISVDKSKPDKALSLIKDDFFDNIKNIVLEHQQWHKDRKNPSLKSKTNDGEEKMEGNSQETERCERAESLAKIKSKAFSVVIQASKSRRHRQVKLDSSDSDSASGQGQVKATRKKEKKERLKPAGRKMSLRNKGNVQNIHKEDKPLSLSMPVITEEEENESLSGTEFTASKKRRKH

SEQ ID NO: 79980 - protein, 334 aa, Homo sapiens
  Payload ID: 15935
  Gene Symbol: SNAPC2
  Gene Name: small nuclear RNA activating complex, polypeptide 2, 45kDa
  Uniprot ID: Q13487
  ENSP ID: ENSP00000221573
MKPPPRRRAAPARYLGEVTGPATWSAREKRQLVRLLQARQGQPEPDATELARELRGRSEAEIRVFLQQLKGRVAREAIQKVHPGGLQGPRRREAQPPAPIEVWTDLAEKITGPLEEALAVAFSQVLTIAATEPVTLLHSKPPKPTQARGKPLLLSAPGGQEDPAPEIPSSAPAAPSSAPRTPDPAPEKPSESSAGPSTEEDFAVDFEKIYKYLSSVSRSGRSPELSAAESAVVLDLLMSLPEELPLLPCTALVEHMTETYLRLTAPQPIPAGGSLGPAAEGDGAGSKAPEETPPATEKAEHSELKSPWQAAGICPLNPFLVPLELLGRAATPAR

SEQ ID NO: 79981 - protein, 279 aa, Homo sapiens
  Payload ID: 15935
  Gene Symbol: SNAPC2
  Gene Name: small nuclear RNA activating complex, polypeptide 2, 45kDa
  ENSP ID: ENSP00000469475
  MOD_RES (1)..(1): Any amino acid
XRAAPARYLGEVTGPATWSAREKRQLVRLLQARQGQPEPDATELARELRGRSEAEIRVFLQQLKGRVAREAIQKVHPGGLQGPRRREAQPPAPIEVWTDLAEKITGPLEEALAVAFSQVLTIAATEPVTLLHSKPPKPTQARGKPLLLSAPGGQEDPAPEIPSSAPAAPSSAPRTPDPAPEKPSESSAGPSTEEDFAVDFEKIYKYLSSVSRSGRSPELSAAGEKGEGGGRSRGIKGPWQQAGVSPYPSPPSITRVRCGPRPAHVTSRGAATPALHSPG

SEQ ID NO: 79982 - protein, 97 aa, Homo sapiens
  Payload ID: 15935
  Gene Symbol: SNAPC2
  Gene Name: small nuclear RNA activating complex, polypeptide 2, 45kDa
  ENSP ID: ENSP00000471962
MSLPEELPLLPCTALVEHMTETYLRLTAPQPIPAGGSLGPAAEGDGAGSKAPEETPPATEKAEHSELKSPWQAAGICPLNPFLVPLELLGRAATPAR

SEQ ID NO: 79983 - protein, 124 aa, Homo sapiens
  Payload ID: 15936
  Gene Symbol: SNAPC3
  Gene Name: small nuclear RNA activating complex, polypeptide 3, 50kDa
  ENSP ID: ENSP00000370177
MLVLGSQKLTQLRDSIRCVSDLQIGGEFSNTPDQAPEHISKDLYKSAFFYFEGTFYNDKRYPECRDLSRTIIEWSESHDRGYGKFQTARMEDFTFNDLCIKLGFPYLYCHQGDCEHVIVITDIR

SEQ ID NO: 79984 - protein, 411 aa, Homo sapiens
  Payload ID: 15936
  Gene Symbol: SNAPC3
  Gene Name: small nuclear RNA activating complex, polypeptide 3, 50kDa
  Uniprot ID: Q92966
  ENSP ID: ENSP00000370200
MAEGSRGGPTCSGVGGRQDPVSGSGGCNFPEYELPELNTRAFHVGAFGELWRGRLRGAGDLSLREPPASALPGSQAADSDREDAAVARDLDCSLEAAAELRAVCGLDKLKCLEDGEDPEVIPENTDLVTLGVRKRFLEHREETITIDRACRQETFVYEMESHAIGKKPENSADMIEEGELILSVNILYPVIFHKHKEHKPYQTMLVLGSQKLTQLRDSIRCVSDLQIGGEFSNTPDQAPEHISKDLYKSAFFYFEGTFYNDKRYPECRDLSRTIIEWSESHDRGYGKFQTARMEDFTFNDLCIKLGFPYLYCHQGDCEHVIVITDIRLVHHDDCLDRTLYPLLIKKHWLWTRKCFVCKMYTARWVTNNDSFAPEDPCFFCDVCFRMLHYDSEGNKLGEFLAYPYVDPGTFN

SEQ ID NO: 79985 - protein, 243 aa, Homo sapiens
  Payload ID: 15936
  Gene Symbol: SNAPC3
  Gene Name: small nuclear RNA activating complex, polypeptide 3, 50kDa
  ENSP ID: ENSP00000391832
MAEGSRGGPTCSGVGGRQDPVSGSGGCNFPEYELPELNTRAFHVGAFGELWRGRLRGAGDLSLREPPASALPGSQAADSDREDAAVARDLDCSLEAAAELRAVCGLDKLKCLEDGEDPEVIPENTDLVTLGVRKRFLEHREETITIDRACRQETFVYEMESHAIGKKPENSADMIEEGELILSVNILYPVIFHKDLYKSAFFYFEGTFYNDKRYPECRDLSRTIIEWSESHDRGYGKFQTARM

SEQ ID NO: 79986 - protein, 411 aa, Homo sapiens; identical to SEQ ID NO: 79984
  Payload ID: 15936
  Gene Symbol: SNAPC3
  Gene Name: small nuclear RNA activating complex, polypeptide 3, 50kDa
  Uniprot ID: Q92966
  ENSP ID: ENSP00000432393

SEQ ID NO: 79987 - protein, 411 aa, Homo sapiens; identical to SEQ ID NO: 79984
  Payload ID: 15936
  Gene Symbol: SNAPC3
  Gene Name: small nuclear RNA activating complex, polypeptide 3, 50kDa
  Uniprot ID: Q92966
  ENSP ID: ENSP00000436699

SEQ ID NO: 79988 - protein, 411 aa, Homo sapiens; identical to SEQ ID NO: 79984
  Payload ID: 15936
  Gene Symbol: SNAPC3
  Gene Name: small nuclear RNA activating complex, polypeptide 3, 50kDa
  Uniprot ID: Q92966
  ENSP ID: ENSP00000483273

SEQ ID NO: 79989 - protein, 1469 aa, Homo sapiens
  Payload ID: 15937
  Gene Symbol: SNAPC4
  Gene Name: small nuclear RNA activating complex, polypeptide 4, 190kDa
  Uniprot ID: Q5SXM2
  ENSP ID: ENSP00000298532
MDVDAEREKITQEIKELERILDPGSSGSHVEISESSLESDSEADSLPSEDLDPADPPISEEERWGEASNDEDDPKDKTLPEDPETCLQLNMVYQEVIQEKLAEANLLLAQNREQQEELMRDLAGSKGTKVKDGKSLPPSTYMGHFMKPYFKDKVTGVGPPANEDTREKAAQGIKAFEELLVTKWKNWEKALLRKSVVSDRLQRLLQPKLLKLEYLHQKQSKVSSELERQALEKQGREAEKEIQDINQLPEEALLGNRLDSHDWEKISNINFEGSRSAEEIRKFWQNSEHPSINKQEWSREEEERLQAIAAAHGHLEWQKIAEELGTSRSAFQCLQKFQQHNKALKRKEWTEEEDRMLTQLVQEMRVGSHIPYRRIVYYMEGRDSMQLIYRWTKSLDPGLKKGYWAPEEDAKLLQAVAKYGEQDWFKIREEVPGRSDAQCRDRYLRRLHFSLKKGRWNLKEEEQLIELIEKYGVGHWAKIASELPHRSGSQCLSKWKIMMGKKQGLRRRRRRARHSVRWSSTSSSGSSSGSSGGSSSSSSSSSEEDEPEQAQAGEGDRALLSPQYMVPDMDLWVPARQSTSQPWRGGAGAWLGGPAASLSPPKGSSASQGGSKEASTTAAAPGEETSPVQVPARAHGPVPRSAQASHSADTRPAGAEKQALEGGRRLLTVPVETVLRVLRANTAARSCTQKEQLRQPPLPTSSPGVSSGDSVARSHVQWLRHRATQSGQRRWRHALHRRLLNRRLLLAVTPWVGDVVVPCTQASQRPAVVQTQADGLREQLQQARLASTPVFTLFTQLFHIDTAGCLEVVRERKALPPRLPQAGARDPPVHLLQASSSAQSTPGHLFPNVPAQEASKSASHKGSRRLASSRVERTLPQASLLASTGPRPKPKTVSELLQEKRLQEARAREATRGPVVLPSQLLVSSSVILQPPLPHTPHGRPAPGPTVLNVPLSGPGAPAAAKPGTSGSWQEAGTSAKDKRLSTMQALPLAPVFSEAEGTAPAASQAPALGPGQISVSCPESGLGQSQAPAASRKQGLPEAPPFLPAAPSPTPLPVQPLSLTHIGGPHVATSVPLPVTWVLTAQGLLPVPVPAVVSLPRPAGTPGPAGLLATLLPPLTETRAAQGPRAPALSSSWQPPANMNREPEPSCRTDTPAPPTHALSQSPAEADGSVAFVPGEAQVAREIPEPRTSSHADPPEAEPPWSGRLPAFGGVIPATEPRGTPGSPSGTQEPRGPLGLEKLPLRQPGPEKGALDLEKPPLPQPGPEKGALDLGLLSQEGEAATQQWLGGQRGVRVPLLGSRLPYQPPALCSLRALSGLLLHKKALEHKATSLVVGGEAERPAGALQASLGLVRGQLQDNPAYLLLRARFLAAFTLPALLATLAPQGVRTTLSVPSRVGSESEDEDLLSELELADRDGQPGCTTATCPIQGAPDSGKCSASSCLDTSNDPDDLDVLRTRHARHTRKRRRLV

SEQ ID NO: 79990 - protein, 68 aa, Homo sapiens
  Payload ID: 15938
  Gene Symbol: SNAPC5
  Gene Name: small nuclear RNA activating complex, polypeptide 5, 19kDa
  Uniprot ID: O75971
  ENSP ID: ENSP00000308439
MLSRLQELRKEEETLLRLKAALHDQLNRLKMLVHVDNEASINQTTLELSTKSHVTEEEEEEEEEESDS

SEQ ID NO: 79991 - protein, 98 aa, Homo sapiens
  Payload ID: 15938
  Gene Symbol: SNAPC5
  Gene Name: small nuclear RNA activating complex, polypeptide 5, 19kDa
  Uniprot ID: O75971
  ENSP ID: ENSP00000319597
MLSRLQELRKEEETLLRLKAALHDQLNRLKVEELALQSMISSRRGDEMLSSHTVPEQSHDMLVHVDNEASINQTTLELSTKSHVTEEEEEEEEEESDS

SEQ ID NO: 79992 - protein, 98 aa, Homo sapiens; identical to SEQ ID NO: 79991
  Payload ID: 15938
  Gene Symbol: SNAPC5
  Gene Name: small nuclear RNA activating complex, polypeptide 5, 19kDa
  Uniprot ID: O75971
  ENSP ID: ENSP00000378954

SEQ ID NO: 79993 - protein, 98 aa, Homo sapiens; identical to SEQ ID NO: 79991
  Payload ID: 15938
  Gene Symbol: SNAPC5
  Gene Name: small nuclear RNA activating complex, polypeptide 5, 19kDa
  Uniprot ID: O75971
  ENSP ID: ENSP00000454421

SEQ ID NO: 79994 - protein, 67 aa, Homo sapiens
  Payload ID: 15938
  Gene Symbol: SNAPC5
  Gene Name: small nuclear RNA activating complex, polypeptide 5, 19kDa
  ENSP ID: ENSP00000455626
MLSRLQELRKEEETLLRLKAALHDQLNRLKVTPRPSPAPPPFLPSDHFPPTWASVVTTCCGQFSATH

SEQ ID NO: 79995 - protein, 83 aa, Homo sapiens
  Payload ID: 15938
  Gene Symbol: SNAPC5
  Gene Name: small nuclear RNA activating complex, polypeptide 5, 19kDa
  ENSP ID: ENSP00000455680
MLSRLQELRKEEETLLRLKAALHDQLNRLKVEELALQSMISSRRGDEMLSSHTVPEQSHDVSLIKCRPRRECKVCSAPMLLGW

SEQ ID NO: 79996 - protein, 67 aa, Homo sapiens; identical to SEQ ID NO: 79994
  Payload ID: 15938
  Gene Symbol: SNAPC5
  Gene Name: small nuclear RNA activating complex, polypeptide 5, 19kDa
  ENSP ID: ENSP00000456716

SEQ ID NO: 79997 - protein, 98 aa, Homo sapiens; identical to SEQ ID NO: 79991
  Payload ID: 15938
  Gene Symbol: SNAPC5
  Gene Name: small nuclear RNA activating complex, polypeptide 5, 19kDa
  Uniprot ID: O75971
  ENSP ID: ENSP00000457892

SEQ ID NO: 79998 - protein, 89 aa, Homo sapiens
  Payload ID: 15939
  Gene Symbol: SPRR1A
  Gene Name: small proline-rich protein 1A
  Uniprot ID: P35321
  ENSP ID: ENSP00000357751
MNSQQQKQPCTPPPQPQQQQVKQPCQPPPQEPCIPKTKEPCHPKVPEPCHPKVPEPCQPKVPEPCQPKVPEPCPSTVTPAPAQQKTKQK

SEQ ID NO: 79999 - protein, 89 aa, Homo sapiens
  Payload ID: 15940
  Gene Symbol: SPRR1B
  Gene Name: small proline-rich protein 1B
  Uniprot ID: P22528
  ENSP ID: ENSP00000306461
MSSQQQKQPCTPPPQLQQQQVKQPCQPPPQEPCIPKTKEPCHPKVPEPCHPKVPEPCQPKVPEPCHPKVPEPCPSIVTPAPAQQKTKQK

SEQ ID NO: 80000 - protein, 72 aa, Homo sapiens
  Payload ID: 15941
  Gene Symbol: SPRR2A
  Gene Name: small proline-rich protein 2A
  Uniprot ID: P35326
  ENSP ID: ENSP00000376423
MSYQQQQCKQPCQPPPVCPTPKCPEPCPPPKCPEPCPPPKCPQPCPPQQCQQKYPPVTPSPPCQSKYPPKSK

SEQ ID NO: 80001 - protein, 72 aa, Homo sapiens
  Payload ID: 15942
  Gene Symbol: SPRR2B
  Gene Name: small proline-rich protein 2B
  Uniprot ID: P35325
  ENSP ID: ENSP00000357744
MSYQQQQCKQPCQPPPVCPTPKCPEPCPPPKCPEPCPPPKCPQPCPPQQCQQKYPPVTPSPPCQPKYPPKSK

SEQ ID NO: 80002 - protein, 72 aa, Homo sapiens
  Payload ID: 15943
  Gene Symbol: SPRR2D
  Gene Name: small proline-rich protein 2D
  Uniprot ID: P22532
  ENSP ID: ENSP00000353542
MSYQQQQCKQPCQPPPVCPTPKCPEPCPPPKCPEPCPSPKCPQPCPPQQCQQKYPPVTPSPPCQPKCPPKSK

SEQ ID NO: 80003 - protein, 72 aa, Homo sapiens; identical to SEQ ID NO: 80002
  Payload ID: 15943
  Gene Symbol: SPRR2D
  Gene Name: small proline-rich protein 2D
  Uniprot ID: P22532
  ENSP ID: ENSP00000357745

SEQ ID NO: 80004 - protein, 72 aa, Homo sapiens; identical to SEQ ID NO: 80002
  Payload ID: 15943
  Gene Symbol: SPRR2D
  Gene Name: small proline-rich protein 2D
  Uniprot ID: P22532
  ENSP ID: ENSP00000357746

SEQ ID NO: 80005 - protein, 72 aa, Homo sapiens; identical to SEQ ID NO: 80002
  Payload ID: 15943
  Gene Symbol: SPRR2D
  Gene Name: small proline-rich protein 2D
  Uniprot ID: P22532
  ENSP ID: ENSP00000357747

SEQ ID NO: 80006 - protein, 72 aa, Homo sapiens
  Payload ID: 15944
  Gene Symbol: SPRR2E
  Gene Name: small proline-rich protein 2E
  Uniprot ID: P22531
  ENSP ID: ENSP00000357739
MSYQQQQCKQPCQPPPVCPTPKCPEPCPPPKCPEPCPPPKCPQPCPPQQCQQKCPPVTPSPPCQPKCPPKSK

SEQ ID NO: 80007 - protein, 72 aa, Homo sapiens; identical to SEQ ID NO: 80006
  Payload ID: 15944
  Gene Symbol: SPRR2E
  Gene Name: small proline-rich protein 2E
  Uniprot ID: P22531
  ENSP ID: ENSP00000357740

SEQ ID NO: 80008 - protein, 72 aa, Homo sapiens
  Payload ID: 15945
  Gene Symbol: SPRR2F
  Gene Name: small proline-rich protein 2F
  Uniprot ID: Q96RM1
  ENSP ID: ENSP00000418193
MSYQQQQCKQPCQPPPVCPAPKCPEPCPPPKCPEPCPPSKCPQSCPPQQCQQKCPPVTPSPPCQPKCPPKSK

SEQ ID NO: 80009 - protein, 73 aa, Homo sapiens
  Payload ID: 15946
  Gene Symbol: SPRR2G
  Gene Name: small proline-rich protein 2G
  Uniprot ID: Q9BYE4
  ENSP ID: ENSP00000357737
MSYQQQQCKQPCQPPPVCPTPKCPEPCPPPKCPEPYLPPPCPPEHCPPPPCQDKCPPVQPYPPCQQKYPPKSK

SEQ ID NO: 80010 - protein, 169 aa, Homo sapiens
  Payload ID: 15947
  Gene Symbol: SPRR3
  Gene Name: small proline-rich protein 3
  Uniprot ID: Q9UBC9
  ENSP ID: ENSP00000295367
MSSYQQKQTFTPPPQLQQQQVKQPSQPPPQEIFVPTTKEPCHSKVPQPGNTKIPEPGCTKVPEPGCTKVPEPGCTKVPEPGCTKVPEPGCTKVPEPGCTKVPEPGYTKVPEPGSIKVPDQGFIKFPEPGAIKVPEQGYTKVPVPGYTKLPEPCPSTVTPGPAQQKTKQK

SEQ ID NO: 80011 - protein, 169 aa, Homo sapiens; identical to SEQ ID NO: 80010
  Payload ID: 15947
  Gene Symbol: SPRR3
  Gene Name: small proline-rich protein 3
  Uniprot ID: Q9UBC9
  ENSP ID: ENSP00000330391

SEQ ID NO: 80012 - protein, 158 aa, Homo sapiens
  Payload ID: 15947
  Gene Symbol: SPRR3
  Gene Name: small proline-rich protein 3
  ENSP ID: ENSP00000402016
MSSYQQKQTFTPPPQLQQQQVKQPSQPPPQEIFVPTTKEPCHSKVPQPGNTKIPEPGCTKVPEPGCTKVPEPGCTKVPEPGCTKVPEPGCTKVPEPGCTKVPEPGYTKVPEPGSIKVPDQGFIKFPEPGAIKVPEQGYTKVPVPGYTKLPEPCPSTVT

SEQ ID NO: 80013 - protein, 79 aa, Homo sapiens
  Payload ID: 15948
  Gene Symbol: SPRR4
  Gene Name: small proline-rich protein 4
  Uniprot ID: Q96PI1
  ENSP ID: ENSP00000332163
MSSQQQQRQQQQCPPQRAQQQQVKQPCQPPPVKCQETCAPKTKDPCAPQVKKQCPPKGTIIPAQQKCPSAQQASKSKQK

SEQ ID NO: 80014 - protein, 76 aa, Homo sapiens
  Payload ID: 15949
  Gene Symbol: SUMO1
  Gene Name: small ubiquitin-like modifier 1
  Uniprot ID: P63165
  ENSP ID: ENSP00000376075
MSDQDSSEIHFKVKMTTHLKKLKESYCQRQGVPMNSLRFLFEGQRIADNHTPKELGMEEEDVIEVYQEQTGGHSTV

SEQ ID NO: 80015 - protein, 101 aa, Homo sapiens
  Payload ID: 15949
  Gene Symbol: SUMO1
  Gene Name: small ubiquitin-like modifier 1
  Uniprot ID: P63165
  ENSP ID: ENSP00000376076
MSDQEAKPSTEDLGDKKEGEYIKLKVIGQDSSEIHFKVKMTTHLKKLKESYCQRQGVPMNSLRFLFEGQRIADNHTPKELGMEEEDVIEVYQEQTGGHSTV

SEQ ID NO: 80016 - protein, 101 aa, Homo sapiens; identical to SEQ ID NO: 80015
  Payload ID: 15949
  Gene Symbol: SUMO1
  Gene Name: small ubiquitin-like modifier 1
  Uniprot ID: P63165
  ENSP ID: ENSP00000376077

SEQ ID NO: 80017 - protein, 62 aa, Homo sapiens
  Payload ID: 15949
  Gene Symbol: SUMO1
  Gene Name: small ubiquitin-like modifier 1
  ENSP ID: ENSP00000386267
MTTHLKKLKESYCQRQGVPMNSLRFLFEGQRIADNHTPKELGMEEEDVIEVYQEQTGGHSTV

SEQ ID NO: 80018 - protein, 77 aa, Homo sapiens
  Payload ID: 15949
  Gene Symbol: SUMO1
  Gene Name: small ubiquitin-like modifier 1
  ENSP ID: ENSP00000386296
MSDQEAKPSTEDLGDKKEGEYIKLKVIGQDSSEIHFKVKMTTHLKKLKESYCQRQLGMEEEDVIEVYQEQTGGHSTV

SEQ ID NO: 80019 - protein, 62 aa, Homo sapiens; identical to SEQ ID NO: 80017
  Payload ID: 15949
  Gene Symbol: SUMO1
  Gene Name: small ubiquitin-like modifier 1
  ENSP ID: ENSP00000386472

SEQ ID NO: 80020 - protein, 73 aa, Homo sapiens
  Payload ID: 15949
  Gene Symbol: SUMO1
  Gene Name: small ubiquitin-like modifier 1
  ENSP ID: ENSP00000386500
MSDQESLNPESLVRRHGEKWSQAHTMMADKGREADNLFFLRRSLALSPSLECSGAISTRCNLRLPGSRGKTFN

SEQ ID NO: 80021 - protein, 58 aa, Homo sapiens
  Payload ID: 15949
  Gene Symbol: SUMO1
  Gene Name: small ubiquitin-like modifier 1
  ENSP ID: ENSP00000386753
MSDQEAKPSTEDLGDKKEGEYIKLKVIGQDSSEIHFKVKMTTHLKKLKESYCQRQVSL

SEQ ID NO: 80022 - protein, 146 aa, Homo sapiens
  Payload ID: 15949
  Gene Symbol: SUMO1
  Gene Name: small ubiquitin-like modifier 1
  ENSP ID: ENSP00000387204
MSDQEAKPSTEDLGDKKEGEYIKLKVIGQDSSEIHFKVKMTTHLKKLKESYCQRQGVPMNSLRFLFEGQRIADNHTPKEAQWPTPAILALWEAEAGWITAGQELRPAWATWRNLISTKNRKSSQLGMEEEDVIEVYQEQTGGHSTV

SEQ ID NO: 80023 - protein, 71 aa, Homo sapiens
  Payload ID: 15950
  Gene Symbol: SUMO2
  Gene Name: small ubiquitin-like modifier 2
  Uniprot ID: P61956
  ENSP ID: ENSP00000400886
MADEKPKEGVKTENNDHINLKVAGQDGSVVQFKIKRHTPLSKLMKAYCERQLEMEDEDTIDVFQQQTGGVY

SEQ ID NO: 80024 - protein, 95 aa, Homo sapiens
  Payload ID: 15950
  Gene Symbol: SUMO2
  Gene Name: small ubiquitin-like modifier 2
  Uniprot ID: P61956
  ENSP ID: ENSP00000405965
MADEKPKEGVKTENNDHINLKVAGQDGSVVQFKIKRHTPLSKLMKAYCERQGLSMRQIRFRFDGQPINETDTPAQLEMEDEDTIDVFQQQTGGVY

SEQ ID NO: 80025 - protein, 52 aa, Homo sapiens
  Payload ID: 15950
  Gene Symbol: SUMO2
  Gene Name: small ubiquitin-like modifier 2
  ENSP ID: ENSP00000461997
MKAYCERQGLSMRQIRFRFDGQPINETDTPAQLEMEDEDTIDVFQQQTGGVY

SEQ ID NO: 80026 - protein, 103 aa, Homo sapiens
  Payload ID: 15951
  Gene Symbol: SUMO3
  Gene Name: small ubiquitin-like modifier 3
  Uniprot ID: P55854
  ENSP ID: ENSP00000330343
MSEEKPKEGVKTENDHINLKVAGQDGSVVQFKIKRHTPLSKLMKAYCERQGLSMRQIRFRFDGQPINETDTPAQLEMEDEDTIDVFQQQTGGVPESSLAGHSF

SEQ ID NO: 80027 - protein, 147 aa, Homo sapiens
  Payload ID: 15951
  Gene Symbol: SUMO3
  Gene Name: small ubiquitin-like modifier 3
  ENSP ID: ENSP00000380990
MSEEKPKEGVKTENDHINLKVAGQDGSVVQFKIKRHTPLSKLMKAYCERQGLSMRQIRFRFDGQPINETDTPAQGIILSWKELWTWKQTFFFETESRFVAQARMQWRSLSSLCKLCLLSSRHSPASASQVAGTIGAHHHSRLIFLYF

SEQ ID NO: 80028 - protein, 135 aa, Homo sapiens
  Payload ID: 15951
  Gene Symbol: SUMO3
  Gene Name: small ubiquitin-like modifier 3
  ENSP ID: ENSP00000380995
MSEEKPKEGVKTENDHINLKVAGQDGSVVQFKIKRHTPLSKLMKAYCERQGLSMRQIRFRFDGQPINETDTPAQVRSWLRVVPGRLPICAGWRWRTRTPSTCSSSRREVCRRAAWQGTVSRGPVPSPGRPSSHCC

SEQ ID NO: 80029 - protein, 141 aa, Homo sapiens
  Payload ID: 15951
  Gene Symbol: SUMO3
  Gene Name: small ubiquitin-like modifier 3
  Uniprot ID: P55854
  ENSP ID: ENSP00000409666
MSEEKPKEGVKTENDHINLKVAGQDGSVVQFKIKRHTPLSKLMKAYCERQVRHLAPPQSLPVCALVLCVPGIPRARASRGWTQMQLPEGLSMRQIRFRFDGQPINETDTPAQLEMEDEDTIDVFQQQTGGVPESSLAGHSF

SEQ ID NO: 80030 - protein, 95 aa, Homo sapiens
  Payload ID: 15952
  Gene Symbol: SUMO4
  Gene Name: small ubiquitin-like modifier 4
  Uniprot ID: Q6EEV6
  ENSP ID: ENSP00000318635
MANEKPTEEVKTENNNHINLKVAGQDGSVVQFKIKRQTPLSKLMKAYCEPRGLSVKQIRFRFGGQPISGTDKPAQLEMEDEDTIDVFQQPTGGVY

SEQ ID NO: 80031 - protein, 66 aa, Homo sapiens
  Payload ID: 15953
  Gene Symbol: SVBP
  Gene Name: small vasohibin binding protein
  Uniprot ID: Q8N300
  ENSP ID: ENSP00000361599
MDPPARKEKTKVKESVSRVEKAKQKSAQQELKQRQRAEIYALNRVMTELEQQQFDEFCKQMQPPGE

SEQ ID NO: 80032 - protein, 66 aa, Homo sapiens; identical to SEQ ID NO: 80031
  Payload ID: 15953
  Gene Symbol: SVBP
  Gene Name: small vasohibin binding protein
  Uniprot ID: Q8N300
  ENSP ID: ENSP00000361600

SEQ ID NO: 80033 - protein, 77 aa, Homo sapiens
  Payload ID: 15954
  Gene Symbol: SVIP
  Gene Name: small VCP/p97-interacting protein
  Uniprot ID: Q8NHG7
  ENSP ID: ENSP00000346130
MGLCFPCPGESAPPTPDLEEKRAKLAEAAERRQKEAASRGILDVQSVQEKRKKKEKIEKQIATSGPPPEGGLRWTVS

SEQ ID NO: 80034 - protein, 1058 aa, Homo sapiens
  Payload ID: 15955
  Gene Symbol: SLF1
  Gene Name: SMC5-SMC6 complex localization factor 1
  Uniprot ID: Q9BQI6
  ENSP ID: ENSP00000265140
MEDGTPKHIIQMTGFKMEEKEALVKLLLKLDCTFIKSEKYKNCTHLIAERLCKSEKFLAACAAGKWILTKDYIIHSAKSGRWLDETTYEWGYKIEKDSRYSPQMQSAPKRWREELKRTGAPGAFHRWKVVLLVRTDKRSDSLIRVLEAGKANVILPKSSPSGITHVIASNARIKAEKEKDNFKAPFYPIQYLGDFLLEKEIQNDEDSQTNSVWTEHSNEETNKDFRKDAGFLEMKGALRETMYRTQKEMQNHEDVNVGSILIQHHKKEKFSGSSKDLKFVKMRNTFGSHTYENQKEIKKKDEDIQRSYTLRRKRKKGKESNCKKGVEHEKIKSTLRRHIYNRDQKEMKNSIFAEYAKESKAMAIKTDVDVVEIKNTLRKHIYRAQAVRYNCIRIDKQPVYNVEVKNAEFPRGVLNLIESLIEGHFFKEAIEELSTLQAHYIPPVCVLHALLENVLQDNIDTFSGRYFHILSALLHLHPPWKSPAMSRYYLELFQCPTCMKGAWSLVEVLIRSCLFNESFCHQISENIGSKVLHLTLLKFFFNLIESEVQHLSQKLYDWSDSQNLKITGKAMLLEIFWSGSETSGLLTKPVNMLLEWTIYSHKEKFKSNDVFKHELAYLLAGILGAAIDYWIFLGLKMGRNVMRHMSDDLGSYVSLSCDDFSSQELEIFICSFSSSWLQMFVAEAVFKKLCLQSSGSVSSEPLSLQKMVYSYLPALGKTGVLGSGKIQVSKKIGQRPCFDSQRTLLMLNGTKQKQVEGLPELLDLNLAKCSSSLKKLKKKSEGELSCSKENCPSVVKKMNFHKTNLKGETALHRACINNQVEKLILLLSLPGIDINVKDNAGWTPLHEACNYGNTVCVQEILQRCPEVDLLTQVDGVTPLHDALSNGHVEIGKLLLQHGGPVLLQQRNAKGELPLDYVVSPQIKEELFAITKIEDTVENFHAQAEKHFHYQQLEFGSFLLSRMLLNFCSIFDLSSEFILASKGLTHLNELLMACKSHKETTSVHTDWLLDLYAGNIKTLQKLPHILKELPENLKVCPGVHTEALMITLEMMCRSVMEFS

SEQ ID NO: 80035 - protein, 179 aa, Homo sapiens
  Payload ID: 15955
  Gene Symbol: SLF1
  Gene Name: SMC5-SMC6 complex localization factor 1
  Uniprot ID: Q9BQI6
  ENSP ID: ENSP00000424232
MEDGTPKHIIQMTGFKMEEKEALVKLLLKLDCTFIKSEKYKNCTHLIAERLCKSEKFLAACAAGKWILTKDYIIHSAKSGRWLDETTYEWGYKIEKDSRYSPQMQSAPKRWREELKRTGAPGAFHRWKVVLLVRTDKRSDSLIRKKFRMMKIPKPILFGLNIAMKKQTKISGKMQDFLK

SEQ ID NO: 80036 - protein, 130 aa, Homo sapiens
  Payload ID: 15955
  Gene Symbol: SLF1
  Gene Name: SMC5-SMC6 complex localization factor 1
  ENSP ID: ENSP00000425022
MEDGTPKHIIQMTGFKMEEKEALVKLLLKLDCTFIKSEKYKNCTHLIAERLCKSEKFLAACAAGKWILTKDYIIHSAKSGRWLDETTYEWGYKIEKDSRYSPQMQSAPKRWREELKRTGAPGAFHRWKVV

SEQ ID NO: 80037 - protein, 129 aa, Homo sapiens
  Payload ID: 15955
  Gene Symbol: SLF1
  Gene Name: SMC5-SMC6 complex localization factor 1
  ENSP ID: ENSP00000430335
  MOD_RES (1)..(1): Any amino acid
XKLLLKLDCTFIKSEKYKNCTHLIAERLCKSEKFLAACAAGKWILTKDYIIHSAKSGRWLDETTYEWGYKIEKDSRYSPQMQSAPKRWREELKRTGAPGAFHRWKVVLLVRTDKRSDSLIRLSDTTALE

SEQ ID NO: 80038 - protein, 1173 aa, Homo sapiens
  Payload ID: 15956
  Gene Symbol: SLF2
  Gene Name: SMC5-SMC6 complex localization factor 2
  Uniprot ID: Q8IX21
  ENSP ID: ENSP00000238961
MTRRCMPARPGFPSSPAPGSSPPRCHLRPGSTAHAAAGKRTESPGDRKQSIIDFFKPASKQDRHMLDSPQKSNIKYGGSRLSITGTEQFERKLSSPKESKPKRVPPEKSPIIEAFMKGVKEHHEDHGIHESRRPCLSLASKYLAKGTNIYVPSSYHLPKEMKSLKKKHRSPERRKSLFIHENNEKNDRDRGKTNADSKKQTTVAEADIFNNSSRSLSSRSSLSRHHPEESPLGAKFQLSLASYCRERELKRLRKEQMEQRINSENSFSEASSLSLKSSIERKYKPRQEQRKQNDIIPGKNNLSNVENGHLSRKRSSSDSWEPTSAGSKQNKFPEKRKRNSVDSDLKSTRESMIPKARESFLEKRPDGPHQKEKFIKHIALKTPGDVLRLEDISKEPSDETDGSSAGLAPSNSGNSGHHSTRNSDQIQVAGTKETKMQKPHLPLSQEKSAIKKASNLQKNKTASSTTKEKETKLPLLSRVPSAGSSLVPLNAKNCALPVSKKDKERSSSKECSGHSTESTKHKEHKAKTNKADSNVSSGKISGGPLRSEYGTPTKSPPAALEVVPCIPSPAAPSDKAPSEGESSGNSNAGSSALKRKLRGDFDSDEESLGYNLDSDEEEETLKSLEEIMALNFNQTPAATGKPPALSKGLRSQSSDYTGHVHPGTYTNTLERLVKEMEDTQRLDELQKQLQEDIRQGRGIKSPIRIGEEDSTDDEDGLLEEHKEFLKKFSVTIDAIPDHHPGEEIFNFLNSGKIFNQYTLDLRDSGFIGQSAVEKLILKSGKTDQIFLTTQGFLTSAYHYVQCPVPVLKWLFRMMSVHTDCIVSVQILSTLMEITIRNDTFSDSPVWPWIPSLSDVAAVFFNMGIDFRSLFPLENLQPDFNEDYLVSETQTTSRGKESEDSSYKPIFSTLPETNILNVVKFLGLCTSIHPEGYQDREIMLLILMLFKMSLEKQLKQIPLVDFQSLLINLMKNIRDWNTKVPELCLGINELSSHPHNLLWLVQLVPNWTSRGRQLRQCLSLVIISKLLDEKHEDVPNASNLQVSVLHRYLVQMKPSDLLKKMVLKKKAEQPDGIIDDSLHLELEKQAYYLTYILLHLVGEVSCSHSFSSGQRKHFVLLCGALEKHVKCDIREDARLFYRTKVKDLVARIHGKWQEIIQNCRPTQGQLHDFWVPDS

SEQ ID NO: 80039 - protein, 1186 aa, Homo sapiens
  Payload ID: 15956
  Gene Symbol: SLF2
  Gene Name: SMC5-SMC6 complex localization factor 2
  Uniprot ID: Q8IX21
  ENSP ID: ENSP00000359292
MTRRCMPARPGFPSSPAPGSSPPRCHLRPGSTAHAAAGKRTESPGDRKQSIIDFFKPASKQDRHMLDSPQKSNIKYGGSRLSITGTEQFERKLSSPKESKPKRVPPEKSPIIEAFMKGVKEHHEDHGIHESRRPCLSLASKYLAKGTNIYVPSSYHLPKEMKSLKKKHRSPERRKSLFIHENNEKNDRDRGKTNADSKKQTTVAEADIFNNSSRSLSSRSSLSRHHPEESPLGAKFQLSLASYCRERELKRLRKEQMEQRINSENSFSEASSLSLKSSIERKYKPRQEQRKQNDIIPGKNNLSNVENGHLSRKRSSSDSWEPTSAGSKQNKFPEKRKRNSVDSDLKSTRESMIPKARESFLEKRPDGPHQKEKFIKHIALKTPGDVLRLEDISKEPSDETDGSSAGLAPSNSGNSGHHSTRNSDQIQVAGTKETKMQKPHLPLSQEKSAIKKASNLQKNKTASSTTKEKETKLPLLSRVPSAGSSLVPLNAKNCALPVSKKDKERSSSKECSGHSTESTKHKEHKAKTNKADSNVSSGKISGGPLRSEYGTPTKSPPAALEVVPCIPSPAAPSDKAPSEGESSGNSNAGSSALKRKLRGDFDSDEESLGYNLDSDEEEETLKSLEEIMALNFNQTPAATGKPPALSKGLRSQSSDYTGHVHPGTYTNTLERLVKEMEDTQRLDELQKQLQEDIRQGRGIKSPIRIGEEDSTDDEDGLLEEHKEFLKKFSVTIDAIPDHHPGEEIFNFLNSGKIFNQYTLDLRDSGFIGQSAVEKLILKSGKTDQIFLTTQGFLTSAYHYVQCPVPVLKWLFRMMSVHTDCIVSVQILSTLMEITIRNDTFSDSPVWPWIPSLSDVAAVFFNMGIDFRSLFPLENLQPDFNEDYLVSETQTTSRGKESEDSSYKPIFSTLPETNILNVVKFLGLCTSIHPEGYQDREIMLLILMLFKMSLEKQLKQIPLVDFQSLLINLMKNIRDWNTKVPELCLGINELSSHPHNLLWLVQLVPNWTSRGRQLRQCLSLVIISKLLDEKHEDVPNASNLQVSVLHRYLVQMKPSDLLKKMVLKKKAEQPDGIIDDSLHLELEKQAYYLTYILLHLVGEVSCSHSFSSGQRKHFVLLCGALEKHVKCDIREDARLFYRTKVKDLVARIHGKWQEIIQNCRPTQVSFCYTISCILNSFAEWHSSYCLK

SEQ ID NO: 80040 - protein, 758 aa, Homo sapiens
  Payload ID: 15956
  Gene Symbol: SLF2
  Gene Name: SMC5-SMC6 complex localization factor 2
  ENSP ID: ENSP00000359294
MTRRCMPARPGFPSSPAPGSSPPRCHLRPGSTAHAAAGKRTESPGDRKQSIIDFFKPASKQDRHMLDSPQKSNIKYGGSRLSITGTEQFERKLSSPKESKPKRVPPEKSPIIEAFMKGVKEHHEDHGIHESRRPCLSLASKYLAKGTNIYVPSSYHLPKEMKSLKKKHRSPERRKSLFIHENNEKNDRDRGKTNADSKKQTTVAEADIFNNSSRSLSSRSSLSRHHPEESPLGAKFQLSLASYCRERELKRLRKEQMEQRINSENSFSEASSLSLKSSIERKYKPRQEQRKQNDIIPGKNNLSNVENGHLSRKRSSSDSWEPTSAGSKQNKFPEKRKRNSVDSDLKSTRESMIPKARESFLEKRPDGPHQKEKFIKHIALKTPGDVLRLEDISKEPSDETDGSSAGLAPSNSGNSGHHSTRNSDQIQVAGTKETKMQKPHLPLSQEKSAIKKASNLQKNKTASSTTKEKETKLPLLSRVPSAGSSLVPLNAKNCALPVSKKDKERSSSKECSGHSTESTKHKEHKAKTNKADSNVSSGKISGGPLRSEYGTPTKSPPAALEVVPCIPSPAAPSDKAPSEGESSGNSNAGSSALKRKLRGDFDSDEESLGYNLDSDEEEETLKSLEEIMALNFNQTPAATGKPPALSKGLRSQSSDYTGHVHPGTYTNTLERLVKEMEDTQRFVSIKINLLNLTFCLFVWLTFNLPFLKNHEKLACILDSVVNCVRIRYVGRTQWLMPVITTLWETQARLLEPRSSRLR

SEQ ID NO: 80041 - protein, 63 aa, Homo sapiens
  Payload ID: 15956
  Gene Symbol: SLF2
  Gene Name: SMC5-SMC6 complex localization factor 2
  Uniprot ID: Q8IX21
  ENSP ID: ENSP00000476379
MTRRCMPARPGFPSSPAPGSSPPRCHLRPGSTAHAAAGKRTESPGDRYRAEGLRRGRVAGARV

SEQ ID NO: 80042 - protein, 3661 aa, Homo sapiens
  Payload ID: 15957
  Gene Symbol: SMG1
  Gene Name: SMG1 phosphatidylinositol 3-kinase-related kinase
  Uniprot ID: Q96Q15
  ENSP ID: ENSP00000402515
MSRRAPGSRLSSGGGGGGTKYPRSWNDWQPRTDSASADPDNLKYSSSRDRGGSSSYGLQPSNSAVVSRQRHDDTRVHADIQNDEKGGYSVNGGSGENTYGRKSLGQELRVNNVTSPEFTSVQHGSRALATKDMRKSQERSMSYSDESRLSNLLRRITREDDRDRRLATVKQLKEFIQQPENKLVLVKQLDNILAAVHDVLNESSKLLQELRQEGACCLGLLCASLSYEAEKIFKWIFSKFSSSAKDEVKLLYLCATYKALETVGEKKAFSSVMQLVMTSLQSILENVDTPELLCKCVKCILLVARCYPHIFSTNFRDTVDILVGWHIDHTQKPSLTQQVSGWLQSLEPFWVADLAFSTTLLGQFLEDMEAYAEDLSHVASGESVDEDVPPPSVSLPKLAALLRVFSTVVRSIGERFSPIRGPPITEAYVTDVLYRVMRCVTAANQVFFSEAVLTAANECVGVLLGSLDPSMTIHCDMVITYGLDQLENCQTCGTDYIISVLNLLTLIVEQINTKLPSSFVEKLFIPSSKLLFLRYHKEKEVVAVAHAVYQAVLSLKNIPVLETAYKLILGEMTCALNNLLHSLQLPEACSEIKHEAFKNHVFNVDNAKFVVIFDLSALTTIGNAKNSLIGMWALSPTVFALLSKNLMIVHSDLAVHFPAIQYAVLYTLYSHCTRHDHFISSSLSSSSPSLFDGAVISTVTTATKKHFSIILNLLGILLKKDNLNQDTRKLLMTWALEAAVLMKKSETYAPLFSLPSFHKFCKGLLANTLVEDVNICLQACSSLHALSSSLPDDLLQRCVDVCRVQLVHSGTRIRQAFGKLLKSIPLDVVLSNNNHTEIQEISLALRSHMSKAPSNTFHPQDFSDVISFILYGNSHRTGKDNWLERLFYSCQRLDKRDQSTIPRNLLKTDAVLWQWAIWEAAQFTVLSKLRTPLGRAQDTFQTIEGIIRSLAAHTLNPDQDVSQWTTADNDEGHGNNQLRLVLLLQYLENLEKLMYNAYEGCANALTSPPKVIRTFFYTNRQTCQDWLTRIRLSIMRVGLLAGQPAVTVRHGFDLLTEMKTTSLSQGNELEVTIMMVVEALCELHCPEAIQGIAVWSSSIVGKNLLWINSVAQQAEGRFEKASVEYQEHLCAMTGVDCCISSFDKSVLTLANAGRNSASPKHSLNGESRKTVLSKPTDSSPEVINYLGNKACECYISIADWAAVQEWQNAIHDLKKSTSSTSLNLKADFNYIKSLSSFESGKFVECTEQLELLPGENINLLAGGSKEKIDMKKLLPNMLSPDPRELQKSIEVQLLRSSVCLATALNPIEQDQKWQSITENVVKYLKQTSRIAIGPLRLSTLTVSQSLPVLSTLQLYCSSALENTVSNRLSTEDCLIPLFSEALRSCKQHDVRPWMQALRYTMYQNQLLEKIKEQTVPIRSHLMELGLTAAKFARKRGNVSLATRLLAQCSEVQLGKTTTAQDLVQHFKKLSTQGQVDEKWGPELDIEKTKLLYTAGQSTHAMEMLSSCAISFCKSVKAEYAVAKSILTLAKWIQAEWKEISGQLKQVYRAQHQQNFTGLSTLSKNILTLIELPSVNTMEEEYPRIESESTVHIGVGEPDFILGQLYHLSSVQAPEVAKSWAALASWAYRWGRKVVDNASQGEGVRLLPREKSEVQNLLPDTITEEEKERIYGILGQAVCRPAGIQDEDITLQITESEDNEEDDMVDVIWRQLISSCPWLSELDESATEGVIKVWRKVVDRIFSLYKLSCSAYFTFLKLNAGQIPLDEDDPRLHLSHRVEQSTDDMIVMATLRLLRLLVKHAGELRQYLEHGLETTPTAPWRGIIPQLFSRLNHPEVYVRQSICNLLCRVAQDSPHLILYPAIVGTISLSSESQASGNKFSTAIPTLLGNIQGEELLVSECEGGSPPASQDSNKDEPKSGLNEDQAMMQDCYSKIVDKLSSANPTMVLQVQMLVAELRRVTVLWDELWLGVLLQQHMYVLRRIQQLEDEVKRVQNNNTLRKEEKIAIMREKHTALMKPIVFALEHVRSITAAPAETPHEKWFQDNYGDAIENALEKLKTPLNPAKPGSSWIPFKEIMLSLQQRAQKRASYILRLEEISPWLAAMTNTEIALPGEVSARDTVTIHSVGGTITILPTKTKPKKLLFLGSDGKSYPYLFKGLEDLHLDERIMQFLSIVNTMFATINRQETPRFHARHYSVTPLGTRSGLIQWVDGATPLFGLYKRWQQREAALQAQKAQDSYQTPQNPGIVPRPSELYYSKIGPALKTVGLSLDVSRRDWPLHVMKAVLEELMEATPPNLLAKELWSSCTTPDEWWRVTQSYARSTAVMSMVGYIIGLGDRHLDNVLIDMTTGEVVHIDYNVCFEKGKSLRVPEKVPFRMTQNIETALGVTGVEGVFRLSCEQVLHIMRRGRETLLTLLEAFVYDPLVDWTAGGEAGFAGAVYGGGGQQAESKQSKREMEREITRSLFSSRVAEIKVNWFKNRDEMLVVLPKLDGSLDEYLSLQEQLTDVEKLQGKLLEEIEFLEGAEGVDHPSHTLQHRYSEHTQLQTQQRAVQEAIQVKLNEFEQWITHYQAAFNNLEATQLASLLQEISTQMDLGPPSYVPATAFLQNAGQAHLISQCEQLEGEVGALLQQRRSVLRGCLEQLHHYATVALQYPKAIFQKHRIEQWKTWMEELICNTTVERCQELYRKYEMQYAPQPPPTVCQFITATEMTLQRYAADINSRLIRQVERLKQEAVTVPVCEDQLKEIERCIKVFLHENGEEGSLSLASVIISALCTLTRRNLMMEGAASSAGEQLVDLTSRDGAWFLEELCSMSGNVTCLVQLLKQCHLVPQDLDIPNPMEASETVHLANGVYTSLQELNSNFRQIIFPEALRCLMKGEYTLESMLHELDGLIEQTTDGVPLQTLVESLQAYLRNAAMGLEEETHAHYIDVARLLHAQYGELIQPRNGSVDETPKMSAGQMLLVAFDGMFAQVETAFSLLVEKLNKMEIPIAWRKIDIIREARSTQVNFFDDDNHRQVLEEIFFLKRLQTIKEFFRLCGTFSKTLSGSSSLEDQNTVNGPVQIVNVKTLFRNSCFSEDQMAKPIKAFTADFVRQLLIGLPNQALGLTLCSFISALGVDIIAQVEAKDFGAESKVSVDDLCKKAVEHNIQIGKFSQLVMNRATVLASSYDTAWKKHDLVRRLETSISSCKTSLQRVQLHIAMFQWQHEDLLINRPQAMSVTPPPRSAILTSMKKKLHTLSQIETSIATVQEKLAALESSIEQRLKWAGGANPALAPVLQDFEATIAERRNLVLKESQRASQVTFLCSNIIHFESLRTRTAEALNLDAALFELIKRCQQMCSFASQFNSSVSELELRLLQRVDTGLEHPIGSSEWLLSAHKQLTQDMSTQRAIQTEKEQQIETVCETIQNLVDNIKTVLTGHNRQLGDVKHLLKAMAKDEEAALADGEDVPYENSVRQFLGEYKSWQDNIQTVLFTLVQAMGQVRSQEHVEMLQEITPTLKELKTQSQSIYNNLVSFASPLVTDATNECSSPTSSATYQPSFAAAVRSNTGQKTQPDVMSQNARKLIQKNLATSADTPPSTVPGTGKSVACSPKKAVRDPKTGKAVQERNSYAVSVWKRVKAKLEGRDVDPNRRMSVAEQVDYVIKEATNLDNLAQLYEGWTAWV

SEQ ID NO: 80043 - protein, 335 aa, Homo sapiens
  Payload ID: 15957
  Gene Symbol: SMG1
  Gene Name: SMG1 phosphatidylinositol 3-kinase-related kinase
  ENSP ID: ENSP00000432825
MRFLRTDSASADPDNLKYSSSRDRGGSSSYGLQPSNSAVVSRQRHDDTRVHADIQNDEKGGYSVNGGSGENTYGRKSLGQELRVNNVTSPEFTSVQHGSRALATKDMRKSQERSMSYSDESRLSNLLRRITREDDRDRRLATVKQLKEFIQQPENKLVLVKQLDNILAAVHDVLNESSKLLQELRQEGACCLGLLCASLSYEAEKIFKWIFSKFSSSAKDEVKLLYLCATYKALETVGEKKAFSSVMQLVMTSLQSILENVDTPELLCKCVKCILLVARCYPHIFSTNFRDTVDILVGWHIDHTQKPSLTQQVSGWLQSLEPFWVADLAFSTTLL

SEQ ID NO: 80044 - protein, 62 aa, Homo sapiens
  Payload ID: 15957
  Gene Symbol: SMG1
  Gene Name: SMG1 phosphatidylinositol 3-kinase-related kinase
  ENSP ID: ENSP00000455453
MRKSQERSMSYSDESRLSNLLRRITREDDRDRRLATVKQLKEFIQQPENKLVLVKQLDNILA

SEQ ID NO: 80045 - protein, 853 aa, Homo sapiens
  Payload ID: 15957
  Gene Symbol: SMG1
  Gene Name: SMG1 phosphatidylinositol 3-kinase-related kinase
  ENSP ID: ENSP00000455861
  MOD_RES (1)..(1): Any amino acid
XEMTCALNNLLHSLQLPEACSEIKHEAFKNHVFNVDNAKFVVIFDLSALTTIGNAKNSLIGMWALSPTVFALLSKNLMIVHSDLAVHFPAIQYAVLYTLYSHCTRHDHFISSSLSSSSPSLFDGAVISTVTTATKKHFSIILNLLGILLKKDNLNQDTRKLLMTWALEAAVLMKKSETYAPLFSLPSFHKFCKGLLANTLVEDVNICLQACSSLHALSSSLPDDLLQRCVDVCRVQLVHSGTRIRQAFGKLLKSIPLDVVLSNNNHTEIQEISLALRSHMSKAPSNTFHPQDFSDVISFILYGNSHRTGKDNWLERLFYSCQRLDKRDQSTIPRNLLKTDAVLWQWAIWEAAQFTVLSKLRTPLGRAQDTFQTIEGIIRSLAAHTLNPDQDVSQWTTADNDEGHGNNQLRLVLLLQYLENLEKLMYNAYEGCANALTSPPKVIRTFFYTNRQTCQDWLTRIRLSIMRVGLLAGQPAVTVRHGFDLLTEMKTTSLSQGNELEVTIMMVVEALCELHCPEAIQGIAVWSSSIVGKNLLWINSVAQQAEGRFEKASVEYQEHLCAMTGVDCCISSFDKSVLTLANAGRNSASPKHSLNGESRKTVLSKPTDSSPEVINYLGNKACECYISIADWAAVQEWQNAIHDLKKSTSSTSLNLKADFNYIKSLSSFESGKFVECTEQLELLPGENINLLAGGSKEKIDMKKLLPNMLSPDPRELQKSIEVQLLRSSVCLATALNPIEQDQKWQSITENVVKYLKQTSRIAIGPLRLSTLTVSQSLPVLSTLQLYCSSALENTVSNRLSTEDCLIPLFSEALRSCKQHDVRPWMQALRYTMYQNQLLEKIKGKWFFFLVREN

SEQ ID NO: 80046 - protein, 56 aa, Homo sapiens
  Payload ID: 15957
  Gene Symbol: SMG1
  Gene Name: SMG1 phosphatidylinositol 3-kinase-related kinase
  ENSP ID: ENSP00000456025
MRFLRTDSASADPDNLKYSSSRDRGGSSSYGLQPSNSAVVSRQRHDDTRVHADIQN

SEQ ID NO: 80047 - protein, 3551 aa, Homo sapiens
  Payload ID: 15957
  Gene Symbol: SMG1
  Gene Name: SMG1 phosphatidylinositol 3-kinase-related kinase
  ENSP ID: ENSP00000456259
QPSNSAVVSRQRHDDTRVHADIQNDEKERSMSYSDESRLSNLLRRITREDDRDRRLATVKQLKEFIQQPENKLVLVKQLDNILAAVHDVLNESSKLLQELRQEGACCLGLLCASLSYEAEKIFKWIFSKFSSSAKDEVKLLYLCATYKALETVGEKKAFSSVMQLVMTSLQSILENVDTPELLCKCVKCILLVARCYPHIFSTNFRDTVDILVGWHIDHTQKPSLTQQVSGWLQSLEPFWVADLAFSTTLLGQFLEDMEAYAEDLSHVASGESVDEDVPPPSVSLPKLAALLRVFSTVVRSIGERFSPIRGPPITEAYVTDVLYRVMRCVTAANQVFFSEAVLTAANECVGVLLGSLDPSMTIHCDMVITYGLDQLENCQTCGTDYIISVLNLLTLIVEQINTKLPSSFVEKLFIPSSKLLFLRYHKEKEVVAVAHAVYQAVLSLKNIPVLETAYKLILGEMTCALNNLLHSLQLPEACSEIKHEAFKNHVFNVDNAKFVVIFDLSALTTIGNAKNSLIGMWALSPTVFALLSKNLMIVHSDLAVHFPAIQYAVLYTLYSHCTRHDHFISSSLSSSSPSLFDGAVISTVTTATKKHFSIILNLLGILLKKDNLNQDTRKLLMTWALEAAVLMKKSETYAPLFSLPSFHKFCKGLLANTLVEDVNICLQACSSLHALSSSLPDDLLQRCVDVCRVQLVHSGTRIRQAFGKLLKSIPLDVVLSNNNHTEIQEISLALRSHMSKAPSNTFHPQDFSDVISFILYGNSHRTGKDNWLERLFYSCQRLDKRDQSTIPRNLLKTDAVLWQWAIWEAAQFTVLSKLRTPLGRAQDTFQTIEGIIRSLAAHTLNPDQDVSQWTTADNDEGHGNNQLRLVLLLQYLENLEKLMYNAYEGCANALTSPPKVIRTFFYTNRQTCQDWLTRIRLSIMRVGLLAGQPAVTVRHGFDLLTEMKTTSLSQGNELEVTIMMVVEALCELHCPEAIQGIAVWSSSIVGKNLLWINSVAQQAEGRFEKASVEYQEHLCAMTGVDCCISSFDKSVLTLANAGRNSASPKHSLNGESRKTVLSKPTDSSPEVINYLGNKACECYISIADWAAVQEWQNAIHDLKKSTSSTSLNLKADFNYIKSLSSFESGKFVECTEQLELLPGENINLLAGGSKEKIDMKKLLPNMLSPDPRELQKSIEVQLLRSSVCLATALNPIEQDQKWQSITENVVKYLKQTSRIAIGPLRLSTLTVSQSLPVLSTLQLYCSSALENTVSNRLSTEDCLIPLFSEALRSCKQHDVRPWMQALRYTMYQNQLLEKIKEQTVPIRSHLMELGLTAAKFARKRGNVSLATRLLAQCSEVQLGKTTTAQDLVQHFKKLSTQGQVDEKWGPELDIEKTKLLYTAGQSTHAMEMLSSCAISFCKSVKAEYAVAKSILTLAKWIQAEWKEISGQLKQVYRAQHQQNFTGLSTLSKNILTLIELPSVNTMEEEYPRIESESTVHIGVGEPDFILGQLYHLSSVQAPEVAKSWAALASWAYRWGRKVVDNASQGEGVRLLPREKSEVQNLLPDTITEEEKERIYGILGQAVCRPAGIQDEDITLQITESEDNEEDDMVDVIWRQLISSCPWLSELDESATEGVIKVWRKVVDRIFSLYKLSCSAYFTFLKLNAGQIPLDEDDPRLHLSHRVEQSTDDMIVMATLRLLRLLVKHAGELRQYLEHGLETTPTAPWRGIIPQLFSRLNHPEVYVRQSICNLLCRVAQDSPHLILYPAIVGTISLSSESQASGNKFSTAIPTLLGNIQGEELLVSECEGGSPPASQDSNKDEPKSGLNEDQAMMQDCYSKIVDKLSSANPTMVLQVQMLVAELRRVTVLWDELWLGVLLQQHMYVLRRIQQLEDEVKRVQNNNTLRKEEKIAIMREKHTALMKPIVFALEHVRSITAAPAETPHEKWFQDNYGDAIENALEKLKTPLNPAKPGSSWIPFKEIMLSLQQRAQKRASYILRLEEISPWLAAMTNTEIALPGEVSARDTVTIHSVGGTITILPTKTKPKKLLFLGSDGKSYPYLFKGLEDLHLDERIMQFLSIVNTMFATINRQETPRFHARHYSVTPLGTRSGLIQWVDGATPLFGLYKRWQQREAALQAQKAQDSYQTPQNPGIVPRPSELYYSKIGPALKTVGLSLDVSRRDWPLHVMKAVLEELMEATPPNLLAKELWSSCTTPDEWWRVTQSYARSTAVMSMVGYIIGLGDRHLDNVLIDMTTGEVVHIDYNVCFEKGKSLRVPEKVPFRMTQNIETALGVTGVEGVFRLSCEQVLHIMRRGRETLLTLLEAFVYDPLVDWTAGGEAGFAGAVYGGGGQQAESKQSKREMEREITRSLFSSRVAEIKVNWFKNRDEMLVVLPKLDGSLDEYLSLQEQLTDVEKLQGKLLEEIEFLEGAEGVDHPSHTLQHRYSEHTQLQTQQRAVQEAIQVKLNEFEQWITHYQAAFNNLEATQLASLLQEISTQMDLGPPSYVPATAFLQNAGQAHLISQCEQLEGEVGALLQQRRSVLRGCLEQLHHYATVALQYPKAIFQKHRIEQWKTWMEELICNTTVERCQELYRKYEMQYAPQPPPTVCQFITATEMTLQRYAADINSRLIRQVERLKQEAVTVPVCEDQLKEIERCIKVFLHENGEEGSLSLASVIISALCTLTRRNLMMEGAASSAGEQLVDLTSRDGAWFLEELCSMSGNVTCLVQLLKQCHLVPQDLDIPNPMEASETVHLANGVYTSLQELNSNFRQIIFPEALRCLMKGEYTLESMLHELDGLIEQTTDGVPLQTLVESLQAYLRNAAMGLEEETHAHYIDVARLLHAQYGELIQPRNGSVDETPKMSAGQMLLVAFDGMFAQVETAFSLLVEKLNKMEIPIAWRKIDIIREARSTQVNFFDDDNHRQVLEEIFFLKRLQTIKEFFRLCGTFSKTLSGSSSLEDQNTVNGPVQIVNVKTLFRNSCFSEDQMAKPIKAFTADFVRQLLIGLPNQALGLTLCSFISALGVDIIAQVEAKDFGAESKVSVDDLCKKAVEHNIQIGKFSQLVMNRATVLASSYDTAWKKHDLVRRLETSISSCKTSLQRVQLHIAMFQWQHEDLLINRPQAMSVTPPPRSAILTSMKKKLHTLSQIETSIATVQEKLAALESSIEQRLKWAGGANPALAPVLQDFEATIAERRNLVLKESQRASQVTFLCSNIIHFESLRTRTAEALNLDAALFELIKRCQQMCSFASQFNSSVSELELRLLQRVDTGLEHPIGSSEWLLSAHKQLTQDMSTQRAIQTEKEQQIETVCETIQNLVDNIKTVLTGHNRQLGDVKHLLKAMAKDEEAALADGEDVPYENSVRQFLGEYKSWQDNIQTVLFTLVQAMGQVRSQEHVEMLQEITPTLKELKTQSQSIYNNLVSFASPLVTDATNECSSPTSSATYQPSFAAAVRSNTGQKTQPDVMSQNARKLIQKNLATSADTPPSTVPGTGKSVACSPKKAVRDPKTGKAVQERNSYAVSVWKRVKAKLEGRDVDPNRRMSVAEQVDYVIKEATNLDNLAQLYEGWTAWV

SEQ ID NO: 80048 - protein, 607 aa, Homo sapiens
  Payload ID: 15957
  Gene Symbol: SMG1
  Gene Name: SMG1 phosphatidylinositol 3-kinase-related kinase
  ENSP ID: ENSP00000458380
MRFLRTDSASADPDNLKYSSSRDRGGSSSYGLQPSNSAVVSRQRHDDTRVHADIQNDEKGGYSVNGGSGENTYGRKSLGQELRVNNVTSPEFTSVQHGSRALATKDMRKSQERSMSYSDESRLSNLLRRITREDDRDRRLATVKQLKEFIQQPENKLVLVKQLDNILAAVHDVLNESSKLLQELRQEGACCLGLLCASLSYEAEKIFKWIFSKFSSSAKDEVKLLYLCATYKALETVGEKKAFSSVMQLVMTSLQSILENVDTPELLCKCVKCILLVARCYPHIFSTNFRDTVDILVGWHIDHTQKPSLTQQVSGWLQSLEPFWVADLAFSTTLLGQFLEDMEAYAEDLSHVASGESVDEDVPPPSVSLPKLAALLRVFSTVVRSIGERFSPIRGPPITEAYVTDVLYRVMRCVTAANQVFFSEAVLTAANECVGVLLGSLDPSMTIHCDMVITYGLDQLENCQTCGTDYIISVLNLLTLIVEQINTKLPSSFVEKLFIPSSKLLFLRYHKEKEVVAVAHAVYQAVLSLKNIPVLETAYKLILGEMTCALNNLLHSLQLPEACSEIKHEAFKNHVFNVDNAKFVVIFDLSALTTIGNAKNSLIGVSL

SEQ ID NO: 80049 - protein, 321 aa, Homo sapiens
  Payload ID: 15957
  Gene Symbol: SMG1
  Gene Name: SMG1 phosphatidylinositol 3-kinase-related kinase
  ENSP ID: ENSP00000458558
  MOD_RES (1)..(1): Any amino acid
XHFPAIQYAVLYTLYSHCTRHDHFISSSLSSSSPSLFDGAVISTVTTATKKHFSIILNLLGILLKKDNLNQDTRKLLMTWALEAAVLMKKSETYAPLFSLPSFHKFCKGLLANTLVEDVNICLQACSSLHALSSSLPDDLLQRCVDVCRVQLVHSGTRIRQAFGKLLKSIPLDVVLSNNNHTEIQEISLALRSHMSKAPSNTFHPQDFSDVISFILYGNSHRTGKDNWLERLFYSCQRLDKRDQSTIPRNLLKTDAVLWQWAIWEAAQFTVLSKLRTPLGRAQDTFQTIEGIIRSLAAHTLNPDQDVSQWTTADNDEGHGH

SEQ ID NO: 80050 - protein, 551 aa, Homo sapiens
  Payload ID: 15957
  Gene Symbol: SMG1
  Gene Name: SMG1 phosphatidylinositol 3-kinase-related kinase
  ENSP ID: ENSP00000460854
  MOD_RES (1)..(1): Any amino acid
XTDSASADPDNLKYSSSRDRGGSSSYGLQPSNSAVVSRQRHDDTRVHADIQNDEKERSMSYSDESRLSNLLRRITREDDRDRRLATVKQLKEFIQQPENKLVLVKQLDNILAAVHDVLNESSKLLQELRQEGACCLGLLCASLSYEAEKIFKWIFSKFSSSAKDEVKLLYLCATYKALETVGEKKAFSSVMQLVMTSLQSILENVDTPELLCKCVKCILLVARCYPHIFSTNFRDTVDILVGWHIDHTQKPSLTQQVSGWLQSLEPFWVADLAFSTTLLGQFLEDMEAYAEDLSHVASGESVDEDVPPPSVSLPKLAALLRVFSTVVRSIGERFSPIRGPPITEAYVTDVLYRVMRCVTAANQVFFSEAVLTAANECVGVLLGSLDPSMTIHCDMVITYGLDQLENCQTCGTDYIISVLNLLTLIVEQINTKLPSSFVEKLFIPSSKLLFLRYHKEKEVVAVAHAVYQAVLSLKNIPVLETAYKLILGEMTCALNNLLHSLQLPEACSEIKHEAFKNHVFNVDNAKFVVIFDLSALTTIGNAKNSLIGVSL

SEQ ID NO: 80051 - protein, 197 aa, Homo sapiens
  Payload ID: 15957
  Gene Symbol: SMG1
  Gene Name: SMG1 phosphatidylinositol 3-kinase-related kinase
  ENSP ID: ENSP00000481150
MSYSDESRLSNLLRRITREDDRDRRLATVKQLKEFIQQPENKLVLVKQLDNILAAVHDVLNESSKLLQELRQEGACCLGLLCASLSYEAEKIFKWIFSKFSSSAKDEVKLLYLCATYKALETVGEKKAFSSVMQLVMTSLQSILENVDTPELLCKCVKCILLVARCYPHIFSTNFRVSSSFRFSDHGVRGMVVCVRI

SEQ ID NO: 80052 - protein, 85 aa, Homo sapiens
  Payload ID: 15957
  Gene Symbol: SMG1
  Gene Name: SMG1 phosphatidylinositol 3-kinase-related kinase
  ENSP ID: ENSP00000484278
  MOD_RES (1)..(1): Any amino acid
XEMKTTSLSQGNELEVTIMMVVEALCELHCPEAIQGIAVWSSSIVGKNLLWINSVAQQAEGSIEACYKSLHQEASSVCSLVSSNT

SEQ ID NO: 80053 - protein, 1016 aa, Homo sapiens
  Payload ID: 15958
  Gene Symbol: SMG5
  Gene Name: SMG5 nonsense mediated mRNA decay factor
  Uniprot ID: Q9UPR3
  ENSP ID: ENSP00000355261
MSQGPPTGESSEPEAKVLHTKRLYRAVVEAVHRLDLILCNKTAYQEVFKPENISLRNKLRELCVKLMFLHPVDYGRKAEELLWRKVYYEVIQLIKTNKKHIHSRSTLECAYRTHLVAGIGFYQHLLLYIQSHYQLELQCCIDWTHVTDPLIGCKKPVSASGKEMDWAQMACHRCLVYLGDLSRYQNELAGVDTELLAERFYYQALSVAPQIGMPFNQLGTLAGSKYYNVEAMYCYLRCIQSEVSFEGAYGNLKRLYDKAAKMYHQLKKCETRKLSPGKKRCKDIKRLLVNFMYLQSLLQPKSSSVDSELTSLCQSVLEDFNLCLFYLPSSPNLSLASEDEEEYESGYAFLPDLLIFQMVIICLMCVHSLERAGSKQYSAAIAFTLALFSHLVNHVNIRLQAELEEGENPVPAFQSDGTDEPESKEPVEKEEEPDPEPPPVTPQVGEGRKSRKFSRLSCLRRRRHPPKVGDDSDLSEGFESDSSHDSARASEGSDSGSDKSLEGGGTAFDAETDSEMNSQESRSDLEDMEEEEGTRSPTLEPPRGRSEAPDSLNGPLGPSEASIASNLQAMSTQMFQTKRCFRLAPTFSNLLLQPTTNPHTSASHRPCVNGDVDKPSEPASEEGSESEGSESSGRSCRNERSIQEKLQVLMAEGLLPAVKVFLDWLRTNPDLIIVCAQSSQSLWNRLSVLLNLLPAAGELQESGLALCPEVQDLLEGCELPDLPSSLLLPEDMALRNLPPLRAAHRRFNFDTDRPLLSTLEESVVRICCIRSFGHFIARLQGSILQFNPEVGIFVSIAQSEQESLLQQAQAQFRMAQEEARRNRLMRDMAQLRLQLEVSQLEGSLQQPKAQSAMSPYLVPDTQALCHHLPVIRQLATSGRFIVIIPRTVIDGLDLLKKEHPGARDGIRYLEAEFKKGNRYIRCQKEVGKSFERHKLKRQDADAWTLYKILDSCKQLTLAQGAGEEDPSGMVTIITGLPLDNPSVLSGPMQAALQAAAHASVDIKNVLDFYKQWKEIG

SEQ ID NO: 80054 - protein, 1419 aa, Homo sapiens
  Payload ID: 15959
  Gene Symbol: SMG6
  Gene Name: SMG6 nonsense mediated mRNA decay factor
  Uniprot ID: Q86US8
  ENSP ID: ENSP00000263073
MAEGLERVRISASELRGILATLAPQAGSRENMKELKEARPRKDNRRPDLEIYKPGLSRLRNKPKIKEPPGSEEFKDEIVNDRDCSAVENGTQPVKDVCKELNNQEQNGPIDPENNRGQESFPRTAGQEDRSLKIIKRTKKPDLQIYQPGRRLQTVSKESASRVEEEEVLNQVEQLRVEEDECRGNVAKEEVANKPDRAEIEKSPGGGRVGAAKGEKGKRMGKGEGVRETHDDPARGRPGSAKRYSRSDKRRNRYRTRSTSSAGSNNSAEGAGLTDNGCRRRRQDRTKERPRLKKQVSVSSTDSLDEDRIDEPDGLGPRRSSERKRHLERNWSGRGEGEQKNSAKEYRGTLRVTFDAEAMNKESPMVRSARDDMDRGKPDKGLSSGGKGSEKQESKNPKQELRGRGRGILILPAHTTLSVNSAGSPESAPLGPRLLFGSGSKGSRSWGRGGTTRRLWDPNNPDQKPALKTQTPQLHFLDTDDEVSPTSWGDSRQAQASYYKFQNSDNPYYYPRTPGPASQYPYTGYNPLQYPVGPTNGVYPGPYYPGYPTPSGQYVCSPLPTSTMSPEEVEQHMRNLQQQELHRLLRVADNQELQLSNLLSRDRISPEGLEKMAQLRAELLQLYERCILLDIEFSDNQNVDQILWKNAFYQVIEKFRQLVKDPNVENPEQIRNRLLELLDEGSDFFDSLLQKLQVTYKFKLEDYMDGLAIRSKPLRKTVKYALISAQRCMICQGDIARYREQASDTANYGKARSWYLKAQHIAPKNGRPYNQLALLAVYTRRKLDAVYYYMRSLAASNPILTAKESLMSLFEETKRKAEQMEKKQHEEFDLSPDQWRKGKKSTFRHVGDDTTRLEIWIHPSHPRSSQGTESGKDSEQENGLGSLSPSDLNKRFILSFLHAHGKLFTRIGMETFPAVAEKVLKEFQVLLQHSPSPIGSTRMLQLMTINMFAVHNSQLKDCFSEECRSVIQEQAAALGLAMFSLLVRRCTCLLKESAKAQLSSPEDQDDQDDIKVSSFVPDLKELLPSVKVWSDWMLGYPDTWNPPPTSLDLPSHVAVDVWSTLADFCNILTAVNQSEVPLYKDPDDDLTLLILEEDRLLSGFVPLLAAPQDPCYVEKTSDKVIAADCKRVTVLKYFLEALCGQEEPLLAFKGGKYVSVAPVPDTMGKEMGSQEGTRLEDEEEDVVIEDFEEDSEAEGSGGEDDIRELRAKKLALARKIAEQQRRQEKIQAVLEDHSQMRQMELEIRPLFLVPDTNGFIDHLASLARLLESRKYILVVPLIVINELDGLAKGQETDHRAGGYARVVQEKARKSIEFLEQRFESRDSCLRALTSRGNELESIAFRSEDITGQLGNNDDLILSCCLHYCKDKAKDFMPASKEEPIRLLREVVLLTDDRNLRVKALTRNVPVRDIPAFLTWAQVG

SEQ ID NO: 80055 - protein, 511 aa, Homo sapiens
  Payload ID: 15959
  Gene Symbol: SMG6
  Gene Name: SMG6 nonsense mediated mRNA decay factor
  Uniprot ID: Q86US8
  ENSP ID: ENSP00000346977
METFPAVAEKVLKEFQVLLQHSPSPIGSTRMLQLMTINMFAVHNSQLKDCFSEECRSVIQEQAAALGLAMFSLLVRRCTCLLKESAKAQLSSPEDQDDQDDIKVSSFVPDLKELLPSVKVWSDWMLGYPDTWNPPPTSLDLPSHVAVDVWSTLADFCNILTAVNQSEVPLYKDPDDDLTLLILEEDRLLSGFVPLLAAPQDPCYVEKTSDKVIAADCKRVTVLKYFLEALCGQEEPLLAFKGGKYVSVAPVPDTMGKEMGSQEGTRLEDEEEDVVIEDFEEDSEAEGSGGEDDIRELRAKKLALARKIAEQQRRQEKIQAVLEDHSQMRQMELEIRPLFLVPDTNGFIDHLASLARLLESRKYILVVPLIVINELDGLAKGQETDHRAGGYARVVQEKARKSIEFLEQRFESRDSCLRALTSRGNELESIAFRSEDITGQLGNNDDLILSCCLHYCKDKAKDFMPASKEEPIRLLREVVLLTDDRNLRVKALTRNVPVRDIPAFLTWAQVG

SEQ ID NO: 80056 - protein, 511 aa, Homo sapiens; identical to SEQ ID NO: 80055
  Payload ID: 15959
  Gene Symbol: SMG6
  Gene Name: SMG6 nonsense mediated mRNA decay factor
  Uniprot ID: Q86US8
  ENSP ID: ENSP00000440283

SEQ ID NO: 80057 - protein, 162 aa, Homo sapiens
  Payload ID: 15959
  Gene Symbol: SMG6
  Gene Name: SMG6 nonsense mediated mRNA decay factor
  ENSP ID: ENSP00000458635
METFPAVAEKVLKEFQVLLQHSPSPIGSTRMLQLMTINMFAVHNSQLKDCFSEECRSVIQEQAAALGLAMFSLLVRRCTCLLKESAKAQLSSPEDQDDQDDIKVSSFVPDLKELLPSVKVWSDWMLGYPDTWNPPPTSLDLPSHVAVDVWSTLADFCNILTA

SEQ ID NO: 80058 - protein, 164 aa, Homo sapiens
  Payload ID: 15959
  Gene Symbol: SMG6
  Gene Name: SMG6 nonsense mediated mRNA decay factor
  ENSP ID: ENSP00000459164
METFPAVAEKVLKEFQVLLQHSPSPIGSTRMLQLMTINMFAVHNSQLKDCFSEECRSVIQEQAAALGLAMFSLLVRRCTCLLKESAKAQLSSPEDQDDQDDIKVSSFVPDLKELLPSVKVWSDWMLGYPDTWNPPPTSLDLPSHVAVDVWSTLADFCNILTAVN

SEQ ID NO: 80059 - protein, 123 aa, Homo sapiens
  Payload ID: 15959
  Gene Symbol: SMG6
  Gene Name: SMG6 nonsense mediated mRNA decay factor
  ENSP ID: ENSP00000460191
METFPAVAEKVLKEFQVLLQHSPSPIGSTRMLQLMTINMFAVHNSQLKDCFSEECRSVIQEQAAALGLAMFSLLVRRCTCLLKESAKAQLSSPEDQDDQDDIKVSSFVPDLKELLPSVKVWSD

SEQ ID NO: 80060 - protein, 208 aa, Homo sapiens
  Payload ID: 15959
  Gene Symbol: SMG6
  Gene Name: SMG6 nonsense mediated mRNA decay factor
  ENSP ID: ENSP00000460273
MTGPCIRQLSLQILFPLCVAVDVWSTLADFCNILTAVNQSEVPLYKDPDDDLTLLILEEDRLLSGFVPLLAAPQDPCYVEKTSDKVIAADCKRVTVLKYFLEALCGQEEPLLAFKGGKYVSVAPVPDTMGKEMGSQEGTRLEDEEEDVVIEDFEEDSEAEGSGGEDDIRELRAKKLALARKIAEQQRRQEKIQAVLEDHSQMRQMELE

SEQ ID NO: 80061 - protein, 119 aa, Homo sapiens
  Payload ID: 15959
  Gene Symbol: SMG6
  Gene Name: SMG6 nonsense mediated mRNA decay factor
  ENSP ID: ENSP00000460301
METFPAVAEKVLKEFQVLLQHSPSPIGSTRMLQLMTINMFAVHNSQLKDCFSEECRSVIQEQAAALGLAMFSLLVRRCTCLLKESAKAQLSSPEDQDDQDDIKVSSFVPDLKELLPSVK

SEQ ID NO: 80062 - protein, 163 aa, Homo sapiens
  Payload ID: 15959
  Gene Symbol: SMG6
  Gene Name: SMG6 nonsense mediated mRNA decay factor
  ENSP ID: ENSP00000460898
METFPAVAEKVLKEFQVLLQHSPSPIGSTRMLQLMTINMFAVHNSQLKDCFSEECRSVIQEQAAALGLAMFSLLVRRCTCLLKESAKAQLSSPEDQDDQDDIKVSSFVPDLKELLPSVKVWSDWMLGYPDTWNPPPTSLDLPSHVAVDVWSTLADFCNILTAV

SEQ ID NO: 80063 - protein, 138 aa, Homo sapiens
  Payload ID: 15959
  Gene Symbol: SMG6
  Gene Name: SMG6 nonsense mediated mRNA decay factor
  ENSP ID: ENSP00000465793
MFSLLVRRCTCLLKESAKAQLSSPEDQDDQDDIKVSSFVPDLKELLPSVKVWSDWMLGYPDTWNPPPTSLDLPSHVAVDVWSTLADFCNILTAVNQSEVPLYKDPDDDLTLLILEEDRLLSGFVPLLAAPQDPCYVEK

SEQ ID NO: 80064 - protein, 124 aa, Homo sapiens
  Payload ID: 15959
  Gene Symbol: SMG6
  Gene Name: SMG6 nonsense mediated mRNA decay factor
  ENSP ID: ENSP00000466139
MFSLLVRRCTCLLKESAKAQLSSPEDQDDQDDIKVSSFVPDLKELLPSVKVWSDWMLGYPDTWNPPPTSLDLPSHVAVDVWSTLADFCNILTAVNQSEVPLYKDPDDDLTLLILEEDRLLSGFV

SEQ ID NO: 80065 - protein, 115 aa, Homo sapiens
  Payload ID: 15959
  Gene Symbol: SMG6
  Gene Name: SMG6 nonsense mediated mRNA decay factor
  ENSP ID: ENSP00000466951
MFSLLVRRCTCLLKESAKAQLSSPEDQDDQDDIKVSSFVPDLKELLPSVKVWSDWMLGYPDTWNPPPTSLDLPSHVAVDVWSTLADFCNILTAVNQSEVPLYKDPDDDLTLLILE

SEQ ID NO: 80066 - protein, 1137 aa, Homo sapiens
  Payload ID: 15960
  Gene Symbol: SMG7
  Gene Name: SMG7 nonsense mediated mRNA decay factor
  Uniprot ID: Q92540
  ENSP ID: ENSP00000340766
MSLQSAQYLRQAEVLKADMTDSKLGPAEVWTSRQALQDLYQKMLVTDLEYALDKKVEQDLWNHAFKNQITTLQGQAKNRANPNRSEVQANLSLFLEAASGFYTQLLQELCTVFNVDLPCRVKSSQLGIISNKQTHTSAIVKPQSSSCSYICQHCLVHLGDIARYRNQTSQAESYYRHAAQLVPSNGQPYNQLAILASSKGDHLTTIFYYCRSIAVKFPFPAASTNLQKALSKALESRDEVKTKWGVSDFIKAFIKFHGHVYLSKSLEKLSPLREKLEEQFKRLLFQKAFNSQQLVHVTVINLFQLHHLRDFSNETEQHTYSQDEQLCWTQLLALFMSFLGILCKCPLQNESQEESYNAYPLPAVKVSMDWLRLRPRVFQEAVVDERQYIWPWLISLLNSFHPHEEDLSSISATPLPEEFELQGFLALRPSFRNLDFSKGHQGITGDKEGQQRRIRQQRLISIGKWIADNQPRLIQCENEVGKLLFITEIPELILEDPSEAKENLILQETSVIESLAADGSPGLKSVLSTSRNLSNNCDTGEKPVVTFKENIKTREVNRDQGRSFPPKEVRRDYSKGITVTKNDGKKDNNKRKTETKKCTLEKLQETGKQNVAVQVKSQTELRKTPVSEARKTPVTQTPTQASNSQFIPIHHPGAFPPLPSRPGFPPPTYVIPPPVAFSMGSGYTFPAGVSVPGTFLQPTAHSPAGNQVQAGKQSHIPYSQQRPSGPGPMNQGPQQSQPPSQQPLTSLPAQPTAQSTSQLQVQALTQQQQSPTKAVPALGKSPPHHSGFQQYQQADASKQLWNPPQVQGPLGKIMPVKQPYYLQTQDPIKLFEPSLQPPVMQQQPLEKKMKPFPMEPYNHNPSEVKVPEFYWDSSYSMADNRSVMAQQANIDRRGKRSPGVFRPEQDPVPRMPFEKSLLEKPSELMSHSSSFLSLTGFSLNQERYPNNSMFNEVYGKNLTSSSKAELSPSMAPQETSLYSLFEGTPWSPSLPASSDHSTPASQSPHSSNPSSLPSSPPTHNHNSVPFSNFGPIGTPDNRDRRTADRWKTDKPAMGGFGIDYLSATSSSESSWHQASTPSGTWTGHGPSMEDSSAVLMESLKSIWSSSMMHPGPSALEQLLMQQKQKQQRGQGTMNPPH

SEQ ID NO: 80067 - protein, 1170 aa, Homo sapiens
  Payload ID: 15960
  Gene Symbol: SMG7
  Gene Name: SMG7 nonsense mediated mRNA decay factor
  ENSP ID: ENSP00000356507
MRNWMFLQIVIVGENVSFKSQMRTENLKSEEHLKSSNIRQAEVLKADMTDSKLGPAEVWTSRQALQDLYQKMLVTDLEYALDKKVEQDLWNHAFKNQITTLQGQAKNRANPNRSEVQANLSLFLEAASGFYTQLLQELCTVFNVDLPCRVKSSQLGIISNKQTHTSAIVKPQSSSCSYICQHCLVHLGDIARYRNQTSQAESYYRHAAQLVPSNGQPYNQLAILASSKGDHLTTIFYYCRSIAVKFPFPAASTNLQKALSKALESRDEVKTKWGVSDFIKAFIKFHGHVYLSKSLEKLSPLREKLEEQFKRLLFQKAFNSQQLVHVTVINLFQLHHLRDFSNETEQHTYSQDEQLCWTQLLALFMSFLGILCKCPLQNESQEESYNAYPLPAVKVSMDWLRLRPRVFQEAVVDERQYIWPWLISLLNSFHPHEEDLSSISATPLPEEFELQGFLALRPSFRNLDFSKGHQGITGDKEGQQRRIRQQRLISIGKWIADNQPRLIQCENEVGKLLFITEIPELILEDPSEAKENLILQETSVIESLAADGSPGLKSVLSTSRNLSNNCDTGEKPVVTFKENIKTREVNRDQGRSFPPKEVKSQTELRKTPVSEARKTPVTQTPTQASNSQFIPIHHPGAFPPLPSRPGFPPPTYVIPPPVAFSMGSGYTFPAGVSVPGTFLQPTAHSPAGNQVQAGKQSHIPYSQQRPSGPGPMNQGPQQSQPPSQQPLTSLPAQPTAQSTSQLQVQALTQQQQSPTKAVPALGKSPPHHSGFQQYQQADASKQLWNPPQVQGPLGKIMPVKQPYYLQTQDPIKLFEPSLQPPVMQQQPLEKKMKPFPMEPYNHNPSEVKVPEFYWDSSYSMADNRSVMAQQANIDRRGKRSPGVFRPEQDPVPRMPFEDPKSSPLLPPDLLKSLAALEEEEELIFSNPPDLYPALLGPLASLPGRSLFKSLLEKPSELMSHSSSFLSLTGFSLNQERYPNNSMFNEVYGKNLTSSSKAELSPSMAPQETSLYSLFEGTPWSPSLPASSDHSTPASQSPHSSNPSSLPSSPPTHNHNSVPFSNFGPIGTPDNRDRRTADRWKTDKPAMGGFGIDYLSATSSSESSWHQASTPSGTWTGHGPSMEDSSAVLMESLKSIWSSSMMHPGPSALEQLLMQQKQKQQRGQGTMNPPH

SEQ ID NO: 80068 - protein, 756 aa, Homo sapiens
  Payload ID: 15960
  Gene Symbol: SMG7
  Gene Name: SMG7 nonsense mediated mRNA decay factor
  ENSP ID: ENSP00000388390
MLVTDLEYALDKKVEQDLWNHAFKNQITTLQGQAKNRANPNRSEVQANLSLFLEAASGFYTQLLQELCTVFNVDLPCRVKSSQLGIISNKQTHTSAIVKPQSSSCSYICQHCLVHLGDIARYRNQTSQAESYYRHAAQLVPSNGQPYNQLAILASSKGDHLTTIFYYCRSIAVKFPFPAASTNLQKALSKALESRDEVKTKWGVSDFIKAFIKFHGHVYLSKSLEKLSPLREKLEEQFKRLLFQKAFNSQQLVHVTVINLFQLHHLRDFSNETEQHTYSQDEQLCWTQLLALFMSFLGILCKCPLQNESQEESYNAYPLPAVKVSMDWLRLRPRVFQEAVVDERQYIWPWLISLLNSFHPHEEDLSSISATPLPEEFELQGFLALRPSFRNLDFSKGHQGITGDKEGQQRRIRQQRLISIGKWIADNQPRLIQCENEVGKLLFITEIPELILEDPSEAKENLILQETSVIESLAADGSPGLKSVLSTSRNLSNNCDTGEKPVVTFKENIKTREVNRDQGRSFPPKEVKSQTELRKTPVSEARKTPVTQTPTQASNSQFIPIHHPGAFPPLPSRPGFPPPTYVIPPPVAFSMGSGYTFPAGVSVPGTFLQPTAHSPAGNQVQAGKQSHIPYSQQRPSGPGPMNQGPQQSQPPSQQPLTSLPAQPTAQSTSQLQVQALTQQQQSPTKAVPALGKSPPHHSGFQQYQQADASKQLWNPPQVQGPLGKIMPVKQPYYLQTQDPIKLFEPSLQPPVMQQQP

SEQ ID NO: 80069 - protein, 73 aa, Homo sapiens
  Payload ID: 15960
  Gene Symbol: SMG7
  Gene Name: SMG7 nonsense mediated mRNA decay factor
  ENSP ID: ENSP00000400220
MSLQSAQYLRQAEVLKADMTDSKLGPAEVWTSRQALQDLYQKMLVTDLEYALDKKVEQDLGTSVCPVSHCYTK

SEQ ID NO: 80070 - protein, 184 aa, Homo sapiens
  Payload ID: 15960
  Gene Symbol: SMG7
  Gene Name: SMG7 nonsense mediated mRNA decay factor
  ENSP ID: ENSP00000410254
MSLQSAQYLRQAEVLKADMTDSKLGPAEVWTSRQALQDLYQKMLVTDLEYALDKKVEQDLWNHAFKNQITTLQGQAKNRANPNRSEVQANLSLFLEAASGFYTQLLQELCTVFNVDLPCRVKSSQLGIISNKQTHTSAIVKPQSSSCSYICQHCLVHLGDIVPYNSPLLVGRLQVTSIVHSGSW

SEQ ID NO: 80071 - protein, 1091 aa, Homo sapiens
  Payload ID: 15960
  Gene Symbol: SMG7
  Gene Name: SMG7 nonsense mediated mRNA decay factor
  Uniprot ID: Q92540
  ENSP ID: ENSP00000421358
MSLQSAQYLRQAEVLKADMTDSKLGPAEVWTSRQALQDLYQKMLVTDLEYALDKKVEQDLWNHAFKNQITTLQGQAKNRANPNRSEVQANLSLFLEAASGFYTQLLQELCTVFNVDLPCRVKSSQLGIISNKQTHTSAIVKPQSSSCSYICQHCLVHLGDIARYRNQTSQAESYYRHAAQLVPSNGQPYNQLAILASSKGDHLTTIFYYCRSIAVKFPFPAASTNLQKALSKALESRDEVKTKWGVSDFIKAFIKFHGHVYLSKSLEKLSPLREKLEEQFKRLLFQKAFNSQQLVHVTVINLFQLHHLRDFSNETEQHTYSQDEQLCWTQLLALFMSFLGILCKCPLQNESQEESYNAYPLPAVKVSMDWLRLRPRVFQEAVVDERQYIWPWLISLLNSFHPHEEDLSSISATPLPEEFELQGFLALRPSFRNLDFSKGHQGITGDKEGQQRRIRQQRLISIGKWIADNQPRLIQCENEVGKLLFITEIPELILEDPSEAKENLILQETSVIESLAADGSPGLKSVLSTSRNLSNNCDTGEKPVVTFKENIKTREVNRDQGRSFPPKEVKSQTELRKTPVSEARKTPVTQTPTQASNSQFIPIHHPGAFPPLPSRPGFPPPTYVIPPPVAFSMGSGYTFPAGVSVPGTFLQPTAHSPAGNQVQAGKQSHIPYSQQRPSGPGPMNQGPQQSQPPSQQPLTSLPAQPTAQSTSQLQVQALTQQQQSPTKAVPALGKSPPHHSGFQQYQQADASKQLWNPPQVQGPLGKIMPVKQPYYLQTQDPIKLFEPSLQPPVMQQQPLEKKMKPFPMEPYNHNPSEVKVPEFYWDSSYSMADNRSVMAQQANIDRRGKRSPGVFRPEQDPVPRMPFEKSLLEKPSELMSHSSSFLSLTGFSLNQERYPNNSMFNEVYGKNLTSSSKAELSPSMAPQETSLYSLFEGTPWSPSLPASSDHSTPASQSPHSSNPSSLPSSPPTHNHNSVPFSNFGPIGTPDNRDRRTADRWKTDKPAMGGFGIDYLSATSSSESSWHQASTPSGTWTGHGPSMEDSSAVLMESLKSIWSSSMMHPGPSALEQLLMQQKQKQQRGQGTMNPPH

SEQ ID NO: 80072 - protein, 56 aa, Homo sapiens
  Payload ID: 15960
  Gene Symbol: SMG7
  Gene Name: SMG7 nonsense mediated mRNA decay factor
  ENSP ID: ENSP00000422056
MRNWMFLQIVIVGENVSFKSQMRTENLKSEEHLKSSNIRQAEVLKADMTDSKLGPA

SEQ ID NO: 80073 - protein, 150 aa, Homo sapiens
  Payload ID: 15960
  Gene Symbol: SMG7
  Gene Name: SMG7 nonsense mediated mRNA decay factor
  ENSP ID: ENSP00000422742
MRNWMFLQIVIVGENVSFKSQMRTENLKSEEHLKSSNIRQAEVLKADMTDSKLGPAEVWTSRQALQDLYQKMLVTDLEYALDKKVEQDLWNHAFKNQITTLQGQAKNRANPNRSEVQANLSLFLEAASGFYTQLLQELCTVFNVDLPCRV

SEQ ID NO: 80074 - protein, 1178 aa, Homo sapiens
  Payload ID: 15960
  Gene Symbol: SMG7
  Gene Name: SMG7 nonsense mediated mRNA decay factor
  Uniprot ID: Q92540
  ENSP ID: ENSP00000425133
MSLQSAQYLRQAEVLKADMTDSKLGPAEVWTSRQALQDLYQKMLVTDLEYALDKKVEQDLWNHAFKNQITTLQGQAKNRANPNRSEVQANLSLFLEAASGFYTQLLQELCTVFNVDLPCRVKSSQLGIISNKQTHTSAIVKPQSSSCSYICQHCLVHLGDIARYRNQTSQAESYYRHAAQLVPSNGQPYNQLAILASSKGDHLTTIFYYCRSIAVKFPFPAASTNLQKALSKALESRDEVKTKWGVSDFIKAFIKFHGHVYLSKSLEKLSPLREKLEEQFKRLLFQKAFNSQQLVHVTVINLFQLHHLRDFSNETEQHTYSQDEQLCWTQLLALFMSFLGILCKCPLQNESQEESYNAYPLPAVKVSMDWLRLRPRVFQEAVVDERQYIWPWLISLLNSFHPHEEDLSSISATPLPEEFELQGFLALRPSFRNLDFSKGHQGITGDKEGQQRRIRQQRLISIGKWIADNQPRLIQCENEVGKLLFITEIPELILEDPSEAKENLILQETSVIESLAADGSPGLKSVLSTSRNLSNNCDTGEKPVVTFKENIKTREVNRDQGRSFPPKEVKSQTELRKTPVSEARKTPVTQTPTQASNSQFIPIHHPGAFPPLPSRPGFPPPTYVIPPPVAFSMGSGYTFPAGVSVPGTFLQPTAHSPAGNQVQAGKQSHIPYSQQRPSGPGPMNQGPQQSQPPSQQPLTSLPAQPTAQSTSQLQVQALTQQQQSPTKAVPALGKSPPHHSGFQQYQQADASKQLWNPPQVQGPLGKIMPVKQPYYLQTQDPIKLFEPSLQPPVMQQQPLEKKMKPFPMEPYNHNPSEVKVPEFYWDSSYSMADNRSVMAQQANIDRRGKRSPGVFRPEQDPVPRMPFEDPKSSPLLPPDLLKSLAALEEEEELIFSNPPDLYPALLGPLASLPGRSLFKSLLEKPSELMSHSSSFLSLTGFSLNQERYPNNSMFNEVYGKNLTSSSKAELSPSMAPQETSLYSLFEGTPWSPSLPASSDHSTPASQSPHSSNPSSLPSSPPTHNHNSVPFSNFGPIGTPDNRDRRTADRWKTDKPAMGGFGIDYLSATSSSESSWHQASTPSGTWTGHGPSMEDSSAVLMESLKKQQHGVQQLGPKRQSEEEGSSSICVAHRGPRPLPSCSLPASTFRVKFKAARTCAHQAQKKTRRRPFWKRRKKGK

SEQ ID NO: 80075 - protein, 1145 aa, Homo sapiens
  Payload ID: 15960
  Gene Symbol: SMG7
  Gene Name: SMG7 nonsense mediated mRNA decay factor
  Uniprot ID: Q92540
  ENSP ID: ENSP00000426915
MLVTDLEYALDKKVEQDLWNHAFKNQITTLQGQAKNRANPNRSEVQANLSLFLEAASGFYTQLLQELCTVFNVDLPCRVKSSQLGIISNKQTHTSAIVKPQSSSCSYICQHCLVHLGDIARYRNQTSQAESYYRHAAQLVPSNGQPYNQLAILASSKGDHLTTIFYYCRSIAVKFPFPAASTNLQKALSKALESRDEVKTKWGVSDFIKAFIKFHGHVYLSKSLEKLSPLREKLEEQFKRLLFQKAFNSQQLVHVTVINLFQLHHLRDFSNETEQHTYSQDEQLCWTQLLALFMSFLGILCKCPLQNESQEESYNAYPLPAVKVSMDWLRLRPRVFQEAVVDERQYIWPWLISLLNSFHPHEEDLSSISATPLPEEFELQGFLALRPSFRNLDFSKGHQGITGDKEGQQRRIRQQRLISIGKWIADNQPRLIQCENEVGKLLFITEIPELILEDPSEAKENLILQETSVIESLAADGSPGLKSVLSTSRNLSNNCDTGEKPVVTFKENIKTREVNRDQGRSFPPKEVRRDYSKGITVTKNDGKKDNNKRKTETKKCTLEKLQETGKQNVAVQVKSQTELRKTPVSEARKTPVTQTPTQASNSQFIPIHHPGAFPPLPSRPGFPPPTYVIPPPVAFSMGSGYTFPAGVSVPGTFLQPTAHSPAGNQVQAGKQSHIPYSQQRPSGPGPMNQGPQQSQPPSQQPLTSLPAQPTAQSTSQLQVQALTQQQQSPTKAVPALGKSPPHHSGFQQYQQADASKQLWNPPQVQGPLGKIMPVKQPYYLQTQDPIKLFEPSLQPPVMQQQPLEKKMKPFPMEPYNHNPSEVKVPEFYWDSSYSMADNRSVMAQQANIDRRGKRSPGVFRPEQDPVPRMPFEDPKSSPLLPPDLLKSLAALEEEEELIFSNPPDLYPALLGPLASLPGRSLFKSLLEKPSELMSHSSSFLSLTGFSLNQERYPNNSMFNEVYGKNLTSSSKAELSPSMAPQETSLYSLFEGTPWSPSLPASSDHSTPASQSPHSSNPSSLPSSPPTHNHNSVPFSNFGPIGTPDNRDRRTADRWKTDKPAMGGFGIDYLSATSSSESSWHQASTPSGTWTGHGPSMEDSSAVLMESLKSIWSSSMMHPGPSALEQLLMQQKQKQQRGQGTMNPPH

SEQ ID NO: 80076 - protein, 991 aa, Homo sapiens
  Payload ID: 15961
  Gene Symbol: SMG8
  Gene Name: SMG8 nonsense mediated mRNA decay factor
  Uniprot ID: Q8ND04
  ENSP ID: ENSP00000300917
MAGPVSLRDLLMGASAWMGSESPGGSPTEGGGSAAGGPEPPWREDEICVVGIFGKTALRLNSEKFSLVNTVCDRQVFPLFRHQDPGDPGPGIRTEAGAVGEAGGAEDPGAAAGGSVRGSGAVAEGNRTEAGSQDYSLLQAYYSQESKVLYLLLTSICDNSQLLRACRALQSGEAGGGLSLPHAEAHEFWKHQEKLQCLSLLYLFSVCHILLLVHPTCSFDITYDRVFRALDGLRQKVLPLLKTAIKDCPVGKDWKLNCRPCPPRLLFLFQLNGALKVEPPRNQDPAHPDKPKKHSPKRRLQHALEDQIYRIFRKSRVLTNQSINCLFTVPANQAFVYIVPGSQEEDPVGMLLDQLRSHCTVKDPESLLVPAPLSGPRRYQVMRQHSRQQLSFHIDSSSSSSSGQLVDFTLREFLWQHVELVLSKKGFDDSVGRNPQPSHFELPTYQKWISAASKLYEVAIDGKEEDLGSPTGELTSKILSSIKVLEGFLDIDTKFSENRCQKALPMAHSAYQSNLPHNYTMTVHKNQLAQALRVYSQHARGPAFHKYAMQLHEDCYKFWSNGHQLCEERSLTDQHCVHKFHSLPKSGEKPEADRNPPVLYHNSRARSTGACNCGRKQAPRDDPFDIKAANYDFYQLLEEKCCGKLDHINFPVFEPSTPDPAPAKNESSPAPPDSDADKLKEKEPQTQGESTSLSLALSLGQSTDSLGTYPADPQAGGDNPEVHGQVEVKTEKRPNFVDRQASTVEYLPGMLHSNCPKGLLPKFSSWSLVKLGPAKSYNFHTGLDQQGFIPGTNYLMPWDIVIRTRAEDEGDLDTNSWPAPNKAIPGKRSAVVMGRGRRRDDIARAFVGFEYEDSRGRRFMCSGPDKVMKVMGSGPKESALKALNSDMPLYILSSSQGRGLKPHYAQLMRLFVVVPDAPLQIILMPQVQPGPPPCPVFYPEKQEITLPPDGLWVLRFPYAYVTERGPCFPPKENVQLMSYKVLRGVLKAVTQ

SEQ ID NO: 80077 - protein, 991 aa, Homo sapiens; identical to SEQ ID NO: 80076
  Payload ID: 15961
  Gene Symbol: SMG8
  Gene Name: SMG8 nonsense mediated mRNA decay factor
  Uniprot ID: Q8ND04
  ENSP ID: ENSP00000438748

SEQ ID NO: 80078 - protein, 588 aa, Homo sapiens
  Payload ID: 15961
  Gene Symbol: SMG8
  Gene Name: SMG8 nonsense mediated mRNA decay factor
  Uniprot ID: Q8ND04
  ENSP ID: ENSP00000462119
MAGPVSLRDLLMGASAWMGSESPGGSPTEGGGSAAGGPEPPWREDEICVVGIFGKTALRLNSEKFSLVNTVCDRQVFPLFRHQDPGDPGPGIRTEAGAVGEAGGAEDPGAAAGGSVRGSGAVAEGNRTEAGSQDYSLLQAYYSQESKVLYLLLTSICDNSQLLRACRALQSGEAGGGLSLPHAEAHEFWKHQEKLQCLSLLYLFSVCHILLLVHPTCSFDITYDRVFRALDGLRQKVLPLLKTAIKDCPVGKDWKLNCRPCPPRLLFLFQLNGALKVEPPRNQDPAHPDKPKKHSPKRRLQHALEDQIYRIFRKSRVLTNQSINCLFTVPANQAFVYIVPGSQEEDPVGMLLDQLRSHCTVKDPESLLVPAPLSGPRRYQVMRQHSRQQLSFHIDSSSSSSSGQLVDFTLREFLWQHVELVLSKKGFDDSVGRNPQPSHFELPTYQKWISAASKLYEVAIDGKEEDLGSPTGELTSKILSSIKVLEGFLDIDTKFSENRCQKALPMAHSAYQSNLPHNYTMTVHKNQLAQALRVYSQHARGPAFHKYAMQLHEDCYKFWSNGHQLCEERSLTDQHCVHKFHSLPKSGS

SEQ ID NO: 80079 - protein, 271 aa, Homo sapiens
  Payload ID: 15961
  Gene Symbol: SMG8
  Gene Name: SMG8 nonsense mediated mRNA decay factor
  ENSP ID: ENSP00000462931
VAIDGKEEDLGSPTGELTSKILSSIKVLEGFLDIDTKFSENRCQKALPMAHSAYQSNLPHNYTMTVHKNQLAQALRVYSQHARGPAFHKYAMQLHEDCYKFWSNGHQLCEERSLTDQHCVHKFHSLPKSGEKPEADRNPPVLYHNSRARSTGACNCGRKQAPRDDPFDIKAANYDFYQLLEEKCCGKLDHINFPVFEPSTPDPAPAKNESSPAPPDSDADKLKEKEPQTQGESTSLSLALSLGQSTDSLGSARPTTMSGILPRKTRNHPST

SEQ ID NO: 80080 - protein, 32 aa, Homo sapiens
  Payload ID: 15961
  Gene Symbol: SMG8
  Gene Name: SMG8 nonsense mediated mRNA decay factor
  ENSP ID: ENSP00000463175
  MOD_RES (1)..(1): Any amino acid
XFWSNGHQLCEERSLTDQHCVHKFHSLPKSGS

SEQ ID NO: 80081 - protein, 520 aa, Homo sapiens
  Payload ID: 15962
  Gene Symbol: SMG9
  Gene Name: SMG9 nonsense mediated mRNA decay factor
  Uniprot ID: Q9H0W8
  ENSP ID: ENSP00000270066
MSESGHSQPGLYGIERRRRWKEPGSGGPQNLSGPGGRERDYIAPWERERRDASEETSTSVMQKTPIILSKPPAERSKQPPPPTAPAAPPAPAPLEKPIVLMKPREEGKGPVAVTGASTPEGTAPPPPAAPAPPKGEKEGQRPTQPVYQIQNRGMGTAAPAAMDPVVGQAKLLPPERMKHSIKLVDDQMNWCDSAIEYLLDQTDVLVVGVLGLQGTGKSMVMSLLSANTPEEDQRTYVFRAQSAEMKERGGNQTSGIDFFITQERIVFLDTQPILSPSILDHLINNDRKLPPEYNLPHTYVEMQSLQIAAFLFTVCHVVIVVQDWFTDLSLYRFLQTAEMVKPSTPSPSHESSSSSGSDEGTEYYPHLVFLQNKARREDFCPRKLRQMHLMIDQLMAHSHLRYKGTLSMLQCNVFPGLPPDFLDSEVNLFLVPFMDSEAESENPPRAGPGSSPLFSLLPGYRGHPSFQSLVSKLRSQVMSMARPQLSHTILTEKNWFHYAARIWDGVRKSSALAEYSRLLA

SEQ ID NO: 80082 - protein, 120 aa, Homo sapiens
  Payload ID: 15962
  Gene Symbol: SMG9
  Gene Name: SMG9 nonsense mediated mRNA decay factor
  ENSP ID: ENSP00000468941
MSESGHSQPGLYGIERRRRWKEPGSGGPQNLSGPGGRERDYIAPWERERRDASEETSTSVMQKTPIILSKPPAERSKQPPPPTAPAAPPAPAPLEKPIVLMKPREEGKGPVAVTGASTPE

SEQ ID NO: 80083 - protein, 148 aa, Homo sapiens
  Payload ID: 15962
  Gene Symbol: SMG9
  Gene Name: SMG9 nonsense mediated mRNA decay factor
  ENSP ID: ENSP00000470031
MSESGHSQPGLYGIERRRRWKEPGSGGPQNLSGPGGRERDYIAPWERERRDASEETSTSVMQKTPIILSKPPAERSKQPPPPTAPAAPPAPAPLEKPIVLMKPREEGKGPVAVTGASTPEGTAPPPPAAPAPPKGEKEGQRPTQPVYQ

SEQ ID NO: 80084 - protein, 183 aa, Homo sapiens
  Payload ID: 15962
  Gene Symbol: SMG9
  Gene Name: SMG9 nonsense mediated mRNA decay factor
  ENSP ID: ENSP00000470451
MSESGHSQPGLYGIERRRRWKEPGSGGPQNLSGPGGRERDYIAPWERERRDASEETSTSVMQKTPIILSKPPAERSKQPPPPTAPAAPPAPAPLEKPIVLMKPREEGKGPVAVTGASTPEGTAPPPPAAPAPPKGEKEGQRPTQPVYQIQNRGMGTAAPAAMDPVVGQAKLLPPERMKHSIKL

SEQ ID NO: 80085 - protein, 115 aa, Homo sapiens
  Payload ID: 15962
  Gene Symbol: SMG9
  Gene Name: SMG9 nonsense mediated mRNA decay factor
  ENSP ID: ENSP00000470541
MSESGHSQPGLYGIERRRRWKEPGSGGPQNLSGPGGRERDYIAPWERERRDASEETSTSVMQKTPIILSKPPAERSKQPPPPTAPAAPPAPAPLEKPIVLMKPREEGKGPVAVTG

SEQ ID NO: 80086 - protein, 495 aa, Homo sapiens
  Payload ID: 15962
  Gene Symbol: SMG9
  Gene Name: SMG9 nonsense mediated mRNA decay factor
  Uniprot ID: Q9H0W8
  ENSP ID: ENSP00000471398
MSESGHSQPGLYGIERRRRWKEPGSGGPQNLSGPGGRERDYIAPWERERRDASEETSTSVMQKTPIILSKPPAERSKQPPPPTAPAAPPAPAPLEKPIVLMKPREEGKGPVAVTGASTPEGTAPPPPAAPAPPKGEKEGQRPTQPVYQIQNRGMGTAAPAAMDPVVGQAKLLPPERMKHSIKLVDDQMNWCDSAIEYLLDQTDVLVVGVLGLQGTGKSMVMSLLSANTPEEDQRTYVFRAQSAEMKERGGNQTSGIDFFITQERIVFLDTQPILSPSILDHLINNDRKLPPEYNLPHTYVEMQSLQIAAFLFTVCHVVIVVQDWFTDLSLYRFLQTAEMVKPSTPSPSHESSSSSGSDEGTEYYPHLVFLQNKARREDFCPRKLRQMHLMIDQLMAHSHLRYKGTLSMLQCNVFPGLPPDFLDSEVNLFLVPFMDSEAESENPPRAGPGSSPLFSLLPGYRGHPSFQSLVSKLRSQVMSMARPQLSHTILTEKNW

SEQ ID NO: 80087 - protein, 157 aa, Homo sapiens
  Payload ID: 15962
  Gene Symbol: SMG9
  Gene Name: SMG9 nonsense mediated mRNA decay factor
  ENSP ID: ENSP00000471442
  MOD_RES (1)..(1): Any amino acid
XAPPKGEKEGQRPTQPVYQIQNRGMGTAAPAAMDPVVGQAKLLPPERMKHSIKLVDDQMNWCDSAIEYLLDQTDVLVVGVLGLQGTGKSMVMSLLSANTPEEDQRTYVFRAQSAEMKERGGNQTSGIDFFITQERIVFLDTQVPAPPAFAPPCHILH

SEQ ID NO: 80088 - protein, 156 aa, Homo sapiens
  Payload ID: 15962
  Gene Symbol: SMG9
  Gene Name: SMG9 nonsense mediated mRNA decay factor
  ENSP ID: ENSP00000472684
MSESGHSQPGLYGIERRRRWKEPGSGGPQNLSGPGGRERDYIAPWERERRDASEETSTSVMQKTPIILSKPPAERSKQPPPPTAPAAPPAPAPLEKPIVLMKPREEGKGPVAVTGASTPEGTAPPPPAAPAPPKGEKEGQRPTQPVYQIQNRGMGT

SEQ ID NO: 80089 - protein, 937 aa, Homo sapiens
  Payload ID: 15963
  Gene Symbol: SMCR8
  Gene Name: Smith-Magenis syndrome chromosome region, candidate 8
  Uniprot ID: Q8TEV9
  ENSP ID: ENSP00000385025
MISAPDVVAFTKEEEYEEEPYNEPALPEEYSVPLFPFASQGANPWSKLSGAKFSRDFILISEFSEQVGPQPLLTIPNDTKVFGTFDLNYFSLRIMSVDYQASFVGHPPGSAYPKLNFVEDSKVVLGDSKEGAFAYVHHLTLYDLEARGFVRPFCMAYISADQHKIMQQFQELSAEFSRASECLKTGNRKAFAGELEKKLKDLDYTRTVLHTETEIQKKANDKGFYSSQAIEKANELASVEKSIIEHQDLLKQIRSYPHRKLKGHDLCPGEMEHIQDQASQASTTSNPDESADTDLYTCRPAYTPKLIKAKSTKCFDKKLKTLEELCDTEYFTQTLAQLSHIEHMFRGDLCYLLTSQIDRALLKQQHITNFLFEDFVEVDDRMVEKQESIPSKPSQDRPPSSSLEECPIPKVLISVGSYKSSVESVLIKMEQELGDEEYKEVEVTELSSFDPQENLDYLDMDMKGSISSGESIEVLGTEKSTSVLSKSDSQASLTVPLSPQVVRSKAVSHRTISEDSIEVLSTCPSEALIPDDFKASYPSAINEEESYPDGNEGAIRFQASISPPELGETEEGSIENTPSQIDSSCCIGKESDGQLVLPSTPAHTHSDEDGVVSSPPQRHRQKDQGFRVDFSVENANPSSRDNSCEGFPAYELDPSHLLASRDISKTSLDNYSDTTSYVSSVASTSSDRIPSAYPAGLSSDRHKKRAGQNALKFIRQYPFAHPAIYSLLSGRTLVVLGEDEAIVRKLVTALAIFVPSYGCYAKPVKHWASSPLHIMDFQKWKLIGLQRVASPAGAGTLHALSRYSRYTSILDLDNKTLRCPLYRGTLVPRLADHRTQIKRGSTYYLHVQSMLTQLCSKAFLYTFCHHLHLPTHDKETEELVASRQMSFLKLTLGLVNEDVRVVQYLAELLKLHYMQESPGTSHPMLRFDYVPSFLYKI

SEQ ID NO: 80090 - protein, 917 aa, Homo sapiens
  Payload ID: 15964
  Gene Symbol: SMTN
  Gene Name: smoothelin
  Uniprot ID: P53814
  ENSP ID: ENSP00000328635
MADEALAGLDEGALRKLLEVTADLAERRRIRSAIRELQRQELEREEEALASKRFRAERQDNKENWLHSQQREAEQRAALARLAGQLESMNDVEELTALLRSAGEYEERKLIRAAIRRVRAQEIEAATLAGRLYSGRPNSGSREDSKGLAAHRLEQCEVPEREEQEQQAEVSKPTPTPEGTSQDVTTVTLLLRAPPGSTSSSPASPSSSPTPASPEPPLEPAEAQCLTAEVPGSPEPPPSPPKTTSPEPQESPTLPSTEGQVVNKLLSGPKETPAAQSPTRGPSDTKRADVAGPRPCQRSLSVLSPRQPAQNRESTPLASGPSSFQRAGSVRDRVHKFTSDSPMAARLQDGTPQAALSPLTPARLLGPSLTSTTPASSSSGSSSRGPSDTSSRFSKEQRGVAQPLAQLRSCPQEEGPRGRGLAARPLENRAGGPVARSEEPGAPLPVAVGTAEPGGSMKTTFTIEIKDGRGQASTGRVLLPTGNQRAELTLGLRAPPTLLSTSSGGKSTITRVNSPGTLARLGSVTHVTSFSHAPPSSRGGCSIKMEAEPAEPLAAAVEAANGAEQTRVNKAPEGRSPLSAEELMTIEDEGVLDKMLDQSTDFEERKLIRAALRELRQRKRDQRDKERERRLQEARGRPGEGRGNTATETTTRHSQRAADGSAVSTVTKTERLVHSNDGTRTARTTTVESSFVRRSENGSGSTMMQTKTFSSSSSSKKMGSIFDREDQASPRAGSLAALEKRQAEKKKELMKAQSLPKTSASQARKAMIEKLEKEGAAGSPGGPRAAVQRSTSFGVPNANSIKQMLLDWCRAKTRGYEHVDIQNFSSSWSDGMAFCALVHNFFPEAFDYGQLSPQNRRQNFEVAFSSAEMLVDCVPLVEVDDMMIMGKKPDPKCVFTYVQSLYNHLRRHELRLRGKNV

SEQ ID NO: 80091 - protein, 915 aa, Homo sapiens
  Payload ID: 15964
  Gene Symbol: SMTN
  Gene Name: smoothelin
  Uniprot ID: P53814
  ENSP ID: ENSP00000329532
MADEALAGLDEGALRKLLEVTADLAERRRIRSAIRELQRQELEREEEALASKRFRAERQDNKENWLHSQQREAEQRAALARLAGQLESMNDVEELTALLRSAGEYEERKLIRAAIRRVRAQEIEAATLAGRLYSGRPNSGSREDSKGLAAHRLEQCEVPEREEQEQQAEVSKPTPTPEGTSQDVTTVTLLLRAPPGSTSSSPASPSSSPTPASPEPPLEPAEAQCLTAEVPGSPEPPPSPPKTTSPEPQESPTLPSTEGQVVNKLLSGPKETPAAQSPTRGPSDTKRADVAGPRPCQRSLSVLSPRQPAQNRESTPLASGPSSFQRAGSVRDRVHKFTSDSPMAARLQDGTPQAALSPLTPARLLGPSLTSTTPASSSSGSSSRGPSDTSSRFSKEQRGVAQPLAQLRSCPQEEGPRGRGLAARPLENRAGGPVARSEEPGAPLPVAVGTAEPGGSMKTTFTIEIKDGRGQASTGRVLLPTGNQRAELTLGLRAPPTLLSTSSGGKSTITRVNSPGTLARLGSVTHVTSFSHAPPSSRGGCSIKMEAEPAEPLAAAVEAANGAEQTRVNKAPEGRSPLSAEELMTIEDEGVLDKMLDQSTDFEERKLIRAALRELRQRKRDQRDKERERRLQEARGRPGEGRGNTATETTTRHSQRAADGSAVSTVTKTERLVHSNDGTRTARTTTVESSFVRRSENGSGSTMMQTKTFSSSSSSKKMGSIFDREDQASPRAGSLAALEKRQAEKKKELMKAQSLPKTSASQARKAMIEKLEKEGAAGSPGGPRAAVQRSTSFGVPNANSIKQMLLDWCRAKTRGYEHVDIQNFSSSWSDGMAFCALVHNFFPEAFDYGQLSPQNRRQNFEVAFSSAETHADCPQLLDTEDMVRLREPDWKCVYTYIQEFYRCLVQKGLVKTKKS

SEQ ID NO: 80092 - protein, 940 aa, Homo sapiens
  Payload ID: 15964
  Gene Symbol: SMTN
  Gene Name: smoothelin
  Uniprot ID: P53814
  ENSP ID: ENSP00000351593
MADEALAGLDEGALRKLLEVTADLAERRRIRSAIRELQRQELEREEEALASKRFRAERQDNKENWLHSQQREAEQRAALARLAGQLESMNDVEELTALLRSAGEYEERKLIRAAIRRVRAQEIEAATLAGRLYSGRPNSGSREDSKGLAAHRLEQCEVPEREEQEQQAEVSKPTPTPEGTSQDVTTVTLLLRAPPGSTSSSPASPSSSPTPASPEPPLEPAEAQCLTAEVPGSPEPPPSPPKTTSPEPQESPTLPSTEGQVVNKLLSGPKETPAAQSPTRGPSDTKRADVAGPRPCQRSLSVLSPRQPAQNRESTPLASGPSSFQRAGSVRDRVHKFTSDSPMAARLQDGTPQAALSPLTPARLLGPSLTSTTPASSSSGSSSRGPSDTSSRFSKEQRGVAQPLAQLRSCPQEEGPRGRGLAARPLENRAGGPVARSEEPGAPLPVAVGTAEPGGSMKTTFTIEIKDGRGQASTGRVLLPTGNQRAELTLGLRAPPTLLSTSSGGKSTITRVNSPGTLARLGSVTHVTSFSHAPPSSRGGCSIKMEAEPAEPLAAAVEAANGAEQTRVNKAPEGRSPLSAEELMTIEDEGVLDKMLDQSTDFEERKLIRAALRELRQRKRDQRDKERERRLQEARGRPGEGRGNTATETTTRHSQRAADGSAVSTVTKTERLVHSNDGTRTARTTTVESSFVRRSENGSGSTMMQTKTFSSSSSSKKMGSIFDREDQASPRAGSLAALEKRQAEKKKELMKAQSLPKTSASQARKAMIEKLEKEGAAGSPGGPRAAVQRSTSFGVPNANSIKQMLLDWCRAKTRGYEHVDIQNFSSSWSDGMAFCALVHNFFPEAFDYGQLSPQNRRQNFEVAFSSAETHADCPQLLDTEDMVRLREPDWKMLVDCVPLVEVDDMMIMGKKPDPKCVFTYVQSLYNHLRRHELRLRGKNV

SEQ ID NO: 80093 - protein, 438 aa, Homo sapiens
  Payload ID: 15964
  Gene Symbol: SMTN
  Gene Name: smoothelin
  ENSP ID: ENSP00000383919
MPGVPGPGPELAAALEEQLGRALEELRAVAEAGRVAVTQAAEVAVATVEPVARAAEELRAERAALSRRLDALSRQVEVLSLRLGVPLVSGLEPELEPSELLLAAADPEALFQAAEDAGTPVAHPPAFSTRRRSSTGTTRSTSLMEAEPAEPLAAAVEAANGAEQTRVNKAPEGRSPLSAEELMTIEDEGVLDKMLDQSTDFEERKLIRAALRELRQRKRDGSGSTMMQTKTFSSSSSSKKMGSIFDREDQASPRAGSLAALEKRQAEKKKELMKAQSLPKTSASQARKAMIEKLEKEGAAGSPGGPRAAVQRSTSFGVPNANSIKQMLLDWCRAKTRGYEHVDIQNFSSSWSDGMAFCALVHNFFPEAFDYGQLSPQNRRQNFEVAFSSAETHADCPQLLDTEDMVRLREPDWKCVYTYIQEFYRCLVQKGLVKTKKS

SEQ ID NO: 80094 - protein, 37 aa, Homo sapiens
  Payload ID: 15964
  Gene Symbol: SMTN
  Gene Name: smoothelin
  ENSP ID: ENSP00000390453
MADEALAGLDEGALRKLLEVTADLAERRRIRSAIREL

SEQ ID NO: 80095 - protein, 216 aa, Homo sapiens
  Payload ID: 15964
  Gene Symbol: SMTN
  Gene Name: smoothelin
  ENSP ID: ENSP00000392329
GSTSRELSRERDPQAGHPAAQMEAEPAEPLAAAVEAANGAEQTRVNKAPEGRSPLSAEELMTIEDEGVLDKMLDQSTDFEERKLIRAALRELRQRKRDGSGSTMMQTKTFSSSSSSKKMGSIFDREDQASPRAGSLAALEKRQAEKKKELMKAQSLPKTSASQARKAMIEKLEKEGAAGSPGGPRAAVQRSTSFGVPNANSIKQMLLDWCRAKTRG

SEQ ID NO: 80096 - protein, 158 aa, Homo sapiens
  Payload ID: 15964
  Gene Symbol: SMTN
  Gene Name: smoothelin
  ENSP ID: ENSP00000394637
MTCLSHPLQLEVTADLAERRRIRSAIRELQRQELEREEEALASKRFRAERQDNKENWLHSQQREAEQRAALARLAGQLESMNDVEELTALLRSAGEYEERKLIRAAIRRVRAQEIEAATLAGRLYSGRPNSGSREDSKGLAAHRLEQCEVPEREEQEQ

SEQ ID NO: 80097 - protein, 91 aa, Homo sapiens
  Payload ID: 15964
  Gene Symbol: SMTN
  Gene Name: smoothelin
  ENSP ID: ENSP00000398663
MRVHPRPHSRLAAKLAGLEPETPYPGFEFSELVTGATGTGDLTRKEPTELGASEMADEALAGLDEGALRKLLEVTADLAERRRIRSAIREL

SEQ ID NO: 80098 - protein, 141 aa, Homo sapiens
  Payload ID: 15964
  Gene Symbol: SMTN
  Gene Name: smoothelin
  ENSP ID: ENSP00000399432
MRVHPRPHSRLAAKLAGLEPETPYPGFEFSELVTGATGTGDLTRKEPTELGASEMADEALAGLDEGALRKLLEVTADLAERRRIRSAIRELQRQELEREEEALASKRFRAERQDNKENWLHSQQREAEQRAALARLAGQLE

SEQ ID NO: 80099 - protein, 151 aa, Homo sapiens
  Payload ID: 15964
  Gene Symbol: SMTN
  Gene Name: smoothelin
  ENSP ID: ENSP00000401341
MRVHPRPHSRLAAKLAGLEPETPYPGFEFSELVTGATGTGDLTRKEPTELGASEMADEALAGLDEGALRKLLEVTADLAERRRIRSAIRELQRQELEREEEALASKRFRAERQDNKENWLHSQQREAEQRAALARLAGQLESMNDVEELTA

SEQ ID NO: 80100 - protein, 127 aa, Homo sapiens
  Payload ID: 15964
  Gene Symbol: SMTN
  Gene Name: smoothelin
  ENSP ID: ENSP00000409925
MADEALAGLDEGALRKLLEVTADLAERRRIRSAIRELQRQELEREEEALASKRFRAERQDNKENWLHSQQREAEQRAALARLAGQLESMNDVEELTALLRSAGEYEERKLIRAAIRRVRAQEIEAAT

SEQ ID NO: 80101 - protein, 98 aa, Homo sapiens
  Payload ID: 15964
  Gene Symbol: SMTN
  Gene Name: smoothelin
  ENSP ID: ENSP00000409990
MNDVEELTALLRSAGEYEERKLIRAAIRRVRAQEIEAATLAGRLYSGRPNSGSREDSKGLAAHRLEQCEVPEREEQEQQAEVSKPTPTPEGTSQDVTT

SEQ ID NO: 80102 - protein, 971 aa, Homo sapiens
  Payload ID: 15964
  Gene Symbol: SMTN
  Gene Name: smoothelin
  ENSP ID: ENSP00000479578
MGGMGTPGDLHAACPSTTRRDALCLGPEFEFDLRHSAGCPGDLGFFPLDPDTEAGGSGCLPTWLPLRRLARGRLEVTADLAERRRIRSAIRELQRQELEREEEALASKRFRAERQDNKENWLHSQQREAEQRAALARLAGQLESMNDVEELTALLRSAGEYEERKLIRAAIRRVRAQEIEAATLAGRLYSGRPNSGSREDSKGLAAHRLEQCEVPEREEQEQQAEVSKPTPTPEGTSQDVTTVTLLLRAPPGSTSSSPASPSSSPTPASPEPPLEPAEAQCLTAEVPGSPEPPPSPPKTTSPEPQESPTLPSTEGQVVNKLLSGPKETPAAQSPTRGPSDTKRADVAGPRPCQRSLSVLSPRQPAQNRESTPLASGPSSFQRAGSVRDRVHKFTSDSPMAARLQDGTPQAALSPLTPARLLGPSLTSTTPASSSSGSSSRGPSDTSSRFSKEQRGVAQPLAQLRSCPQEEGPRGRGLAARPLENRAGGPVARSEEPGAPLPVAVGTAEPGGSMKTTFTIEIKDGRGQASTGRVLLPTGNQRAELTLGLRAPPTLLSTSSGGKSTITRVNSPGTLARLGSVTHVTSFSHAPPSSRGGCSIKMEAEPAEPLAAAVEAANGAEQTRVNKAPEGRSPLSAEELMTIEDEGVLDKMLDQSTDFEERKLIRAALRELRQRKRDQRDKERERRLQEARGRPGEGRGNTATETTTRHSQRAADGSAVSTVTKTERLVHSNDGTRTARTTTVESSFVRRSENGSGSTMMQTKTFSSSSSSKKMGSIFDREDQASPRAGSLAALEKRQAEKKKELMKAQSLPKTSASQARKAMIEKLEKEGAAGSPGGPRAAVQRSTSFGVPNANSIKQMLLDWCRAKTRGYEHVDIQNFSSSWSDGMAFCALVHNFFPEAFDYGQLSPQNRRQNFEVAFSSAETHADCPQLLDTEDMVRLREPDWKCVYTYIQEFYRCLVQKGLVKTKKS

SEQ ID NO: 80103 - protein, 1002 aa, Homo sapiens
  Payload ID: 15964
  Gene Symbol: SMTN
  Gene Name: smoothelin
  ENSP ID: ENSP00000484398
MRVHPRPHSRLAAKLAGLEPETPYPGFEFSELVTGATGTGDLTRKEPTELGASEMADEALAGLDEGALRKLLEVTADLAERRRIRSAIRELQRQELEREEEALASKRFRAERQDNKENWLHSQQREAEQRAALARLAGQLESMNDVEELTALLRSAGEYEERKLIRAAIRRVRAQEIEAATLAGRLYSGRPNSGSREDSKGLAAHRLEQCEVPEREEQEQQAEVSKPTPTPEGTSQDVTTVTLLLRAPPGSTSSSPASPSSSPTPASPEPPLEPAEAQCLTAEVPGSPEPPPSPPKTTSPEPQESPTLPSTEGQVVNKLLSGPKETPAAQSPTRGPSDTKRADVAGPRPCQRSLSVLSPRQPAQNRESTPLASGPSSFQRAGSVRDRVHKFTSDSPMAARLQDGTPQAALSPLTPARLLGPSLTSTTPASSSSGSSSRGPSDTSSRFSKEQRGVAQPLAQLRSCPQEEGPRGRGLAARPLENRAGGPVARSEEPGAPLPVAVGTAEPGGSMKTTFTIEIKDGRGQASTGRVLLPTGNQRAELTLGLRAPPTLLSTSSGGKSTITRVNSPGTLARLGSVTHVTSFSHAPPSSRGGCSIKAAEDAGTPVAHPPAFSTRRRSSTGTTRSTSLMEAEPAEPLAAAVEAANGAEQTRVNKAPEGRSPLSAEELMTIEDEGVLDKMLDQSTDFEERKLIRAALRELRQRKRDQRDKERERRLQEARGRPGEGRGNTATETTTRHSQRAADGSAVSTVTKTERLVHSNDGTRTARTTTVESSFVRRSENGSGSTMMQTKTFSSSSSSKKMGSIFDREDQASPRAGSLAALEKRQAEKKKELMKAQSLPKTSASQARKAMIEKLEKEGAAGSPGGPRAAVQRSTSFGVPNANSIKQMLLDWCRAKTRGYEHVDIQNFSSSWSDGMAFCALVHNFFPEAFDYGQLSPQNRRQNFEVAFSSAEMLVDCVPLVEVDDMMIMGKKPDPKCVFTYVQSLYNHLRRHELRLRGKNV

SEQ ID NO: 80104 - protein, 311 aa, Homo sapiens
  Payload ID: 15964
  Gene Symbol: SMTN
  Gene Name: smoothelin
  ENSP ID: ENSP00000485089
  MOD_RES (1)..(1): Any amino acid
XRKLIRAALRELRQRKRDQRDKERERRLQEARGRPGEGRGNTATETTTRHSQRAADGSAVSTVTKTERLVHSNDGTRTARTTTVESSFVRRSENGSGSTMMQTKTFSSSSSSKKMGSIFDREDQASPRAGSLAALEKRQAEKKKELMKAQSLPKTSASQARKAMIEKLEKEGAAGPGGPRAAVQRSTSFGVPNANSIKQMLLDWCRAKTRGYEHVDIQNFSSSWSDGMAFCALVHNFFPEAFDYGQLSPQNRRQNFEVAFSSAETHADCPQLLDTEDMVRLREPDWKCVYTYIQEFYRCLVQKGLVKTKKS

SEQ ID NO: 80105 - protein, 5 aa, Homo sapiens
  Payload ID: 15964
  Gene Symbol: SMTN
  Gene Name: smoothelin
  ENSP ID: ENSP00000485277
MNDVE

SEQ ID NO: 80106 - protein, 457 aa, Homo sapiens
  Payload ID: 15965
  Gene Symbol: SMTNL1
  Gene Name: smoothelin-like 1
  Uniprot ID: A8MU46
  ENSP ID: ENSP00000382108
MEQKEGKLSEDGTTVSPAADNPEMSGGGAPAEETKGTAGKAINEGPPTESGKQEKAPAEDGMSAELQGEANGLDEVKVESQREAGGKEDAEAELKKEDGEKEETTVGSQEMTGRKEETKSEPKEAEEKESTLASEKQKAEEKEAKPESGQKADANDRDKPEPKATVEEEDAKTASQEETVVEDEAKAEPKEPDGKEEAKHGAKEEADEPGSPSEEQEQDVEKEPEGGAGVIPSSPEEWPESPTGEGHNLSTDGLGPDCVASGQTSPSASESSPSDVPQSPPESPSSGEKKEKAPERRVSAPARPRGPRAQNRKAIVDKFGGAASGPTALFRNTKAAGAAIGGVKNMLLEWCRAMTKKYEHVDIQNFSSSWSSGMAFCALIHKFFPDAFDYAELDPAKRRHNFTLAFSTAEKLADCAQLLDVDDMVRLAVPDSKCVYTYIQELYRSLVQKGLVKTKKK

SEQ ID NO: 80107 - protein, 494 aa, Homo sapiens
  Payload ID: 15965
  Gene Symbol: SMTNL1
  Gene Name: smoothelin-like 1
  ENSP ID: ENSP00000432651
MEQKEGKLSEDGTTVSPAADNPEMSGGGAPAEETKGTAGKAINEGPPTESGKQEKAPAEDGMSAELQGEANGLDEVKVESQREAGGKEDAEAELKKEDGEKEETTVGSQEMTGRKEETKSEPKEAEEKESTLASEKQKAEEKEAKPESGQKADANDRDKPEPKATVEEEDAKTASQEETGQRKECSTEPKEKATDEEAKAESQKAVVEDEAKAEPKEPDGKEEAKHGAKEEADAKEEAEDAEEAEPGSPSEEQEQDVEKEPEGGAGVIPSSPEEWPESPTGEGHNLSTDGLGPDCVASGQTSPSASESSPSDVPQSPPESPSSGEKKEKAPERRVSAPARPRGPRAQNRKAIVDKFGGAASGPTALFRNTKAAGAAIGGVKNMLLEWCRAMTKKYEHVDIQNFSSSWSSGMAFCALIHKFFPDAFDYAELDPAKRRHNFTLAFSTAEKLADCAQLLDVDDMVRLAVPDSKCVYTYIQELYRSLVQKGLVKTKKK

SEQ ID NO: 80108 - protein, 317 aa, Homo sapiens
  Payload ID: 15966
  Gene Symbol: SMTNL2
  Gene Name: smoothelin-like 2
  Uniprot ID: Q2TAL5
  ENSP ID: ENSP00000345143
MRKTSNSCIMENGHQPGAGPGDGPPEIAQNFSAPDPPRPRPVSLSLRLPHQPVTAITRVSDRFSGETSAAALSPMSAATLGGLNPSPSEVITPWTPSPSEKNSSFTWSVPSSGYGAVTASKHSNSPPLVTPPQSPVSPQPPAITQVHRQGERRRELVRSQTLPRTSEAQARKALFEKWEQETAAGKGKGEARARLKRSQSFGVASASSIKQILLEWCRSKTLGYQHVDLQNFSSSWSDGMAFCALVHSFFPDAFDYNSLSPTQRQKNFELAFTMAENLANCERLIEVEDMMVMGRKPDPMCVFTYVQSLYNHLRRFE

SEQ ID NO: 80109 - protein, 461 aa, Homo sapiens
  Payload ID: 15966
  Gene Symbol: SMTNL2
  Gene Name: smoothelin-like 2
  Uniprot ID: Q2TAL5
  ENSP ID: ENSP00000373964
MEPAPDAQEARTVREALGRYEAALEGAVRALHEDMRGLQRGVERRVAEAMRLAGPLARTVADLQRDNQRLQAQLERLTRQVEALGLASGMSPVPGTPGTPSPPPAPGVPDRAPRLGSARFASHATFSLSGRGQSLDHDEASESEMRKTSNSCIMENGHQPGAGPGDGPPEIAQNFSAPDPPRPRPVSLSLRLPHQPVTAITRVSDRFSGETSAAALSPMSAATLGGLNPSPSEVITPWTPSPSEKNSSFTWSVPSSGYGAVTASKHSNSPPLVTPPQSPVSPQPPAITQVHRQGERRRELVRSQTLPRTSEAQARKALFEKWEQETAAGKGKGEARARLKRSQSFGVASASSIKQILLEWCRSKTLGYQHVDLQNFSSSWSDGMAFCALVHSFFPDAFDYNSLSPTQRQKNFELAFTMAENLANCERLIEVEDMMVMGRKPDPMCVFTYVQSLYNHLRRFE

SEQ ID NO: 80110 - protein, 82 aa, Homo sapiens
  Payload ID: 15966
  Gene Symbol: SMTNL2
  Gene Name: smoothelin-like 2
  ENSP ID: ENSP00000460663
MRKTSNSCIMENGHQPGAEKNSSFTWSVPSSGYGAVTASKHSNSPPLVTPPQSPVSPQPPAITQVHRQGERRRELVRSQTLP

SEQ ID NO: 80111 - protein, 787 aa, Homo sapiens
  Payload ID: 15967
  Gene Symbol: SMO
  Gene Name: smoothened, frizzled class receptor
  Uniprot ID: Q99835
  ENSP ID: ENSP00000249373
MAAARPARGPELPLLGLLLLLLLGDPGRGAASSGNATGPGPRSAGGSARRSAAVTGPPPPLSHCGRAAPCEPLRYNVCLGSVLPYGATSTLLAGDSDSQEEAHGKLVLWSGLRNAPRCWAVIQPLLCAVYMPKCENDRVELPSRTLCQATRGPCAIVERERGWPDFLRCTPDRFPEGCTNEVQNIKFNSSGQCEVPLVRTDNPKSWYEDVEGCGIQCQNPLFTEAEHQDMHSYIAAFGAVTGLCTLFTLATFVADWRNSNRYPAVILFYVNACFFVGSIGWLAQFMDGARREIVCRADGTMRLGEPTSNETLSCVIIFVIVYYALMAGVVWFVVLTYAWHTSFKALGTTYQPLSGKTSYFHLLTWSLPFVLTVAILAVAQVDGDSVSGICFVGYKNYRYRAGFVLAPIGLVLIVGGYFLIRGVMTLFSIKSNHPGLLSEKAASKINETMLRLGIFGFLAFGFVLITFSCHFYDFFNQAEWERSFRDYVLCQANVTIGLPTKQPIPDCEIKNRPSLLVEKINLFAMFGTGIAMSTWVWTKATLLIWRRTWCRLTGQSDDEPKRIKKSKMIAKAFSKRHELLQNPGQELSFSMHTVSHDGPVAGLAFDLNEPSADVSSAWAQHVTKMVARRGAILPQDISVTPVATPVPPEEQANLWLVEAEISPELQKRLGRKKKRRKRKKEVCPLAPPPELHPPAPAPSTIPRLPQLPRQKCLVAAGAWGAGDSCRQGAWTLVSNPFCPEPSPPQDPFLPSAPAPVAWAHGRRQGLGPIHSRTNLMDTELMDADSDF

SEQ ID NO: 80112 - protein, 151 aa, Homo sapiens
  Payload ID: 15967
  Gene Symbol: SMO
  Gene Name: smoothened, frizzled class receptor
  ENSP ID: ENSP00000418720
  MOD_RES (1)..(1): Any amino acid
XSNETLSCVIIFVIVYYALMAGVVWFVVLTYAWHTSFKALGTTYQPLSGKTSYFHLLTWSLPFVLTVAILAVAQVDGDSVSGICFVGYKNYRYRAGFVLAPIGLVLIVGGYFLIRGVMTLFSIKSNHPGLLSEKAASKINETMLRLDVRPM

SEQ ID NO: 80113 - protein, 70 aa, Homo sapiens
  Payload ID: 15967
  Gene Symbol: SMO
  Gene Name: smoothened, frizzled class receptor
  ENSP ID: ENSP00000420749
TKATLLIWRRTWCRLTGQSDDEPKRIKKSKMIAKAFSKRHELLQNPGQELSFSMHTVSHDGPVVALPGQE

SEQ ID NO: 80114 - protein, 513 aa, Homo sapiens [sequence omitted]

SEQ ID NO: 80115 - protein, 70 aa, Homo sapiens
  Payload ID: 15969
  Gene Symbol: SMYD5
  Gene Name: SMYD family member 5
  ENSP ID: ENSP00000258100
MAASMCDVFSFCVGVAGRARVSVEVRFVSSAKGKGLFATQLIRKGETIFVERPLVAAQFLWNALYRYRGH

SEQ ID NO: 80116 - protein, 418 aa, Homo sapiens
  Payload ID: 15969
  Gene Symbol: SMYD5
  Gene Name: SMYD family member 5
  Uniprot ID: Q6GMV2
  ENSP ID: ENSP00000374152
MAASMCDVFSFCVGVAGRARVSVEVRFVSSAKGKGLFATQLIRKGETIFVERPLVAAQFLWNALYRYRACDHCLRALEKAEENAQRLTGKPGQVLPHPELCTVRKDLHQNCPHCQVMYCSAECRLAATEQYHQVLCPGPSQDDPLHPLNKLQEAWRSIHYPPETASIMLMARMVATVKQAKDKDRWIRLFSQFCNKTANEEEEIVHKLLGDKFKGQLELLRRLFTEALYEEAVSQWFTPDGFRSLFALVGTNGQGIGTSSLSQWVHACDTLELKPQDREQLDAFIDQLYKDIEAATGEFLNCEGSGLFVLQSCCNHSCVPNAETSFPENNFLLHVTALEDIKPGEEICISYLDCCQRERSRHSRHKILRENYLFVCSCPKCLAEADEPNVTSEEEEEEEEEEEGEPEDAELGDEMTDV

SEQ ID NO: 80117 - protein, 81 aa, Homo sapiens
  Payload ID: 15969
  Gene Symbol: SMYD5
  Gene Name: SMYD family member 5
  ENSP ID: ENSP00000388195
MAASMCDVFSFCVGVAGRARVSVEVRFVSSAKGKGLFATQLIRKGETIFVERPLVAAQFLWNALYRYREWCLAHSSCSVGL

SEQ ID NO: 80118 - protein, 138 aa, Homo sapiens
  Payload ID: 15969
  Gene Symbol: SMYD5
  Gene Name: SMYD family member 5
  ENSP ID: ENSP00000412587
MCEIWGKGLFATQLIRKGETIFVERPLVAAQFLWNALYRYRACDHCLRALEKAEENAQRLTGKPGQVLPHPELCTVRKDLHQNCPHCQVMYCSAECRLAATEQYHQVLCPGPSQDDPLHPLNKLQEAWRSIHYPPETA

SEQ ID NO: 80119 - protein, 81 aa, Homo sapiens; identical to SEQ ID NO: 80117
  Payload ID: 15969
  Gene Symbol: SMYD5
  Gene Name: SMYD family member 5
  ENSP ID: ENSP00000485790

SEQ ID NO: 80120 - protein, 264 aa, Homo sapiens
  Payload ID: 15970
  Gene Symbol: SNAI1
  Gene Name: snail family zinc finger 1
  Uniprot ID: O95863
  ENSP ID: ENSP00000244050
MPRSFLVRKPSDPNRKPNYSELQDSNPEFTFQQPYDQAHLLAAIPPPEILNPTASLPMLIWDSVLAPQAQPIAWASLRLQESPRVAELTSLSDEDSGKGSQPPSPPSPAPSSFSSTSVSSLEAEAYAAFPGLGQVPKQLAQLSEAKDLQARKAFNCKYCNKEYLSLGALKMHIRSHTLPCVCGTCGKAFSRPWLLQGHVRTHTGEKPFSCPHCSRAFADRSNLRAHLQTHSDVKKYQCQACARTFSRMSLLHKHQESGCSGCPR

SEQ ID NO: 80121 - protein, 268 aa, Homo sapiens
  Payload ID: 15971
  Gene Symbol: SNAI2
  Gene Name: snail family zinc finger 2
  Uniprot ID: O43623
  ENSP ID: ENSP00000020945
MPRSFLVKKHFNASKKPNYSELDTHTVIISPYLYESYSMPVIPQPEILSSGAYSPITVWTTAAPFHAQLPNGLSPLSGYSSSLGRVSPPPPSDTSSKDHSGSESPISDEEERLQSKLSDPHAIEAEKFQCNLCNKTYSTFSGLAKHKQLHCDAQSRKSFSCKYCDKEYVSLGALKMHIRTHTLPCVCKICGKAFSRPWLLQGHIRTHTGEKPFSCPHCNRAFADRSNLRAHLQTHSDVKKYQCKNCSKTFSRMSLLHKHEESGCCVAH

SEQ ID NO: 80122 - protein, 268 aa, Homo sapiens; identical to SEQ ID NO: 80121
  Payload ID: 15971
  Gene Symbol: SNAI2
  Gene Name: snail family zinc finger 2
  Uniprot ID: O43623
  ENSP ID: ENSP00000380034

SEQ ID NO: 80123 - protein, 292 aa, Homo sapiens
  Payload ID: 15972
  Gene Symbol: SNAI3
  Gene Name: snail family zinc finger 3
  Uniprot ID: Q3KNW1
  ENSP ID: ENSP00000327968
MPRSFLVKTHSSHRVPNYRRLETQREINGACSACGGLVVPLLPRDKEAPSVPGDLPQPWDRSSAVACISLPLLPRIEEALGASGLDALEVSEVDPRASRAAIVPLKDSLNHLNLPPLLVLPTRWSPTLGPDRHGAPEKLLGAERMPRAPGGFECFHCHKPYHTLAGLARHRQLHCHLQVGRVFTCKYCDKEYTSLGALKMHIRTHTLPCTCKICGKAFSRPWLLQGHVRTHTGEKPYACSHCSRAFADRSNLRAHLQTHSDAKKYRCRRCTKTFSRMSLLARHEESGCCPGP

SEQ ID NO: 80124 - protein, 136 aa, Homo sapiens
  Payload ID: 15973
  Gene Symbol: SNAPIN
  Gene Name: SNAP-associated protein
  Uniprot ID: O95295
  ENSP ID: ENSP00000357674
MAGAGSAAVSGAGTPVAGPTGRDLFAEGLLEFLRPAVQQLDSHVHAVRESQVELREQIDNLATELCRINEDQKVALDLDPYVKKLLNARRRVVLVNNILQNAQERLRRLNHSVAKETARRRAMLDSGIYPPGSPGK

SEQ ID NO: 80125 - protein, 765 aa, Homo sapiens
  Payload ID: 15974
  Gene Symbol: SNRK
  Gene Name: SNF related kinase
  Uniprot ID: Q9NRH2
  ENSP ID: ENSP00000296088
MAGFKRGYDGKIAGLYDLDKTLGRGHFAVVKLARHVFTGEKVAVKVIDKTKLDTLATGHLFQEVRCMKLVQHPNIVRLYEVIDTQTKLYLILELGDGGDMFDYIMKHEEGLNEDLAKKYFAQIVHAISYCHKLHVVHRDLKPENVVFFEKQGLVKLTDFGFSNKFQPGKKLTTSCGSLAYSAPEILLGDEYDAPAVDIWSLGVILFMLVCGQPPFQEANDSETLTMIMDCKYTVPSHVSKECKDLITRMLQRDPKRRASLEEIENHPWLQGVDPSPATKYNIPLVSYKNLSEEEHNSIIQRMVLGDIADRDAIVEALETNRYNHITATYFLLAERILREKQEKEIQTRSASPSNIKAQFRQSWPTKIDVPQDLEDDLTATPLSHATVPQSPARAADSVLNGHRSKGLCDSAKKDDLPELAGPALSTVPPASLKPTASGRKCLFRVEEDEEEDEEDKKPMSLSTQVVLRRKPSVTNRLTSRKSAPVLNQIFEEGESDDEFDMDENLPPKLSRLKMNIASPGTVHKRYHRRKSQGRGSSCSSSETSDDDSESRRRLDKDSGFTYSWHRRDSSEGPPGSEGDGGGQSKPSNASGGVDKASPSENNAGGGSPSSGSGGNPTNTSGTTRRCAGPSNSMQLASRSAGELVESLKLMSLCLGSQLHGSTKYIIDPQNGLSFSSVKVQEKSTWKMCISSTGNAGQVPAVGGIKFFSDHMADTTTELERIKSKNLKNNVLQLPLCEKTISVNIQRNPKEGLLCASSPASCCHVI

SEQ ID NO: 80126 - protein, 765 aa, Homo sapiens; identical to SEQ ID NO: 80125
  Payload ID: 15974
  Gene Symbol: SNRK
  Gene Name: SNF related kinase
  Uniprot ID: Q9NRH2
  ENSP ID: ENSP00000401246

SEQ ID NO: 80127 - protein, 559 aa, Homo sapiens
  Payload ID: 15974
  Gene Symbol: SNRK
  Gene Name: SNF related kinase
  ENSP ID: ENSP00000409516
MLVCGQPPFQEANDSETLTMIMDCKYTVPSHVSKECKDLITRMLQRDPKRRASLEEIENHPWLQGVDPSPATKYNIPLVSYKNLSEEEHNSIIQRMVLGDIADRDAIVEALETNRYNHITATYFLLAERILREKQEKEIQTRSASPSNIKAQFRQSWPTKIDVPQDLEDDLTATPLSHATVPQSPARAADSVLNGHRSKGLCDSAKKDDLPELAGPALSTVPPASLKPTASGRKCLFRVEEDEEEDEEDKKPMSLSTQVVLRRKPSVTNRLTSRKSAPVLNQIFEEGESDDEFDMDENLPPKLSRLKMNIASPGTVHKRYHRRKSQGRGSSCSSSETSDDDSESRRRLDKDSGFTYSWHRRDSSEGPPGSEGDGGGQSKPSNASGGVDKASPSENNAGGGSPSSGSGGNPTNTSGTTRRCAGPSNSMQLASRSAGELVESLKLMSLCLGSQLHGSTKYIIDPQNGLSFSSVKVQEKSTWKMCISSTGNAGQVPAVGGIKFFSDHMADTTTELERIKSKNLKNNVLQLPLCEKTISVNIQRNPKEGLLCASSPASCCHVI

SEQ ID NO: 80128 - protein, 765 aa, Homo sapiens; identical to SEQ ID NO: 80125
  Payload ID: 15974
  Gene Symbol: SNRK
  Gene Name: SNF related kinase
  Uniprot ID: Q9NRH2
  ENSP ID: ENSP00000411375

SEQ ID NO: 80129 - protein, 1683 aa, Homo sapiens
  Payload ID: 15975
  Gene Symbol: SHPRH
  Gene Name: SNF2 histone linker PHD RING helicase, E3 ubiquitin protein ligase
  Uniprot ID: Q149N8
  ENSP ID: ENSP00000275233
MSSRRKRAPPVRVDEEKRQQLHWNMHEDRRNEPIIISDDDEQPCPGSDTSSAHYIILSDSLKEEVAHRDKKRCSKVVSFSKPIEKEETVGIFSPLSVKLNIVISPYHFDNSWKAFLGELTLQLLPAQSLIENFSERSITLMSSESSNQFLIYVHSKGEDVEKQKKEPMSICDKGILVESSFSGEMLEDLGWLQKKRRIKLYQKPEGNHIIKVGIYLLEAGLAKLDFLSDANSRMKKFNQLMKKVMEKLHNSIIPDVLEEDEDDPESEPEGQDIDELYHFVKQTHQQETQSIQVDVQHPALIPVLRPYQREAVNWMLQQECFRSSPATESALHFLWREIVTSEGLKLYYNPYTGCIIREYPNSGPQLLGGILADEMGLGKTVEVLALILTHTRQDVKQDALTLPEGKVVNYFIPSHYFGGKLKKTEIQNIEFEPKEKVQCPPTRVMILTAVKEMNGKKGVSILSIYKYVSSIYRYDVQRNRSLLKRMLKCLIFEGLVKQIKGHGFSGTFTLGKNYKEEDICDKTKKQAVGSPRKIQKETRKSGNKDTDSEYLPSDTSDDDDDPYYYYYKSRRNRSKLRKKLVPSTKKGKSQPFINPDSQGHCPATSDSGITDVAMSKSTCISEFNQEHETEDCAESLNHADSDVPPSNTMSPFNTSDYRFECICGELDQIDRKPRVQCLKCHLWQHAKCVNYDEKNLKIKPFYCPHCLVAMEPVSTRATLIISPSSICHQWVDEINRHVRSSSLRVLVYQGVKKDGFLQPHFLAEQDIVIITYDVLRSELNYVDIPHSNSEDGRRLRNQKRYMAIPSPLVAVEWWRICLDEAQMVECPTVKAAEMAQRLSGINRWCISGTPVQRGLEDLFGLVVFLGIEPYCVKHWWVRLLYRPYCKKNPQHLYSFIAKILWRSAKKDVIDQIQIPPQTEEIHWLHFSPVERHFYHRQHEVCCQDVVVKLRKISDWALKLSSLDRRTVTSILYPLLRLRQACCHPQAVRGEFLPLQKSTMTMEELLTSLQKKCGTECEEAHRQLVCALNGLAGIHIIKGEYALAAELYREVLRSSEEHKGKLKTDSLQRLHATHNLMELLIARHPGIPPTLRDGRLEEEAKQLREHYMSKCNTEVAEAQQALYPVQQTIHELQRKIHSNSPWWLNVIHRAIEFTIDEELVQRVRNEITSNYKQQTGKLSMSEKFRDCRGLQFLLTTQMEELNKCQKLVREAVKNLEGPPSRNVIESATVCHLRPARLPLNCCVFCKADELFTEYESKLFSNTVKGQTAIFEEMIEDEEGLVDDRAPTTTRGLWAISETERSMKAILSFAKSHRFDVEFVDEGSTSMDLFEAWKKEYKLLHEYWMALRNRVSAVDELAMATERLRVRDPREPKPNPPVLHIIEPHEVEQNRIKLLNDKAVATSQLQKKLGQLLYLTNLEKSQDKTSGGVNPEPCPICARQLGKQWAVLTCGHCFCNECISIIIEQYSVGSHRSSIKCAICRQTTSHKEISYVFTSEKANQEEDIPVKGSHSTKVEAVVRTLMKIQLRDPGAKALVFSTWQDVLDIISKALTDNNMEFAQISRVKTFQENLSAFKRDPQINILLLPLHTGSNGLTIIEATHVLLVEPILNPAHELQAIGRVHRIGQTKPTIVHRFLIKATIEERMQAMLKTAERSHTNSSAKHSEASVLTVADLADLFTKETEELE

SEQ ID NO: 80130 - protein, 660 aa, Homo sapiens
  Payload ID: 15975
  Gene Symbol: SHPRH
  Gene Name: SNF2 histone linker PHD RING helicase, E3 ubiquitin protein ligase
  ENSP ID: ENSP00000356473
MSSRRKRAPPVRVDEEKRQQLHWNMHEDRRNEPIIISDDDEQPCPGEDVEKQKKEPMSICDKGILVESSFSGEMLEDLGWLQKKRRIKLYQKPEGNHIIKVGIYLLEAGLAKLDFLSDANSRMKKFNQLMKKVMEKLHNSIIPDVLEEDEDDPESEPEGQDIDELYHFVKQTHQQETQSIQVDVQHPALIPVLRPYQREAVNWMLQQECFRSSPATESALHFLWREIVTSEGLKLYYNPYTGCIIREYPNSGPQLLGGILADEMGLGKTVEVLALILTHTRQDVKQDALTLPEGKVVNYFIPSHYFGGKLKKTEIQNIEFEPKEKVQCPPTRVMILTAVKEMNGKKGVSILSIYKYVSSIYRYDVQRNRSLLKRMLKCLIFEGLVKQIKGHGFSGTFTLGKNYKEEDICDKTKKQAVGSPRKIQKETRKSGNKDTDSEYLPSDTSDDDDDPYYYYYKSRRNRSKLRKKLVPSTKKGKSQPFINPDSQGHCPATSDSGITDVAMSKSTCISEFNQEHETEDCAESLNHADSDVPPSNTMSPFNTSDYRFECICGELDQIDRKPRVQCLKCHLWQHAKCVNYDEKNLKIKPFYCPHCLVAMEPVSTRATLIISPSSICHQWVDEINRHVRSSSLRVLVYQGVKKDGFLQPHFGRTGYSYHYL

SEQ ID NO: 80131 - protein, 1683 aa, Homo sapiens; identical to SEQ ID NO: 80129
  Payload ID: 15975
  Gene Symbol: SHPRH
  Gene Name: SNF2 histone linker PHD RING helicase, E3 ubiquitin protein ligase
  Uniprot ID: Q149N8
  ENSP ID: ENSP00000356475

SEQ ID NO: 80132 - protein, 129 aa, Homo sapiens
  Payload ID: 15975
  Gene Symbol: SHPRH
  Gene Name: SNF2 histone linker PHD RING helicase, E3 ubiquitin protein ligase
  ENSP ID: ENSP00000403790
ILLLPLHTGSNGLTIIEATHVLLVEPILNPAHELQAIGRVHRIGQTKPTIVHRFLIKATIEERMQAMLKTAERRFFEEQALFCFHDITPFSHPWSLTTAILQLRDLVICELFFIYFKNFLICFLSSFSI

SEQ ID NO: 80133 - protein, 449 aa, Homo sapiens
  Payload ID: 15975
  Gene Symbol: SHPRH
  Gene Name: SNF2 histone linker PHD RING helicase, E3 ubiquitin protein ligase
  ENSP ID: ENSP00000408019
WNMHEDRRNEPIIISDDDEQPCPGSDTSSAHYIILSDSLKEEVAHRDKKRCSKVVSFSKPIEKEETVGIFSPLSVKLNIVISPYHFDNSWKAFLGELTLQLLPAQSLIENFSERSITLMSSESSNQFLIYVHSKGEDVEKQKKEPMSICDKGILVESSFSGEMLEDLGWLQKKRRIKLYQKPEGNHIIKVGIYLLEAGLAKLDFLSDANSRMKKFNQLMKKVMEKLHNSIIPDVLEEDEDDPESEPEGQDIDELYHFVKQTHQQETQSIQVDVQHPALIPVLRPYQREAVNWMLQQECFRSSPATESALHFLWREIVTSEGLKLYYNPYTGCIIREYPNSGPQLLGGILADEMGLGKTVEVLALILTHTRQDVKQDALTLPEGKVVNYFIPSHYFGGKLKKTEIQNIEFEPKEKVQCPPYPFTFSYTCDDTDSCERNEWKKRSVHPFHL

SEQ ID NO: 80134 - protein, 1659 aa, Homo sapiens
  Payload ID: 15975
  Gene Symbol: SHPRH
  Gene Name: SNF2 histone linker PHD RING helicase, E3 ubiquitin protein ligase
  Uniprot ID: Q149N8
  ENSP ID: ENSP00000412797
MSSRRKRAPPVRVDEEKRQQLHWNMHEDRRNEPIIISDDDEQPCPGSDTSSAHYIILSDSLKEEVAHRDKKRCSKVVSFSKPIEKEETVGIFSPLSVKLNIVISPYHFDNSWKAFLGELTLQLLPAQSLIENFSERSITLMSSESSNQFLIYVHSKGEDVEKQKKEPMSICDKGILVESSFSGEMLEDLGWLQKKRRIKLYQKPEGNHIIKVGIYLLEAGLAKLDFLSDANSRMKKFNQLMKKVMEKLHNSIIPDVLEEDEDDPESEPEGQDIDELYHFVKQTHQQETQSIQVDVQHPALIPVLRPYQREAVNWMLQQECFRSSPATESALHFLWREIVTSEGLKLYYNPYTGCIIREYPNSGPQLLGGILADEMGLGKTVEVLALILTHTRQDVKQDALTLPEGKVVNYFIPSHYFGGKLKKTEIQNIEFEPKEKVQCPPTRVMILTAVKEMNGKKGVSILSIYKYVSSIYRYDVQRNRSLLKRMLKCLIFEGLVKQIKGHGFSGTFTLGKNYKEEDICDKTKKQAVGSPRKIQKETRKSGNKDTDSEYLPSDTSDDDDDPYYYYYKSRRNRSKLRKKLVPSTKKGKSQPFINPDSQGHCPATSDSGITDVAMSKSTCISEFNQEHETEDCAESLNHADSDVPPSNTMSPFNTSDYRFECICGELDQIDRKPRVQCLKCHLWQHAKCVNYDEKNLKIKPFYCPHCLVAMEPVSTRATLIISPSSICHQWVDEINRHVRSSSLRVLVYQGVKKDGFLQPHFLAEQDIVIITYDVLRSELNYVDIPHSNSEDGRRLRNQKRYMAIPSPLVAVEWWRICLDEAQMVECPTVKAAEMAQRLSGINRWCISGTPVQRGLEDLFGLVVFLGIEPYCVKHWWVRLLYRPYCKKNPQHLYSFIAKILWRSAKKDVIDQIQIPPQTEEIHWLHFSPVERHFYHRQHEVCCQDVVVKLRKISDWALKLSSLDRRTVTSILYPLLRLRQACCHPQAVRGEFLPLQKSFEQSTFSFSTMTMEELLTSLQKKCGTECEEAHRQLVCALNGLAGIHIIKGEYALAAELYREVLRSSEEHKGKLKTDSLQRLHATHNLMELLIARHPGIPPTLRDGRLEEEAKQLREHYMSKCNTEVAEAQQALYPVQQTIHELQRKIHSNSPWWLNVIHRAIEFTIDEELVQRVRNEITSNYKQQTGKLSMSEKGLQFLLTTQMEELNKCQKLVREAVKNLEGPPSRNVIESATVCHLRPARLPLNCCVFCKADELFTEYESKLFSNTVKGQTAIFEEMIEDEEGLVDDRAPTTTRGLWAISETERSMKAILSFAKSHRFDVEFVDEGSTSMDLFEAWKKEYKLLHEYWMALRNRVSAVDELAMATERLRVRDPREPKPNPPVLHIIEPHEVEQNRIKLLNDKAVATSQLQKKLGQLLYLTNLEKSQDKTSGGVNPEPCPICARQLGKQWAVLTCGHCFCNECISIIIEQYSVGSHRSSIKCAICRQTTSHKEISYVFTSEKANQEEDIPVKGSHSTKVEAVVRTLMKIQLRDPGAKALVFSTWQDVLDIISKALTDNNMEFAQISRVKTFQENLSAFKRDPQINILLLPLHTGSNGLTIIEATHVLLVEPILNPAHELQAIGRVHRIGQTKPTIVHRFLIKATIEERMQAMLKTAERSIYI

SEQ ID NO: 80135 - protein, 97 aa, Homo sapiens
  Payload ID: 15975
  Gene Symbol: SHPRH
  Gene Name: SNF2 histone linker PHD RING helicase, E3 ubiquitin protein ligase
  ENSP ID: ENSP00000429548
  MOD_RES (1)..(1): Any amino acid
XKPEGNHIIKVGIYLLEAGLAKLDFLSDANSRMKKFNQLMKKVMEKLHNSIIPDVASLVRTADSELSAIGHLGRVWMAWCSSSTLLEKQPKFSKFCS

SEQ ID NO: 80136 - protein, 929 aa, Homo sapiens
  Payload ID: 15975
  Gene Symbol: SHPRH
  Gene Name: SNF2 histone linker PHD RING helicase, E3 ubiquitin protein ligase
  Uniprot ID: Q149N8
  ENSP ID: ENSP00000430528
MSSRRKRAPPVRVDEEKRQQLHWNMHEDRRNEPIIISDDDEQPCPGEDVEKQKKEPMSICDKGILVESSFSGEMLEDLGWLQKKRRIKLYQKPEGNHIIKVGIYLLEAGLAKLDFLSDANSRMKKFNQLMKKVMEKLHNSIIPDVLEEDEDDPESEPEGQDIDELYHFVKQTHQQETQSIQVDVQHPALIPVLRPYQREAVNWMLQQECFRSSPATESALHFLWREIVTSEGLKLYYNPYTGCIIREYPNSGPQLLGGILADEMGLGKTVEVLALILTHTRQDVKQDALTLPEGKVVNYFIPSHYFGGKLKKTEIQNIEFEPKEKVQCPPTRVMILTAVKEMNGKKGVSILSIYKYVSSIYRYDVQRNRSLLKRMLKCLIFEGLVKQIKGHGFSGTFTLGKNYKEEDICDKTKKQAVGSPRKIQKETRKSGNKDTDSEYLPSDTSDDDDDPYYYYYKSRRNRSKLRKKLVPSTKKGKSQPFINPDSQGHCPATSDSGITDVAMSKSTCISEFNQEHETEDCAESLNHADSDVPPSNTMSPFNTSDYRFECICGELDQIDRKPRVQCLKCHLWQHAKCVNYDEKNLKIKPFYCPHCLVAMEPVSTRATLIISPSSICHQWVDEINRHVRSSSLRVLVYQGVKKDGFLQPHFLAEQDIVIITYDVLRSELNYVDIPHSNSEDGRRLRNQKRYMAIPSPLVAVEWWRICLDEAQMVECPTVKAAEMAQRLSGINRWCISGTPVQRGLEDLFGLVVFLGIEPYCVKHWWVRLLYRPYCKKNPQHLYSFIAKILWRSAKKDVIDQIQIPPQTEEIHWLHFSPVERHFYHRQHEVCCQDVVVKLRKISDWALKLSSLDRRTVTSILYPLLRLRQACCHPQAVRGEFLPLQKSTMTMEELLTSLQKKCGTECEEAHRQLVCALNGLAGIHIIKGRR

SEQ ID NO: 80137 - protein, 1687 aa, Homo sapiens
  Payload ID: 15975
  Gene Symbol: SHPRH
  Gene Name: SNF2 histone linker PHD RING helicase, E3 ubiquitin protein ligase
  ENSP ID: ENSP00000486723
MSSRRKRAPPVRVDEEKRQQLHWNMHEDRRNEPIIISDDDEQPCPGSDTSSAHYIILSDSLKEEVAHRDKKRCSKVVSFSKPIEKEETVGIFSPLSVKLNIVISPYHFDNSWKAFLGELTLQLLPAQSLIENFSERSITLMSSESSNQFLIYVHSKGEDVEKQKKEPMSICDKGILVESSFSGEMLEDLGWLQKKRRIKLYQKPEGNHIIKVGIYLLEAGLAKLDFLSDANSRMKKFNQLMKKVMEKLHNSIIPDVLEEDEDDPESEPEGQDIDELYHFVKQTHQQETQSIQVDVQHPALIPVLRPYQREAVNWMLQQECFRSSPATESALHFLWREIVTSEGLKLYYNPYTGCIIREYPNSGPQLLGGILADEMGLGKTVEVLALILTHTRQDVKQDALTLPEGKVVNYFIPSHYFGGKLKKTEIQNIEFEPKEKVQCPPTRVMILTAVKEMNGKKGVSILSIYKYVSSIYRYDVQRNRSLLKRMLKCLIFEGLVKQIKGHGFSGTFTLGKNYKEEDICDKTKKQAVGSPRKIQKETRKSGNKDTDSEYLPSDTSDDDDDPYYYYYKSRRNRSKLRKKLVPSTKKGKSQPFINPDSQGHCPATSDSGITDVAMSKSTCISEFNQEHETEDCAESLNHADSDVPPSNTMSPFNTSDYRFECICGELDQIDRKPRVQCLKCHLWQHAKCVNYDEKNLKIKPFYCPHCLVAMEPVSTRATLIISPSSICHQWVDEINRHVRSSSLRVLVYQGVKKDGFLQPHFLAEQDIVIITYDVLRSELNYVDIPHSNSEDGRRLRNQKRYMAIPSPLVAVEWWRICLDEAQMVECPTVKAAEMAQRLSGINRWCISGTPVQRGLEDLFGLVVFLGIEPYCVKHWWVRLLYRPYCKKNPQHLYSFIAKILWRSAKKDVIDQIQIPPQTEEIHWLHFSPVERHFYHRQHEVCCQDVVVKLRKISDWALKLSSLDRRTVTSILYPLLRLRQACCHPQAVRGEFLPLQKSFEQSTFSFSTMTMEELLTSLQKKCGTECEEAHRQLVCALNGLAGIHIIKGEYALAAELYREVLRSSEEHKGKLKTDSLQRLHATHNLMELLIARHPGIPPTLRDGRLEEEAKQLREHYMSKCNTEVAEAQQALYPVQQTIHELQRKIHSNSPWWLNVIHRAIEFTIDEELVQRVRNEITSNYKQQTGKLSMSEKGLQFLLTTQMEELNKCQKLVREAVKNLEGPPSRNVIESATVCHLRPARLPLNCCVFCKADELFTEYESKLFSNTVKGQTAIFEEMIEDEEGLVDDRAPTTTRGLWAISETERSMKAILSFAKSHRFDVEFVDEGSTSMDLFEAWKKEYKLLHEYWMALRNRVSAVDELAMATERLRVRDPREPKPNPPVLHIIEPHEVEQNRIKLLNDKAVATSQLQKKLGQLLYLTNLEKSQDKTSGGVNPEPCPICARQLGKQWAVLTCGHCFCNECISIIIEQYSVGSHRSSIKCAICRQTTSHKEISYVFTSEKANQEEDIPVKGSHSTKVEAVVRTLMKIQLRDPGAKALVFSTWQDVLDIISKALTDNNMEFAQISRVKTFQENLSAFKRDPQINILLLPLHTGSNGLTIIEATHVLLVEPILNPAHELQAIGRVHRIGQTKPTIVHRFLIKATIEERMQAMLKTAERSHTNSSAKHSEASVLTVADLADLFTKETEELE

SEQ ID NO: 80138 - protein, 3230 aa, Homo sapiens
  Payload ID: 15976
  Gene Symbol: SRCAP
  Gene Name: Snf2-related CREBBP activator protein
  Uniprot ID: Q6ZRS2
  ENSP ID: ENSP00000262518
MQSSPSPAHPQLPVLQTQMVSDGMTGSNPVSPASSSSPASSGAGGISPQHIAQDSSLDGPPGPPDGATVPLEGFSLSQAADLANKGPKWEKSHAEIAEQAKHEAEIETRIAELRKEGFWSLKRLPKVPEPPRPKGHWDYLCEEMQWLSADFAQERRWKRGVARKVVRMVIRHHEEQRQKEERARREEQAKLRRIASTMAKDVRQFWSNVEKVVQFKQQSRLEEKRKKALDLHLDFIVGQTEKYSDLLSQSLNQPLTSSKAGSSPCLGSSSAASSPPPPASRLDDEDGDFQPQEDEEEDDEETIEVEEQQEGNDAEAQRREIELLRREGELPLEELLRSLPPQLLEGPSSPSQTPSSHDSDTRDGPEEGAEEEPPQVLEIKPPPSAVTQRNKQPWHPDEDDEEFTANEEEAEDEEDTIAAEEQLEGEVDHAMELSELAREGELSMEELLQQYAGAYAPGSGSSEDEDEDEVDANSSDCEPEGPVEAEEPPQEDSSSQSDSVEDRSEDEEDEHSEEEETSGSSASEESESEESEDAQSQSQADEEEEDDDFGVEYLLARDEEQSEADAGSGPPTPGPTTLGPKKEITDIAAAAESLQPKGYTLATTQVKTPIPLLLRGQLREYQHIGLDWLVTMYEKKLNGILADEMGLGKTIQTISLLAHLACEKGNWGPHLIIVPTSVMLNWEMELKRWCPSFKILTYYGAQKERKLKRQGWTKPNAFHVCITSYKLVLQDHQAFRRKNWRYLILDEAQNIKNFKSQRWQSLLNFNSQRRLLLTGTPLQNSLMELWSLMHFLMPHVFQSHREFKEWFSNPLTGMIEGSQEYNEGLVKRLHKVLRPFLLRRVKVDVEKQMPKKYEHVIRCRLSKRQRCLYDDFMAQTTTKETLATGHFMSVINILMQLRKVCNHPNLFDPRPVTSPFITPGICFSTASLVLRATDVHPLQRIDMGRFDLIGLEGRVSRYEADTFLPRHRLSRRVLLEVATAPDPPPRPKPVKMKVNRMLQPVPKQEGRTVVVVNNPRAPLGPVPVRPPPGPELSAQPTPGPVPQVLPASLMVSASPAGPPLIPASRPPGPVLLPPLQPNSGSLPQVLPSPLGVLSGTSRPPTPTLSLKPTPPAPVRLSPAPPPGSSSLLKPLTVPPGYTFPPAAATTTSTTTATATTTAVPAPTPAPQRLILSPDMQARLPSGEVVSIGQLASLAQRPVANAGGSKPLTFQIQGNKLTLTGAQVRQLAVGQPRPLQRNVVHLVSAGGQHHLISQPAHVALIQAVAPTPGPTPVSVLPSSTPSTTPAPTGLSLPLAANQVPPTMVNNTGVVKIVVRQAPRDGLTPVPPLAPAPRPPSSGLPAVLNPRPTLTPGRLPTPTLGTARAPMPTPTLVRPLLKLVHSPSPEVSASAPGAAPLTISSPLHVPSSLPGPASSPMPIPNSSPLASPVSSTVSVPLSSSLPISVPTTLPAPASAPLTIPISAPLTVSASGPALLTSVTPPLAPVVPAAPGPPSLAPSGASPSASALTLGLATAPSLSSSQTPGHPLLLAPTSSHVPGLNSTVAPACSPVLVPASALASPFPSAPNPAPAQASLLAPASSASQALATPLAPMAAPQTAILAPSPAPPLAPLPVLAPSPGAAPVLASSQTPVPVMAPSSTPGTSLASASPVPAPTPVLAPSSTQTMLPAPVPSPLPSPASTQTLALAPALAPTLGGSSPSQTLSLGTGNPQGPFPTQTLSLTPASSLVPTPAQTLSLAPGPPLGPTQTLSLAPAPPLAPASPVGPAPAHTLTLAPASSSASLLAPASVQTLTLSPAPVPTLGPAAAQTLALAPASTQSPASQASSLVVSASGAAPLPVTMVSRLPVSKDEPDTLTLRSGPPSPPSTATSFGGPRPRRQPPPPPRSPFYLDSLEEKRKRQRSERLERIFQLSEAHGALAPVYGTEVLDFCTLPQPVASPIGPRSPGPSHPTFWTYTEAAHRAVLFPQQRLDQLSEIIERFIFVMPPVEAPPPSLHACHPPPWLAPRQAAFQEQLASELWPRARPLHRIVCNMRTQFPDLRLIQYDCGKLQTLAVLLRQLKAEGHRVLIFTQMTRMLDVLEQFLTYHGHLYLRLDGSTRVEQRQALMERFNADKRIFCFILSTRSGGVGVNLTGADTVVFYDSDWNPTMDAQAQDRCHRIGQTRDVHIYRLISERTVEENILKKANQKRMLGDMAIEGGNFTTAYFKQQTIRELFDMPLEEPSSSSVPSAPEEEEETVASKQTHILEQALCRAEDEEDIRAATQAKAEQVAELAEFNENDGFPAGEGEEAGRPGAEDEEMSRAEQEIAALVEQLTPIERYAMKFLEASLEEVSREELKQAEEQVEAARKDLDQAKEEVFRLPQEEEEGPGAGDESSCGTGGGTHRRSKKAKAPERPGTRVSERLRGARAETQGANHTPVISAHQTRSTTTPPRCSPARERVPRPAPRPRPTPASAPAAIPALVPVPVSAPVPISAPNPITILPVHILPSPPPPSQIPPCSSPACTPPPACTPPPAHTPPPAQTCLVTPSSPLLLGPPSVPISASVTNLPLGLRPEAELCAQALASPESLELASVASSETSSLSLVPPKDLLPVAVEILPVSEKNLSLTPSAPSLTLEAGSIPNGQEQEAPDSAEGTTLTVLPEGEELPLCVSESNGLELPPSAASDEPLQEPLEADRTSEELTEAKTPTSSPEKPQELVTAEVAAPSTSSSATSSPEGPSPARPPRRRTSADVEIRGQGTGRPGQPPGPKVLRKLPGRLVTVVEEKELVRRRRQQRGAASTLVPGVSETSASPGSPSVRSMSGPESSPPIGGPCEAAPSSSLPTPPQQPFIARRHIELGVTGGGSPENGDGALLAITPPAVKRRRGRPPKKNRSPADAGRGVDEAPSSTLKGKTNGADPVPGPETLIVADPVLEPQLIPGPQPLGPQPVHRPNPLLSPVEKRRRGRPPKARDLPIPGTISSAGDGNSESRTQPPPHPSPLTPLPPLLVCPTATVANTVTTVTISTSPPKRKRGRPPKNPPSPRPSQLPVLDRDSTSVLESCGLGRRRQPQGQGESEGSSSDEDGSRPLTRLARLRLEAEGMRGRKSGGSMVVAVIQDDLDLADSGPGGLELTPPVVSLTPKLRSTRLRPGSLVPPLETEKLPRKRAGAPVGGSPGLAKRGRLQPPSPLGPEGSVEESEAEASGEEEEGDGTPRRRPGPRRLVGTTNQGDQRILRSSAPPSLAGPAVSHRGRKAKT

SEQ ID NO: 80139 - protein, 2971 aa, Homo sapiens [sequence omitted]

SEQ ID NO: 80140 - protein, 100 aa, Homo sapiens
  Payload ID: 15976
  Gene Symbol: SRCAP
  Gene Name: Snf2-related CREBBP activator protein
  ENSP ID: ENSP00000405186
MQSSPSPAHPQLPVLQTQMVSDGMTGSNPVSPASSSSPASSGAGGISPQHIAQDSSLDGPPGPPDGATVPLEGFSLSQAADLANKGPKWEKSHAEIAEQA

SEQ ID NO: 80141 - protein, 1610 aa, Homo sapiens
  Payload ID: 15976
  Gene Symbol: SRCAP
  Gene Name: Snf2-related CREBBP activator protein
  ENSP ID: ENSP00000483329
  MOD_RES (1)..(1): Any amino acid
XTIEVEEQQEGNDAEAQRREIELLRREGELPLEELLRSLPPQLLEGPSSPSQTPSSHDSDTRDGPEEGAEEEPPQVLEIKPPPSAVTQRNKQPWHPDEDDEEFTANEEEAEDEEDTIAAEEQLEGEVDHAMELSELAREGELSMEELLQQYAGAYAPGSGSSEDEDEDEVDANSSDCEPEGPVEAEEPPQEDSSSQSDSVEDRSEDEEDEHSEEEETSGSSASEESESEESEDAQSQSQADEEEEDDDFGVEYLLARDEEQSEADAGSGPPTPGPTTLGPKKEITDIAAAAESLQPKGYTLATTQVKTPIPLLLRGQLREYQHIGLDWLVTMYEKKLNGILADEMGLGKTIQTISLLAHLACEKGNWGPHLIIVPTSVMLNWEMELKRWCPSFKILTYYGAQKERKLKRQGWTKPNAFHVCITSYKLVLQDHQAFRRKNWRYLILDEAQNIKNFKSQRWQSLLNFNSQRRLLLTGTPLQNSLMELWSLMHFLMPHVFQSHREFKEWFSNPLTGMIEGSQEYNEGLVKRLHKVLRPFLLRRVKVDVEKQMPKKYEHVIRCRLSKRQRCLYDDFMAQTTTKETLATGHFMSVINILMQLRKVCNHPNLFDPRPVTSPFITPGICFSTASLVLRATDVHPLQRIDMGRFDLIGLEGRVSRYEADTFLPRHRLSRRVLLEVATAPDPPPRPKPVKMKVNRMLQPVPKQEGRTVVVVNNPRAPLGPVPVRPPPGPELSAQPTPGPVPQVLPASLMVSASPAGPPLIPASRPPGPVLLPPLQPNSGSLPQVLPSPLGVLSGTSRPPTPTLSLKPTPPAPVRLSPAPPPGSSSLLKPLTVPPGYTFPPAAATTTSTTTATATTTAVPAPTPAPQRLILSPDMQARLPSGEVVSIGQLASLAQRPVANAGGSKPLTFQIQGNKLTLTGAQVRQLAVGQPRPLQRNVVHLVSAGGQHHLISQPAHVALIQAVAPTPGPTPVSVLPSSTPSTTPAPTGLSLPLAANQVPPTMVNNTGVVKIVVRQAPRDGLTPVPPLAPAPRPPSSGLPAVLNPRPTLTPGRLPTPTLGTARAPMPTPTLVRPLLKLVHSPSPEVSASAPGAAPLTISSPLHVPSSLPGPASSPMPIPNSSPLASPVSSTVSVPLSSSLPISVPTTLPAPASAPLTIPISAPLTVSASGPALLTSVTPPLAPVVPAAPGPPSLAPSGASPSASALTLGLATAPSLSSSQTPGHPLLLAPTSSHVPGLNSTVAPACSPVLVPASALASPFPSAPNPAPAQASLLAPASSASQALATPLAPMAAPQTAILAPSPAPPLAPLPVLAPSPGAAPVLASSQTPVPVMAPSSTPGTSLASASPVPAPTPVLAPSSTQTMLPAPVPSPLPSPASTQTLALAPALAPTLGGSSPSQTLSLGTGNPQGPFPTQTLSLTPASSLVPTPAQTLSLAPGPPLGPTQTLSLAPAPPLAPASPVGPAPAHTLTLAPASSSASLLAPASVQTLTLSPAPVPTLGPAAAQTLALAPASTQSPASQASSLVVSASGAAPLPVTMVSRLPVSKDEPDTLTLRSGPPSPPSTATSFGGPRPRRQPPPPPRSPFYLVSFTSSRGNRKLSFFGVLVGWMEQ

SEQ ID NO: 80142 - protein, 257 aa, Homo sapiens
  Payload ID: 15977
  Gene Symbol: SNF8
  Gene Name: SNF8, ESCRT-II complex subunit
  Uniprot ID: Q96H20
  ENSP ID: ENSP00000290330
MHRRGVGAGAIAKKKLAEAKYKERGTVLAEDQLAQMSKQLDMFKTNLEEFASKHKQEIRKNPEFRVQFQDMCATIGVDPLASGKGFWSEMLGVGDFYYELGVQIIEVCLALKHRNGGLITLEELHQQVLKGRGKFAQDVSQDDLIRAIKKLKALGTGFGIIPVGGTYLIQSVPAELNMDHTVVLQLAENGYVTVSEIKASLKWETERARQVLEHLLKEGLAWLDLQAPGEAHYWLPALFTDLYSQEITAEEAREALP

SEQ ID NO: 80143 - protein, 258 aa, Homo sapiens
  Payload ID: 15977
  Gene Symbol: SNF8
  Gene Name: SNF8, ESCRT-II complex subunit
  Uniprot ID: Q96H20
  ENSP ID: ENSP00000421380
MHRRGVGAGAIAKKKLAEAKYKERGTVLAEDQLAQMSKQLDMFKTNLEEFASKHKQEIRKNPEFRVQFQDMCATIGVDPLASGKGFWSEMLGVGDFYYELGVQIIEVCLALKHRNGGLITLEELHQQVLKGRGKFAQDVSQDDLIRAIKKLKALGTGFGIIPVGGTYLIQSVPAELNMDHTVVLQLAEKNGYVTVSEIKASLKWETERARQVLEHLLKEGLAWLDLQAPGEAHYWLPALFTDLYSQEITAEEAREALP

SEQ ID NO: 80144 - protein, 167 aa, Homo sapiens
  Payload ID: 15977
  Gene Symbol: SNF8
  Gene Name: SNF8, ESCRT-II complex subunit
  ENSP ID: ENSP00000421390
MHRRGVGAGAIAKKKLAEAKYKERGTVLAEDQLAQMSKQLDMFKTNLEEFASKHKQEIRKNPEFRVQFQDMCATIGVDPLASGKGFWSEMLGVGDFYYELGVQIIEVCLALKHRNGGLITLEELHQQVLKGRGKFAQDVSQLERSGTISAHCNLRLLGSNDSSASAS

SEQ ID NO: 80145 - protein, 81 aa, Homo sapiens
  Payload ID: 15977
  Gene Symbol: SNF8
  Gene Name: SNF8, ESCRT-II complex subunit
  ENSP ID: ENSP00000421956
  MOD_RES (1)..(1): Any amino acid
XHRRGVGAGAIAKKKLAEAKYKERGTVLAEDQLAQMSKQLDMFKTNLEEFASKHKQEIRKNPEFRVQFQDMCATIGVDPLA

SEQ ID NO: 80146 - protein, 103 aa, Homo sapiens
  Payload ID: 15977
  Gene Symbol: SNF8
  Gene Name: SNF8, ESCRT-II complex subunit
  ENSP ID: ENSP00000422701
MHRRGVGAGAIAKKKLAEAKYKERGTVLAEDQLAQMSKQLDMFKTNLEEFASKHKQEIRKNPEFRVQFQDMCATIGVDPLASGVTLEKDFGLRCWAWGTSITN

SEQ ID NO: 80147 - protein, 141 aa, Homo sapiens
  Payload ID: 15977
  Gene Symbol: SNF8
  Gene Name: SNF8, ESCRT-II complex subunit
  ENSP ID: ENSP00000427328
MHRRGVGAGAIAKKKLAEAKYKERGTVLAEDQLAQMSKQLDMFKTNLEEFASKHKQEIRKNPEFRVQFQDMCATIGVDPLASGKGFWSEMLGVGDFYYELGVQIIEVCLALKHRNGGLITLEELHQQVLKGRGKFAQDVSQ

SEQ ID NO: 80148 - protein, 53 aa, Homo sapiens
  Payload ID: 15977
  Gene Symbol: SNF8
  Gene Name: SNF8, ESCRT-II complex subunit
  ENSP ID: ENSP00000460001
MHRRGVGAGAIAKKKLAEAKYKERGTVLAEDQLAQLEKDFGLRCWAWGTSITN

SEQ ID NO: 80149 - protein, 36 aa, Homo sapiens
  Payload ID: 15977
  Gene Symbol: SNF8
  Gene Name: SNF8, ESCRT-II complex subunit
  ENSP ID: ENSP00000460981
MHRRGVGAGAIAKKKLAEAKYKERGTVLAEDQLAQR

SEQ ID NO: 80150 - protein, 16 aa, Homo sapiens
  Payload ID: 15977
  Gene Symbol: SNF8
  Gene Name: SNF8, ESCRT-II complex subunit
  ENSP ID: ENSP00000467548
  MOD_RES (1)..(1): Any amino acid
XEVCLALKHRNGGEGG

SEQ ID NO: 80151 - protein, 71 aa, Homo sapiens
  Payload ID: 15978
  Gene Symbol: SNURF
  Gene Name: SNRPN upstream reading frame
  Uniprot ID: Q9Y675
  ENSP ID: ENSP00000342152
MERARDRLHLRRTTEQHVPEVEVQVKRRRTASLSNQECQLYPRRSQQQQVPVVDFQAELRQAFLAETPRGG

SEQ ID NO: 80152 - protein, 71 aa, Homo sapiens; identical to SEQ ID NO: 80151
  Payload ID: 15978
  Gene Symbol: SNURF
  Gene Name: SNRPN upstream reading frame
  Uniprot ID: Q9Y675
  ENSP ID: ENSP00000463201

SEQ ID NO: 80153 - protein, 71 aa, Homo sapiens; identical to SEQ ID NO: 80151
  Payload ID: 15978
  Gene Symbol: SNURF
  Gene Name: SNRPN upstream reading frame
  Uniprot ID: Q9Y675
  ENSP ID: ENSP00000463396

SEQ ID NO: 80154 - protein, 71 aa, Homo sapiens; identical to SEQ ID NO: 80151
  Payload ID: 15979
  Gene Symbol:
  Gene Name: SNRPN upstream reading frame protein  [Source:UniProtKB/Swiss-Prot
  Acc:Q9Y675]
  Uniprot ID: Q9Y675
  ENSP ID: ENSP00000451421

SEQ ID NO: 80155 - protein, 37 aa, Homo sapiens
  Payload ID: 15979
  Gene Symbol:
  Gene Name: SNRPN upstream reading frame protein  [Source:UniProtKB/Swiss-Prot
  Acc:Q9Y675]
  ENSP ID: ENSP00000451898
MERARDRLHLRRTTEQHVPEVEVQVKRRRTASLSNQE

SEQ ID NO: 80156 - protein, 128 aa, Homo sapiens
  Payload ID: 15980
  Gene Symbol: SNU13
  Gene Name: SNU13 homolog, small nuclear ribonucleoprotein (U4/U6.U5)
  Uniprot ID: P55769
  ENSP ID: ENSP00000215956
MTEADVNPKAYPLADAHLTKKLLDLVQQSCNYKQLRKGANEATKTLNRGISEFIVMAADAEPLEIILHLPLLCEDKNVPYVFVRSKQALGRACGVSRPVIACSVTIKEGSQLKQQIQSIQQSIERLLV

SEQ ID NO: 80157 - protein, 128 aa, Homo sapiens; identical to SEQ ID NO: 80156
  Payload ID: 15980
  Gene Symbol: SNU13
  Gene Name: SNU13 homolog, small nuclear ribonucleoprotein (U4/U6.U5)
  Uniprot ID: P55769
  ENSP ID: ENSP00000347401

SEQ ID NO: 80158 - protein, 128 aa, Homo sapiens; identical to SEQ ID NO: 80156
  Payload ID: 15980
  Gene Symbol: SNU13
  Gene Name: SNU13 homolog, small nuclear ribonucleoprotein (U4/U6.U5)
  Uniprot ID: P55769
  ENSP ID: ENSP00000383949

SEQ ID NO: 80159 - protein, 132 aa, Homo sapiens
  Payload ID: 15980
  Gene Symbol: SNU13
  Gene Name: SNU13 homolog, small nuclear ribonucleoprotein (U4/U6.U5)
  ENSP ID: ENSP00000383989
MLLVQTEADVNPKAYPLADAHLTKKLLDLVQQSCNYKQLRKGANEATKTLNRGISEFIVMAADAEPLEIILHLPLLCEDKNVPYVFVRSKQALGRACGVSRPVIACSVTIKEGSQLKQQIQSIQQSIERLLV

SEQ ID NO: 80160 - protein, 360 aa, Homo sapiens
  Payload ID: 15981
  Gene Symbol: SNUPN
  Gene Name: snurportin 1
  Uniprot ID: O95149
  ENSP ID: ENSP00000309831
MEELSQALASSFSVSQDLNSTAAPHPRLSQYKSKYSSLEQSERRRRLLELQKSKRLDYVNHARRLAEDDWTGMESEEENKKDDEEMDIDTVKKLPKHYANQLMLSEWLIDVPSDLGQEWIVVVCPVGKRALIVASRGSTSAYTKSGYCVNRFSSLLPGGNRRNSTAKDYTILDCIYNEVNQTYYVLDVMCWRGHPFYDCQTDFRFYWMHSKLPEEEGLGEKTKLNPFKFVGLKNFPCTPESLCDVLSMDFPFEVDGLLFYHKQTHYSPGSTPLVGWLRPYMVSDVLGVAVPAGPLTTKPDYAGHQLQQIMEHKKSQKEGMKEKLTHKASENGHYELEHLSTPKLKGSSHSPDHPGCLMEN

SEQ ID NO: 80161 - protein, 360 aa, Homo sapiens; identical to SEQ ID NO: 80160
  Payload ID: 15981
  Gene Symbol: SNUPN
  Gene Name: snurportin 1
  Uniprot ID: O95149
  ENSP ID: ENSP00000454852

SEQ ID NO: 80162 - protein, 2 aa, Homo sapiens
  Payload ID: 15981
  Gene Symbol: SNUPN
  Gene Name: snurportin 1
  ENSP ID: ENSP00000455649
ME

SEQ ID NO: 80163 - protein, 63 aa, Homo sapiens
  Payload ID: 15981
  Gene Symbol: SNUPN
  Gene Name: snurportin 1
  ENSP ID: ENSP00000455894
MEELSQALASSFSVSQDLNSTAAPHPRLSQYKSKYSSLEQSERRRRLLELQKSKRLDYVNHAR

SEQ ID NO: 80164 - protein, 360 aa, Homo sapiens; identical to SEQ ID NO: 80160
  Payload ID: 15981
  Gene Symbol: SNUPN
  Gene Name: snurportin 1
  Uniprot ID: O95149
  ENSP ID: ENSP00000456224

SEQ ID NO: 80165 - protein, 209 aa, Homo sapiens
  Payload ID: 15981
  Gene Symbol: SNUPN
  Gene Name: snurportin 1
  ENSP ID: ENSP00000456260
MEELSQALASSFSVSQDLNSTAAPHPRLSQYKSKYSSLEQSERRRRLLELQKSKRLDYVNHARRLAEDDWTGMESEEENKKDDEEMDIDTVKKLPKHYANQLMLSEWLIDVPSDLGQEWIVVVCPVGKRALIVASRGSTSAYTKSGYCVNRFSSLLPGGNRRNSTAKDYTILDCIYNEVNQTYYVLDVMCWRGHPFYDCQTDFRFYWMH

SEQ ID NO: 80166 - protein, 136 aa, Homo sapiens
  Payload ID: 15981
  Gene Symbol: SNUPN
  Gene Name: snurportin 1
  ENSP ID: ENSP00000456742
MEELSQALASSFSVSQDLNSTAAPHPRLSQYKSKYSSLEQSERRRRLLELQKSKRLDYVNHARRLAEDDWTGMESEEENKKDDEEMDIDTVKKLPKHYANQLMLSEWLIDVPSDLGQEWIVVVCPVGKRALIVASR

SEQ ID NO: 80167 - protein, 100 aa, Homo sapiens
  Payload ID: 15981
  Gene Symbol: SNUPN
  Gene Name: snurportin 1
  ENSP ID: ENSP00000457093
MEELSQALASSFSVSQDLNSTAAPHPRLSQYKSKYSSLEQSERRRRLLELQKSKRLDYVNHARRLAEDDWTGMESEEENKKDDEEMDIDTVKKLPKHYAN

SEQ ID NO: 80168 - protein, 200 aa, Homo sapiens
  Payload ID: 15981
  Gene Symbol: SNUPN
  Gene Name: snurportin 1
  ENSP ID: ENSP00000457562
RRLAEDDWTGMESEEENKKDDEEMDIDTVKKLPKHYANQLMLSEWLIDVPSDLGQEWIVVVCPVGKRALIVASRGSTSAYTKSGYCVNRFSSLLPGGNRRNSTAKDYTILDCIYNEVNQTYYVLDVMCWRGHPFYDCQTDFRFYWMHSKLPEEEGLGEKTKLNPFKFVGLKNFPCTPESLCDVLSMDFPFEVTKPLSLLP

SEQ ID NO: 80169 - protein, 360 aa, Homo sapiens; identical to SEQ ID NO: 80160
  Payload ID: 15981
  Gene Symbol: SNUPN
  Gene Name: snurportin 1
  Uniprot ID: O95149
  ENSP ID: ENSP00000458053

SEQ ID NO: 80170 - protein, 536 aa, Homo sapiens
  Payload ID: 15982
  Gene Symbol: SNW1
  Gene Name: SNW domain containing 1
  Uniprot ID: Q13573
  ENSP ID: ENSP00000261531
MALTSFLPAPTQLSQDQLEAEEKARSQRSRQTSLVSSRREPPPYGYRKGWIPRLLEDFGDGGAFPEIHVAQYPLDMGRKKKMSNALAIQVDSEGKIKYDAIARQGQSKDKVIYSKYTDLVPKEVMNADDPDLQRPDEEAIKEITEKTRVALEKSVSQKVAAAMPVRAADKLAPAQYIRYTPSQQGVAFNSGAKQRVIRMVEMQKDPMEPPRFKINKKIPRGPPSPPAPVMHSPSRKMTVKEQQEWKIPPCISNWKNAKGYTIPLDKRLAADGRGLQTVHINENFAKLAEALYIADRKAREAVEMRAQVERKMAQKEKEKHEEKLREMAQKARERRAGIKTHVEKEDGEARERDEIRHDRRKERQHDRNLSRAAPDKRSKLQRNENRDISEVIALGVPNPRTSNEVQYDQRLFNQSKGMDSGFAGGEDEIYNVYDQAWRGGKDMAQSIYRPSKNLDKDMYGDDLEARIKTNRFVPDKEFSGSDRRQRGREGPVQFEEDPFGLDKFLEEAKQHGGSKRPSDSSRPKEHEHEGKKRRKE

SEQ ID NO: 80171 - protein, 571 aa, Homo sapiens
  Payload ID: 15982
  Gene Symbol: SNW1
  Gene Name: SNW domain containing 1
  ENSP ID: ENSP00000451129
MALTSFLPAPTQLSQDQLEAEEKARSQRSRQTSLVSSRREPPPYGYRKGWIPRLLEDFGDGGAFPEIHVAQYPLDMGRKKKMSNALAIQVDSEGKIKYDAIARQGQSKDKVIYSKYTDLVPKEVMNADDPDLQRPDEEAIKEITEKTRVALEKSVSQKVAAAMPVRAADKLAPAQYIRYTPSQQGVAFNSGAKQRVIRMVEMQKDPMEPPRFKINKKIPRGPPSPPAPVMHSPSRKMTVKEQQEWKIPPCISNWKNAKGYTIPLDKRLAADGRGLQTVHINENFAKLAEALYIADRKAREAVEMRAQVERKMAQKEKEKHEEKLREMAQKARERRAGIKTHVEKEDGEARERDEIRHDRRKERQHDRNLSRAAPDKRSKLQRNENRDISEVIALGVPNPRTSNEVQYDQRLFNQSKGMDSGFAGGEDEIYNVYDQAWRGGKDMAQSIYRPSKNLDKDMYGDDLEARIKTNRCQAIQLNFSVYTGESKVVHSFFSFSLDLFPTRSFLVQTVDREAEKDQCSLRKILLVWTSFWKKPNSMVALKDPQIAAAPRNTSMKARRGGRNRHRSLQSE

SEQ ID NO: 80172 - protein, 47 aa, Homo sapiens
  Payload ID: 15982
  Gene Symbol: SNW1
  Gene Name: SNW domain containing 1
  ENSP ID: ENSP00000451741
MALTSYLRTSLRLKKRQDPRDHGRPHWSPPEENLPRTDTGKAGYLGY

SEQ ID NO: 80173 - protein, 374 aa, Homo sapiens
  Payload ID: 15982
  Gene Symbol: SNW1
  Gene Name: SNW domain containing 1
  ENSP ID: ENSP00000452059
MPVRAADKLAPAQYIRYTPSQQGVAFNSGAKQRVIRMVEMQKDPMEPPRFKINKKIPRGPPSPPAPVMHSPSRKMTVKEQQEWKIPPCISNWKNAKGYTIPLDKRLAADGRGLQTVHINENFAKLAEALYIADRKAREAVEMRAQVERKMAQKEKEKHEEKLREMAQKARERRAGIKTHVEKEDGEARERDEIRHDRRKERQHDRNLSRAAPDKRSKLQRNENRDISEVIALGVPNPRTSNEVQYDQRLFNQSKGMDSGFAGGEDEIYNVYDQAWRGGKDMAQSIYRPSKNLDKDMYGDDLEARIKTNRFVPDKEFSGSDRRQRGREGPVQFEEDPFGLDKFLEEAKQHGGSKRPSDSSRPKEHEHEGKKRRKE

SEQ ID NO: 80174 - protein, 185 aa, Homo sapiens
  Payload ID: 15982
  Gene Symbol: SNW1
  Gene Name: SNW domain containing 1
  ENSP ID: ENSP00000452473
MALTSFLPAPTQLSQDQLEAEEKARSQRSRQTSLVSSRREPPPYGYRKGWIPRLLEDFGDGGAFPEIHVAQYPLDMGRKKKMSNALAIQVDSEGKIKYDAIARQGQSKDKVIYSKYTDLVPKEVMNADDPDLQRPDEEAIKEMTVKEQQEWKIPPCISNWKNAKGYTIPLDKRLAADGRGLQTVH

SEQ ID NO: 80175 - protein, 688 aa, Homo sapiens
  Payload ID: 15983
  Gene Symbol: SCLT1
  Gene Name: sodium channel and clathrin linker 1
  Uniprot ID: Q96NL6
  ENSP ID: ENSP00000281142
MAAEIDFLREQNRRLNEDFRRYQMESFSKYSSVQKAVCQGEGDDTFENLVFDQSFLAPLVTEYDKHLGELNGQLKYYQKQVGEMKLQLENVIKENERLHSELKDAVEKKLEAFPLGTEVGTDIYADDETVRNLQEQLQLANQEKTQAVELWQTVSQELDRLHKLYQEHMTEAQIHVFESQKQKDQLFDFQQLTKQLHVTNENMEVTNQQFLKTVTEQSVIIEQLRKKLRQAKLELRVAVAKVEELTNVTEDLQGQMKKKEKDVVSAHGREEASDRRLQQLQSSIKQLEIRLCVTIQEANQLRTENTHLEKQTRELQAKCNELENERYEAIVRARNSMQLLEEANLQKSQALLEEKQKEEDIEKMKETVSRFVQDATIRTKKEVANTKKQCNIQISRLTEELSALQMECAEKQGQIERVIKEKKAVEEELEKIYREGRGNESDYRKLEEMHQRFLVSERSKDDLQLRLTRAENRIKQLETDSSEEISRYQEMIQKLQNVLESERENCGLVSEQRLKLQQENKQLRKETESLRKIALEAQKKAKVKISTMEHEFSIKERGFEVQLREMEDSNRNSIVELRHLLATQQKAANRWKEETKKLTESAEIRINNLKSELSRQKLHTQELLSQLEMANEKVAENEKLILEHQEKANRLQRRLSQAEERAASASQQLSVITVQRRKAASLMNLENI

SEQ ID NO: 80176 - protein, 175 aa, Homo sapiens
  Payload ID: 15983
  Gene Symbol: SCLT1
  Gene Name: sodium channel and clathrin linker 1
  Uniprot ID: Q96NL6
  ENSP ID: ENSP00000395292
MAAEIDFLREQNRRLNEDFRRYQMESFSKYSSVQKAVCQGEGDDTFENLVFDQSFLAPLVTEYDKHLGELNGQLKYYQKQVGEMKLQLENVIKENERSELSRQKLHTQELLSQLEMANEKVAENEKLILEHQEKANRLQRRLSQAEERAASASQQLSVITVQRRKAASLMNLENI

SEQ ID NO: 80177 - protein, 79 aa, Homo sapiens
  Payload ID: 15983
  Gene Symbol: SCLT1
  Gene Name: sodium channel and clathrin linker 1
  Uniprot ID: Q96NL6
  ENSP ID: ENSP00000420861
MAAEIDFLREQNRRLNEDFRRYQMESFSKYSSVQKAVCQGEGDDTFENLVFDQSFLAPLVTEYDKHLGELNGQLKYYQA

SEQ ID NO: 80178 - protein, 284 aa, Homo sapiens
  Payload ID: 15983
  Gene Symbol: SCLT1
  Gene Name: sodium channel and clathrin linker 1
  ENSP ID: ENSP00000424029
MESFSKYSSVQKAVCQGEGDDTFENLVFDQSFLAPLVTEYDKHLGELNGQLKYYQKQVGEMKLQLENVIKENERLHSELKDAVEKKLEAFPLGTEVGTDIYADDETVRNLQEQLQLANQEKTQAVELWQTVSQELDRLHKLYQEHMTEAQIHVFESQKQKDQLFDFQQLTKQLHVTNENMEVTNQQFLKTVTEQSVIIEQLRKKLRSELSRQKLHTQELLSQLEMANEKVAENEKLILEHQEKANRLQRRLSQAEERAASASQQLSVITVQRRKAASLMNLENI

SEQ ID NO: 80179 - protein, 131 aa, Homo sapiens
  Payload ID: 15983
  Gene Symbol: SCLT1
  Gene Name: sodium channel and clathrin linker 1
  ENSP ID: ENSP00000424304
MAAEIDFLREQNRRLNEDFRRYQMESFSKYSSVQKAVCQGEGDDTFENLVFDQSFLAPLVTEYDKHLGELNGQLKYYQKQVGEMKLQLENVIKENERVLLCLPGWSAVVRSRLTASSASRIRAILLPQPPQ

SEQ ID NO: 80180 - protein, 56 aa, Homo sapiens
  Payload ID: 15983
  Gene Symbol: SCLT1
  Gene Name: sodium channel and clathrin linker 1
  ENSP ID: ENSP00000425315
MESFSKYSSVQKAVCQGEGDDTFENLVFDQSFLAPLVTEYDKHLGELNGQLKYYQA

SEQ ID NO: 80181 - protein, 195 aa, Homo sapiens
  Payload ID: 15984
  Gene Symbol: SCNM1
  Gene Name: sodium channel modifier 1
  Uniprot ID: Q9BWG6
  ENSP ID: ENSP00000357898
MLRDGRFACAICPHRPVLDTLAMLTAHRAGKKHLSSLQLFYGKKQPGKERKQNPKHQNELRREETKAEAPLLTQTRLITQSALHRAPHYNSCCRRKYRPEAPGPSVSLSPMPPSEVKLQSGKISREPEPAAGPQAEESATVSAPAPMSPTRRRALDHYLTLRSSGWIPDGRGRWVKDENVEFDSDEEEPPDLPLD

SEQ ID NO: 80182 - protein, 230 aa, Homo sapiens
  Payload ID: 15984
  Gene Symbol: SCNM1
  Gene Name: sodium channel modifier 1
  Uniprot ID: Q9BWG6
  ENSP ID: ENSP00000357901
MSFKREGDDWSQLNVLKKRRVGDLLASYIPEDEALMLRDGRFACAICPHRPVLDTLAMLTAHRAGKKHLSSLQLFYGKKQPGKERKQNPKHQNELRREETKAEAPLLTQTRLITQSALHRAPHYNSCCRRKYRPEAPGPSVSLSPMPPSEVKLQSGKISREPEPAAGPQAEESATVSAPAPMSPTRRRALDHYLTLRSSGWIPDGRGRWVKDENVEFDSDEEEPPDLPLD

SEQ ID NO: 80183 - protein, 195 aa, Homo sapiens; identical to SEQ ID NO: 80181
  Payload ID: 15984
  Gene Symbol: SCNM1
  Gene Name: sodium channel modifier 1
  Uniprot ID: Q9BWG6
  ENSP ID: ENSP00000473282

SEQ ID NO: 80184 - protein, 669 aa, Homo sapiens
  Payload ID: 15985
  Gene Symbol: SCNN1A
  Gene Name: sodium channel, non voltage gated 1 alpha subunit
  Uniprot ID: P37088
  ENSP ID: ENSP00000228916
MEGNKLEEQDSSPPQSTPGLMKGNKREEQGLGPEPAAPQQPTAEEEALIEFHRSYRELFEFFCNNTTIHGAIRLVCSQHNRMKTAFWAVLWLCTFGMMYWQFGLLFGEYFSYPVSLNINLNSDKLVFPAVTICTLNPYRYPEIKEELEELDRITEQTLFDLYKYSSFTTLVAGSRSRRDLRGTLPHPLQRLRVPPPPHGARRARSVASSLRDNNPQVDWKDWKIGFQLCNQNKSDCFYQTYSSGVDAVREWYRFHYINILSRLPETLPSLEEDTLGNFIFACRFNQVSCNQANYSHFHHPMYGNCYTFNDKNNSNLWMSSMPGINNGLSLMLRAEQNDFIPLLSTVTGARVMVHGQDEPAFMDDGGFNLRPGVETSISMRKETLDRLGGDYGDCTKNGSDVPVENLYPSKYTQQVCIHSCFQESMIKECGCAYIFYPRPQNVEYCDYRKHSSWGYCYYKLQVDFSSDHLGCFTKCRKPCSVTSYQLSAGYSRWPSVTSQEWVFQMLSRQNNYTVNNKRNGVAKVNIFFKELNYKTNSESPSVTMVTLLSNLGSQWSLWFGSSVLSVVEMAELVFDLLVIMFLMLLRRFRSRYWSPGRGGRGAQEVASTLASSPPSHFCPHPMSLSLSQPGPAPSPALTAPPPAYATLGPRPSPGGSAGASSSTCPLGGP

SEQ ID NO: 80185 - protein, 245 aa, Homo sapiens
  Payload ID: 15985
  Gene Symbol: SCNN1A
  Gene Name: sodium channel, non voltage gated 1 alpha subunit
  ENSP ID: ENSP00000345028
MEGNKLEEQDSSPPQSTPGLMKGNKREEQGLGPEPAAPQQPTAEEEALIEFHRSYRELFEFFCNNTTIHGAIRLVCSQHNRMKTAFWAVLWLCTFGMMYWQFGLLFGEYFSYPVSLNINLNSDKLVFPAVTICTLNPYRYPEIKEELEELDRITEQTLFDLYKYSSFTTLVAGSRSRRDLRGTLPHPLQRLRVPPPPHGARRARSVASSLRDNNPQVDWKDWKIGFQLELLSLPPPDVWKLLYFQ

SEQ ID NO: 80186 - protein, 728 aa, Homo sapiens
  Payload ID: 15985
  Gene Symbol: SCNN1A
  Gene Name: sodium channel, non voltage gated 1 alpha subunit
  Uniprot ID: P37088
  ENSP ID: ENSP00000353292
MGMARGSLTRVPGVMGEGTQGPELSLDPDPCSPQSTPGLMKGNKLEEQDPRPLQPIPGLMEGNKLEEQDSSPPQSTPGLMKGNKREEQGLGPEPAAPQQPTAEEEALIEFHRSYRELFEFFCNNTTIHGAIRLVCSQHNRMKTAFWAVLWLCTFGMMYWQFGLLFGEYFSYPVSLNINLNSDKLVFPAVTICTLNPYRYPEIKEELEELDRITEQTLFDLYKYSSFTTLVAGSRSRRDLRGTLPHPLQRLRVPPPPHGARRARSVASSLRDNNPQVDWKDWKIGFQLCNQNKSDCFYQTYSSGVDAVREWYRFHYINILSRLPETLPSLEEDTLGNFIFACRFNQVSCNQANYSHFHHPMYGNCYTFNDKNNSNLWMSSMPGINNGLSLMLRAEQNDFIPLLSTVTGARVMVHGQDEPAFMDDGGFNLRPGVETSISMRKETLDRLGGDYGDCTKNGSDVPVENLYPSKYTQQVCIHSCFQESMIKECGCAYIFYPRPQNVEYCDYRKHSSWGYCYYKLQVDFSSDHLGCFTKCRKPCSVTSYQLSAGYSRWPSVTSQEWVFQMLSRQNNYTVNNKRNGVAKVNIFFKELNYKTNSESPSVTMVTLLSNLGSQWSLWFGSSVLSVVEMAELVFDLLVIMFLMLLRRFRSRYWSPGRGGRGAQEVASTLASSPPSHFCPHPMSLSLSQPGPAPSPALTAPPPAYATLGPRPSPGGSAGASSSTCPLGGP

SEQ ID NO: 80187 - protein, 511 aa, Homo sapiens
  Payload ID: 15985
  Gene Symbol: SCNN1A
  Gene Name: sodium channel, non voltage gated 1 alpha subunit
  ENSP ID: ENSP00000380166
MEGNKLEEQDSSPPQSTPGLMKGNKREEQGLGPEPAAPQQPTAEEEALIEFHRSYRELFEFFCNNTTIHGAIRLVCSQHNRMKTAFWAVLWLCTFGMMYWQFGLLFGEYFSYPVSLNINLNSDKLVFPAVTICTLNPYRYPEIKEELEELDRITEQTLFDLYKYSSFTTLVAGSRSRRDLRGTLPHPLQRLRVPPPPHGARRARSVASSLRDNNPQVDWKDWKIGFQLCNQNKSDCFYQTYSSGVDAVREWYRFHYINILSRLPETLPSLEEDTLGNFIFACRFNQVSCNQANYSHFHHPMYGNCYTFNDKNNSNLWMSSMPGINNGLSLMLRAEQNDFIPLLSTVTGARVMVHGQDEPAFMDDGGFNLRPGVETSISMRKETLDRLGGDYGDCTKNGSDVPVENLYPSKYTQQVCIHSCFQESMIKECGCAYIFYPRPQNVEYCDYRKHSSWGYCYYKLQVDFSSDHLGCFTKCRKPCRNGSSRCYRDRTITPSTTREMEWPKSTSSSRS

SEQ ID NO: 80188 - protein, 692 aa, Homo sapiens
  Payload ID: 15985
  Gene Symbol: SCNN1A
  Gene Name: sodium channel, non voltage gated 1 alpha subunit
  Uniprot ID: P37088
  ENSP ID: ENSP00000438739
MSSIKGNKLEEQDPRPLQPIPGLMEGNKLEEQDSSPPQSTPGLMKGNKREEQGLGPEPAAPQQPTAEEEALIEFHRSYRELFEFFCNNTTIHGAIRLVCSQHNRMKTAFWAVLWLCTFGMMYWQFGLLFGEYFSYPVSLNINLNSDKLVFPAVTICTLNPYRYPEIKEELEELDRITEQTLFDLYKYSSFTTLVAGSRSRRDLRGTLPHPLQRLRVPPPPHGARRARSVASSLRDNNPQVDWKDWKIGFQLCNQNKSDCFYQTYSSGVDAVREWYRFHYINILSRLPETLPSLEEDTLGNFIFACRFNQVSCNQANYSHFHHPMYGNCYTFNDKNNSNLWMSSMPGINNGLSLMLRAEQNDFIPLLSTVTGARVMVHGQDEPAFMDDGGFNLRPGVETSISMRKETLDRLGGDYGDCTKNGSDVPVENLYPSKYTQQVCIHSCFQESMIKECGCAYIFYPRPQNVEYCDYRKHSSWGYCYYKLQVDFSSDHLGCFTKCRKPCSVTSYQLSAGYSRWPSVTSQEWVFQMLSRQNNYTVNNKRNGVAKVNIFFKELNYKTNSESPSVTMVTLLSNLGSQWSLWFGSSVLSVVEMAELVFDLLVIMFLMLLRRFRSRYWSPGRGGRGAQEVASTLASSPPSHFCPHPMSLSLSQPGPAPSPALTAPPPAYATLGPRPSPGGSAGASSSTCPLGGP

SEQ ID NO: 80189 - protein, 369 aa, Homo sapiens
  Payload ID: 15985
  Gene Symbol: SCNN1A
  Gene Name: sodium channel, non voltage gated 1 alpha subunit
  ENSP ID: ENSP00000440876
MYGNCYTFNDKNNSNLWMSSMPGINNGLSLMLRAEQNDFIPLLSTVTGARVMVHGQDEPAFMDDGGFNLRPGVETSISMRKETLDRLGGDYGDCTKNGSDVPVENLYPSKYTQQVCIHSCFQESMIKECGCAYIFYPRPQNVEYCDYRKHSSWGYCYYKLQVDFSSDHLGCFTKCRKPCSVTSYQLSAGYSRWPSVTSQEWVFQMLSRQNNYTVNNKRNGVAKVNIFFKELNYKTNSESPSVTMVTLLSNLGSQWSLWFGSSVLSVVEMAELVFDLLVIMFLMLLRRFRSRYWSPGRGGRGAQEVASTLASSPPSHFCPHPMSLSLSQPGPAPSPALTAPPPAYATLGPRPSPGGSAGASSSTCPLGGP

SEQ ID NO: 80190 - protein, 159 aa, Homo sapiens
  Payload ID: 15985
  Gene Symbol: SCNN1A
  Gene Name: sodium channel, non voltage gated 1 alpha subunit
  ENSP ID: ENSP00000443434
MPNGNKLEEQDPRPLQPIPGLMEGNKLEEQDSSPPQSTPGLMKGNKREEQGLGPEPAAPQQPTAEEEALIEFHRSYRELFEFFCNNTTIHGAIRLVCSQHNRMKTAFWAVLWLCTFGMMYWQFGLLFGEYFSYPVSLNINLNSDKLVFPAVTICTLNPY

SEQ ID NO: 80191 - protein, 685 aa, Homo sapiens
  Payload ID: 15986
  Gene Symbol: SCNN1B
  Gene Name: sodium channel, non voltage gated 1 beta subunit
  Uniprot ID: P51168
  ENSP ID: ENSP00000302874
MLLHINPAYLFKLLHGFPPWIMPTDGNLGDKNFQMGKPGHREGATMHVKKYLLKGLHRLQKGPGYTYKELLVWYCDNTNTHGPKRIICEGPKKKAMWFLLTLLFAALVCWQWGIFIRTYLSWEVSVSLSVGFKTMDFPAVTICNASPFKYSKIKHLLKDLDELMEAVLERILAPELSHANATRNLNFSIWNHTPLVLIDERNPHHPMVLDLFGDNHNGLTSSSASEKICNAHGCKMAMRLCSLNRTQCTFRNFTSATQALTEWYILQATNIFAQVPQQELVEMSYPGEQMILACLFGAEPCNYRNFTSIFYPHYGNCYIFNWGMTEKALPSANPGTEFGLKLILDIGQEDYVPFLASTAGVRLMLHEQRSYPFIRDEGIYAMSGTETSIGVLVDKLQRMGEPYSPCTVNGSEVPVQNFYSDYNTTYSIQACLRSCFQDHMIRNCNCGHYLYPLPRGEKYCNNRDFPDWAHCYSDLQMSVAQRETCIGMCKESCNDTQYKMTISMADWPSEASEDWIFHVLSQERDQSTNITLSRKGIVKLNIYFQEFNYRTIEESAANNIVWLLSNLGGQFGFWMGGSVLCLIEFGEIIIDFVWITIIKLVALAKSLRQRRAQASYAGPPPTVAELVEAHTNFGFQPDTAPRSPNTGPYPSEQALPIPGTPPPNYDSLRLQPLDVIESDSEGDAI

SEQ ID NO: 80192 - protein, 640 aa, Homo sapiens
  Payload ID: 15986
  Gene Symbol: SCNN1B
  Gene Name: sodium channel, non voltage gated 1 beta subunit
  Uniprot ID: P51168
  ENSP ID: ENSP00000345751
MHVKKYLLKGLHRLQKGPGYTYKELLVWYCDNTNTHGPKRIICEGPKKKAMWFLLTLLFAALVCWQWGIFIRTYLSWEVSVSLSVGFKTMDFPAVTICNASPFKYSKIKHLLKDLDELMEAVLERILAPELSHANATRNLNFSIWNHTPLVLIDERNPHHPMVLDLFGDNHNGLTSSSASEKICNAHGCKMAMRLCSLNRTQCTFRNFTSATQALTEWYILQATNIFAQVPQQELVEMSYPGEQMILACLFGAEPCNYRNFTSIFYPHYGNCYIFNWGMTEKALPSANPGTEFGLKLILDIGQEDYVPFLASTAGVRLMLHEQRSYPFIRDEGIYAMSGTETSIGVLVDKLQRMGEPYSPCTVNGSEVPVQNFYSDYNTTYSIQACLRSCFQDHMIRNCNCGHYLYPLPRGEKYCNNRDFPDWAHCYSDLQMSVAQRETCIGMCKESCNDTQYKMTISMADWPSEASEDWIFHVLSQERDQSTNITLSRKGIVKLNIYFQEFNYRTIEESAANNIVWLLSNLGGQFGFWMGGSVLCLIEFGEIIIDFVWITIIKLVALAKSLRQRRAQASYAGPPPTVAELVEAHTNFGFQPDTAPRSPNTGPYPSEQALPIPGTPPPNYDSLRLQPLDVIESDSEGDAI

SEQ ID NO: 80193 - protein, 604 aa, Homo sapiens
  Payload ID: 15986
  Gene Symbol: SCNN1B
  Gene Name: sodium channel, non voltage gated 1 beta subunit
  ENSP ID: ENSP00000455673
MHVKKYLLKGLHRLQKGPGYTYKELLVWYCDNTNTHGPKRIICEGPKKKAMWFLLTLLFAALVCWQWGIFIRTYLSWEVSVSLSVGFKTMDFPAVTICNASPFKYSKIKHLLKDLDELMEAVLERILAPELSHANATRNLNFSIWNHTPLVLIDERNPHHPMVLDLFGDNHNGLTSSSASEKICNAHGCKMAMRLCSLNRTQCTFRNFTSATQALTEWYILQATNIFAQVPQQELVEMSYPGEQMILACLFGAEPCNYRNFTSIFYPHYGNCYIFNWGMTEKALPSANPGTEFGLKLILDIGQEDYVPFLASTAGVRLMLHEQRSYPFIRDEGIYAMSGTETSIGVLVACLRSCFQDHMIRNCNCGHYLYPLPRGEKYCNNRDFPDWAHCYSDLQMSVAQRETCIGMCKESCNDTQYKMTISMADWPSEASEDWIFHVLSQERDQSTNITLSRKGIVKLNIYFQEFNYRTIEESAANNIVWLLSNLGGQFGFWMGGSVLCLIEFGEIIIDFVWITIIKLVALAKSLRQRRAQASYAGPPPTVAELVEAHTNFGFQPDTAPRSPNTGPYPSEQALPIPGTPPPNYDSLRLQPLDVIESDSEGDAI

SEQ ID NO: 80194 - protein, 613 aa, Homo sapiens
  Payload ID: 15986
  Gene Symbol: SCNN1B
  Gene Name: sodium channel, non voltage gated 1 beta subunit
  ENSP ID: ENSP00000456309
MHVKKYLLKGLHRLQKGPGYTYKELLVWYCDNTNTHGPKRIICEGPKKKAMWFLLTLLFAALVCWQWGIFIRTYLSWEVSVSLSVGFKTMDFPAVTICNASPFKYSKIKHLLKDLDELMEAVLERILAPELSHANATRNLNFSIWNHTPLVLIDERNPHHPMVLDLFGDNHNGLTSSSASEKICNAHGCKMAMRLATNIFAQVPQQELVEMSYPGEQMILACLFGAEPCNYRNFTSIFYPHYGNCYIFNWGMTEKALPSANPGTEFGLKLILDIGQEDYVPFLASTAGVRLMLHEQRSYPFIRDEGIYAMSGTETSIGVLVDKLQRMGEPYSPCTVNGSEVPVQNFYSDYNTTYSIQACLRSCFQDHMIRNCNCGHYLYPLPRGEKYCNNRDFPDWAHCYSDLQMSVAQRETCIGMCKESCNDTQYKMTISMADWPSEASEDWIFHVLSQERDQSTNITLSRKGIVKLNIYFQEFNYRTIEESAANNIVWLLSNLGGQFGFWMGGSVLCLIEFGEIIIDFVWITIIKLVALAKSLRQRRAQASYAGPPPTVAELVEAHTNFGFQPDTAPRSPNTGPYPSEQALPIPGTPPPNYDSLRLQPLDVIESDSEGDAI

SEQ ID NO: 80195 - protein, 296 aa, Homo sapiens
  Payload ID: 15986
  Gene Symbol: SCNN1B
  Gene Name: sodium channel, non voltage gated 1 beta subunit
  ENSP ID: ENSP00000457754
MHVKKYLLKGLHRLQKGPGYTYKELLVWYCDNTNTHGPKRIICEGPKKKAMWFLLTLLFAALVCWQWGIFIRTYLSWEVSVSLSVGFKTMDFPAVTICNASPFKYSKIKHLLKDLDELMEAVLERILAPELSHANATRNLNFSIWNHTPLVLIDERNPHHPMVLDLFGDNHNGLTSSSASEKICNAHGCKMAMRLCSLNRTQCTFRNFTSATQALTEWYILQATNIFAQVPQQELVEMSYPGEQMILACLFGAEPCNYRPEVDPGHRPGRLRPLPCVHGRGQADASRAEVIPLHQR

SEQ ID NO: 80196 - protein, 188 aa, Homo sapiens
  Payload ID: 15986
  Gene Symbol: SCNN1B
  Gene Name: sodium channel, non voltage gated 1 beta subunit
  ENSP ID: ENSP00000482681
  MOD_RES (1)..(1): Any amino acid
XVEMSYPGEQMILACLFGAEPCNYRNFTSIFYPHYGNCYIFNWGMTEKALPSANPGTEFGLKLILDIGQEDYVPFLASTAGVRLMLHEQRSYPFIRDEGIYAMSGTETSIGVLVDKLQRMGEPYSPCTVNGSEVPVQNFYSDYNTTYSIQVGRWCTPHAPGPLSGFMGPRPQYSGRAGPSKSGSAGPL

SEQ ID NO: 80197 - protein, 704 aa, Homo sapiens
  Payload ID: 15987
  Gene Symbol: SCNN1D
  Gene Name: sodium channel, non voltage gated 1 delta subunit
  Uniprot ID: P51172
  ENSP ID: ENSP00000321594
MAFLSRTSPVAAASFQSRQEARGSILLQSCQLPPQWLSTEAWTGEWKQPHGGALTSRSPGPVAPQRPCHLKGWQHRPTQHNAACKQGQAAAQTPPRPGPPSAPPPPPKEGHQEGLVELPASFRELLTFFCTNATIHGAIRLVCSRGNRLKTTSWGLLSLGALVALCWQLGLLFERHWHRPVLMAVSVHSERKLLPLVTLCDGNPRRPSPVLRHLELLDEFARENIDSLYNVNLSKGRAALSATVPRHEPPFHLDREIRLQRLSHSGSRVRVGFRLCNSTGGDCFYRGYTSGVAAVQDWYHFHYVDILALLPAAWEDSHGSQDGHFVLSCSYDGLDCQARQFRTFHHPTYGSCYTVDGVWTAQRPGITHGVGLVLRVEQQPHLPLLSTLAGIRVMVHGRNHTPFLGHHSFSVRPGTEATISIREDEVHRLGSPYGHCTAGGEGVEVELLHNTSYTRQACLVSCFQQLMVETCSCGYYLHPLPAGAEYCSSARHPAWGHCFYRLYQDLETHRLPCTSRCPRPCRESAFKLSTGTSRWPSAKSAGWTLATLGEQGLPHQSHRQRSSLAKINIVYQELNYRSVEEAPVYSVPQLLSAMGSLCSLWFGASVLSLLELLELLLDASALTLVLGGRRLRRAWFSWPRASPASGASSIKPEASQMPPPAGGTSDDPEPSGPHLPRVMLPGVLAGVSAEESWAGPQPLETLDT

SEQ ID NO: 80198 - protein, 638 aa, Homo sapiens
  Payload ID: 15987
  Gene Symbol: SCNN1D
  Gene Name: sodium channel, non voltage gated 1 delta subunit
  Uniprot ID: P51172
  ENSP ID: ENSP00000339504
MAEHRSMDGRMEAATRGGSHLQAAAQTPPRPGPPSAPPPPPKEGHQEGLVELPASFRELLTFFCTNATIHGAIRLVCSRGNRLKTTSWGLLSLGALVALCWQLGLLFERHWHRPVLMAVSVHSERKLLPLVTLCDGNPRRPSPVLRHLELLDEFARENIDSLYNVNLSKGRAALSATVPRHEPPFHLDREIRLQRLSHSGSRVRVGFRLCNSTGGDCFYRGYTSGVAAVQDWYHFHYVDILALLPAAWEDSHGSQDGHFVLSCSYDGLDCQARQFRTFHHPTYGSCYTVDGVWTAQRPGITHGVGLVLRVEQQPHLPLLSTLAGIRVMVHGRNHTPFLGHHSFSVRPGTEATISIREDEVHRLGSPYGHCTAGGEGVEVELLHNTSYTRQACLVSCFQQLMVETCSCGYYLHPLPAGAEYCSSARHPAWGHCFYRLYQDLETHRLPCTSRCPRPCRESAFKLSTGTSRWPSAKSAGWTLATLGEQGLPHQSHRQRSSLAKINIVYQELNYRSVEEAPVYSVPQLLSAMGSLCSLWFGASVLSLLELLELLLDASALTLVLGGRRLRRAWFSWPRASPASGASSIKPEASQMPPPAGGTSDDPEPSGPHLPRVMLPGVLAGVSAEESWAGPQPLETLDT

SEQ ID NO: 80199 - protein, 308 aa, Homo sapiens
  Payload ID: 15987
  Gene Symbol: SCNN1D
  Gene Name: sodium channel, non voltage gated 1 delta subunit
  ENSP ID: ENSP00000368393
  MOD_RES (1)..(1): Any amino acid
XATARAATAFTEATRQAWRLSRTGTTSTMWISWPCCPRHGRTATGARTATSSSPAVTMAWTARPDSSGPSTTPPTAAATRSMASGQLSAPASPTVGASPWPVRGQGCRSGGLTPALGLPGVGLVLRVEQQPHLPLLSTLAGIRVMVHGRNHTPFLGHHSFSVRPGTEATISIREDEVHRLGSPYGHCTAGGEGVEVELLHNTSYTRQACLVSCFQQLMVETCSCGYYLHPLPAGAEYCSSARHPAWGHCFYRLYQDLETHRLPCTSRCPRPCRESAFKLSTGTSRWPSAKSAGWTLATLGEQGLPHQS

SEQ ID NO: 80200 - protein, 802 aa, Homo sapiens
  Payload ID: 15987
  Gene Symbol: SCNN1D
  Gene Name: sodium channel, non voltage gated 1 delta subunit
  ENSP ID: ENSP00000368411
MRAVLSQKTTPLPRYLWPGHLSGPRRLTWSWCSDHRTPTCRELGSPHPTPCTGPARGWPRRGGGPCGFTSAGHVLCGYPLCLLSGPIQGCGTGLGDSSMAFLSRTSPVAAASFQSRQEARGSILLQSCQLPPQWLSTEAWTGEWKQPHGGALTSRSPGPVAPQRPCHLKGWQHRPTQHNAACKQGQAAAQTPPRPGPPSAPPPPPKEGHQEGLVELPASFRELLTFFCTNATIHGAIRLVCSRGNRLKTTSWGLLSLGALVALCWQLGLLFERHWHRPVLMAVSVHSERKLLPLVTLCDGNPRRPSPVLRHLELLDEFARENIDSLYNVNLSKGRAALSATVPRHEPPFHLDREIRLQRLSHSGSRVRVGFRLCNSTGGDCFYRGYTSGVAAVQDWYHFHYVDILALLPAAWEDSHGSQDGHFVLSCSYDGLDCQARQFRTFHHPTYGSCYTVDGVWTAQRPGITHGVGLVLRVEQQPHLPLLSTLAGIRVMVHGRNHTPFLGHHSFSVRPGTEATISIREDEVHRLGSPYGHCTAGGEGVEVELLHNTSYTRQACLVSCFQQLMVETCSCGYYLHPLPAGAEYCSSARHPAWGHCFYRLYQDLETHRLPCTSRCPRPCRESAFKLSTGTSRWPSAKSAGWTLATLGEQGLPHQSHRQRSSLAKINIVYQELNYRSVEEAPVYSVPQLLSAMGSLCSLWFGASVLSLLELLELLLDASALTLVLGGRRLRRAWFSWPRASPASGASSIKPEASQMPPPAGGTSDDPEPSGPHLPRVMLPGVLAGVSAEESWAGPQPLETLDT

SEQ ID NO: 80201 - protein, 638 aa, Homo sapiens; identical to SEQ ID NO: 80198
  Payload ID: 15987
  Gene Symbol: SCNN1D
  Gene Name: sodium channel, non voltage gated 1 delta subunit
  Uniprot ID: P51172
  ENSP ID: ENSP00000383717

SEQ ID NO: 80202 - protein, 139 aa, Homo sapiens
  Payload ID: 15987
  Gene Symbol: SCNN1D
  Gene Name: sodium channel, non voltage gated 1 delta subunit
  ENSP ID: ENSP00000420548
MAFLSRTSPVAAASFQSRQAGGQRLHPASELPAAPAMAEHRSMDGRMEAATRGGSHLQAAAQTPPRPGPPSAPPPPPKEGHQEGLVELPASFRELLTFFCTNATIHGAIRLVCSRGNRLKTTSWGLLSLGALVALCWQL

SEQ ID NO: 80203 - protein, 328 aa, Homo sapiens
  Payload ID: 15987
  Gene Symbol: SCNN1D
  Gene Name: sodium channel, non voltage gated 1 delta subunit
  ENSP ID: ENSP00000449804
MRAVLSQKTTPLPRYLWPGHLSGPRRLTWSWCSDHRTPTCRELGSPHPTPCTGPARGWPRRGGGPCGFTSAGHVLCGYPLCLLSGPIQGCGTGLGDSSMAFLSRTSPVAAASFQSRQEARGSILLQSCQLPPQWLSTEAWTGEWKQPHGGALTSRLQPRRPPGRGHHQHHHHHPRRGTRRGWWSCPPRSGSCSPSSAPMPPSTAPSAWSAPAGTASRRRPGGCCPWEPWSRSAGSWGSSLSVTGTARSSWPSLCTRSASCSRWSPCVTGTHVGRVRSSAIWSCWTSLPGRTLTPCTTSTSAKAEPPSPPLSPATSPPSTWTGRSVCRG

SEQ ID NO: 80204 - protein, 803 aa, Homo sapiens
  Payload ID: 15987
  Gene Symbol: SCNN1D
  Gene Name: sodium channel, non voltage gated 1 delta subunit
  ENSP ID: ENSP00000478543
ISRAVLSQKTTPLPRYLWPGHLSGPRRLTWSWCSDHRTPTCRELGSPHPTPCTGPARGWPRRGGGPCGFTSAGHVLCGYPLCLLSGPIQGCGTGLGDSSMAFLSRTSPVAAASFQSRQEARGSILLQSCQLPPQWLSTEAWTGEWKQPHGGALTSRSPGPVAPQRPCHLKGWQHRPTQHNAACKQGQAAAQTPPRPGPPSAPPPPPKEGHQEGLVELPASFRELLTFFCTNATIHGAIRLVCSRGNRLKTTSWGLLSLGALVALCWQLGLLFERHWHRPVLMAVSVHSERKLLPLVTLCDGNPRRPSPVLRHLELLDEFARENIDSLYNVNLSKGRAALSATVPRHEPPFHLDREIRLQRLSHSGSRVRVGFRLCNSTGGDCFYRGYTSGVAAVQDWYHFHYVDILALLPAAWEDSHGSQDGHFVLSCSYDGLDCQARQFRTFHHPTYGSCYTVDGVWTAQRPGITHGVGLVLRVEQQPHLPLLSTLAGIRVMVHGRNHTPFLGHHSFSVRPGTEATISIREDEVHRLGSPYGHCTAGGEGVEVELLHNTSYTRQACLVSCFQQLMVETCSCGYYLHPLPAGAEYCSSARHPAWGHCFYRLYQDLETHRLPCTSRCPRPCRESAFKLSTGTSRWPSAKSAGWTLATLGEQGLPHQSHRQRSSLAKINIVYQELNYRSVEEAPVYSVPQLLSAMGSLCSLWFGASVLSLLELLELLLDASALTLVLGGRRLRRAWFSWPRASPASGASSIKPEASQMPPPAGGTSDDPEPSGPHLPRVMLPGVLAGVSAEESWAGPQPLETLDT

SEQ ID NO: 80205 - protein, 649 aa, Homo sapiens
  Payload ID: 15988
  Gene Symbol: SCNN1G
  Gene Name: sodium channel, non voltage gated 1 gamma subunit
  Uniprot ID: P51170
  ENSP ID: ENSP00000300061
MAPGEKIKAKIKKNLPVTGPQAPTIKELMRWYCLNTNTHGCRRIVVSRGRLRRLLWIGFTLTAVALILWQCALLVFSFYTVSVSIKVHFRKLDFPAVTICNINPYKYSTVRHLLADLEQETREALKSLYGFPESRKRREAESWNSVSEGKQPRFSHRIPLLIFDQDEKGKARDFFTGRKRKVGGSIIHKASNVMHIESKQVVGFQLCSNDTSDCATYTFSSGINAIQEWYKLHYMNIMAQVPLEKKINMSYSAEELLVTCFFDGVSCDARNFTLFHHPMHGNCYTFNNRENETILSTSMGGSEYGLQVILYINEEEYNPFLVSSTGAKVIIHRQDEYPFVEDVGTEIETAMVTSIGMHLTESFKLSEPYSQCTEDGSDVPIRNIYNAAYSLQICLHSCFQTKMVEKCGCAQYSQPLPPAANYCNYQQHPNWMYCYYQLHRAFVQEELGCQSVCKEACSFKEWTLTTSLAQWPSVVSEKWLLPVLTWDQGRQVNKKLNKTDLAKLLIFYKDLNQRSIMESPANSIEMLLSNFGGQLGLWMSCSVVCVIEIIEVFFIDFFSIIARRQWQKAKEWWAWKQAPPCPEAPRSPQGQDNPALDIDDDLPTFNSALHLPPALGTQVPGTPPPKYNTLRLERAFSNQLTDTQMLDEL

SEQ ID NO: 80206 - protein, 2009 aa, Homo sapiens
  Payload ID: 15989
  Gene Symbol: SCN1A
  Gene Name: sodium channel, voltage gated, type I alpha subunit
  Uniprot ID: P35498
  ENSP ID: ENSP00000303540
MEQTVLVPPGPDSFNFFTRESLAAIERRIAEEKAKNPKPDKKDDDENGPKPNSDLEAGKNLPFIYGDIPPEMVSEPLEDLDPYYINKKTFIVLNKGKAIFRFSATSALYILTPFNPLRKIAIKILVHSLFSMLIMCTILTNCVFMTMSNPPDWTKNVEYTFTGIYTFESLIKIIARGFCLEDFTFLRDPWNWLDFTVITFAYVTEFVDLGNVSALRTFRVLRALKTISVIPGLKTIVGALIQSVKKLSDVMILTVFCLSVFALIGLQLFMGNLRNKCIQWPPTNASLEEHSIEKNITVNYNGTLINETVFEFDWKSYIQDSRYHYFLEGFLDALLCGNSSDAGQCPEGYMCVKAGRNPNYGYTSFDTFSWAFLSLFRLMTQDFWENLYQLTLRAAGKTYMIFFVLVIFLGSFYLINLILAVVAMAYEEQNQATLEEAEQKEAEFQQMIEQLKKQQEAAQQAATATASEHSREPSAAGRLSDSSSEASKLSSKSAKERRNRRKKRKQKEQSGGEEKDEDEFQKSESEDSIRRKGFRFSIEGNRLTYEKRYSSPHQSLLSIRGSLFSPRRNSRTSLFSFRGRAKDVGSENDFADDEHSTFEDNESRRDSLFVPRRHGERRNSNLSQTSRSSRMLAVFPANGKMHSTVDCNGVVSLVGGPSVPTSPVGQLLPEVIIDKPATDDNGTTTETEMRKRRSSSFHVSMDFLEDPSQRQRAMSIASILTNTVEELEESRQKCPPCWYKFSNIFLIWDCSPYWLKVKHVVNLVVMDPFVDLAITICIVLNTLFMAMEHYPMTDHFNNVLTVGNLVFTGIFTAEMFLKIIAMDPYYYFQEGWNIFDGFIVTLSLVELGLANVEGLSVLRSFRLLRVFKLAKSWPTLNMLIKIIGNSVGALGNLTLVLAIIVFIFAVVGMQLFGKSYKDCVCKIASDCQLPRWHMNDFFHSFLIVFRVLCGEWIETMWDCMEVAGQAMCLTVFMMVMVIGNLVVLNLFLALLLSSFSADNLAATDDDNEMNNLQIAVDRMHKGVAYVKRKIYEFIQQSFIRKQKILDEIKPLDDLNNKKDSCMSNHTAEIGKDLDYLKDVNGTTSGIGTGSSVEKYIIDESDYMSFINNPSLTVTVPIAVGESDFENLNTEDFSSESDLEESKEKLNESSSSSEGSTVDIGAPVEEQPVVEPEETLEPEACFTEGCVQRFKCCQINVEEGRGKQWWNLRRTCFRIVEHNWFETFIVFMILLSSGALAFEDIYIDQRKTIKTMLEYADKVFTYIFILEMLLKWVAYGYQTYFTNAWCWLDFLIVDVSLVSLTANALGYSELGAIKSLRTLRALRPLRALSRFEGMRVVVNALLGAIPSIMNVLLVCLIFWLIFSIMGVNLFAGKFYHCINTTTGDRFDIEDVNNHTDCLKLIERNETARWKNVKVNFDNVGFGYLSLLQVATFKGWMDIMYAAVDSRNVELQPKYEESLYMYLYFVIFIIFGSFFTLNLFIGVIIDNFNQQKKKFGGQDIFMTEEQKKYYNAMKKLGSKKPQKPIPRPGNKFQGMVFDFVTRQVFDISIMILICLNMVTMMVETDDQSEYVTTILSRINLVFIVLFTGECVLKLISLRHYYFTIGWNIFDFVVVILSIVGMFLAELIEKYFVSPTLFRVIRLARIGRILRLIKGAKGIRTLLFALMMSLPALFNIGLLLFLVMFIYAIFGMSNFAYVKREVGIDDMFNFETFGNSMICLFQITTSAGWDGLLAPILNSKPPDCDPNKVNPGSSVKGDCGNPSVGIFFFVSYIIISFLVVVNMYIAVILENFSVATEESAEPLSEDDFEMFYEVWEKFDPDATQFMEFEKLSQFAAALEPPLNLPQPNKLQLIAMDLPMVSGDRIHCLDILFAFTKRVLGESGEMDALRIQMEERFMASNPSKVSYQPITTTLKRKQEEVSAVIIQRAYRRHLLKRTVKQASFTYNKNKIKGGANLLIKEDMIIDRINENSITEKTDLTMSTAACPPSYDRVTKPIVEKHEQEGKDEKAKGK

SEQ ID NO: 80207 - protein, 1998 aa, Homo sapiens
  Payload ID: 15989
  Gene Symbol: SCN1A
  Gene Name: sodium channel, voltage gated, type I alpha subunit
  Uniprot ID: P35498
  ENSP ID: ENSP00000364554
MEQTVLVPPGPDSFNFFTRESLAAIERRIAEEKAKNPKPDKKDDDENGPKPNSDLEAGKNLPFIYGDIPPEMVSEPLEDLDPYYINKKTFIVLNKGKAIFRFSATSALYILTPFNPLRKIAIKILVHSLFSMLIMCTILTNCVFMTMSNPPDWTKNVEYTFTGIYTFESLIKIIARGFCLEDFTFLRDPWNWLDFTVITFAYVTEFVDLGNVSALRTFRVLRALKTISVIPGLKTIVGALIQSVKKLSDVMILTVFCLSVFALIGLQLFMGNLRNKCIQWPPTNASLEEHSIEKNITVNYNGTLINETVFEFDWKSYIQDSRYHYFLEGFLDALLCGNSSDAGQCPEGYMCVKAGRNPNYGYTSFDTFSWAFLSLFRLMTQDFWENLYQLTLRAAGKTYMIFFVLVIFLGSFYLINLILAVVAMAYEEQNQATLEEAEQKEAEFQQMIEQLKKQQEAAQQAATATASEHSREPSAAGRLSDSSSEASKLSSKSAKERRNRRKKRKQKEQSGGEEKDEDEFQKSESEDSIRRKGFRFSIEGNRLTYEKRYSSPHQSLLSIRGSLFSPRRNSRTSLFSFRGRAKDVGSENDFADDEHSTFEDNESRRDSLFVPRRHGERRNSNLSQTSRSSRMLAVFPANGKMHSTVDCNGVVSLVGGPSVPTSPVGQLLPEGTTTETEMRKRRSSSFHVSMDFLEDPSQRQRAMSIASILTNTVEELEESRQKCPPCWYKFSNIFLIWDCSPYWLKVKHVVNLVVMDPFVDLAITICIVLNTLFMAMEHYPMTDHFNNVLTVGNLVFTGIFTAEMFLKIIAMDPYYYFQEGWNIFDGFIVTLSLVELGLANVEGLSVLRSFRLLRVFKLAKSWPTLNMLIKIIGNSVGALGNLTLVLAIIVFIFAVVGMQLFGKSYKDCVCKIASDCQLPRWHMNDFFHSFLIVFRVLCGEWIETMWDCMEVAGQAMCLTVFMMVMVIGNLVVLNLFLALLLSSFSADNLAATDDDNEMNNLQIAVDRMHKGVAYVKRKIYEFIQQSFIRKQKILDEIKPLDDLNNKKDSCMSNHTAEIGKDLDYLKDVNGTTSGIGTGSSVEKYIIDESDYMSFINNPSLTVTVPIAVGESDFENLNTEDFSSESDLEESKEKLNESSSSSEGSTVDIGAPVEEQPVVEPEETLEPEACFTEGCVQRFKCCQINVEEGRGKQWWNLRRTCFRIVEHNWFETFIVFMILLSSGALAFEDIYIDQRKTIKTMLEYADKVFTYIFILEMLLKWVAYGYQTYFTNAWCWLDFLIVDVSLVSLTANALGYSELGAIKSLRTLRALRPLRALSRFEGMRVVVNALLGAIPSIMNVLLVCLIFWLIFSIMGVNLFAGKFYHCINTTTGDRFDIEDVNNHTDCLKLIERNETARWKNVKVNFDNVGFGYLSLLQVATFKGWMDIMYAAVDSRNVELQPKYEESLYMYLYFVIFIIFGSFFTLNLFIGVIIDNFNQQKKKFGGQDIFMTEEQKKYYNAMKKLGSKKPQKPIPRPGNKFQGMVFDFVTRQVFDISIMILICLNMVTMMVETDDQSEYVTTILSRINLVFIVLFTGECVLKLISLRHYYFTIGWNIFDFVVVILSIVGMFLAELIEKYFVSPTLFRVIRLARIGRILRLIKGAKGIRTLLFALMMSLPALFNIGLLLFLVMFIYAIFGMSNFAYVKREVGIDDMFNFETFGNSMICLFQITTSAGWDGLLAPILNSKPPDCDPNKVNPGSSVKGDCGNPSVGIFFFVSYIIISFLVVVNMYIAVILENFSVATEESAEPLSEDDFEMFYEVWEKFDPDATQFMEFEKLSQFAAALEPPLNLPQPNKLQLIAMDLPMVSGDRIHCLDILFAFTKRVLGESGEMDALRIQMEERFMASNPSKVSYQPITTTLKRKQEEVSAVIIQRAYRRHLLKRTVKQASFTYNKNKIKGGANLLIKEDMIIDRINENSITEKTDLTMSTAACPPSYDRVTKPIVEKHEQEGKDEKAKGK

SEQ ID NO: 80208 - protein, 1981 aa, Homo sapiens
  Payload ID: 15989
  Gene Symbol: SCN1A
  Gene Name: sodium channel, voltage gated, type I alpha subunit
  Uniprot ID: P35498
  ENSP ID: ENSP00000386312
MEQTVLVPPGPDSFNFFTRESLAAIERRIAEEKAKNPKPDKKDDDENGPKPNSDLEAGKNLPFIYGDIPPEMVSEPLEDLDPYYINKKTFIVLNKGKAIFRFSATSALYILTPFNPLRKIAIKILVHSLFSMLIMCTILTNCVFMTMSNPPDWTKNVEYTFTGIYTFESLIKIIARGFCLEDFTFLRDPWNWLDFTVITFAYVTEFVDLGNVSALRTFRVLRALKTISVIPGLKTIVGALIQSVKKLSDVMILTVFCLSVFALIGLQLFMGNLRNKCIQWPPTNASLEEHSIEKNITVNYNGTLINETVFEFDWKSYIQDSRYHYFLEGFLDALLCGNSSDAGQCPEGYMCVKAGRNPNYGYTSFDTFSWAFLSLFRLMTQDFWENLYQLTLRAAGKTYMIFFVLVIFLGSFYLINLILAVVAMAYEEQNQATLEEAEQKEAEFQQMIEQLKKQQEAAQQAATATASEHSREPSAAGRLSDSSSEASKLSSKSAKERRNRRKKRKQKEQSGGEEKDEDEFQKSESEDSIRRKGFRFSIEGNRLTYEKRYSSPHQSLLSIRGSLFSPRRNSRTSLFSFRGRAKDVGSENDFADDEHSTFEDNESRRDSLFVPRRHGERRNSNLSQTSRSSRMLAVFPANGKMHSTVDCNGVVSLGTTTETEMRKRRSSSFHVSMDFLEDPSQRQRAMSIASILTNTVEELEESRQKCPPCWYKFSNIFLIWDCSPYWLKVKHVVNLVVMDPFVDLAITICIVLNTLFMAMEHYPMTDHFNNVLTVGNLVFTGIFTAEMFLKIIAMDPYYYFQEGWNIFDGFIVTLSLVELGLANVEGLSVLRSFRLLRVFKLAKSWPTLNMLIKIIGNSVGALGNLTLVLAIIVFIFAVVGMQLFGKSYKDCVCKIASDCQLPRWHMNDFFHSFLIVFRVLCGEWIETMWDCMEVAGQAMCLTVFMMVMVIGNLVVLNLFLALLLSSFSADNLAATDDDNEMNNLQIAVDRMHKGVAYVKRKIYEFIQQSFIRKQKILDEIKPLDDLNNKKDSCMSNHTAEIGKDLDYLKDVNGTTSGIGTGSSVEKYIIDESDYMSFINNPSLTVTVPIAVGESDFENLNTEDFSSESDLEESKEKLNESSSSSEGSTVDIGAPVEEQPVVEPEETLEPEACFTEGCVQRFKCCQINVEEGRGKQWWNLRRTCFRIVEHNWFETFIVFMILLSSGALAFEDIYIDQRKTIKTMLEYADKVFTYIFILEMLLKWVAYGYQTYFTNAWCWLDFLIVDVSLVSLTANALGYSELGAIKSLRTLRALRPLRALSRFEGMRVVVNALLGAIPSIMNVLLVCLIFWLIFSIMGVNLFAGKFYHCINTTTGDRFDIEDVNNHTDCLKLIERNETARWKNVKVNFDNVGFGYLSLLQVATFKGWMDIMYAAVDSRNVELQPKYEESLYMYLYFVIFIIFGSFFTLNLFIGVIIDNFNQQKKKFGGQDIFMTEEQKKYYNAMKKLGSKKPQKPIPRPGNKFQGMVFDFVTRQVFDISIMILICLNMVTMMVETDDQSEYVTTILSRINLVFIVLFTGECVLKLISLRHYYFTIGWNIFDFVVVILSIVGMFLAELIEKYFVSPTLFRVIRLARIGRILRLIKGAKGIRTLLFALMMSLPALFNIGLLLFLVMFIYAIFGMSNFAYVKREVGIDDMFNFETFGNSMICLFQITTSAGWDGLLAPILNSKPPDCDPNKVNPGSSVKGDCGNPSVGIFFFVSYIIISFLVVVNMYIAVILENFSVATEESAEPLSEDDFEMFYEVWEKFDPDATQFMEFEKLSQFAAALEPPLNLPQPNKLQLIAMDLPMVSGDRIHCLDILFAFTKRVLGESGEMDALRIQMEERFMASNPSKVSYQPITTTLKRKQEEVSAVIIQRAYRRHLLKRTVKQASFTYNKNKIKGGANLLIKEDMIIDRINENSITEKTDLTMSTAACPPSYDRVTKPIVEKHEQEGKDEKAKGK

SEQ ID NO: 80209 - protein, 2009 aa, Homo sapiens; identical to SEQ ID NO: 80206
  Payload ID: 15989
  Gene Symbol: SCN1A
  Gene Name: sodium channel, voltage gated, type I alpha subunit
  Uniprot ID: P35498
  ENSP ID: ENSP00000407030

SEQ ID NO: 80210 - protein, 218 aa, Homo sapiens
  Payload ID: 15990
  Gene Symbol: SCN1B
  Gene Name: sodium channel, voltage gated, type I beta subunit
  Uniprot ID: Q07699
  ENSP ID: ENSP00000262631
MGRLLALVVGAALVSSACGGCVEVDSETEAVYGMTFKILCISCKRRSETNAETFTEWTFRQKGTEEFVKILRYENEVLQLEEDERFEGRVVWNGSRGTKDLQDLSIFITNVTYNHSGDYECHVYRLLFFENYEHNTSVVKKIHIEVVDKANRDMASIVSEIMMYVLIVVLTIWLVAEMIYCYKKIAAATETAAQENASEYLAITSESKENCTGVQVAE

SEQ ID NO: 80211 - protein, 268 aa, Homo sapiens
  Payload ID: 15990
  Gene Symbol: SCN1B
  Gene Name: sodium channel, voltage gated, type I beta subunit
  Uniprot ID: Q07699
  ENSP ID: ENSP00000396915
MGRLLALVVGAALVSSACGGCVEVDSETEAVYGMTFKILCISCKRRSETNAETFTEWTFRQKGTEEFVKILRYENEVLQLEEDERFEGRVVWNGSRGTKDLQDLSIFITNVTYNHSGDYECHVYRLLFFENYEHNTSVVKKIHIEVVDKGESGAACPFTVTHRRARWRDRWQAVDRTGWLCAWPANRPQQRAEGEGSSPSCPLQLWPLFLSSPRRGQSMPVPHRRSGYRTQLCHLCCMTSGRCLLSLSQRVVLGLPGIIIRCVSRGVV

SEQ ID NO: 80212 - protein, 147 aa, Homo sapiens
  Payload ID: 15990
  Gene Symbol: SCN1B
  Gene Name: sodium channel, voltage gated, type I beta subunit
  ENSP ID: ENSP00000468848
MGRLLALVVGAALVSSACGGCVEVDSETEAVYGMTFKILCISCKRRSETNAETFTEWTFRQKGTEEFVKKIHIEVVDKANRDMASIVSEIMMYVLIVVLTIWLVAEMIYCYKKIAAATETAAQENASEYLAITSESKENCTGVQVAE

SEQ ID NO: 80213 - protein, 2005 aa, Homo sapiens
  Payload ID: 15991
  Gene Symbol: SCN2A
  Gene Name: sodium channel, voltage gated, type II alpha subunit
  Uniprot ID: Q99250
  ENSP ID: ENSP00000283256
MAQSVLVPPGPDSFRFFTRESLAAIEQRIAEEKAKRPKQERKDEDDENGPKPNSDLEAGKSLPFIYGDIPPEMVSVPLEDLDPYYINKKTFIVLNKGKAISRFSATPALYILTPFNPIRKLAIKILVHSLFNMLIMCTILTNCVFMTMSNPPDWTKNVEYTFTGIYTFESLIKILARGFCLEDFTFLRDPWNWLDFTVITFAYVTEFVDLGNVSALRTFRVLRALKTISVIPGLKTIVGALIQSVKKLSDVMILTVFCLSVFALIGLQLFMGNLRNKCLQWPPDNSSFEINITSFFNNSLDGNGTTFNRTVSIFNWDEYIEDKSHFYFLEGQNDALLCGNSSDAGQCPEGYICVKAGRNPNYGYTSFDTFSWAFLSLFRLMTQDFWENLYQLTLRAAGKTYMIFFVLVIFLGSFYLINLILAVVAMAYEEQNQATLEEAEQKEAEFQQMLEQLKKQQEEAQAAAAAASAESRDFSGAGGIGVFSESSSVASKLSSKSEKELKNRRKKKKQKEQSGEEEKNDRVRKSESEDSIRRKGFRFSLEGSRLTYEKRFSSPHQSLLSIRGSLFSPRRNSRASLFSFRGRAKDIGSENDFADDEHSTFEDNDSRRDSLFVPHRHGERRHSNVSQASRASRVLPILPMNGKMHSAVDCNGVVSLVGGPSTLTSAGQLLPEGTTTETEIRKRRSSSYHVSMDLLEDPTSRQRAMSIASILTNTMEELEESRQKCPPCWYKFANMCLIWDCCKPWLKVKHLVNLVVMDPFVDLAITICIVLNTLFMAMEHYPMTEQFSSVLSVGNLVFTGIFTAEMFLKIIAMDPYYYFQEGWNIFDGFIVSLSLMELGLANVEGLSVLRSFRLLRVFKLAKSWPTLNMLIKIIGNSVGALGNLTLVLAIIVFIFAVVGMQLFGKSYKECVCKISNDCELPRWHMHDFFHSFLIVFRVLCGEWIETMWDCMEVAGQTMCLTVFMMVMVIGNLVVLNLFLALLLSSFSSDNLAATDDDNEMNNLQIAVGRMQKGIDFVKRKIREFIQKAFVRKQKALDEIKPLEDLNNKKDSCISNHTTIEIGKDLNYLKDGNGTTSGIGSSVEKYVVDESDYMSFINNPSLTVTVPIAVGESDFENLNTEEFSSESDMEESKEKLNATSSSEGSTVDIGAPAEGEQPEVEPEESLEPEACFTEDCVRKFKCCQISIEEGKGKLWWNLRKTCYKIVEHNWFETFIVFMILLSSGALAFEDIYIEQRKTIKTMLEYADKVFTYIFILEMLLKWVAYGFQVYFTNAWCWLDFLIVDVSLVSLTANALGYSELGAIKSLRTLRALRPLRALSRFEGMRVVVNALLGAIPSIMNVLLVCLIFWLIFSIMGVNLFAGKFYHCINYTTGEMFDVSVVNNYSECKALIESNQTARWKNVKVNFDNVGLGYLSLLQVATFKGWMDIMYAAVDSRNVELQPKYEDNLYMYLYFVIFIIFGSFFTLNLFIGVIIDNFNQQKKKFGGQDIFMTEEQKKYYNAMKKLGSKKPQKPIPRPANKFQGMVFDFVTKQVFDISIMILICLNMVTMMVETDDQSQEMTNILYWINLVFIVLFTGECVLKLISLRYYYFTIGWNIFDFVVVILSIVGMFLAELIEKYFVSPTLFRVIRLARIGRILRLIKGAKGIRTLLFALMMSLPALFNIGLLLFLVMFIYAIFGMSNFAYVKREVGIDDMFNFETFGNSMICLFQITTSAGWDGLLAPILNSGPPDCDPDKDHPGSSVKGDCGNPSVGIFFFVSYIIISFLVVVNMYIAVILENFSVATEESAEPLSEDDFEMFYEVWEKFDPDATQFIEFAKLSDFADALDPPLLIAKPNKVQLIAMDLPMVSGDRIHCLDILFAFTKRVLGESGEMDALRIQMEERFMASNPSKVSYEPITTTLKRKQEEVSAIIIQRAYRRYLLKQKVKKVSSIYKKDKGKECDGTPIKEDTLIDKLNENSTPEKTDMTPSTTSPPSYDSVTKPEKEKFEKDKSEKEDKGKDIRESKK

SEQ ID NO: 80214 - protein, 2005 aa, Homo sapiens
  Payload ID: 15991
  Gene Symbol: SCN2A
  Gene Name: sodium channel, voltage gated, type II alpha subunit
  Uniprot ID: Q99250
  ENSP ID: ENSP00000364576
MAQSVLVPPGPDSFRFFTRESLAAIEQRIAEEKAKRPKQERKDEDDENGPKPNSDLEAGKSLPFIYGDIPPEMVSVPLEDLDPYYINKKTFIVLNKGKAISRFSATPALYILTPFNPIRKLAIKILVHSLFNMLIMCTILTNCVFMTMSNPPDWTKNVEYTFTGIYTFESLIKILARGFCLEDFTFLRDPWNWLDFTVITFAYVTEFVNLGNVSALRTFRVLRALKTISVIPGLKTIVGALIQSVKKLSDVMILTVFCLSVFALIGLQLFMGNLRNKCLQWPPDNSSFEINITSFFNNSLDGNGTTFNRTVSIFNWDEYIEDKSHFYFLEGQNDALLCGNSSDAGQCPEGYICVKAGRNPNYGYTSFDTFSWAFLSLFRLMTQDFWENLYQLTLRAAGKTYMIFFVLVIFLGSFYLINLILAVVAMAYEEQNQATLEEAEQKEAEFQQMLEQLKKQQEEAQAAAAAASAESRDFSGAGGIGVFSESSSVASKLSSKSEKELKNRRKKKKQKEQSGEEEKNDRVRKSESEDSIRRKGFRFSLEGSRLTYEKRFSSPHQSLLSIRGSLFSPRRNSRASLFSFRGRAKDIGSENDFADDEHSTFEDNDSRRDSLFVPHRHGERRHSNVSQASRASRVLPILPMNGKMHSAVDCNGVVSLVGGPSTLTSAGQLLPEGTTTETEIRKRRSSSYHVSMDLLEDPTSRQRAMSIASILTNTMEELEESRQKCPPCWYKFANMCLIWDCCKPWLKVKHLVNLVVMDPFVDLAITICIVLNTLFMAMEHYPMTEQFSSVLSVGNLVFTGIFTAEMFLKIIAMDPYYYFQEGWNIFDGFIVSLSLMELGLANVEGLSVLRSFRLLRVFKLAKSWPTLNMLIKIIGNSVGALGNLTLVLAIIVFIFAVVGMQLFGKSYKECVCKISNDCELPRWHMHDFFHSFLIVFRVLCGEWIETMWDCMEVAGQTMCLTVFMMVMVIGNLVVLNLFLALLLSSFSSDNLAATDDDNEMNNLQIAVGRMQKGIDFVKRKIREFIQKAFVRKQKALDEIKPLEDLNNKKDSCISNHTTIEIGKDLNYLKDGNGTTSGIGSSVEKYVVDESDYMSFINNPSLTVTVPIAVGESDFENLNTEEFSSESDMEESKEKLNATSSSEGSTVDIGAPAEGEQPEVEPEESLEPEACFTEDCVRKFKCCQISIEEGKGKLWWNLRKTCYKIVEHNWFETFIVFMILLSSGALAFEDIYIEQRKTIKTMLEYADKVFTYIFILEMLLKWVAYGFQVYFTNAWCWLDFLIVDVSLVSLTANALGYSELGAIKSLRTLRALRPLRALSRFEGMRVVVNALLGAIPSIMNVLLVCLIFWLIFSIMGVNLFAGKFYHCINYTTGEMFDVSVVNNYSECKALIESNQTARWKNVKVNFDNVGLGYLSLLQVATFKGWMDIMYAAVDSRNVELQPKYEDNLYMYLYFVIFIIFGSFFTLNLFIGVIIDNFNQQKKKFGGQDIFMTEEQKKYYNAMKKLGSKKPQKPIPRPANKFQGMVFDFVTKQVFDISIMILICLNMVTMMVETDDQSQEMTNILYWINLVFIVLFTGECVLKLISLRYYYFTIGWNIFDFVVVILSIVGMFLAELIEKYFVSPTLFRVIRLARIGRILRLIKGAKGIRTLLFALMMSLPALFNIGLLLFLVMFIYAIFGMSNFAYVKREVGIDDMFNFETFGNSMICLFQITTSAGWDGLLAPILNSGPPDCDPDKDHPGSSVKGDCGNPSVGIFFFVSYIIISFLVVVNMYIAVILENFSVATEESAEPLSEDDFEMFYEVWEKFDPDATQFIEFAKLSDFADALDPPLLIAKPNKVQLIAMDLPMVSGDRIHCLDILFAFTKRVLGESGEMDALRIQMEERFMASNPSKVSYEPITTTLKRKQEEVSAIIIQRAYRRYLLKQKVKKVSSIYKKDKGKECDGTPIKEDTLIDKLNENSTPEKTDMTPSTTSPPSYDSVTKPEKEKFEKDKSEKEDKGKDIRESKK

SEQ ID NO: 80215 - protein, 2005 aa, Homo sapiens; identical to SEQ ID NO: 80213
  Payload ID: 15991
  Gene Symbol: SCN2A
  Gene Name: sodium channel, voltage gated, type II alpha subunit
  Uniprot ID: Q99250
  ENSP ID: ENSP00000364586

SEQ ID NO: 80216 - protein, 505 aa, Homo sapiens
  Payload ID: 15991
  Gene Symbol: SCN2A
  Gene Name: sodium channel, voltage gated, type II alpha subunit
  ENSP ID: ENSP00000406454
MAQSVLVPPGPDSFRFFTRESLAAIEQRIAEEKAKRPKQERKDEDDENGPKPNSDLEAGKSLPFIYGDIPPEMVSVPLEDLDPYYINKKTFIVLNKGKAISRFSATPALYILTPFNPIRKLAIKILVHSLFNMLIMCTILTNCVFMTMSNPPDWTKNVEYTFTGIYTFESLIKILARGFCLEDFTFLRDPWNWLDFTVITFAYVTEFVDLGNVSALRTFRVLRALKTISVIPGLKTIVGALIQSVKKLSDVMILTVFCLSVFALIGLQLFMGNLRNKCLQWPPDNSSFEINITSFFNNSLDGNGTTFNRTVSIFNWDEYIEDKSHFYFLEGQNDALLCGNSSDAGQCPEGYICVKAGRNPNYGYTSFDTFSWAFLSLFRLMTQDFWENLYQLTLRAAGKTYMIFFVLVIFLGSFYLINLILAVVAMAYEEQNQATLEEAEQKEAEFQQMLEQLKKQQEEAQAAAAAASAESRDFSGAGGIGVFSESSSVASKLSSKSEKELKNRR

SEQ ID NO: 80217 - protein, 2005 aa, Homo sapiens; identical to SEQ ID NO: 80214
  Payload ID: 15991
  Gene Symbol: SCN2A
  Gene Name: sodium channel, voltage gated, type II alpha subunit
  Uniprot ID: Q99250
  ENSP ID: ENSP00000486885

SEQ ID NO: 80218 - protein, 178 aa, Homo sapiens
  Payload ID: 15991
  Gene Symbol: SCN2A
  Gene Name: sodium channel, voltage gated, type II alpha subunit
  ENSP ID: ENSP00000487466
WTKNVEYTFTGIYTFESLIKILARGFCLEDFTFLRDPWNWLDFTVITFAYVTEFVDLGNVSALRTFRVLRALKTISVIPGLKTIVGALIQSVKKLSDVMILTVFCLSVFALIGLQLFMGNLRNKCLQWPPDNSSFEINITSFFNNSLDGNGTTFNRTVSIFNWDEYIEDKSKIYSINH

SEQ ID NO: 80219 - protein, 215 aa, Homo sapiens
  Payload ID: 15992
  Gene Symbol: SCN2B
  Gene Name: sodium channel, voltage gated, type II beta subunit
  Uniprot ID: O60939
  ENSP ID: ENSP00000278947
MHRDAWLPRPAFSLTGLSLFFSLVPPGRSMEVTVPATLNVLNGSDARLPCTFNSCYTVNHKQFSLNWTYQECNNCSEEMFLQFRMKIINLKLERFQDRVEFSGNPSKYDVSVMLRNVQPEDEGIYNCYIMNPPDRHRGHGKIHLQVLMEEPPERDSTVAVIVGASVGGFLAVVILVLMVVKCVRRKKEQKLSTDDLKTEEEGKTDGEGNPDDGAK

SEQ ID NO: 80220 - protein, 2000 aa, Homo sapiens
  Payload ID: 15993
  Gene Symbol: SCN3A
  Gene Name: sodium channel, voltage gated, type III alpha subunit
  Uniprot ID: Q9NY46
  ENSP ID: ENSP00000283254
MAQALLVPPGPESFRLFTRESLAAIEKRAAEEKAKKPKKEQDNDDENKPKPNSDLEAGKNLPFIYGDIPPEMVSEPLEDLDPYYINKKTFIVMNKGKAIFRFSATSALYILTPLNPVRKIAIKILVHSLFSMLIMCTILTNCVFMTLSNPPDWTKNVEYTFTGIYTFESLIKILARGFCLEDFTFLRDPWNWLDFSVIVMAYVTEFVDLGNVSALRTFRVLRALKTISVIPGLKTIVGALIQSVKKLSDVMILTVFCLSVFALIGLQLFMGNLRNKCLQWPPSDSAFETNTTSYFNGTMDSNGTFVNVTMSTFNWKDYIGDDSHFYVLDGQKDPLLCGNGSDAGQCPEGYICVKAGRNPNYGYTSFDTFSWAFLSLFRLMTQDYWENLYQLTLRAAGKTYMIFFVLVIFLGSFYLVNLILAVVAMAYEEQNQATLEEAEQKEAEFQQMLEQLKKQQEEAQAVAAASAASRDFSGIGGLGELLESSSEASKLSSKSAKEWRNRRKKRRQREHLEGNNKGERDSFPKSESEDSVKRSSFLFSMDGNRLTSDKKFCSPHQSLLSIRGSLFSPRRNSKTSIFSFRGRAKDVGSENDFADDEHSTFEDSESRRDSLFVPHRHGERRNSNVSQASMSSRMVPGLPANGKMHSTVDCNGVVSLVGGPSALTSPTGQLPPEGTTTETEVRKRRLSSYQISMEMLEDSSGRQRAVSIASILTNTMEELEESRQKCPPCWYRFANVFLIWDCCDAWLKVKHLVNLIVMDPFVDLAITICIVLNTLFMAMEHYPMTEQFSSVLTVGNLVFTGIFTAEMVLKIIAMDPYYYFQEGWNIFDGIIVSLSLMELGLSNVEGLSVLRSFRLLRVFKLAKSWPTLNMLIKIIGNSVGALGNLTLVLAIIVFIFAVVGMQLFGKSYKECVCKINDDCTLPRWHMNDFFHSFLIVFRVLCGEWIETMWDCMEVAGQTMCLIVFMLVMVIGNLVVLNLFLALLLSSFSSDNLAATDDDNEMNNLQIAVGRMQKGIDYVKNKMRECFQKAFFRKPKVIEIHEGNKIDSCMSNNTGIEISKELNYLRDGNGTTSGVGTGSSVEKYVIDENDYMSFINNPSLTVTVPIAVGESDFENLNTEEFSSESELEESKEKLNATSSSEGSTVDVVLPREGEQAETEPEEDLKPEACFTEGCIKKFPFCQVSTEEGKGKIWWNLRKTCYSIVEHNWFETFIVFMILLSSGALAFEDIYIEQRKTIKTMLEYADKVFTYIFILEMLLKWVAYGFQTYFTNAWCWLDFLIVDVSLVSLVANALGYSELGAIKSLRTLRALRPLRALSRFEGMRVVVNALVGAIPSIMNVLLVCLIFWLIFSIMGVNLFAGKFYHCVNMTTGNMFDISDVNNLSDCQALGKQARWKNVKVNFDNVGAGYLALLQVATFKGWMDIMYAAVDSRDVKLQPVYEENLYMYLYFVIFIIFGSFFTLNLFIGVIIDNFNQQKKKFGGQDIFMTEEQKKYYNAMKKLGSKKPQKPIPRPANKFQGMVFDFVTRQVFDISIMILICLNMVTMMVETDDQGKYMTLVLSRINLVFIVLFTGEFVLKLVSLRHYYFTIGWNIFDFVVVILSIVGMFLAEMIEKYFVSPTLFRVIRLARIGRILRLIKGAKGIRTLLFALMMSLPALFNIGLLLFLVMFIYAIFGMSNFAYVKKEAGIDDMFNFETFGNSMICLFQITTSAGWDGLLAPILNSAPPDCDPDTIHPGSSVKGDCGNPSVGIFFFVSYIIISFLVVVNMYIAVILENFSVATEESAEPLSEDDFEMFYEVWEKFDPDATQFIEFSKLSDFAAALDPPLLIAKPNKVQLIAMDLPMVSGDRIHCLDILFAFTKRVLGESGEMDALRIQMEDRFMASNPSKVSYEPITTTLKRKQEEVSAAIIQRNFRCYLLKQRLKNISSNYNKEAIKGRIDLPIKQDMIIDKLNGNSTPEKTDGSSSTTSPPSYDSVTKPDKEKFEKDKPEKESKGKEVRENQK

SEQ ID NO: 80221 - protein, 2000 aa, Homo sapiens
  Payload ID: 15993
  Gene Symbol: SCN3A
  Gene Name: sodium channel, voltage gated, type III alpha subunit
  Uniprot ID: Q9NY46
  ENSP ID: ENSP00000353206
MAQALLVPPGPESFRLFTRESLAAIEKRAAEEKAKKPKKEQDNDDENKPKPNSDLEAGKNLPFIYGDIPPEMVSEPLEDLDPYYINKKTFIVMNKGKAIFRFSATSALYILTPLNPVRKIAIKILVHSLFSMLIMCTILTNCVFMTLSNPPDWTKNVEYTFTGIYTFESLIKILARGFCLEDFTFLRDPWNWLDFSVIVMAYVTEFVSLGNVSALRTFRVLRALKTISVIPGLKTIVGALIQSVKKLSDVMILTVFCLSVFALIGLQLFMGNLRNKCLQWPPSDSAFETNTTSYFNGTMDSNGTFVNVTMSTFNWKDYIGDDSHFYVLDGQKDPLLCGNGSDAGQCPEGYICVKAGRNPNYGYTSFDTFSWAFLSLFRLMTQDYWENLYQLTLRAAGKTYMIFFVLVIFLGSFYLVNLILAVVAMAYEEQNQATLEEAEQKEAEFQQMLEQLKKQQEEAQAVAAASAASRDFSGIGGLGELLESSSEASKLSSKSAKEWRNRRKKRRQREHLEGNNKGERDSFPKSESEDSVKRSSFLFSMDGNRLTSDKKFCSPHQSLLSIRGSLFSPRRNSKTSIFSFRGRAKDVGSENDFADDEHSTFEDSESRRDSLFVPHRHGERRNSNVSQASMSSRMVPGLPANGKMHSTVDCNGVVSLVGGPSALTSPTGQLPPEGTTTETEVRKRRLSSYQISMEMLEDSSGRQRAVSIASILTNTMEELEESRQKCPPCWYRFANVFLIWDCCDAWLKVKHLVNLIVMDPFVDLAITICIVLNTLFMAMEHYPMTEQFSSVLTVGNLVFTGIFTAEMVLKIIAMDPYYYFQEGWNIFDGIIVSLSLMELGLSNVEGLSVLRSFRLLRVFKLAKSWPTLNMLIKIIGNSVGALGNLTLVLAIIVFIFAVVGMQLFGKSYKECVCKINDDCTLPRWHMNDFFHSFLIVFRVLCGEWIETMWDCMEVAGQTMCLIVFMLVMVIGNLVVLNLFLALLLSSFSSDNLAATDDDNEMNNLQIAVGRMQKGIDYVKNKMRECFQKAFFRKPKVIEIHEGNKIDSCMSNNTGIEISKELNYLRDGNGTTSGVGTGSSVEKYVIDENDYMSFINNPSLTVTVPIAVGESDFENLNTEEFSSESELEESKEKLNATSSSEGSTVDVVLPREGEQAETEPEEDLKPEACFTEGCIKKFPFCQVSTEEGKGKIWWNLRKTCYSIVEHNWFETFIVFMILLSSGALAFEDIYIEQRKTIKTMLEYADKVFTYIFILEMLLKWVAYGFQTYFTNAWCWLDFLIVDVSLVSLVANALGYSELGAIKSLRTLRALRPLRALSRFEGMRVVVNALVGAIPSIMNVLLVCLIFWLIFSIMGVNLFAGKFYHCVNMTTGNMFDISDVNNLSDCQALGKQARWKNVKVNFDNVGAGYLALLQVATFKGWMDIMYAAVDSRDVKLQPVYEENLYMYLYFVIFIIFGSFFTLNLFIGVIIDNFNQQKKKFGGQDIFMTEEQKKYYNAMKKLGSKKPQKPIPRPANKFQGMVFDFVTRQVFDISIMILICLNMVTMMVETDDQGKYMTLVLSRINLVFIVLFTGEFVLKLVSLRHYYFTIGWNIFDFVVVILSIVGMFLAEMIEKYFVSPTLFRVIRLARIGRILRLIKGAKGIRTLLFALMMSLPALFNIGLLLFLVMFIYAIFGMSNFAYVKKEAGIDDMFNFETFGNSMICLFQITTSAGWDGLLAPILNSAPPDCDPDTIHPGSSVKGDCGNPSVGIFFFVSYIIISFLVVVNMYIAVILENFSVATEESAEPLSEDDFEMFYEVWEKFDPDATQFIEFSKLSDFAAALDPPLLIAKPNKVQLIAMDLPMVSGDRIHCLDILFAFTKRVLGESGEMDALRIQMEDRFMASNPSKVSYEPITTTLKRKQEEVSAAIIQRNFRCYLLKQRLKNISSNYNKEAIKGRIDLPIKQDMIIDKLNGNSTPEKTDGSSSTTSPPSYDSVTKPDKEKFEKDKPEKESKGKEVRENQK

SEQ ID NO: 80222 - protein, 1951 aa, Homo sapiens
  Payload ID: 15993
  Gene Symbol: SCN3A
  Gene Name: sodium channel, voltage gated, type III alpha subunit
  Uniprot ID: Q9NY46
  ENSP ID: ENSP00000386726
MAQALLVPPGPESFRLFTRESLAAIEKRAAEEKAKKPKKEQDNDDENKPKPNSDLEAGKNLPFIYGDIPPEMVSEPLEDLDPYYINKKTFIVMNKGKAIFRFSATSALYILTPLNPVRKIAIKILVHSLFSMLIMCTILTNCVFMTLSNPPDWTKNVEYTFTGIYTFESLIKILARGFCLEDFTFLRDPWNWLDFSVIVMAYVTEFVSLGNVSALRTFRVLRALKTISVIPGLKTIVGALIQSVKKLSDVMILTVFCLSVFALIGLQLFMGNLRNKCLQWPPSDSAFETNTTSYFNGTMDSNGTFVNVTMSTFNWKDYIGDDSHFYVLDGQKDPLLCGNGSDAGQCPEGYICVKAGRNPNYGYTSFDTFSWAFLSLFRLMTQDYWENLYQLTLRAAGKTYMIFFVLVIFLGSFYLVNLILAVVAMAYEEQNQATLEEAEQKEAEFQQMLEQLKKQQEEAQAVAAASAASRDFSGIGGLGELLESSSEASKLSSKSAKEWRNRRKKRRQREHLEGNNKGERDSFPKSESEDSVKRSSFLFSMDGNRLTSDKKFCSPHQSLLSIRGSLFSPRRNSKTSIFSFRGRAKDVGSENDFADDEHSTFEDSESRRDSLFVPHRHGERRNSNGTTTETEVRKRRLSSYQISMEMLEDSSGRQRAVSIASILTNTMEELEESRQKCPPCWYRFANVFLIWDCCDAWLKVKHLVNLIVMDPFVDLAITICIVLNTLFMAMEHYPMTEQFSSVLTVGNLVFTGIFTAEMVLKIIAMDPYYYFQEGWNIFDGIIVSLSLMELGLSNVEGLSVLRSFRLLRVFKLAKSWPTLNMLIKIIGNSVGALGNLTLVLAIIVFIFAVVGMQLFGKSYKECVCKINDDCTLPRWHMNDFFHSFLIVFRVLCGEWIETMWDCMEVAGQTMCLIVFMLVMVIGNLVVLNLFLALLLSSFSSDNLAATDDDNEMNNLQIAVGRMQKGIDYVKNKMRECFQKAFFRKPKVIEIHEGNKIDSCMSNNTGIEISKELNYLRDGNGTTSGVGTGSSVEKYVIDENDYMSFINNPSLTVTVPIAVGESDFENLNTEEFSSESELEESKEKLNATSSSEGSTVDVVLPREGEQAETEPEEDLKPEACFTEGCIKKFPFCQVSTEEGKGKIWWNLRKTCYSIVEHNWFETFIVFMILLSSGALAFEDIYIEQRKTIKTMLEYADKVFTYIFILEMLLKWVAYGFQTYFTNAWCWLDFLIVDVSLVSLVANALGYSELGAIKSLRTLRALRPLRALSRFEGMRVVVNALVGAIPSIMNVLLVCLIFWLIFSIMGVNLFAGKFYHCVNMTTGNMFDISDVNNLSDCQALGKQARWKNVKVNFDNVGAGYLALLQVATFKGWMDIMYAAVDSRDVKLQPVYEENLYMYLYFVIFIIFGSFFTLNLFIGVIIDNFNQQKKKFGGQDIFMTEEQKKYYNAMKKLGSKKPQKPIPRPANKFQGMVFDFVTRQVFDISIMILICLNMVTMMVETDDQGKYMTLVLSRINLVFIVLFTGEFVLKLVSLRHYYFTIGWNIFDFVVVILSIVGMFLAEMIEKYFVSPTLFRVIRLARIGRILRLIKGAKGIRTLLFALMMSLPALFNIGLLLFLVMFIYAIFGMSNFAYVKKEAGIDDMFNFETFGNSMICLFQITTSAGWDGLLAPILNSAPPDCDPDTIHPGSSVKGDCGNPSVGIFFFVSYIIISFLVVVNMYIAVILENFSVATEESAEPLSEDDFEMFYEVWEKFDPDATQFIEFSKLSDFAAALDPPLLIAKPNKVQLIAMDLPMVSGDRIHCLDILFAFTKRVLGESGEMDALRIQMEDRFMASNPSKVSYEPITTTLKRKQEEVSAAIIQRNFRCYLLKQRLKNISSNYNKEAIKGRIDLPIKQDMIIDKLNGNSTPEKTDGSSSTTSPPSYDSVTKPDKEKFEKDKPEKESKGKEVRENQK

SEQ ID NO: 80223 - protein, 200 aa, Homo sapiens
  Payload ID: 15993
  Gene Symbol: SCN3A
  Gene Name: sodium channel, voltage gated, type III alpha subunit
  ENSP ID: ENSP00000391569
MAQALLVPPGPESFRLFTRESLAAIEKRAAEEKAKKPKKEQDNDDENKPKPNSDLEAGKNLPFIYGDIPPEMVSEPLEDLDPYYINKKTFIVMNKGKAIFRFSATSALYILTPLNPVRKIAIKILVHSLFSMLIMCTILTNCVFMTLSNPPDWTKNVEYTFTGIYTFESLIKILARGFCLEDFTFLRDPWNWLDFSVIVM

SEQ ID NO: 80224 - protein, 1364 aa, Homo sapiens
  Payload ID: 15993
  Gene Symbol: SCN3A
  Gene Name: sodium channel, voltage gated, type III alpha subunit
  ENSP ID: ENSP00000403348
MAQALLVPPGPESFRLFTRESLAAIEKRAAEEKAKKPKKEQDNDDENKPKPNSDLEAGKNLPFIYGDIPPEMVSEPLEDLDPYYINKKTFIVMNKGKAIFRFSATSALYILTPLNPVRKIAIKILVHSLFSMLIMCTILTNCVFMTLSNPPDWTKNVEYTFTGIYTFESLIKILARGFCLEDFTFLRDPWNWLDFSVIVMAYVTEFVDLGNVSALRTFRVLRALKTISVIPGLKTIVGALIQSVKKLSDVMILTVFCLSVFALIGLQLFMGNLRNKCLQWPPSDSAFETNTTSYFNGTMDSNGTFVNVTMSTFNWKDYIGDDSHFYVLDGQKDPLLCGNGSDAGQCPEGYICVKAGRNPNYGYTSFDTFSWAFLSLFRLMTQDYWENLYQLTLRAAGKTYMIFFVLVIFLGSFYLVNLILAVVAMAYEEQNQATLEEAEQKEAEFQQMLEQLKKQQEEAQAVAAASAASRDFSGIGGLGELLESSSEASKLSSKSAKEWRNRRKKRRQREHLEGNNKGERDSFPKSESEDSVKRSSFLFSMDGNRLTSDKKFCSPHQSLLSIRGSLFSPRRNSKTSIFSFRGRAKDVGSENDFADDEHSTFEDSESRRDSLFVPHRHGERRNSNGTTTETEVRKRRLSSYQISMEMLEDSSGRQRAVSIASILTNTMEELEESRQKCPPCWYRFANVFLIWDCCDAWLKVKHLVNLIVMDPFVDLAITICIVLNTLFMAMEHYPMTEQFSSVLTVGNLVFTGIFTAEMVLKIIAMDPYYYFQEGWNIFDGIIVSLSLMELGLSNVEGLSVLRSFRLLRVFKLAKSWPTLNMLIKIIGNSVGALGNLTLVLAIIVFIFAVVGMQLFGKSYKECVCKINDDCTLPRWHMNDFFHSFLIVFRVLCGEWIETMWDCMEVAGQTMCLIVFMLVMVIGNLVVLNLFLALLLSSFSSDNLAATDDDNEMNNLQIAVGRMQKGIDYVKNKMRECFQKAFFRKPKVIEIHEGNKIDSCMSNNTGIEISKELNYLRDGNGTTSGVGTGSSVEKYVIDENDYMSFINNPSLTVTVPIAVGESDFENLNTEEFSSESELEESKEKLNATSSSEGSTVDVVLPREGEQAETEPEEDLKPEACFTEGCIKKFPFCQVSTEEGKGKIWWNLRKTCYSIVEHNWFETFIVFMILLSSGALAFEDIYIEQRKTIKTMLEYADKVFTYIFILEMLLKWVAYGFQTYFTNAWCWLDFLIVDVSLVSLVANALGYSELGAIKSLRTLRALRPLRALSRFEGMRVVVNALVGAIPSIMNVLLVCLIFWLIFSIMGVNLFAGKFYHCVNMTTGNMFDISDVNNLSDCQALGKQARWKNVKVNFDNVGAGYLALLQV

SEQ ID NO: 80225 - protein, 215 aa, Homo sapiens
  Payload ID: 15994
  Gene Symbol: SCN3B
  Gene Name: sodium channel, voltage gated, type III beta subunit
  Uniprot ID: Q9NY72
  ENSP ID: ENSP00000299333
MPAFNRLFPLASLVLIYWVSVCFPVCVEVPSETEAVQGNPMKLRCISCMKREEVEATTVVEWFYRPEGGKDFLIYEYRNGHQEVESPFQGRLQWNGSKDLQDVSITVLNVTLNDSGLYTCNVSREFEFEAHRPFVKTTRLIPLRVTEEAGEDFTSVVSEIMMYILLVFLTLWLLIEMIYCYRKVSKAEEAAQENASDYLAIPSENKENSAVPVEE

SEQ ID NO: 80226 - protein, 215 aa, Homo sapiens; identical to SEQ ID NO: 80225
  Payload ID: 15994
  Gene Symbol: SCN3B
  Gene Name: sodium channel, voltage gated, type III beta subunit
  Uniprot ID: Q9NY72
  ENSP ID: ENSP00000376523

SEQ ID NO: 80227 - protein, 215 aa, Homo sapiens; identical to SEQ ID NO: 80225
  Payload ID: 15994
  Gene Symbol: SCN3B
  Gene Name: sodium channel, voltage gated, type III beta subunit
  Uniprot ID: Q9NY72
  ENSP ID: ENSP00000432785

SEQ ID NO: 80228 - protein, 93 aa, Homo sapiens
  Payload ID: 15994
  Gene Symbol: SCN3B
  Gene Name: sodium channel, voltage gated, type III beta subunit
  ENSP ID: ENSP00000434363
MPAFNRLFPLASLVLIYWVSVCFPVCVEVPSETEAVQGNPMKLRCISCMKREEVEATTVVEWFYRPEGGKDFLIYEYRNGHQEVESPFQGRLQ

SEQ ID NO: 80229 - protein, 141 aa, Homo sapiens
  Payload ID: 15994
  Gene Symbol: SCN3B
  Gene Name: sodium channel, voltage gated, type III beta subunit
  ENSP ID: ENSP00000435554
MPAFNRLFPLASLVLIYWVSVCFPVCVEVPSETEAVQGNPMKLRCISCMKREEVEATTVVEWFYRPEGGKDFLIYEYRNGHQEVESPFQGRLQWNGSKDLQDVSITVLNVTLNDSGLYTCNVSREFEFEAHRPFVKTTRLI

SEQ ID NO: 80230 - protein, 1836 aa, Homo sapiens
  Payload ID: 15995
  Gene Symbol: SCN4A
  Gene Name: sodium channel, voltage gated, type IV alpha subunit
  Uniprot ID: P35499
  ENSP ID: ENSP00000396320
MARPSLCTLVPLGPECLRPFTRESLAAIEQRAVEEEARLQRNKQMEIEEPERKPRSDLEAGKNLPMIYGDPPPEVIGIPLEDLDPYYSNKKTFIVLNKGKAIFRFSATPALYLLSPFSVVRRGAIKVLIHALFSMFIMITILTNCVFMTMSDPPPWSKNVEYTFTGIYTFESLIKILARGFCVDDFTFLRDPWNWLDFSVIMMAYLTEFVDLGNISALRTFRVLRALKTITVIPGLKTIVGALIQSVKKLSDVMILTVFCLSVFALVGLQLFMGNLRQKCVRWPPPFNDTNTTWYSNDTWYGNDTWYGNEMWYGNDSWYANDTWNSHASWATNDTFDWDAYISDEGNFYFLEGSNDALLCGNSSDAGHCPEGYECIKTGRNPNYGYTSYDTFSWAFLALFRLMTQDYWENLFQLTLRAAGKTYMIFFVVIIFLGSFYLINLILAVVAMAYAEQNEATLAEDKEKEEEFQQMLEKFKKHQEELEKAKAAQALEGGEADGDPAHGKDCNGSLDTSQGEKGAPRQSSSGDSGISDAMEELEEAHQKCPPWWYKCAHKVLIWNCCAPWLKFKNIIHLIVMDPFVDLGITICIVLNTLFMAMEHYPMTEHFDNVLTVGNLVFTGIFTAEMVLKLIAMDPYEYFQQGWNIFDSIIVTLSLVELGLANVQGLSVLRSFRLLRVFKLAKSWPTLNMLIKIIGNSVGALGNLTLVLAIIVFIFAVVGMQLFGKSYKECVCKIALDCNLPRWHMHDFFHSFLIVFRILCGEWIETMWDCMEVAGQAMCLTVFLMVMVIGNLVVLNLFLALLLSSFSADSLAASDEDGEMNNLQIAIGRIKLGIGFAKAFLLGLLHGKILSPKDIMLSLGEADGAGEAGEAGETAPEDEKKEPPEEDLKKDNHILNHMGLADGPPSSLELDHLNFINNPYLTIQVPIASEESDLEMPTEEETDTFSEPEDSKKPPQPLYDGNSSVCSTADYKPPEEDPEEQAEENPEGEQPEECFTEACVQRWPCLYVDISQGRGKKWWTLRRACFKIVEHNWFETFIVFMILLSSGALAFEDIYIEQRRVIRTILEYADKVFTYIFIMEMLLKWVAYGFKVYFTNAWCWLDFLIVDVSIISLVANWLGYSELGPIKSLRTLRALRPLRALSRFEGMRVVVNALLGAIPSIMNVLLVCLIFWLIFSIMGVNLFAGKFYYCINTTTSERFDISEVNNKSECESLMHTGQVRWLNVKVNYDNVGLGYLSLLQVATFKGWMDIMYAAVDSREKEEQPQYEVNLYMYLYFVIFIIFGSFFTLNLFIGVIIDNFNQQKKKLGGKDIFMTEEQKKYYNAMKKLGSKKPQKPIPRPQNKIQGMVYDLVTKQAFDITIMILICLNMVTMMVETDNQSQLKVDILYNINMIFIIIFTGECVLKMLALRQYYFTVGWNIFDFVVVILSIVGLALSDLIQKYFVSPTLFRVIRLARIGRVLRLIRGAKGIRTLLFALMMSLPALFNIGLLLFLVMFIYSIFGMSNFAYVKKESGIDDMFNFETFGNSIICLFEITTSAGWDGLLNPILNSGPPDCDPNLENPGTSVKGDCGNPSIGICFFCSYIIISFLIVVNMYIAIILENFNVATEESSEPLGEDDFEMFYETWEKFDPDATQFIAYSRLSDFVDTLQEPLRIAKPNKIKLITLDLPMVPGDKIHCLDILFALTKEVLGDSGEMDALKQTMEEKFMAANPSKVSYEPITTTLKRKHEEVCAIKIQRAYRRHLLQRSMKQASYMYRHSHDGSGDDAPEKEGLLANTMSKMYGHENGNSSSPSPEEKGEAGDAGPTMGLMPISPSDTAWPPAPPPGQTVRPGVKESLV

SEQ ID NO: 80231 - protein, 1836 aa, Homo sapiens
  Payload ID: 15995
  Gene Symbol: SCN4A
  Gene Name: sodium channel, voltage gated, type IV alpha subunit
  ENSP ID: ENSP00000463963
MARPSLCTLVPLGPECLRPFTRESLAAIEQRAVEEEARLQRNKQMEIEEPERKPRSDLEAGKNLPMIYGDPPPEVIGIPLEDLDPYYSNKKTFIVLNKGKAIFRFSATPALYLLSPFSVVRRGAIKVLIHALFSMFIMITILTNCVFMTMSDPPPWSKNVEYTFTGIYTFESLIKILARGFCVDDFTFLRDPWNWLDFSVIMMAYLTEFVDLGNISALRTFRVLRALKTITVIPGLKTIVGALIQSVKKLSDVMILTVFCLSVFALVGLQLFMGNLRQKCVRWPPPFNDTNTTWYSNDTWYGNDTWYGNEMWYGNDSWYANDTWNSHASWATNDTFDWDAYISDEGNFYFLEGSNDALLCGNSSDAGHCPEGYECIKTGRNPNYGYTSYDTFSWAFLALFRLMTQDYWENLFQLTLRAAGKTYMIFFVVIIFLGSFYLINLILAVVAMAYAEQNEATLAEDKEKEEEFQQMLEKFKKHQEELEKAKAAQALEGGEADGDPAHGKDCNGSLDTSQGEKGAPRQSSSGDSGISDAMEELEEAHQKCPPWWYKCAHKVLIWNCCAPWLKFKNIIHLIVMDPFVDLGITICIVLNTLFMAMEHYPMTEHFDNVLTVGNLVFTGIFTAEMVLKLIAMDPYEYFQQGWNIFDSIIVTLSLVELGLANVQGLSVLRSFRLLRVFKLAKSWPTLNMLIKIIGNSVGALGNLTLVLAIIVFIFAVVGMQLFGKSYKECVCKIALDCNLPRWHMHDFFHSFLIVFRILCGEWIETMWDCMEVAGQAMCLTVFLMVMVIGNLVVLNLFLALLLSSFSADSLAASDEDGEMNNLQIAIGRIKLGIGFAKAFLLGLLHGKILSPKDIMLSLGEADGAGEAGEAGETAPEDEKKEPPEEDLKKDNHILNHMGLADGPPSSLELDHLNFINNPYLTIQVPIASEESDLEMPTEEETDTFSEPEDSKKPPQPLYDGNSSVCSTADYKPPEEDPEEQAEENPEGEQPEECFTEACVQRWPCLYVDISQGRGKKWWTLRRACFKIVEHNWFETFIVFMILLSSGALAFEDIYIEQRRVIRTILEYADKVFTYIFIMEMLLKWVAYGFKVYFTNAWCWLDFLIVDVSIISLVANWLGYSELGPIKSLRTLRALRPLRALSRFEGMRVVVNALLGAIPSIMNVLLVCLIFWLIFSIMGVNLFAGKFYYCINTTTSERFDISEVNNKSECESLMHTGQVRWLNVKVNYDNVGLGYLSLLQVATFKGWMDIMYAAVDSREKEEQPQYEVNLYMYLYFVIFIIFGSFFTLNLFIGVIIDNFNQQKKKMRGKDIFMTEEQKKYYNAMKKLGSKKPQKPIPRPQNKIQGMVYDLVTKQAFDITIMILICLNMVTMMVETDNQSQLKVDILYNINMIFIIIFTGECVLKMLALRQYYFTVGWNIFDFVVVILSIVGLALSDLIQKYFVSPTLFRVIRLARIGRVLRLIRGAKGIRTLLFALMMSLPALFNIGLLLFLVMFIYSIFGMSNFAYVKKESGIDDMFNFETFGNSIICLFEITTSAGWDGLLNPILNSGPPDCDPNLENPGTSVKGDCGNPSIGICFFCSYIIISFLIVVNMYIAIILENFNVATEESSEPLGEDDFEMFYETWEKFDPDATQFIAYSRLSDFVDTLQEPLRIAKPNKIKLITLDLPMVPGDKIHCLDILFALTKEVLGDSGEMDALKQTMEEKFMAANPSKVSYEPITTTLKRKHEEVCAIKIQRAYRRHLLQRSMKQASYMYRHSHDGSGDDAPEKEGLLANTMSKMYGHENGNSSSPSPEEKGEAGDAGPTMGLMPISPSDTAWPPAPPPGQTVRPGVKESLV

SEQ ID NO: 80232 - protein, 228 aa, Homo sapiens
  Payload ID: 15996
  Gene Symbol: SCN4B
  Gene Name: sodium channel, voltage gated, type IV beta subunit
  Uniprot ID: Q8IWT1
  ENSP ID: ENSP00000322460
MPGAGDGGKAPARWLGTGLLGLFLLPVTLSLEVSVGKATDIYAVNGTEILLPCTFSSCFGFEDLHFRWTYNSSDAFKILIEGTVKNEKSDPKVTLKDDDRITLVGSTKEKMNNISIVLRDLEFSDTGKYTCHVKNPKENNLQHHATIFLQVVDRLEEVDNTVTLIILAVVGGVIGLLILILLIKKLIIFILKKTREKKKECLVSSSGNDNTENGLPGSKAEEKPPSKV

SEQ ID NO: 80233 - protein, 94 aa, Homo sapiens
  Payload ID: 15996
  Gene Symbol: SCN4B
  Gene Name: sodium channel, voltage gated, type IV beta subunit
  Uniprot ID: Q8IWT1
  ENSP ID: ENSP00000436343
MPGAGDGGKAPARWLGTGLLVEEVDNTVTLIILAVVGGVIGLLILILLIKKLIIFILKKTREKKKECLVSSSGNDNTENGLPGSKAEEKPPSKV

SEQ ID NO: 80234 - protein, 1988 aa, Homo sapiens
  Payload ID: 15997
  Gene Symbol: SCN9A
  Gene Name: sodium channel, voltage gated, type IX alpha subunit
  Uniprot ID: Q15858
  ENSP ID: ENSP00000304748
MAMLPPPGPQSFVHFTKQSLALIEQRIAERKSKEPKEEKKDDDEEAPKPSSDLEAGKQLPFIYGDIPPGMVSEPLEDLDPYYADKKTFIVLNKGKTIFRFNATPALYMLSPFSPLRRISIKILVHSLFSMLIMCTILTNCIFMTMNNPPDWTKNVEYTFTGIYTFESLVKILARGFCVGEFTFLRDPWNWLDFVVIVFAYLTEFVNLGNVSALRTFRVLRALKTISVIPGLKTIVGALIQSVKKLSDVMILTVFCLSVFALIGLQLFMGNLKHKCFRNSLENNETLESIMNTLESEEDFRKYFYYLEGSKDALLCGFSTDSGQCPEGYTCVKIGRNPDYGYTSFDTFSWAFLALFRLMTQDYWENLYQQTLRAAGKTYMIFFVVVIFLGSFYLINLILAVVAMAYEEQNQANIEEAKQKELEFQQMLDRLKKEQEEAEAIAAAAAEYTSIRRSRIMGLSESSSETSKLSSKSAKERRNRRKKKNQKKLSSGEEKGDAEKLSKSESEDSIRRKSFHLGVEGHRRAHEKRLSTPNQSPLSIRGSLFSARRSSRTSLFSFKGRGRDIGSETEFADDEHSIFGDNESRRGSLFVPHRPQERRSSNISQASRSPPMLPVNGKMHSAVDCNGVVSLVDGRSALMLPNGQLLPEVIIDKATSDDSGTTNQIHKKRRCSSYLLSEDMLNDPNLRQRAMSRASILTNTVEELEESRQKCPPWWYRFAHKFLIWNCSPYWIKFKKCIYFIVMDPFVDLAITICIVLNTLFMAMEHHPMTEEFKNVLAIGNLVFTGIFAAEMVLKLIAMDPYEYFQVGWNIFDSLIVTLSLVELFLADVEGLSVLRSFRLLRVFKLAKSWPTLNMLIKIIGNSVGALGNLTLVLAIIVFIFAVVGMQLFGKSYKECVCKINDDCTLPRWHMNDFFHSFLIVFRVLCGEWIETMWDCMEVAGQAMCLIVYMMVMVIGNLVVLNLFLALLLSSFSSDNLTAIEEDPDANNLQIAVTRIKKGINYVKQTLREFILKAFSKKPKISREIRQAEDLNTKKENYISNHTLAEMSKGHNFLKEKDKISGFGSSVDKHLMEDSDGQSFIHNPSLTVTVPIAPGESDLENMNAEELSSDSDSEYSKVRLNRSSSSECSTVDNPLPGEGEEAEAEPMNSDEPEACFTDGCVWRFSCCQVNIESGKGKIWWNIRKTCYKIVEHSWFESFIVLMILLSSGALAFEDIYIERKKTIKIILEYADKIFTYIFILEMLLKWIAYGYKTYFTNAWCWLDFLIVDVSLVTLVANTLGYSDLGPIKSLRTLRALRPLRALSRFEGMRVVVNALIGAIPSIMNVLLVCLIFWLIFSIMGVNLFAGKFYECINTTDGSRFPASQVPNRSECFALMNVSQNVRWKNLKVNFDNVGLGYLSLLQVATFKGWTIIMYAAVDSVNVDKQPKYEYSLYMYIYFVVFIIFGSFFTLNLFIGVIIDNFNQQKKKLGGQDIFMTEEQKKYYNAMKKLGSKKPQKPIPRPGNKIQGCIFDLVTNQAFDISIMVLICLNMVTMMVEKEGQSQHMTEVLYWINVVFIILFTGECVLKLISLRHYYFTVGWNIFDFVVVIISIVGMFLADLIETYFVSPTLFRVIRLARIGRILRLVKGAKGIRTLLFALMMSLPALFNIGLLLFLVMFIYAIFGMSNFAYVKKEDGINDMFNFETFGNSMICLFQITTSAGWDGLLAPILNSKPPDCDPKKVHPGSSVEGDCGNPSVGIFYFVSYIIISFLVVVNMYIAVILENFSVATEESTEPLSEDDFEMFYEVWEKFDPDATQFIEFSKLSDFAAALDPPLLIAKPNKVQLIAMDLPMVSGDRIHCLDILFAFTKRVLGESGEMDSLRSQMEERFMSANPSKVSYEPITTTLKRKQEDVSATVIQRAYRRYRLRQNVKNISSIYIKDGDRDDDLLNKKDMAFDNVNENSSPEKTDATSSTTSPPSYDSVTKPDKEKYEQDRTEKEDKGKDSKESKK

SEQ ID NO: 80235 - protein, 1977 aa, Homo sapiens
  Payload ID: 15997
  Gene Symbol: SCN9A
  Gene Name: sodium channel, voltage gated, type IX alpha subunit
  Uniprot ID: Q15858
  ENSP ID: ENSP00000386306
MAMLPPPGPQSFVHFTKQSLALIEQRIAERKSKEPKEEKKDDDEEAPKPSSDLEAGKQLPFIYGDIPPGMVSEPLEDLDPYYADKKTFIVLNKGKTIFRFNATPALYMLSPFSPLRRISIKILVHSLFSMLIMCTILTNCIFMTMNNPPDWTKNVEYTFTGIYTFESLVKILARGFCVGEFTFLRDPWNWLDFVVIVFAYLTEFVNLGNVSALRTFRVLRALKTISVIPGLKTIVGALIQSVKKLSDVMILTVFCLSVFALIGLQLFMGNLKHKCFRNSLENNETLESIMNTLESEEDFRKYFYYLEGSKDALLCGFSTDSGQCPEGYTCVKIGRNPDYGYTSFDTFSWAFLALFRLMTQDYWENLYQQTLRAAGKTYMIFFVVVIFLGSFYLINLILAVVAMAYEEQNQANIEEAKQKELEFQQMLDRLKKEQEEAEAIAAAAAEYTSIRRSRIMGLSESSSETSKLSSKSAKERRNRRKKKNQKKLSSGEEKGDAEKLSKSESEDSIRRKSFHLGVEGHRRAHEKRLSTPNQSPLSIRGSLFSARRSSRTSLFSFKGRGRDIGSETEFADDEHSIFGDNESRRGSLFVPHRPQERRSSNISQASRSPPMLPVNGKMHSAVDCNGVVSLVDGRSALMLPNGQLLPEGTTNQIHKKRRCSSYLLSEDMLNDPNLRQRAMSRASILTNTVEELEESRQKCPPWWYRFAHKFLIWNCSPYWIKFKKCIYFIVMDPFVDLAITICIVLNTLFMAMEHHPMTEEFKNVLAIGNLVFTGIFAAEMVLKLIAMDPYEYFQVGWNIFDSLIVTLSLVELFLADVEGLSVLRSFRLLRVFKLAKSWPTLNMLIKIIGNSVGALGNLTLVLAIIVFIFAVVGMQLFGKSYKECVCKINDDCTLPRWHMNDFFHSFLIVFRVLCGEWIETMWDCMEVAGQAMCLIVYMMVMVIGNLVVLNLFLALLLSSFSSDNLTAIEEDPDANNLQIAVTRIKKGINYVKQTLREFILKAFSKKPKISREIRQAEDLNTKKENYISNHTLAEMSKGHNFLKEKDKISGFGSSVDKHLMEDSDGQSFIHNPSLTVTVPIAPGESDLENMNAEELSSDSDSEYSKVRLNRSSSSECSTVDNPLPGEGEEAEAEPMNSDEPEACFTDGCVWRFSCCQVNIESGKGKIWWNIRKTCYKIVEHSWFESFIVLMILLSSGALAFEDIYIERKKTIKIILEYADKIFTYIFILEMLLKWIAYGYKTYFTNAWCWLDFLIVDVSLVTLVANTLGYSDLGPIKSLRTLRALRPLRALSRFEGMRVVVNALIGAIPSIMNVLLVCLIFWLIFSIMGVNLFAGKFYECINTTDGSRFPASQVPNRSECFALMNVSQNVRWKNLKVNFDNVGLGYLSLLQVATFKGWTIIMYAAVDSVNVDKQPKYEYSLYMYIYFVVFIIFGSFFTLNLFIGVIIDNFNQQKKKLGGQDIFMTEEQKKYYNAMKKLGSKKPQKPIPRPGNKIQGCIFDLVTNQAFDISIMVLICLNMVTMMVEKEGQSQHMTEVLYWINVVFIILFTGECVLKLISLRHYYFTVGWNIFDFVVVIISIVGMFLADLIETYFVSPTLFRVIRLARIGRILRLVKGAKGIRTLLFALMMSLPALFNIGLLLFLVMFIYAIFGMSNFAYVKKEDGINDMFNFETFGNSMICLFQITTSAGWDGLLAPILNSKPPDCDPKKVHPGSSVEGDCGNPSVGIFYFVSYIIISFLVVVNMYIAVILENFSVATEESTEPLSEDDFEMFYEVWEKFDPDATQFIEFSKLSDFAAALDPPLLIAKPNKVQLIAMDLPMVSGDRIHCLDILFAFTKRVLGESGEMDSLRSQMEERFMSANPSKVSYEPITTTLKRKQEDVSATVIQRAYRRYRLRQNVKNISSIYIKDGDRDDDLLNKKDMAFDNVNENSSPEKTDATSSTTSPPSYDSVTKPDKEKYEQDRTEKEDKGKDSKESKK

SEQ ID NO: 80236 - protein, 1988 aa, Homo sapiens; identical to SEQ ID NO: 80234
  Payload ID: 15997
  Gene Symbol: SCN9A
  Gene Name: sodium channel, voltage gated, type IX alpha subunit
  Uniprot ID: Q15858
  ENSP ID: ENSP00000386330

SEQ ID NO: 80237 - protein, 539 aa, Homo sapiens
  Payload ID: 15997
  Gene Symbol: SCN9A
  Gene Name: sodium channel, voltage gated, type IX alpha subunit
  ENSP ID: ENSP00000393141
ILTNCIFMTMNNPPDWTKNVEYTFTGIYTFESLVKILARGFCVGEFTFLRDPWNWLDFVVIVFAYVTEFVDLGNVSALRTFRVLRALKTISVIPGLKTIVGALIQSVKKLSDVMILTVFCLSVFALIGLQLFMGNLKHKCFRNSLENNETLESIMNTLESEEDFRKYFYYLEGSKDALLCGFSTDSGQCPEGYTCVKIGRNPDYGYTSFDTFSWAFLALFRLMTQDYWENLYQQTLRAAGKTYMIFFVVVIFLGSFYLINLILAVVAMAYEEQNQANIEEAKQKELEFQQMLDRLKKEQEEAEAIAAAAAEYTSIRRSRIMGLSESSSETSKLSSKSAKERRNRRKKKNQKKLSSGEEKGDAEKLSKSESEDSIRRKSFHLGVEGHRRAHEKRLSTPNQSPLSIRGSLFSARRSSRTSLFSFKGRGRDIGSETEFADDEHSIFGDNESRRGSLFVPHRPQERRSSNISQASRSPPMLPVNGKMHSAVDCNGVVSLVDGRSALMLPNGQLLPEVIIDKATSDDSGTTNQIHKKRRCSSYL

SEQ ID NO: 80238 - protein, 528 aa, Homo sapiens
  Payload ID: 15997
  Gene Symbol: SCN9A
  Gene Name: sodium channel, voltage gated, type IX alpha subunit
  ENSP ID: ENSP00000413212
ILTNCIFMTMNNPPDWTKNVEYTFTGIYTFESLVKILARGFCVGEFTFLRDPWNWLDFVVIVFAYVTEFVDLGNVSALRTFRVLRALKTISVIPGLKTIVGALIQSVKKLSDVMILTVFCLSVFALIGLQLFMGNLKHKCFRNSLENNETLESIMNTLESEEDFRKYFYYLEGSKDALLCGFSTDSGQCPEGYTCVKIGRNPDYGYTSFDTFSWAFLALFRLMTQDYWENLYQQTLRAAGKTYMIFFVVVIFLGSFYLINLILAVVAMAYEEQNQANIEEAKQKELEFQQMLDRLKKEQEEAEAIAAAAAEYTSIRRSRIMGLSESSSETSKLSSKSAKERRNRRKKKNQKKLSSGEEKGDAEKLSKSESEDSIRRKSFHLGVEGHRRAHEKRLSTPNQSPLSIRGSLFSARRSSRTSLFSFKGRGRDIGSETEFADDEHSIFGDNESRRGSLFVPHRPQERRSSNISQASRSPPMLPVNGKMHSAVDCNGVVSLVDGRSALMLPNGQLLPEGTTNQIHKKRRCSSYL

SEQ ID NO: 80239 - protein, 2016 aa, Homo sapiens [sequence omitted]

SEQ ID NO: 80240 - protein, 65 aa, Homo sapiens
  Payload ID: 15998
  Gene Symbol: SCN5A
  Gene Name: sodium channel, voltage gated, type V alpha subunit
  ENSP ID: ENSP00000333674
MANFLLPRGTSSFRRFTRESLAAIEKRMAEKQARGSTTLQESREGLPEEEAPRPQLDLQASKKLP

SEQ ID NO: 80241 - protein, 1962 aa, Homo sapiens
  Payload ID: 15998
  Gene Symbol: SCN5A
  Gene Name: sodium channel, voltage gated, type V alpha subunit
  ENSP ID: ENSP00000388797
MANFLLPRGTSSFRRFTRESLAAIEKRMAEKQARGSTTLQESREGLPEEEAPRPQLDLQASKKLPDLYGNPPQELIGEPLEDLDPFYSTQKTFIVLNKGKTIFRFSATNALYVLSPFHPIRRAAVKILVHSLFNMLIMCTILTNCVFMAQHDPPPWTKYVEYTFTAIYTFESLVKILARGFCLHAFTFLRDPWNWLDFSVIIMAYVSENIKLGNLSALRTFRVLRALKTISVIPGLKTIVGALIQSVKKLADVMVLTVFCLSVFALIGLQLFMGNLRHKCVRNFTALNGTNGSVEADGLVWESLDLYLSDPENYLLKNGTSDVLLCGNSSDAGTCPEGYRCLKAGENPDHGYTSFDSFAWAFLALFRLMTQDCWERLYQQTLRSAGKIYMIFFMLVIFLGSFYLVNLILAVVAMAYEEQNQATIAETEEKEKRFQEAMEMLKKEHEALTIRGVDTVSRSSLEMSPLAPVNSHERRSKRRKRMSSGTEECGEDRLPKSDSEDGPRAMNHLSLTRGLSRTSMKPRSSRGSIFTFRRRDLGSEADFADDENSTAGESESHHTSLLVPWPLRRTSAQGQPSPGTSAPGHALHGKKNSTVDCNGVVSLLGAGDPEATSPGSHLLRPVMLEHPPDTTTPSEEPGGPQMLTSQAPCVDGFEEPGARQRALSAVSVLTSALEELEESRHKCPPCWNRLAQRYLIWECCPLWMSIKQGVKLVVMDPFTDLTITMCIVLNTLFMALEHYNMTSEFEEMLQVGNLVFTGIFTAEMTFKIIALDPYYYFQQGWNIFDSIIVILSLMELGLSRMSNLSVLRSFRLLRVFKLAKSWPTLNTLIKIIGNSVGALGNLTLVLAIIVFIFAVVGMQLFGKNYSELRDSDSGLLPRWHMMDFFHAFLIIFRILCGEWIETMWDCMEVSGQSLCLLVFLLVMVIGNLVVLNLFLALLLSSFSADNLTAPDEDREMNNLQLALARIQRGLRFVKRTTWDFCCGLLRQRPQKPAALAAQGQLPSCIATPYSPPPPETEKVPPTRKETRFEEGEQPGQGTPGDPEPVCVPIAVAESDTDDQEEDEENSLGTEEESSKQTPEDSCSEGSTADMTNTAELLEQIPDLGQDVKDPEDCFTEGCVRRCPCCAVDTTQAPGKVWWRLRKTCYHIVEHSWFETFIIFMILLSSGALAFEDIYLEERKTIKVLLEYADKMFTYVFVLEMLLKWVAYGFKKYFTNAWCWLDFLIVDVSLVSLVANTLGFAEMGPIKSLRTLRALRPLRALSRFEGMRVVVNALVGAIPSIMNVLLVCLIFWLIFSIMGVNLFAGKFGRCINQTEGDLPLNYTIVNNKSQCESLNLTGELYWTKVKVNFDNVGAGYLALLQVATFKGWMDIMYAAVDSRGYEEQPQWEYNLYMYIYFVIFIIFGSFFTLNLFIGVIIDNFNQQKKKLGGQDIFMTEEQKKYYNAMKKLGSKKPQKPIPRPLNKYQGFIFDIVTKQAFDVTIMFLICLNMVTMMVETDDQSPEKINILAKINLLFVAIFTGECIVKLAALRHYYFTNSWNIFDFVVVILSIVGTVLSDIIQKYFFSPTLFRVIRLARIGRILRLIRGAKGIRTLLFALMMSLPALFNIGLLLFLVMFIYSIFGMANFAYVKWEAGIDDMFNFQTFANSMLCLFQITTSAGWDGLLSPILNTGPPYCDPTLPNSNGSRGDCGSPAVGILFFTTYIIISFLIVVNMYIAIILENFSVATEESTEPLSEDDFDMFYEIWEKFDPEATQFIEYSVLSDFADALSEPLRIAKPNQISLINMDLPMVSGDRIHCMDILFAFTKRVLGESGEMDALKIQMEEKFMAANPSKISYEPITTTLRRKHEEVSAMVIQRAFRRHLLQRSLKHASFLFRQQAGSGLSEEDAPEREGLIAYVMSENFSRPLGPPSSSSISSTSFPPSYDSVTRATSDNLQVRGSDYSHSEDLADFPPSPDRDRESIV

SEQ ID NO: 80242 - protein, 2015 aa, Homo sapiens [sequence omitted]

SEQ ID NO: 80243 - protein, 1998 aa, Homo sapiens
  Payload ID: 15998
  Gene Symbol: SCN5A
  Gene Name: sodium channel, voltage gated, type V alpha subunit
  ENSP ID: ENSP00000398962
MANFLLPRGTSSFRRFTRESLAAIEKRMAEKQARGSTTLQESREGLPEEEAPRPQLDLQASKKLPDLYGNPPQELIGEPLEDLDPFYSTQKTFIVLNKGKTIFRFSATNALYVLSPFHPIRRAAVKILVHSLFNMLIMCTILTNCVFMAQHDPPPWTKYVEYTFTAIYTFESLVKILARGFCLHAFTFLRDPWNWLDFSVIIMAYVSENIKLGNLSALRTFRVLRALKTISVIPGLKTIVGALIQSVKKLADVMVLTVFCLSVFALIGLQLFMGNLRHKCVRNFTALNGTNGSVEADGLVWESLDLYLSDPENYLLKNGTSDVLLCGNSSDAGTCPEGYRCLKAGENPDHGYTSFDSFAWAFLALFRLMTQDCWERLYQQTLRSAGKIYMIFFMLVIFLGSFYLVNLILAVVAMAYEEQNQATIAETEEKEKRFQEAMEMLKKEHEALTIRGVDTVSRSSLEMSPLAPVNSHERRSKRRKRMSSGTEECGEDRLPKSDSEDGPRAMNHLSLTRGLSRTSMKPRSSRGSIFTFRRRDLGSEADFADDENSTAGESESHHTSLLVPWPLRRTSAQGQPSPGTSAPGHALHGKKNSTVDCNGVVSLLGAGDPEATSPGSHLLRPVMLEHPPDTTTPSEEPGGPQMLTSQAPCVDGFEEPGARQRALSAVSVLTSALEELEESRHKCPPCWNRLAQRYLIWECCPLWMSIKQGVKLVVMDPFTDLTITMCIVLNTLFMALEHYNMTSEFEEMLQVGNLVFTGIFTAEMTFKIIALDPYYYFQQGWNIFDSIIVILSLMELGLSRMSNLSVLRSFRLLRVFKLAKSWPTLNTLIKIIGNSVGALGNLTLVLAIIVFIFAVVGMQLFGKNYSELRDSDSGLLPRWHMMDFFHAFLIIFRILCGEWIETMWDCMEVSGQSLCLLVFLLVMVIGNLVVLNLFLALLLSSFSADNLTAPDEDREMNNLQLALARIQRGLRFVKRTTWDFCCGLLRQRPQKPAALAAQGQLPSCIATPYSPPPPETEKVPPTRKETRFEEGEQPGQGTPGDPEPVCVPIAVAESDTDDQEEDEENSLGTEEESSKQQESQPVSGGPEAPPDSRTWSQVSATASSEAEASASQADWRQQWKAEPQAPGCGETPEDSCSEGSTADMTNTAELLEQIPDLGQDVKDPEDCFTEGCVRRCPCCAVDTTQAPGKVWWRLRKTCYHIVEHSWFETFIIFMILLSSGALAFEDIYLEERKTIKVLLEYADKMFTYVFVLEMLLKWVAYGFKKYFTNAWCWLDFLIVDVSLVSLVANTLGFAEMGPIKSLRTLRALRPLRALSRFEGMRVVVNALVGAIPSIMNVLLVCLIFWLIFSIMGVNLFAGKFGRCINQTEGDLPLNYTIVNNKSQCESLNLTGELYWTKVKVNFDNVGAGYLALLQVYEEQPQWEYNLYMYIYFVIFIIFGSFFTLNLFIGVIIDNFNQQKKKLGGQDIFMTEEQKKYYNAMKKLGSKKPQKPIPRPLNKYQGFIFDIVTKQAFDVTIMFLICLNMVTMMVETDDQSPEKINILAKINLLFVAIFTGECIVKLAALRHYYFTNSWNIFDFVVVILSIVGTVLSDIIQKYFFSPTLFRVIRLARIGRILRLIRGAKGIRTLLFALMMSLPALFNIGLLLFLVMFIYSIFGMANFAYVKWEAGIDDMFNFQTFANSMLCLFQITTSAGWDGLLSPILNTGPPYCDPTLPNSNGSRGDCGSPAVGILFFTTYIIISFLIVVNMYIAIILENFSVATEESTEPLSEDDFDMFYEIWEKFDPEATQFIEYSVLSDFADALSEPLRIAKPNQISLINMDLPMVSGDRIHCMDILFAFTKRVLGESGEMDALKIQMEEKFMAANPSKISYEPITTTLRRKHEEVSAMVIQRAFRRHLLQRSLKHASFLFRQQAGSGLSEEDAPEREGLIAYVMSENFSRPLGPPSSSSISSTSFPPSYDSVTRATSDNLQVRGSDYSHSEDLADFPPSPDRDRESIV

SEQ ID NO: 80244 - protein, 1983 aa, Homo sapiens
  Payload ID: 15998
  Gene Symbol: SCN5A
  Gene Name: sodium channel, voltage gated, type V alpha subunit
  ENSP ID: ENSP00000399524
MANFLLPRGTSSFRRFTRESLAAIEKRMAEKQARGSTTLQESREGLPEEEAPRPQLDLQASKKLPDLYGNPPQELIGEPLEDLDPFYSTQKTFIVLNKGKTIFRFSATNALYVLSPFHPIRRAAVKILVHSLFNMLIMCTILTNCVFMAQHDPPPWTKYVEYTFTAIYTFESLVKILARGFCLHAFTFLRDPWNWLDFSVIIMAYVSENIKLGNLSALRTFRVLRALKTISVIPGLKTIVGALIQSVKKLADVMVLTVFCLSVFALIGLQLFMGNLRHKCVRNFTALNGTNGSVEADGLVWESLDLYLSDPENYLLKNGTSDVLLCGNSSDAGTCPEGYRCLKAGENPDHGYTSFDSFAWAFLALFRLMTQDCWERLYQQTLRSAGKIYMIFFMLVIFLGSFYLVNLILAVVAMAYEEQNQATIAETEEKEKRFQEAMEMLKKEHEALTIRGVDTVSRSSLEMSPLAPVNSHERRSKRRKRMSSGTEECGEDRLPKSDSEDGPRAMNHLSLTRGLSRTSMKPRSSRGSIFTFRRRDLGSEADFADDENSTAGESESHHTSLLVPWPLRRTSAQGQPSPGTSAPGHALHGKKNSTVDCNGVVSLLGAGDPEATSPGSHLLRPVMLEHPPDTTTPSEEPGGPQMLTSQAPCVDGFEEPGARQRALSAVSVLTSALEELEESRHKCPPCWNRLAQRYLIWECCPLWMSIKQGVKLVVMDPFTDLTITMCIVLNTLFMALEHYNMTSEFEEMLQVGNLVFTGIFTAEMTFKIIALDPYYYFQQGWNIFDSIIVILSLMELGLSRMSNLSVLRSFRLLRVFKLAKSWPTLNTLIKIIGNSVGALGNLTLVLAIIVFIFAVVGMQLFGKNYSELRDSDSGLLPRWHMMDFFHAFLIIFRILCGEWIETMWDCMEVSGQSLCLLVFLLVMVIGNLVVLNLFLALLLSSFSADNLTAPDEDREMNNLQLALARIQRGLRFVKRTTWDFCCGLLRQRPQKPAALAAQGQLPSCIATPYSPPPPETEKVPPTRKETRFEEGEQPGQGTPGDPEPVCVPIAVAESDTDDQEEDEENSLGTEEESSKQESQPVSGGPEAPPDSRTWSQVSATASSEAEASASQADWRQQWKAEPQAPGCGETPEDSCSEGSTADMTNTAELLEQIPDLGQDVKDPEDCFTEGCVRRCPCCAVDTTQAPGKVWWRLRKTCYHIVEHSWFETFIIFMILLSSGALAFEDIYLEERKTIKVLLEYADKMFTYVFVLEMLLKWVAYGFKKYFTNAWCWLDFLIVDVSLVSLVANTLGFAEMGPIKSLRTLRALRPLRALSRFEGMRVVVNALVGAIPSIMNVLLVCLIFWLIFSIMGVNLFAGKFGRCINQTEGDLPLNYTIVNNKSQCESLNLTGELYWTKVKVNFDNVGAGYLALLQVATFKGWMDIMYAAVDSRGYEEQPQWEYNLYMYIYFVIFIIFGSFFTLNLFIGVIIDNFNQQKKKLGGQDIFMTEEQKKYYNAMKKLGSKKPQKPIPRPLNKYQGFIFDIVTKQAFDVTIMFLICLNMVTMMVETDDQSPEKINILAKINLLFVAIFTGTVLSDIIQKYFFSPTLFRVIRLARIGRILRLIRGAKGIRTLLFALMMSLPALFNIGLLLFLVMFIYSIFGMANFAYVKWEAGIDDMFNFQTFANSMLCLFQITTSAGWDGLLSPILNTGPPYCDPTLPNSNGSRGDCGSPAVGILFFTTYIIISFLIVVNMYIAIILENFSVATEESTEPLSEDDFDMFYEIWEKFDPEATQFIEYSVLSDFADALSEPLRIAKPNQISLINMDLPMVSGDRIHCMDILFAFTKRVLGESGEMDALKIQMEEKFMAANPSKISYEPITTTLRRKHEEVSAMVIQRAFRRHLLQRSLKHASFLFRQQAGSGLSEEDAPEREGLIAYVMSENFSRPLGPPSSSSISSTSFPPSYDSVTRATSDNLQVRGSDYSHSEDLADFPPSPDRDRESIV

SEQ ID NO: 80245 - protein, 1962 aa, Homo sapiens; identical to SEQ ID NO: 80241
  Payload ID: 15998
  Gene Symbol: SCN5A
  Gene Name: sodium channel, voltage gated, type V alpha subunit
  ENSP ID: ENSP00000403355

SEQ ID NO: 80246 - protein, 2016 aa, Homo sapiens
  Payload ID: 15998
  Gene Symbol: SCN5A
  Gene Name: sodium channel, voltage gated, type V alpha subunit
  ENSP ID: ENSP00000410257
MANFLLPRGTSSFRRFTRESLAAIEKRMAEKQARGSTTLQESREGLPEEEAPRPQLDLQASKKLPDLYGNPPQELIGEPLEDLDPFYSTQKTFIVLNKGKTIFRFSATNALYVLSPFHPIRRAAVKILVHSLFNMLIMCTILTNCVFMAQHDPPPWTKYVEYTFTAIYTFESLVKILARGFCLHAFTFLRDPWNWLDFSVIIMAYVSENIKLGNLSALRTFRVLRALKTISVIPGLKTIVGALIQSVKKLADVMVLTVFCLSVFALIGLQLFMGNLRHKCVRNFTALNGTNGSVEADGLVWESLDLYLSDPENYLLKNGTSDVLLCGNSSDAGTCPEGYRCLKAGENPDHGYTSFDSFAWAFLALFRLMTQDCWERLYQQTLRSAGKIYMIFFMLVIFLGSFYLVNLILAVVAMAYEEQNQATIAETEEKEKRFQEAMEMLKKEHEALTIRGVDTVSRSSLEMSPLAPVNSHERRSKRRKRMSSGTEECGEDRLPKSDSEDGPRAMNHLSLTRGLSRTSMKPRSSRGSIFTFRRRDLGSEADFADDENSTAGESESHHTSLLVPWPLRRTSAQGQPSPGTSAPGHALHGKKNSTVDCNGVVSLLGAGDPEATSPGSHLLRPVMLEHPPDTTTPSEEPGGPQMLTSQAPCVDGFEEPGARQRALSAVSVLTSALEELEESRHKCPPCWNRLAQRYLIWECCPLWMSIKQGVKLVVMDPFTDLTITMCIVLNTLFMALEHYNMTSEFEEMLQVGNLVFTGIFTAEMTFKIIALDPYYYFQQGWNIFDSIIVILSLMELGLSRMSNLSVLRSFRLLRVFKLAKSWPTLNTLIKIIGNSVGALGNLTLVLAIIVFIFAVVGMQLFGKNYSELRDSDSGLLPRWHMMDFFHAFLIIFRILCGEWIETMWDCMEVSGQSLCLLVFLLVMVIGNLVVLNLFLALLLSSFSADNLTAPDEDREMNNLQLALARIQRGLRFVKRTTWDFCCGLLRQRPQKPAALAAQGQLPSCIATPYSPPPPETEKVPPTRKETRFEEGEQPGQGTPGDPEPVCVPIAVAESDTDDQEEDEENSLGTEEESSKQQESQPVSGGPEAPPDSRTWSQVSATASSEAEASASQADWRQQWKAEPQAPGCGETPEDSCSEGSTADMTNTAELLEQIPDLGQDVKDPEDCFTEGCVRRCPCCAVDTTQAPGKVWWRLRKTCYHIVEHSWFETFIIFMILLSSGALAFEDIYLEERKTIKVLLEYADKMFTYVFVLEMLLKWVAYGFKKYFTNAWCWLDFLIVDVSLVSLVANTLGFAEMGPIKSLRTLRALRPLRALSRFEGMRVVVNALVGAIPSIMNVLLVCLIFWLIFSIMGVNLFAGKFGRCINQTEGDLPLNYTIVNNKSQCESLNLTGELYWTKVKVNFDNVGAGYLALLQVATFKGWMDIMYAAVDSRGYEEQPQWEYNLYMYIYFVIFIIFGSFFTLNLFIGVIIDNFNQQKKKLGGQDIFMTEEQKKYYNAMKKLGSKKPQKPIPRPLNKYQGFIFDIVTKQAFDVTIMFLICLNMVTMMVETDDQSPEKINILAKINLLFVAIFTGECIVKLAALRHYYFTNSWNIFDFVVVILSIVGTVLSDIIQKYFFSPTLFRVIRLARIGRILRLIRGAKGIRTLLFALMMSLPALFNIGLLLFLVMFIYSIFGMANFAYVKWEAGIDDMFNFQTFANSMLCLFQITTSAGWDGLLSPILNTGPPYCDPTLPNSNGSRGDCGSPAVGILFFTTYIIISFLIVVNMYIAIILENFSVATEESTEPLSEDDFDMFYEIWEKFDPEATQFIEYSVLSDFADALSEPLRIAKPNQISLINMDLPMVSGDRIHCMDILFAFTKRVLGESGEMDALKIQMEEKFMAANPSKISYEPITTTLRRKHEEVSAMVIQRAFRRHLLQRSLKHASFLFRQQAGSGLSEEDAPEREGLIAYVMSENFSRPLGPPSSSSISSTSFPPSYDSVTRATSDNLQVRGSDYSHSEDLADFPPSPDRDRESIV

SEQ ID NO: 80247 - protein, 1962 aa, Homo sapiens
  Payload ID: 15998
  Gene Symbol: SCN5A
  Gene Name: sodium channel, voltage gated, type V alpha subunit
  ENSP ID: ENSP00000413996
MANFLLPRGTSSFRRFTRESLAAIEKRMAEKQARGSTTLQESREGLPEEEAPRPQLDLQASKKLPDLYGNPPQELIGEPLEDLDPFYSTQKTFIVLNKGKTIFRFSATNALYVLSPFHPIRRAAVKILVHSLFNMLIMCTILTNCVFMAQHDPPPWTKYVEYTFTAIYTFESLVKILARGFCLHAFTFLRDPWNWLDFSVIIMAYTTEFVDLGNVSALRTFRVLRALKTISVISGLKTIVGALIQSVKKLADVMVLTVFCLSVFALIGLQLFMGNLRHKCVRNFTALNGTNGSVEADGLVWESLDLYLSDPENYLLKNGTSDVLLCGNSSDAGTCPEGYRCLKAGENPDHGYTSFDSFAWAFLALFRLMTQDCWERLYQQTLRSAGKIYMIFFMLVIFLGSFYLVNLILAVVAMAYEEQNQATIAETEEKEKRFQEAMEMLKKEHEALTIRGVDTVSRSSLEMSPLAPVNSHERRSKRRKRMSSGTEECGEDRLPKSDSEDGPRAMNHLSLTRGLSRTSMKPRSSRGSIFTFRRRDLGSEADFADDENSTAGESESHHTSLLVPWPLRRTSAQGQPSPGTSAPGHALHGKKNSTVDCNGVVSLLGAGDPEATSPGSHLLRPVMLEHPPDTTTPSEEPGGPQMLTSQAPCVDGFEEPGARQRALSAVSVLTSALEELEESRHKCPPCWNRLAQRYLIWECCPLWMSIKQGVKLVVMDPFTDLTITMCIVLNTLFMALEHYNMTSEFEEMLQVGNLVFTGIFTAEMTFKIIALDPYYYFQQGWNIFDSIIVILSLMELGLSRMSNLSVLRSFRLLRVFKLAKSWPTLNTLIKIIGNSVGALGNLTLVLAIIVFIFAVVGMQLFGKNYSELRDSDSGLLPRWHMMDFFHAFLIIFRILCGEWIETMWDCMEVSGQSLCLLVFLLVMVIGNLVVLNLFLALLLSSFSADNLTAPDEDREMNNLQLALARIQRGLRFVKRTTWDFCCGLLRQRPQKPAALAAQGQLPSCIATPYSPPPPETEKVPPTRKETRFEEGEQPGQGTPGDPEPVCVPIAVAESDTDDQEEDEENSLGTEEESSKQTPEDSCSEGSTADMTNTAELLEQIPDLGQDVKDPEDCFTEGCVRRCPCCAVDTTQAPGKVWWRLRKTCYHIVEHSWFETFIIFMILLSSGALAFEDIYLEERKTIKVLLEYADKMFTYVFVLEMLLKWVAYGFKKYFTNAWCWLDFLIVDVSLVSLVANTLGFAEMGPIKSLRTLRALRPLRALSRFEGMRVVVNALVGAIPSIMNVLLVCLIFWLIFSIMGVNLFAGKFGRCINQTEGDLPLNYTIVNNKSQCESLNLTGELYWTKVKVNFDNVGAGYLALLQVATFKGWMDIMYAAVDSRGYEEQPQWEYNLYMYIYFVIFIIFGSFFTLNLFIGVIIDNFNQQKKKLGGQDIFMTEEQKKYYNAMKKLGSKKPQKPIPRPLNKYQGFIFDIVTKQAFDVTIMFLICLNMVTMMVETDDQSPEKINILAKINLLFVAIFTGECIVKLAALRHYYFTNSWNIFDFVVVILSIVGTVLSDIIQKYFFSPTLFRVIRLARIGRILRLIRGAKGIRTLLFALMMSLPALFNIGLLLFLVMFIYSIFGMANFAYVKWEAGIDDMFNFQTFANSMLCLFQITTSAGWDGLLSPILNTGPPYCDPTLPNSNGSRGDCGSPAVGILFFTTYIIISFLIVVNMYIAIILENFSVATEESTEPLSEDDFDMFYEIWEKFDPEATQFIEYSVLSDFADALSEPLRIAKPNQISLINMDLPMVSGDRIHCMDILFAFTKRVLGESGEMDALKIQMEEKFMAANPSKISYEPITTTLRRKHEEVSAMVIQRAFRRHLLQRSLKHASFLFRQQAGSGLSEEDAPEREGLIAYVMSENFSRPLGPPSSSSISSTSFPPSYDSVTRATSDNLQVRGSDYSHSEDLADFPPSPDRDRESIV

SEQ ID NO: 80248 - protein, 1998 aa, Homo sapiens; identical to SEQ ID NO: 80243
  Payload ID: 15998
  Gene Symbol: SCN5A
  Gene Name: sodium channel, voltage gated, type V alpha subunit
  ENSP ID: ENSP00000416634

SEQ ID NO: 80249 - protein, 223 aa, Homo sapiens
  Payload ID: 15998
  Gene Symbol: SCN5A
  Gene Name: sodium channel, voltage gated, type V alpha subunit
  ENSP ID: ENSP00000479016
MANFLLPRGTSSFRRFTRESLAAIEKRMAEKQARGSTTLQESREGLPEEEAPRPQLDLQASKKLPDLYGNPPQELIGEPLEDLDPFYSTQKTFIVLNKGKTIFRFSATNALYVLSPFHPIRRAAVKILVHSLFNMLIMCTILTNCVFMAQHDPPPWTKYVEYTFTAIYTFESLVKILARGFCLHAFTFLRDPWNWLDFSVIIMAASVLGTLFFPMSIQATSTS

SEQ ID NO: 80250 - protein, 1682 aa, Homo sapiens
  Payload ID: 15999
  Gene Symbol: SCN7A
  Gene Name: sodium channel, voltage gated, type VII alpha subunit
  Uniprot ID: Q01118
  ENSP ID: ENSP00000386796
MLASPEPKGLVPFTKESFELIKQHIAKTHNEDHEEEDLKPTPDLEVGKKLPFIYGNLSQGMVSEPLEDVDPYYYKKKNTFIVLNKNRTIFRFNAASILCTLSPFNCIRRTTIKVLVHPFFQLFILISVLIDCVFMSLTNLPKWRPVLENTLLGIYTFEILVKLFARGVWAGSFSFLGDPWNWLDFSVTVFEVIIRYSPLDFIPTLQTARTLRILKIIPLNQGLKSLVGVLIHCLKQLIGVIILTLFFLSIFSLIGMGLFMGNLKHKCFRWPQENENETLHNRTGNPYYIRETENFYYLEGERYALLCGNRTDAGQCPEGYVCVKAGINPDQGFTNFDSFGWALFALFRLMAQDYPEVLYHQILYASGKVYMIFFVVVSFLFSFYMASLFLGILAMAYEEEKQRVGEISKKIEPKFQQTGKELQEGNETDEAKTIQIEMKKRSPISTDTSLDVLEDATLRHKEELEKSKKICPLYWYKFAKTFLIWNCSPCWLKLKEFVHRIIMAPFTDLFLIICIILNVCFLTLEHYPMSKQTNTLLNIGNLVFIGIFTAEMIFKIIAMHPYGYFQVGWNIFDSMIVFHGLIELCLANVAGMALLRLFRMLRIFKLGKYWPTFQILMWSLSNSWVALKDLVLLLFTFIFFSAAFGMKLFGKNYEEFVCHIDKDCQLPRWHMHDFFHSFLNVFRILCGEWVETLWDCMEVAGQSWCIPFYLMVILIGNLLVLYLFLALVSSFSSCKDVTAEENNEAKNLQLAVARIKKGINYVLLKILCKTQNVPKDTMDHVNEVYVKEDISDHTLSELSNTQDFLKDKEKSSGTEKNATENESQSLIPSPSVSETVPIASGESDIENLDNKEIQSKSGDGGSKEKIKQSSSSECSTVDIAISEEEEMFYGGERSKHLKNGCRRGSSLGQISGASKKGKIWQNIRKTCCKIVENNWFKCFIGLVTLLSTGTLAFEDIYMDQRKTIKILLEYADMIFTYIFILEMLLKWMAYGFKAYFSNGWYRLDFVVVIVFCLSLIGKTREELKPLISMKFLRPLRVLSQFERMKVVVRALIKTTLPTLNVFLVCLMIWLIFSIMGVDLFAGRFYECIDPTSGERFPSSEVMNKSRCESLLFNESMLWENAKMNFDNVGNGFLSLLQVATFNGWITIMNSAIDSVAVNIQPHFEVNIYMYCYFINFIIFGVFLPLSMLITVIIDNFNKHKIKLGGSNIFITVKQRKQYRRLKKLMYEDSQRPVPRPLNKLQGFIFDVVTSQAFNVIVMVLICFQAIAMMIDTDVQSLQMSIALYWINSIFVMLYTMECILKLIAFRCFYFTIAWNIFDFMVVIFSITGLCLPMTVGSYLVPPSLVQLILLSRIIHMLRLGKGPKVFHNLMLPLMLSLPALLNIILLIFLVMFIYAVFGMYNFAYVKKEAGINDVSNFETFGNSMLCLFQVAIFAGWDGMLDAIFNSKWSDCDPDKINPGTQVRGDCGNPSVGIFYFVSYILISWLIIVNMYIVVVMEFLNIASKKKNKTLSEDDFRKFFQVWKRFDPDRTQYIDSSKLSDFAAALDPPLFMAKPNKGQLIALDLPMAVGDRIHCLDILLAFTKRVMGQDVRMEKVVSEIESGFLLANPFKITCEPITTTLKRKQEAVSATIIQRAYKNYRLRRNDKNTSDIHMIDGDRDVHATKEGAYFDKAKEKSPIQSQI

SEQ ID NO: 80251 - protein, 762 aa, Homo sapiens
  Payload ID: 15999
  Gene Symbol: SCN7A
  Gene Name: sodium channel, voltage gated, type VII alpha subunit
  ENSP ID: ENSP00000396600
MLASPEPKGLVPFTKESFELIKQHIAKTHNEDHEEEDLKPTPDLEVGKKLPFIYGNLSQGMVSEPLEDVDPYYYKKKNTFIVLNKNRTIFRFNAASILCTLSPFNCIRRTTIKVLVHPFFQLFILISVLIDCVFMSLTNLPKWRPVLENTLLGIYTFEILVKLFARGVWAGSFSFLGDPWNWLDFSVTVFEVIIRYSPLDFIPTLQTARTLRILKIIPLNQGLKSLVGVLIHCLKQLIGVIILTLFFLSIFSLIGMGLFMGNLKHKCFRWPQENENETLHNRTGNPYYIRETENFYYLEGERYALLCGNRTDAGQCPEGYVCVKAGINPDQGFTNFDSFGWALFALFRLMAQDYPEVLYHQILYASGKVYMIFFVVVSFLFSFYMASLFLGILAMAYEEEKQRVGEISKKIEPKFQQTGKELQEGNETDEAKTIQIEMKKRSPISTDTSLDVLEDATLRHKEELEKSKKICPLYWYKFAKTFLIWNCSPCWLKLKEFVHRIIMAPFTDLFLIICIILNVCFLTLEHYPMSKQTNTLLNIGNLVFIGIFTAEMIFKIIAMHPYGYFQVGWNIFDSMIVFHGLIELCLANVAGMALLRLFRMLRIFKLGKYWPTFQILMWSLSNSWVALKDLVLLLFTFIFFSAAFGMKLFGKNYEEFVCHIDKDCQLPRWHMHDFFHSFLNVFRILCGEWVETLWDCMEVAGQSWCIPFYLMVILIGNLLGLGGLRKLTITVEEEAGMSFTLQQQGEVQSEGTLPVSGIGELI

SEQ ID NO: 80252 - protein, 402 aa, Homo sapiens
  Payload ID: 15999
  Gene Symbol: SCN7A
  Gene Name: sodium channel, voltage gated, type VII alpha subunit
  ENSP ID: ENSP00000403846
MLASPEPKGLVPFTKESFELIKQHIAKTHNEDHEEEDLKPTPDLEVGKKLPFIYGNLSQGMVSEPLEDVDPYYYKKKNTFIVLNKNRTIFRFNAASILCTLSPFNCIRRTTIKVLVHPFFQLFILISVLIDCVFMSLTNLPKWRPVLENTLLGIYTFEILVKLFARGVWAGSFSFLGDPWNWLDFSVTVFEVIIRYSPLDFIPTLQTARTLRILKIIPLNQGLKSLVGVLIHCLKQLIGVIILTLFFLSIFSLIGMGLFMGNLKHKCFRWPQENENETLHNRTGNPYYIRETENFYYLEGERYALLCGNRTDAGQCPEGYVCVKAGINPDQGFTNFDSFGWALFALFRLMAQDYPEVLYHQILYASGKVYMIFFVVVSFLFSFYMASLFLGILAMAYEEEKQ

SEQ ID NO: 80253 - protein, 863 aa, Homo sapiens
  Payload ID: 15999
  Gene Symbol: SCN7A
  Gene Name: sodium channel, voltage gated, type VII alpha subunit
  ENSP ID: ENSP00000413699
MLASPEPKGLVPFTKESFELIKQHIAKTHNEDHEEEDLKPTPDLEVGKKLPFIYGNLSQGMVSEPLEDVDPYYYKKKNTFIVLNKNRTIFRFNAASILCTLSPFNCIRRTTIKVLVHPFFQLFILISVLIDCVFMSLTNLPKWRPVLENTLLGIYTFEILVKLFARGVWAGSFSFLGDPWNWLDFSVTVFEVIIRYSPLDFIPTLQTARTLRILKIIPLNQGLKSLVGVLIHCLKQLIGVIILTLFFLSIFSLIGMGLFMGNLKHKCFRWPQENENETLHNRTGNPYYIRETENFYYLEGERYALLCGNRTDAGQCPEGYVCVKAGINPDQGFTNFDSFGWALFALFRLMAQDYPEVLYHQILYASGKVYMIFFVVVSFLFSFYMASLFLGILAMAYEEEKQRVGEISKKIEPKFQQTGKELQEGNETDEAKTIQIEMKKRSPISTDTSLDVLEDATLRHKEELEKSKKICPLYWYKFAKTFLIWNCSPCWLKLKEFVHRIIMAPFTDLFLIICIILNVCFLTLEHYPMSKQTNTLLNIGNLVFIGIFTAEMIFKIIAMHPYGYFQVGWNIFDSMIVFHGLIELCLANVAGMALLRLFRMLRIFKLGKYWPTFQILMWSLSNSWVALKDLVLLLFTFIFFSAAFGMKLFGKNYEEFVCHIDKDCQLPRWHMHDFFHSFLNVFRILCGEWVETLWDCMEVAGQSWCIPFYLMVILIGNLLVLYLFLALVSSFSSCKDVTAEENNEAKNLQLAVARIKKGINYVLLKILCKTQNVPKDTMDHVNEVYVKEDISDHTLSELSNTQDFLKDKEKSSGTEKNATENESQSLIPSPSVSETVPIASGESDIENLDNKEIQSKSGDGGSK

SEQ ID NO: 80254 - protein, 1682 aa, Homo sapiens; identical to SEQ ID NO: 80250
  Payload ID: 15999
  Gene Symbol: SCN7A
  Gene Name: sodium channel, voltage gated, type VII alpha subunit
  Uniprot ID: Q01118
  ENSP ID: ENSP00000478562

SEQ ID NO: 80255 - protein, 1682 aa, Homo sapiens; identical to SEQ ID NO: 80250
  Payload ID: 15999
  Gene Symbol: SCN7A
  Gene Name: sodium channel, voltage gated, type VII alpha subunit
  Uniprot ID: Q01118
  ENSP ID: ENSP00000481734

SEQ ID NO: 80256 - protein, 1980 aa, Homo sapiens
  Payload ID: 16000
  Gene Symbol: SCN8A
  Gene Name: sodium channel, voltage gated, type VIII alpha subunit
  Uniprot ID: Q9UQD0
  ENSP ID: ENSP00000346534
MAARLLAPPGPDSFKPFTPESLANIERRIAESKLKKPPKADGSHREDDEDSKPKPNSDLEAGKSLPFIYGDIPQGLVAVPLEDFDPYYLTQKTFVVLNRGKTLFRFSATPALYILSPFNLIRRIAIKILIHSVFSMIIMCTILTNCVFMTFSNPPDWSKNVEYTFTGIYTFESLVKIIARGFCIDGFTFLRDPWNWLDFSVIMMAYITEFVNLGNVSALRTFRVLRALKTISVIPGLKTIVGALIQSVKKLSDVMILTVFCLSVFALIGLQLFMGNLRNKCVVWPINFNESYLENGTKGFDWEEYINNKTNFYTVPGMLEPLLCGNSSDAGQCPEGYQCMKAGRNPNYGYTSFDTFSWAFLALFRLMTQDYWENLYQLTLRAAGKTYMIFFVLVIFVGSFYLVNLILAVVAMAYEEQNQATLEEAEQKEAEFKAMLEQLKKQQEEAQAAAMATSAGTVSEDAIEEEGEEGGGSPRSSSEISKLSSKSAKERRNRRKKRKQKELSEGEEKGDPEKVFKSESEDGMRRKAFRLPDNRIGRKFSIMNQSLLSIPGSPFLSRHNSKSSIFSFRGPGRFRDPGSENEFADDEHSTVEESEGRRDSLFIPIRARERRSSYSGYSGYSQGSRSSRIFPSLRRSVKRNSTVDCNGVVSLIGGPGSHIGGRLLPEATTEVEIKKKGPGSLLVSMDQLASYGRKDRINSIMSVVTNTLVEELEESQRKCPPCWYKFANTFLIWECHPYWIKLKEIVNLIVMDPFVDLAITICIVLNTLFMAMEHHPMTPQFEHVLAVGNLVFTGIFTAEMFLKLIAMDPYYYFQEGWNIFDGFIVSLSLMELSLADVEGLSVLRSFRLLRVFKLAKSWPTLNMLIKIIGNSVGALGNLTLVLAIIVFIFAVVGMQLFGKSYKECVCKINQDCELPRWHMHDFFHSFLIVFRVLCGEWIETMWDCMEVAGQAMCLIVFMMVMVIGNLVVLNLFLALLLSSFSADNLAATDDDGEMNNLQISVIRIKKGVAWTKLKVHAFMQAHFKQREADEVKPLDELYEKKANCIANHTGADIHRNGDFQKNGNGTTSGIGSSVEKYIIDEDHMSFINNPNLTVRVPIAVGESDFENLNTEDVSSESDPEGSKDKLDDTSSSEGSTIDIKPEVEEVPVEQPEEYLDPDACFTEGCVQRFKCCQVNIEEGLGKSWWILRKTCFLIVEHNWFETFIIFMILLSSGALAFEDIYIEQRKTIRTILEYADKVFTYIFILEMLLKWTAYGFVKFFTNAWCWLDFLIVAVSLVSLIANALGYSELGAIKSLRTLRALRPLRALSRFEGMRVVVNALVGAIPSIMNVLLVCLIFWLIFSIMGVNLFAGKYHYCFNETSEIRFEIEDVNNKTECEKLMEGNNTEIRWKNVKINFDNVGAGYLALLQVATFKGWMDIMYAAVDSRKPDEQPKYEDNIYMYIYFVIFIIFGSFFTLNLFIGVIIDNFNQQKKKFGGQDIFMTEEQKKYYNAMKKLGSKKPQKPIPRPLNKIQGIVFDFVTQQAFDIVIMMLICLNMVTMMVETDTQSKQMENILYWINLVFVIFFTCECVLKMFALRHYYFTIGWNIFDFVVVILSIVGMFLADIIEKYFVSPTLFRVIRLARIGRILRLIKGAKGIRTLLFALMMSLPALFNIGLLLFLVMFIFSIFGMSNFAYVKHEAGIDDMFNFETFGNSMICLFQITTSAGWDGLLLPILNRPPDCSLDKEHPGSGFKGDCGNPSVGIFFFVSYIIISFLIVVNMYIAIILENFSVATEESADPLSEDDFETFYEIWEKFDPDATQFIEYCKLADFADALEHPLRVPKPNTIELIAMDLPMVSGDRIHCLDILFAFTKRVLGDSGELDILRQQMEERFVASNPSKVSYEPITTTLRRKQEEVSAVVLQRAYRGHLARRGFICKKTTSNKLENGGTHREKKESTPSTASLPSYDSVTKPEKEKQQRAEEGRRERAKRQKEVRESKC

SEQ ID NO: 80257 - protein, 1939 aa, Homo sapiens
  Payload ID: 16000
  Gene Symbol: SCN8A
  Gene Name: sodium channel, voltage gated, type VIII alpha subunit
  Uniprot ID: Q9UQD0
  ENSP ID: ENSP00000347255
MAARLLAPPGPDSFKPFTPESLANIERRIAESKLKKPPKADGSHREDDEDSKPKPNSDLEAGKSLPFIYGDIPQGLVAVPLEDFDPYYLTQKTFVVLNRGKTLFRFSATPALYILSPFNLIRRIAIKILIHSVFSMIIMCTILTNCVFMTFSNPPDWSKNVEYTFTGIYTFESLVKIIARGFCIDGFTFLRDPWNWLDFSVIMMAYITEFVNLGNVSALRTFRVLRALKTISVIPGLKTIVGALIQSVKKLSDVMILTVFCLSVFALIGLQLFMGNLRNKCVVWPINFNESYLENGTKGFDWEEYINNKTNFYTVPGMLEPLLCGNSSDAGQCPEGYQCMKAGRNPNYGYTSFDTFSWAFLALFRLMTQDYWENLYQLTLRAAGKTYMIFFVLVIFVGSFYLVNLILAVVAMAYEEQNQATLEEAEQKEAEFKAMLEQLKKQQEEAQAAAMATSAGTVSEDAIEEEGEEGGGSPRSSSEISKLSSKSAKERRNRRKKRKQKELSEGEEKGDPEKVFKSESEDGMRRKAFRLPDNRIGRKFSIMNQSLLSIPGSPFLSRHNSKSSIFSFRGPGRFRDPGSENEFADDEHSTVEESEGRRDSLFIPIRARERRSSYSGYSGYSQGSRSSRIFPSLRRSVKRNSTVDCNGVVSLIGGPGSHIGGRLLPEATTEVEIKKKGPGSLLVSMDQLASYGRKDRINSIMSVVTNTLVEELEESQRKCPPCWYKFANTFLIWECHPYWIKLKEIVNLIVMDPFVDLAITICIVLNTLFMAMEHHPMTPQFEHVLAVGNLVFTGIFTAEMFLKLIAMDPYYYFQEGWNIFDGFIVSLSLMELSLADVEGLSVLRSFRLLRVFKLAKSWPTLNMLIKIIGNSVGALGNLTLVLAIIVFIFAVVGMQLFGKSYKECVCKINQDCELPRWHMHDFFHSFLIVFRVLCGEWIETMWDCMEVAGQAMCLIVFMMVMVIGNLVVLNLFLALLLSSFSADNLAATDDDGEMNNLQISVIRIKKGVAWTKLKVHAFMQAHFKQREADEVKPLDELYEKKANCIANHTGADIHRNGDFQKNGNGTTSGIGSSVEKYIIDEDHMSFINNPNLTVRVPIAVGESDFENLNTEDVSSESDPEGSKDKLDDTSSSEGSTIDIKPEVEEVPVEQPEEYLDPDACFTEGCVQRFKCCQVNIEEGLGKSWWILRKTCFLIVEHNWFETFIIFMILLSSGALAFEDIYIEQRKTIRTILEYADKVFTYIFILEMLLKWTAYGFVKFFTNAWCWLDFLIVAVVVNALVGAIPSIMNVLLVCLIFWLIFSIMGVNLFAGKYHYCFNETSEIRFEIEDVNNKTECEKLMEGNNTEIRWKNVKINFDNVGAGYLALLQVATFKGWMDIMYAAVDSRKPDEQPKYEDNIYMYIYFVIFIIFGSFFTLNLFIGVIIDNFNQQKKKFGGQDIFMTEEQKKYYNAMKKLGSKKPQKPIPRPLNKIQGIVFDFVTQQAFDIVIMMLICLNMVTMMVETDTQSKQMENILYWINLVFVIFFTCECVLKMFALRHYYFTIGWNIFDFVVVILSIVGMFLADIIEKYFVSPTLFRVIRLARIGRILRLIKGAKGIRTLLFALMMSLPALFNIGLLLFLVMFIFSIFGMSNFAYVKHEAGIDDMFNFETFGNSMICLFQITTSAGWDGLLLPILNRPPDCSLDKEHPGSGFKGDCGNPSVGIFFFVSYIIISFLIVVNMYIAIILENFSVATEESADPLSEDDFETFYEIWEKFDPDATQFIEYCKLADFADALEHPLRVPKPNTIELIAMDLPMVSGDRIHCLDILFAFTKRVLGDSGELDILRQQMEERFVASNPSKVSYEPITTTLRRKQEEVSAVVLQRAYRGHLARRGFICKKTTSNKLENGGTHREKKESTPSTASLPSYDSVTKPEKEKQQRAEEGRRERAKRQKEVRESKC

SEQ ID NO: 80258 - protein, 1939 aa, Homo sapiens; identical to SEQ ID NO: 80257
  Payload ID: 16000
  Gene Symbol: SCN8A
  Gene Name: sodium channel, voltage gated, type VIII alpha subunit
  Uniprot ID: Q9UQD0
  ENSP ID: ENSP00000440360

SEQ ID NO: 80259 - protein, 542 aa, Homo sapiens
  Payload ID: 16000
  Gene Symbol: SCN8A
  Gene Name: sodium channel, voltage gated, type VIII alpha subunit
  ENSP ID: ENSP00000447567
FSNPPDWSKNVEYTFTGIYTFESLVKIIARGFCIDGFTFLRDPWNWLDFSVIMMAYVTEFVDLGNVSALRTFRVLRALKTISVIPGLKTIVGALIQSVKKLSDVMILTVFCLSVFALIGLQLFMGNLRNKCVVWPINFNESYLENGTKGFDWEEYINNKTNFYTVPGMLEPLLCGNSSDAGQCPEGYQCMKAGRNPNYGYTSFDTFSWAFLALFRLMTQDYWENLYQLTLRAAGKTYMIFFVLVIFVGSFYLVNLILAVVAMAYEEQNQATLEEAEQKEAEFKAMLEQLKKQQEEAQAAAMATSAGTVSEDAIEEEGEEGGGSPRSSSEISKLSSKSAKERRNRRKKRKQKELSEGEEKGDPEKVFKSESEDGMRRKAFRLPDNRIGRKFSIMNQSLLSIPGSPFLSRHNSKSSIFSFRGPGRFRDPGSENEFADDEHSTVEESEGRRDSLFIPIRARERRSSYSGYSGYSQGSRSSRIFPSLRRSVKRNSTVDCNGVVSLIGGPGSHIGGRLLPEVKIDKAATDDSATTEVEIKKKGPGSL

SEQ ID NO: 80260 - protein, 1991 aa, Homo sapiens
  Payload ID: 16000
  Gene Symbol: SCN8A
  Gene Name: sodium channel, voltage gated, type VIII alpha subunit
  Uniprot ID: Q9UQD0
  ENSP ID: ENSP00000476447
MAARLLAPPGPDSFKPFTPESLANIERRIAESKLKKPPKADGSHREDDEDSKPKPNSDLEAGKSLPFIYGDIPQGLVAVPLEDFDPYYLTQKTFVVLNRGKTLFRFSATPALYILSPFNLIRRIAIKILIHSVFSMIIMCTILTNCVFMTFSNPPDWSKNVEYTFTGIYTFESLVKIIARGFCIDGFTFLRDPWNWLDFSVIMMAYITEFVNLGNVSALRTFRVLRALKTISVIPGLKTIVGALIQSVKKLSDVMILTVFCLSVFALIGLQLFMGNLRNKCVVWPINFNESYLENGTKGFDWEEYINNKTNFYTVPGMLEPLLCGNSSDAGQCPEGYQCMKAGRNPNYGYTSFDTFSWAFLALFRLMTQDYWENLYQLTLRAAGKTYMIFFVLVIFVGSFYLVNLILAVVAMAYEEQNQATLEEAEQKEAEFKAMLEQLKKQQEEAQAAAMATSAGTVSEDAIEEEGEEGGGSPRSSSEISKLSSKSAKERRNRRKKRKQKELSEGEEKGDPEKVFKSESEDGMRRKAFRLPDNRIGRKFSIMNQSLLSIPGSPFLSRHNSKSSIFSFRGPGRFRDPGSENEFADDEHSTVEESEGRRDSLFIPIRARERRSSYSGYSGYSQGSRSSRIFPSLRRSVKRNSTVDCNGVVSLIGGPGSHIGGRLLPEVKIDKAATDDSATTEVEIKKKGPGSLLVSMDQLASYGRKDRINSIMSVVTNTLVEELEESQRKCPPCWYKFANTFLIWECHPYWIKLKEIVNLIVMDPFVDLAITICIVLNTLFMAMEHHPMTPQFEHVLAVGNLVFTGIFTAEMFLKLIAMDPYYYFQEGWNIFDGFIVSLSLMELSLADVEGLSVLRSFRLLRVFKLAKSWPTLNMLIKIIGNSVGALGNLTLVLAIIVFIFAVVGMQLFGKSYKECVCKINQDCELPRWHMHDFFHSFLIVFRVLCGEWIETMWDCMEVAGQAMCLIVFMMVMVIGNLVVLNLFLALLLSSFSADNLAATDDDGEMNNLQISVIRIKKGVAWTKLKVHAFMQAHFKQREADEVKPLDELYEKKANCIANHTGADIHRNGDFQKNGNGTTSGIGSSVEKYIIDEDHMSFINNPNLTVRVPIAVGESDFENLNTEDVSSESDPEGSKDKLDDTSSSEGSTIDIKPEVEEVPVEQPEEYLDPDACFTEGCVQRFKCCQVNIEEGLGKSWWILRKTCFLIVEHNWFETFIIFMILLSSGALAFEDIYIEQRKTIRTILEYADKVFTYIFILEMLLKWTAYGFVKFFTNAWCWLDFLIVAVSLVSLIANALGYSELGAIKSLRTLRALRPLRALSRFEGMRVVVNALVGAIPSIMNVLLVCLIFWLIFSIMGVNLFAGKYHYCFNETSEIRFEIEDVNNKTECEKLMEGNNTEIRWKNVKINFDNVGAGYLALLQVATFKGWMDIMYAAVDSRKPDEQPKYEDNIYMYIYFVIFIIFGSFFTLNLFIGVIIDNFNQQKKKFGGQDIFMTEEQKKYYNAMKKLGSKKPQKPIPRPLNKIQGIVFDFVTQQAFDIVIMMLICLNMVTMMVETDTQSKQMENILYWINLVFVIFFTCECVLKMFALRHYYFTIGWNIFDFVVVILSIVGMFLADIIEKYFVSPTLFRVIRLARIGRILRLIKGAKGIRTLLFALMMSLPALFNIGLLLFLVMFIFSIFGMSNFAYVKHEAGIDDMFNFETFGNSMICLFQITTSAGWDGLLLPILNRPPDCSLDKEHPGSGFKGDCGNPSVGIFFFVSYIIISFLIVVNMYIAIILENFSVATEESADPLSEDDFETFYEIWEKFDPDATQFIEYCKLADFADALEHPLRVPKPNTIELIAMDLPMVSGDRIHCLDILFAFTKRVLGDSGELDILRQQMEERFVASNPSKVSYEPITTTLRRKQEEVSAVVLQRAYRGHLARRGFICKKTTSNKLENGGTHREKKESTPSTASLPSYDSVTKPEKEKQQRAEEGRRERAKRQKEVRESKC

SEQ ID NO: 80261 - protein, 1 aa, Homo sapiens
  Payload ID: 16000
  Gene Symbol: SCN8A
  Gene Name: sodium channel, voltage gated, type VIII alpha subunit
  ENSP ID: ENSP00000486828
M

SEQ ID NO: 80262 - protein, 1980 aa, Homo sapiens
  Payload ID: 16000
  Gene Symbol: SCN8A
  Gene Name: sodium channel, voltage gated, type VIII alpha subunit
  Uniprot ID: Q9UQD0
  ENSP ID: ENSP00000487583
MAARLLAPPGPDSFKPFTPESLANIERRIAESKLKKPPKADGSHREDDEDSKPKPNSDLEAGKSLPFIYGDIPQGLVAVPLEDFDPYYLTQKTFVVLNRGKTLFRFSATPALYILSPFNLIRRIAIKILIHSVFSMIIMCTILTNCVFMTFSNPPDWSKNVEYTFTGIYTFESLVKIIARGFCIDGFTFLRDPWNWLDFSVIMMAYVTEFVDLGNVSALRTFRVLRALKTISVIPGLKTIVGALIQSVKKLSDVMILTVFCLSVFALIGLQLFMGNLRNKCVVWPINFNESYLENGTKGFDWEEYINNKTNFYTVPGMLEPLLCGNSSDAGQCPEGYQCMKAGRNPNYGYTSFDTFSWAFLALFRLMTQDYWENLYQLTLRAAGKTYMIFFVLVIFVGSFYLVNLILAVVAMAYEEQNQATLEEAEQKEAEFKAMLEQLKKQQEEAQAAAMATSAGTVSEDAIEEEGEEGGGSPRSSSEISKLSSKSAKERRNRRKKRKQKELSEGEEKGDPEKVFKSESEDGMRRKAFRLPDNRIGRKFSIMNQSLLSIPGSPFLSRHNSKSSIFSFRGPGRFRDPGSENEFADDEHSTVEESEGRRDSLFIPIRARERRSSYSGYSGYSQGSRSSRIFPSLRRSVKRNSTVDCNGVVSLIGGPGSHIGGRLLPEATTEVEIKKKGPGSLLVSMDQLASYGRKDRINSIMSVVTNTLVEELEESQRKCPPCWYKFANTFLIWECHPYWIKLKEIVNLIVMDPFVDLAITICIVLNTLFMAMEHHPMTPQFEHVLAVGNLVFTGIFTAEMFLKLIAMDPYYYFQEGWNIFDGFIVSLSLMELSLADVEGLSVLRSFRLLRVFKLAKSWPTLNMLIKIIGNSVGALGNLTLVLAIIVFIFAVVGMQLFGKSYKECVCKINQDCELPRWHMHDFFHSFLIVFRVLCGEWIETMWDCMEVAGQAMCLIVFMMVMVIGNLVVLNLFLALLLSSFSADNLAATDDDGEMNNLQISVIRIKKGVAWTKLKVHAFMQAHFKQREADEVKPLDELYEKKANCIANHTGADIHRNGDFQKNGNGTTSGIGSSVEKYIIDEDHMSFINNPNLTVRVPIAVGESDFENLNTEDVSSESDPEGSKDKLDDTSSSEGSTIDIKPEVEEVPVEQPEEYLDPDACFTEGCVQRFKCCQVNIEEGLGKSWWILRKTCFLIVEHNWFETFIIFMILLSSGALAFEDIYIEQRKTIRTILEYADKVFTYIFILEMLLKWTAYGFVKFFTNAWCWLDFLIVAVSLVSLIANALGYSELGAIKSLRTLRALRPLRALSRFEGMRVVVNALVGAIPSIMNVLLVCLIFWLIFSIMGVNLFAGKYHYCFNETSEIRFEIEDVNNKTECEKLMEGNNTEIRWKNVKINFDNVGAGYLALLQVATFKGWMDIMYAAVDSRKPDEQPKYEDNIYMYIYFVIFIIFGSFFTLNLFIGVIIDNFNQQKKKFGGQDIFMTEEQKKYYNAMKKLGSKKPQKPIPRPLNKIQGIVFDFVTQQAFDIVIMMLICLNMVTMMVETDTQSKQMENILYWINLVFVIFFTCECVLKMFALRHYYFTIGWNIFDFVVVILSIVGMFLADIIEKYFVSPTLFRVIRLARIGRILRLIKGAKGIRTLLFALMMSLPALFNIGLLLFLVMFIFSIFGMSNFAYVKHEAGIDDMFNFETFGNSMICLFQITTSAGWDGLLLPILNRPPDCSLDKEHPGSGFKGDCGNPSVGIFFFVSYIIISFLIVVNMYIAIILENFSVATEESADPLSEDDFETFYEIWEKFDPDATQFIEYCKLADFADALEHPLRVPKPNTIELIAMDLPMVSGDRIHCLDILFAFTKRVLGDSGELDILRQQMEERFVASNPSKVSYEPITTTLRRKQEEVSAVVLQRAYRGHLARRGFICKKTTSNKLENGGTHREKKESTPSTASLPSYDSVTKPEKEKQQRAEEGRRERAKRQKEVRESKC

SEQ ID NO: 80263 - protein, 1956 aa, Homo sapiens
  Payload ID: 16001
  Gene Symbol: SCN10A
  Gene Name: sodium channel, voltage gated, type X alpha subunit
  Uniprot ID: Q9Y5Y9
  ENSP ID: ENSP00000390600
MEFPIGSLETNNFRRFTPESLVEIEKQIAAKQGTKKAREKHREQKDQEEKPRPQLDLKACNQLPKFYGELPAELIGEPLEDLDPFYSTHRTFMVLNKGRTISRFSATRALWLFSPFNLIRRTAIKVSVHSWFSLFITVTILVNCVCMTRTDLPEKIEYVFTVIYTFEALIKILARGFCLNEFTYLRDPWNWLDFSVITLAYVGTAIDLRGISGLRTFRVLRALKTVSVIPGLKVIVGALIHSVKKLADVTILTIFCLSVFALVGLQLFKGNLKNKCVKNDMAVNETTNYSSHRKPDIYINKRGTSDPLLCGNGSDSGHCPDGYICLKTSDNPDFNYTSFDSFAWAFLSLFRLMTQDSWERLYQQTLRTSGKIYMIFFVLVIFLGSFYLVNLILAVVTMAYEEQNQATTDEIEAKEKKFQEALEMLRKEQEVLAALGIDTTSLHSHNGSPLTSKNASERRHRIKPRVSEGSTEDNKSPRSDPYNQRRMSFLGLASGKRRASHGSVFHFRSPGRDISLPEGVTDDGVFPGDHESHRGSLLLGGGAGQQGPLPRSPLPQPSNPDSRHGEDEHQPPPTSELAPGAVDVSAFDAGQKKTFLSAEYLDEPFRAQRAMSVVSIITSVLEELEESEQKCPPCLTSLSQKYLIWDCCPMWVKLKTILFGLVTDPFAELTITLCIVVNTIFMAMEHHGMSPTFEAMLQIGNIVFTIFFTAEMVFKIIAFDPYYYFQKKWNIFDCIIVTVSLLELGVAKKGSLSVLRSFRLLRVFKLAKSWPTLNTLIKIIGNSVGALGNLTIILAIIVFVFALVGKQLLGENYRNNRKNISAPHEDWPRWHMHDFFHSFLIVFRILCGEWIENMWACMEVGQKSICLILFLTVMVLGNLVVLNLFIALLLNSFSADNLTAPEDDGEVNNLQVALARIQVFGHRTKQALCSFFSRSCPFPQPKAEPELVVKLPLSSSKAENHIAANTARGSSGGLQAPRGPRDEHSDFIANPTVWVSVPIAEGESDLDDLEDDGGEDAQSFQQEVIPKGQQEQLQQVERCGDHLTPRSPGTGTSSEDLAPSLGETWKDESVPQVPAEGVDDTSSSEGSTVDCLDPEEILRKIPELADDLEEPDDCFTEGCIRHCPCCKLDTTKSPWDVGWQVRKTCYRIVEHSWFESFIIFMILLSSGSLAFEDYYLDQKPTVKALLEYTDRVFTFIFVFEMLLKWVAYGFKKYFTNAWCWLDFLIVNISLISLTAKILEYSEVAPIKALRTLRALRPLRALSRFEGMRVVVDALVGAIPSIMNVLLVCLIFWLIFSIMGVNLFAGKFWRCINYTDGEFSLVPLSIVNNKSDCKIQNSTGSFFWVNVKVNFDNVAMGYLALLQVATFKGWMDIMYAAVDSREVNMQPKWEDNVYMYLYFVIFIIFGGFFTLNLFVGVIIDNFNQQKKKLGGQDIFMTEEQKKYYNAMKKLGSKKPQKPIPRPLNKFQGFVFDIVTRQAFDITIMVLICLNMITMMVETDDQSEEKTKILGKINQFFVAVFTGECVMKMFALRQYYFTNGWNVFDFIVVVLSIASLIFSAILKSLQSYFSPTLFRVIRLARIGRILRLIRAAKGIRTLLFALMMSLPALFNIGLLLFLVMFIYSIFGMSSFPHVRWEAGIDDMFNFQTFANSMLCLFQITTSAGWDGLLSPILNTGPPYCDPNLPNSNGTRGDCGSPAVGIIFFTTYIIISFLIMVNMYIAVILENFNVATEESTEPLSEDDFDMFYETWEKFDPEATQFITFSALSDFADTLSGPLRIPKPNRNILIQMDLPLVPGDKIHCLDILFAFTKNVLGESGELDSLKANMEEKFMATNLSKSSYEPIATTLRWKQEDISATVIQKAYRSYVLHRSMALSNTPCVPRAEEEAASLPDEGFVAFTANENCVLPDKSETASATSFPPSYESVTRGLSDRVNMRTSSSIQNEDEATSMELIAPGP

SEQ ID NO: 80264 - protein, 1791 aa, Homo sapiens
  Payload ID: 16002
  Gene Symbol: SCN11A
  Gene Name: sodium channel, voltage gated, type XI alpha subunit
  Uniprot ID: Q9UI33
  ENSP ID: ENSP00000307599
MDDRCYPVIFPDERNFRPFTSDSLAAIEKRIAIQKEKKKSKDQTGEVPQPRPQLDLKASRKLPKLYGDIPRELIGKPLEDLDPFYRNHKTFMVLNRKRTIYRFSAKHALFIFGPFNSIRSLAIRVSVHSLFSMFIIGTVIINCVFMATGPAKNSNSNNTDIAECVFTGIYIFEALIKILARGFILDEFSFLRDPWNWLDSIVIGIAIVSYIPGITIKLLPLRTFRVFRALKAISVVSRLKVIVGALLRSVKKLVNVIILTFFCLSIFALVGQQLFMGSLNLKCISRDCKNISNPEAYDHCFEKKENSPEFKMCGIWMGNSACSIQYECKHTKINPDYNYTNFDNFGWSFLAMFRLMTQDSWEKLYQQTLRTTGLYSVFFFIVVIFLGSFYLINLTLAVVTMAYEEQNKNVAAEIEAKEKMFQEAQQLLKEEKEALVAMGIDRSSLTSLETSYFTPKKRKLFGNKKRKSFFLRESGKDQPPGSDSDEDCQKKPQLLEQTKRLSQNLSLDHFDEHGDPLQRQRALSAVSILTITMKEQEKSQEPCLPCGENLASKYLVWNCCPQWLCVKKVLRTVMTDPFTELAITICIIINTVFLAMEHHKMEASFEKMLNIGNLVFTSIFIAEMCLKIIALDPYHYFRRGWNIFDSIVALLSFADVMNCVLQKRSWPFLRSFRVLRVFKLAKSWPTLNTLIKIIGNSVGALGSLTVVLVIVIFIFSVVGMQLFGRSFNSQKSPKLCNPTGPTVSCLRHWHMGDFWHSFLVVFRILCGEWIENMWECMQEANASSSLCVIVFILITVIGKLVVLNLFIALLLNSFSNEERNGNLEGEARKTKVQLALDRFRRAFCFVRHTLEHFCHKWCRKQNLPQQKEVAGGCAAQSKDIIPLVMEMKRGSETQEELGILTSVPKTLGVRHDWTWLAPLAEEEDDVEFSGEDNAQRITQPEPEQQAYELHQENKKPTSQRVQSVEIDMFSEDEPHLTIQDPRKKSDVTSILSECSTIDLQDGFGWLPEMVPKKQPERCLPKGFGCCFPCCSVDKRKPPWVIWWNLRKTCYQIVKHSWFESFIIFVILLSSGALIFEDVHLENQPKIQELLNCTDIIFTHIFILEMVLKWVAFGFGKYFTSAWCCLDFIIVIVSVTTLINLMELKSFRTLRALRPLRALSQFEGMKVVVNALIGAIPAILNVLLVCLIFWLVFCILGVYFFSGKFGKCINGTDSVINYTIITNKSQCESGNFSWINQKVNFDNVGNAYLALLQVATFKGWMDIIYAAVDSTEKEQQPEFESNSLGYIYFVVFIIFGSFFTLNLFIGVIIDNFNQQQKKLGGQDIFMTEEQKKYYNAMKKLGSKKPQKPIPRPLNKCQGLVFDIVTSQIFDIIIISLIILNMISMMAESYNQPKAMKSILDHLNWVFVVIFTLECLIKIFALRQYYFTNGWNLFDCVVVLLSIVSTMISTLENQEHIPFPPTLFRIVRLARIGRILRLVRAARGIRTLLFALMMSLPSLFNIGLLLFLIMFIYAILGMNWFSKVNPESGIDDIFNFKTFASSMLCLFQISTSAGWDSLLSPMLRSKESCNSSSENCHLPGIATSYFVSYIIISFLIVVNMYIAVILENFNTATEESEDPLGEDDFDIFYEVWEKFDPEATQFIKYSALSDFADALPEPLRVAKPNKYQFLVMDLPMVSEDRLHCMDILFAFTARVLGGSDGLDSMKAMMEEKFMEANPLKKLYEPIVTTTKRKEEERGAAIIQKAFRKYMMKVTKGDQGDQNDLENGPHSPLQTLCNGDLSSFGVAKGKVHCD

SEQ ID NO: 80265 - protein, 1444 aa, Homo sapiens
  Payload ID: 16002
  Gene Symbol: SCN11A
  Gene Name: sodium channel, voltage gated, type XI alpha subunit
  Uniprot ID: Q9UI33
  ENSP ID: ENSP00000408028
MDDRCYPVIFPDERNFRPFTSDSLAAIEKRIAIQKEKKKSKDQTGEVPQPRPQLDLKASRKLPKLYGDIPRELIGKPLEDLDPFYRNHKTFMVLNRKRTIYRFSAKHALFIFGPFNSIRSLAIRVSVHSLFSMFIIGTVIINCVFMATGPAKNSNSNNTDIAECVFTGIYIFEALIKILARGFILDEFSFLRDPWNWLDSIVIGIAIVSYIPGITIKLLPLRTFRVFRALKAISVVSRLKVIVGALLRSVKKLVNVIILTFFCLSIFALVGQQLFMGSLNLKCISRDCKNISNPEAYDHCFEKKENSPEFKMCGIWMGNSACSIQYECKHTKINPDYNYTNFDNFGWSFLAMFRLMTQDSWEKLYQQTLRTTGLYSVFFFIVVIFLGSFYLINLTLAVVTMAYEEQNKNVAAEIEAKEKMFQEAQQLLKEEKEALVAMGIDRSSLTSLETSYFTPKKRKLFGNKKRKSFFLRESGKDQPPGSDSDEDCQKKPQLLEQTKRLSQNLSLDHFDEHGDPLQRQRALSAVSILTITMKEQEKSQEPCLPCGENLASKYLVWNCCPQWLCVKKVLRTVMTDPFTELAITICIIINTVFLAMEHHKMEASFEKMLNIGNLVFTSIFIAEMCLKIIALDPYHYFRRGWNIFDSIVALLSFADVMNCVLQKRSWPFLRSFRVLRVFKLAKSWPTLNTLIKIIGNSVGALGSLTVVLVIVIFIFSVVGMQLFGRSFNSQKSPKLCNPTGPTVSCLRHWHMGDFWHSFLVVFRILCGEWIENMWECMQEANASSSLCVIVFILITVIGKLVVLNLFIALLLNSFSNEERNGNLEGEARKTKVQLALDRFRRAFCFVRHTLEHFCHKWCRKQNLPQQKEVAGGCAAQSKDIIPLVMEMKRGSETQEELGILTSVPKTLGVRHDWTWLAPLAEEEDDVEFSGEDNAQRITQPEPEQQAYELHQENKKPTSQRVQSVEIDMFSEDEPHLTIQDPRKKSDVTSILSECSTIDLQDGFGWLPEMVPKKQPERCLPKGFGCCFPCCSVDKRKPPWVIWWNLRKTCYQIVKHSWFESFIIFVILLSSGALIFEDVHLENQPKIQELLNCTDIIFTHIFILEMVLKWVAFGFGKYFTSAWCCLDFIIVIVSVTTLINLMELKSFRTLRALRPLRALSQFEGMKVVVNALIGAIPAILNVLLVCLIFWLVFCILGVYFFSGKFGKCINGTDSVINYTIITNKSQCESGNFSWINQKVNFDNVGNAYLALLQVATFKGWMDIIYAAVDSTEKEQQPEFESNSLGYIYFVVFIIFGSFFTLNLFIGVIIDNFNQQQKKLGGQDIFMTEEQKKYYNAMKKLGSKKPQKPIPRPLNKCQGLVFDIVTSQIFDIIIISLIILNMISMMAESYNQPKAMKSILDHLNWVFVVIFTLECLIKIFALRQYYFTNGWNLFDCVVVLLSIVSK

SEQ ID NO: 80266 - protein, 1753 aa, Homo sapiens
  Payload ID: 16002
  Gene Symbol: SCN11A
  Gene Name: sodium channel, voltage gated, type XI alpha subunit
  Uniprot ID: Q9UI33
  ENSP ID: ENSP00000416757
MDDRCYPVIFPDERNFRPFTSDSLAAIEKRIAIQKEKKKSKDQTGEVPQPRPQLDLKASRKLPKLYGDIPRELIGKPLEDLDPFYRNHKTFMVLNRKRTIYRFSAKHALFIFGPFNSIRSLAIRVSVHSLFSMFIIGTVIINCVFMATGPAKNSNSNNTDIAECVFTGIYIFEALIKILARGFILDEFSFLRDPWNWLDSIVIGIAIVSYIPGITIKLLPLRTFRVFRALKAISVVSRLKVIVGALLRSVKKLVNVIILTFFCLSIFALVGQQLFMGSLNLKCISRDCKNISNPEAYDHCFEKKENSPEFKMCGIWMGNSACSIQYECKHTKINPDYNYTNFDNFGWSFLAMFRLMTQDSWEKLYQQTLRTTGLYSVFFFIVVIFLGSFYLINLTLAVVTMAYEEQNKNVAAEIEAKEKMFQEAQQLLKEEKEALVAMGIDRSSLTSLETSYFTPKKRKLFGNKKRKSFFLRESGKDQPPGSDSDEDCQKKPQLLEQTKRLSQNLSLDHFDEHGDPLQRQRALSAVSILTITMKEQEKSQEPCLPCGENLASKYLVWNCCPQWLCVKKVLRTVMTDPFTELAITICIIINTVFLAMEHHKMEASFEKMLNIGNLVFTSIFIAEMCLKIIALDPYHYFRRGWNIFDSIVALLSFADVMNCVLQKRSWPFLRSFRVLRVFKLAKSWPTLNTLIKIIGNSVGALGSLTVVLVIVIFIFSVVGMQLFGRSFNSQKSPKLCNPTGPTVSCLRHWHMGDFWHSFLVVFRILCGEWIENMWECMQEANASSSLCVIVFILITVIGKLVVLNLFIALLLNSFSNEERNGNLEGEARKTKVQLALDRFRRAFCFVRHTLEHFCHKWCRKQNLPQQKEVAGGCAAQSKDIIPLVMEMKRGSETQEELGILTSVPKTLGVRHDWTWLAPLAEEEDDVEFSGEDNAQRITQPEPEQQKSDVTSILSECSTIDLQDGFGWLPEMVPKKQPERCLPKGFGCCFPCCSVDKRKPPWVIWWNLRKTCYQIVKHSWFESFIIFVILLSSGALIFEDVHLENQPKIQELLNCTDIIFTHIFILEMVLKWVAFGFGKYFTSAWCCLDFIIVIVSVTTLINLMELKSFRTLRALRPLRALSQFEGMKVVVNALIGAIPAILNVLLVCLIFWLVFCILGVYFFSGKFGKCINGTDSVINYTIITNKSQCESGNFSWINQKVNFDNVGNAYLALLQVATFKGWMDIIYAAVDSTEKEQQPEFESNSLGYIYFVVFIIFGSFFTLNLFIGVIIDNFNQQQKKLGGQDIFMTEEQKKYYNAMKKLGSKKPQKPIPRPLNKCQGLVFDIVTSQIFDIIIISLIILNMISMMAESYNQPKAMKSILDHLNWVFVVIFTLECLIKIFALRQYYFTNGWNLFDCVVVLLSIVSTMISTLENQEHIPFPPTLFRIVRLARIGRILRLVRAARGIRTLLFALMMSLPSLFNIGLLLFLIMFIYAILGMNWFSKVNPESGIDDIFNFKTFASSMLCLFQISTSAGWDSLLSPMLRSKESCNSSSENCHLPGIATSYFVSYIIISFLIVVNMYIAVILENFNTATEESEDPLGEDDFDIFYEVWEKFDPEATQFIKYSALSDFADALPEPLRVAKPNKYQFLVMDLPMVSEDRLHCMDILFAFTARVLGGSDGLDSMKAMMEEKFMEANPLKKLYEPIVTTTKRKEEERGAAIIQKAFRKYMMKVTKGDQGDQNDLENGPHSPLQTLCNGDLSSFGVAKGKVHCD

SEQ ID NO: 80267 - protein, 1738 aa, Homo sapiens
  Payload ID: 16003
  Gene Symbol: NALCN
  Gene Name: sodium leak channel, non selective
  Uniprot ID: Q8IZF0
  ENSP ID: ENSP00000251127
MLKRKQSSRVEAQPVTDFGPDESLSDNADILWINKPWVHSLLRICAIISVISVCMNTPMTFEHYPPLQYVTFTLDTLLMFLYTAEMIAKMHIRGIVKGDSSYVKDRWCVFDGFMVFCLWVSLVLQVFEIADIVDQMSPWGMLRIPRPLIMIRAFRIYFRFELPRTRITNILKRSGEQIWSVSIFLLFFLLLYGILGVQMFGTFTYHCVVNDTKPGNVTWNSLAIPDTHCSPELEEGYQCPPGFKCMDLEDLGLSRQELGYSGFNEIGTSIFTVYEAASQEGWVFLMYRAIDSFPRWRSYFYFITLIFFLAWLVKNVFIAVIIETFAEIRVQFQQMWGSRSSTTSTATTQMFHEDAAGGWQLVAVDVNKPQGRAPACLQKMMRSSVFHMFILSMVTVDVIVAASNYYKGENFRRQYDEFYLAEVAFTVLFDLEALLKIWCLGFTGYISSSLHKFELLLVIGTTLHVYPDLYHSQFTYFQVLRVVRLIKISPALEDFVYKIFGPGKKLGSLVVFTASLLIVMSAISLQMFCFVEELDRFTTFPRAFMSMFQILTQEGWVDVMDQTLNAVGHMWAPVVAIYFILYHLFATLILLSLFVAVILDNLELDEDLKKLKQLKQSEANADTKEKLPLRLRIFEKFPNRPQMVKISKLPSDFTVPKIRESFMKQFIDRQQQDTCCLLRSLPTTSSSSCDHSKRSAIEDNKYIDQKLRKSVFSIRARNLLEKETAVTKILRACTRQRMLSGSFEGQPAKERSILSVQHHIRQERRSLRHGSNSQRISRGKSLETLTQDHSNTVRYRNAQREDSEIKMIQEKKEQAEMKRKVQEEELRENHPYFDKPLFIVGREHRFRNFCRVVVRARFNASKTDPVTGAVKNTKYHQLYDLLGLVTYLDWVMIIVTICSCISMMFESPFRRVMHAPTLQIAEYVFVIFMSIELNLKIMADGLFFTPTAVIRDFGGVMDIFIYLVSLIFLCWMPQNVPAESGAQLLMVLRCLRPLRIFKLVPQMRKVVRELFSGFKEIFLVSILLLTLMLVFASFGVQLFAGKLAKCNDPNIIRREDCNGIFRINVSVSKNLNLKLRPGEKKPGFWVPRVWANPRNFNFDNVGNAMLALFEVLSLKGWVEVRDVIIHRVGPIHGIYIHVFVFLGCMIGLTLFVGVVIANFNENKGTALLTVDQRRWEDLKSRLKIAQPLHLPPRPDNDGFRAKMYDITQHPFFKRTIALLVLAQSVLLSVKWDVEDPVTVPLATMSVVFTFIFVLEVTMKIIAMSPAGFWQSRRNRYDLLVTSLGVVWVVLHFALLNAYTYMMGACVIVFRFFSICGKHVTLKMLLLTVVVSMYKSFFIIVGMFLLLLCYAFAGVVLFGTVKYGENINRHANFSSAGKAITVLFRIVTGEDWNKIMHDCMVQPPFCTPDEFTYWATDCGNYAGALMYFCSFYVIIAYIMLNLLVAIIVENFSLFYSTEEDQLLSYNDLRHFQIIWNMVDDKREGVIPTFRVKFLLRLLRGRLEVDLDKDKLLFKHMCYEMERLHNGGDVTFHDVLSMLSYRSVDIRKSLQLEELLAREQLEYTIEEEVAKQTIRMWLKKCLKRIRAKQQQSCSIIHSLRESQQQELSRFLNPPSIETTQPSEDTNANSQDNSMQPETSSQQQLLSPTLSDRGGSRQDAADAGKPQRKFGQWRLPSAPKPISHSVSSVNLRFGGRTTMKSVVCKMNPMTDAASCGSEVKKWWTRQLTVESDESGDDLLDI

SEQ ID NO: 80268 - protein, 218 aa, Homo sapiens
  Payload ID: 16003
  Gene Symbol: NALCN
  Gene Name: sodium leak channel, non selective
  Uniprot ID: Q8IZF0
  ENSP ID: ENSP00000365373
MLKRKQSSRVEAQPVTDFGPDESLSDNADILWINKPWVHSLLRICAIISVISVCMNTPMTFEHYPPLQYVTFTLDTLLMFLYTAEMIAKMHIRGIVKGDSSYVKDRWCVFDGFMVFCLWVSLVLQVFEIADIVDQMSPWGMLRIPRPLIMIRAFRIYFRFELPRTRITNILKRSGEQIWSVSIFLLFFLLLYGILGVQMFGTFTYHCVVNDTKPGLSL

SEQ ID NO: 80269 - protein, 10 aa, Homo sapiens
  Payload ID: 16004
  Gene Symbol: SOGA3
  Gene Name: SOGA family member 3
  ENSP ID: ENSP00000431662
MSQPPIGGAA

SEQ ID NO: 80270 - protein, 947 aa, Homo sapiens; identical to SEQ ID NO: 69033
  Payload ID: 16004
  Gene Symbol: SOGA3
  Gene Name: SOGA family member 3
  Uniprot ID: Q5TF21
  ENSP ID: ENSP00000434570

SEQ ID NO: 80271 - protein, 944 aa, Homo sapiens
  Payload ID: 16004
  Gene Symbol: SOGA3
  Gene Name: SOGA family member 3
  ENSP ID: ENSP00000435559
MSQPPIGGAAPATAAASPAAAATEARLHPEGSSRKQQRAQSPARPRDSSLRQTIAATRSPVGAGTKLNSVRQQQLQQQQQQGNKTGSRTGPPASIRGGGGGAEKATPLAPKGAAPGAVQPVAGAEAAPAATLAALGGRRPGPPEEPPRELESVPSKLGEPPPLGEGGGGGGEGGGAGGGSGEREGGAPQPPPPRGWRGKGVRAQQRGGSGGEGASPSPSSSSAGKTPGTGSRNSGSGVAGGGSGGGGSYWKEGCLQSELIQFHLKKERAAAAAAAAQMHAKNGGGSSSRSSPVSGPPAVCETLAVASASPMAAAAEGPQQSAEGSASGGGMQAAAPPSSQPHPQQLQEQEEMQEEMEKLREENETLKNEIDELRTEMDEMRDTFFEEDACQLQEMRHELERANKNCRILQYRLRKAERKRLRYAQTGEIDGELLRSLEQDLKVAKDVSVRLHHELENVEEKRTTTEDENEKLRQQLIEVEIAKQALQNELEKMKELSLKRRGSKDLPKSEKKAQQTPTEEDNEDLKCQLQFVKEEAALMRKKMAKIDKEKDRFEHELQKYRSFYGDLDSPLPKGEAGGPPSTREAELKLRLRLVEEEANILGRKIVELEVENRGLKAELDDLRGDDFNGSANPLMREQSESLSELRQHLQLVEDETELLRRNVADLEEQNKRITAELNKYKYKSGGHDSARHHDNAKTEALQEELKAARLQINELSGKVMQLQYENRVLMSNMQRYDLASHLGIRGSPRDSDAESDAGKKESDDDSRPPHRKREGPIGGESDSEEVRNIRCLTPTRSFYPAPGPWPKSFSDRQQMKDIRSEAERLGKTIDRLIADTSTIITEARIYVANGDLFGLMDEEDDGSRIREHELLYRINAQMKAFRKELQTFIDRLEVPKSADDRGAEEPISMFQPIILLILILVLFSSLSYTTIFKLVFLFTLFFVL

SEQ ID NO: 80272 - protein, 574 aa, Homo sapiens
  Payload ID: 16005
  Gene Symbol: SLC1A2
  Gene Name: solute carrier family 1 (glial high affinity glutamate transporter), member 2
  Uniprot ID: P43004
  ENSP ID: ENSP00000278379
MASTEGANNMPKQVEVRMHDSHLGSEEPKHRHLGLRLCDKLGKNLLLTLTVFGVILGAVCGGLLRLASPIHPDVVMLIAFPGDILMRMLKMLILPLIISSLITGLSGLDAKASGRLGTRAMVYYMSTTIIAAVLGVILVLAIHPGNPKLKKQLGPGKKNDEVSSLDAFLDLIRNLFPENLVQACFQQIQTVTKKVLVAPPPDEEANATSAVVSLLNETVTEVPEETKMVIKKGLEFKDGMNVLGLIGFFIAFGIAMGKMGDQAKLMVDFFNILNEIVMKLVIMIMWYSPLGIACLICGKIIAIKDLEVVARQLGMYMVTVIIGLIIHGGIFLPLIYFVVTRKNPFSFFAGIFQAWITALGTASSAGTLPVTFRCLEENLGIDKRVTRFVLPVGATINMDGTALYEAVAAIFIAQMNGVVLDGGQIVTVSLTATLASVGAASIPSAGLVTMLLILTAVGLPTEDISLLVAVDWLLDRMRTSVNVVGDSFGAGIVYHLSKSELDTIDSQHRVHEDIEMTKTQSIYDDMKNHRESNSNQCVYAAHNSVIVDECKVTLAANGKSADCSVEEEPWKREK

SEQ ID NO: 80273 - protein, 565 aa, Homo sapiens
  Payload ID: 16005
  Gene Symbol: SLC1A2
  Gene Name: solute carrier family 1 (glial high affinity glutamate transporter), member 2
  Uniprot ID: P43004
  ENSP ID: ENSP00000379099
MPKQVEVRMHDSHLGSEEPKHRHLGLRLCDKLGKNLLLTLTVFGVILGAVCGGLLRLASPIHPDVVMLIAFPGDILMRMLKMLILPLIISSLITGLSGLDAKASGRLGTRAMVYYMSTTIIAAVLGVILVLAIHPGNPKLKKQLGPGKKNDEVSSLDAFLDLIRNLFPENLVQACFQQIQTVTKKVLVAPPPDEEANATSAVVSLLNETVTEVPEETKMVIKKGLEFKDGMNVLGLIGFFIAFGIAMGKMGDQAKLMVDFFNILNEIVMKLVIMIMWYSPLGIACLICGKIIAIKDLEVVARQLGMYMVTVIIGLIIHGGIFLPLIYFVVTRKNPFSFFAGIFQAWITALGTASSAGTLPVTFRCLEENLGIDKRVTRFVLPVGATINMDGTALYEAVAAIFIAQMNGVVLDGGQIVTVSLTATLASVGAASIPSAGLVTMLLILTAVGLPTEDISLLVAVDWLLDRMRTSVNVVGDSFGAGIVYHLSKSELDTIDSQHRVHEDIEMTKTQSIYDDMKNHRESNSNQCVYAAHNSVIVDECKVTLAANGKSADCSVEEEPWKREK

SEQ ID NO: 80274 - protein, 565 aa, Homo sapiens; identical to SEQ ID NO: 80273
  Payload ID: 16005
  Gene Symbol: SLC1A2
  Gene Name: solute carrier family 1 (glial high affinity glutamate transporter), member 2
  Uniprot ID: P43004
  ENSP ID: ENSP00000379102

SEQ ID NO: 80275 - protein, 199 aa, Homo sapiens
  Payload ID: 16005
  Gene Symbol: SLC1A2
  Gene Name: solute carrier family 1 (glial high affinity glutamate transporter), member 2
  ENSP ID: ENSP00000406133
MGANNMPKQVEVRMHDSHLGSEEPKHRHLGLRLCDKLGKNLLLTLTVFGVILGAVCGGLLRLASPIHPDVVMLIAFPGDILMRMLKMLILPLIISSLITGLSGLDAKASGRLGTRAMVYYMSTTIIAAVLGVILVLAIHPGNPKLKKQLGPGKKNDEVSSLDAFLDLIRNLFPENLVQACFQQIQTVTKKVLVAPPPDE

SEQ ID NO: 80276 - protein, 91 aa, Homo sapiens
  Payload ID: 16005
  Gene Symbol: SLC1A2
  Gene Name: solute carrier family 1 (glial high affinity glutamate transporter), member 2
  ENSP ID: ENSP00000435406
TSVNVVGDSFGAGIVYHLSKSELDTIDSQHRVHEDIEMTKTQSIYDDMKNHRESNSNQCVYAAHNSVIVDECKGPFVLRIKPAIGTDLTAL

SEQ ID NO: 80277 - protein, 199 aa, Homo sapiens
  Payload ID: 16005
  Gene Symbol: SLC1A2
  Gene Name: solute carrier family 1 (glial high affinity glutamate transporter), member 2
  ENSP ID: ENSP00000436029
  MOD_RES (1)..(1): Any amino acid
XIMWYSPLGIACLICGKIIAIKDLEVVARQLGMYMVTVIIGLIIHGGIFLPLIYFVVTRKNPFSFFAGIFQAWITALGTASSAGTLPVTFRCLEENLGIDKRVTRFVLPVGATINMDGTALYEAVAAIFIAQMNGVVLDGGQIVTVRDRMRTSVNVVGDSFGAGIVYHLSKSELDTIDSQHRVHEDIEMTKTQSIYDDM

SEQ ID NO: 80278 - protein, 563 aa, Homo sapiens
  Payload ID: 16005
  Gene Symbol: SLC1A2
  Gene Name: solute carrier family 1 (glial high affinity glutamate transporter), member 2
  Uniprot ID: P43004
  ENSP ID: ENSP00000476124
MASTEGANNMPKQVEVRMHDSHLGSEEPKHRHLGLRLCDKLGKNLLLTLTVFGVILGAVCGGLLRLASPIHPDVVMLIAFPGDILMRMLKMLILPLIISSLITGLSGLDAKASGRLGTRAMVYYMSTTIIAAVLGVILVLAIHPGNPKLKKQLGPGKKNDEVSSLDAFLDLIRNLFPENLVQACFQQIQTVTKKVLVAPPPDEEANATSAVVSLLNETVTEVPEETKMVIKKGLEFKDGMNVLGLIGFFIAFGIAMGKMGDQAKLMVDFFNILNEIVMKLVIMIMWYSPLGIACLICGKIIAIKDLEVVARQLGMYMVTVIIGLIIHGGIFLPLIYFVVTRKNPFSFFAGIFQAWITALGTASSAGTLPVTFRCLEENLGIDKRVTRFVLPVGATINMDGTALYEAVAAIFIAQMNGVVLDGGQIVTVSLTATLASVGAASIPSAGLVTMLLILTAVGLPTEDISLLVAVDWLLDRMRTSVNVVGDSFGAGIVYHLSKSELDTIDSQHRVHEDIEMTKTQSIYDDMKNHRESNSNQCVYAAHNSVIVDECKVHFPFMDIETCI

SEQ ID NO: 80279 - protein, 542 aa, Homo sapiens
  Payload ID: 16006
  Gene Symbol: SLC1A3
  Gene Name: solute carrier family 1 (glial high affinity glutamate transporter), member 3
  Uniprot ID: P43003
  ENSP ID: ENSP00000265113
MTKSNGEEPKMGGRMERFQQGVRKRTLLAKKKVQNITKEDVKSYLFRNAFVLLTVTAVIVGTILGFTLRPYRMSYREVKYFSFPGELLMRMLQMLVLPLIISSLVTGMAALDSKASGKMGMRAVVYYMTTTIIAVVIGIIIVIIIHPGKGTKENMHREGKIVRVTAADAFLDLIRNMFPPNLVEACFKQFKTNYEKRSFKVPIQANETLVGAVINNVSEAMETLTRITEELVPVPGSVNGVNALGLVVFSMCFGFVIGNMKEQGQALREFFDSLNEAIMRLVAVIMWYAPVGILFLIAGKIVEMEDMGVIGGQLAMYTVTVIVGLLIHAVIVLPLLYFLVTRKNPWVFIGGLLQALITALGTSSSSATLPITFKCLEENNGVDKRVTRFVLPVGATINMDGTALYEALAAIFIAQVNNFELNFGQIITISITATAASIGAAGIPQAGLVTMVIVLTSVGLPTDDITLIIAVDWFLDRLRTTTNVLGDSLGAGIVEHLSRHELKNRDVEMGNSVIEENEMKKPYQLIAQDNETEKPIDSETKM

SEQ ID NO: 80280 - protein, 497 aa, Homo sapiens
  Payload ID: 16006
  Gene Symbol: SLC1A3
  Gene Name: solute carrier family 1 (glial high affinity glutamate transporter), member 3
  Uniprot ID: P43003
  ENSP ID: ENSP00000371343
MTKSNGEEPKMGGRMERFQQGVRKRTLLAKKKVQNITKEDVKSYLFRNAFVLLTVTAVIVGTILGFTLRPYRMSYREVKYFSFPGELLMRMLQMLVLPLIISSLVTGMAALDSKASGKMGMRAVVYYMTTTIIAVVIGIIIVIIIHPGKGTKENMHREGKIVRVTAADAFLDLIRNMFPPNLVEACFKQFKTNYEKRSFKVPIQANETLVGAVINNVSEAMETLTRITEELVPVPGSVNGVNALGLVVFSMCFGFVIGNMKEQGQALREFFDSLNEAIMRLVAVIMWYAPVGILFLIAGKIVEMEDMGVIGGQLAMYTVTVIVGLLIHAVIVLPLLYFLVTRKNPWVFIGGLLQALITALGTSSSSATLPITFKCLEENNGVDKRVTRFVLPVGATINMDGTALYEALAAIFIAQVNNFELNFGQIITIRDRLRTTTNVLGDSLGAGIVEHLSRHELKNRDVEMGNSVIEENEMKKPYQLIAQDNETEKPIDSETKM

SEQ ID NO: 80281 - protein, 106 aa, Homo sapiens
  Payload ID: 16006
  Gene Symbol: SLC1A3
  Gene Name: solute carrier family 1 (glial high affinity glutamate transporter), member 3
  ENSP ID: ENSP00000420992
MTKSNGEEPKMGGRMERFQQGVRKRTLLAKKKVQNITKEDVKSYLFRNAFVLLTVTAVIVGTILGFTLRPYRMSYREVKYFSFPGELLMRMLQMLVLPLIISSLVT

SEQ ID NO: 80282 - protein, 106 aa, Homo sapiens; identical to SEQ ID NO: 80281
  Payload ID: 16006
  Gene Symbol: SLC1A3
  Gene Name: solute carrier family 1 (glial high affinity glutamate transporter), member 3
  ENSP ID: ENSP00000424986

SEQ ID NO: 80283 - protein, 101 aa, Homo sapiens
  Payload ID: 16006
  Gene Symbol: SLC1A3
  Gene Name: solute carrier family 1 (glial high affinity glutamate transporter), member 3
  ENSP ID: ENSP00000427203
MTKSNGEEPKMGGRMERFQQGVRKRTLLAKKKVQNITKEDVKSYLFRNAFVLLTVTAVIVGTILGFTLRPYRMSYREVKYFSFPGELLMRMLQMLVLPLII

SEQ ID NO: 80284 - protein, 496 aa, Homo sapiens
  Payload ID: 16006
  Gene Symbol: SLC1A3
  Gene Name: solute carrier family 1 (glial high affinity glutamate transporter), member 3
  ENSP ID: ENSP00000477672
MTKSNGEEPKMGGRMERFQQGVRKRTLLAKKKVQNITKEDVKSYLFRNAFVLLTVTAVIVGMAALDSKASGKMGMRAVVYYMTTTIIAVVIGIIIVIIIHPGKGTKENMHREGKIVRVTAADAFLDLIRNMFPPNLVEACFKQFKTNYEKRSFKVPIQANETLVGAVINNVSEAMETLTRITEELVPVPGSVNGVNALGLVVFSMCFGFVIGNMKEQGQALREFFDSLNEAIMRLVAVIMWYAPVGILFLIAGKIVEMEDMGVIGGQLAMYTVTVIVGLLIHAVIVLPLLYFLVTRKNPWVFIGGLLQALITALGTSSSSATLPITFKCLEENNGVDKRVTRFVLPVGATINMDGTALYEALAAIFIAQVNNFELNFGQIITISITATAASIGAAGIPQAGLVTMVIVLTSVGLPTDDITLIIAVDWFLDRLRTTTNVLGDSLGAGIVEHLSRHELKNRDVEMGNSVIEENEMKKPYQLIAQDNETEKPIDSETKM

SEQ ID NO: 80285 - protein, 430 aa, Homo sapiens
  Payload ID: 16006
  Gene Symbol: SLC1A3
  Gene Name: solute carrier family 1 (glial high affinity glutamate transporter), member 3
  ENSP ID: ENSP00000483657
MTKSNGEEPKMGGRMERFQQGVRKRTLLAKKKVQNITKEDVKSYLFRNAFVLLTVTAVIVGTILGFTLRPYRMSYREVKYFSFPGELLMRMLQMLVLPLIISSLVTGMAALDSKASGKMGMRAVVYYMTTTIIAVVIGIIIVIIIHPGKGTKENMHREGKIVRVTAADAFLDLIRYAPVGILFLIAGKIVEMEDMGVIGGQLAMYTVTVIVGLLIHAVIVLPLLYFLVTRKNPWVFIGGLLQALITALGTSSSSATLPITFKCLEENNGVDKRVTRFVLPVGATINMDGTALYEALAAIFIAQVNNFELNFGQIITISITATAASIGAAGIPQAGLVTMVIVLTSVGLPTDDITLIIAVDWFLDRLRTTTNVLGDSLGAGIVEHLSRHELKNRDVEMGNSVIEENEMKKPYQLIAQDNETEKPIDSETKM

SEQ ID NO: 80286 - protein, 158 aa, Homo sapiens
  Payload ID: 16007
  Gene Symbol: SLC1A7
  Gene Name: solute carrier family 1 (glutamate transporter), member 7
  Uniprot ID: O00341
  ENSP ID: ENSP00000360546
MVPHAILARGRDVCRRNGLLILSVLSVIVGCLLGFFLRTRRLSPQEISYFQFPGELLMRMLKMMILPLVVSSLMSGLASLDAKTSSRLGVLTVAYYLWTTFMAVIVGIFMVSIIHPGSAAQKETTEQSGKPIMSSADALLDLIRQKEESWRNGPKGPG

SEQ ID NO: 80287 - protein, 560 aa, Homo sapiens
  Payload ID: 16007
  Gene Symbol: SLC1A7
  Gene Name: solute carrier family 1 (glutamate transporter), member 7
  Uniprot ID: O00341
  ENSP ID: ENSP00000360549
MVPHAILARGRDVCRRNGLLILSVLSVIVGCLLGFFLRTRRLSPQEISYFQFPGELLMRMLKMMILPLVVSSLMSGLASLDAKTSSRLGVLTVAYYLWTTFMAVIVGIFMVSIIHPGSAAQKETTEQSGKPIMSSADALLDLIRNMFPANLVEATFKQYRTKTTPVVKSPKVAPEEAPPRRILIYGVQEENGSHVQNFALDLTPPPEVVYKSEPGTSDGMNVLGIVFFSATMGIMLGRMGDSGAPLVSFCQCLNESVMKIVAVAVWYFPFGIVFLIAGKILEMDDPRAVGKKLGFYSVTVVCGLVLHGLFILPLLYFFITKKNPIVFIRGILQALLIALATSSSSATLPITFKCLLENNHIDRRIARFVLPVGATINMDGTALYEAVAAIFIAQVNNYELDFGQIITISITATAASIGAAGIPQAGLVTMVIVLTSVGLPTDDITLIIAVDWALDRFRTMINVLGDALAAGIMAHICRKDFARDTGTEKLLPCETKPVSLQEIVAAQQNGCVKSVAEASELTLGPTCPHHVPVQVEQDEELPAASLNHCTIQISELETNV

SEQ ID NO: 80288 - protein, 619 aa, Homo sapiens
  Payload ID: 16007
  Gene Symbol: SLC1A7
  Gene Name: solute carrier family 1 (glutamate transporter), member 7
  ENSP ID: ENSP00000478639
MVPHAILARGRDVCRRNGLLILSVLSVIVGCLLGFFLRTRRLSPQEISYFQFPGELLMRMLKMMILPLVVSSLMSGLASLDAKTSSRLGVLTVAYYLWTTFMAVIVGIFMVSIIHPGSAAQKETTEQSGKPIMSSADALLDLIRNMFPANLVEATFKQYRTKTTPVVKSPKVAPEEAPPRRILIYGVQEENGSHVQNFALDLTPPPEVVYKSEPGTSDGMNVLGIVFFSATMGIMLGRMGDSGAPLVSFCQCLNESVMKIVAVAVWYFPFGIVFLIAGKILEMDDPRAVGKKLGFYSVTVVCGLVLHGLFILPLLYFFITKKNPIVFIRGILQALLIALATSSRKNQVRALQCPRSLPPAGAALQRHKHSWRGGCLGRGELPDRGPSHPGGGCWADTGPSNRSSATLPITFKCLLENNHIDRRIARFVLPVGATINMDGTALYEAVAAIFIAQVNNYELDFGQIITISITATAASIGAAGIPQAGLVTMVIVLTSVGLPTDDITLIIAVDWALDRFRTMINVLGDALAAGIMAHICRKDFARDTGTEKLLPCETKPVSLQEIVAAQQNGCVKSVAEASELTLGPTCPHHVPVQVEQDEELPAASLNHCTIQISELETNV

SEQ ID NO: 80289 - protein, 158 aa, Homo sapiens
  Payload ID: 16007
  Gene Symbol: SLC1A7
  Gene Name: solute carrier family 1 (glutamate transporter), member 7
  ENSP ID: ENSP00000481341
MVPHAILARGRDVCRRNGLLILSVLSVIVGCLLGFFLRTRRLSPQEISYFQFPGELLMRMLKMMILPLVVSSLMSGLASLDAKTSSRLGVLTVAYYLWTTFMAVIVGIFMVSIIHPGSAAQKETTEQSGKPIMSSADALLDLIRNMFPANLVEATFKQ

SEQ ID NO: 80290 - protein, 472 aa, Homo sapiens
  Payload ID: 16007
  Gene Symbol: SLC1A7
  Gene Name: solute carrier family 1 (glutamate transporter), member 7
  ENSP ID: ENSP00000484987
MVPHAILARGRDVCRRNGLLILSVLSVIVGCLLGFFLRTRRLSPQEISYFQFPGELLMRMLKMMILPLVVSRNMFPANLVEATFKQYRTKTTPVVKSPKVAPEEAPPRRILIYGVQEENGSHVQNFALDLTPPPEVVYKSEPGTSDGMNVLGIVFFSATMGIMLGRMGDSGAPLVSFCQCLNESVMKIVAVAVWYFPFGIVFLIAGKILEMDDPRAVGKKLGFYSVTVVCGLVLHGLFILPLLYFFITKKNPIVFIRGILQALLIALATSSSSATLPITFKCLLENNHIDRRIARFVLPVGATINMDGTALYEAVAAIFIAQVNNYELDFGQIITISITATAASIGAAGIPQAGLVTMVIVLTSVGLPTDDITLIIAVDWALDRFRTMINVLGDALAAGIMAHICRKDFARDTGTETCFPSPETAALRDQASEPPGDRGSPAEWLCEECSRGLRAHPGPHLPPPRPRSSGAG

SEQ ID NO: 80291 - protein, 532 aa, Homo sapiens
  Payload ID: 16008
  Gene Symbol: SLC1A4
  Gene Name: solute carrier family 1 (glutamate/neutral amino acid transporter), member 4
  Uniprot ID: P43007
  ENSP ID: ENSP00000234256
MEKSNETNGYLDSAQAGPAAGPGAPGTAAGRARRCAGFLRRQALVLLTVSGVLAGAGLGAALRGLSLSRTQVTYLAFPGEMLLRMLRMIILPLVVCSLVSGAASLDASCLGRLGGIAVAYFGLTTLSASALAVALAFIIKPGSGAQTLQSSDLGLEDSGPPPVPKETVDSFLDLARNLFPSNLVVAAFRTYATDYKVVTQNSSSGNVTHEKIPIGTEIEGMNILGLVLFALVLGVALKKLGSEGEDLIRFFNSLNEATMVLVSWIMWYVPVGIMFLVGSKIVEMKDIIVLVTSLGKYIFASILGHVIHGGIVLPLIYFVFTRKNPFRFLLGLLAPFATAFATCSSSATLPSMMKCIEENNGVDKRISRFILPIGATVNMDGAAIFQCVAAVFIAQLNNVELNAGQIFTILVTATASSVGAAGVPAGGVLTIAIILEAIGLPTHDLPLILAVDWIVDRTTTVVNVEGDALGAGILHHLNQKATKKGEQELAEVKVEAIPNCKSEEETSPLVTHQNPAGPVASAPELESKESVL

SEQ ID NO: 80292 - protein, 234 aa, Homo sapiens
  Payload ID: 16008
  Gene Symbol: SLC1A4
  Gene Name: solute carrier family 1 (glutamate/neutral amino acid transporter), member 4
  Uniprot ID: P43007
  ENSP ID: ENSP00000431942
MNILGLVLFALVLGVALKKLGSEGEDLIRFFNSLNEATMVLVSWIMCSATLPSMMKCIEENNGVDKRISRFILPIGATVNMDGAAIFQCVAAVFIAQLNNVELNAGQIFTILVTATASSVGAAGVPAGGVLTIAIILEAIGLPTHDLPLILAVDWIVDRTTTVVNVEGDALGAGILHHLNQKATKKGEQELAEVKVEAIPNCKSEEETSPLVTHQNPAGPVASAPELESKESVL

SEQ ID NO: 80293 - protein, 564 aa, Homo sapiens
  Payload ID: 16009
  Gene Symbol: SLC1A6
  Gene Name: solute carrier family 1 (high affinity aspartate/glutamate transporter), member 6
  Uniprot ID: P48664
  ENSP ID: ENSP00000221742
MSSHGNSLFLRESGQRLGRVGWLQRLQESLQQRALRTRLRLQTMTLEHVLRFLRRNAFILLTVSAVVIGVSLAFALRPYQLTYRQIKYFSFPGELLMRMLQMLVLPLIVSSLVTGMASLDNKATGRMGMRAAVYYMVTTIIAVFIGILMVTIIHPGKGSKEGLHREGRIETIPTADAFMDLIRNMFPPNLVEACFKQFKTQYSTRVVTRTMVRTENGSEPGASMPPPFSVENGTSFLENVTRALGTLQEMLSFEETVPVPGSANGINALGLVVFSVAFGLVIGGMKHKGRVLRDFFDSLNEAIMRLVGIIIWYAPVGILFLIAGKILEMEDMAVLGGQLGMYTLTVIVGLFLHAGIVLPLIYFLVTHRNPFPFIGGMLQALITAMGTSSSSATLPITFRCLEEGLGVDRRITRFVLPVGATVNMDGTALYEALAAIFIAQVNNYELNLGQITTISITATAASVGAAGIPQAGLVTMVIVLTSVGLPTEDITLIIAVDWFLDRLRTMTNVLGDSIGAAVIEHLSQRELELQEAELTLPSLGKPYKSLMAQEKGASRGRGGNESAM

SEQ ID NO: 80294 - protein, 500 aa, Homo sapiens
  Payload ID: 16009
  Gene Symbol: SLC1A6
  Gene Name: solute carrier family 1 (high affinity aspartate/glutamate transporter), member 6
  ENSP ID: ENSP00000409386
MSIDHEQPWQQPVPAGERPAAGPGGLAAAAAGKPAAESTAHAPAPADHDPRARAALPAPKRLHSADGQRRGHWGQPGLCPAPISAHLPPDQVLLFSWRASDEDAADAGVTSHCLQPGHRNMFPPNLVEACFKQFKTQYSTRVVTRTMVRTENGSEPGASMPPPFSVENGTSFLENVTRALGTLQEMLSFEETVPVPGSANGINALGLVVFSVAFGLVIGGMKHKGRVLRDFFDSLNEAIMRLVGIIIWYAPVGILFLIAGKILEMEDMAVLGGQLGMYTLTVIVGLFLHAGIVLPLIYFLVTHRNPFPFIGGMLQALITAMGTSSSSATLPITFRCLEEGLGVDRRITRFVLPVGATVNMDGTALYEALAAIFIAQVNNYELNLGQITTISITATAASVGAAGIPQAGLVTMVIVLTSVGLPTEDITLIIAVDWFLDRLRTMTNVLGDSIGAAVIEHLSQRELELQEAELTLPSLGKPYKSLMAQEKGASRGRGGNESAM

SEQ ID NO: 80295 - protein, 312 aa, Homo sapiens
  Payload ID: 16009
  Gene Symbol: SLC1A6
  Gene Name: solute carrier family 1 (high affinity aspartate/glutamate transporter), member 6
  Uniprot ID: P48664
  ENSP ID: ENSP00000446175
MSSHGNSLFLRESGQRLGRVGWLQRLQESLQQRALRTRLRLQTMTLEHVLRFLRRNAFILLTVSAVVIGVSLAFALRPYQLTYRQIKYFSFPGELLMRMLQMLVLPLIVSSLVTGMASLDNKATGRMGMRAAVYYMVTTIIAVFIGILMVTIIHPGKGSKEGLHREGRIETIPTADAFMDLIRNMFPPNLVEACFKQFKTQYSTRVVTRTMVRTENGSEPGASMPPPFSVENGTSFLENVTRALGTLQEMLSFEETVPVPGSANGINALGLVVFSVAFGLVIGGMKHKGRVLRDFFDSLNEAIMRLVGIIIW

SEQ ID NO: 80296 - protein, 110 aa, Homo sapiens
  Payload ID: 16009
  Gene Symbol: SLC1A6
  Gene Name: solute carrier family 1 (high affinity aspartate/glutamate transporter), member 6
  ENSP ID: ENSP00000469551
MSSHGNSLFLRESGQRLGRVGWLQRLQESLQQRALRTRLRLQTMTLEHVLRFLRRNAFILLTVSAVVIGVSLAFALRPYQLTYRQIKYFSFPGELLMRMLQMLVLPLIVS

SEQ ID NO: 80297 - protein, 486 aa, Homo sapiens
  Payload ID: 16009
  Gene Symbol: SLC1A6
  Gene Name: solute carrier family 1 (high affinity aspartate/glutamate transporter), member 6
  ENSP ID: ENSP00000471038
MSSHGNSLFLRESGQRLGRVGWLQRLQESLQQRALRTRLRLQTMTLEHVLRFLRRNAFILLTVSAVVIGVSLAFALRPYQLTYRQIKYFSFPGELLMRMLQMLVLPLIVSSLVTGMASLDNKATGRMGMRAAVYYMVTTIIAVFIGILMVTIIHPGKGSKEGLHREGRIETIPTADAFMDLIRNMFPPNLVEACFKQFKTQYSTRVVTRTMVRTENGSEPGASMPPPFSVENGTSFLENVTRALGTLQEMLSFEETVPVPGSANGINALGLVVFSVAFGLVIGGMKHKGRVLRDFFDSLNEAIMRLVGIIICSATLPITFRCLEEGLGVDRRITRFVLPVGATVNMDGTALYEALAAIFIAQVNNYELNLGQITTISITATAASVGAAGIPQAGLVTMVIVLTSVGLPTEDITLIIAVDWFLDRLRTMTNVLGDSIGAAVIEHLSQRELELQEAELTLPSLGKPYKSLMAQEKGASRGRGGNESAM

SEQ ID NO: 80298 - protein, 74 aa, Homo sapiens
  Payload ID: 16009
  Gene Symbol: SLC1A6
  Gene Name: solute carrier family 1 (high affinity aspartate/glutamate transporter), member 6
  ENSP ID: ENSP00000471129
MSSHGNSLFLRESGQRLGRVGWLQRLQESLQQRALRTRLRLQTMTLEHVLRFLRRNAFILLTVSAVVIGELCLL

SEQ ID NO: 80299 - protein, 160 aa, Homo sapiens
  Payload ID: 16009
  Gene Symbol: SLC1A6
  Gene Name: solute carrier family 1 (high affinity aspartate/glutamate transporter), member 6
  ENSP ID: ENSP00000471562
MSSHGNSLFLRESGQRLGRVGWLQRLQESLQQRALRTRLRLQTMTLEHVLRFLRRNAFILLTVSAVVIGVSLAFALRPYQLTYRQIKYFSFPGELLMRMLQMLVLPLIVSSLVTGMASLDNKATGRMGMRAAVYYMVTTIIAVFIGILMVTIIHPGKGSK

SEQ ID NO: 80300 - protein, 312 aa, Homo sapiens; identical to SEQ ID NO: 80295
  Payload ID: 16009
  Gene Symbol: SLC1A6
  Gene Name: solute carrier family 1 (high affinity aspartate/glutamate transporter), member 6
  Uniprot ID: P48664
  ENSP ID: ENSP00000471781

SEQ ID NO: 80301 - protein, 35 aa, Homo sapiens
  Payload ID: 16009
  Gene Symbol: SLC1A6
  Gene Name: solute carrier family 1 (high affinity aspartate/glutamate transporter), member 6
  ENSP ID: ENSP00000472133
MSSHGNSLFLRESGQRLGRVGWLQRLQESLQQRAL

SEQ ID NO: 80302 - protein, 146 aa, Homo sapiens
  Payload ID: 16009
  Gene Symbol: SLC1A6
  Gene Name: solute carrier family 1 (high affinity aspartate/glutamate transporter), member 6
  ENSP ID: ENSP00000472837
MSIDHEQPWQQPVPAGERPAAGPGGLAAAAAGKPAAESTAHAPAPADHDPRARAALPAPKRLHSADGQRRGHWGQPGLCPAPISAHLPPDQVLLFSWRASDEDAADAGVTSHCLQPGHRYGIPGQQGHGADGDAGSCVLHGDHHHR

SEQ ID NO: 80303 - protein, 524 aa, Homo sapiens
  Payload ID: 16010
  Gene Symbol: SLC1A1
  Gene Name: solute carrier family 1 (neuronal/epithelial high affinity glutamate transporter, system Xag), member 1
  Uniprot ID: P43005
  ENSP ID: ENSP00000262352
MGKPARKGCEWKRFLKNNWVLLSTVAAVVLGITTGVLVREHSNLSTLEKFYFAFPGEILMRMLKLIILPLIISSMITGVAALDSNVSGKIGLRAVVYYFCTTLIAVILGIVLVVSIKPGVTQKVGEIARTGSTPEVSTVDAMLDLIRNMFPENLVQACFQQYKTKREEVKPPSDPEMNMTEESFTAVMTTAISKNKTKEYKIVGMYSDGINVLGLIVFCLVFGLVIGKMGEKGQILVDFFNALSDATMKIVQIIMCYMPLGILFLIAGKIIEVEDWEIFRKLGLYMATVLTGLAIHSIVILPLIYFIVVRKNPFRFAMGMAQALLTALMISSSSATLPVTFRCAEENNQVDKRITRFVLPVGATINMDGTALYEAVAAVFIAQLNDLDLGIGQIITISITATSASIGAAGVPQAGLVTMVIVLSAVGLPAEDVTLIIAVDWLLDRFRTMVNVLGDAFGTGIVEKLSKKELEQMDVSSEVNIVNPFALESTILDNEDSDTKKSYVNGGFAVDKSDTISFTQTSQF

SEQ ID NO: 80304 - protein, 242 aa, Homo sapiens
  Payload ID: 16010
  Gene Symbol: SLC1A1
  Gene Name: solute carrier family 1 (neuronal/epithelial high affinity glutamate transporter, system Xag), member 1
  ENSP ID: ENSP00000414620
  MOD_RES (1)..(1): Any amino acid
XFFNALSDATMKIVQIIMCYMPLGILFLIAGKIIEVEDWEIFRKLGLYMATVLTGLAIHSIVILPLIYFIVVRKNPFRFAMGMAQALLTALMISSSSATLPVTFRCAEENNQVDKRITRFVLPVGATINMDGTALYEAVAAVFIAQLNDLDLGIGQIITIRDRFRTMVNVLGDAFGTGIVEKLSKKELEQMDVSSEVNIVNPFALESTILDNEDSDTKKSYVNGGFAVDKSDTISFTQTSQF

SEQ ID NO: 80305 - protein, 313 aa, Homo sapiens
  Payload ID: 16011
  Gene Symbol: SLC1A5
  Gene Name: solute carrier family 1 (neutral amino acid transporter), member 5
  Uniprot ID: Q15758
  ENSP ID: ENSP00000397924
MNILGLVVFAIVFGVALRKLGPEGELLIRFFNSFNEATMVLVSWIMWYAPVGIMFLVAGKIVEMEDVGLLFARLGKYILCCLLGHAIHGLLVLPLIYFLFTRKNPYRFLWGIVTPLATAFGTSSSSATLPLMMKCVEENNGVAKHISRFILPIGATVNMDGAALFQCVAAVFIAQLSQQSLDFVKIITILVTATASSVGAAGIPAGGVLTLAIILEAVNLPVDHISLILAVDWLVDRSCTVLNVEGDALGAGLLQNYVDRTESRSTEPELIQVKSELPLDPLPVPTEEGNPLLKHYRGPAGDATVASEKESVM

SEQ ID NO: 80306 - protein, 339 aa, Homo sapiens
  Payload ID: 16011
  Gene Symbol: SLC1A5
  Gene Name: solute carrier family 1 (neutral amino acid transporter), member 5
  Uniprot ID: Q15758
  ENSP ID: ENSP00000406532
MYSTTYEERNITGTRVKVPVGQEVEGMNILGLVVFAIVFGVALRKLGPEGELLIRFFNSFNEATMVLVSWIMWYAPVGIMFLVAGKIVEMEDVGLLFARLGKYILCCLLGHAIHGLLVLPLIYFLFTRKNPYRFLWGIVTPLATAFGTSSSSATLPLMMKCVEENNGVAKHISRFILPIGATVNMDGAALFQCVAAVFIAQLSQQSLDFVKIITILVTATASSVGAAGIPAGGVLTLAIILEAVNLPVDHISLILAVDWLVDRSCTVLNVEGDALGAGLLQNYVDRTESRSTEPELIQVKSELPLDPLPVPTEEGNPLLKHYRGPAGDATVASEKESVM

SEQ ID NO: 80307 - protein, 541 aa, Homo sapiens
  Payload ID: 16011
  Gene Symbol: SLC1A5
  Gene Name: solute carrier family 1 (neutral amino acid transporter), member 5
  Uniprot ID: Q15758
  ENSP ID: ENSP00000444408
MVADPPRDSKGLAAAEPTANGGLALASIEDQGAAAGGYCGSRDQVRRCLRANLLVLLTVVAVVAGVALGLGVSGAGGALALGPERLSAFVFPGELLLRLLRMIILPLVVCSLIGGAASLDPGALGRLGAWALLFFLVTTLLASALGVGLALALQPGAASAAINASVGAAGSAENAPSKEVLDSFLDLARNIFPSNLVSAAFRSYSTTYEERNITGTRVKVPVGQEVEGMNILGLVVFAIVFGVALRKLGPEGELLIRFFNSFNEATMVLVSWIMWYAPVGIMFLVAGKIVEMEDVGLLFARLGKYILCCLLGHAIHGLLVLPLIYFLFTRKNPYRFLWGIVTPLATAFGTSSSSATLPLMMKCVEENNGVAKHISRFILPIGATVNMDGAALFQCVAAVFIAQLSQQSLDFVKIITILVTATASSVGAAGIPAGGVLTLAIILEAVNLPVDHISLILAVDWLVDRSCTVLNVEGDALGAGLLQNYVDRTESRSTEPELIQVKSELPLDPLPVPTEEGNPLLKHYRGPAGDATVASEKESVM

SEQ ID NO: 80308 - protein, 258 aa, Homo sapiens
  Payload ID: 16011
  Gene Symbol: SLC1A5
  Gene Name: solute carrier family 1 (neutral amino acid transporter), member 5
  ENSP ID: ENSP00000468890
  MOD_RES (1)..(1): Any amino acid
XHASLLGLKEADSPSPAKGCKPSSNPAGLRNIFPSNLVSAAFRSYSTTYEERNITGTRVKVPVGQEVEGMNILGLVVFAIVFGVALRKLGPEGELLIRFFNSFNEATMVLVSWIMWYAPVGIMFLVAGKIVEMEDVGLLFARLGKYILCCLLGHAIHGLLVLPLIYFLFTRKNPYRFLWGIVTPLATAFGTSSSSATLPLMMKCVEENNGVAKHISRFILPIGATVNMDGAALFQCVAAVFIAQLSQQSLDFVKIITI

SEQ ID NO: 80309 - protein, 365 aa, Homo sapiens
  Payload ID: 16011
  Gene Symbol: SLC1A5
  Gene Name: solute carrier family 1 (neutral amino acid transporter), member 5
  ENSP ID: ENSP00000469265
MVSNNPLCVCLCRNIFPSNLVSAAFRSYSTTYEERNITGTRVKVPVGQEVEGMNILGLVVFAIVFGVALRKLGPEGELLIRFFNSFNEATMVLVSWIMWYAPVGIMFLVAGKIVEMEDVGLLFARLGKYILCCLLGHAIHGLLVLPLIYFLFTRKNPYRFLWGIVTPLATAFGTSSSSATLPLMMKCVEENNGVAKHISRFILPIGATVNMDGAALFQCVAAVFIAQLSQQSLDFVKIITILVTATASSVGAAGIPAGGVLTLAIILEAVNLPVDHISLILAVDWLVDRSCTVLNVEGDALGAGLLQNYVDRTESRSTEPELIQVKSELPLDPLPVPTEEGNPLLKHYRGPAGDATVASEKESVM

SEQ ID NO: 80310 - protein, 29 aa, Homo sapiens
  Payload ID: 16011
  Gene Symbol: SLC1A5
  Gene Name: solute carrier family 1 (neutral amino acid transporter), member 5
  ENSP ID: ENSP00000471626
MNILGLVVFAIVFGVALRKLGPEGELLIR

SEQ ID NO: 80311 - protein, 349 aa, Homo sapiens
  Payload ID: 16012
  Gene Symbol: SLC10A1
  Gene Name: solute carrier family 10 (sodium/bile acid cotransporter), member 1
  Uniprot ID: Q14973
  ENSP ID: ENSP00000216540
MEAHNASAPFNFTLPPNFGKRPTDLALSVILVFMLFFIMLSLGCTMEFSKIKAHLWKPKGLAIALVAQYGIMPLTAFVLGKVFRLKNIEALAILVCGCSPGGNLSNVFSLAMKGDMNLSIVMTTCSTFCALGMMPLLLYIYSRGIYDGDLKDKVPYKGIVISLVLVLIPCTIGIVLKSKRPQYMRYVIKGGMIIILLCSVAVTVLSAINVGKSIMFAMTPLLIATSSLMPFIGFLLGYVLSALFCLNGRCRRTVSMETGCQNVQLCSTILNVAFPPEVIGPLFFFPLLYMIFQLGEGLLLIAIFWCYEKFKTPKDKTKMIYTAATTEETIPGALGNGTYKGEDCSPCTA

SEQ ID NO: 80312 - protein, 348 aa, Homo sapiens
  Payload ID: 16013
  Gene Symbol: SLC10A2
  Gene Name: solute carrier family 10 (sodium/bile acid cotransporter), member 2
  Uniprot ID: Q12908
  ENSP ID: ENSP00000245312
MNDPNSCVDNATVCSGASCVVPESNFNNILSVVLSTVLTILLALVMFSMGCNVEIKKFLGHIKRPWGICVGFLCQFGIMPLTGFILSVAFDILPLQAVVVLIIGCCPGGTASNILAYWVDGDMDLSVSMTTCSTLLALGMMPLCLLIYTKMWVDSGSIVIPYDNIGTSLVSLVVPVSIGMFVNHKWPQKAKIILKIGSIAGAILIVLIAVVGGILYQSAWIIAPKLWIIGTIFPVAGYSLGFLLARIAGLPWYRCRTVAFETGMQNTQLCSTIVQLSFTPEELNVVFTFPLIYSIFQLAFAAIFLGFYVAYKKCHGKNKAEIPESKENGTEPESSFYKANGGFQPDEK

SEQ ID NO: 80313 - protein, 377 aa, Homo sapiens
  Payload ID: 16014
  Gene Symbol: SLC10A6
  Gene Name: solute carrier family 10 (sodium/bile acid cotransporter), member 6
  Uniprot ID: Q3KNW5
  ENSP ID: ENSP00000273905
MRANCSSSSACPANSSEEELPVGLEVHGNLELVFTVVSTVMMGLLMFSLGCSVEIRKLWSHIRRPWGIAVGLLCQFGLMPFTAYLLAISFSLKPVQAIAVLIMGCCPGGTISNIFTFWVDGDMDLSISMTTCSTVAALGMMPLCIYLYTWSWSLQQNLTIPYQNIGITLVCLTIPVAFGVYVNYRWPKQSKIILKIGAVVGGVLLLVVAVAGVVLAKGSWNSDITLLTISFIFPLIGHVTGFLLALFTHQSWQRCRTISLETGAQNIQMCITMLQLSFTAEHLVQMLSFPLAYGLFQLIDGFLIVAAYQTYKRRLKNKHGKKNSGCTEVCHTRKSTSSRETNAFLEVNEEGAITPGPPGPMDCHRALEPVGHITSCE

SEQ ID NO: 80314 - protein, 477 aa, Homo sapiens
  Payload ID: 16015
  Gene Symbol: SLC10A3
  Gene Name: solute carrier family 10, member 3
  Uniprot ID: P09131
  ENSP ID: ENSP00000263512
MVLMQDKGSSQQWPGLGGEGGGTGPLSMLRAALLLISLPWGAQGTASTSLSTAGGHTVPPTGGRYLSIGDGSVMEFEFPEDSEGIIVISSQYPGQANRTAPGPMLRVTSLDTEVLTIKNVSAITWGGGGGFVVSIHSGLAGLAPLHIQLVDAHEAPPTLIEERRDFCIKVSPAEDTPATLSADLAHFSENPILYLLLPLIFVNKCSFGCKVELEVLKGLMQSPQPMLLGLLGQFLVMPLYAFLMAKVFMLPKALALGLIITCSSPGGGGSYLFSLLLGGDVTLAISMTFLSTVAATGFLPLSSAIYSRLLSIHETLHVPISKILGTLLFIAIPIAVGVLIKSKLPKFSQLLLQVVKPFSFVLLLGGLFLAYRMGVFILAGIRLPIVLVGITVPLVGLLVGYCLATCLKLPVAQRRTVSIEVGVQNSLLALAMLQLSLRRLQADYASQAPFIVALSGTSEMLALVIGHFIYSSLFPVP

SEQ ID NO: 80315 - protein, 448 aa, Homo sapiens
  Payload ID: 16015
  Gene Symbol: SLC10A3
  Gene Name: solute carrier family 10, member 3
  Uniprot ID: P09131
  ENSP ID: ENSP00000358663
MVLMQDKGSSQQWPGLGGEGGGTGPLSMLRAALLLISLPWGAQGTASTSLSTAGGHTVPPTGGRYLSIGDGSVMEFEFPEDSEGIIVISSQYPGQANRTAPGPMLRVTSLDTEVLTIKNLVDAHEAPPTLIEERRDFCIKVSPAEDTPATLSADLAHFSENPILYLLLPLIFVNKCSFGCKVELEVLKGLMQSPQPMLLGLLGQFLVMPLYAFLMAKVFMLPKALALGLIITCSSPGGGGSYLFSLLLGGDVTLAISMTFLSTVAATGFLPLSSAIYSRLLSIHETLHVPISKILGTLLFIAIPIAVGVLIKSKLPKFSQLLLQVVKPFSFVLLLGGLFLAYRMGVFILAGIRLPIVLVGITVPLVGLLVGYCLATCLKLPVAQRRTVSIEVGVQNSLLALAMLQLSLRRLQADYASQAPFIVALSGTSEMLALVIGHFIYSSLFPVP

SEQ ID NO: 80316 - protein, 532 aa, Homo sapiens
  Payload ID: 16015
  Gene Symbol: SLC10A3
  Gene Name: solute carrier family 10, member 3
  ENSP ID: ENSP00000377211
MAGPRPPGDSPAIKEDSTGLGPTHEPFSGQPNSTSGDVLLSRRGPGHAIRPPGRAMVLMQDKGSSQQWPGLGGEGGGTGPLSMLRAALLLISLPWGAQGTASTSLSTAGGHTVPPTGGRYLSIGDGSVMEFEFPEDSEGIIVISSQYPGQANRTAPGPMLRVTSLDTEVLTIKNVSAITWGGGGGFVVSIHSGLAGLAPLHIQLVDAHEAPPTLIEERRDFCIKVSPAEDTPATLSADLAHFSENPILYLLLPLIFVNKCSFGCKVELEVLKGLMQSPQPMLLGLLGQFLVMPLYAFLMAKVFMLPKALALGLIITCSSPGGGGSYLFSLLLGGDVTLAISMTFLSTVAATGFLPLSSAIYSRLLSIHETLHVPISKILGTLLFIAIPIAVGVLIKSKLPKFSQLLLQVVKPFSFVLLLGGLFLAYRMGVFILAGIRLPIVLVGITVPLVGLLVGYCLATCLKLPVAQRRTVSIEVGVQNSLLALAMLQLSLRRLQADYASQAPFIVALSGTSEMLALVIGHFIYSSLFPVP

SEQ ID NO: 80317 - protein, 477 aa, Homo sapiens; identical to SEQ ID NO: 80314
  Payload ID: 16015
  Gene Symbol: SLC10A3
  Gene Name: solute carrier family 10, member 3
  Uniprot ID: P09131
  ENSP ID: ENSP00000377212

SEQ ID NO: 80318 - protein, 218 aa, Homo sapiens
  Payload ID: 16015
  Gene Symbol: SLC10A3
  Gene Name: solute carrier family 10, member 3
  ENSP ID: ENSP00000395702
MVLMQDKGSSQQWPGLGGEGGGTGPLSMLRAALLLISLPWGAQGTASTSLSTAGGHTVPPTGGRYLSIGDGSVMEFEFPEDSEGIIVISSQYPGQANRTAPGPMLRVTSLDTEVLTIKNVSAITWGGGGGFVVSIHSGLAGLAPLHIQLVDAHEAPPTLIEERRDFCIKVSPAEDTPATLSADLAHFSENPILYLLLPLIFVNKCSFGCKVELEVLKG

SEQ ID NO: 80319 - protein, 437 aa, Homo sapiens
  Payload ID: 16016
  Gene Symbol: SLC10A4
  Gene Name: solute carrier family 10, member 4
  Uniprot ID: Q96EP9
  ENSP ID: ENSP00000273861
MDGNDNVTLLFAPLLRDNYTLAPNASSLGPGTDLALAPASSAGPGPGLSLGPGPSFGFSPGPTPTPEPTTSGLAGGAASHGPSPFPRPWAPHALPFWDTPLNHGLNVFVGAALCITMLGLGCTVDVNHFGAHVRRPVGALLAALCQFGLLPLLAFLLALAFKLDEVAAVAVLLCGCCPGGNLSNLMSLLVDGDMNLSIIMTISSTLLALVLMPLCLWIYSWAWINTPIVQLLPLGTVTLTLCSTLIPIGLGVFIRYKYSRVADYIVKVSLWSLLVTLVVLFIMTGTMLGPELLASIPAAVYVIAIFMPLAGYASGYGLATLFHLPPNCKRTVCLETGSQNVQLCTAILKLAFPPQFIGSMYMFPLLYALFQSAEAGIFVLIYKMYGSEMLHKRDPLDEDEDTDISYKKLKEEEMADTSYGTVKAENIIMMETAQTSL

SEQ ID NO: 80320 - protein, 438 aa, Homo sapiens
  Payload ID: 16017
  Gene Symbol: SLC10A5
  Gene Name: solute carrier family 10, member 5
  Uniprot ID: Q5PT55
  ENSP ID: ENSP00000428612
MIRKLFIVLLLLLVTIEEARMSSLSFLNIEKTEILFFTKTEETILVSSSYENKRPNSSHLFVKIEDPKILQMVNVAKKISSDATNFTINLVTDEEGETNVTIQLWDSEGRQERLIEEIKNVKVKVLKQKDSLLQAPMHIDRNILMLILPLILLNKCAFGCKIELQLFQTVWKRPLPVILGAVTQFFLMPFCGFLLSQIVALPEAQAFGVVMTCTCPGGGGGYLFALLLDGDFTLAILMTCTSTLLALIMMPVNSYIYSRILGLSGTFHIPVSKIVSTLLFILVPVSIGIVIKHRIPEKASFLERIIRPLSFILMFVGIYLTFTVGLVFLKTDNLEVILLGLLVPALGLLFGYSFAKVCTLPLPVCKTVAIESGMLNSFLALAVIQLSFPQSKANLASVAPFTVAMCSGCEMLLIILVYKAKKRCIFFLQDKRKRNFLI

SEQ ID NO: 80321 - protein, 340 aa, Homo sapiens
  Payload ID: 16018
  Gene Symbol: SLC10A7
  Gene Name: solute carrier family 10, member 7
  Uniprot ID: Q0GE19
  ENSP ID: ENSP00000334594
MRLLERMRKDWFMVGIVLAIAGAKLEPSIGVNGGPLKPEITVSYIAVATIFFNSGLSLKTEELTSALVHLKLHLFIQIFTLAFFPATIWLFLQLLSITPINEWLLKGLQTVGCMPPPVSSAVILTKAVGGNEAAAIFNSAFGSFLGIVITPLLLLLFLGSSSSVPFTSIFSQLFMTVVVPLIIGQIVRRYIKDWLERKKPPFGAISSSVLLMIIYTTFCDTFSNPNIDLDKFSLVLILFIIFSIQLSFMLLTFIFSTRNNSGFTPADTVAIIFCSTHKSLTLGIPMLKIVFAGHEHLSLISVPLLIYHPAQILLGSVLVPTIKSWMVSRQKGVKLTRPTV

SEQ ID NO: 80322 - protein, 159 aa, Homo sapiens
  Payload ID: 16018
  Gene Symbol: SLC10A7
  Gene Name: solute carrier family 10, member 7
  Uniprot ID: Q0GE19
  ENSP ID: ENSP00000377623
MRLLERMRKDWFMVGIVLAIAGAKLEPSIGVNGGPLKPEITVSYIAVATIFFNSGLSLKTEELTSALVHLKLHLFIQIFTLAFFPATIWLFLQLLSITPINEWLLKGLQTVGCMPPPVSSAVILTKAVGGNEAAAIFNSAFGSFLVSKHSLTCLLQLLL

SEQ ID NO: 80323 - protein, 327 aa, Homo sapiens
  Payload ID: 16018
  Gene Symbol: SLC10A7
  Gene Name: solute carrier family 10, member 7
  Uniprot ID: Q0GE19
  ENSP ID: ENSP00000411297
MRLLERMRKDWFMVGIVLAIAGAKLEPSIGVNGGPLKPEITVSYIAVATIFFNSGLSLKTEELTSALVHLKLHLFIQIFTLAFFPATIWLFLQLLSITPINEWLLKGLQTVGCMPPPVSSAVILTKAVGGNEGIVITPLLLLLFLGSSSSVPFTSIFSQLFMTVVVPLIIGQIVRRYIKDWLERKKPPFGAISSSVLLMIIYTTFCDTFSNPNIDLDKFSLVLILFIIFSIQLSFMLLTFIFSTRNNSGFTPADTVAIIFCSTHKSLTLGIPMLKIVFAGHEHLSLISVPLLIYHPAQILLGSVLVPTIKSWMVSRQKGVKLTRPTV

SEQ ID NO: 80324 - protein, 358 aa, Homo sapiens
  Payload ID: 16018
  Gene Symbol: SLC10A7
  Gene Name: solute carrier family 10, member 7
  Uniprot ID: Q0GE19
  ENSP ID: ENSP00000421275
MRLLERMRKDWFMVGIVLAIAGAKLEPSIGVNGGPLKPEITVSYIAVATIFFNSGLSLKTEELTSALVHLKLHLFIQIFTLAFFPATIWLFLQLLSITPINEWLLKGLQTVGCMPPPVSSAVILTKAVGGNEAAAIFNSAFGSFLGIVITPLLLLLFLGSSSSVPFTSIFSQLFMTVVVPLIIGQIVRRYIKDWLERKKPPFGAISSSVLLMIIYTTFCDTFSNPNIDLDKFSLVLILFIIFSIQLSFMLLTFIFSTRNNSGFTPADTVAIIFCSTHKSLTLGIPMLKIVFAGHEHLSLISVPLLIYHPAQILLGSVLVPTIKSWMVSRQKKLLQTRGPLANLNNPEGLEYLSIKFGH

SEQ ID NO: 80325 - protein, 85 aa, Homo sapiens
  Payload ID: 16018
  Gene Symbol: SLC10A7
  Gene Name: solute carrier family 10, member 7
  Uniprot ID: Q0GE19
  ENSP ID: ENSP00000421603
MRLLERMRKDWFMVGIVLAIAGAKLEPSIGVNGGPLKPEITVSYIAVATIFFNSGLSLKTEFADSRLHASACVFCSDFNQGSWWK

SEQ ID NO: 80326 - protein, 64 aa, Homo sapiens
  Payload ID: 16018
  Gene Symbol: SLC10A7
  Gene Name: solute carrier family 10, member 7
  Uniprot ID: Q0GE19
  ENSP ID: ENSP00000422577
MRLLERMRKDWFMVGIVLAIAGAKLEPSIGVNGGPLKPEITVSYIAVATIFFNSGLSLKTELLT

SEQ ID NO: 80327 - protein, 550 aa, Homo sapiens
  Payload ID: 16019
  Gene Symbol: SLC11A1
  Gene Name: solute carrier family 11 (proton-coupled divalent metal ion transporter), member 1
  Uniprot ID: P49279
  ENSP ID: ENSP00000233202
MTGDKGPQRLSGSSYGSISSPTSPTSPGPQQAPPRETYLSEKIPIPDTKPGTFSLRKLWAFTGPGFLMSIAFLDPGNIESDLQAGAVAGFKLLWVLLWATVLGLLCQRLAARLGVVTGKDLGEVCHLYYPKVPRTVLWLTIELAIVGSDMQEVIGTAIAFNLLSAGRIPLWGGVLITIVDTFFFLFLDNYGLRKLEAFFGLLITIMALTFGYEYVVARPEQGALLRGLFLPSCPGCGHPELLQAVGIVGAIIMPHNIYLHSALVKSREIDRARRADIREANMYFLIEATIALSVSFIINLFVMAVFGQAFYQKTNQAAFNICANSSLHDYAKIFPMNNATVAVDIYQGGVILGCLFGPAALYIWAIGLLAAGQSSTMTGTYAGQFVMEGFLRLRWSRFARVLLTRSCAILPTVLVAVFRDLRDLSGLNDLLNVLQSLLLPFAVLPILTFTSMPTLMQEFANGLLNKVVTSSIMVLVCAINLYFVVSYLPSLPHPAYFGLAALLAAAYLGLSTYLVWTCCLAHGATFLAHSSHHHFLYGLLEEDQKGETSG

SEQ ID NO: 80328 - protein, 163 aa, Homo sapiens
  Payload ID: 16019
  Gene Symbol: SLC11A1
  Gene Name: solute carrier family 11 (proton-coupled divalent metal ion transporter), member 1
  ENSP ID: ENSP00000346320
MTGDKGPQRLSGSSYGSISSPTSPTSPGPQQAPPRETYLSEKIPIPDTKPGTFSLRKLWAFTGPGFLMSIAFLDPGNIESDLQAGAVAGFKLLWVLLWATVLGLLCQRLAARLGVVTGKDLGEVCHLYYPKSESRSVAQSGVQWCDVSSLQPLPPRCPAPSSG

SEQ ID NO: 80329 - protein, 82 aa, Homo sapiens
  Payload ID: 16019
  Gene Symbol: SLC11A1
  Gene Name: solute carrier family 11 (proton-coupled divalent metal ion transporter), member 1
  ENSP ID: ENSP00000443435
MTGHLQPAEAMGLHGAWLPHEHCFPGPRKHRVRSSGWRRGGIQTSLGAALGHRVGLALPATGCTSGRGDRQGLGRGLPSLLP

SEQ ID NO: 80330 - protein, 41 aa, Homo sapiens
  Payload ID: 16019
  Gene Symbol: SLC11A1
  Gene Name: solute carrier family 11 (proton-coupled divalent metal ion transporter), member 1
  ENSP ID: ENSP00000483970
MTASLGAALGHRVGLALPATGCTSGRGDRQGLGRGLPSLLP

SEQ ID NO: 80331 - protein, 90 aa, Homo sapiens
  Payload ID: 16019
  Gene Symbol: SLC11A1
  Gene Name: solute carrier family 11 (proton-coupled divalent metal ion transporter), member 1
  ENSP ID: ENSP00000484905
MTGDKGPQRLSGSSYGSISSPTSPTSPGPQQAPPRETYLSEKIPIPDTKPETSSQIFRLAPWRDSNFSGCCSGPPCWACSASDWLHVWAW

SEQ ID NO: 80332 - protein, 568 aa, Homo sapiens
  Payload ID: 16020
  Gene Symbol: SLC11A2
  Gene Name: solute carrier family 11 (proton-coupled divalent metal ion transporter), member 2
  Uniprot ID: P49281
  ENSP ID: ENSP00000262051
MVLGPEQKMSDDSVSGDHGESASLGNINPAYSNPSLSQSPGDSEEYFATYFNEKISIPEEEYSCFSFRKLWAFTGPGFLMSIAYLDPGNIESDLQSGAVAGFKLLWILLLATLVGLLLQRLAARLGVVTGLHLAEVCHRQYPKVPRVILWLMVELAIIGSDMQEVIGSAIAINLLSVGRIPLWGGVLITIADTFVFLFLDKYGLRKLEAFFGFLITIMALTFGYEYVTVKPSQSQVLKGMFVPSCSGCRTPQIEQAVGIVGAVIMPHNMYLHSALVKSRQVNRNNKQEVREANKYFFIESCIALFVSFIINVFVVSVFAEAFFGKTNEQVVEVCTNTSSPHAGLFPKDNSTLAVDIYKGGVVLGCYFGPAALYIWAVGILAAGQSSTMTGTYSGQFVMEGFLNLKWSRFARVVLTRSIAIIPTLLVAVFQDVEHLTGMNDFLNVLQSLQLPFALIPILTFTSLRPVMSDFANGLGWRIAGGILVLIICSINMYFVVVYVRDLGHVALYVVAAVVSVAYLGFVFYLGWQCLIALGMSFLDCGHTCHLGLTAQPELYLLNTMDADSLVSR

SEQ ID NO: 80333 - protein, 561 aa, Homo sapiens
  Payload ID: 16020
  Gene Symbol: SLC11A2
  Gene Name: solute carrier family 11 (proton-coupled divalent metal ion transporter), member 2
  Uniprot ID: P49281
  ENSP ID: ENSP00000262052
MVLGPEQKMSDDSVSGDHGESASLGNINPAYSNPSLSQSPGDSEEYFATYFNEKISIPEEEYSCFSFRKLWAFTGPGFLMSIAYLDPGNIESDLQSGAVAGFKLLWILLLATLVGLLLQRLAARLGVVTGLHLAEVCHRQYPKVPRVILWLMVELAIIGSDMQEVIGSAIAINLLSVGRIPLWGGVLITIADTFVFLFLDKYGLRKLEAFFGFLITIMALTFGYEYVTVKPSQSQVLKGMFVPSCSGCRTPQIEQAVGIVGAVIMPHNMYLHSALVKSRQVNRNNKQEVREANKYFFIESCIALFVSFIINVFVVSVFAEAFFGKTNEQVVEVCTNTSSPHAGLFPKDNSTLAVDIYKGGVVLGCYFGPAALYIWAVGILAAGQSSTMTGTYSGQFVMEGFLNLKWSRFARVVLTRSIAIIPTLLVAVFQDVEHLTGMNDFLNVLQSLQLPFALIPILTFTSLRPVMSDFANGLGWRIAGGILVLIICSINMYFVVVYVRDLGHVALYVVAAVVSVAYLGFVFYLGWQCLIALGMSFLDCGHTVSISKGLLTEEATRGYVK

SEQ ID NO: 80334 - protein, 590 aa, Homo sapiens
  Payload ID: 16020
  Gene Symbol: SLC11A2
  Gene Name: solute carrier family 11 (proton-coupled divalent metal ion transporter), member 2
  Uniprot ID: P49281
  ENSP ID: ENSP00000378364
MRKKQLKTEAAPHCELKSYSKNSATQVSTMVLGPEQKMSDDSVSGDHGESASLGNINPAYSNPSLSQSPGDSEEYFATYFNEKISIPEEEYSCFSFRKLWAFTGPGFLMSIAYLDPGNIESDLQSGAVAGFKLLWILLLATLVGLLLQRLAARLGVVTGLHLAEVCHRQYPKVPRVILWLMVELAIIGSDMQEVIGSAIAINLLSVGRIPLWGGVLITIADTFVFLFLDKYGLRKLEAFFGFLITIMALTFGYEYVTVKPSQSQVLKGMFVPSCSGCRTPQIEQAVGIVGAVIMPHNMYLHSALVKSRQVNRNNKQEVREANKYFFIESCIALFVSFIINVFVVSVFAEAFFGKTNEQVVEVCTNTSSPHAGLFPKDNSTLAVDIYKGGVVLGCYFGPAALYIWAVGILAAGQSSTMTGTYSGQFVMEGFLNLKWSRFARVVLTRSIAIIPTLLVAVFQDVEHLTGMNDFLNVLQSLQLPFALIPILTFTSLRPVMSDFANGLGWRIAGGILVLIICSINMYFVVVYVRDLGHVALYVVAAVVSVAYLGFVFYLGWQCLIALGMSFLDCGHTVSISKGLLTEEATRGYVK

SEQ ID NO: 80335 - protein, 557 aa, Homo sapiens
  Payload ID: 16020
  Gene Symbol: SLC11A2
  Gene Name: solute carrier family 11 (proton-coupled divalent metal ion transporter), member 2
  Uniprot ID: P49281
  ENSP ID: ENSP00000442810
MSTVDYLNSVSGDHGESASLGNINPAYSNPSLSQSPGDSEEYFATYFNEKISIPEEEYSCFSFRKLWAFTGPGFLMSIAYLDPGNIESDLQSGAVAGFKLLWILLLATLVGLLLQRLAARLGVVTGLHLAEVCHRQYPKVPRVILWLMVELAIIGSDMQEVIGSAIAINLLSVGRIPLWGGVLITIADTFVFLFLDKYGLRKLEAFFGFLITIMALTFGYEYVTVKPSQSQVLKGMFVPSCSGCRTPQIEQAVGIVGAVIMPHNMYLHSALVKSRQVNRNNKQEVREANKYFFIESCIALFVSFIINVFVVSVFAEAFFGKTNEQVVEVCTNTSSPHAGLFPKDNSTLAVDIYKGGVVLGCYFGPAALYIWAVGILAAGQSSTMTGTYSGQFVMEGFLNLKWSRFARVVLTRSIAIIPTLLVAVFQDVEHLTGMNDFLNVLQSLQLPFALIPILTFTSLRPVMSDFANGLGWRIAGGILVLIICSINMYFVVVYVRDLGHVALYVVAAVVSVAYLGFVFYLGWQCLIALGMSFLDCGHTVSISKGLLTEEATRGYVK

SEQ ID NO: 80336 - protein, 561 aa, Homo sapiens; identical to SEQ ID NO: 80333
  Payload ID: 16020
  Gene Symbol: SLC11A2
  Gene Name: solute carrier family 11 (proton-coupled divalent metal ion transporter), member 2
  Uniprot ID: P49281
  ENSP ID: ENSP00000444542

SEQ ID NO: 80337 - protein, 73 aa, Homo sapiens
  Payload ID: 16020
  Gene Symbol: SLC11A2
  Gene Name: solute carrier family 11 (proton-coupled divalent metal ion transporter), member 2
  ENSP ID: ENSP00000446653
MVLGPEQKMSDDSVSGDHGESASLGNINPAYSNPSLSQSPGDSEEYFATYFNEKISIPEEENKRLMEPAVLLF

SEQ ID NO: 80338 - protein, 568 aa, Homo sapiens; identical to SEQ ID NO: 80332
  Payload ID: 16020
  Gene Symbol: SLC11A2
  Gene Name: solute carrier family 11 (proton-coupled divalent metal ion transporter), member 2
  Uniprot ID: P49281
  ENSP ID: ENSP00000446769

SEQ ID NO: 80339 - protein, 482 aa, Homo sapiens
  Payload ID: 16020
  Gene Symbol: SLC11A2
  Gene Name: solute carrier family 11 (proton-coupled divalent metal ion transporter), member 2
  ENSP ID: ENSP00000446914
MSIAYLDPGNIESDLQSGAVAGFKLLWILLLATLVGLLLQRLAARLGVVTGLHLAEVCHRQYPKVPRVILWLMVELAIIGSDMQEVIGSAIAINLLSVGRIPLWGGVLITIADTFVFLFLDKYGLRKLEAFFGFLITIMALTFGYEYVTVKPSQSQVLKGMFVPSCSGCRTPQIEQAVGIVGAVIMPHNMYLHSALVKSRQVNRNNKQEVREANKYFFIESCIALFVSFIINVFVVSVFAEAFFGKTNEQVVEVCTNTSSPHAGLFPKDNSTLAVDIYKGGVVLGCYFGPAALYIWAVGILAAGQSSTMTGTYSGQFVMEGFLNLKWSRFARVVLTRSIAIIPTLLVAVFQDVEHLTGMNDFLNVLQSLQLPFALIPILTFTSLRPVMSDFANGLGWRIAGGILVLIICSINMYFVVVYVRDLGHVALYVVAAVVSVAYLGFVFYLGWQCLIALGMSFLDCGHTVSISKGLLTEEATRGYVK

SEQ ID NO: 80340 - protein, 147 aa, Homo sapiens
  Payload ID: 16020
  Gene Symbol: SLC11A2
  Gene Name: solute carrier family 11 (proton-coupled divalent metal ion transporter), member 2
  ENSP ID: ENSP00000446984
MTVFLEIMGSLPVLYSCFSFRKLWAFTGPGFLMSIAYLDPGNIESDLQSGAVAGFKLLWILLLATLVGLLLQRLAARLGVVTGLHLAEVCHRQYPKVPRVILWLMVELAIIGSDMQEVIGSAIAINLLSVGRIPLWGGVLITIADTF

SEQ ID NO: 80341 - protein, 98 aa, Homo sapiens
  Payload ID: 16020
  Gene Symbol: SLC11A2
  Gene Name: solute carrier family 11 (proton-coupled divalent metal ion transporter), member 2
  ENSP ID: ENSP00000447102
MSIAYLDPGNIESDLQSGAVAGFKLLWILLLATLVGLLLQRLAARLGVVTGLHLAEVCHRQYPKVPRVILWLMVELAIIGSDMQEVIGSAIAINLLSV

SEQ ID NO: 80342 - protein, 87 aa, Homo sapiens
  Payload ID: 16020
  Gene Symbol: SLC11A2
  Gene Name: solute carrier family 11 (proton-coupled divalent metal ion transporter), member 2
  ENSP ID: ENSP00000447334
MSIAYLDPGNIESDLQSGAVAGFKLLWILLLATLVGLLLQRLAARLGVVTGLHLAEVCHRQYPKVPRVILWLMVELAIIGSDMQEVI

SEQ ID NO: 80343 - protein, 150 aa, Homo sapiens
  Payload ID: 16020
  Gene Symbol: SLC11A2
  Gene Name: solute carrier family 11 (proton-coupled divalent metal ion transporter), member 2
  ENSP ID: ENSP00000447482
MSIAYLDPGNIESDLQSGAVAGFKLLWILLLATLVGLLLQRLAARLGVVTGLHLAEVCHRQYPKVPRVILWLMVELAIIGSDMQEVIGSAIAINLLSVGRIPLWGGVLITIADTFVFLFLDKYGLRKLEAFFGFLITIMALTFGYEYVTV

SEQ ID NO: 80344 - protein, 3 aa, Homo sapiens
  Payload ID: 16020
  Gene Symbol: SLC11A2
  Gene Name: solute carrier family 11 (proton-coupled divalent metal ion transporter), member 2
  ENSP ID: ENSP00000448273
MVL

SEQ ID NO: 80345 - protein, 80 aa, Homo sapiens
  Payload ID: 16020
  Gene Symbol: SLC11A2
  Gene Name: solute carrier family 11 (proton-coupled divalent metal ion transporter), member 2
  ENSP ID: ENSP00000448501
MVLGPEQKMSDDSVSGDHGESASLGNINPAYSNPSLSQSPGDSEEYFATYFNEKISIPEEEARVQWCNPGSPQPPPPAFK

SEQ ID NO: 80346 - protein, 568 aa, Homo sapiens; identical to SEQ ID NO: 80332
  Payload ID: 16020
  Gene Symbol: SLC11A2
  Gene Name: solute carrier family 11 (proton-coupled divalent metal ion transporter), member 2
  Uniprot ID: P49281
  ENSP ID: ENSP00000449008

SEQ ID NO: 80347 - protein, 590 aa, Homo sapiens; identical to SEQ ID NO: 80334
  Payload ID: 16020
  Gene Symbol: SLC11A2
  Gene Name: solute carrier family 11 (proton-coupled divalent metal ion transporter), member 2
  Uniprot ID: P49281
  ENSP ID: ENSP00000449200

SEQ ID NO: 80348 - protein, 149 aa, Homo sapiens
  Payload ID: 16020
  Gene Symbol: SLC11A2
  Gene Name: solute carrier family 11 (proton-coupled divalent metal ion transporter), member 2
  ENSP ID: ENSP00000449209
MVLGPEQKMSDDSVSGDHGESASLGNINPAYSNPSLSQSPGDSEEYFATYFNEKISIPEEEYSCFSFRKLWAFTGPGFLMSIAYLDPGNIESDLQSGAVAGFKLLWILLLATLVGLLLQRLAARLGVVTGLHLAEVCHRQYPKVPRVIL

SEQ ID NO: 80349 - protein, 126 aa, Homo sapiens
  Payload ID: 16020
  Gene Symbol: SLC11A2
  Gene Name: solute carrier family 11 (proton-coupled divalent metal ion transporter), member 2
  ENSP ID: ENSP00000450227
  MOD_RES (1)..(1): Any amino acid
XVLQSLQLPFALIPILTFTSLRPVMSDFANGLGWRIAGGILVLIICSINMYFVVVYVRDLGHVALYVVAAVVSVAYLGFVFYLGWQCLIALGMSFLDCGHTCHLGLTAQPELYLLNTMDADSLVSR

SEQ ID NO: 80350 - protein, 153 aa, Homo sapiens
  Payload ID: 16020
  Gene Symbol: SLC11A2
  Gene Name: solute carrier family 11 (proton-coupled divalent metal ion transporter), member 2
  ENSP ID: ENSP00000450389
MVLGPEQKMSDDSVSGDHGESASLGNINPAYSNPSLSQSPGDSEEYFATYFNEKISIPEEEVPRVILWLMVELAIIGSDMQEVIGSAIAINLLSVGRIPLWGGVLITIADTFVFLFLDKYGLRKLEAFFGFLITIMALTFGYEYVTVKPSQSQ

SEQ ID NO: 80351 - protein, 1085 aa, Homo sapiens
  Payload ID: 16021
  Gene Symbol: SLC12A4
  Gene Name: solute carrier family 12 (potassium/chloride transporter), member 4
  Uniprot ID: Q9UP95
  ENSP ID: ENSP00000318557
MPHFTVVPVDGPRRGDYDNLEGLSWVDYGERAELDDSDGHGNHRESSPFLSPLEASRGIDYYDRNLALFEEELDIRPKVSSLLGKLVSYTNLTQGAKEHEEAESGEGTRRRAAEAPSMGTLMGVYLPCLQNIFGVILFLRLTWMVGTAGVLQALLIVLICCCCTLLTAISMSAIATNGVVPAGGSYFMISRSLGPEFGGAVGLCFYLGTTFAAAMYILGAIEILLTYIAPPAAIFYPSGAHDTSNATLNNMRVYGTIFLTFMTLVVFVGVKYVNKFASLFLACVIISILSIYAGGIKSIFDPPVFPVCMLGNRTLSRDQFDICAKTAVVDNETVATQLWSFFCHSPNLTTDSCDPYFMLNNVTEIPGIPGAAAGVLQENLWSAYLEKGDIVEKHGLPSADAPSLKESLPLYVVADIATSFTVLVGIFFPSVTGIMAGSNRSGDLRDAQKSIPVGTILAIITTSLVYFSSVVLFGACIEGVVLRDKYGDGVSRNLVVGTLAWPSPWVIVIGSFFSTCGAGLQSLTGAPRLLQAIAKDNIIPFLRVFGHGKVNGEPTWALLLTALIAELGILIASLDMVAPILSMFFLMCYLFVNLACAVQTLLRTPNWRPRFKYYHWALSFLGMSLCLALMFVSSWYYALVAMLIAGMIYKYIEYQGAEKEWGDGIRGLSLSAARYALLRLEEGPPHTKNWRPQLLVLLKLDEDLHVKYPRLLTFASQLKAGKGLTIVGSVIQGSFLESYGEAQAAEQTIKNMMEIEKVKGFCQVVVASKVREGLAHLIQSCGLGGMRHNSVVLGWPYGWRQSEDPRAWKTFIDTVRCTTAAHLALLVPKNIAFYPSNHERYLEGHIDVWWIVHDGGMLMLLPFLLRQHKVWRKCRMRIFTVAQMDDNSIQMKKDLAVFLYHLRLEAEVEVVEMHNSDISAYTYERTLMMEQRSQMLRQMRLTKTEREREAQLVKDRHSALRLESLYSDEEDESAVGADKIQMTWTRDKYMTETWDPSHAPDNFRELVHIKPDQSNVRRMHTAVKLNEVIVTRSHDARLVLLNMPGPPRNSEGDENYMEFLEVLTEGLERVLLVRGGGREVITIYS

SEQ ID NO: 80352 - protein, 1087 aa, Homo sapiens
  Payload ID: 16021
  Gene Symbol: SLC12A4
  Gene Name: solute carrier family 12 (potassium/chloride transporter), member 4
  Uniprot ID: Q9UP95
  ENSP ID: ENSP00000395983
MRAGGACRPGAAGTAAGTAAGGWDGGCGGAEPARCLTSPWCQWTGRGAATMTTSRGSVGWTTGSAPSWMTRTEELDIRPKVSSLLGKLVSYTNLTQGAKEHEEAESGEGTRRRAAEAPSMGTLMGVYLPCLQNIFGVILFLRLTWMVGTAGVLQALLIVLICCCCTLLTAISMSAIATNGVVPAGGSYFMISRSLGPEFGGAVGLCFYLGTTFAAAMYILGAIEILLTYIAPPAAIFYPSGAHDTSNATLNNMRVYGTIFLTFMTLVVFVGVKYVNKFASLFLACVIISILSIYAGGIKSIFDPPVFPVCMLGNRTLSRDQFDICAKTAVVDNETVATQLWSFFCHSPNLTTDSCDPYFMLNNVTEIPGIPGAAAGVLQENLWSAYLEKGDIVEKHGLPSADAPSLKESLPLYVVADIATSFTVLVGIFFPSVTGIMAGSNRSGDLRDAQKSIPVGTILAIITTSLVYFSSVVLFGACIEGVVLRDKYGDGVSRNLVVGTLAWPSPWVIVIGSFFSTCGAGLQSLTGAPRLLQAIAKDNIIPFLRVFGHGKVNGEPTWALLLTALIAELGILIASLDMVAPILSMFFLMCYLFVNLACAVQTLLRTPNWRPRFKYYHWALSFLGMSLCLALMFVSSWYYALVAMLIAGMIYKYIEYQGAEKEWGDGIRGLSLSAARYALLRLEEGPPHTKNWRPQLLVLLKLDEDLHVKYPRLLTFASQLKAGKGLTIVGSVIQGSFLESYGEAQAAEQTIKNMMEIEKVKGFCQVVVASKVREGLAHLIQSCGLGGMRHNSVVLGWPYGWRQSEDPRAWKTFIDTVRCTTAAHLALLVPKNIAFYPSNHERYLEGHIDVWWIVHDGGMLMLLPFLLRQHKVWRKCRMRIFTVAQMDDNSIQMKKDLAVFLYHLRLEAEVEVVEMHNSDISAYTYERTLMMEQRSQMLRQMRLTKTEREREAQLVKDRHSALRLESLYSDEEDESAVGADKIQMTWTRDKYMTETWDPSHAPDNFRELVHIKPDQSNVRRMHTAVKLNEVIVTRSHDARLVLLNMPGPPRNSEGDENYMEFLEVLTEGLERVLLVRGGGREVITIYS

SEQ ID NO: 80353 - protein, 1054 aa, Homo sapiens
  Payload ID: 16021
  Gene Symbol: SLC12A4
  Gene Name: solute carrier family 12 (potassium/chloride transporter), member 4
  Uniprot ID: Q9UP95
  ENSP ID: ENSP00000438334
MGDTLSPGHGNHRESSPFLSPLEASRGIDYYDRNLALFEEELDIRPKVSSLLGKLVSYTNLTQGAKEHEEAESGEGTRRRAAEAPSMGTLMGVYLPCLQNIFGVILFLRLTWMVGTAGVLQALLIVLICCCCTLLTAISMSAIATNGVVPAGGSYFMISRSLGPEFGGAVGLCFYLGTTFAAAMYILGAIEILLTYIAPPAAIFYPSGAHDTSNATLNNMRVYGTIFLTFMTLVVFVGVKYVNKFASLFLACVIISILSIYAGGIKSIFDPPVFPVCMLGNRTLSRDQFDICAKTAVVDNETVATQLWSFFCHSPNLTTDSCDPYFMLNNVTEIPGIPGAAAGVLQENLWSAYLEKGDIVEKHGLPSADAPSLKESLPLYVVADIATSFTVLVGIFFPSVTGIMAGSNRSGDLRDAQKSIPVGTILAIITTSLVYFSSVVLFGACIEGVVLRDKYGDGVSRNLVVGTLAWPSPWVIVIGSFFSTCGAGLQSLTGAPRLLQAIAKDNIIPFLRVFGHGKVNGEPTWALLLTALIAELGILIASLDMVAPILSMFFLMCYLFVNLACAVQTLLRTPNWRPRFKYYHWALSFLGMSLCLALMFVSSWYYALVAMLIAGMIYKYIEYQGAEKEWGDGIRGLSLSAARYALLRLEEGPPHTKNWRPQLLVLLKLDEDLHVKYPRLLTFASQLKAGKGLTIVGSVIQGSFLESYGEAQAAEQTIKNMMEIEKVKGFCQVVVASKVREGLAHLIQSCGLGGMRHNSVVLGWPYGWRQSEDPRAWKTFIDTVRCTTAAHLALLVPKNIAFYPSNHERYLEGHIDVWWIVHDGGMLMLLPFLLRQHKVWRKCRMRIFTVAQMDDNSIQMKKDLAVFLYHLRLEAEVEVVEMHNSDISAYTYERTLMMEQRSQMLRQMRLTKTEREREAQLVKDRHSALRLESLYSDEEDESAVGADKIQMTWTRDKYMTETWDPSHAPDNFRELVHIKPDQSNVRRMHTAVKLNEVIVTRSHDARLVLLNMPGPPRNSEGDENYMEFLEVLTEGLERVLLVRGGGREVITIYS

SEQ ID NO: 80354 - protein, 1079 aa, Homo sapiens
  Payload ID: 16021
  Gene Symbol: SLC12A4
  Gene Name: solute carrier family 12 (potassium/chloride transporter), member 4
  Uniprot ID: Q9UP95
  ENSP ID: ENSP00000445962
MAAEGAVCGFVYLEGTAWAVPEDTEPLASCTLGHGNHRESSPFLSPLEASRGIDYYDRNLALFEEELDIRPKVSSLLGKLVSYTNLTQGAKEHEEAESGEGTRRRAAEAPSMGTLMGVYLPCLQNIFGVILFLRLTWMVGTAGVLQALLIVLICCCCTLLTAISMSAIATNGVVPAGGSYFMISRSLGPEFGGAVGLCFYLGTTFAAAMYILGAIEILLTYIAPPAAIFYPSGAHDTSNATLNNMRVYGTIFLTFMTLVVFVGVKYVNKFASLFLACVIISILSIYAGGIKSIFDPPVFPVCMLGNRTLSRDQFDICAKTAVVDNETVATQLWSFFCHSPNLTTDSCDPYFMLNNVTEIPGIPGAAAGVLQENLWSAYLEKGDIVEKHGLPSADAPSLKESLPLYVVADIATSFTVLVGIFFPSVTGIMAGSNRSGDLRDAQKSIPVGTILAIITTSLVYFSSVVLFGACIEGVVLRDKYGDGVSRNLVVGTLAWPSPWVIVIGSFFSTCGAGLQSLTGAPRLLQAIAKDNIIPFLRVFGHGKVNGEPTWALLLTALIAELGILIASLDMVAPILSMFFLMCYLFVNLACAVQTLLRTPNWRPRFKYYHWALSFLGMSLCLALMFVSSWYYALVAMLIAGMIYKYIEYQGAEKEWGDGIRGLSLSAARYALLRLEEGPPHTKNWRPQLLVLLKLDEDLHVKYPRLLTFASQLKAGKGLTIVGSVIQGSFLESYGEAQAAEQTIKNMMEIEKVKGFCQVVVASKVREGLAHLIQSCGLGGMRHNSVVLGWPYGWRQSEDPRAWKTFIDTVRCTTAAHLALLVPKNIAFYPSNHERYLEGHIDVWWIVHDGGMLMLLPFLLRQHKVWRKCRMRIFTVAQMDDNSIQMKKDLAVFLYHLRLEAEVEVVEMHNSDISAYTYERTLMMEQRSQMLRQMRLTKTEREREAQLVKDRHSALRLESLYSDEEDESAVGADKIQMTWTRDKYMTETWDPSHAPDNFRELVHIKPDQSNVRRMHTAVKLNEVIVTRSHDARLVLLNMPGPPRNSEGDENYMEFLEVLTEGLERVLLVRGGGREVITIYS

SEQ ID NO: 80355 - protein, 1068 aa, Homo sapiens
  Payload ID: 16021
  Gene Symbol: SLC12A4
  Gene Name: solute carrier family 12 (potassium/chloride transporter), member 4
  Uniprot ID: Q9UP95
  ENSP ID: ENSP00000458902
MPHFTVVPVDGPRRGDYDNLEGLSWVDYGERAELDDSDGHGNHRESSPFLSPLEASRGIDYYDRNLALFEEELDIRPKVSSLLGKLVSYTNLTQGAKEHEEAESGEGTRRRAAEAPSMGTLMGVYLPCLQNIFGVILFLRLTWMVGTAGVLQALLIVLICCCCTLLTAISMSAIATNGVVPAGGSYFMISRSLGPEFGGAVGLCFYLGTTFAAAMYILGAIEILLTYIAPPAAIFYPSGAHDTSNATLNNMRVYGTIFLTFMTLVVFVGVKYVNKFASLFLACVIISILSIYAGGIKSIFDPPVFPVCMLGNRTLSRDQFDICAKTAVVDNETVATQLWSFFCHSPNLTTDSCDPYFMLNNVTEIPGIPGAAAGVLQENLWSAYLEKGDIVEKHGLPSADAPSLKESLPLYVVADIATSFTVLVGIFFPSVTGIMAGSNRSGDLRDAQKSIPVGTILAIITTSLVYFSSVVLFGACIEGVVLRDKYGDGVSRNLVVGTLAWPSPWVIVIGSFFSTCGAGLQSLTGAPRLLQAIAKDNIIPFLRVFGHGKVNGEPTWALLLTALIAELGILIASLDMVAPILSMFFLMCYLFVNLACAVQTLLRTPNWRPRFKYYHWALSFLGMSLCLALMFVSSWYYALVAMLIAGMIYKYIEYQGAEKEWGDGIRGLSLSAARYALLRLEEGPPHTKNWRPQLLVLLKLDEDLHVKYPRLLTFASQLKAGKGLTIVGSVIQGSFLESYGEAQAAEQTIKNMMEIEKVKGFCQVVVASKVREGLAHLIQSCGLGGMRHNSVVLGWPYGWRQSEDPRAWKTFIDTVRCTTAAHLALLVPKNIAFYPSNHERYLEGHIDVWWIVHDGGMLMLLPFLLRQHKVWRKCRMRIFTVAQMDDNSIQMKKDLAVFLYHLRLEAEVEVVEMHNSDISAYTYERTLMMEQRSQMLRQMRLTKTEREREAQLVKDRHSALRLESLYSDEEDESAVGADKIQMTWTRDKYMTETWDPSHAPDNFRELVHIKPDQSNVRRMHTAVKLNEVIVTRSHDARLVLLNMPGPPRNSEGDENCIPLWRGRQLGGG

SEQ ID NO: 80356 - protein, 54 aa, Homo sapiens
  Payload ID: 16021
  Gene Symbol: SLC12A4
  Gene Name: solute carrier family 12 (potassium/chloride transporter), member 4
  ENSP ID: ENSP00000458975
MPHFTVVPVDGPRRGDYDNLEGLSWVDYGERAELDDSDDLHCPTSCHFLPIGCS

SEQ ID NO: 80357 - protein, 1037 aa, Homo sapiens
  Payload ID: 16021
  Gene Symbol: SLC12A4
  Gene Name: solute carrier family 12 (potassium/chloride transporter), member 4
  ENSP ID: ENSP00000461403
MTTSRGSVGWTTGSAPSWMTRTEELDIRPKVSSLLGKLVSYTNLTQGAKEHEEAESGEGTRRRAAEAPSMGTLMGVYLPCLQNIFGVILFLRLTWMVGTAGVLQALLIVLICCCCTLLTAISMSAIATNGVVPAGGSYFMISRSLGPEFGGAVGLCFYLGTTFAAAMYILGAIEILLTYIAPPAAIFYPSGAHDTSNATLNNMRVYGTIFLTFMTLVVFVGVKYVNKFASLFLACVIISILSIYAGGIKSIFDPPVFPVCMLGNRTLSRDQFDICAKTAVVDNETVATQLWSFFCHSPNLTTDSCDPYFMLNNVTEIPGIPGAAAGVLQENLWSAYLEKGDIVEKHGLPSADAPSLKESLPLYVVADIATSFTVLVGIFFPSVTGIMAGSNRSGDLRDAQKSIPVGTILAIITTSLVYFSSVVLFGACIEGVVLRDKYGDGVSRNLVVGTLAWPSPWVIVIGSFFSTCGAGLQSLTGAPRLLQAIAKDNIIPFLRVFGHGKVNGEPTWALLLTALIAELGILIASLDMVAPILSMFFLMCYLFVNLACAVQTLLRTPNWRPRFKYYHWALSFLGMSLCLALMFVSSWYYALVAMLIAGMIYKYIEYQGAEKEWGDGIRGLSLSAARYALLRLEEGPPHTKNWRPQLLVLLKLDEDLHVKYPRLLTFASQLKAGKGLTIVGSVIQGSFLESYGEAQAAEQTIKNMMEIEKVKGFCQVVVASKVREGLAHLIQSCGLGGMRHNSVVLGWPYGWRQSEDPRAWKTFIDTVRCTTAAHLALLVPKNIAFYPSNHERYLEGHIDVWWIVHDGGMLMLLPFLLRQHKVWRKCRMRIFTVAQMDDNSIQMKKDLAVFLYHLRLEAEVEVVEMHNSDISAYTYERTLMMEQRSQMLRQMRLTKTEREREAQLVKDRHSALRLESLYSDEEDESAVGADKIQMTWTRDKYMTETWDPSHAPDNFRELVHIKPDQSNVRRMHTAVKLNEVIVTRSHDARLVLLNMPGPPRNSEGDENYMEFLEVLTEGLERVLLVRGGGREVITIYS

SEQ ID NO: 80358 - protein, 19 aa, Homo sapiens
  Payload ID: 16021
  Gene Symbol: SLC12A4
  Gene Name: solute carrier family 12 (potassium/chloride transporter), member 4
  ENSP ID: ENSP00000463148
  MOD_RES (1)..(1): Any amino acid
XPDNFRELVHIKPMAHGDL

SEQ ID NO: 80359 - protein, 178 aa, Homo sapiens
  Payload ID: 16021
  Gene Symbol: SLC12A4
  Gene Name: solute carrier family 12 (potassium/chloride transporter), member 4
  ENSP ID: ENSP00000464168
MGTLMGVYLPCLQNIFGVILFLRLTWMVGTAGVLQALLIVLICCCCTLLTAISMSAIATNGVVPAGGSYFMISRSLGPEFGGAVGLCFYLGTTFAAAMYILGAIEILLTYIAPPAAIFYPSGAHDTSNATLNNMRVYGTIFLTFMTLVVFVGVKYVNKFASLFLACVIISILSIYAGG

SEQ ID NO: 80360 - protein, 90 aa, Homo sapiens
  Payload ID: 16021
  Gene Symbol: SLC12A4
  Gene Name: solute carrier family 12 (potassium/chloride transporter), member 4
  ENSP ID: ENSP00000464660
  MOD_RES (1)..(1): Any amino acid
XPQLLVLLKLDEDLHVKYPRLLTFASQLKAGKGLTIVGSVIQGSFLESYGEAQAAEQTPCAALRLPTWPCSCPRTSPSTPATTSATWRAT

SEQ ID NO: 80361 - protein, 1116 aa, Homo sapiens
  Payload ID: 16022
  Gene Symbol: SLC12A5
  Gene Name: solute carrier family 12 (potassium/chloride transporter), member 5
  Uniprot ID: Q9H2X9
  ENSP ID: ENSP00000243964
MLNNLTDCEDGDGGANPGDGNPKESSPFINSTDTEKGKEYDGKNMALFEEEMDTSPMVSSLLSGLANYTNLPQGSREHEEAENNEGGKKKPVQAPRMGTFMGVYLPCLQNIFGVILFLRLTWVVGIAGIMESFCMVFICCSCTMLTAISMSAIATNGVVPAGGSYYMISRSLGPEFGGAVGLCFYLGTTFAGAMYILGTIEILLAYLFPAMAIFKAEDASGEAAAMLNNMRVYGTCVLTCMATVVFVGVKYVNKFALVFLGCVILSILAIYAGVIKSAFDPPNFPICLLGNRTLSRHGFDVCAKLAWEGNETVTTRLWGLFCSSRFLNATCDEYFTRNNVTEIQGIPGAASGLIKENLWSSYLTKGVIVERSGMTSVGLADGTPIDMDHPYVFSDMTSYFTLLVGIYFPSVTGIMAGSNRSGDLRDAQKSIPTGTILAIATTSAVYISSVVLFGACIEGVVLRDKFGEAVNGNLVVGTLAWPSPWVIVIGSFFSTCGAGLQSLTGAPRLLQAISRDGIVPFLQVFGHGKANGEPTWALLLTACICEIGILIASLDEVAPILSMFFLMCYMFVNLACAVQTLLRTPNWRPRFRYYHWTLSFLGMSLCLALMFICSWYYALVAMLIAGLIYKYIEYRGAEKEWGDGIRGLSLSAARYALLRLEEGPPHTKNWRPQLLVLVRVDQDQNVVHPQLLSLTSQLKAGKGLTIVGSVLEGTFLENHPQAQRAEESIRRLMEAEKVKGFCQVVISSNLRDGVSHLIQSGGLGGLQHNTVLVGWPRNWRQKEDHQTWRNFIELVRETTAGHLALLVTKNVSMFPGNPERFSEGSIDVWWIVHDGGMLMLLPFLLRHHKVWRKCKMRIFTVAQMDDNSIQMKKDLTTFLYHLRITAEVEVVEMHESDISAYTYEKTLVMEQRSQILKQMHLTKNEREREIQSITDESRGSIRRKNPANTRLRLNVPEETAGDSEEKPEEEVQLIHDQSAPSCPSSSPSPGEEPEGEGETDPEKVHLTWTKDKSVAEKNKGPSPVSSEGIKDFFSMKPEWENLNQSNVRRMHTAVRLNEVIVKKSRDAKLVLLNMPGPPRNRNGDENYMEFLEVLTEHLDRVMLVRGGGREVITIYS

SEQ ID NO: 80362 - protein, 1139 aa, Homo sapiens
  Payload ID: 16022
  Gene Symbol: SLC12A5
  Gene Name: solute carrier family 12 (potassium/chloride transporter), member 5
  Uniprot ID: Q9H2X9
  ENSP ID: ENSP00000387694
MSRRFTVTSLPPAGPARSPDPESRRHSVADPRHLPGEDVKGDGNPKESSPFINSTDTEKGKEYDGKNMALFEEEMDTSPMVSSLLSGLANYTNLPQGSREHEEAENNEGGKKKPVQAPRMGTFMGVYLPCLQNIFGVILFLRLTWVVGIAGIMESFCMVFICCSCTMLTAISMSAIATNGVVPAGGSYYMISRSLGPEFGGAVGLCFYLGTTFAGAMYILGTIEILLAYLFPAMAIFKAEDASGEAAAMLNNMRVYGTCVLTCMATVVFVGVKYVNKFALVFLGCVILSILAIYAGVIKSAFDPPNFPICLLGNRTLSRHGFDVCAKLAWEGNETVTTRLWGLFCSSRFLNATCDEYFTRNNVTEIQGIPGAASGLIKENLWSSYLTKGVIVERSGMTSVGLADGTPIDMDHPYVFSDMTSYFTLLVGIYFPSVTGIMAGSNRSGDLRDAQKSIPTGTILAIATTSAVYISSVVLFGACIEGVVLRDKFGEAVNGNLVVGTLAWPSPWVIVIGSFFSTCGAGLQSLTGAPRLLQAISRDGIVPFLQVFGHGKANGEPTWALLLTACICEIGILIASLDEVAPILSMFFLMCYMFVNLACAVQTLLRTPNWRPRFRYYHWTLSFLGMSLCLALMFICSWYYALVAMLIAGLIYKYIEYRGAEKEWGDGIRGLSLSAARYALLRLEEGPPHTKNWRPQLLVLVRVDQDQNVVHPQLLSLTSQLKAGKGLTIVGSVLEGTFLENHPQAQRAEESIRRLMEAEKVKGFCQVVISSNLRDGVSHLIQSGGLGGLQHNTVLVGWPRNWRQKEDHQTWRNFIELVRETTAGHLALLVTKNVSMFPGNPERFSEGSIDVWWIVHDGGMLMLLPFLLRHHKVWRKCKMRIFTVAQMDDNSIQMKKDLTTFLYHLRITAEVEVVEMHESDISAYTYEKTLVMEQRSQILKQMHLTKNEREREIQSITDESRGSIRRKNPANTRLRLNVPEETAGDSEEKPEEEVQLIHDQSAPSCPSSSPSPGEEPEGEGETDPEKVHLTWTKDKSVAEKNKGPSPVSSEGIKDFFSMKPEWENLNQSNVRRMHTAVRLNEVIVKKSRDAKLVLLNMPGPPRNRNGDENYMEFLEVLTEHLDRVMLVRGGGREVITIYS

SEQ ID NO: 80363 - protein, 186 aa, Homo sapiens
  Payload ID: 16022
  Gene Symbol: SLC12A5
  Gene Name: solute carrier family 12 (potassium/chloride transporter), member 5
  ENSP ID: ENSP00000446091
MLNNLTDCEDGDGGANPGDGNPKESSPFINSTDTEKGKEYDGKNMALFEEEMDTSPMVSSLLSGLANYTNLPQGSREHEEAENNEGGKKKPVQAPRMGTFMGVYLPCLQNIFGVILFLRLTWVVGIAGIMESFCMVFICCSCTMLTAISMSAIATNGVVPAGGSYYMISRSLAMARPMESRPGPCS

SEQ ID NO: 80364 - protein, 123 aa, Homo sapiens
  Payload ID: 16022
  Gene Symbol: SLC12A5
  Gene Name: solute carrier family 12 (potassium/chloride transporter), member 5
  ENSP ID: ENSP00000476885
MALFEEEMDTSPMVSSLLSGLANYTNLPQGSREHEEAENNEGGKKKPVQAPRMGTFMGVYLPCLQNIFGVILFLRLTWVVGIAGIMESFCMVFICCSCTMLTAISMSAIATNGVVPAGGSYYM

SEQ ID NO: 80365 - protein, 262 aa, Homo sapiens
  Payload ID: 16022
  Gene Symbol: SLC12A5
  Gene Name: solute carrier family 12 (potassium/chloride transporter), member 5
  ENSP ID: ENSP00000477569
MLNNLTDCEDGDGGANPGDGNPKESSPFINSTDTEKGKEYDGKNMALFEEEMDTSPMVSSLLSGLANYTNLPQGSREHEEAENNEGGKKKPVQAPRMGTFMGVYLPCLQNIFGVILFLRLTWVVGIAGIMESFCMVFICCSCTMLTAISMSAIATNGVVPAGGSYYMISRSLGPEFGGAVGLCFYLGTTFAGAMYILGTIEILLSLTLLPRLEGSGAVTDSLDFPGSNDPPHQFSLPSSWLTSSQPWPSSRQKMPVGRQQPC

SEQ ID NO: 80366 - protein, 289 aa, Homo sapiens
  Payload ID: 16022
  Gene Symbol: SLC12A5
  Gene Name: solute carrier family 12 (potassium/chloride transporter), member 5
  ENSP ID: ENSP00000478369
MLNNLTDCEDGDGGANPGDGNPKESSPFINSTDTEKGKEYDGKNMALFEEEMDTSPMVSSLLSGLANYTNLPQGSREHEEAENNEGGKKKPVQAPRMGTFMGVYLPCLQNIFGVILFLRLTWVVGIAGIMESFCMVFICCSCTMLTAISMSAIATNGVVPAGGSYYMISRSLGPEFGGAVGLCFYLGTTFAGAMYILGTIEILLRREQPLLIGSYASWGQDRGGVLLKRKKPRGPRPTEEAPPRCLRWGAGVSPQSACRLLPVSHGSSPKTEIVELEGAPSPEFPPWDK

SEQ ID NO: 80367 - protein, 459 aa, Homo sapiens [sequence omitted]

SEQ ID NO: 80368 - protein, 180 aa, Homo sapiens
  Payload ID: 16022
  Gene Symbol: SLC12A5
  Gene Name: solute carrier family 12 (potassium/chloride transporter), member 5
  ENSP ID: ENSP00000485953
MLNNLTDCEDGDGGANPGDGNPKESSPFINSTDTEKGKEYDGKNMALFEEEMDTSPMVSSLLSGLANYTNLPQGSREHEEAENNEGGKKKPVQAPRMGTFMGVYLPCLQNIFGVILFLRLTWVVGIAGIMESFCMVFICCSCTMLTAISMSAIATNGVVPAGGSYYMISRLSGWQEQSFR

SEQ ID NO: 80369 - protein, 53 aa, Homo sapiens
  Payload ID: 16022
  Gene Symbol: SLC12A5
  Gene Name: solute carrier family 12 (potassium/chloride transporter), member 5
  ENSP ID: ENSP00000486382
MSRRFTVTSLPPAGPARSPDPESRRHSVADPRHLPGEDVKANPTDPHVLAIHL

SEQ ID NO: 80370 - protein, 67 aa, Homo sapiens
  Payload ID: 16022
  Gene Symbol: SLC12A5
  Gene Name: solute carrier family 12 (potassium/chloride transporter), member 5
  ENSP ID: ENSP00000487291
  MOD_RES (1)..(1): Any amino acid
XHSVADPRHLPGEDVKVAPARGGGGGGGGGGGRGGGGRGGGRGGGGEGGGEASPDRQGSLPSRSKSN

SEQ ID NO: 80371 - protein, 120 aa, Homo sapiens
  Payload ID: 16022
  Gene Symbol: SLC12A5
  Gene Name: solute carrier family 12 (potassium/chloride transporter), member 5
  ENSP ID: ENSP00000487372
MSRRFTVTSLPPAGPARSPDPESRRHSVADPRHLPGEDVKVSPQGALIRGPLPGSEALGSGRNKANRLVVAPARGGGGGGGGGGGRGGGGRGGGRGGGGEGGGEASPDRQGSLPSRSKSN

SEQ ID NO: 80372 - protein, 58 aa, Homo sapiens
  Payload ID: 16022
  Gene Symbol: SLC12A5
  Gene Name: solute carrier family 12 (potassium/chloride transporter), member 5
  ENSP ID: ENSP00000487449
MLNNLTDCEDGDGGANPGDGNPKESSPFINSTDTEKGKEYDGKNMALFEPPSTDTLPP

SEQ ID NO: 80373 - protein, 1099 aa, Homo sapiens
  Payload ID: 16023
  Gene Symbol: SLC12A6
  Gene Name: solute carrier family 12 (potassium/chloride transporter), member 6
  Uniprot ID: Q9UHW9
  ENSP ID: ENSP00000290209
MPHFTVTKVEDPEEGAAASISQEPSLADIKARIQDSDEPDLSQNSITGEHSQLLDDGHKKARNAYLNNSNYEEGDEYFDKNLALFEEEMDTRPKVSSLLNRMANYTNLTQGAKEHEEAENITEGKKKPTKTPQMGTFMGVYLPCLQNIFGVILFLRLTWVVGTAGVLQAFAIVLICCCCTMLTAISMSAIATNGVVPAGGSYFMISRALGPEFGGAVGLCFYLGTTFAAAMYILGAIEIFLVYIVPRAAIFHSDDALKESAAMLNNMRVYGTAFLVLMVLVVFIGVRYVNKFASLFLACVIVSILAIYAGAIKSSFAPPHFPVCMLGNRTLSSRHIDVCSKTKEINNMTVPSKLWGFFCNSSQFFNATCDEYFVHNNVTSIQGIPGLASGIITENLWSNYLPKGEIIEKPSAKSSDVLGSLNHEYVLVDITTSFTLLVGIFFPSVTGIMAGSNRSGDLKDAQKSIPIGTILAILTTSFVYLSNVVLFGACIEGVVLRDKFGDAVKGNLVVGTLSWPSPWVIVIGSFFSTCGAGLQSLTGAPRLLQAIAKDNIIPFLRVFGHSKANGEPTWALLLTAAIAELGILIASLDLVAPILSMFFLMCYLFVNLACALQTLLRTPNWRPRFRYYHWALSFMGMSICLALMFISSWYYAIVAMVIAGMIYKYIEYQGAEKEWGDGIRGLSLSAARFALLRLEEGPPHTKNWRPQLLVLLKLDEDLHVKHPRLLTFASQLKAGKGLTIVGSVIVGNFLENYGEALAAEQTIKHLMEAEKVKGFCQLVVAAKLREGISHLIQSCGLGGMKHNTVVMGWPNGWRQSEDARAWKTFIGTVRVTTAAHLALLVAKNISFFPSNVEQFSEGNIDVWWIVHDGGMLMLLPFLLKQHKVWRKCSIRIFTVAQLEDNSIQMKKDLATFLYHLRIEAEVEVVEMHDSDISAYTYERTLMMEQRSQMLRHMRLSKTERDREAQLVKDRNSMLRLTSIGSDEDEETETYQEKVHMTWTKDKYMASRGQKAKSMEGFQDLLNMRPDQSNVRRMHTAVKLNEVIVNKSHEAKLVLLNMPGPPRNPEGDENYMEFLEVLTEGLERVLLVRGGGSEVITIYS

SEQ ID NO: 80374 - protein, 1150 aa, Homo sapiens
  Payload ID: 16023
  Gene Symbol: SLC12A6
  Gene Name: solute carrier family 12 (potassium/chloride transporter), member 6
  Uniprot ID: Q9UHW9
  ENSP ID: ENSP00000346112
MHPPETTTKMASVRFMVTPTKIDDIPGLSDTSPDLSSRSSSRVRFSSRESVPETSRSEPMSEMSGATTSLATVALDPPSDRTSHPQDVIEDLSQNSITGEHSQLLDDGHKKARNAYLNNSNYEEGDEYFDKNLALFEEEMDTRPKVSSLLNRMANYTNLTQGAKEHEEAENITEGKKKPTKTPQMGTFMGVYLPCLQNIFGVILFLRLTWVVGTAGVLQAFAIVLICCCCTMLTAISMSAIATNGVVPAGGSYFMISRALGPEFGGAVGLCFYLGTTFAAAMYILGAIEIFLVYIVPRAAIFHSDDALKESAAMLNNMRVYGTAFLVLMVLVVFIGVRYVNKFASLFLACVIVSILAIYAGAIKSSFAPPHFPVCMLGNRTLSSRHIDVCSKTKEINNMTVPSKLWGFFCNSSQFFNATCDEYFVHNNVTSIQGIPGLASGIITENLWSNYLPKGEIIEKPSAKSSDVLGSLNHEYVLVDITTSFTLLVGIFFPSVTGIMAGSNRSGDLKDAQKSIPIGTILAILTTSFVYLSNVVLFGACIEGVVLRDKFGDAVKGNLVVGTLSWPSPWVIVIGSFFSTCGAGLQSLTGAPRLLQAIAKDNIIPFLRVFGHSKANGEPTWALLLTAAIAELGILIASLDLVAPILSMFFLMCYLFVNLACALQTLLRTPNWRPRFRYYHWALSFMGMSICLALMFISSWYYAIVAMVIAGMIYKYIEYQGAEKEWGDGIRGLSLSAARFALLRLEEGPPHTKNWRPQLLVLLKLDEDLHVKHPRLLTFASQLKAGKGLTIVGSVIVGNFLENYGEALAAEQTIKHLMEAEKVKGFCQLVVAAKLREGISHLIQSCGLGGMKHNTVVMGWPNGWRQSEDARAWKTFIGTVRVTTAAHLALLVAKNISFFPSNVEQFSEGNIDVWWIVHDGGMLMLLPFLLKQHKVWRKCSIRIFTVAQLEDNSIQMKKDLATFLYHLRIEAEVEVVEMHDSDISAYTYERTLMMEQRSQMLRHMRLSKTERDREAQLVKDRNSMLRLTSIGSDEDEETETYQEKVHMTWTKDKYMASRGQKAKSMEGFQDLLNMRPDQSNVRRMHTAVKLNEVIVNKSHEAKLVLLNMPGPPRNPEGDENYMEFLEVLTEGLERVLLVRGGGSEVITIYS

SEQ ID NO: 80375 - protein, 1091 aa, Homo sapiens
  Payload ID: 16023
  Gene Symbol: SLC12A6
  Gene Name: solute carrier family 12 (potassium/chloride transporter), member 6
  Uniprot ID: Q9UHW9
  ENSP ID: ENSP00000380814
MSEMSGATTSLATVALDPPSDRTSHPQDVIEDLSQNSITGEHSQLLDDGHKKARNAYLNNSNYEEGDEYFDKNLALFEEEMDTRPKVSSLLNRMANYTNLTQGAKEHEEAENITEGKKKPTKTPQMGTFMGVYLPCLQNIFGVILFLRLTWVVGTAGVLQAFAIVLICCCCTMLTAISMSAIATNGVVPAGGSYFMISRALGPEFGGAVGLCFYLGTTFAAAMYILGAIEIFLVYIVPRAAIFHSDDALKESAAMLNNMRVYGTAFLVLMVLVVFIGVRYVNKFASLFLACVIVSILAIYAGAIKSSFAPPHFPVCMLGNRTLSSRHIDVCSKTKEINNMTVPSKLWGFFCNSSQFFNATCDEYFVHNNVTSIQGIPGLASGIITENLWSNYLPKGEIIEKPSAKSSDVLGSLNHEYVLVDITTSFTLLVGIFFPSVTGIMAGSNRSGDLKDAQKSIPIGTILAILTTSFVYLSNVVLFGACIEGVVLRDKFGDAVKGNLVVGTLSWPSPWVIVIGSFFSTCGAGLQSLTGAPRLLQAIAKDNIIPFLRVFGHSKANGEPTWALLLTAAIAELGILIASLDLVAPILSMFFLMCYLFVNLACALQTLLRTPNWRPRFRYYHWALSFMGMSICLALMFISSWYYAIVAMVIAGMIYKYIEYQGAEKEWGDGIRGLSLSAARFALLRLEEGPPHTKNWRPQLLVLLKLDEDLHVKHPRLLTFASQLKAGKGLTIVGSVIVGNFLENYGEALAAEQTIKHLMEAEKVKGFCQLVVAAKLREGISHLIQSCGLGGMKHNTVVMGWPNGWRQSEDARAWKTFIGTVRVTTAAHLALLVAKNISFFPSNVEQFSEGNIDVWWIVHDGGMLMLLPFLLKQHKVWRKCSIRIFTVAQLEDNSIQMKKDLATFLYHLRIEAEVEVVEMHDSDISAYTYERTLMMEQRSQMLRHMRLSKTERDREAQLVKDRNSMLRLTSIGSDEDEETETYQEKVHMTWTKDKYMASRGQKAKSMEGFQDLLNMRPDQSNVRRMHTAVKLNEVIVNKSHEAKLVLLNMPGPPRNPEGDENYMEFLEVLTEGLERVLLVRGGGSEVITIYS

SEQ ID NO: 80376 - protein, 1135 aa, Homo sapiens
  Payload ID: 16023
  Gene Symbol: SLC12A6
  Gene Name: solute carrier family 12 (potassium/chloride transporter), member 6
  Uniprot ID: Q9UHW9
  ENSP ID: ENSP00000380819
MHPPETTTKMASVRFMVTPTKIDDIPGLSDTSPDLSSRSSSRVRFSSRESVPETSRSEPMSEMSGATTSLATVALDPPSDRTSHPQDVIEDDGHKKARNAYLNNSNYEEGDEYFDKNLALFEEEMDTRPKVSSLLNRMANYTNLTQGAKEHEEAENITEGKKKPTKTPQMGTFMGVYLPCLQNIFGVILFLRLTWVVGTAGVLQAFAIVLICCCCTMLTAISMSAIATNGVVPAGGSYFMISRALGPEFGGAVGLCFYLGTTFAAAMYILGAIEIFLVYIVPRAAIFHSDDALKESAAMLNNMRVYGTAFLVLMVLVVFIGVRYVNKFASLFLACVIVSILAIYAGAIKSSFAPPHFPVCMLGNRTLSSRHIDVCSKTKEINNMTVPSKLWGFFCNSSQFFNATCDEYFVHNNVTSIQGIPGLASGIITENLWSNYLPKGEIIEKPSAKSSDVLGSLNHEYVLVDITTSFTLLVGIFFPSVTGIMAGSNRSGDLKDAQKSIPIGTILAILTTSFVYLSNVVLFGACIEGVVLRDKFGDAVKGNLVVGTLSWPSPWVIVIGSFFSTCGAGLQSLTGAPRLLQAIAKDNIIPFLRVFGHSKANGEPTWALLLTAAIAELGILIASLDLVAPILSMFFLMCYLFVNLACALQTLLRTPNWRPRFRYYHWALSFMGMSICLALMFISSWYYAIVAMVIAGMIYKYIEYQGAEKEWGDGIRGLSLSAARFALLRLEEGPPHTKNWRPQLLVLLKLDEDLHVKHPRLLTFASQLKAGKGLTIVGSVIVGNFLENYGEALAAEQTIKHLMEAEKVKGFCQLVVAAKLREGISHLIQSCGLGGMKHNTVVMGWPNGWRQSEDARAWKTFIGTVRVTTAAHLALLVAKNISFFPSNVEQFSEGNIDVWWIVHDGGMLMLLPFLLKQHKVWRKCSIRIFTVAQLEDNSIQMKKDLATFLYHLRIEAEVEVVEMHDSDISAYTYERTLMMEQRSQMLRHMRLSKTERDREAQLVKDRNSMLRLTSIGSDEDEETETYQEKVHMTWTKDKYMASRGQKAKSMEGFQDLLNMRPDQSNVRRMHTAVKLNEVIVNKSHEAKLVLLNMPGPPRNPEGDENYMEFLEVLTEGLERVLLVRGGGSEVITIYS

SEQ ID NO: 80377 - protein, 1091 aa, Homo sapiens; identical to SEQ ID NO: 80375
  Payload ID: 16023
  Gene Symbol: SLC12A6
  Gene Name: solute carrier family 12 (potassium/chloride transporter), member 6
  Uniprot ID: Q9UHW9
  ENSP ID: ENSP00000387725

SEQ ID NO: 80378 - protein, 962 aa, Homo sapiens
  Payload ID: 16023
  Gene Symbol: SLC12A6
  Gene Name: solute carrier family 12 (potassium/chloride transporter), member 6
  ENSP ID: ENSP00000452705
MDTRPKVSSLLNRMANYTNLTQGAKEHEEAENITEGKKKPTKTMLTAISMSAIATNGVVPAGGSYFMISRALGPEFGGAVGLCFYLGTTFAAAMYILGAIEIFLVYIVPRAAIFHSDDALKESAAMLNNMRVYGTAFLVLMVLVVFIGVRYVNKFASLFLACVIVSILAIYAGAIKSSFAPPHFPVCMLGNRTLSSRHIDVCSKTKEINNMTVPSKLWGFFCNSSQFFNATCDEYFVHNNVTSIQGIPGLASGIITENLWSNYLPKGEIIEKPSAKSSDVLGSLNHEYVLVDITTSFTLLVGIFFPSVTGIMAGSNRSGDLKDAQKSIPIGTILAILTTSFVYLSNVVLFGACIEGVVLRDKFGDAVKGNLVVGTLSWPSPWVIVIGSFFSTCGAGLQSLTGAPRLLQAIAKDNIIPFLRVFGHSKANGEPTWALLLTAAIAELGILIASLDLVAPILSMFFLMCYLFVNLACALQTLLRTPNWRPRFRYYHWALSFMGMSICLALMFISSWYYAIVAMVIAGMIYKYIEYQGAEKEWGDGIRGLSLSAARFALLRLEEGPPHTKNWRPQLLVLLKLDEDLHVKHPRLLTFASQLKAGKGLTIVGSVIVGNFLENYGEALAAEQTIKHLMEAEKVKGFCQLVVAAKLREGISHLIQSCGLGGMKHNTVVMGWPNGWRQSEDARAWKTFIGTVRVTTAAHLALLVAKNISFFPSNVEQFSEGNIDVWWIVHDGGMLMLLPFLLKQHKVWRKCSIRIFTVAQLEDNSIQMKKDLATFLYHLRIEAEVEVVEMHDSDISAYTYERTLMMEQRSQMLRHMRLSKTERDREAQLVKDRNSMLRLTSIGSDEDEETETYQEKVHMTWTKDKYMASRGQKAKSMEGFQDLLNMRPDQSNVRRMHTAVKLNEVIVNKSHEAKLVLLNMPGPPRNPEGDENYMEFLEVLTEGLERVLLVRGGGSEVITIYS

SEQ ID NO: 80379 - protein, 152 aa, Homo sapiens
  Payload ID: 16023
  Gene Symbol: SLC12A6
  Gene Name: solute carrier family 12 (potassium/chloride transporter), member 6
  ENSP ID: ENSP00000452771
MASVRFMVTPTKIDDIPGLSDTSPDLSSRSSSRVRFSSRESVPETSRSEPMSEMSGATTSLATVALDPPSDRTSHPQDVIEDLSQNSITGEHSQLLDDGHKKARNAYLNNSNYEEGDEYFDKNLALFEEEMDTRPKVSSLLNRMANYTNLTQ

SEQ ID NO: 80380 - protein, 1141 aa, Homo sapiens
  Payload ID: 16023
  Gene Symbol: SLC12A6
  Gene Name: solute carrier family 12 (potassium/chloride transporter), member 6
  Uniprot ID: Q9UHW9
  ENSP ID: ENSP00000452776
MASVRFMVTPTKIDDIPGLSDTSPDLSSRSSSRVRFSSRESVPETSRSEPMSEMSGATTSLATVALDPPSDRTSHPQDVIEDLSQNSITGEHSQLLDDGHKKARNAYLNNSNYEEGDEYFDKNLALFEEEMDTRPKVSSLLNRMANYTNLTQGAKEHEEAENITEGKKKPTKTPQMGTFMGVYLPCLQNIFGVILFLRLTWVVGTAGVLQAFAIVLICCCCTMLTAISMSAIATNGVVPAGGSYFMISRALGPEFGGAVGLCFYLGTTFAAAMYILGAIEIFLVYIVPRAAIFHSDDALKESAAMLNNMRVYGTAFLVLMVLVVFIGVRYVNKFASLFLACVIVSILAIYAGAIKSSFAPPHFPVCMLGNRTLSSRHIDVCSKTKEINNMTVPSKLWGFFCNSSQFFNATCDEYFVHNNVTSIQGIPGLASGIITENLWSNYLPKGEIIEKPSAKSSDVLGSLNHEYVLVDITTSFTLLVGIFFPSVTGIMAGSNRSGDLKDAQKSIPIGTILAILTTSFVYLSNVVLFGACIEGVVLRDKFGDAVKGNLVVGTLSWPSPWVIVIGSFFSTCGAGLQSLTGAPRLLQAIAKDNIIPFLRVFGHSKANGEPTWALLLTAAIAELGILIASLDLVAPILSMFFLMCYLFVNLACALQTLLRTPNWRPRFRYYHWALSFMGMSICLALMFISSWYYAIVAMVIAGMIYKYIEYQGAEKEWGDGIRGLSLSAARFALLRLEEGPPHTKNWRPQLLVLLKLDEDLHVKHPRLLTFASQLKAGKGLTIVGSVIVGNFLENYGEALAAEQTIKHLMEAEKVKGFCQLVVAAKLREGISHLIQSCGLGGMKHNTVVMGWPNGWRQSEDARAWKTFIGTVRVTTAAHLALLVAKNISFFPSNVEQFSEGNIDVWWIVHDGGMLMLLPFLLKQHKVWRKCSIRIFTVAQLEDNSIQMKKDLATFLYHLRIEAEVEVVEMHDSDISAYTYERTLMMEQRSQMLRHMRLSKTERDREAQLVKDRNSMLRLTSIGSDEDEETETYQEKVHMTWTKDKYMASRGQKAKSMEGFQDLLNMRPDQSNVRRMHTAVKLNEVIVNKSHEAKLVLLNMPGPPRNPEGDENYMEFLEVLTEGLERVLLVRGGGSEVITIYS

SEQ ID NO: 80381 - protein, 135 aa, Homo sapiens
  Payload ID: 16023
  Gene Symbol: SLC12A6
  Gene Name: solute carrier family 12 (potassium/chloride transporter), member 6
  ENSP ID: ENSP00000452828
MHPPETTTKMASVRFMVTPTKIDDIPGLSDTSPDLSSRSSSRVRFSSRESVPETSRSEPMSEMSGATTSLATVALDPPSDRTSHPQDVIEDLSQNSITGEHSQLLDDGHKKARNAYLNNSNYEEGDEYFDKNLAL

SEQ ID NO: 80382 - protein, 60 aa, Homo sapiens
  Payload ID: 16023
  Gene Symbol: SLC12A6
  Gene Name: solute carrier family 12 (potassium/chloride transporter), member 6
  ENSP ID: ENSP00000452857
MSEMSGATTSLATVALDPPSDRTSHPQDVIEDLSQNSITGEHSQLLDDGHKKARNAYLNN

SEQ ID NO: 80383 - protein, 942 aa, Homo sapiens
  Payload ID: 16023
  Gene Symbol: SLC12A6
  Gene Name: solute carrier family 12 (potassium/chloride transporter), member 6
  ENSP ID: ENSP00000452904
MSEMSGATTSLATVALDPPSDRTSHPQDVIEDLSQNSITGEHSQLLDDGHKKARNAYLNNSNYEEGDEYFDKNLALFEEEMDTRPKVSSLLNRMANYTNLTQGAKEHEEAENITEGKKKPTKTPQMGTFMGVYLPCLQNIFGVILFLRLTWVVGTAGVLQAFAIVLICCCCTMLTAISMSAIATNGVVPAGGSYFMISRALGPEFGGAVGLCFYLGTTFAAAMYILGAIEIFLVYIVPRAAIFHSDDALKESAAMLNNMRVYGTAFLVLMVLVVFIGVRYVNKFASLFLACVIVSILAIYAGAIKSSFAPPHFPVCMLGNRTLSSRHIDVCSKTKEINNMTVPSKLWGFFCNSSQFFNATCDEYFVHNNVTSIQGIPGLASGIITENLWSNYLPKGEIIEKPSAKSSDVLGSLNHEYVLVDITTSFTLLVGIFFPSVTGIMAGSNRSGDLKDAQKSIPIGTILAILTTSFVYLSNVVLFGACIEGVVLRDKFGDAVKGNLVVGTLSWPSPWVIVIGSFFSTCGAGLQSLTGAPRLLQAIAKDNIIPFLRVFGHSKANGEPTWALLLTAAIAELGILIASLDLVAPILSMFFLMCYLFVNLACALQTLLRTPNWRPRFRYYHWALSFMGMSICLALMFISSWYYAIVAMVIAGMIYKYIEYQGAEKEWGDGIRGLSLSAARFALLRLEEGPPHTKNWRPQLLVLLKLDEDLHVKHPRLLTFASQLKAGKGLTIVGSVIVGNFLENYGEALAAEQTIKHLMEAEKVKGFCQLVVAAKLREGISHLIQSCGLGGMKHNTVVMGWPNGWRQSEDARAWKTFIGTVRVTTAAHLALLVAKNISFFPSNVEQFSEGNIDVWWIVHDGGMLMLLPFLLKQHKVWRKCSIRIFTVAQLEDNSIQMKKDLATFLYHLRIEAEVEVVEMVRKLSLRYKSMTVIYQHILTSAL

SEQ ID NO: 80384 - protein, 1150 aa, Homo sapiens; identical to SEQ ID NO: 80374
  Payload ID: 16023
  Gene Symbol: SLC12A6
  Gene Name: solute carrier family 12 (potassium/chloride transporter), member 6
  Uniprot ID: Q9UHW9
  ENSP ID: ENSP00000453473

SEQ ID NO: 80385 - protein, 906 aa, Homo sapiens
  Payload ID: 16023
  Gene Symbol: SLC12A6
  Gene Name: solute carrier family 12 (potassium/chloride transporter), member 6
  ENSP ID: ENSP00000453702
MHPPETTTKMASVRFMVTPTKIDDIPGLSDTSPDLSSRSSSRVRFSSRESVPETSRSEPMSEMSGATTSLATVALDPPSDRTSHPQDVIEDLSQNSITGEHSQLLDDGHKKARNAYLNNSNYEEGDEYFDKNLALFEEEMDTRPKVSSLLNRMANYTNLTQGAKEHEEAENITEGKKKPTKTPQMGTFMGVYLPCLQNIFGVILFLRLTWVVGTAGVLQAFAIVLICCCCTMLTAISMSAIATNGVVPAGGSYFMISRALGPEFGGAVGLCFYLGTTFAAAMYILGAIEIFLVYIVPRAAIFHSDDALKESAAMLNNMRVYGTAFLVLMVLVVFIGVRYVNKFASLFLACVIVSILAIYAGAIKSSFAPPHFPVCMLGNRTLSSRHIDVCSKTKEINNMTVPSKLWGFFCNSSQFFNATCDEYFVHNNVTSIQGIPGLASGIITENLWSNYLPKGEIIEKPSAKSSDVLGSLNHEYVLVDITTSFTLLVGIFFPSVTGIMAGSNRSGDLKDAQKSIPIGTILAILTTSFVYLSNVVLFGACIEGVVLRDKFGDAVKGNLVVGTLSWPSPWVIVIGSFFSTCGAGLQSLTGAPRLLQAIAKDNIIPFLRVFGHSKANGEPTWALLLTAAIAELGILIASLDLVAPILSMFFLMCYLFVNLACALQTLLRTPNWRPRFRYYHWALSFMGMSICLALMFISSWYYAIVAMVIAGMIYKYIEYQGAEKEWGDGIRGLSLSAARFALLRLEEGPPHTKNWRPQLLVLLKLDEDLHVKHPRLLTFASQLKAGKGLTIVGSVIVGNFLENYGEALAAEQTIKHLMEAEKVKGFCQLVVAAKLREGISHLIQSCGLGGMKHNTVVMGWPNGWRQSEDARAWKTFIAMWSNFLRATLMCGGLCMMGGCLCYYHSY

SEQ ID NO: 80386 - protein, 107 aa, Homo sapiens
  Payload ID: 16023
  Gene Symbol: SLC12A6
  Gene Name: solute carrier family 12 (potassium/chloride transporter), member 6
  ENSP ID: ENSP00000454037
MDTRPKVSSLLNRMANYTNLTQGAKEHEEAENITEGKKKPTKTPQMGTFMGVYLPCLQNIFGVILFLRLTWVVGTAGVLQAFAIVLICCCCTMLTAISMSAIATNGV

SEQ ID NO: 80387 - protein, 906 aa, Homo sapiens; identical to SEQ ID NO: 80385
  Payload ID: 16023
  Gene Symbol: SLC12A6
  Gene Name: solute carrier family 12 (potassium/chloride transporter), member 6
  ENSP ID: ENSP00000454069

SEQ ID NO: 80388 - protein, 1150 aa, Homo sapiens; identical to SEQ ID NO: 80374
  Payload ID: 16023
  Gene Symbol: SLC12A6
  Gene Name: solute carrier family 12 (potassium/chloride transporter), member 6
  Uniprot ID: Q9UHW9
  ENSP ID: ENSP00000454168

SEQ ID NO: 80389 - protein, 1083 aa, Homo sapiens
  Payload ID: 16024
  Gene Symbol: SLC12A7
  Gene Name: solute carrier family 12 (potassium/chloride transporter), member 7
  Uniprot ID: Q9Y666
  ENSP ID: ENSP00000264930
MPTNFTVVPVEAHADGGGDETAERTEAPGTPEGPEPERPSPGDGNPRENSPFLNNVEVEQESFFEGKNMALFEEEMDSNPMVSSLLNKLANYTNLSQGVVEHEEDEESRRREAKAPRMGTFIGVYLPCLQNILGVILFLRLTWIVGVAGVLESFLIVAMCCTCTMLTAISMSAIATNGVVPAGGSYYMISRSLGPEFGGAVGLCFYLGTTFAGAMYILGTIEIFLTYISPGAAIFQAEAAGGEAAAMLHNMRVYGTCTLVLMALVVFVGVKYVNKLALVFLACVVLSILAIYAGVIKSAFDPPDIPVCLLGNRTLSRRSFDACVKAYGIHNNSATSALWGLFCNGSQPSAACDEYFIQNNVTEIQGIPGAASGVFLENLWSTYAHAGAFVEKKGVPSVPVAEESRASALPYVLTDIAASFTLLVGIYFPSVTGIMAGSNRSGDLKDAQKSIPTGTILAIVTTSFIYLSCIVLFGACIEGVVLRDKFGEALQGNLVIGMLAWPSPWVIVIGSFFSTCGAGLQSLTGAPRLLQAIARDGIVPFLQVFGHGKANGEPTWALLLTVLICETGILIASLDSVAPILSMFFLMCYLFVNLACAVQTLLRTPNWRPRFKFYHWTLSFLGMSLCLALMFICSWYYALSAMLIAGCIYKYIEYRGAEKEWGDGIRGLSLNAARYALLRVEHGPPHTKNWRPQVLVMLNLDAEQAVKHPRLLSFTSQLKAGKGLTIVGSVLEGTYLDKHMEAQRAEENIRSLMSTEKTKGFCQLVVSSSLRDGMSHLIQSAGLGGLKHNTVLMAWPASWKQEDNPFSWKNFVDTVRDTTAAHQALLVAKNVDSFPQNQERFGGGHIDVWWIVHDGGMLMLLPFLLRQHKVWRKCRMRIFTVAQVDDNSIQMKKDLQMFLYHLRISAEVEVVEMVENDISAFTYERTLMMEQRSQMLKQMQLSKNEQEREAQLIHDRNTASHTAAAARTQAPPTPDKVQMTWTREKLIAEKYRSRDTSLSGFKDLFSMKPDQSNVRRMHTAVKLNGVVLNKSQDAQLVLLNMPGPPKNRQGDENYMEFLEVLTEGLNRVLLVRGGGREVITIYS

SEQ ID NO: 80390 - protein, 355 aa, Homo sapiens
  Payload ID: 16024
  Gene Symbol: SLC12A7
  Gene Name: solute carrier family 12 (potassium/chloride transporter), member 7
  ENSP ID: ENSP00000428854
  MOD_RES (1)..(1): Any amino acid
XYYALSAMLIAGCIYKYIEYRGAEKEWGDGIRGLSLNAARYALLRVEHGPPHTKNWRPQVLVMLNLDAEQAVKHPRLLSFTSQLKAGKGLTIVGSVLEGTYLDKHMEAQRAEENIRSLMSTEKTKGFCQLVVSSSLRDGMSHLIQSAGLGGLKHNTVLMAWPASWKQEDNPFSWKNFVDTVRDTTAAHQALLVAKNVDSFPQNQERFGGGHIDVWWIVHDGGMLMLLPFLLRQHKVWRKCRMRIFTVAQVDDNSIQMKKDLQMFLYHLRISAEVEVVEMVENDISAFTYERTLMMEQRSQMLKQMQLSKNEQEREAQLIHDRNTASHTAAAARTQAPPTPDKVQMTWTREKLIAE

SEQ ID NO: 80391 - protein, 1083 aa, Homo sapiens
  Payload ID: 16024
  Gene Symbol: SLC12A7
  Gene Name: solute carrier family 12 (potassium/chloride transporter), member 7
  ENSP ID: ENSP00000482242
MPTNFTVVPVEAHADGGGDETAERTEAPGTPEGPEPERPSPGDGNPRENSPFLNNVEVEQESFFEGKNMALFEEEMDSNPMVSSLLNKLANYTNLSQGVVEHEEDEESRRREAKAPRMGTFIGVYLPCLQNILGVILFLRLTWIVGVAGVLESFLIVAMCCTCTMLTAISMSAIATNGVVPAGGSYYMISRSLGPEFGGAVGLCFYLGTTFAGAMYILGTIEIFLTYISPGAAIFQAEAAGGEAAAMLHNMRVYGTCTLVLMALVVFVGVKYVNKLALVFLACVVLSILAIYAGVIKSAFDPPDIPVCLLGNRTLSRRSFDACVKAYGIHNNSATSALWGLFCNGSQPSAACDEYFIQNNVTEIQGIPGAASGVFLENLWSTYAHAGAFVEKKGVPSVPVAEESRASTLPYVLTDIAASFTLLVGIYFPSVTGIMAGSNRSGDLKDAQKSIPTGTILAIVTTSFIYLSCIVLFGACIEGVVLRDKFGEALQGNLVIGMLAWPSPWVIVIGSFFSTCGAGLQSLTGAPRLLQAIARDGIVPFLQVFGHGKANGEPTWALLLTVLICETGILIASLDSVAPILSMFFLMCYLFVNLACAVQTLLRTPNWRPRFKFYHWTLSFLGMSLCLALMFICSWYYALSAMLIAGCIYKYIEYRGAEKEWGDGIRGLSLNAARYALLRVEHGPPHTKNWRPQVLVMLNLDAEQAVKHPRLLSFTSQLKAGKGLTIVGSVLEGTYLDKHMEAQRAEENIRSLMSTEKTKGFCQLVVSSSLRDGMSHLIQSAGLGGLKHNTVLMAWPASWKQEDNPFSWKNFVDTVRDTTAAHQALLVAKNVDSFPQNQERFGGGHIDVWWIVHDGGMLMLLPFLLRQHKVWRKCRMRIFTVAQVDDNSIQMKKDLQMFLYHLRISAEVEVVEMVENDISAFTYERTLMMEQRSQMLKQMQLSKNEQEREAQLIHDRNTASHTAAAARTQAPPTPDKVQMTWTREKLIAEKYRSRDTSLSGFKDLFSMKPDQSNVRRMHTAVKLNGVVLNKSQDAQLVLLNMPGPPKNRQGDENYMEFLEVLTEGLNRVLLVRGGGREVITIYS

SEQ ID NO: 80392 - protein, 347 aa, Homo sapiens
  Payload ID: 16024
  Gene Symbol: SLC12A7
  Gene Name: solute carrier family 12 (potassium/chloride transporter), member 7
  ENSP ID: ENSP00000485792
  MOD_RES (1)..(1): Any amino acid
XVRGWTNPDFLSHRAEKEWGDGIRGLSLNAARYALLRVEHGPPHTKNWRPQVLVMLNLDAEQAVKHPRLLSFTSQLKAGKGLTIVGSVLEGTYLDKHMEAQRAEENIRSLMSTEKTKGFCQLVVSSSLRDGMSHLIQSAGLGGLKHNTVLMAWPASWKQEDNPFSWKNFVDTVRDTTAAHQALLVAKNVDSFPQNQERFGGGHIDVWWIVHDGGMLMLLPFLLRQHKVWRKCRMRIFTVAQVDDNSIQMKKDLQMFLYHLRISAEVEVVEMVENDISAFTYERTLMMEQRSQMLKQMQLSKNEQEREAQLIHDRNTASHTAAAARTQAPPTPDKVQMTWTREKLIAE

SEQ ID NO: 80393 - protein, 63 aa, Homo sapiens
  Payload ID: 16024
  Gene Symbol: SLC12A7
  Gene Name: solute carrier family 12 (potassium/chloride transporter), member 7
  ENSP ID: ENSP00000489272
PTWALLLTVLICETGILIASLDSVAPILSMFFLMCYLFVNLACAVQTLLRTPNWRPRFKFYHW

SEQ ID NO: 80394 - protein, 989 aa, Homo sapiens
  Payload ID: 16024
  Gene Symbol: SLC12A7
  Gene Name: solute carrier family 12 (potassium/chloride transporter), member 7
  ENSP ID: ENSP00000489285
  MOD_RES (1)..(1): Any amino acid
XEHEEDEESRRREAKAPRMGTFIGVYLPCLQNILGVILFLRLTWIVGVAGVLESFLIVAMCCTCTMLTAISMSAIATNGVVPAGGSYYMISRSLGPEFGGAVGLCFYLGTTFAGAMYILGTIEIFLTYISPGAAIFQAEAAGGEAAAMLHNMRVYGTCTLVLMALVVFVGVKYVNKLALVFLACVVLSILAIYAGVIKSAFDPPDIPVCLLGNRTLSRRSFDACVKAYGIHNNSATSALWGLFCNGSQPSAACDEYFIQNNVTEIQGIPGAASGVFLENLWSTYAHAGAFVEKKGVPSVPVAEESRASALPYVLTDIAASFTLLVGIYFPSVTGIMAGSNRSGDLKDAQKSIPTGTILAIVTTSFIYLSCIVLFGACIEGVVLRDKFGEALQGNLVIGMLAWPSPWVIVIGSFFSTCGAGLQSLTGAPRLLQAIARDGIVPFLQVFGHGKANGEPTWALLLTVLICETGILIASLDSVAPILSMFFLMCYLFVNLACAVQTLLRTPNWRPRFKFYHWTLSFLGMSLCLALMFICSWYYALSAMLIAGCIYKYIEYRGAEKEWGDGIRGLSLNAARYALLRVEHGPPHTKNWRPQVLVMLNLDAEQAVKHPRLLSFTSQLKAGKGLTIVGSVLEGTYLDKHMEAQRAEENIRSLMSTEKTKGFCQLVVSSSLRDGMSHLIQSAGLGGLKHNTVLMAWPASWKQEDNPFSWKNFVDTVRDTTAAHQALLVAKNVDSFPQNQERFGGGHIDVWWIVHDGGMLMLLPFLLRQHKVWRKCRMRIFTVAQVDDNSIQMKKDLQMFLYHLRISAEVEVVEMVENDISAFTYERTLMMEQRSQMLKQMQLSKNEQEREAQLIHDRNTASHTAAAARTQAPPTPDKVQMTWTREKLIAEKYRSRDTSLSGFKDLFSMKPEWGNLDQSNVRRMHTAVKLNGVVLNKSQDAQLVLLNMPGPPKNRQGDENYMEFLEVLTEGLNRVLLVRGGGREVITIYS

SEQ ID NO: 80395 - protein, 1020 aa, Homo sapiens
  Payload ID: 16025
  Gene Symbol: SLC12A3
  Gene Name: solute carrier family 12 (sodium/chloride transporter), member 3
  ENSP ID: ENSP00000262502
MAELPTTETPGDATLCSGRFTISTLLSSDEPSPPAAYDSSHPSHLTHSSTFCMRTFGYNTIDVVPTYEHYANSTQPGEPRKVRPTLADLHSFLKEGRHLHALAFDSRPSHEMTDGLVEGEAGTSSEKNPEEPVRFGWVKGVMIRCMLNIWGVILYLRLPWITAQAGIVLTWIIILLSVTVTSITGLSISAISTNGKVKSGGTYFLISRSLGPELGGSIGLIFAFANAVGVAMHTVGFAETVRDLLQEYGAPIVDPINDIRIIAVVSVTVLLAISLAGMEWESKAQVLFFLVIMVSFANYLVGTLIPPSEDKASKGFFSYRADIFVQNLVPDWRGPDGTFFGMFSIFFPSATGILAGANISGDLKDPAIAIPKGTLMAIFWTTISYLAISATIGSCVVRDASGVLNDTVTPGWGACEGLACSYGWNFTECTQQHSCHYGLINYYQTMSMVSGFAPLITAGIFGATLSSALACLVSAAKVFQCLCEDQLYPLIGFFGKGYGKNKEPVRGYLLAYAIAVAFIIIAELNTIAPIISNFFLCSYALINFSCFHASITNSPGWRPSFQYYNKWAALFGAIISVVIMFLLTWWAALIAIGVVLFLLLYVIYKKPEVNWGSSVQAGSYNLALSYSVGLNEVEDHIKNYRPQCLVLTGPPNFRPALVDFVGTFTRNLSLMICGHVLIGPHKQRMPELQLIANGHTKWLNKRKIKAFYSDVIAEDLRRGVQILMQAAGLGRMKPNILVVGFKKNWQSAHPATVEDYIGILHDAFDFNYGVCVMRMREGLNVSKMMQAHINPVFDPAEDGKEASARVDPKALVKEEQATTIFQSEQGKKTIDIYWLFDDGGLTLLIPYLLGRKRRWSKCKIRVFVGGQINRMDQERKAIISLLSKFRLGFHEVHILPDINQNPRAEHTKRFEDMIAPFRLNDGFKDEATVNEMRRDCPWKISDEEITKNRVKSLRQVRLNEIVLDYSRDAALIVITLPIGRKGKCPSSLYMAWLETLSQDLRPPVILIRGNQENVLTFYCQ

SEQ ID NO: 80396 - protein, 1030 aa, Homo sapiens
  Payload ID: 16025
  Gene Symbol: SLC12A3
  Gene Name: solute carrier family 12 (sodium/chloride transporter), member 3
  Uniprot ID: P55017
  ENSP ID: ENSP00000402152
MAELPTTETPGDATLCSGRFTISTLLSSDEPSPPAAYDSSHPSHLTHSSTFCMRTFGYNTIDVVPTYEHYANSTQPGEPRKVRPTLADLHSFLKQEGRHLHALAFDSRPSHEMTDGLVEGEAGTSSEKNPEEPVRFGWVKGVMIRCMLNIWGVILYLRLPWITAQAGIVLTWIIILLSVTVTSITGLSISAISTNGKVKSGGTYFLISRSLGPELGGSIGLIFAFANAVGVAMHTVGFAETVRDLLQEYGAPIVDPINDIRIIAVVSVTVLLAISLAGMEWESKAQVLFFLVIMVSFANYLVGTLIPPSEDKASKGFFSYRADIFVQNLVPDWRGPDGTFFGMFSIFFPSATGILAGANISGDLKDPAIAIPKGTLMAIFWTTISYLAISATIGSCVVRDASGVLNDTVTPGWGACEGLACSYGWNFTECTQQHSCHYGLINYYQTMSMVSGFAPLITAGIFGATLSSALACLVSAAKVFQCLCEDQLYPLIGFFGKGYGKNKEPVRGYLLAYAIAVAFIIIAELNTIAPIISNFFLCSYALINFSCFHASITNSPGWRPSFQYYNKWAALFGAIISVVIMFLLTWWAALIAIGVVLFLLLYVIYKKPEVNWGSSVQAGSYNLALSYSVGLNEVEDHIKNYRPQCLVLTGPPNFRPALVDFVGTFTRNLSLMICGHVLIGPHKQRMPELQLIANGHTKWLNKRKIKAFYSDVIAEDLRRGVQILMQAAGLGRMKPNILVVGFKKNWQSAHPATVEDYIGILHDAFDFNYGVCVMRMREGLNVSKMMQAHINPVFDPAEDGKEASARGARPSVSGALDPKALVKEEQATTIFQSEQGKKTIDIYWLFDDGGLTLLIPYLLGRKRRWSKCKIRVFVGGQINRMDQERKAIISLLSKFRLGFHEVHILPDINQNPRAEHTKRFEDMIAPFRLNDGFKDEATVNEMRRDCPWKISDEEITKNRVKSLRQVRLNEIVLDYSRDAALIVITLPIGRKGKCPSSLYMAWLETLSQDLRPPVILIRGNQENVLTFYCQ

SEQ ID NO: 80397 - protein, 1021 aa, Homo sapiens
  Payload ID: 16025
  Gene Symbol: SLC12A3
  Gene Name: solute carrier family 12 (sodium/chloride transporter), member 3
  Uniprot ID: P55017
  ENSP ID: ENSP00000456149
MAELPTTETPGDATLCSGRFTISTLLSSDEPSPPAAYDSSHPSHLTHSSTFCMRTFGYNTIDVVPTYEHYANSTQPGEPRKVRPTLADLHSFLKQEGRHLHALAFDSRPSHEMTDGLVEGEAGTSSEKNPEEPVRFGWVKGVMIRCMLNIWGVILYLRLPWITAQAGIVLTWIIILLSVTVTSITGLSISAISTNGKVKSGGTYFLISRSLGPELGGSIGLIFAFANAVGVAMHTVGFAETVRDLLQEYGAPIVDPINDIRIIAVVSVTVLLAISLAGMEWESKAQVLFFLVIMVSFANYLVGTLIPPSEDKASKGFFSYRADIFVQNLVPDWRGPDGTFFGMFSIFFPSATGILAGANISGDLKDPAIAIPKGTLMAIFWTTISYLAISATIGSCVVRDASGVLNDTVTPGWGACEGLACSYGWNFTECTQQHSCHYGLINYYQTMSMVSGFAPLITAGIFGATLSSALACLVSAAKVFQCLCEDQLYPLIGFFGKGYGKNKEPVRGYLLAYAIAVAFIIIAELNTIAPIISNFFLCSYALINFSCFHASITNSPGWRPSFQYYNKWAALFGAIISVVIMFLLTWWAALIAIGVVLFLLLYVIYKKPEVNWGSSVQAGSYNLALSYSVGLNEVEDHIKNYRPQCLVLTGPPNFRPALVDFVGTFTRNLSLMICGHVLIGPHKQRMPELQLIANGHTKWLNKRKIKAFYSDVIAEDLRRGVQILMQAAGLGRMKPNILVVGFKKNWQSAHPATVEDYIGILHDAFDFNYGVCVMRMREGLNVSKMMQAHINPVFDPAEDGKEASARVDPKALVKEEQATTIFQSEQGKKTIDIYWLFDDGGLTLLIPYLLGRKRRWSKCKIRVFVGGQINRMDQERKAIISLLSKFRLGFHEVHILPDINQNPRAEHTKRFEDMIAPFRLNDGFKDEATVNEMRRDCPWKISDEEITKNRVKSLRQVRLNEIVLDYSRDAALIVITLPIGRKGKCPSSLYMAWLETLSQDLRPPVILIRGNQENVLTFYCQ

SEQ ID NO: 80398 - protein, 1029 aa, Homo sapiens
  Payload ID: 16025
  Gene Symbol: SLC12A3
  Gene Name: solute carrier family 12 (sodium/chloride transporter), member 3
  Uniprot ID: P55017
  ENSP ID: ENSP00000457552
MAELPTTETPGDATLCSGRFTISTLLSSDEPSPPAAYDSSHPSHLTHSSTFCMRTFGYNTIDVVPTYEHYANSTQPGEPRKVRPTLADLHSFLKEGRHLHALAFDSRPSHEMTDGLVEGEAGTSSEKNPEEPVRFGWVKGVMIRCMLNIWGVILYLRLPWITAQAGIVLTWIIILLSVTVTSITGLSISAISTNGKVKSGGTYFLISRSLGPELGGSIGLIFAFANAVGVAMHTVGFAETVRDLLQEYGAPIVDPINDIRIIAVVSVTVLLAISLAGMEWESKAQVLFFLVIMVSFANYLVGTLIPPSEDKASKGFFSYRADIFVQNLVPDWRGPDGTFFGMFSIFFPSATGILAGANISGDLKDPAIAIPKGTLMAIFWTTISYLAISATIGSCVVRDASGVLNDTVTPGWGACEGLACSYGWNFTECTQQHSCHYGLINYYQTMSMVSGFAPLITAGIFGATLSSALACLVSAAKVFQCLCEDQLYPLIGFFGKGYGKNKEPVRGYLLAYAIAVAFIIIAELNTIAPIISNFFLCSYALINFSCFHASITNSPGWRPSFQYYNKWAALFGAIISVVIMFLLTWWAALIAIGVVLFLLLYVIYKKPEVNWGSSVQAGSYNLALSYSVGLNEVEDHIKNYRPQCLVLTGPPNFRPALVDFVGTFTRNLSLMICGHVLIGPHKQRMPELQLIANGHTKWLNKRKIKAFYSDVIAEDLRRGVQILMQAAGLGRMKPNILVVGFKKNWQSAHPATVEDYIGILHDAFDFNYGVCVMRMREGLNVSKMMQAHINPVFDPAEDGKEASARGARPSVSGALDPKALVKEEQATTIFQSEQGKKTIDIYWLFDDGGLTLLIPYLLGRKRRWSKCKIRVFVGGQINRMDQERKAIISLLSKFRLGFHEVHILPDINQNPRAEHTKRFEDMIAPFRLNDGFKDEATVNEMRRDCPWKISDEEITKNRVKSLRQVRLNEIVLDYSRDAALIVITLPIGRKGKCPSSLYMAWLETLSQDLRPPVILIRGNQENVLTFYCQ

SEQ ID NO: 80399 - protein, 430 aa, Homo sapiens
  Payload ID: 16026
  Gene Symbol: SLC12A1
  Gene Name: solute carrier family 12 (sodium/potassium/chloride transporter), member 1
  ENSP ID: ENSP00000331550
MSLNNSSNVFLDSVPSNTNRFQVSVINENHESSAAADDNTDPPHYEETSFGDEAQKRLRISFRPGNQECYDNFLQSGETAKTDASFHAYDSHTNTYYLQTFGHNTMDAVPKIEYYRNTGSISGPKVNRPSLLEIHEQLAKNVAVTPSSADRVANGDGIPGDEQAENKEDDQAGVVKFGWVKGVLVRCMLNIWGVMLFIRLSWIVGEAGIGLGVLIILLSTMVTSITGLSTSAIATNGFVRGGGAYYLISRSLGPEFGGSIGLIFAFANAVAVAMYVVGFAETVVDLLKESDSMMVDPTNDIRIIGSITVVILLGISVAGMEWEAKAQVILLVILLIAIANFFIGTVIPSNNEKKSRGFFNYQASIFAENFGPRFTKGEGFFSVFAIFFPAATGILAGANISGDLEALRKQGASPLPQGAQSRRRRQTSLI

SEQ ID NO: 80400 - protein, 1099 aa, Homo sapiens
  Payload ID: 16026
  Gene Symbol: SLC12A1
  Gene Name: solute carrier family 12 (sodium/potassium/chloride transporter), member 1
  Uniprot ID: Q13621
  ENSP ID: ENSP00000370381
MSLNNSSNVFLDSVPSNTNRFQVSVINENHESSAAADDNTDPPHYEETSFGDEAQKRLRISFRPGNQECYDNFLQSGETAKTDASFHAYDSHTNTYYLQTFGHNTMDAVPKIEYYRNTGSISGPKVNRPSLLEIHEQLAKNVAVTPSSADRVANGDGIPGDEQAENKEDDQAGVVKFGWVKGVLVRCMLNIWGVMLFIRLSWIVGEAGIGLGVLIILLSTMVTSITGLSTSAIATNGFVRGGGAYYLISRSLGPEFGGSIGLIFAFANAVAVAMYVVGFAETVVDLLKESDSMMVDPTNDIRIIGSITVVILLGISVAGMEWEAKAQVILLVILLIAIANFFIGTVIPSNNEKKSRGFFNYQASIFAENFGPRFTKGEGFFSVFAIFFPAATGILAGANISGDLEDPQDAIPRGTMLAIFITTVAYLGVAICVGACVVRDATGNMNDTIISGMNCNGSAACGLGYDFSRCRHEPCQYGLMNNFQVMSMVSGFGPLITAGIFSATLSSALASLVSAPKVFQALCKDNIYKALQFFAKGYGKNNEPLRGYILTFLIAMAFILIAELNTIAPIISNFFLASYALINFSCFHASYAKSPGWRPAYGIYNMWVSLFGAVLCCAVMFVINWWAAVITYVIEFFLYVYVTCKKPDVNWGSSTQALSYVSALDNALELTTVEDHVKNFRPQCIVLTGGPMTRPALLDITHAFTKNSGLCICCEVFVGPRKLCVKEMNSGMAKKQAWLIKNKIKAFYAAVAADCFRDGVRSLLQASGLGRMKPNTLVIGYKKNWRKAPLTEIENYVGIIHDAFDFEIGVVIVRISQGFDISQVLQVQEELERLEQERLALEATIKDNECEEESGGIRGLFKKAGKLNITKTTPKKDGSINTSQSMHVGEFNQKLVEASTQFKKKQEKGTIDVWWLFDDGGLTLLIPYILTLRKKWKDCKLRIYVGGKINRIEEEKIVMASLLSKFRIKFADIHIIGDINIRPNKESWKVFEEMIEPYRLHESCKDLTTAEKLKRETPWKITDAELEAVKEKSYRQVRLNELLQEHSRAANLIVLSLPVARKGSISDLLYMAWLEILTKNLPPVLLVRGNHKNVLTFYS

SEQ ID NO: 80401 - protein, 1099 aa, Homo sapiens
  Payload ID: 16026
  Gene Symbol: SLC12A1
  Gene Name: solute carrier family 12 (sodium/potassium/chloride transporter), member 1
  Uniprot ID: Q13621
  ENSP ID: ENSP00000379822
MSLNNSSNVFLDSVPSNTNRFQVSVINENHESSAAADDNTDPPHYEETSFGDEAQKRLRISFRPGNQECYDNFLQSGETAKTDASFHAYDSHTNTYYLQTFGHNTMDAVPKIEYYRNTGSISGPKVNRPSLLEIHEQLAKNVAVTPSSADRVANGDGIPGDEQAENKEDDQAGVVKFGWVKGVLVRCMLNIWGVMLFIRLSWIVGEAGIGLGVIIIGLSVVVTTLTGISMSAICTNGVVRGGGAYYLISRSLGPEFGGSIGLIFAFANAVAVAMYVVGFAETVVDLLKESDSMMVDPTNDIRIIGSITVVILLGISVAGMEWEAKAQVILLVILLIAIANFFIGTVIPSNNEKKSRGFFNYQASIFAENFGPRFTKGEGFFSVFAIFFPAATGILAGANISGDLEDPQDAIPRGTMLAIFITTVAYLGVAICVGACVVRDATGNMNDTIISGMNCNGSAACGLGYDFSRCRHEPCQYGLMNNFQVMSMVSGFGPLITAGIFSATLSSALASLVSAPKVFQALCKDNIYKALQFFAKGYGKNNEPLRGYILTFLIAMAFILIAELNTIAPIISNFFLASYALINFSCFHASYAKSPGWRPAYGIYNMWVSLFGAVLCCAVMFVINWWAAVITYVIEFFLYVYVTCKKPDVNWGSSTQALSYVSALDNALELTTVEDHVKNFRPQCIVLTGGPMTRPALLDITHAFTKNSGLCICCEVFVGPRKLCVKEMNSGMAKKQAWLIKNKIKAFYAAVAADCFRDGVRSLLQASGLGRMKPNTLVIGYKKNWRKAPLTEIENYVGIIHDAFDFEIGVVIVRISQGFDISQVLQVQEELERLEQERLALEATIKDNECEEESGGIRGLFKKAGKLNITKTTPKKDGSINTSQSMHVGEFNQKLVEASTQFKKKQEKGTIDVWWLFDDGGLTLLIPYILTLRKKWKDCKLRIYVGGKINRIEEEKIVMASLLSKFRIKFADIHIIGDINIRPNKESWKVFEEMIEPYRLHESCKDLTTAEKLKRETPWKITDAELEAVKEKSYRQVRLNELLQEHSRAANLIVLSLPVARKGSISDLLYMAWLEILTKNLPPVLLVRGNHKNVLTFYS

SEQ ID NO: 80402 - protein, 648 aa, Homo sapiens
  Payload ID: 16026
  Gene Symbol: SLC12A1
  Gene Name: solute carrier family 12 (sodium/potassium/chloride transporter), member 1
  ENSP ID: ENSP00000453230
MLNIWGVMLFIRLSWIVGEAGIGLGVLIILLSTMVTSITGLSTSAIATNGFVRGGGAYYLISRSLGPEFGGSIGLIFAFANAVAVAMYVVGFAETVVDLLKESDSMMVDPTNDIRIIGSITVVILLGISVAGMEWEAKAQVILLVILLIAIANFFIGTVIPSNNEKKSRGFFNYQASIFAENFGPRFTKGEGFFSVFAIFFPAATGILAGANISGDLEDPQDAIPRGTMLAIFITTVAYLGVAICVGACVVRDATGNMNDTIISGMNCNGSAACGLGYDFSRCRHEPCQYGLMNNFQVMSMVSGFGPLITAGIFSATLSSALASLVSAPKVFQALCKDNIYKALQFFAKGYGKNNEPLRGYILTFLIAMAFILIAELNTIAPIISNFFLASYALINFSCFHASYAKSPGWRPAYGIYNMWVSLFGAVLCCAVMFVINWWAAVITYVIEFFLYVYVTCKKPDVNWGSSTQALSYVSALDNALELTTVEDHVKNFRPQCIVLTGGPMTRPALLDITHAFTKNSGLCICCEVFVGPRKLCVKEMNSGMAKKQAWLIKNKIKAFYAAVAADCFRDGVRSLLQASGLGRMKPNTLVIGYKKNWRKAPLTEIENYVGIIHDAFDFEIGVVIVRISQGFDISQVLQVQEELERLE

SEQ ID NO: 80403 - protein, 1099 aa, Homo sapiens; identical to SEQ ID NO: 80400
  Payload ID: 16026
  Gene Symbol: SLC12A1
  Gene Name: solute carrier family 12 (sodium/potassium/chloride transporter), member 1
  Uniprot ID: Q13621
  ENSP ID: ENSP00000453409

SEQ ID NO: 80404 - protein, 113 aa, Homo sapiens
  Payload ID: 16026
  Gene Symbol: SLC12A1
  Gene Name: solute carrier family 12 (sodium/potassium/chloride transporter), member 1
  ENSP ID: ENSP00000453602
MLNIWGVMLFIRLSWIVGEAGIGLGVLIILLSTMVTSITGLSTSAIATNGFVRGGGAYYLISRSLGPEFGGSIGLIFAFANAVAVAMYVVGFAETVVDLLKESDSMMVDPTND

SEQ ID NO: 80405 - protein, 103 aa, Homo sapiens
  Payload ID: 16026
  Gene Symbol: SLC12A1
  Gene Name: solute carrier family 12 (sodium/potassium/chloride transporter), member 1
  ENSP ID: ENSP00000454054
  MOD_RES (1)..(1): Any amino acid
XAQVILLVILLIAIANFFIGTVIPSNNEKKSRGFFNYQASIFAENFGPRFTKGEGFFSVFAIFFPAATGILAGANISGDLEVRCLLCFAVLGVVVHLVGSTRS

SEQ ID NO: 80406 - protein, 217 aa, Homo sapiens
  Payload ID: 16026
  Gene Symbol: SLC12A1
  Gene Name: solute carrier family 12 (sodium/potassium/chloride transporter), member 1
  ENSP ID: ENSP00000454178
MSLNNSSNVFLDSVPSNTNRFQVSVINENHESSAAADDNTDPPHYEETSFGDEAQKRLRISFRPGNQECYDNFLQSGETAKTDASFHAYDSHTNTYYLQTFGHNTMDAVPKIEYYRNTGSISGPKVNRPSLLEIHEQLAKNVAVTPSSADRVANGDGIPGDEQAENKEDDQAGVVKFGWVKGVLVRCMLNIWGVMLFIRLSWIVGEAGIEYPSWHDW

SEQ ID NO: 80407 - protein, 1212 aa, Homo sapiens
  Payload ID: 16027
  Gene Symbol: SLC12A2
  Gene Name: solute carrier family 12 (sodium/potassium/chloride transporter), member 2
  Uniprot ID: P55011
  ENSP ID: ENSP00000262461
MEPRPTAPSSGAPGLAGVGETPSAAALAAARVELPGTAVPSVPEDAAPASRDGGGVRDEGPAAAGDGLGRPLGPTPSQSRFQVDLVSENAGRAAAAAAAAAAAAAAAGAGAGAKQTPADGEASGESEPAKGSEEAKGRFRVNFVDPAASSSAEDSLSDAAGVGVDGPNVSFQNGGDTVLSEGSSLHSGGGGGSGHHQHYYYDTHTNTYYLRTFGHNTMDAVPRIDHYRHTAAQLGEKLLRPSLAELHDELEKEPFEDGFANGEESTPTRDAVVTYTAESKGVVKFGWIKGVLVRCMLNIWGVMLFIRLSWIVGQAGIGLSVLVIMMATVVTTITGLSTSAIATNGFVRGGGAYYLISRSLGPEFGGAIGLIFAFANAVAVAMYVVGFAETVVELLKEHSILMIDEINDIRIIGAITVVILLGISVAGMEWEAKAQIVLLVILLLAIGDFVIGTFIPLESKKPKGFFGYKSEIFNENFGPDFREEETFFSVFAIFFPAATGILAGANISGDLADPQSAIPKGTLLAILITTLVYVGIAVSVGSCVVRDATGNVNDTIVTELTNCTSAACKLNFDFSSCESSPCSYGLMNNFQVMSMVSGFTPLISAGIFSATLSSALASLVSAPKIFQALCKDNIYPAFQMFAKGYGKNNEPLRGYILTFLIALGFILIAELNVIAPIISNFFLASYALINFSVFHASLAKSPGWRPAFKYYNMWISLLGAILCCIVMFVINWWAALLTYVIVLGLYIYVTYKKPDVNWGSSTQALTYLNALQHSIRLSGVEDHVKNFRPQCLVMTGAPNSRPALLHLVHDFTKNVGLMICGHVHMGPRRQAMKEMSIDQAKYQRWLIKNKMKAFYAPVHADDLREGAQYLMQAAGLGRMKPNTLVLGFKKDWLQADMRDVDMYINLFHDAFDIQYGVVVIRLKEGLDISHLQGQEELLSSQEKSPGTKDVVVSVEYSKKSDLDTSKPLSEKPITHKVEEEDGKTATQPLLKKESKGPIVPLNVADQKLLEASTQFQKKQGKNTIDVWWLFDDGGLTLLIPYLLTTKKKWKDCKIRVFIGGKINRIDHDRRAMATLLSKFRIDFSDIMVLGDINTKPKKENIIAFEEIIEPYRLHEDDKEQDIADKMKEDEPWRITDNELELYKTKTYRQIRLNELLKEHSSTANIIVMSLPVARKGAVSSALYMAWLEALSKDLPPILLVRGNHQSVLTFYS

SEQ ID NO: 80408 - protein, 1196 aa, Homo sapiens
  Payload ID: 16027
  Gene Symbol: SLC12A2
  Gene Name: solute carrier family 12 (sodium/potassium/chloride transporter), member 2
  Uniprot ID: P55011
  ENSP ID: ENSP00000340878
MEPRPTAPSSGAPGLAGVGETPSAAALAAARVELPGTAVPSVPEDAAPASRDGGGVRDEGPAAAGDGLGRPLGPTPSQSRFQVDLVSENAGRAAAAAAAAAAAAAAAGAGAGAKQTPADGEASGESEPAKGSEEAKGRFRVNFVDPAASSSAEDSLSDAAGVGVDGPNVSFQNGGDTVLSEGSSLHSGGGGGSGHHQHYYYDTHTNTYYLRTFGHNTMDAVPRIDHYRHTAAQLGEKLLRPSLAELHDELEKEPFEDGFANGEESTPTRDAVVTYTAESKGVVKFGWIKGVLVRCMLNIWGVMLFIRLSWIVGQAGIGLSVLVIMMATVVTTITGLSTSAIATNGFVRGGGAYYLISRSLGPEFGGAIGLIFAFANAVAVAMYVVGFAETVVELLKEHSILMIDEINDIRIIGAITVVILLGISVAGMEWEAKAQIVLLVILLLAIGDFVIGTFIPLESKKPKGFFGYKSEIFNENFGPDFREEETFFSVFAIFFPAATGILAGANISGDLADPQSAIPKGTLLAILITTLVYVGIAVSVGSCVVRDATGNVNDTIVTELTNCTSAACKLNFDFSSCESSPCSYGLMNNFQVMSMVSGFTPLISAGIFSATLSSALASLVSAPKIFQALCKDNIYPAFQMFAKGYGKNNEPLRGYILTFLIALGFILIAELNVIAPIISNFFLASYALINFSVFHASLAKSPGWRPAFKYYNMWISLLGAILCCIVMFVINWWAALLTYVIVLGLYIYVTYKKPDVNWGSSTQALTYLNALQHSIRLSGVEDHVKNFRPQCLVMTGAPNSRPALLHLVHDFTKNVGLMICGHVHMGPRRQAMKEMSIDQAKYQRWLIKNKMKAFYAPVHADDLREGAQYLMQAAGLGRMKPNTLVLGFKKDWLQADMRDVDMYINLFHDAFDIQYGVVVIRLKEGLDISHLQGQEELLSSQEKSPGTKDVVVSVEYSKKSDLDTSKPLSEKPITHKESKGPIVPLNVADQKLLEASTQFQKKQGKNTIDVWWLFDDGGLTLLIPYLLTTKKKWKDCKIRVFIGGKINRIDHDRRAMATLLSKFRIDFSDIMVLGDINTKPKKENIIAFEEIIEPYRLHEDDKEQDIADKMKEDEPWRITDNELELYKTKTYRQIRLNELLKEHSSTANIIVMSLPVARKGAVSSALYMAWLEALSKDLPPILLVRGNHQSVLTFYS

SEQ ID NO: 80409 - protein, 1150 aa, Homo sapiens
  Payload ID: 16027
  Gene Symbol: SLC12A2
  Gene Name: solute carrier family 12 (sodium/potassium/chloride transporter), member 2
  ENSP ID: ENSP00000427109
MEPRPTAPSSGAPGLAGVGETPSAAALAAARVELPGTAVPSVPEDAAPASRDGGGVRDEGPAAAGDGLGRPLGPTPSQSRFQVDLVSENAGRAAAAAAAAAAAAAAAGAGAGAKQTPADGEASGESEPAKGSEEAKGRFRVNFVDPAASSSAEDSLSDAAGVGVDGPNVSFQNGGDTVLSEGSSLHSGGGGGSGHHQHYYYDTHTNTYYLRTFGHNTMDAVPRIDHYRHTAAQLGEKLLRPSLAELHDELEKEPFEDGFANGEESTPTRDAVVTYTAESKGVVKFGWIKGVLVRCMLNIWGVMLFIRLSWIVGQAGIGLSVLVIMMATVVTTITGLSTSAIATNGFVRGGGAYYLISRSLGPEFGGAIGLIFAFANAVAVAMYVVGFAETVVELLKEHSILMIDEINDIRIIGAITVVILLGISVAGMEWEAKAQIVLLVILLLAIGDFVIGTFIPLESKKPKGFFGYKSEIFNENFGPDFREEETFFSVFAIFFPAATGILAGANISGDLADPQSAIPKGTLLAILITTLVYVGIAVSVGSCVVRDATGNVNDTIVTELTNCTSAACKLNFDFSSCESSPCSYGLMNNFQVMSMVSGFTPLISAGIFSATLSSALASLVSAPKIFQALCKDNIYPAFQMFAKGYGKNNEPLRGYILTFLIALGFILIAELNVIAPIISNFFLASYALINFSVFHASLAKSPGWRPAFKYYNMWISLLGAILCCIVMFVINWWAALLTYVIVLGLYIYVTYKKPDVNWGSSTQALTYLNALQHSIRLSGVEDHVKNFRPQCLVMTGAPNSRPALLHLVHDFTKNVGLMICGHVHMGPRRQAMKEMSIDQAKYQRWLIKNKMKAFYAPVHADDLREGAQYLMQAAGLGRMKPNTLVLGFKKDWLQADMRDVDMYINLFHDAFDIQYGVVVIRLKEGLDISHLQGQEELLSSQEKSPGTKDVVVSVEYSKKSDLDTSKPLSEKPITHKVEEEDGKTATQPLLKKESKGPIVPLNVADQKLLEASTQFQKKQGKNTIDVWWLFDDGGLTLLIPYLLTTKKKWKDCKIRVFIGGKINRIDHDRRAMATLLSKFRIDFSDIMVLGDINTKPKKENIIAFEEIIEPYRLHEDDKEQDIADKMKEDEPWRITDNELELYKTKFYEPC

SEQ ID NO: 80410 - protein, 1150 aa, Homo sapiens; identical to SEQ ID NO: 80409
  Payload ID: 16027
  Gene Symbol: SLC12A2
  Gene Name: solute carrier family 12 (sodium/potassium/chloride transporter), member 2
  ENSP ID: ENSP00000486323

SEQ ID NO: 80411 - protein, 714 aa, Homo sapiens
  Payload ID: 16028
  Gene Symbol: SLC12A8
  Gene Name: solute carrier family 12, member 8
  Uniprot ID: A0AV02
  ENSP ID: ENSP00000377112
MTQMSQVQELFHEAAQQDALAQPQPWWKTQLFMWEPVLFGTWDGVFTSCMINIFGVVLFLRTGWLVGNTGVLLGMFLVSFVILVALVTVLSGIGVGERSSIGSGGVYSMISSVLGGQTGGTIGLLYVFGQCVAGAMYITGFAESISDLLGLGNIWAVRGISVAVLLALLGINLAGVKWIIRLQLLLLFLLAVSTLDFVVGSFTHLDPEHGFIGYSPELLQNNTLPDYSPGESFFTVFGVFFPAATGVMAGFNMGGDLREPAASIPLGSLAAVGISWFLYIIFVFLLGAICTREALRYDFLIAEKVSLMGFLFLLGLYISSLASCMGGLYGAPRILQCIAQEKVIPALACLGQGKGPNKTPVAAICLTSLVTMAFVFVGQVNVLAPIVTINFMLTYVAVDYSYFSLSMCSCSLTPVPEPVLREGAEGLHCSEHLLLEKAPSYGSEGPAQRVLEGTLLEFTKDMDQLLQLTRKLESSQPRQGEGNRTPESQKRKSKKATKQTLQDSFLLDLKSPPSFPVEISDRLPAASWEGQESCWNKQTSKSEGTQPEGTYGEQLVPELCNQSESSGEDFFLKSRLQEQDVWRRSTSFYTHMCNPWVSLLGAVGSLLIMFVIQWVYTLVNMGVAAIVYFYIGRASPGLHLGSASNFSFFRWMRSLLLPSCRSLRSPQEQIILAPSLAKVDMEMTQLTQENADFATRDRYHHSSLVNREQLMPHY

SEQ ID NO: 80412 - protein, 515 aa, Homo sapiens
  Payload ID: 16028
  Gene Symbol: SLC12A8
  Gene Name: solute carrier family 12, member 8
  Uniprot ID: A0AV02
  ENSP ID: ENSP00000415713
MRRAAAGGLAVGQLPGEGPAGEEGAALGKAMRGGGCSPHSPSGCLSGVMAGFNMGGDLREPAASIPLGSLAAVGISWFLYIIFVFLLGAICTREALRYDFLIAEKVSLMGFLFLLGLYISSLASCMGGLYGAPRILQCIAQEKVIPALACLGQGKGPNKTPVAAICLTSLVTMAFVFVGQVNVLAPIVTINFMLTYVAVDYSYFSLSMCSCSLTPVPEPVLREGAEGLHCSEHLLLEKAPSYGSEGPAQRVLEGTLLEFTKDMDQLLQLTRKLESSQPRQGEGNRTPESQKRKSKKATKQTLQDSFLLDLKSPPSFPVEISDRLPAASWEGQESCWNKQTSKSEGTQPEGTYGEQLVPELCNQSESSGEDFFLKSRLQEQDVWRRSTSFYTHMCNPWVSLLGAVGSLLIMFVIQWVYTLVNMGVAAIVYFYIGRASPGLHLGSASNFSFFRWMRSLLLPSCRSLRSPQEQIILAPSLAKVDMEMTQLTQENADFATRDRYHHSSLVNREQLMPHY

SEQ ID NO: 80413 - protein, 112 aa, Homo sapiens
  Payload ID: 16028
  Gene Symbol: SLC12A8
  Gene Name: solute carrier family 12, member 8
  ENSP ID: ENSP00000418636
MWEPVLFGTWDGVFTSCMINIFGVVLFLRTGWLVGNTGVLLGMFLVSFVILVALVTVLSGIGVGERSSIGSGGVYSMISSVLGGQTGGTIGLLYVFGQCVAGAMYITGFAES

SEQ ID NO: 80414 - protein, 714 aa, Homo sapiens; identical to SEQ ID NO: 80411
  Payload ID: 16028
  Gene Symbol: SLC12A8
  Gene Name: solute carrier family 12, member 8
  Uniprot ID: A0AV02
  ENSP ID: ENSP00000418783

SEQ ID NO: 80415 - protein, 160 aa, Homo sapiens
  Payload ID: 16028
  Gene Symbol: SLC12A8
  Gene Name: solute carrier family 12, member 8
  ENSP ID: ENSP00000419424
  MOD_RES (1)..(1): Any amino acid
XQDALAQPQPWWKTQLFMWEPVLFGTWDGVFTSCMINIFGVVLFLRTGWLVGNTGVLLGMFLVSFVILVALVTVLSGIGVGERSSIGSGGVYSMISSVLGGQTGGTIGLLYVFGQVPCISPALLNPSRICWASGISGLCEEFQLRCFWPCWALTSQVSNG

SEQ ID NO: 80416 - protein, 207 aa, Homo sapiens
  Payload ID: 16028
  Gene Symbol: SLC12A8
  Gene Name: solute carrier family 12, member 8
  ENSP ID: ENSP00000420197
LGWCVHILHDQHLWGCALPEDWLAGGKHRSAPGHVPGVLRHPGGPRHGAVWHWRRGAQQHRQRWRLLHDLLGPGWADGRHHRAALCVWTEHGFIGYSPELLQNNTLPDYSPGESFFTVFGVFFPAATGVMAGFNMGGDLREPAASIPLGSLAAVGISWFLYIIFVFLLGAICTREALRYDFLIAEKVSLMGFLFLLGLYISSLASCM

SEQ ID NO: 80417 - protein, 914 aa, Homo sapiens
  Payload ID: 16029
  Gene Symbol: SLC12A9
  Gene Name: solute carrier family 12, member 9
  Uniprot ID: Q9BXP2
  ENSP ID: ENSP00000275730
MASESSPLLAYRLLGEEGVALPANGAGGPGGASARKLSTFLGVVVPTVLSMFSIVVFLRIGFVVGHAGLLQALAMLLVAYFILALTVLSVCAIATNGAVQGGGAYFMISRTLGPEVGGSIGLMFYLANVCGCAVSLLGLVESVLDVFGADATGPSGLRVLPQGYGWNLLYGSLLLGLVGGVCTLGAGLYARASFLTFLLVSGSLASVLISFVAVGPRDIRLTPRPGPNGSSLPPRFGHFTGFNSSTLKDNLGAGYAEDYTTGAVMNFASVFAVLFNGCTGIMAGANMSGELKDPSRAIPLGTIVAVAYTFFVYVLLFFLSSFTCDRTLLQEDYGFFRAISLWPPLVLIGIYATALSASMSSLIGASRILHALARDDLFGVILAPAKVVSRGGNPWAAVLYSWGLVQLVLLAGKLNTLAAVVTVFYLVAYAAVDLSCLSLEWASAPNFRPTFSLFSWHTCLLGVASCLLMMFLISPGAAGGSLLLMGLLAALLTARGGPSSWGYVSQALLFHQVRKYLLRLDVRKDHVKFWRPQLLLLVGNPRGALPLLRLANQLKKGGLYVLGHVTLGDLDSLPSDPVQPQYGAWLSLVDRAQVKAFVDLTLSPSVRQGAQHLLRISGLGGMKPNTLVLGFYDDAPPQDHFLTDPAFSEPADSTREGSSPALSTLFPPPRAPGSPRALNPQDYVATVADALKMNKNVVLARASGALPPERLSRGSGGTSQLHHVDVWPLNLLRPRGGPGYVDVCGLFLLQMATILGMVPAWHSARLRIFLCLGPREAPGAAEGRLRALLSQLRIRAEVQEVVWGEGAGAGEPEAEEEGDFVNSGRGDAEAEALARSANALVRAQQGRGTGGGPGGPEGGDAEGPITALTFLYLPRPPADPARYPRYLALLETLTRDLGPTLLVHGVTPVTCTDL

SEQ ID NO: 80418 - protein, 45 aa, Homo sapiens
  Payload ID: 16029
  Gene Symbol: SLC12A9
  Gene Name: solute carrier family 12, member 9
  ENSP ID: ENSP00000401583
MNFASVFAVLFNGCTGIMAGANMSGPCCRKTMGSSAPSACGPHWC

SEQ ID NO: 80419 - protein, 156 aa, Homo sapiens
  Payload ID: 16029
  Gene Symbol: SLC12A9
  Gene Name: solute carrier family 12, member 9
  ENSP ID: ENSP00000406560
MNFASVFAVLFNGCTGIMAGANMSGELKDPSRAIPLGTIVAVAYTFFVYVLLFFLSSFTCDRTLLQEDYGFFRAISLWPPLVLIGIYATALSASMSSLIGASRILHALARDDLFGVILAPAKVVSRGGNPWAAVLYSWGLVQLVLLAGKLNTLAAV

SEQ ID NO: 80420 - protein, 128 aa, Homo sapiens
  Payload ID: 16029
  Gene Symbol: SLC12A9
  Gene Name: solute carrier family 12, member 9
  ENSP ID: ENSP00000408571
MASESSPLLAYRLLGEEGVALPANGAGGPGGASARKLSTFLGVVVPTVLSMFSIVVFLRIGFVVGHAGLLQALAMLLVAYFILALTVLSVCAIATNGAVQGGGAYFMISRTLGPEVGGSIGLMFYLAN

SEQ ID NO: 80421 - protein, 245 aa, Homo sapiens
  Payload ID: 16029
  Gene Symbol: SLC12A9
  Gene Name: solute carrier family 12, member 9
  ENSP ID: ENSP00000410692
MASESSPLLAYRLLGEEGVALPANGAGGPGGASARKLSTFLGVVVPTVLSMFSIVVFLRIAGYAEDYTTGAVMNFASVFAVLFNGCTGIMAGANMSGELKDPSRAIPLGTIVAVAYTFFVYVLLFFLSSFTCDRTLLQEDYGFFRAISLWPPLVLIGIYATALSASMSSLIGASRILHALARDDLFGVILAPAKVVSRGGNPWAAVLYSWGLVQLVLLAGKLNTLAAVVTVFYLVAYAAVDLSCL

SEQ ID NO: 80422 - protein, 538 aa, Homo sapiens
  Payload ID: 16029
  Gene Symbol: SLC12A9
  Gene Name: solute carrier family 12, member 9
  Uniprot ID: Q9BXP2
  ENSP ID: ENSP00000413796
MASESSPLLAYRLLGEEGVALPANGAGGPGGASARKLSTFLGVVVPTVLSMFSIVVFLRIDATGPSGLRVLPQGYGWNLLYGSLLLGLVGGVCTLGAGLYARASFLTFLLVSGSLASVLISFVAVGPRDIRLTPRPGPNGSSLPPRFGHFTGFNSSTLKDNLGAGYAEDYTTGAVMNFASVFAVLFNGCTGIMAGANMSGELKDPSRAIPLGTIVAVAYTFFVYVLLFFLSSFTCDRTLLQEDYGFFRAISLWPPLVLIGIYATALSASMSSLIGASRILHALARDDLFGVILAPAKVVSRGGNPWAAVLYSWGLVQLVLLAGKLNTLAAVVTVFYLVAYAAVDLSCLSLEWASAPNFRPTFSLFSWHTCLLGVASCLLMMFLISPGAAGGSLLLMGLLAALLTARGGPSSWGYVSQALLFHQVRKYLLRLDVRKDHVKFWRPQLLLLVGNPRGALPLLRLANQLKKGGLYVLGHVTLGDLDSLPSDPVQPQYGAWLSLVDRAQVKAFVDLTLSPSVRQGAQHLLRISGLESNSHPLP

SEQ ID NO: 80423 - protein, 631 aa, Homo sapiens
  Payload ID: 16029
  Gene Symbol: SLC12A9
  Gene Name: solute carrier family 12, member 9
  Uniprot ID: Q9BXP2
  ENSP ID: ENSP00000443702
MASESSPLLAYRLLGEEGVALPANGAGGPGGASARKLSTFLGVVVPTVLSMFSIVVFLRIGFVVGHAGLLQALAMLLVAYFILALTVLSVCAIATNGAVQGGGAYFMISRTLGPEVGGSIGLMFYLANVCGCAVSLLGLVESVLDVFGADATGPSGLRVLPQGYGWNLLYGSLLLGLVGGVCTLGAGLYARASFLTFLLVSGSLASVLISFVAVGPRDIRLTPRPGPNGSSLPPRFGHFTGFNSSTLKDNLGAGYAEDYTTGAVMNFASVFAVLFNGCTGIMAGANMSGELKDPSRAIPLGTIVAVAYTFFVYVLLFFLSSFTCDRTLLQEDYGFFRAISLWPPLVLIGIYATALSASMSSLIGASRILHALARDDLFGVILAPAKVVSRGGNPWAAVLYSWGLVQLVLLAGKLNTLAAVVTVFYLVAYAAVDLSCLSLEWASAPNFRPTFSLFSWHTCLLGVASCLLMMFLISPGAAGGSLLLMGLLAALLTARGGPSSWGYVSQALLFHQVRKYLLRLDVRKDHVKFWRPQLLLLVGNPRGALPLLRLANQLKKGGLYVLGHVTLGDLDSLPSDPVQPQYGAWLSLVDRAQVKAFVDLTLSPSVRQGAQHLLRISGLESGTLLPWGFRS

SEQ ID NO: 80424 - protein, 595 aa, Homo sapiens
  Payload ID: 16030
  Gene Symbol: SLC13A1
  Gene Name: solute carrier family 13 (sodium/sulfate symporter), member 1
  Uniprot ID: Q9BZW2
  ENSP ID: ENSP00000194130
MKFFSYILVYRRFLFVVFTVLVLLPLPIVLHTKEAECAYTLFVVATFWLTEALPLSVTALLPSLMLPMFGIMPSKKVASAYFKDFHLLLIGVICLATSIEKWNLHKRIALKMVMMVGVNPAWLTLGFMSSTAFLSMWLSNTSTAAMVMPIAEAVVQQIINAEAEVEATQMTYFNGSTNHGLEIDESVNGHEINERKEKTKPVPGYNNDTGKISSKVELEKNSGMRTKYRTKKGHVTRKLTCLCIAYSSTIGGLTTITGTSTNLIFAEYFNTRYPDCRCLNFGSWFTFSFPAALIILLLSWIWLQWLFLGFNFKEMFKCGKTKTVQQKACAEVIKQEYQKLGPIRYQEIVTLVLFIIMALLWFSRDPGFVPGWSALFSEYPGFATDSTVALLIGLLFFLIPAKTLTKTTPTGEIVAFDYSPLITWKEFQSFMPWDIAILVGGGFALADGCEESGLSKWIGNKLSPLGSLPAWLIILISSLMVTSLTEVASNPATITLFLPILSPLAEAIHVNPLYILIPSTLCTSFAFLLPVANPPNAIVFSYGHLKVIDMVKAGLGVNIVGVAVVMLGICTWIVPMFDLYTYPSWAPAMSNETMP

SEQ ID NO: 80425 - protein, 36 aa, Homo sapiens
  Payload ID: 16030
  Gene Symbol: SLC13A1
  Gene Name: solute carrier family 13 (sodium/sulfate symporter), member 1
  ENSP ID: ENSP00000388403
MKFFSYILVYRRFLFVVFTVLVLLPLPIVLHTKSKL

SEQ ID NO: 80426 - protein, 40 aa, Homo sapiens
  Payload ID: 16030
  Gene Symbol: SLC13A1
  Gene Name: solute carrier family 13 (sodium/sulfate symporter), member 1
  ENSP ID: ENSP00000401417
MKFFSYILVYRRFLFVVFTVLVLLPLPIVLHTKLILTFPR

SEQ ID NO: 80427 - protein, 161 aa, Homo sapiens
  Payload ID: 16030
  Gene Symbol: SLC13A1
  Gene Name: solute carrier family 13 (sodium/sulfate symporter), member 1
  ENSP ID: ENSP00000441309
MLPMFGIMPSKKVASAYFKDFHLLLIGVICLATSIEKWNLHKRIALKMVMMVGVNPAWLTLGFMSSTAFLSMWLSNTSTAAMVMPIAEAVVQQIINAEAEVEATQMTYFNGSTNHGLEIDESVNGHEINERKEKTKPVPGYNNDTGKISSKVELEKYLQVR

SEQ ID NO: 80428 - protein, 626 aa, Homo sapiens
  Payload ID: 16031
  Gene Symbol: SLC13A4
  Gene Name: solute carrier family 13 (sodium/sulfate symporter), member 4
  Uniprot ID: Q9UKG4
  ENSP ID: ENSP00000297282
MGLLQGLLRVRKLLLVVCVPLLLLPLPVLHPSSEASCAYVLIVTAVYWVSEAVPLGAAALVPAFLYPFFGVLRSNEVAAEYFKNTTLLLVGVICVAAAVEKWNLHKRIALRMVLMAGAKPGMLLLCFMCCTTLLSMWLSNTSTTAMVMPIVEAVLQELVSAEDEQLVAGNSNTEEAEPISLDVKNSQPSLELIFVNEESNADLTTLMHNENLNGVPSITNPIKTANQHQGKKQHPSQEKPQVLTPSPRKQKLNRKYRSHHDQMICKCLSLSISYSATIGGLTTIIGTSTSLIFLEHFNNQYPAAEVVNFGTWFLFSFPISLIMLVVSWFWMHWLFLGCNFKETCSLSKKKKTKREQLSEKRIQEEYEKLGDISYPEMVTGFFFILMTVLWFTREPGFVPGWDSFFEKKGYRTDATVSVFLGFLLFLIPAKKPCFGKKNDGENQEHSLGTEPIITWKDFQKTMPWEIVILVGGGYALASGSKSSGLSTWIGNQMLSLSSLPPWAVTLLACILVSIVTEFVSNPATITIFLPILCSLSETLHINPLYTLIPVTMCISFAVMLPVGNPPNAIVFSYGHCQIKDMVKAGLGVNVIGLVIVMVAINTWGVSLFHLDTYPAWARVSNITDQA

SEQ ID NO: 80429 - protein, 112 aa, Homo sapiens
  Payload ID: 16031
  Gene Symbol: SLC13A4
  Gene Name: solute carrier family 13 (sodium/sulfate symporter), member 4
  ENSP ID: ENSP00000476620
MGLLQGLLRVRKLLLVVCVPLLLLPLPVLHPSSEASCAYVLIVTAVYWVSEAVPLGAAALVPAFLYPFFGVLRSNEVAAEYFKNTTLLLVGVICVAAAVEKWNLHKRIALRM

SEQ ID NO: 80430 - protein, 76 aa, Homo sapiens
  Payload ID: 16031
  Gene Symbol: SLC13A4
  Gene Name: solute carrier family 13 (sodium/sulfate symporter), member 4
  ENSP ID: ENSP00000477467
MGLLQGLLRVRKLLLVVCVPLLLLPLPVLHPSSEASCAYVLIVTAVYWVSEAVPLGAAALVPAFLYPFFGVLRSNE

SEQ ID NO: 80431 - protein, 551 aa, Homo sapiens
  Payload ID: 16032
  Gene Symbol: SLC13A5
  Gene Name: solute carrier family 13 (sodium-dependent citrate transporter), member 5
  Uniprot ID: Q86YT5
  ENSP ID: ENSP00000293800
MASALSYVSKFKSFVILFVTPLLLLPLVILMPAKFVRCAYVIILMAIYWCTEVIPLAVTSLMPVLLFPLFQILDSRQVCVQYMKDTNMLFLGGLIVAVAVERWNLHKRIALRTLLWVGAKPARNTATTAMMVPIVEAILQQMEATSAATEAGLELVDKGKAKELPGSQVIFEGPTLGQQEDQERKRLCKAMTLCICYAASIGGTATLTGTGPNVVLLGQMNELFPDSKDLVNFASWFAFAFPNMLVMLLFAWLWLQFVYMRFNFKKSWGCGLESKKNEKAALKVLQEEYRKLGPLSFAEINVLICFFLLVILWFSRDPGFMPGWLTVAWVEGETKYVSDATVAIFVATLLFIVPSQKPKFNFRSQTEEERKTPFYPPPLLDWKVTQEKVPWGIVLLLGGGFALAKGSEASGLSVWMGKQMEPLHAVPPAAITLILSLLVAVFTECTSNVATTTLFLPIFASMSRSIGLNPLYIMLPCTLSASFAFMLPVATPPNAIVFTYGHLKVADMVKTGVIMNIIGVFCVFLAVNTWGRAIFDLDHFPDWANVTHIET

SEQ ID NO: 80432 - protein, 525 aa, Homo sapiens
  Payload ID: 16032
  Gene Symbol: SLC13A5
  Gene Name: solute carrier family 13 (sodium-dependent citrate transporter), member 5
  Uniprot ID: Q86YT5
  ENSP ID: ENSP00000370464
MASALSYVSKFKSFVILFVTPLLLLPLVILMPAKVCVQYMKDTNMLFLGGLIVAVAVERWNLHKRIALRTLLWVGAKPARLMLGFMGVTALLSMWISNTATTAMMVPIVEAILQQMEATSAATEAGLELVDKGKAKELPGSQVIFEGPTLGQQEDQERKRLCKAMTLCICYAASIGGTATLTGTGPNVVLLGQMNELFPDSKDLVNFASWFAFAFPNMLVMLLFAWLWLQFVYMRFNFKKSWGCGLESKKNEKAALKVLQEEYRKLGPLSFAEINVLICFFLLVILWFSRDPGFMPGWLTVAWVEGETKYVSDATVAIFVATLLFIVPSQKPKFNFRSQTEEERKTPFYPPPLLDWKVTQEKVPWGIVLLLGGGFALAKGSEASGLSVWMGKQMEPLHAVPPAAITLILSLLVAVFTECTSNVATTTLFLPIFASMSRSIGLNPLYIMLPCTLSASFAFMLPVATPPNAIVFTYGHLKVADMVKTGVIMNIIGVFCVFLAVNTWGRAIFDLDHFPDWANVTHIET

SEQ ID NO: 80433 - protein, 568 aa, Homo sapiens [sequence omitted]

SEQ ID NO: 80434 - protein, 522 aa, Homo sapiens
  Payload ID: 16032
  Gene Symbol: SLC13A5
  Gene Name: solute carrier family 13 (sodium-dependent citrate transporter), member 5
  Uniprot ID: Q86YT5
  ENSP ID: ENSP00000459372
MASALSYVSKFKSFVILFVTPLLLLPLVILMPAKFVRCAYVIILMAIYWCTEVIPLAVTSLMPVLLFPLFQILDSRQVCVQYMKDTNMLFLGGLIVAVAVERWNLHKRIALRTLLWVGAKPARLMLGFMGVTALLSMWISNTATTAMMVPIVEAILQQMEATSAATEAGLELVDKGKAKELPGSQVIFEGPTLGQQEDQERKRLCKAMTLCICYAASIGGTATLTGTGPNVVLLGQMNELFPDSKDLVNFASWFAFAFPNMLVMLLFAWLWLQFVYMRFNFKKSWGCGLESKKNEKAALKVLQEEYRKLGPLSFAEINVLICFFLLVILWFSRDPGFMPGWLTVAWVEGETKYVSDATVAIFVATLLFIVPSQKPKFNFRSQTEEERKTPFYPPPLLDWKVTQEKVPWGIVLLLGGGFALAKGSEASGLSVWMGKQMEPLHAVPPAAITLILSLLVAVFTECTSNVATTTLFLPIFASMVKTGVIMNIIGVFCVFLAVNTWGRAIFDLDHFPDWANVTHIET

SEQ ID NO: 80435 - protein, 94 aa, Homo sapiens
  Payload ID: 16032
  Gene Symbol: SLC13A5
  Gene Name: solute carrier family 13 (sodium-dependent citrate transporter), member 5
  ENSP ID: ENSP00000460037
  MOD_RES (1)..(1): Any amino acid
XPAAITLILSLLVAVFTECTSNVATTTLFLPIFASMSRSIGLNPLYIMLPCTLSASFAFMLPVATPPNAIVFTYGHLKVADMVTQLFLFTPVGL

SEQ ID NO: 80436 - protein, 91 aa, Homo sapiens
  Payload ID: 16032
  Gene Symbol: SLC13A5
  Gene Name: solute carrier family 13 (sodium-dependent citrate transporter), member 5
  ENSP ID: ENSP00000460903
MASALSYVSKFKSFVILFVTPLLLLPLVILMPAKFVRCAYVIILMAIYWCTEVIPLAVTSLMPVLLFPLFQILDSRQGDTTRACIPTPSCP

SEQ ID NO: 80437 - protein, 81 aa, Homo sapiens
  Payload ID: 16032
  Gene Symbol: SLC13A5
  Gene Name: solute carrier family 13 (sodium-dependent citrate transporter), member 5
  ENSP ID: ENSP00000461495
MASALSYVSKFKSFVILFVTPLLLLPLVILMPAKFVRCAYVIILMAIYWCTEVIPLAVTSLMPVLLFPLFQILDSRCVSST

SEQ ID NO: 80438 - protein, 167 aa, Homo sapiens
  Payload ID: 16032
  Gene Symbol: SLC13A5
  Gene Name: solute carrier family 13 (sodium-dependent citrate transporter), member 5
  ENSP ID: ENSP00000461622
MASALSYVSKFKSFVILFVTPLLLLPLVILMPAKILDSRQVCVQYMKDTNMLFLGGLIVAVAVERWNLHKRIALRTLLWVGAKPARLMLGFMGVTALLSMWISNTATTAMMVPIVEAILQQMEATSAATEAGLELVDKGKAKELPGSQVIFEGPTLGQQEDQERKRL

SEQ ID NO: 80439 - protein, 592 aa, Homo sapiens
  Payload ID: 16033
  Gene Symbol: SLC13A2
  Gene Name: solute carrier family 13 (sodium-dependent dicarboxylate transporter), member 2
  Uniprot ID: Q13183
  ENSP ID: ENSP00000316202
MATCWQALWAYRSYLIVFFVPILLLPLPILVPSKEAYCAYAIILMALFWCTEALPLAVTALFPLILFPMMGIVDASEVAVEYLKDSNLLFFGGLLVAIAVEHWNLHKRIALRVLLIVGVRPAPLILGFMLVTAFLSMWISNTATSAMMVPIAHAVLDQLHSSQASSNVEEGSNNPTFELQEPSPQKEVTKLDNGQALPVTSASSEGRAHLSQKHLHLTQCMSLCVCYSASIGGIATLTGTAPNLVLQGQINSLFPQNGNVVNFASWFSFAFPTMVILLLLAWLWLQILFLGFNFRKNFGIGEKMQEQQQAAYCVIQTEHRLLGPMTFAEKAISILFVILVLLWFTREPGFFLGWGNLAFPNAKGESMVSDGTVAIFIGIIMFIIPSKFPGLTQDPENPGKLKAPLGLLDWKTVNQKMPWNIVLLLGGGYALAKGSERSGLSEWLGNKLTPLQSVPAPAIAIILSLLVATFTECTSNVATTTIFLPILASMAQAICLHPLYVMLPCTLATSLAFMLPVATPPNAIVFSFGDLKVLDMARAGFLLNIIGVLIIALAINSWGIPLFSLHSFPSWAQSNTTAQCLPSLANTTTPSP

SEQ ID NO: 80440 - protein, 641 aa, Homo sapiens
  Payload ID: 16033
  Gene Symbol: SLC13A2
  Gene Name: solute carrier family 13 (sodium-dependent dicarboxylate transporter), member 2
  Uniprot ID: Q13183
  ENSP ID: ENSP00000392411
MATCWQALWAYRSYLIVFFVPILLLPLPILVPSKEAYCAYAIILMALFWCTEALPLAVTALFPLILFPMMGIVDASEIIQRPFPSSFESPGECQSVGMSVTASHNLGGTVGDSRVFPPLSHVSTCQVAVEYLKDSNLLFFGGLLVAIAVEHWNLHKRIALRVLLIVGVRPAPLILGFMLVTAFLSMWISNTATSAMMVPIAHAVLDQLHSSQASSNVEEGSNNPTFELQEPSPQKEVTKLDNGQALPVTSASSEGRAHLSQKHLHLTQCMSLCVCYSASIGGIATLTGTAPNLVLQGQINSLFPQNGNVVNFASWFSFAFPTMVILLLLAWLWLQILFLGFNFRKNFGIGEKMQEQQQAAYCVIQTEHRLLGPMTFAEKAISILFVILVLLWFTREPGFFLGWGNLAFPNAKGESMVSDGTVAIFIGIIMFIIPSKFPGLTQDPENPGKLKAPLGLLDWKTVNQKMPWNIVLLLGGGYALAKGSERSGLSEWLGNKLTPLQSVPAPAIAIILSLLVATFTECTSNVATTTIFLPILASMAQAICLHPLYVMLPCTLATSLAFMLPVATPPNAIVFSFGDLKVLDMARAGFLLNIIGVLIIALAINSWGIPLFSLHSFPSWAQSNTTAQCLPSLANTTTPSP

SEQ ID NO: 80441 - protein, 358 aa, Homo sapiens
  Payload ID: 16033
  Gene Symbol: SLC13A2
  Gene Name: solute carrier family 13 (sodium-dependent dicarboxylate transporter), member 2
  ENSP ID: ENSP00000441935
MALFWCTEALPLAVTALFPLILFPMMGIVDASEVAVEYLKDSNLLFFGGLLVAIAVEHWNLHKRIALRVLLIVGVRPAPLILGFMLVTAFLSMWISNTATSAMMVPIAHAVLDQLHSSQASSNVEEGSNNPTFELQEPSPQKEVTKLDNGQALPVTSASSEGRAHLSQKHLHLTQCMSLCVCYSASIGGIATLTGTAPNLVLQGQINSLFPQNGNVVNFASWFSFAFPTMVILLLLAWLWLQILFLGFNFRKNFGIGEKMQEQQQAAYCVIQTEHRLLGPMTFAEKAISILFVILVLLWFTREPGFFWLGQFGFSQCQGGEVRVAGVGRRTHLGLTCSGRREGYRAPIAEQEVTLGGG

SEQ ID NO: 80442 - protein, 27 aa, Homo sapiens
  Payload ID: 16033
  Gene Symbol: SLC13A2
  Gene Name: solute carrier family 13 (sodium-dependent dicarboxylate transporter), member 2
  ENSP ID: ENSP00000463421
  MOD_RES (1)..(1): Any amino acid
XAYRSYLIVFFVPILLLPLPILVPSKL

SEQ ID NO: 80443 - protein, 35 aa, Homo sapiens
  Payload ID: 16033
  Gene Symbol: SLC13A2
  Gene Name: solute carrier family 13 (sodium-dependent dicarboxylate transporter), member 2
  ENSP ID: ENSP00000463457
MATCWQALWAYRSYLIVFFVPILLLPLPILVPSKL

SEQ ID NO: 80444 - protein, 27 aa, Homo sapiens
  Payload ID: 16033
  Gene Symbol: SLC13A2
  Gene Name: solute carrier family 13 (sodium-dependent dicarboxylate transporter), member 2
  ENSP ID: ENSP00000464074
  MOD_RES (1)..(1): Any amino acid
XAYRSYLIVFFVPILLLPLPILVPSKL

SEQ ID NO: 80445 - protein, 602 aa, Homo sapiens
  Payload ID: 16034
  Gene Symbol: SLC13A3
  Gene Name: solute carrier family 13 (sodium-dependent dicarboxylate transporter), member 3
  Uniprot ID: Q8WWT9
  ENSP ID: ENSP00000279027
MAALAAAAKKVWSARRLLVLLFTPLALLPVVFALPPKEGRCLFVILLMAVYWCTEALPLSVTALLPIVLFPFMGILPSNKVCPQYFLDTNFLFLSGLIMASAIEEWNLHRRIALKILMLVGVQPARLILGMMVTTSFLSMWLSNTASTAMMLPIANAILKSLFGQKEVRKDPSQESEENTAAVRRNGLHTVPTEMQFLASTEAKDHPGETEVPLDLPADSRKEDEYRRNIWKGFLISIPYSASIGGTATLTGTAPNLILLGQLKSFFPQCDVVNFGSWFIFAFPLMLLFLLAGWLWISFLYGGLSFRGWRKNKSEIRTNAEDRARAVIREEYQNLGPIKFAEQAVFILFCMFAILLFTRDPKFIPGWASLFNPGFLSDAVTGVAIVTILFFFPSQRPSLKWWFDFKAPNTETEPLLTWKKAQETVPWNIILLLGGGFAMAKGCEESGLSVWIGGQLHPLENVPPALAVLLITVVIAFFTEFASNTATIIIFLPVLAELAIRLRVHPLYLMIPGTVGCSFAFMLPVSTPPNSIAFASGHLLVKDMVRTGLLMNLMGVLLLSLAMNTWAQTIFQLGTFPDWADMYSVNVTALPPTLANDTFRTL

SEQ ID NO: 80446 - protein, 555 aa, Homo sapiens
  Payload ID: 16034
  Gene Symbol: SLC13A3
  Gene Name: solute carrier family 13 (sodium-dependent dicarboxylate transporter), member 3
  Uniprot ID: Q8WWT9
  ENSP ID: ENSP00000290317
MAVYWCTEALPLSVTALLPIVLFPFMGILPSNKVCPQYFLDTNFLFLSGLIMASAIEEWNLHRRIALKILMLVGVQPARLILGMMVTTSFLSMWLSNTASTAMMLPIANAILKSLFGQKEVRKDPSQESEENTAAVRRNGLHTVPTEMQFLASTEAKDHPGETEVPLDLPADSRKEDEYRRNIWKGFLISIPYSASIGGTATLTGTAPNLILLGQLKSFFPQCDVVNFGSWFIFAFPLMLLFLLAGWLWISFLYGGLSFRGWRKNKSEIRTNAEDRARAVIREEYQNLGPIKFAEQAVFILFCMFAILLFTRDPKFIPGWASLFNPGFLSDAVTGVAIVTILFFFPSQRPSLKWWFDFKAPNTETEPLLTWKKAQETVPWNIILLLGGGFAMAKGCEESGLSVWIGGQLHPLENVPPALAVLLITVVIAFFTEFASNTATIIIFLPVLAELAIRLRVHPLYLMIPGTVGCSFAFMLPVSTPPNSIAFASGHLLVKDMVRTGLLMNLMGVLLLSLAMNTWAQTIFQLGTFPDWADMYSVNVTALPPTLANDTFRTL

SEQ ID NO: 80447 - protein, 248 aa, Homo sapiens
  Payload ID: 16034
  Gene Symbol: SLC13A3
  Gene Name: solute carrier family 13 (sodium-dependent dicarboxylate transporter), member 3
  ENSP ID: ENSP00000361193
MAVYWCTEALPLSVTALLPIVLFPFMGILPSNKVCPQYFLDTNFLFLSGLIMASAIEEWNLHRRIALKILMLVGVQPARLILGMMVTTSFLSMWLSNTASTAMMLPIANAILKSLFGQKEVRKDPSQESEENTAKTTLGRQRFHWICRLTPGRRMNIVGTSGRASSSPSPTQPVLGAQPHSRAQPLTSSCLASSRGWLWISFLYGGLSFRGWRKNKSEIRTNAEDRARAVIREEYQNLGPIKFAEQAV

SEQ ID NO: 80448 - protein, 236 aa, Homo sapiens
  Payload ID: 16034
  Gene Symbol: SLC13A3
  Gene Name: solute carrier family 13 (sodium-dependent dicarboxylate transporter), member 3
  ENSP ID: ENSP00000394217
  MOD_RES (1)..(1): Any amino acid
XFHNFGNGCSAAVRRNGLHTVPTEMQFLASTEAKDHPGETEVPLDLPADSRKEDEYRRNIWKGFLISIPYSASIGGTATLTGTAPNLILLGQLKSFFPQCDVVNFGSWFIFAFPLMLLFLLAGWLWISFLYGGLSFRGWRKNKSEIRTNAEDRARAVIREEYQNLGPIKFAEQAVFILFCMFAILLFTRDPKFIPGWASLFNPGFLSDAVTGVAIVTILFFFPSQRPSLKWWFDFK

SEQ ID NO: 80449 - protein, 301 aa, Homo sapiens
  Payload ID: 16034
  Gene Symbol: SLC13A3
  Gene Name: solute carrier family 13 (sodium-dependent dicarboxylate transporter), member 3
  ENSP ID: ENSP00000395095
EGRCLFVILLMAVYWCTEALPLSVTALLPIVLFPFMGILPSNKVCPQYFLDTNFLFLSGLIMASAIEEWNLHRRIALKILMLVGVQPARLILGMMVTTSFLSMWLSNTASTAMMLPIANAILKSLFGQKEVRKDPSQESEENTAKTTLGRQRFHWICRLTPGRRMNIVGTSGRASSSPSPTQPVLGAQPHSRAQPLTSSCLASSRGWLWISFLYGGLSFRGWRKNKSEIRTNAEDRARAVIREEYQNLGPIKFAEQAVFILFCMFAILLFTRDPKFIPGWASLFNPGCKMGIISISTIQKM

SEQ ID NO: 80450 - protein, 185 aa, Homo sapiens
  Payload ID: 16034
  Gene Symbol: SLC13A3
  Gene Name: solute carrier family 13 (sodium-dependent dicarboxylate transporter), member 3
  ENSP ID: ENSP00000397955
MAVYWCTEALPLSVTALLPIVLFPFMGILPSNKVCPQYFLDTNFLFLSGLIMASAIEEWNLHRRIALKILMLVGVQPARLILGMMVTTSFLSMWLSNTASTAMMLPIANAILKSLFGQKEVRKDPSQESEENTGIEPNTFLSEERLKLQAPLVIRLGQITESGQWNMSGNDVCNFRVLSFLPGGM

SEQ ID NO: 80451 - protein, 552 aa, Homo sapiens
  Payload ID: 16034
  Gene Symbol: SLC13A3
  Gene Name: solute carrier family 13 (sodium-dependent dicarboxylate transporter), member 3
  Uniprot ID: Q8WWT9
  ENSP ID: ENSP00000415852
MAALAAAAKKVWSARRLLVLLFTPLALLPVVFALPPKEGRCLFVILLMAVYWCTEALPLSVTALLPIVLFPFMGILPSNKVCPQYFLDTNFLFLSGLIMASAIEEWNLHRRIALKILMLVGVQPARLILGMMVTTSFLSMWLSNTASTAMMLPIANAILKSLFGQKEVRKDPSQESEENTAKTTLGRQRFHWICRLTPGRRMNIVGTSGRASSSPSPTQPVLGAQPHSRAQPLTSSCLASSRGWLWISFLYGGLSFRGWRKNKSEIRTNAEDRARAVIREEYQNLGPIKFAEQAVFILFCMFAILLFTRDPKFIPGWASLFNPGFLSDAVTGVAIVTILFFFPSQRPSLKWWFDFKAPNTETEPLLTWKKAQETVPWNIILLLGGGFAMAKGCEESGLSVWIGGQLHPLENVPPALAVLLITVVIAFFTEFASNTATIIIFLPVLAELAIRLRVHPLYLMIPGTVGCSFAFMLPVSTPPNSIAFASGHLLVKDMVRTGLLMNLMGVLLLSLAMNTWAQTIFQLGTFPDWADMYSVNVTALPPTLANDTFRTL

SEQ ID NO: 80452 - protein, 408 aa, Homo sapiens
  Payload ID: 16034
  Gene Symbol: SLC13A3
  Gene Name: solute carrier family 13 (sodium-dependent dicarboxylate transporter), member 3
  ENSP ID: ENSP00000417784
MAVYWCTEALPLSVTALLPIVLFPFMGILPSNKVCPQYFLDTNFLFLSGLIMASAIEEWNLHRRIALKILMLVGVQPARLILGMMVTTSFLSMWLSNTASTAMMLPIANAILKSLFGQKEVRKDPSQESEENTAAVRRNGLHTVPTEMQFLASTEAKDHPGETEVPLDLPADSRKEDEYRRNIWKGFLISIPYSASIGGTATLTGTAPNLILLGQLKSFFPQCDVVNFGSWFIFAFPLMLLFLLAGWLWISFLYGGLSFRGWRKNKSEIRTNAEDRARAVIREEYQNLGPIKFAEQAVFILFCMFAILLFTRDPKFIPGWASLFNPGFLSDAVTGVAIVTILFFFPSQRPSLKWWFDFKAPNTETEPLLTWKKAQETVPWNIILLLGGGFAMAKGCEESGLSVWIGGQ

SEQ ID NO: 80453 - protein, 555 aa, Homo sapiens; identical to SEQ ID NO: 80446
  Payload ID: 16034
  Gene Symbol: SLC13A3
  Gene Name: solute carrier family 13 (sodium-dependent dicarboxylate transporter), member 3
  Uniprot ID: Q8WWT9
  ENSP ID: ENSP00000419621

SEQ ID NO: 80454 - protein, 520 aa, Homo sapiens
  Payload ID: 16034
  Gene Symbol: SLC13A3
  Gene Name: solute carrier family 13 (sodium-dependent dicarboxylate transporter), member 3
  Uniprot ID: Q8WWT9
  ENSP ID: ENSP00000420177
MAVYWCTEALPLSVTALLPIVLFPFMGILPSNKVCPQYFLDTNFLFLSGLIMASAIEEWNLHRRIALKILMLVGVQPARLILGMMVTTSFLSMWLSNTASTAMMLPIANAILKSLFGQKEVRKDPSQESEENTAAVRRNGLHTVPTEMQFLASTEAKDHPGETEVPLDLPADSRKEDEYRRNIWKGFLISIPYSASIGGTATLTGTAPNLILLGQLKSFFPQCDVVNFGSWFIFAFPLMLLFLLAGWLWISFLYGGLSFRGWRKNKSEIRTNAEDRARAVIREEYQNLGPIKFLSDAVTGVAIVTILFFFPSQRPSLKWWFDFKAPNTETEPLLTWKKAQETVPWNIILLLGGGFAMAKGCEESGLSVWIGGQLHPLENVPPALAVLLITVVIAFFTEFASNTATIIIFLPVLAELAIRLRVHPLYLMIPGTVGCSFAFMLPVSTPPNSIAFASGHLLVKDMVRTGLLMNLMGVLLLSLAMNTWAQTIFQLGTFPDWADMYSVNVTALPPTLANDTFRTL

SEQ ID NO: 80455 - protein, 389 aa, Homo sapiens
  Payload ID: 16035
  Gene Symbol: SLC14A1
  Gene Name: solute carrier family 14 (urea transporter), member 1 (Kidd blood group)
  Uniprot ID: Q13336
  ENSP ID: ENSP00000318546
MEDSPTMVRVDSPTMVRGENQVSPCQGRRCFPKALGYVTGDMKELANQLKDKPVVLQFIDWILRGISQVVFVNNPVSGILILVGLLVQNPWWALTGWLGTVVSTLMALLLSQDRSLIASGLYGYNATLVGVLMAVFSDKGDYFWWLLLPVCAMSMTCPIFSSALNSMLSKWDLPVFTLPFNMALSMYLSATGHYNPFFPAKLVIPITTAPNISWSDLSALELLKSIPVGVGQIYGCDNPWTGGIFLGAILLSSPLMCLHAAIGSLLGIAAGLSLSAPFEDIYFGLWGFNSSLACIAMGGMFMALTWQTHLLALGCALFTAYLGVGMANFMAEVGLPACTWPFCLATLLFLIMTTKNSNIYKMPLSKVTYPEENRIFYLQAKKRMVESPL

SEQ ID NO: 80456 - protein, 284 aa, Homo sapiens
  Payload ID: 16035
  Gene Symbol: SLC14A1
  Gene Name: solute carrier family 14 (urea transporter), member 1 (Kidd blood group)
  ENSP ID: ENSP00000385320
MALLLSQDRSLIASGLYGYNATLVGVLMAVFSDKGDYFWWLLLPVCAMSMTCPIFSSALNSMLSKWDLPVFTLPFNMALSMYLSATGHYNPFFPAKLVIPITTAPNISWSDLSALELLKSIPVGVGQIYGCDNPWTGGIFLGAILLSSPLMCLHAAIGSLLGIAAGLSLSAPFEDIYFGLWGFNSSLACIAMGGMFMALTWQTHLLALGCALFTAYLGVGMANFMAEVGLPACTWPFCLATLLFLIMTTKNSNIYKMPLSKVTYPEENRIFYLQAKKRMVESPL

SEQ ID NO: 80457 - protein, 445 aa, Homo sapiens
  Payload ID: 16035
  Gene Symbol: SLC14A1
  Gene Name: solute carrier family 14 (urea transporter), member 1 (Kidd blood group)
  Uniprot ID: Q13336
  ENSP ID: ENSP00000390637
MNGRSLIGGAGDARHGPVWKDPFGTKAGDAARRGIARLSLALADGSQEQEPEEEIAMEDSPTMVRVDSPTMVRGENQVSPCQGRRCFPKALGYVTGDMKELANQLKDKPVVLQFIDWILRGISQVVFVNNPVSGILILVGLLVQNPWWALTGWLGTVVSTLMALLLSQDRSLIASGLYGYNATLVGVLMAVFSDKGDYFWWLLLPVCAMSMTCPIFSSALNSMLSKWDLPVFTLPFNMALSMYLSATGHYNPFFPAKLVIPITTAPNISWSDLSALELLKSIPVGVGQIYGCDNPWTGGIFLGAILLSSPLMCLHAAIGSLLGIAAGLSLSAPFEDIYFGLWGFNSSLACIAMGGMFMALTWQTHLLALGCALFTAYLGVGMANFMAEVGLPACTWPFCLATLLFLIMTTKNSNIYKMPLSKVTYPEENRIFYLQAKKRMVESPL

SEQ ID NO: 80458 - protein, 445 aa, Homo sapiens; identical to SEQ ID NO: 80457
  Payload ID: 16035
  Gene Symbol: SLC14A1
  Gene Name: solute carrier family 14 (urea transporter), member 1 (Kidd blood group)
  Uniprot ID: Q13336
  ENSP ID: ENSP00000412309

SEQ ID NO: 80459 - protein, 257 aa, Homo sapiens
  Payload ID: 16035
  Gene Symbol: SLC14A1
  Gene Name: solute carrier family 14 (urea transporter), member 1 (Kidd blood group)
  ENSP ID: ENSP00000441998
MAVFSDKGDYFWWLLLPVCAMSMTCPIFSSALNSMLSKWDLPVFTLPFNMALSMYLSATGHYNPFFPAKLVIPITTAPNISWSDLSALELLKSIPVGVGQIYGCDNPWTGGIFLGAILLSSPLMCLHAAIGSLLGIAAGLSLSAPFEDIYFGLWGFNSSLACIAMGGMFMALTWQTHLLALGCALFTAYLGVGMANFMAEVGLPACTWPFCLATLLFLIMTTKNSNIYKMPLSKVTYPEENRIFYLQAKKRMVESPL

SEQ ID NO: 80460 - protein, 281 aa, Homo sapiens
  Payload ID: 16035
  Gene Symbol: SLC14A1
  Gene Name: solute carrier family 14 (urea transporter), member 1 (Kidd blood group)
  ENSP ID: ENSP00000442180
MGRRNRSLIASGLYGYNATLVGVLMAVFSDKGDYFWWLLLPVCAMSMTCPIFSSALNSMLSKWDLPVFTLPFNMALSMYLSATGHYNPFFPAKLVIPITTAPNISWSDLSALELLKSIPVGVGQIYGCDNPWTGGIFLGAILLSSPLMCLHAAIGSLLGIAAGLSLSAPFEDIYFGLWGFNSSLACIAMGGMFMALTWQTHLLALGCALFTAYLGVGMANFMAEVGLPACTWPFCLATLLFLIMTTKNSNIYKMPLSKVTYPEENRIFYLQAKKRMVESPL

SEQ ID NO: 80461 - protein, 28 aa, Homo sapiens
  Payload ID: 16035
  Gene Symbol: SLC14A1
  Gene Name: solute carrier family 14 (urea transporter), member 1 (Kidd blood group)
  ENSP ID: ENSP00000465029
MALLLSQDRSLIASGLYGYNATLVGVLM

SEQ ID NO: 80462 - protein, 302 aa, Homo sapiens
  Payload ID: 16035
  Gene Symbol: SLC14A1
  Gene Name: solute carrier family 14 (urea transporter), member 1 (Kidd blood group)
  ENSP ID: ENSP00000465044
MEDSPTMVRVDSPTMVRGENQVSPCQGRRCFPKALGYVTGDMKELANQLKDKPVVLQFIDWILRGISQVVFVNNPVSGILILVGLLVQNPWWALTGWLGTVVSTLMALLLSQDRSLIASGLYGYNATLVGVLMAVFSDKGDYFWWLLLPVCAMSMTCPIFSSALNSMLSKWDLPVFTLPFNMALSMYLSATGHYNPFFPAKLVIPITTAPNISWSDLSALEDSVFQPHLRTSTLDSGVSTALWPALQWEECSWRSPGKPTSWLLAVPCSRPILESAWQTLWLRLDCQLVPGPSVWPRYCSSS

SEQ ID NO: 80463 - protein, 173 aa, Homo sapiens
  Payload ID: 16035
  Gene Symbol: SLC14A1
  Gene Name: solute carrier family 14 (urea transporter), member 1 (Kidd blood group)
  ENSP ID: ENSP00000465150
  MOD_RES (1)..(1): Any amino acid
XLTGWLGTVVSTLMALLLSQDRSLIASGLYGYNATLVGVLMAVFSDKGDYFWWLLLPVCAMSMTCPIFSSALNSMLSKWDLPVFTLPFNMALSMYLSATGHYNPFFPAKLVIPITTAPNISWSDLSALEPCSRPILESAWQTLWLRERVKEELWGKKSKHNQRSSAVKNLGCG

SEQ ID NO: 80464 - protein, 102 aa, Homo sapiens
  Payload ID: 16035
  Gene Symbol: SLC14A1
  Gene Name: solute carrier family 14 (urea transporter), member 1 (Kidd blood group)
  ENSP ID: ENSP00000465702
MEDSPTMVRVDSPTMVRGENQVSPCQGRRCFPKALGYVTGDMKELANQLKDKPVVLQFIDWILRGISQVVFVNNPVSGILILVGLLVQNPWWALTGWLGTVV

SEQ ID NO: 80465 - protein, 129 aa, Homo sapiens
  Payload ID: 16035
  Gene Symbol: SLC14A1
  Gene Name: solute carrier family 14 (urea transporter), member 1 (Kidd blood group)
  ENSP ID: ENSP00000466093
MNGRSLIGGAGDARHGPVWKDPFGTKAGDAARRGIARLSLALADGSQEQEPEEEIAMEDSPTMVRVDSPTMVRGENQVSPCQGRRCFPKALGYVTGDMKELANQLKDKPVVLQFIDWILRGISQVVFVN

SEQ ID NO: 80466 - protein, 169 aa, Homo sapiens
  Payload ID: 16035
  Gene Symbol: SLC14A1
  Gene Name: solute carrier family 14 (urea transporter), member 1 (Kidd blood group)
  ENSP ID: ENSP00000466273
MAVFSDKGDYFWWLLLPVCAMSMTCPIFSSALNSMLSKWDLPVFTLPFNMALSMYLSATGHYNPFFPAKLVIPITTAPNISWSDLSALELLKSIPVGVGQIYGCDNPWTGGIFLGAILLSSPLMCLHAAIGSLLGIAAGLSLSAPFEDIYFGLWGFNSSLACIAMGGMF

SEQ ID NO: 80467 - protein, 214 aa, Homo sapiens
  Payload ID: 16035
  Gene Symbol: SLC14A1
  Gene Name: solute carrier family 14 (urea transporter), member 1 (Kidd blood group)
  ENSP ID: ENSP00000467898
MNGRSLIGGAGDARHGPVWKDPFGTKAGDAARRGIARLSLALADGSQEQEPEEEIAMEDSPTMVRVDSPTMVRGENQVSPCQGRRCFPKALGYVTGDMKELANQLKDKPVVLQFIDWILRGISQVVFVNNPVSGILILVGLLVQNPWWALTGWLGTVVSTLMALLLSQDRSLIASGLYGYNATLVGVLMAVFSDKGDYFWWLLLPVCAMSMTCC

SEQ ID NO: 80468 - protein, 116 aa, Homo sapiens
  Payload ID: 16035
  Gene Symbol: SLC14A1
  Gene Name: solute carrier family 14 (urea transporter), member 1 (Kidd blood group)
  ENSP ID: ENSP00000468763
MALLLSQDRSLIASGLYGYNATLVGVLMAVFSDKGDYFWWLLLPVCAMSMTCPIFSSALNSMLSKWDLPVFTLPFNMALSMYLSATGHYNPFFPAKLVIPITTAPNISWSDLSALE

SEQ ID NO: 80469 - protein, 136 aa, Homo sapiens
  Payload ID: 16035
  Gene Symbol: SLC14A1
  Gene Name: solute carrier family 14 (urea transporter), member 1 (Kidd blood group)
  ENSP ID: ENSP00000470055
MEDSPTMVRVDSPTMVRGENQVSPCQGRRCFPKALGYVTGDMKELANQLKDKPVVLQFIDWILRGISQVVFVNNPVSGILILVGLLVQNPWWALTGWLGTVVSTLMALLLSQDRSLIASGLYGYNATLVGVLMAVF

SEQ ID NO: 80470 - protein, 389 aa, Homo sapiens; identical to SEQ ID NO: 80455
  Payload ID: 16035
  Gene Symbol: SLC14A1
  Gene Name: solute carrier family 14 (urea transporter), member 1 (Kidd blood group)
  Uniprot ID: Q13336
  ENSP ID: ENSP00000470476

SEQ ID NO: 80471 - protein, 302 aa, Homo sapiens; identical to SEQ ID NO: 80462
  Payload ID: 16035
  Gene Symbol: SLC14A1
  Gene Name: solute carrier family 14 (urea transporter), member 1 (Kidd blood group)
  ENSP ID: ENSP00000479595

SEQ ID NO: 80472 - protein, 920 aa, Homo sapiens
  Payload ID: 16036
  Gene Symbol: SLC14A2
  Gene Name: solute carrier family 14 (urea transporter), member 2
  Uniprot ID: Q15849
  ENSP ID: ENSP00000255226
MSDPHSSPLLPEPLSSRYKLYEAEFTSPSWPSTSPDTHPALPLLEMPEEKDLRSSNEDSHIVKIEKLNERSKRKDDGVAHRDSAGQRCICLSKAVGYLTGDMKEYRIWLKDKHLALQFIDWVLRGTAQVMFINNPLSGLIIFIGLLIQNPWWTITGGLGTVVSTLTALALGQDRSAIASGLHGYNGMLVGLLMAVFSEKLDYYWWLLFPVTFTAMSCPVLSSALNSIFSKWDLPVFTLPFNIAVTLYLAATGHYNLFFPTTLVEPVSSVPNITWTEMEMPLLLQAIPVGVGQVYGCDNPWTGGVFLVALFISSPLICLHAAIGSIVGLLAALSVATPFETIYTGLWSYNCVLSCIAIGGMFYALTWQTHLLALICALFCAYMEAAISNIMSVVGVPPGTWAFCLATIIFLLLTTNNPAIFRLPLSKVTYPEANRIYYLTVKSGEEEKAPSGGGGEHPPTAGPKVEEGSEAVLSKHRSVFHIEWSSIRRRSKVFGKGEHQERQNKDPFPYRYRKPTVELLDLDTMEESSEIKVETNISKTSWIRSSMAASGKRVSKALSYITGEMKECGEGLKDKSPVFQFFDWVLRGTSQVMFVNNPLSGILIILGLFIQNPWWAISGCLGTIMSTLTALILSQDKSAIAAGFHGYNGVLVGLLMAVFSDKGDYYWWLLLPVIIMSMSCPILSSALGTIFSKWDLPVFTLPFNITVTLYLAATGHYNLFFPTTLLQPASAMPNITWSEVQVPLLLRAIPVGIGQVYGCDNPWTGGIFLIALFISSPLICLHAAIGSTMGMLAALTIATPFDSIYFGLCGFNSTLACIAIGGMFYVITWQTHLLAIACALFAAYLGAALANMLSVFGLPPCTWPFCLSALTFLLLTTNNPAIYKLPLSKVTYPEANRIYYLSQERNRRASIITKYQAYDVS

SEQ ID NO: 80473 - protein, 235 aa, Homo sapiens
  Payload ID: 16036
  Gene Symbol: SLC14A2
  Gene Name: solute carrier family 14 (urea transporter), member 2
  ENSP ID: ENSP00000320689
MSDPHSSPLLPEPLSSRYKLYEAEFTSPSWPSTSPDTHPALPLLEMPEEKDLRSSNEDSHIVKIEKLNERSKRKDDGVAHRDSAGQRCICLSKAVGYLTGDMKEYRIWLKDKHLALQFIDWVLRGTAQVMFINNPLSGLIIFIGLLIQNPWWTITGGLGTVVSTLTALALGQDRSAIASGLHGYNGMLVGLLMAVFSEKLDYYWWLLFPVTFTAMSWMETDFNWSKSGCWKHLLQ

SEQ ID NO: 80474 - protein, 920 aa, Homo sapiens; identical to SEQ ID NO: 80472
  Payload ID: 16036
  Gene Symbol: SLC14A2
  Gene Name: solute carrier family 14 (urea transporter), member 2
  Uniprot ID: Q15849
  ENSP ID: ENSP00000465349

SEQ ID NO: 80475 - protein, 920 aa, Homo sapiens; identical to SEQ ID NO: 80472
  Payload ID: 16036
  Gene Symbol: SLC14A2
  Gene Name: solute carrier family 14 (urea transporter), member 2
  Uniprot ID: Q15849
  ENSP ID: ENSP00000465953

SEQ ID NO: 80476 - protein, 708 aa, Homo sapiens
  Payload ID: 16037
  Gene Symbol: SLC15A1
  Gene Name: solute carrier family 15 (oligopeptide transporter), member 1
  Uniprot ID: P46059
  ENSP ID: ENSP00000365686
MGMSKSHSFFGYPLSIFFIVVNEFCERFSYYGMRAILILYFTNFISWDDNLSTAIYHTFVALCYLTPILGALIADSWLGKFKTIVSLSIVYTIGQAVTSVSSINDLTDHNHDGTPDSLPVHVVLSLIGLALIALGTGGIKPCVSAFGGDQFEEGQEKQRNRFFSIFYLAINAGSLLSTIITPMLRVQQCGIHSKQACYPLAFGVPAALMAVALIVFVLGSGMYKKFKPQGNIMGKVAKCIGFAIKNRFRHRSKAFPKREHWLDWAKEKYDERLISQIKMVTRVMFLYIPLPMFWALFDQQGSRWTLQATTMSGKIGALEIQPDQMQTVNAILIVIMVPIFDAVLYPLIAKCGFNFTSLKKMAVGMVLASMAFVVAAIVQVEIDKTLPVFPKGNEVQIKVLNIGNNTMNISLPGEMVTLGPMSQTNAFMTFDVNKLTRINISSPGSPVTAVTDDFKQGQRHTLLVWAPNHYQVVKDGLNQKPEKGENGIRFVNTFNELITITMSGKVYANISSYNASTYQFFPSGIKGFTISSTEIPPQCQPNFNTFYLEFGSAYTYIVQRKNDSCPEVKVFEDISANTVNMALQIPQYFLLTCGEVVFSVTGLEFSYSQAPSNMKSVLQAGWLLTVAVGNIIVLIVAGAGQFSKQWAEYILFAALLLVVCVIFAIMARFYTYINPAEIEAQFDEDEKKNRLEKSNPYFMSGANSQKQM

SEQ ID NO: 80477 - protein, 706 aa, Homo sapiens
  Payload ID: 16037
  Gene Symbol: SLC15A1
  Gene Name: solute carrier family 15 (oligopeptide transporter), member 1
  ENSP ID: ENSP00000478051
MGMSKSHSFFGYPLSIFFIVVNEFCERFSYYGMRAILILYFTNFISWDDNLSTAIYHTFVALCYLTPILGALIADSWLGKFKTIVSLSIVYTIGQAVTSVSSINDLTDHNHDGTPDSLPVHVVLSLIGLALIALGTGGIKPCVSAFGGDQFEEGQEKQRNRFFSIFYLAINAGSLLSTIITPMLRVQQCGIHSKQACYPLAFGVPAALMAVALIVFVLGSGMYKKFKPQGNIMGKVAKCIGFAIKNRFRHRSKAFPKREHWLDWAKEKYDERLISQIKMVTRVMFLYIPLPMFWALFDQQGSRWTLQATTMSGKIGALEIQPDQMQTVNAILIVIMVPIFDAVLYPLIAKCGFNFTSLKKMAVGMVLASMAFVVAAIVQVEIDKTLPVFPKGNEVQIKVLNIGNNTMNISLPGEMVTLGPMSQTNAFMTFDVNKLTRINISSPGSPVTAVTDDFKQGQRHTLLVWAPNHYQVVKDGLNQKPEKGENGIRFVNTFNELITITMSGKVYANISSYQHIPVFPSGIKGFTISSTEIPPQCQPNFNTFYLEFGSAYTYIVQRKNDSCPEVKVFEDISANTVNMALQIPQYFLLTCGEVVFSVTGLEFSYSQAPSNMKSVLQAGWLLTVAVGNIIVLIVAGAGQFSKQWAEYILFAALLLVVCVIFAIMARFYTYINPAEIEAQFDEDEKKNRLEKSNPYFMSGANSQKQM

SEQ ID NO: 80478 - protein, 208 aa, Homo sapiens
  Payload ID: 16037
  Gene Symbol: SLC15A1
  Gene Name: solute carrier family 15 (oligopeptide transporter), member 1
  ENSP ID: ENSP00000482440
MDQWGVYFNPVLVSFCQSFFGYPLSIFFIVVNEFCERFSYYGMRAILILYFTNFISWDDNLSTAIYHTFVALCYLTPILGALIADSWLGKFKTIVSLSIVYTIGQAVTSVSSINDLTDHNHDGTPDSLPVHVVLSLIGLALIALGTGGIKPCVSAFGGDQFEEGQEKQRNRFFSIFYLAINAGSLLSTIITPMLRGKRYLKGTSVGLF

SEQ ID NO: 80479 - protein, 698 aa, Homo sapiens
  Payload ID: 16038
  Gene Symbol: SLC15A2
  Gene Name: solute carrier family 15 (oligopeptide transporter), member 2
  Uniprot ID: Q16348
  ENSP ID: ENSP00000295605
MNPFQKNESKETLFSPVSIEEVPPRPPSPPKKPSPTICGSNYPLSIAFIVVNEFCERFSYYGMKAVLILYFLYFLHWNEDTSTSIYHAFSSLCYFTPILGAAIADSWLGKFKVLSLIGLSLIALGTGGIKPCVAAFGGDQFEEKHAEERTRYFSVFYLSINAGSLISTFITPMLRGDVQCFGEDCYALAFGVPGLLMVIALVVFAMGSKIYNKPPPEGNIVAQVFKCIWFAISNRFKNRSGDIPKRQHWLDWAAEKYPKQLIMDVKALTRVLFLYIPLPMFWALLDQQGSRWTLQAIRMNRNLGFFVLQPDQMQVLNPLLVLIFIPLFDFVIYRLVSKCGINFSSLRKMAVGMILACLAFAVAAAVEIKINEMAPAQPGPQEVFLQVLNLADDEVKVTVVGNENNSLLIESIKSFQKTPHYSKLHLKTKSQDFHFHLKYHNLSLYTEHSVQEKNWYSLVIREDGNSISSMMVKDTESRTTNGMTTVRFVNTLHKDVNISLSTDTSLNVGEDYGVSAYRTVQRGEYPAVHCRTEDKNFSLNLGLLDFGAAYLFVITNNTNQGLQAWKIEDIPANKMSIAWQLPQYALVTAGEVMFSVTGLEFSYSQAPSSMKSVLQAAWLLTIAVGNIIVLVVAQFSGLVQWAEFILFSCLLLVICLIFSIMGYYYVPVKTEDMRGPADKHIPHIQGNMIKLETKKTKL

SEQ ID NO: 80480 - protein, 729 aa, Homo sapiens
  Payload ID: 16038
  Gene Symbol: SLC15A2
  Gene Name: solute carrier family 15 (oligopeptide transporter), member 2
  Uniprot ID: Q16348
  ENSP ID: ENSP00000417085
MNPFQKNESKETLFSPVSIEEVPPRPPSPPKKPSPTICGSNYPLSIAFIVVNEFCERFSYYGMKAVLILYFLYFLHWNEDTSTSIYHAFSSLCYFTPILGAAIADSWLGKFKTIIYLSLVYVLGHVIKSLGALPILGGQVVHTVLSLIGLSLIALGTGGIKPCVAAFGGDQFEEKHAEERTRYFSVFYLSINAGSLISTFITPMLRGDVQCFGEDCYALAFGVPGLLMVIALVVFAMGSKIYNKPPPEGNIVAQVFKCIWFAISNRFKNRSGDIPKRQHWLDWAAEKYPKQLIMDVKALTRVLFLYIPLPMFWALLDQQGSRWTLQAIRMNRNLGFFVLQPDQMQVLNPLLVLIFIPLFDFVIYRLVSKCGINFSSLRKMAVGMILACLAFAVAAAVEIKINEMAPAQPGPQEVFLQVLNLADDEVKVTVVGNENNSLLIESIKSFQKTPHYSKLHLKTKSQDFHFHLKYHNLSLYTEHSVQEKNWYSLVIREDGNSISSMMVKDTESRTTNGMTTVRFVNTLHKDVNISLSTDTSLNVGEDYGVSAYRTVQRGEYPAVHCRTEDKNFSLNLGLLDFGAAYLFVITNNTNQGLQAWKIEDIPANKMSIAWQLPQYALVTAGEVMFSVTGLEFSYSQAPSSMKSVLQAAWLLTIAVGNIIVLVVAQFSGLVQWAEFILFSCLLLVICLIFSIMGYYYVPVKTEDMRGPADKHIPHIQGNMIKLETKKTKL

SEQ ID NO: 80481 - protein, 152 aa, Homo sapiens
  Payload ID: 16038
  Gene Symbol: SLC15A2
  Gene Name: solute carrier family 15 (oligopeptide transporter), member 2
  ENSP ID: ENSP00000418704
MKAVLILYFLYFLHWNEDTSTSIYHAFSSLCYFTPILGAAIADSWLGKFKTIIYLSLVYVLGHVIKSLGALPILGGQVVHTVLSLIGLSLIALGTGGIKPCVAAFGGDQFEEKHAEERTRYFSVFYLSINAGSLISTFITPMLRGDVQCFGE

SEQ ID NO: 80482 - protein, 581 aa, Homo sapiens
  Payload ID: 16039
  Gene Symbol: SLC15A3
  Gene Name: solute carrier family 15 (oligopeptide transporter), member 3
  Uniprot ID: Q8IY34
  ENSP ID: ENSP00000227880
MPAPRAREQPRVPGERQPLLPRGARGPRRWRRAAGAAVLLVEMLERAAFFGVTANLVLYLNSTNFNWTGEQATRAALVFLGASYLLAPVGGWLADVYLGRYRAVALSLLLYLAASGLLPATAFPDGRSSFCGEMPASPLGPACPSAGCPRSSPSPYCAPVLYAGLLLLGLAASSVRSNLTSFGADQVMDLGRDATRRFFNWFYWSINLGAVLSLLVVAFIQQNISFLLGYSIPVGCVGLAFFIFLFATPVFITKPPMGSQVSSMLKLALQNCCPQLWQRHSARDRQCARVLADERSPQPGASPQEDIANFQVLVKILPVMVTLVPYWMVYFQMQSTYVLQGLHLHIPNIFPANPANISVALRAQGSSYTIPEAWLLLANVVVVLILVPLKDRLIDPLLLRCKLLPSALQKMALGMFFGFTSVIVAGVLEMERLHYIHHNETVSQQIGEVLYNAAPLSIWWQIPQYLLIGISEIFASIPGLEFAYSEAPRSMQGAIMGIFFCLSGVGSLLGSSLVALLSLPGGWLHCPKDFGNINNCRMDLYFFLLAGIQAVTALLFVWIAGRYERASQGPASHSRFSRDRG

SEQ ID NO: 80483 - protein, 247 aa, Homo sapiens
  Payload ID: 16039
  Gene Symbol: SLC15A3
  Gene Name: solute carrier family 15 (oligopeptide transporter), member 3
  ENSP ID: ENSP00000437908
  MOD_RES (1)..(1): Any amino acid
XPGASPQEDIANFQVLVKILPVMVTLVPYWMVYFQIPEAWLLLANVVVVLILVPLKDRLIDPLLLRCKLLPSALQKMALGMFFGFTSVIVAGVLEMERLHYIHHNETVSQQIGEVLYNAAPLSIWWQIPQYLLIGISEIFASIPGLEFAYSEAPRSMQGAIMGIFFCLSGVGSLLGSSLVALLSLPGGWLHCPKDFGNINNCRMDLYFFLLAGIQAVTALLFVWIAGRYERASQGPASHSRFSRDRG

SEQ ID NO: 80484 - protein, 209 aa, Homo sapiens
  Payload ID: 16039
  Gene Symbol: SLC15A3
  Gene Name: solute carrier family 15 (oligopeptide transporter), member 3
  ENSP ID: ENSP00000439535
MDLGRDATRRFFNWFYWSINLGAVLSLLVVAFIQQNISFLLGYSIPVGCVGLAFFIFLFATPVFITKPPMGSQVSSMLKLALQNCCPQLWQRHSARDRQCARVLADERSPQPGASPQEDIANFQVLVKILPVMVTLVPYWMVYFQMQSTYVLQGLHLHIPNIFPANPANISVALRAQGSSYTIPEAWLLLANVVVVLILVPLKDRLIDP

SEQ ID NO: 80485 - protein, 149 aa, Homo sapiens
  Payload ID: 16039
  Gene Symbol: SLC15A3
  Gene Name: solute carrier family 15 (oligopeptide transporter), member 3
  ENSP ID: ENSP00000441559
MPASPLGPACPSAGCPRSSPSPYCAPVLYAGLLLLGLAASSVRSNLTSFGADQVMDLGRDATRRFFNWFYWSINLGAVLSLLVVAFIQQNISFLLGYSIPVGCVGLAFFIFLFATPVFITKPPMGSQVSSMLKLALQNCCPQLWQRHSA

SEQ ID NO: 80486 - protein, 43 aa, Homo sapiens
  Payload ID: 16039
  Gene Symbol: SLC15A3
  Gene Name: solute carrier family 15 (oligopeptide transporter), member 3
  ENSP ID: ENSP00000441694
GAIMGIFFCLSGVGSLLGSSLVALLSLPGGWLHCPKDFAEEEL

SEQ ID NO: 80487 - protein, 456 aa, Homo sapiens
  Payload ID: 16039
  Gene Symbol: SLC15A3
  Gene Name: solute carrier family 15 (oligopeptide transporter), member 3
  ENSP ID: ENSP00000445773
MPAPRAREQPRVPGERQPLLPRGARGPRRWRRAAGAAVLLVEMLERAAFFGVTANLVLYLNSTNFNWTGEQATRAALVFLGASYLLAPVGGWLADVYLGRYRAVALSLLLYLAASGLLPATAFPDGRSSFCGEMPASPLGPACPSAGCPRSSPSPYCAPVLYAGLLLLGLAASSVRSNLTSFGADQVMDLGRDATRRFFNWFYWSINLGAVLSLLVVAFIQQNISFLLGYSIPVGCVGLAFFIFLFATPVFITKPPMGSQVSSMLKLALQNCCPQLWQRHSARDRQCARVLADERSPQPGASPQEDIANFQVLVKILPVMVTLVPYWMVYFQMQSTYVLQGLHLHIPNIFPANPANISVALRAQGSSYTESWRWSAYTTSTTTRPCPSRLGRSCTTRHHCPSGGRSLSTCSLGSVRSLPASQAWSLPTQRPRAPCRAPSWASSSACRGWAHCWAPA

SEQ ID NO: 80488 - protein, 313 aa, Homo sapiens
  Payload ID: 16039
  Gene Symbol: SLC15A3
  Gene Name: solute carrier family 15 (oligopeptide transporter), member 3
  ENSP ID: ENSP00000479400
MPAPRAREQPRVPGERQPLLPRGARGPRRWRRAAGAAVLLVEMLERAAFFGVTANLVLYLNSTNFNWTGEQATRAALVFLGASYLLAPVGGWLADVYLGRYRAVALSLLLYLAASGLLPATAFPDGRSSFCGEMPASPLGPACPSAGCPRSSPSPYCAPVLYAGLLLLGLAASSVRSNLTSFGADQVMDLGRDATRRFFNWFTGASTWVLCCRCWWWRLFSRTSASCWATASLWAVWAWHFSSSSLPPPSSSPSPRWAAKCPLCLSSLSKTAAPSCGNDTRPETVNVPACWPTRGLPSQGLPRKRTSPTSRCW

SEQ ID NO: 80489 - protein, 313 aa, Homo sapiens; identical to SEQ ID NO: 80488
  Payload ID: 16039
  Gene Symbol: SLC15A3
  Gene Name: solute carrier family 15 (oligopeptide transporter), member 3
  ENSP ID: ENSP00000484264

SEQ ID NO: 80490 - protein, 577 aa, Homo sapiens
  Payload ID: 16040
  Gene Symbol: SLC15A4
  Gene Name: solute carrier family 15 (oligopeptide transporter), member 4
  Uniprot ID: Q8N697
  ENSP ID: ENSP00000266771
MEGSGGGAGERAPLLGARRAAAAAAAAGAFAGRRAACGAVLLTELLERAAFYGITSNLVLFLNGAPFCWEGAQASEALLLFMGLTYLGSPFGGWLADARLGRARAILLSLALYLLGMLAFPLLAAPATRAALCGSARLLNCTAPGPDAAARCCSPATFAGLVLVGLGVATVKANITPFGADQVKDRGPEATRRFFNWFYWSINLGAILSLGGIAYIQQNVSFVTGYAIPTVCVGLAFVVFLCGQSVFITKPPDGSAFTDMFKILTYSCCSQKRSGERQSNGEGIGVFQQSSKQSLFDSCKMSHGGPFTEEKVEDVKALVKIVPVFLALIPYWTVYFQMQTTYVLQSLHLRIPEISNITTTPHTLPAAWLTMFDAVLILLLIPLKDKLVDPILRRHGLLPSSLKRIAVGMFFVMCSAFAAGILESKRLNLVKEKTINQTIGNVVYHAADLSLWWQVPQYLLIGISEIFASIAGLEFAYSAAPKSMQSAIMGLFFFFSGVGSFVGSGLLALVSIKAIGWMSSHTDFGNINGCYLNYYFFLLAAIQGATLLLFLIISVKYDHHRDHQRSRANGVPTSRRA

SEQ ID NO: 80491 - protein, 155 aa, Homo sapiens
  Payload ID: 16040
  Gene Symbol: SLC15A4
  Gene Name: solute carrier family 15 (oligopeptide transporter), member 4
  ENSP ID: ENSP00000365930
  MOD_RES (1)..(1): Any amino acid
XTAPGPDAAARCCSPATFAGLVLVGLGVATVKANITPFGADQVKDRGPEATRRFFNWFYWSINLGAILSLGGIAYIQQNVSFVTGYAIPTVCVGLAFVVFLCGQSVFITKPPDGSAFTDMFKILTYSCCSQKRSGERQSNGCLMVGHLQKRKWKM

SEQ ID NO: 80492 - protein, 238 aa, Homo sapiens
  Payload ID: 16040
  Gene Symbol: SLC15A4
  Gene Name: solute carrier family 15 (oligopeptide transporter), member 4
  ENSP ID: ENSP00000365935
  MOD_RES (1)..(1): Any amino acid
XSNLVLFLNGAPFCWEGAQASEALLLFMGLTYLGSPFGGWLADARLGRARAILLSLALYLLGMLAFPLLAAPATRAALCGSARLLNCTAPGPDAAARCCSPATFAGLVLVGLGVATVKANITPFGADQVKDRGPEATRRFFNWFYWSINLGAILSLGGIAYIQQNVSFVTGYAIPTVCVGLAFVVFLCGQSVFITKPPDGSAFTDMFKILTYSCCSQKRSGERQSNGCRQHMFYRVFI

SEQ ID NO: 80493 - protein, 187 aa, Homo sapiens
  Payload ID: 16040
  Gene Symbol: SLC15A4
  Gene Name: solute carrier family 15 (oligopeptide transporter), member 4
  ENSP ID: ENSP00000483143
MQTTYVLQSLHLRIPEISNITTTPHTLPAAWLTMFDAVLILLLIPLKDKLVDPILRRHGLLPSSLKRIAVGMFFVMCSAFAAGILESKRLNLVKEKTINQTIGNVVYHAADLSLWWQVPQYLLIGISEIFASIAGLEFAYSAAPKSMQSAIMGLFFFFSGRVVRGFWTAGTGVYQSHRMDEQSHRLW

SEQ ID NO: 80494 - protein, 579 aa, Homo sapiens
  Payload ID: 16041
  Gene Symbol: SLC15A5
  Gene Name: solute carrier family 15, member 5
  Uniprot ID: A6NIM6
  ENSP ID: ENSP00000340402
MSVTGFTITDEKVHLYHSIEKEKTVRHIGDLCSSHSVKKIQVGICLLLVELCERFTFFEVVCNMIPFCTIKLGYHNCQAAILNLCFIGTSILTPVFVRWLTDVYLGRNKLVYICLFLHFLGTALLSVVAFPLEDFYLGTYHAVNNIPKTEQHRLFYVALLTICLGIGGVRAIVCPLGAFGLQEYGSQKTMSFFNWFYWLMNLNATIVFLGISYIQHSQAWALVLLIPFMSMLMAVITLHMIYYNLIYQSEKRCSLLTGVGVLVSALKTCHPQYCHLGRDVTSQLDHAKEKNGGCYSELHVEDTTFFLTLLPLFIFQLLYRMCIMQIPSGYYLQTMNSNLNLDGFLLPIAVMNAISSLPLLILAPFLEYFSTCLFPSKRVGSFLSTCIIAGNLFAALSVMIAGFFEIHRKHFPAVEQPLSGKVLTVSSMPCFYLILQYVLLGVAETLVNPALSVISYRFVPSNVRGTSMNFLTLFNGFGCFTGALLVKLVYLISDGNWFPNTLNKGNLESFFFFLASLTLLNVLGFCSVSQRYCNLNHFNAQNIRGSNLEETLLLHEKSLKFYGSIQEFSSSIDLWETAL

SEQ ID NO: 80495 - protein, 201 aa, Homo sapiens
  Payload ID: 16042
  Gene Symbol: SLC16A10
  Gene Name: solute carrier family 16 (aromatic amino acid transporter), member 10
  ENSP ID: ENSP00000357843
MKHVNERFQDEKNKEVVLMCIGVTSGVGRLLFGRIADYVPGVKKVYLQVLSFFFIGLMSMMIPLCSIFGALIAVCLIMGLFDGCFISIMAPIAFELVGAQDVSQAIGFLLGFMSIPMTVGPPIAGLLRDKLGSYDVAFYLAGVPPLIGGAVLCFIPWIHSKKQREISKTTGKEKMEKMLENQNSLLSSSSGMFKKESDSII

SEQ ID NO: 80496 - protein, 515 aa, Homo sapiens
  Payload ID: 16042
  Gene Symbol: SLC16A10
  Gene Name: solute carrier family 16 (aromatic amino acid transporter), member 10
  Uniprot ID: Q8TF71
  ENSP ID: ENSP00000357844
MVLSQEEPDSARGTSEAQPLGPAPTGAAPPPGPGPSDSPEAAVEKVEVELAGPATAEPHEPPEPPEGGWGWLVMLAAMWCNGSVFGIQNACGVLFVSMLETFGSKDDDKMVFKTAWVGSLSMGMIFFCCPIVSVFTDLFGCRKTAVVGAAVGFVGLMSSSFVSSIEPLYLTYGIIFACGCSFAYQPSLVILGHYFKKRLGLVNGIVTAGSSVFTILLPLLLRVLIDSVGLFYTLRVLCIFMFVLFLAGFTYRPLATSTKDKESGGSGSSLFSRKKFSPPKKIFNFAIFKVTAYAVWAVGIPLALFGYFVPYVHLMKHVNERFQDEKNKEVVLMCIGVTSGVGRLLFGRIADYVPGVKKVYLQVLSFFFIGLMSMMIPLCSIFGALIAVCLIMGLFDGCFISIMAPIAFELVGAQDVSQAIGFLLGFMSIPMTVGPPIAGLLRDKLGSYDVAFYLAGVPPLIGGAVLCFIPWIHSKKQREISKTTGKEKMEKMLENQNSLLSSSSGMFKKESDSII

SEQ ID NO: 80497 - protein, 206 aa, Homo sapiens
  Payload ID: 16042
  Gene Symbol: SLC16A10
  Gene Name: solute carrier family 16 (aromatic amino acid transporter), member 10
  ENSP ID: ENSP00000387501
  MOD_RES (1)..(1): Any amino acid
XWVGSLSMGMIFFCCPIVSVFTDLFGCRKTAVVGAAVGFVGLMSSSFVSSIEPLYLTYGIIFACGCSFAYQPSLVILGHYFKKRLGLVNGIVTAGSSVFTILLPLLLRVLIDSVGLFYTLRVLCIFMFVLFLAGFTYRPLATSTKDKESGGSGSSLFSRKKFSPPKKIFNFAIFKVTAYAVWAVGIPLALFGYFVPYVHLVSMLLH

SEQ ID NO: 80498 - protein, 211 aa, Homo sapiens
  Payload ID: 16042
  Gene Symbol: SLC16A10
  Gene Name: solute carrier family 16 (aromatic amino acid transporter), member 10
  ENSP ID: ENSP00000399601
  MOD_RES (1)..(1): Any amino acid
XWVGSLSMGMIFFCCPIVSVFTDLFGCRKTAVVGAAVGFVGLMSSSFVSSIEPLYLTYGIIFACGCSFAYQPSLVILGHYFKKRLGLVNGIVTAGSSVFTILLPLLLRVLIDSVGLFYTLRVLCIFMFVLFLAGFTYRPLATSTKDKESGGSGSSLFSRKKFSPPKKIFNFAIFKVTAYAVWAVGIPLALFGYFVPYVHLAKFSFVILKYE

SEQ ID NO: 80499 - protein, 326 aa, Homo sapiens
  Payload ID: 16042
  Gene Symbol: SLC16A10
  Gene Name: solute carrier family 16 (aromatic amino acid transporter), member 10
  ENSP ID: ENSP00000483868
MVLSQEEPDSARGTSEAQPLGPAPTGAAPPPGPGPSDSPEAAVEKVEVELAGPATAEPHEPPEPPEGGWGWLVMLAAMWCNGSVFGIQNACGVLFVSMLETFGSKDDDKMVFKTAWVGSLSMGMIFFCCPIVSVFTDLFGCRKTAVVGAAVGFVGLMSSSFVSSIEPLYLTYGIIFACGCSFAYQPSLVILGHYFKKRLGLVNGIVTAGSSVFTILLPLLLRVLIDSVGLFYTLRVLCIFMFVLFLAGFTYRPLATSTKDKESGGSGSSLFSRKKFSPPKNFQFCHLQGDSLCSVGSWNTTCTFWILCALCSLGEYAPSLIMNITI

SEQ ID NO: 80500 - protein, 500 aa, Homo sapiens
  Payload ID: 16043
  Gene Symbol: SLC16A1
  Gene Name: solute carrier family 16 (monocarboxylate transporter), member 1
  Uniprot ID: P53985
  ENSP ID: ENSP00000358640
MPPAVGGPVGYTPPDGGWGWAVVIGAFISIGFSYAFPKSITVFFKEIEGIFHATTSEVSWISSIMLAVMYGGGPISSILVNKYGSRIVMIVGGCLSGCGLIAASFCNTVQQLYVCIGVIGGLGLAFNLNPALTMIGKYFYKRRPLANGLAMAGSPVFLCTLAPLNQVFFGIFGWRGSFLILGGLLLNCCVAGALMRPIGPKPTKAGKDKSKASLEKAGKSGVKKDLHDANTDLIGRHPKQEKRSVFQTINQFLDLTLFTHRGFLLYLSGNVIMFFGLFAPLVFLSSYGKSQHYSSEKSAFLLSILAFVDMVARPSMGLVANTKPIRPRIQYFFAASVVANGVCHMLAPLSTTYVGFCVYAGFFGFAFGWLSSVLFETLMDLVGPQRFSSAVGLVTIVECCPVLLGPPLLGRLNDMYGDYKYTYWACGVVLIISGIYLFIGMGINYRLLAKEQKANEQKKESKEEETSIDVAGKPNEVTKAAESPDQKDTDGGPKEEESPV

SEQ ID NO: 80501 - protein, 215 aa, Homo sapiens
  Payload ID: 16043
  Gene Symbol: SLC16A1
  Gene Name: solute carrier family 16 (monocarboxylate transporter), member 1
  ENSP ID: ENSP00000397106
MPPAVGGPVGYTPPDGGWGWAVVIGAFISIGFSYAFPKSITVFFKEIEGIFHATTSEVSWISSIMLAVMYGGGPISSILVNKYGSRIVMIVGGCLSGCGLIAASFCNTVQQLYVCIGVIGGLGLAFNLNPALTMIGKYFYKRRPLANGLAMAGSPVFLCTLAPLNQVFFGIFGWRGSFLILGGLLLNCCVAGALMRPIGPKPTKAGKDKSKASLE

SEQ ID NO: 80502 - protein, 296 aa, Homo sapiens
  Payload ID: 16043
  Gene Symbol: SLC16A1
  Gene Name: solute carrier family 16 (monocarboxylate transporter), member 1
  ENSP ID: ENSP00000399104
MPPAVGGPVGYTPPDGGWGWAVVIGAFISIGFSYAFPKSITVFFKEIEGIFHATTSEVSWISSIMLAVMYGGGPISSILVNKYGSRIVMIVGGCLSGCGLIAASFCNTVQQLYVCIGVIGGLGLAFNLNPALTMIGKYFYKRRPLANGLAMAGSPVFLCTLAPLNQVFFGIFGWRGSFLILGGLLLNCCVAGALMRPIGPKPTKAGKDKSKASLEKAGKSGVKKDLHDANTDLIGRHPKQEKRSVFQTINQFLDLTLFTHRGFLLYLSGNVIMFFGLFAPLVFLSSYGKSQHYSSE

SEQ ID NO: 80503 - protein, 456 aa, Homo sapiens
  Payload ID: 16043
  Gene Symbol: SLC16A1
  Gene Name: solute carrier family 16 (monocarboxylate transporter), member 1
  ENSP ID: ENSP00000416167
MPPAVGGPVGYTPPDGGWGWAVVIGAFISIGFSYAFPKSITVFFKEIEGIFHATTSEVSWISSIMLAVMYGGGPISSILVNKYGSRIVMIVGGCLSGCGLIAASFCNTVQQLYVCIGVIGGLGLAFNLNPALTMIGKYFYKRRPLANGLAMAGSPVFLCTLAPLNQVFFGIFGWRGSFLILGGLLLNCCVAGALMRPIGPKPTKAGKDKSKASLEKAGKSGVKKDLHDANTDLIGRHPKQEKRSVFQTINQFLDLTLFTHRGFLLYLSGNVIMFFGLFAPLVFLSSYGKSQHYSSEKSAFLLSILAFVDMVARPSMGLVANTKPIRPRIQYFFAASVVANGVCHMLAPLSTTYVGFCVYAGFFGFAFGWLSSVLFETLMDLVGPQRFSSAVGLVTIVECCPVLLGPPLLGRLNDMYGDYKYTYWACGVVLIISGIYLFIGMGINYRLLAKEQKANE

SEQ ID NO: 80504 - protein, 500 aa, Homo sapiens; identical to SEQ ID NO: 80500
  Payload ID: 16043
  Gene Symbol: SLC16A1
  Gene Name: solute carrier family 16 (monocarboxylate transporter), member 1
  Uniprot ID: P53985
  ENSP ID: ENSP00000441065

SEQ ID NO: 80505 - protein, 500 aa, Homo sapiens; identical to SEQ ID NO: 80500
  Payload ID: 16043
  Gene Symbol: SLC16A1
  Gene Name: solute carrier family 16 (monocarboxylate transporter), member 1
  Uniprot ID: P53985
  ENSP ID: ENSP00000485688

SEQ ID NO: 80506 - protein, 215 aa, Homo sapiens; identical to SEQ ID NO: 80501
  Payload ID: 16043
  Gene Symbol: SLC16A1
  Gene Name: solute carrier family 16 (monocarboxylate transporter), member 1
  ENSP ID: ENSP00000485854

SEQ ID NO: 80507 - protein, 500 aa, Homo sapiens; identical to SEQ ID NO: 80500
  Payload ID: 16043
  Gene Symbol: SLC16A1
  Gene Name: solute carrier family 16 (monocarboxylate transporter), member 1
  Uniprot ID: P53985
  ENSP ID: ENSP00000486000

SEQ ID NO: 80508 - protein, 296 aa, Homo sapiens; identical to SEQ ID NO: 80502
  Payload ID: 16043
  Gene Symbol: SLC16A1
  Gene Name: solute carrier family 16 (monocarboxylate transporter), member 1
  ENSP ID: ENSP00000486404

SEQ ID NO: 80509 - protein, 456 aa, Homo sapiens; identical to SEQ ID NO: 80503
  Payload ID: 16043
  Gene Symbol: SLC16A1
  Gene Name: solute carrier family 16 (monocarboxylate transporter), member 1
  ENSP ID: ENSP00000486874

SEQ ID NO: 80510 - protein, 465 aa, Homo sapiens
  Payload ID: 16044
  Gene Symbol: SLC16A3
  Gene Name: solute carrier family 16 (monocarboxylate transporter), member 3
  Uniprot ID: O15427
  ENSP ID: ENSP00000376150
MGGAVVDEGPTGVKAPDGGWGWAVLFGCFVITGFSYAFPKAVSVFFKELIQEFGIGYSDTAWISSILLAMLYGTGPLCSVCVNRFGCRPVMLVGGLFASLGMVAASFCRSIIQVYLTTGVITGLGLALNFQPSLIMLNRYFSKRRPMANGLAAAGSPVFLCALSPLGQLLQDRYGWRGGFLILGGLLLNCCVCAALMRPLVVTAQPGSGPPRPSRRLLDLSVFRDRGFVLYAVAASVMVLGLFVPPVFVVSYAKDLGVPDTKAAFLLTILGFIDIFARPAAGFVAGLGKVRPYSVYLFSFSMFFNGLADLAGSTAGDYGGLVVFCIFFGISYGMVGALQFEVLMAIVGTHKFSSAIGLVLLMEAVAVLVGPPSGGKLLDATHVYMYVFILAGAEVLTSSLILLLGNFFCIRKKPKEPQPEVAAAEEEKLHKPPADSGVDLREVEHFLKAEPEKNGEVVHTPETSV

SEQ ID NO: 80511 - protein, 465 aa, Homo sapiens; identical to SEQ ID NO: 80510
  Payload ID: 16044
  Gene Symbol: SLC16A3
  Gene Name: solute carrier family 16 (monocarboxylate transporter), member 3
  Uniprot ID: O15427
  ENSP ID: ENSP00000376152

SEQ ID NO: 80512 - protein, 465 aa, Homo sapiens; identical to SEQ ID NO: 80510
  Payload ID: 16044
  Gene Symbol: SLC16A3
  Gene Name: solute carrier family 16 (monocarboxylate transporter), member 3
  Uniprot ID: O15427
  ENSP ID: ENSP00000462405

SEQ ID NO: 80513 - protein, 219 aa, Homo sapiens
  Payload ID: 16044
  Gene Symbol: SLC16A3
  Gene Name: solute carrier family 16 (monocarboxylate transporter), member 3
  ENSP ID: ENSP00000462854
MGGAVVDEGPTGVKAPDGGWGWAVLFGCFVITGFSYAFPKAVSVFFKELIQEFGIGYSDTAWISSILLAMLYGTGPLCSVCVNRFGCRPVMLVGGLFASLGMVAASFCRSIIQVYLTTGVITGLGLALNFQPSLIMLNRYFSKRRPMANGLAAAGSPVFLCALSPLGQLLQDRYGWRGGFLILGGLLLNCCVCAALMRPLVVTAQPGSGPPRPSRRLLD

SEQ ID NO: 80514 - protein, 306 aa, Homo sapiens
  Payload ID: 16044
  Gene Symbol: SLC16A3
  Gene Name: solute carrier family 16 (monocarboxylate transporter), member 3
  ENSP ID: ENSP00000463005
LIMLNRYFSKRRPMANGLAAAGSPVFLCALSPLGQLLQDRYGWRGGFLILGGLLLNCCVCAALMRPLVVTAQPGSGPPRPSRRLLDLSVFRDRGFVLYAVAASVMVLGLFVPPVFVVSYAKDLGVPDTKAAFLLTILGFIDIFARPAAGFVAGLGKVRPYSVYLFSFSMFFNGLADLAGSTAGDYGGLVVFCIFFGISYGMVGALQFEVLMAIVGTHKFSSAIGLVLLMEAVAVLVGPPSGGVLLSPRLEGSGTITAPCSLNLPNSSHPPASASRVAETTDVSHCTWPVSFSSLPPKCLSRNHPFC

SEQ ID NO: 80515 - protein, 157 aa, Homo sapiens
  Payload ID: 16044
  Gene Symbol: SLC16A3
  Gene Name: solute carrier family 16 (monocarboxylate transporter), member 3
  ENSP ID: ENSP00000463063
MGGAVVDEGPTGVKAVSVFFKELIQEFGIGYSDTAWISSILLAMLYGTGPLCSVCVNRFGCRPVMLVGGLFASLGMVAASFCRSIIQVYLTTGVITGLGLALNFQPSLIMLNRYFSKRRPMANGLAAAGSPVFLCALSPLGQLLQDRYGWRGGFLIL

SEQ ID NO: 80516 - protein, 135 aa, Homo sapiens
  Payload ID: 16044
  Gene Symbol: SLC16A3
  Gene Name: solute carrier family 16 (monocarboxylate transporter), member 3
  ENSP ID: ENSP00000463508
MGGAVVDEGPTGVKAPDGGWGWAVLFGCFVITGFSYAFPKAVSVFFKELIQEFGIGYSDTAWISSILLAMLYGTGPLCSVCVNRFGCRPVMLVGGLFASLGMVAASFCRSIIQVYLTTGVITGLGLALNFQPSLI

SEQ ID NO: 80517 - protein, 235 aa, Homo sapiens
  Payload ID: 16044
  Gene Symbol: SLC16A3
  Gene Name: solute carrier family 16 (monocarboxylate transporter), member 3
  ENSP ID: ENSP00000463880
MGGAVVDEGPTGVKAPDGGWGWAVLFGCFVITGFSYAFPKAVSVFFKELIQEFGIGYSDTAWISSILLAMLYGTGPLCSVCVNRFGCRPVMLVGGLFASLGMVAASFCRSIIQVYLTTGVITGLGLALNFQPSLIMLNRYFSKRRPMANGLAAAGSPVFLCALSPLGQLLQDRYGWRGGFLILGGLLLNCCVCAALMRPLVVTAQPGSGPPRPSRRLLDLSVFRDRGFVLYAVAA

SEQ ID NO: 80518 - protein, 263 aa, Homo sapiens
  Payload ID: 16044
  Gene Symbol: SLC16A3
  Gene Name: solute carrier family 16 (monocarboxylate transporter), member 3
  ENSP ID: ENSP00000463912
MGGAVVDEGPTGVKAPDGGWGWAVLFGCFVITGFSYAFPKAVSVFFKELIQEFGIGYSDTAWISSILLAMLYGTGLGLALNFQPSLIMLNRYFSKRRPMANGLAAAGSPVFLCALSPLGQLLQDRYGWRGGFLILGGLLLNCCVCAALMRPLVVTAQPGSGPPRPSRRLLDLSVFRDRGFVLYAVAASVMVLGLFVPPVFVVSYAKDLGVPDTKAAFLLTILGFIDIFARPAAGFVAGLGKVRPYSVYLFSFSMFFNGLADLA

SEQ ID NO: 80519 - protein, 465 aa, Homo sapiens; identical to SEQ ID NO: 80510
  Payload ID: 16044
  Gene Symbol: SLC16A3
  Gene Name: solute carrier family 16 (monocarboxylate transporter), member 3
  Uniprot ID: O15427
  ENSP ID: ENSP00000463978

SEQ ID NO: 80520 - protein, 223 aa, Homo sapiens
  Payload ID: 16044
  Gene Symbol: SLC16A3
  Gene Name: solute carrier family 16 (monocarboxylate transporter), member 3
  ENSP ID: ENSP00000464112
MGGAVVDEGPTGVKAPDGGWGWAVLFGCFVITGFSYAFPKAVSVFFKELIQEFGIGYSDTAWISSILLAMLYGTGPLCSVCVNRFGCRPVMLVGGLFASLGMVAASFCRSIIQVYLTTGVITGLGLALNFQPSLIMLNRYFSKRRPMANGLAAAGSPVFLCALSPLGQLLQDRYGWRGGFLILGGLLLNCCVCAALMRPLVVTAQPGSGPPRPSRRLLDLSVF

SEQ ID NO: 80521 - protein, 79 aa, Homo sapiens
  Payload ID: 16044
  Gene Symbol: SLC16A3
  Gene Name: solute carrier family 16 (monocarboxylate transporter), member 3
  ENSP ID: ENSP00000464326
MGGAVVDEGPTGVKAPDGGWGWAVLFGCFVITGFSYAFPKPVLPWAHMGPVPTPLECLGDSSFHPWKMEINLRVGGVLG

SEQ ID NO: 80522 - protein, 163 aa, Homo sapiens
  Payload ID: 16044
  Gene Symbol: SLC16A3
  Gene Name: solute carrier family 16 (monocarboxylate transporter), member 3
  ENSP ID: ENSP00000464381
MGGAVVDEGPTGVKAPDGGWGWAVLFGCFVITGFSYAFPKAVSVFFKELIQEFGIGYSDTAWISSILLAMLYGTGPLCSVCVNRFGCRPVMLVGGLFASLGMVAASFCRSIIQVYLTTGVITGLGLALNFQPSLIMLNRYFSKRRPMANGLAAAGSPVFLCAL

SEQ ID NO: 80523 - protein, 291 aa, Homo sapiens
  Payload ID: 16044
  Gene Symbol: SLC16A3
  Gene Name: solute carrier family 16 (monocarboxylate transporter), member 3
  ENSP ID: ENSP00000464625
MGGAVVDEGPTGVKAPDGGWGWAVLFGCFVITGFSYAFPKAVSVFFKELIQEFGIGYSDTAWISSILLAMLYGTGPLCSVCVNRFGCRPVMLVGGLFASLGMVAASFCRSIIQVYLTTGVITGLGLALNFQPSLIMLNRYFSKRRPMANGLAAAGSPVFLCALSPLGQLLQDRYGWRGGFLILGGLLLNCCVCAALMRPLVVTAQPGSGPPRPSRRLLDLSVFRDRGFVLYAVAASVMVLGLFVPPVFVVSYAKDLGVPDTKAAFLLTILGFIDIFARPAAGFVAGLGKVR

SEQ ID NO: 80524 - protein, 465 aa, Homo sapiens; identical to SEQ ID NO: 80510
  Payload ID: 16044
  Gene Symbol: SLC16A3
  Gene Name: solute carrier family 16 (monocarboxylate transporter), member 3
  Uniprot ID: O15427
  ENSP ID: ENSP00000482013

SEQ ID NO: 80525 - protein, 465 aa, Homo sapiens; identical to SEQ ID NO: 80510
  Payload ID: 16044
  Gene Symbol: SLC16A3
  Gene Name: solute carrier family 16 (monocarboxylate transporter), member 3
  Uniprot ID: O15427
  ENSP ID: ENSP00000483212

SEQ ID NO: 80526 - protein, 505 aa, Homo sapiens
  Payload ID: 16045
  Gene Symbol: SLC16A5
  Gene Name: solute carrier family 16 (monocarboxylate transporter), member 5
  Uniprot ID: O15375
  ENSP ID: ENSP00000330141
MPQALERADGSWAWVVLLATMVTQGLTLGFPTCIGIFFTELQWEFQASNSETSWFPSILTAVLHMAGPLCSILVGRFGCRVTVMLGGVLASLGMVASSFSHNLSQLYFTAGFITGLGMCFSFQSSITVLGFYFVRRRVLANALASMGVSLGITLWPLLSRYLLENLGWRGTFLVFGGIFLHCCICGAIIRPVATSVAPETKECPPPPPETPALGCLAACGRTIQRHLAFDILRHNTGYCVYILGVMWSVLGFPLPQVFLVPYAMWHSVDEQQAALLISIIGFSNIFLRPLAGLMAGRPAFASHRKYLFSLALLLNGLTNLVCAASGDFWVLVGYCLAYSVSMSGIGALIFQVLMDIVPMDQFPRALGLFTVLDGLAFLISPPLAGLLLDATNNFSYVFYMSSFFLISAALFMGGSFYALQKKEQGKQAVAADALERDLFLEAKDGPGKQRSPEIMCQSSRQPRPAGVNKHLWGCPASSRTSHEWLLWPKAVLQAKQTALGWNSPT

SEQ ID NO: 80527 - protein, 505 aa, Homo sapiens; identical to SEQ ID NO: 80526
  Payload ID: 16045
  Gene Symbol: SLC16A5
  Gene Name: solute carrier family 16 (monocarboxylate transporter), member 5
  Uniprot ID: O15375
  ENSP ID: ENSP00000390564

SEQ ID NO: 80528 - protein, 500 aa, Homo sapiens
  Payload ID: 16045
  Gene Symbol: SLC16A5
  Gene Name: solute carrier family 16 (monocarboxylate transporter), member 5
  Uniprot ID: O15375
  ENSP ID: ENSP00000440212
MPRPTRGPLATSQGWCPSVTPGTWAAATLAVRPWQRRQQRMPQALERADGSWAWVVLLATMVTQGLTLGFPTCIGIFFTELQWEFQASNSETSWFPSILTAVLHMAGPLCSILVGRFGCRVTVMLGGVLASLGMVASSFSHNLSQLYFTAGFITGLGMCFSFQSSITVLGFYFVRRRVLANALASMGVSLGITLWPLLSRYLLENLGWRGTFLVFGGIFLHCCICGAIIRPVATSVAPETKECPPPPPETPALGCLAACGRTIQRHLAFDILRHNTGYCVYILGVMWSVLGFPLPQVFLVPYAMWHSVDEQQAALLISIIGFSNIFLRPLAGLMAGRPAFASHRKYLFSLALLLNGLTNLVCAASGDFWVLVGYCLAYSVSMSGIGALIFQVLMDIVPMDQFPRALGLFTVLDGLAFLISPPLAGLLLDATNNFSYVFYMSSFFLISAALFMGGSFYALQKKEQGKQAVAADALERDLFLEAKDGPGKQRSPEIMYVTSV

SEQ ID NO: 80529 - protein, 203 aa, Homo sapiens
  Payload ID: 16045
  Gene Symbol: SLC16A5
  Gene Name: solute carrier family 16 (monocarboxylate transporter), member 5
  ENSP ID: ENSP00000462267
MGGEAGEPTGHPYRAAATLAVRPWQRRQQRMPQALERADGSWAWVVLLATMVTQGLTLGFPTCIGIFFTELQWEFQASNSETSWFPSILTAVLHMAGPLCSILVGRFGCRVTVMLGGVLASLGMVASSFSHNLSQLYFTAGFITGLGMCFSFQSSITVLGFYFVRRRVLANALASMGVSLGITLWPLLSRYLLENLGWRGTFL

SEQ ID NO: 80530 - protein, 53 aa, Homo sapiens
  Payload ID: 16045
  Gene Symbol: SLC16A5
  Gene Name: solute carrier family 16 (monocarboxylate transporter), member 5
  ENSP ID: ENSP00000462866
MPQALERADGSWAWVVLLATMVTQGLTLGFPTCIGIFFTELQWEFQASNSETS

SEQ ID NO: 80531 - protein, 454 aa, Homo sapiens
  Payload ID: 16045
  Gene Symbol: SLC16A5
  Gene Name: solute carrier family 16 (monocarboxylate transporter), member 5
  ENSP ID: ENSP00000463363
MPQALERADGSWAWVVLLATMVTQGLTLGFPTCIGIFFTELQWEFQASNSETSWFPSILTAVLHMAGPLCSILVGRFGCRVTVMLGGVLASLGMVASSFSHNLSQLYFTAGFITGLGMCFSFQSSITVLGFYFVRRRVLANALASMGVSLGITLWPLLSRYLLENLGWRGTFLVFGGIFLHCCICGAIIRPVATSVAPETKECPPPPPETPALGCLAACGRTIQRHLAFDILRHNTGYCVYILGVMWSVLGFPLPQVFLVPYAMWHSVDEQQAALLISIIGFSNIFLRPLAGLMAGRPAFASHRKYLFSLALLLNGLTNLVCAASGDFWVLVGYCLAYSVSMSGIGALIFQVLMDIVPMDQFPRALGLFTVLDGLAFLISPPLAGLLLDATNNFSYVFYMSSFFLISAALFMGGSFYALQKKEQGKQAVAADALERDLFLEAKDGPGKQRSPEI

SEQ ID NO: 80532 - protein, 505 aa, Homo sapiens; identical to SEQ ID NO: 80526
  Payload ID: 16045
  Gene Symbol: SLC16A5
  Gene Name: solute carrier family 16 (monocarboxylate transporter), member 5
  Uniprot ID: O15375
  ENSP ID: ENSP00000463434

SEQ ID NO: 80533 - protein, 236 aa, Homo sapiens
  Payload ID: 16045
  Gene Symbol: SLC16A5
  Gene Name: solute carrier family 16 (monocarboxylate transporter), member 5
  ENSP ID: ENSP00000463931
MPQALERADGSWAWVVLLATMVTQGLTLGFPTCIGIFFTELQWEFQASNSETSWFPSILTAVLHMAGPLCSILVGRFGCRVTVMLGGVLASLGMVASSFSHNLSQLYFTAGFITGLGMCFSFQSSITVLGFYFVRRRVLANALASMGVSLGITLWPLLSRYLLENLGWRGTFLVFGGIFLHCCICGAIIRPVATSVAPETKECPPPPPETPALGCLAACGRTIQRHLAFDILRHNT

SEQ ID NO: 80534 - protein, 478 aa, Homo sapiens
  Payload ID: 16046
  Gene Symbol: SLC16A7
  Gene Name: solute carrier family 16 (monocarboxylate transporter), member 7
  Uniprot ID: O60669
  ENSP ID: ENSP00000261187
MPPMPSAPPVHPPPDGGWGWIVVGAAFISIGFSYAFPKAVTVFFKEIQQIFHTTYSEIAWISSIMLAVMYAGGPVSSVLVNKYGSRPVVIAGGLLCCLGMVLASFSSSVVQLYLTMGFITGLGLAFNLQPALTIIGKYFYRKRPMANGLAMAGSPVFLSSLAPFNQYLFNTFGWKGSFLILGSLLLNACVAGSLMRPLGPNQTTSKSKNKTGKTEDDSSPKKIKTKKSTWEKVNKYLDFSLFKHRGFLIYLSGNVIMFLGFFAPIIFLAPYAKDQGIDEYSAAFLLSVMAFVDMFARPSVGLIANSKYIRPRIQYFFSFAIMFNGVCHLLCPLAQDYTSLVLYAVFFGLGFGSVSSVLFETLMDLVGAPRFSSAVGLVTIVECGPVLLGPPLAGKLVDLTGEYKYMYMSCGAIVVAASVWLLIGNAINYRLLAKERKEENARQKTRESEPLSKSKHSEDVNVKVSNAQSVTSERETNI

SEQ ID NO: 80535 - protein, 435 aa, Homo sapiens
  Payload ID: 16046
  Gene Symbol: SLC16A7
  Gene Name: solute carrier family 16 (monocarboxylate transporter), member 7
  ENSP ID: ENSP00000446722
MPPMPSAPPVHPPPDGGWGWIVVGAAFISIGFSYAFPKAVTVFFKEIQQIFHTTYSEIAWISSIMLAVMYAGGPVSSVLVNKYGSRPVVIAGGLLCCLGMVLASFSSSVVQLYLTMGFITGLGLAFNLQPALTIIGKYFYRKRPMANGLAMAGSPVFLSSLAPFNQYLFNTFGWKGSFLILGSLLLNACVAGSLMRPLGPNQTTSKSKNKTGKTEDDSSPKKIKTKKSTWEKVNKYLDFSLFKHRGFLIYLSGNVIMFLGFFAPIIFLAPYAKDQGIDEYSAAFLLSVMAFVDMFARPSVGLIANSKYIRPRIQYFFSFAIMFNGVCHLLCPLAQDYTSLVLYAVFFGLGFGSVSSVLFETLMDLVGAPRFSSAVGLVTIVECGPVLLGPPLAGKLVDLTGEYKYMYMSCGAIVVAASVWLLIGNAINYRLLAKE

SEQ ID NO: 80536 - protein, 141 aa, Homo sapiens
  Payload ID: 16046
  Gene Symbol: SLC16A7
  Gene Name: solute carrier family 16 (monocarboxylate transporter), member 7
  ENSP ID: ENSP00000447459
MPPMPSAPPVHPPPDGGWGWIVVGAAFISIGFSYAFPKAVTVFFKEIQQIFHTTYSEIAWISSIMLAVMYAGGRIFESFLIFTSLRIQCSFTQSGSCLAAVHNDSSDESGKRRWKIFWKGFAILDNITIIHCYGRRSKYQH

SEQ ID NO: 80537 - protein, 78 aa, Homo sapiens
  Payload ID: 16046
  Gene Symbol: SLC16A7
  Gene Name: solute carrier family 16 (monocarboxylate transporter), member 7
  ENSP ID: ENSP00000447555
MPPMPSAPPVHPPPDGGWGWIVVGAAFISIGFSYAFPKAVTVFFKEIQQIFHTTYSEIAWISSIMLAVMYAGGWYHMQ

SEQ ID NO: 80538 - protein, 131 aa, Homo sapiens
  Payload ID: 16046
  Gene Symbol: SLC16A7
  Gene Name: solute carrier family 16 (monocarboxylate transporter), member 7
  ENSP ID: ENSP00000447814
MGFITGLGLAFNLQPALTIIGKYFYRKRPMANGLAMAGSPVFLSSLAPFNQYLFNTFGWKGSFLILGSLLLNACVAGSLMRPLGPNQTTSKSKNKTGKTEDDSSPKKIKTKKSTWEKVNKYLDFSLFKHRG

SEQ ID NO: 80539 - protein, 478 aa, Homo sapiens; identical to SEQ ID NO: 80534
  Payload ID: 16046
  Gene Symbol: SLC16A7
  Gene Name: solute carrier family 16 (monocarboxylate transporter), member 7
  Uniprot ID: O60669
  ENSP ID: ENSP00000448071

SEQ ID NO: 80540 - protein, 478 aa, Homo sapiens; identical to SEQ ID NO: 80534
  Payload ID: 16046
  Gene Symbol: SLC16A7
  Gene Name: solute carrier family 16 (monocarboxylate transporter), member 7
  Uniprot ID: O60669
  ENSP ID: ENSP00000448742

SEQ ID NO: 80541 - protein, 84 aa, Homo sapiens
  Payload ID: 16046
  Gene Symbol: SLC16A7
  Gene Name: solute carrier family 16 (monocarboxylate transporter), member 7
  ENSP ID: ENSP00000448870
MPPMPSAPPVHPPPDGGWGWIVVGAAFISIGFSYAFPKAVTVFFKEIQQIFHTTYSEIAWISSIMLAVMYAGAGPKLPSHLQEE

SEQ ID NO: 80542 - protein, 84 aa, Homo sapiens
  Payload ID: 16046
  Gene Symbol: SLC16A7
  Gene Name: solute carrier family 16 (monocarboxylate transporter), member 7
  ENSP ID: ENSP00000449167
MPPMPSAPPVHPPPDGGWGWIVVGAAFISIGFSYAFPKAVTVFFKEIQQIFHTTYSEIAWISSIMLAVMYAGGKKEKRNASFTL

SEQ ID NO: 80543 - protein, 84 aa, Homo sapiens; identical to SEQ ID NO: 80542
  Payload ID: 16046
  Gene Symbol: SLC16A7
  Gene Name: solute carrier family 16 (monocarboxylate transporter), member 7
  ENSP ID: ENSP00000449229

SEQ ID NO: 80544 - protein, 478 aa, Homo sapiens; identical to SEQ ID NO: 80534
  Payload ID: 16046
  Gene Symbol: SLC16A7
  Gene Name: solute carrier family 16 (monocarboxylate transporter), member 7
  Uniprot ID: O60669
  ENSP ID: ENSP00000449547

SEQ ID NO: 80545 - protein, 83 aa, Homo sapiens
  Payload ID: 16046
  Gene Symbol: SLC16A7
  Gene Name: solute carrier family 16 (monocarboxylate transporter), member 7
  ENSP ID: ENSP00000449972
MPPMPSAPPVHPPPDGGWGWIVVGAAFISIGFSYAFPKAVTVFFKEIQQIFHTTYSEIAWISSIMLAVMYAGGPKLPSHLQEE

SEQ ID NO: 80546 - protein, 97 aa, Homo sapiens
  Payload ID: 16046
  Gene Symbol: SLC16A7
  Gene Name: solute carrier family 16 (monocarboxylate transporter), member 7
  ENSP ID: ENSP00000450133
MPPMPSAPPVHPPPDGGWGWIVVGAAFISIGFSYAFPKAVTVFFKEIQQIFHTTYSEIAWISSIMLAVMYAGGRMKHMDNRRASKAERSFTEQQNNS

SEQ ID NO: 80547 - protein, 504 aa, Homo sapiens
  Payload ID: 16047
  Gene Symbol: SLC16A8
  Gene Name: solute carrier family 16 (monocarboxylate transporter), member 8
  Uniprot ID: O95907
  ENSP ID: ENSP00000321735
MGAGGPRRGEGPPDGGWGWVVLGACFVVTGFAYGFPKAVSVFFRALMRDFDAGYSDTAWVSSIMLAMLYGTGPVSSILVTRFGCRPVMLAGGLLASAGMILASFATRLLELYLTAGVLTGLGLALNFQPSLIMLGLYFERRRPLANGLAAAGSPVFLSALSPLGQQLLERFGWRGGFLLLGGLLLHCCACGAVMRPPPGPGPRPRRDSAGDRAGDAPGEAEADGAGLQLREASPRVRPRRRLLDLAVCTDRAFAVYAVTKFLMALGLFVPAILLVNYAKDAGVPDTDAAFLLSIVGFVDIVARPACGALAGLARLRPHVPYLFSLALLANGLTDLSSARARSYGALVAFCVAFGLSYGMVGALQFEVLMAAVGAPRFPSALGLVLLVEAAAVLIGPPSAGRLVDVLKNYEIIFYLAGSEVALAGVFMAVATNCCLRCAKAAPSGPGTEGGASDTEDAEAEGDSEPLPVVAEEPGNLEALEVLSARGEPTEPEIEARPRLAAESV

SEQ ID NO: 80548 - protein, 97 aa, Homo sapiens
  Payload ID: 16047
  Gene Symbol: SLC16A8
  Gene Name: solute carrier family 16 (monocarboxylate transporter), member 8
  ENSP ID: ENSP00000409547
MGAGGPRRGEGPPDGGWGWVVLGACFVVTGFAYGFPKAVSVFFRALMRDFDAGYSDTAWVSSIMLAMLYGTGPVSSILVTRFGCRPVMLAGGLLASA

SEQ ID NO: 80549 - protein, 471 aa, Homo sapiens
  Payload ID: 16048
  Gene Symbol: SLC16A11
  Gene Name: solute carrier family 16, member 11
  Uniprot ID: Q8NCK7
  ENSP ID: ENSP00000310490
MPAPQRKHRRGGFSHRCFPTPQTAMTPQPAGPPDGGWGWVVAAAAFAINGLSYGLLRSLGLAFPDLAEHFDRSAQDTAWISALALAVQQAASPVGSALSTRWGARPVVMVGGVLASLGFVFSAFASDLLHLYLGLGLLAGFGWALVFAPALGTLSRYFSRRRVLAVGLALTGNGASSLLLAPALQLLLDTFGWRGALLLLGAITLHLTPCGALLLPLVLPGDPPAPPRSPLAALGLSLFTRRAFSIFALGTALVGGGYFVPYVHLAPHALDRGLGGYGAALVVAVAAMGDAGARLVCGWLADQGWVPLPRLLAVFGALTGLGLWVVGLVPVVGGEESWGGPLLAAAVAYGLSAGSYAPLVFGVLPGLVGVGGVVQATGLVMMLMSLGGLLGPPLSGFLRDETGDFTASFLLSGSLILSGSFIYIGLPRALPSCGPASPPATPPPETGELLPAPQAVLLSPGGPGSTLDTTC

SEQ ID NO: 80550 - protein, 439 aa, Homo sapiens
  Payload ID: 16048
  Gene Symbol: SLC16A11
  Gene Name: solute carrier family 16, member 11
  ENSP ID: ENSP00000394449
MTPQPAGPPDGGWGWVVAAAAFAINGLSYGLLRSLGLAFPDLAEHFDRSAQDTAWISALALAVQQAASPVGSALSTRWGARPVVMVGGVLASLGFVFSAFASDLLHLYLGLGLLAGFGWALVFAPALGTLSRYFSRRRVLAVGLALTGNGASSLLLAPALQLLLDTFGWRGALLLLGAITLHLTPCGALLLPLVLPGDPPAPPRSPLAALGLSLFTRRAFSIFALGTALVGGGYFVPYVHLAPHALDRGLGGYGAALVVAVAAMGDAGARLVCGWLADQGWVPLPRLLAVFGALTGLGLWVVGLSWGGPLLAAAVAYGLSAGSYAPLVFGVLPGLVGVGGVVQATGLVMMLMSLGGLLGPPLSGFLRDETGDFTASFLLSGSLILSGSFIYIGLPRALPSCGPASPPATPPPETGELLPAPQAVLLSPGGPGSTLDTTC

SEQ ID NO: 80551 - protein, 93 aa, Homo sapiens
  Payload ID: 16048
  Gene Symbol: SLC16A11
  Gene Name: solute carrier family 16, member 11
  ENSP ID: ENSP00000460927
MTPQPAGPPDGGWGWVVAAAAFAINGLSYGLLRSLGLAFPDLAEHFDRSAQDTAWISALALAVQQAASPVGSALSTRWGARPVVMVGGVLASL

SEQ ID NO: 80552 - protein, 516 aa, Homo sapiens
  Payload ID: 16049
  Gene Symbol: SLC16A12
  Gene Name: solute carrier family 16, member 12
  ENSP ID: ENSP00000360855
MPSGSHWTANSSKIITWLLEQPGKEEKRKTMAKVNRARSTSPPDGGWGWMIVAGCFLVTICTRAVTRCISIFFVEFQTYFTQDYAQTAWIHSIVDCVTMLCAPLGSVVSNHLSCQVGIMLGGLLASTGLILSSFATSLKHLYLTLGVLTGLGFALCYSPAIAMVGKYFSRRKALAYGIAMSGSGIGTFILAPVVQLLIEQFSWRGALLILGGFVLNLCVCGALMRPITLKEDHTTPEQNHVCRTQKEDIKRVSPYSSLTKEWAQTCLCCCLQQEYSFLLMSDFVVLAVSVLFMAYGCSPLFVYLVPYALSVGVSHQQAAFLMSILGVIDIIGNITFGWLTDRRCLKNYQYVCYLFAVGMDGLCYLCLPMLQSLPLLVPFSCTFGYFDGAYVTLIPVVTTEIVGTTSLSSALGVVYFLHAVPYLVSPPIAGRLVDTTGSYTAAFLLCGFSMIFSSVLLGFARLIKRMRKTQLQFIAKESDPKLQLWTNGSVAYSVARELDQKHGEPVATAVPGYSLT

SEQ ID NO: 80553 - protein, 25 aa, Homo sapiens
  Payload ID: 16049
  Gene Symbol: SLC16A12
  Gene Name: solute carrier family 16, member 12
  ENSP ID: ENSP00000436965
MPSGSHWTANSSKIITWLLEQPGKE

SEQ ID NO: 80554 - protein, 426 aa, Homo sapiens
  Payload ID: 16050
  Gene Symbol: SLC16A13
  Gene Name: solute carrier family 16, member 13
  Uniprot ID: Q7RTY0
  ENSP ID: ENSP00000309751
MARRTEPPDGGWGWVVVLSAFFQSALVFGVLRSFGVFFVEFVAAFEEQAARVSWIASIGIAVQQFGSPVGSALSTKFGPRPVVMTGGILAALGMLLASFATSLTHLYLSIGLLSGSGWALTFAPTLACLSCYFSRRRSLATGLALTGVGLSSFTFAPFFQWLLSHYAWRGSLLLVSALSLHLVACGALLRPPSLAEDPAVGGPRAQLTSLLHHGPFLRYTVALTLINTGYFIPYLHLVAHLQDLDWDPLPAAFLLSVVAISDLVGRVVSGWLGDAVPGPVTRLLMLWTTLTGVSLALFPVAQAPTALVALAVAYGFTSGALAPLAFSVLPELIGTRRIYCGLGLLQMIESIGGLLGPPLSGYLRDVTGNYTASFVVAGAFLLSGSGILLTLPHFFCFSTTTSGPQDLVTEALDTKVPLPKEGLEED

SEQ ID NO: 80555 - protein, 510 aa, Homo sapiens
  Payload ID: 16051
  Gene Symbol: SLC16A14
  Gene Name: solute carrier family 16, member 14
  Uniprot ID: Q7RTX9
  ENSP ID: ENSP00000295190
MYTSHEDIGYDFEDGPKDKKTLKPHPNIDGGWAWMMVLSSFFVHILIMGSQMALGVLNVEWLEEFHQSRGLTAWVSSLSMGITLIVGPFIGLFINTCGCRQTAIIGGLVNSLGWVLSAYAANVHYLFITFGVAAGLGSGMAYLPAVVMVGRYFQKRRALAQGLSTTGTGFGTFLMTVLLKYLCAEYGWRNAMLIQGAVSLNLCVCGALMRPLSPGKNPNDPGEKDVRGLPAHSTESVKSTGQQGRTEEKDGGLGNEETLCDLQAQECPDQAGHRKNMCALRILKTVSWLTMRVRKGFEDWYSGYFGTASLFTNRMFVAFIFWALFAYSSFVIPFIHLPEIVNLYNLSEQNDVFPLTSIIAIVHIFGKVILGVIADLPCISVWNVFLLANFTLVLSIFILPLMHTYAGLAVICALIGFSSGYFSLMPVVTEDLVGIEHLANAYGIIICANGISALLGPPFAGWIYDITQKYDFSFYICGLLYMIGILFLLIQPCIRIIEQSRRKYMDGAHV

SEQ ID NO: 80556 - protein, 42 aa, Homo sapiens
  Payload ID: 16051
  Gene Symbol: SLC16A14
  Gene Name: solute carrier family 16, member 14
  ENSP ID: ENSP00000389726
MYTSHEDIGYDFEDGPKDKKTLKPHPNIDGGWAWMMVLSSFF

SEQ ID NO: 80557 - protein, 485 aa, Homo sapiens
  Payload ID: 16051
  Gene Symbol: SLC16A14
  Gene Name: solute carrier family 16, member 14
  ENSP ID: ENSP00000395775
MYTSHEDIGYDFEDGPKDKKTLKPHPNIDGGWAWMMVLSSFFVHILIMGSQMALGVLNVEWLEEFHQSRGLTAWVSSLSMGITLIVGPFIGLFINTCGCRQTAIIGGLVNSLGWVLSAYAANVHYLFITFGVAAGLGSGMAYLPAVVMVGRYFQKRRALAQGLSTTGTGFGTFLMTVLLKYLCAEYGWRNAMLIQGAVSLNLCVCGALMRPLSPGKNPNDPGEKDVRGLPAHSTESVKSTGQQGRTEEKDGGLGNEETLCDLQAQECPDQAGHRKNMCALRILKTVSWLTMRVRKGFEDWYSGYFGTASLFTNRMFVAFIFWALFAYSSFVIPFIHLPEIVNLYNLSEQNDVFPLTSIIAIVHIFGKVILGVIADLPCISVWNVFLLANFTLVLSIFILPLMHTYAGLAVICALIGFSSGYFSLMPVVTEDLVGIEHLANAYGIIICANGISALLGPPFAGKLSEVLRAQSACTYGALCYKVPDK

SEQ ID NO: 80558 - protein, 18 aa, Homo sapiens
  Payload ID: 16051
  Gene Symbol: SLC16A14
  Gene Name: solute carrier family 16, member 14
  ENSP ID: ENSP00000396834
MYTSHEDIGYDFEDGPKD

SEQ ID NO: 80559 - protein, 489 aa, Homo sapiens
  Payload ID: 16051
  Gene Symbol: SLC16A14
  Gene Name: solute carrier family 16, member 14
  ENSP ID: ENSP00000400352
MYTSHEDIGYDFEDGPKDKKTLKPHPNIDGGWAWMMVLSSFFVHILIMGSQMALGVLNVEWLEEFHQSRGLTAWVSSLSMGITLIVGPFIGLFINTCGCRQTAIIGGLVNSLGWVLSAYAANVHYLFITFGVAAGLGSGMAYLPAVVMVGRYFQKRRALAQGLSTTGTGFGTFLMTVLLKYLCAEYGWRNAMLIQGAVSLNLCVCGALMRPLSPGKNPNDPGEKDVRGLPAHSTESVKSTGQQGRTEEKDGGLGNEETLCDLQAQECPDQAGHRKNMCALRILKTVSWLTMRVRKGFEDWYSGYFGTASLFTNRMFVAFIFWALFAYSSFVIPFIHLPEIVNLYNLSEQNDVFPLTSIIAIVHIFGKVILGVIADLPCISVWNVFLLANFTLVLSIFILPLMHTYAGLAVICALIGFSSGYFSLMPVVTEDLVGIEHLANAYGIIICANGISALLGPPFAGKLSEVLRAQSACTYGALCYKVPDKEEGF

SEQ ID NO: 80560 - protein, 539 aa, Homo sapiens
  Payload ID: 16052
  Gene Symbol: SLC16A2
  Gene Name: solute carrier family 16, member 2 (thyroid hormone transporter)
  Uniprot ID: P36021
  ENSP ID: ENSP00000465734
MALQSQASEEAKGPWQEADQEQQEPVGSPEPESEPEPEPEPEPVPVPPPEPQPEPQPLPDPAPLPELEFESERVHEPEPTPTVETRGTARGFQPPEGGFGWVVVFAATWCNGSIFGIHNSVGILYSMLLEEEKEKNRQVEFQAAWVGALAMGMIFFCSPIVSIFTDRLGCRITATAGAAVAFIGLHTSSFTSSLSLRYFTYGILFGCGCSFAFQPSLVILGHYFQRRLGLANGVVSAGSSIFSMSFPFLIRMLGDKIKLAQTFQVLSTFMFVLMLLSLTYRPLLPSSQDTPSKRGVRTLHQRFLAQLRKYFNMRVFRQRTYRIWAFGIAAAALGYFVPYVHLMKYVEEEFSEIKETWVLLVCIGATSGLGRLVSGHISDSIPGLKKIYLQVLSFLLLGLMSMMIPLCRDFGGLIVVCLFLGLCDGFFITIMAPIAFELVGPMQASQAIGYLLGMMALPMIAGPPIAGLLRNCFGDYHVAFYFAGVPPIIGAVILFFVPLMHQRMFKKEQRDSSKDKMLAPDPDPNGELLPGSPNPEEPI

SEQ ID NO: 80561 - protein, 229 aa, Homo sapiens
  Payload ID: 16052
  Gene Symbol: SLC16A2
  Gene Name: solute carrier family 16, member 2 (thyroid hormone transporter)
  ENSP ID: ENSP00000466213
  MOD_RES (1)..(1): Any amino acid
XSSFTSSLSLRYFTYGILFGCGCSFAFQPSLVILGHYFQRRLGLANGVVSAGSSIFSMSFPFLIRMLGDKIKLAQTFQVLSTFMFVLMLLSLTYRPLLPSSQDTPSKRGVRTLHQRFLAQLRKYFNMRVFRQRTYRIWAFGIAAAALGYFVPYVHLMKYVEEEFSEIKETWVLLVCIGATSGLGRLVSGHISDSIPGLKKIYLQAYSATVLGTTMWPSTLPVCPPSSGL

SEQ ID NO: 80562 - protein, 487 aa, Homo sapiens
  Payload ID: 16053
  Gene Symbol: SLC16A4
  Gene Name: solute carrier family 16, member 4
  Uniprot ID: O15374
  ENSP ID: ENSP00000358794
MLKREGKVQPYTKTLDGGWGWMIVIHFFLVNVFVMGMTKTFAIFFVVFQEEFEGTSEQIGWIGSIMSSLRFCAGPLVAIICDILGEKTTSILGAFVVTGGYLISSWATSIPFLCVTMGLLPGLGSAFLYQVAAVVTTKYFKKRLALSTAIARSGMGLTFLLAPFTKFLIDLYDWTGALILFGAIALNLVPSSMLLRPIHIKSENNSGIKDKGSSLSAHGPEAHATETHCHETEESTIKDSTTQKAGLPSKNLTVSQNQSEEFYNGPNRNRLLLKSDEESDKVISWSCKQLFDISLFRNPFFYIFTWSFLLSQLAYFIPTFHLVARAKTLGIDIMDASYLVSVAGILETVSQIISGWVADQNWIKKYHYHKSYLILCGITNLLAPLATTFPLLMTYTICFAIFAGGYLALILPVLVDLCRNSTVNRFLGLASFFAGMAVLSGPPIAGWLYDYTQTYNGSFYFSGICYLLSSVSFFFVPLAERWKNSLT

SEQ ID NO: 80563 - protein, 319 aa, Homo sapiens
  Payload ID: 16053
  Gene Symbol: SLC16A4
  Gene Name: solute carrier family 16, member 4
  Uniprot ID: O15374
  ENSP ID: ENSP00000358796
MLKREGKVQPYTKTLDGGWGWMIVIHFFLVNVFVMGMTKTFAIFFVVFQEEFEGTSEQIGWIGSIMSSLRFCAGPLVAIICDILGEKTTSILGAFVVTGGYLISSWATSIPFLCVTMGLLPGLGSAFLYQVAAVVTTKYFKKRLALSTAIARSGMGLTFLLAPFTKFLIDLYDWTGILETVSQIISGWVADQNWIKKYHYHKSYLILCGITNLLAPLATTFPLLMTYTICFAIFAGGYLALILPVLVDLCRNSTVNRFLGLASFFAGMAVLSGPPIAGWLYDYTQTYNGSFYFSGICYLLSSVSFFFVPLAERWKNSLT

SEQ ID NO: 80564 - protein, 382 aa, Homo sapiens
  Payload ID: 16053
  Gene Symbol: SLC16A4
  Gene Name: solute carrier family 16, member 4
  Uniprot ID: O15374
  ENSP ID: ENSP00000394790
MGMDDCDSFFPGLGSAFLYQVAAVVTTKYFKKRLALSTAIARSGMGLTFLLAPFTKFLIDLYDWTGALILFGAIALNLVPSSMLLRPIHIKSENNSGIKDKGSSLSAHGPEAHATETHCHETEESTIKDSTTQKAGLPSKNLTVSQNQSEEFYNGPNRNRLLLKSDEESDKVISWSCKQLFDISLFRNPFFYIFTWSFLLSQLAYFIPTFHLVARAKTLGIDIMDASYLVSVAGILETVSQIISGWVADQNWIKKYHYHKSYLILCGITNLLAPLATTFPLLMTYTICFAIFAGGYLALILPVLVDLCRNSTVNRFLGLASFFAGMAVLSGPPIAEIIPSFQAGYMIIPRHTMALSTSLAYAISSLQFPFFLYHWPKDGKTV

SEQ ID NO: 80565 - protein, 57 aa, Homo sapiens
  Payload ID: 16053
  Gene Symbol: SLC16A4
  Gene Name: solute carrier family 16, member 4
  ENSP ID: ENSP00000432190
MLKREGKVQPYTKTLDGGWGWMIVIHFFLVPWLLLFVTYLERKLPPFLGLSLLLVDI

SEQ ID NO: 80566 - protein, 439 aa, Homo sapiens
  Payload ID: 16053
  Gene Symbol: SLC16A4
  Gene Name: solute carrier family 16, member 4
  Uniprot ID: O15374
  ENSP ID: ENSP00000432495
MLKREGKVQPYTKTLDGGWGWMIVIHFFLVNVFVMGMTKTFAIFFVVFQEEFEGTSEQIGWIGSIMSSLRFCAGLGSAFLYQVAAVVTTKYFKKRLALSTAIARSGMGLTFLLAPFTKFLIDLYDWTGALILFGAIALNLVPSSMLLRPIHIKSENNSGIKDKGSSLSAHGPEAHATETHCHETEESTIKDSTTQKAGLPSKNLTVSQNQSEEFYNGPNRNRLLLKSDEESDKVISWSCKQLFDISLFRNPFFYIFTWSFLLSQLAYFIPTFHLVARAKTLGIDIMDASYLVSVAGILETVSQIISGWVADQNWIKKYHYHKSYLILCGITNLLAPLATTFPLLMTYTICFAIFAGGYLALILPVLVDLCRNSTVNRFLGLASFFAGMAVLSGPPIAGWLYDYTQTYNGSFYFSGICYLLSSVSFFFVPLAERWKNSLT

SEQ ID NO: 80567 - protein, 57 aa, Homo sapiens; identical to SEQ ID NO: 80565
  Payload ID: 16053
  Gene Symbol: SLC16A4
  Gene Name: solute carrier family 16, member 4
  ENSP ID: ENSP00000433463

SEQ ID NO: 80568 - protein, 42 aa, Homo sapiens
  Payload ID: 16053
  Gene Symbol: SLC16A4
  Gene Name: solute carrier family 16, member 4
  ENSP ID: ENSP00000434136
MLKREGKVQPYTKTLDGGWGWMIVIHFFLVWVLLSYTKWLLW

SEQ ID NO: 80569 - protein, 219 aa, Homo sapiens
  Payload ID: 16053
  Gene Symbol: SLC16A4
  Gene Name: solute carrier family 16, member 4
  ENSP ID: ENSP00000435768
ESTIKDSTTQKAGLPSKNLTVSQNQSEEFYNGPNRNRLLLKSDEESDKVISWSCKQLFDISLFRNPFFYIFTWSFLLSQLAYFIPTFHLVARAKTLGIDIMDASYLVSVAGILETVSQIISGWVADQNWIKKYHYHKSYLILCGITNLLAPLATTFPLLMTYTICFAIFAGGYLALILPVLVDLCRNSTVNRFLGLASFFAGMAVLSGPPIAGNTFTTF

SEQ ID NO: 80570 - protein, 425 aa, Homo sapiens
  Payload ID: 16053
  Gene Symbol: SLC16A4
  Gene Name: solute carrier family 16, member 4
  Uniprot ID: O15374
  ENSP ID: ENSP00000446087
MGMDDCDSFFPGPLVAIICDILGEKTTSILGAFVVTGGYLISSWATSIPFLCVTMGLLPGLGSAFLYQVAAVVTTKYFKKRLALSTAIARSGMGLTFLLAPFTKFLIDLYDWTGALILFGAIALNLVPSSMLLRPIHIKSENNSGIKDKGSSLSAHGPEAHATETHCHETEESTIKDSTTQKAGLPSKNLTVSQNQSEEFYNGPNRNRLLLKSDEESDKVISWSCKQLFDISLFRNPFFYIFTWSFLLSQLAYFIPTFHLVARAKTLGIDIMDASYLVSVAGILETVSQIISGWVADQNWIKKYHYHKSYLILCGITNLLAPLATTFPLLMTYTICFAIFAGGYLALILPVLVDLCRNSTVNRFLGLASFFAGMAVLSGPPIAGWLYDYTQTYNGSFYFSGICYLLSSVSFFFVPLAERWKNSLT

SEQ ID NO: 80571 - protein, 523 aa, Homo sapiens
  Payload ID: 16054
  Gene Symbol: SLC16A6
  Gene Name: solute carrier family 16, member 6
  Uniprot ID: O15403
  ENSP ID: ENSP00000319991
MTQNKLKLCSKANVYTEVPDGGWGWAVAVSFFFVEVFTYGIIKTFGVFFNDLMDSFNESNSRISWIISICVFVLTFSAPLATVLSNRFGHRLVVMLGGLLVSTGMVAASFSQEVSHMYVAIGIISGLGYCFSFLPTVTILSQYFGKRRSIVTAVASTGECFAVFAFAPAIMALKERIGWRYSLLFVGLLQLNIVIFGALLRPIFIRGPASPKIVIQENRKEAQYMLENEKTRTSIDSIDSGVELTTSPKNVPTHTNLELEPKADMQQVLVKTSPRPSEKKAPLLDFSILKEKSFICYALFGLFATLGFFAPSLYIIPLGISLGIDQDRAAFLLSTMAIAEVFGRIGAGFVLNREPIRKIYIELICVILLTVSLFAFTFATEFWGLMSCSIFFGFMVGTIGGTHIPLLAEDDVVGIEKMSSAAGVYIFIQSIAGLAGPPLAGLLVDQSKIYSRAFYSCAAGMALAAVCLALVRPCKMGLCQHHHSGETKVVSHRGKTLQDIPEDFLEMDLAKNEHRVHVQMEPV

SEQ ID NO: 80572 - protein, 85 aa, Homo sapiens
  Payload ID: 16054
  Gene Symbol: SLC16A6
  Gene Name: solute carrier family 16, member 6
  ENSP ID: ENSP00000462239
MTQNKLKLCSKANVYTEVPDGGWGWAVAVSFFFVEVFTYGIIKTFGVFFNDLMDSFNESNSRISWIISICVFVLTFSAPLATVLS

SEQ ID NO: 80573 - protein, 523 aa, Homo sapiens; identical to SEQ ID NO: 80571
  Payload ID: 16054
  Gene Symbol: SLC16A6
  Gene Name: solute carrier family 16, member 6
  Uniprot ID: O15403
  ENSP ID: ENSP00000462985

SEQ ID NO: 80574 - protein, 129 aa, Homo sapiens
  Payload ID: 16054
  Gene Symbol: SLC16A6
  Gene Name: solute carrier family 16, member 6
  ENSP ID: ENSP00000463070
MTQNKLKLCSKANVYTEVPDGGWGWAVAVSFFFVEVFTYGIIKTFGVFFNDLMDSFNESNSRISWIISICVFVLTFSGLGYCFSFLPTVTILSQYFGKRRSIVTAVASTGECFAVFAFAPAIMALKERI

SEQ ID NO: 80575 - protein, 522 aa, Homo sapiens [sequence omitted]

SEQ ID NO: 80576 - protein, 509 aa, Homo sapiens
  Payload ID: 16055
  Gene Symbol: SLC16A9
  Gene Name: solute carrier family 16, member 9
  Uniprot ID: Q7RTY1
  ENSP ID: ENSP00000378756
MELKKSPDGGWGWVIVFVSFLTQFLCYGSPLAVGVLYIEWLDAFGEGKGKTAWVGSLASGVGLLASPVCSLCVSSFGARPVTIFSGFMVAGGLMLSSFAPNIYFLFFSYGIVVGLGCGLLYTATVTITCQYFDDRRGLALGLISTGSSVGLFIYAALQRMLVEFYGLDGCLLIVGALALNILACGSLMRPLQSSDCPLPKKIAPEDLPDKYSIYNEKGKNLEENINILDKSYSSEEKCRITLANGDWKQDSLLHKNPTVTHTKEPETYKKKVAEQTYFCKQLAKRKWQLYKNYCGETVALFKNKVFSALFIAILLFDIGGFPPSLLMEDVARSSNVKEEEFIMPLISIIGIMTAVGKLLLGILADFKWINTLYLYVATLIIMGLALCAIPFAKSYVTLALLSGILGFLTGNWSIFPYVTTKTVGIEKLAHAYGILMFFAGLGNSLGPPIVGWFYDWTQTYDIAFYFSGFCVLLGGFILLLAALPSWDTCNKQLPKPAPTTFLYKVASNV

SEQ ID NO: 80577 - protein, 509 aa, Homo sapiens; identical to SEQ ID NO: 80576
  Payload ID: 16055
  Gene Symbol: SLC16A9
  Gene Name: solute carrier family 16, member 9
  Uniprot ID: Q7RTY1
  ENSP ID: ENSP00000378757

SEQ ID NO: 80578 - protein, 495 aa, Homo sapiens
  Payload ID: 16056
  Gene Symbol: SLC17A5
  Gene Name: solute carrier family 17 (acidic sugar transporter), member 5
  Uniprot ID: Q9NRA2
  ENSP ID: ENSP00000348019
MRSPVRDLARNDGEESTDRTPLLPGAPRAEAAPVCCSARYNLAILAFFGFFIVYALRVNLSVALVDMVDSNTTLEDNRTSKACPEHSAPIKVHHNQTGKKYQWDAETQGWILGSFFYGYIITQIPGGYVASKIGGKMLLGFGILGTAVLTLFTPIAADLGVGPLIVLRALEGLGEGVTFPAMHAMWSSWAPPLERSKLLSISYAGAQLGTVISLPLSGIICYYMNWTYVFYFFGTIGIFWFLLWIWLVSDTPQKHKRISHYEKEYILSSLRNQLSSQKSVPWVPILKSLPLWAIVVAHFSYNWTFYTLLTLLPTYMKEILRFNVQENGFLSSLPYLGSWLCMILSGQAADNLRAKWNFSTLCVRRIFSLIGMIGPAVFLVAAGFIGCDYSLAVAFLTISTTLGGFCSSGFSINHLDIAPSYAGILLGITNTFATIPGMVGPVIAKSLTPDNTVGEWQTVFYIAAAINVFGAIFFTLFAKGEVQNWALNDHHGHRH

SEQ ID NO: 80579 - protein, 467 aa, Homo sapiens
  Payload ID: 16057
  Gene Symbol: SLC17A1
  Gene Name: solute carrier family 17 (organic anion transporter), member 1
  Uniprot ID: Q14916
  ENSP ID: ENSP00000244527
MQMDNRLPPKKVPGFCSFRYGLSFLVHCCNVIITAQRACLNLTMVVMVNSTDPHGLPNTSTKKLLDNIKNPMYNWSPDIQGIILSSTSYGVIIIQVPVGYFSGIYSTKKMIGFALCLSSVLSLLIPPAAGIGVAWVVVCRAVQGAAQGIVATAQFEIYVKWAPPLERGRLTSMSTSGFLLGPFIVLLVTGVICESLGWPMVFYIFGACGCAVCLLWFVLFYDDPKDHPCISISEKEYITSSLVQQVSSSRQSLPIKAILKSLPVWAISTGSFTFFWSHNIMTLYTPMFINSMLHVNIKENGFLSSLPYLFAWICGNLAGQLSDFFLTRNILSVIAVRKLFTAAGFLLPAIFGVCLPYLSSTFYSIVIFLILAGATGSFCLGGVFINGLDIAPRYFGFIKACSTLTGMIGGLIASTLTGLILKQDPESAWFKTFILMAAINVTGLIFYLIVATAEIQDWAKEKQHTRL

SEQ ID NO: 80580 - protein, 209 aa, Homo sapiens
  Payload ID: 16057
  Gene Symbol: SLC17A1
  Gene Name: solute carrier family 17 (organic anion transporter), member 1
  ENSP ID: ENSP00000367118
MQMDNRLPPKKVPGFCSFRYGLSFLVHCCNVIITAQRACLNLTMVVMVNSTDPHGLPNTSTKKLLDNIKNPMYNWSPDIQGIILSSTSYGVIIIQVPVGYFSGIYSTKKMIGFALCLSSVLSLLIPPAAGIGVAWVVVCRAVQGAAQGIVATAQFEIYVKWAPPLERGRLTSMSTSGFLLGPFIVLLVTGVICESLGWPMVFYIFGQFK

SEQ ID NO: 80581 - protein, 413 aa, Homo sapiens
  Payload ID: 16057
  Gene Symbol: SLC17A1
  Gene Name: solute carrier family 17 (organic anion transporter), member 1
  Uniprot ID: Q14916
  ENSP ID: ENSP00000420546
MQMDNRLPPKKVPGFCSFRYGLSFLVHCCNVIITAQRACLNLTMVVMVNSTDPHGLPNTSTKKLLDNIKNPMYNWSPDIQGIILSSTSYGVIIIQVPVGYFSGIYSTKKMIGFALCLSSVLSLLIPPAAGIGVAWVVVCRAVQGAAQGIVATAQFEIYVKWAPPLERGRLTSMSTSGFLLGPFIVLLVTGVICESLGWPMVFYIFGACGCAVCLLWFVLFYDDPKDHPCISISEKEYITSSLVQQNGFLSSLPYLFAWICGNLAGQLSDFFLTRNILSVIAVRKLFTAAGFLLPAIFGVCLPYLSSTFYSIVIFLILAGATGSFCLGGVFINGLDIAPRYFGFIKACSTLTGMIGGLIASTLTGLILKQDPESAWFKTFILMAAINVTGLIFYLIVATAEIQDWAKEKQHTRL

SEQ ID NO: 80582 - protein, 467 aa, Homo sapiens; identical to SEQ ID NO: 80579
  Payload ID: 16057
  Gene Symbol: SLC17A1
  Gene Name: solute carrier family 17 (organic anion transporter), member 1
  Uniprot ID: Q14916
  ENSP ID: ENSP00000420614

SEQ ID NO: 80583 - protein, 420 aa, Homo sapiens
  Payload ID: 16058
  Gene Symbol: SLC17A3
  Gene Name: solute carrier family 17 (organic anion transporter), member 3
  Uniprot ID: O00476
  ENSP ID: ENSP00000353873
MATKTELSPTARESKNAQDMQVDETLIPRKVPSLCSARYGIALVLHFCNFTTIAQNVIMNITMVAMVNSTSPQSQLNDSSEVLPVDSFGGLSKAPKSLPAKSSILGGQFAIWEKWGPPQERSRLCSIALSGMLLGCFTAILIGGFISETLGWPFVFYIFGGVGCVCCLLWFVVIYDDPVSYPWISTSEKEYIISSLKQQVGSSKQPLPIKAMLRSLPIWSICLGCFSHQWLVSTMVVYIPTYISSVYHVNIRDNGLLSALPFIVAWVIGMVGGYLADFLLTKKFRLITVRKIATILGSLPSSALIVSLPYLNSGYITATALLTLSCGLSTLCQSGIYINVLDIAPRYSSFLMGASRGFSSIAPVIVPTVSGFLLSQDPEFGWRNVFFLLFAVNLLGLLFYLIFGEADVQEWAKERKLTRL

SEQ ID NO: 80584 - protein, 420 aa, Homo sapiens; identical to SEQ ID NO: 80583
  Payload ID: 16058
  Gene Symbol: SLC17A3
  Gene Name: solute carrier family 17 (organic anion transporter), member 3
  Uniprot ID: O00476
  ENSP ID: ENSP00000355307

SEQ ID NO: 80585 - protein, 498 aa, Homo sapiens
  Payload ID: 16058
  Gene Symbol: SLC17A3
  Gene Name: solute carrier family 17 (organic anion transporter), member 3
  Uniprot ID: O00476
  ENSP ID: ENSP00000380250
MATKTELSPTARESKNAQDMQVDETLIPRKVPSLCSARYGIALVLHFCNFTTIAQNVIMNITMVAMVNSTSPQSQLNDSSEVLPVDSFGGLSKAPKSLPAKAPVYDWSPQIQGIIFGAVGYGGILTMAPSGYLAGRVGTKRVVGISLFATSFLTLCIPLATDFGIVLLIVTRIVQGLSQSSILGGQFAIWEKWGPPQERSRLCSIALSGMLLGCFTAILIGGFISETLGWPFVFYIFGGVGCVCCLLWFVVIYDDPVSYPWISTSEKEYIISSLKQQVGSSKQPLPIKAMLRSLPIWSICLGCFSHQWLVSTMVVYIPTYISSVYHVNIRDNGLLSALPFIVAWVIGMVGGYLADFLLTKKFRLITVRKIATILGSLPSSALIVSLPYLNSGYITATALLTLSCGLSTLCQSGIYINVLDIAPRYSSFLMGASRGFSSIAPVIVPTVSGFLLSQDPEFGWRNVFFLLFAVNLLGLLFYLIFGEADVQEWAKERKLTRL

SEQ ID NO: 80586 - protein, 112 aa, Homo sapiens
  Payload ID: 16058
  Gene Symbol: SLC17A3
  Gene Name: solute carrier family 17 (organic anion transporter), member 3
  ENSP ID: ENSP00000415622
MATKTELSPTARESKNAQDMQVDETLIPRKVPSLCSARYGIALVLHFCNFTTIAQNVIMNITMVAMVNSTSPQSQLNDSSEVLPVDSFGGLSKAPKSLPAKECYWDALLPSS

SEQ ID NO: 80587 - protein, 99 aa, Homo sapiens
  Payload ID: 16058
  Gene Symbol: SLC17A3
  Gene Name: solute carrier family 17 (organic anion transporter), member 3
  ENSP ID: ENSP00000421855
  MOD_RES (1)..(1): Any amino acid
XTLSCGLSTLCQSGIYINVLDIAPRYSSFLMGASRGFSSIAPVIVPTVSGFLLSQDPEFGWRNVFFLLFAVNLLGLLFYLIFGEADVQEWAKERKLTRL

SEQ ID NO: 80588 - protein, 51 aa, Homo sapiens
  Payload ID: 16058
  Gene Symbol: SLC17A3
  Gene Name: solute carrier family 17 (organic anion transporter), member 3
  ENSP ID: ENSP00000424027
SGFLLSQDPEFGWRNVFFLLFAVNLLGLLFYLIFGEADVQEWAKERKLTRL

SEQ ID NO: 80589 - protein, 112 aa, Homo sapiens; identical to SEQ ID NO: 80586
  Payload ID: 16058
  Gene Symbol: SLC17A3
  Gene Name: solute carrier family 17 (organic anion transporter), member 3
  ENSP ID: ENSP00000424729

SEQ ID NO: 80590 - protein, 582 aa, Homo sapiens
  Payload ID: 16059
  Gene Symbol: SLC17A6
  Gene Name: solute carrier family 17 (vesicular glutamate transporter), member 6
  Uniprot ID: Q9P2U8
  ENSP ID: ENSP00000263160
MESVKQRILAPGKEGLKNFAGKSLGQIYRVLEKKQDTGETIELTEDGKPLEVPERKAPLCDCTCFGLPRRYIIAIMSGLGFCISFGIRCNLGVAIVDMVNNSTIHRGGKVIKEKAKFNWDPETVGMIHGSFFWGYIITQIPGGYIASRLAANRVFGAAILLTSTLNMLIPSAARVHYGCVIFVRILQGLVEGVTYPACHGIWSKWAPPLERSRLATTSFCGSYAGAVIAMPLAGILVQYTGWSSVFYVYGSFGMVWYMFWLLVSYESPAKHPTITDEERRYIEESIGESANLLGAMEKFKTPWRKFFTSMPVYAIIVANFCRSWTFYLLLISQPAYFEEVFGFEISKVGMLSAVPHLVMTIIVPIGGQIADFLRSKQILSTTTVRKIMNCGGFGMEATLLLVVGYSHTRGVAISFLVLAVGFSGFAISGFNVNHLDIAPRYASILMGISNGVGTLSGMVCPIIVGAMTKNKSREEWQYVFLIAALVHYGGVIFYAIFASGEKQPWADPEETSEEKCGFIHEDELDEETGDITQNYINYGTTKSYGATTQANGGWPSGWEKKEEFVQGEVQDSHSYKDRVDYS

SEQ ID NO: 80591 - protein, 560 aa, Homo sapiens
  Payload ID: 16060
  Gene Symbol: SLC17A7
  Gene Name: solute carrier family 17 (vesicular glutamate transporter), member 7
  Uniprot ID: Q9P2U7
  ENSP ID: ENSP00000221485
MEFRQEEFRKLAGRALGKLHRLLEKRQEGAETLELSADGRPVTTQTRDPPVVDCTCFGLPRRYIIAIMSGLGFCISFGIRCNLGVAIVSMVNNSTTHRGGHVVVQKAQFSWDPETVGLIHGSFFWGYIVTQIPGGFICQKFAANRVFGFAIVATSTLNMLIPSAARVHYGCVIFVRILQGLVEGVTYPACHGIWSKWAPPLERSRLATTAFCGSYAGAVVAMPLAGVLVQYSGWSSVFYVYGSFGIFWYLFWLLVSYESPALHPSISEEERKYIEDAIGESAKLMNPLTKFSTPWRRFFTSMPVYAIIVANFCRSWTFYLLLISQPAYFEEVFGFEISKVGLVSALPHLVMTIIVPIGGQIADFLRSRRIMSTTNVRKLMNCGGFGMEATLLLVVGYSHSKGVAISFLVLAVGFSGFAISGFNVNHLDIAPRYASILMGISNGVGTLSGMVCPIIVGAMTKHKTREEWQYVFLIASLVHYGGVIFYGVFASGEKQPWAEPEEMSEEKCGFVGHDQLAGSDDSEMEDEAEPPGAPPAPPPSYGATHSTFQPPRPPPPVRDY

SEQ ID NO: 80592 - protein, 493 aa, Homo sapiens
  Payload ID: 16060
  Gene Symbol: SLC17A7
  Gene Name: solute carrier family 17 (vesicular glutamate transporter), member 7
  Uniprot ID: Q9P2U7
  ENSP ID: ENSP00000470338
MSGLGFCISFGIRCNLGVAIVSMVNNSTTHRGGHVVVQKAQFSWDPETVGLIHGSFFWGYIVTQIPGGFICQKFAANRVFGFAIVATSTLNMLIPSAARVHYGCVIFVRILQGLVEGVTYPACHGIWSKWAPPLERSRLATTAFCGSYAGAVVAMPLAGVLVQYSGWSSVFYVYGSFGIFWYLFWLLVSYESPALHPSISEEERKYIEDAIGESAKLMNPLTKFSTPWRRFFTSMPVYAIIVANFCRSWTFYLLLISQPAYFEEVFGFEISKVGLVSALPHLVMTIIVPIGGQIADFLRSRRIMSTTNVRKLMNCGGFGMEATLLLVVGYSHSKGVAISFLVLAVGFSGFAISGFNVNHLDIAPRYASILMGISNGVGTLSGMVCPIIVGAMTKHKTREEWQYVFLIASLVHYGGVIFYGVFASGEKQPWAEPEEMSEEKCGFVGHDQLAGSDDSEMEDEAEPPGAPPAPPPSYGATHSTFQPPRPPPPVRDY

SEQ ID NO: 80593 - protein, 116 aa, Homo sapiens
  Payload ID: 16060
  Gene Symbol: SLC17A7
  Gene Name: solute carrier family 17 (vesicular glutamate transporter), member 7
  ENSP ID: ENSP00000472086
  MOD_RES (1)..(1): Any amino acid
XWSKWAPPLERSRLATTAFCGSYAGAVVAMPLAGVLVQYSGWSSVFYVYGSFGIFWYLFWLLVSYESPALHPSISEEERKYIEDAIGESAKLMNPLTNYTVVPEGTRRSPQPRSPS

SEQ ID NO: 80594 - protein, 589 aa, Homo sapiens
  Payload ID: 16061
  Gene Symbol: SLC17A8
  Gene Name: solute carrier family 17 (vesicular glutamate transporter), member 8
  Uniprot ID: Q8NDX2
  ENSP ID: ENSP00000316909
MPFKAFDTFKEKILKPGKEGVKNAVGDSLGILQRKIDGTTEEEDNIELNEEGRPVQTSRPSPPLCDCHCCGLPKRYIIAIMSGLGFCISFGIRCNLGVAIVEMVNNSTVYVDGKPEIQTAQFNWDPETVGLIHGSFFWGYIMTQIPGGFISNKFAANRVFGAAIFLTSTLNMFIPSAARVHYGCVMCVRILQGLVEGVTYPACHGMWSKWAPPLERSRLATTSFCGSYAGAVVAMPLAGVLVQYIGWSSVFYIYGMFGIIWYMFWLLQAYECPAAHPTISNEEKTYIETSIGEGANVVSLSKFSTPWKRFFTSLPVYAIIVANFCRSWTFYLLLISQPAYFEEVFGFAISKVGLLSAVPHMVMTIVVPIGGQLADYLRSRQILTTTAVRKIMNCGGFGMEATLLLVVGFSHTKGVAISFLVLAVGFSGFAISGFNVNHLDIAPRYASILMGISNGVGTLSGMVCPLIVGAMTRHKTREEWQNVFLIAALVHYSGVIFYGVFASGEKQEWADPENLSEEKCGIIDQDELAEEIELNHESFASPKKKMSYGATSQNCEVQKKEWKGQRGATLDEEELTSYQNEERNFSTIS

SEQ ID NO: 80595 - protein, 539 aa, Homo sapiens
  Payload ID: 16061
  Gene Symbol: SLC17A8
  Gene Name: solute carrier family 17 (vesicular glutamate transporter), member 8
  Uniprot ID: Q8NDX2
  ENSP ID: ENSP00000376715
MPFKAFDTFKEKILKPGKEGVKNAVGDSLGILQRKIDGTTEEEDNIELNEEGRPVQTSRPSPPLCDCHCCGLPKRYIIAIMSGLGFCISFGIRCNLGVAIVEMVNNSTVYVDGKPEIQTAQFNWDPETVGLIHGSFFWGYIMTQIPGGFISNKFAANRVFGAAIFLTSTLNMFIPSAARVHYGCVMCVRILQGLVEGVTYPACHGMWSKWAPPLERSRLATTSFCGSYAGAVVAMPLAGVLVQYIGWSSVFYIYGMFGIIWYMFWLLQAYECPAAHPTISNEEKTYIETSIGEGANVVSLSVGLLSAVPHMVMTIVVPIGGQLADYLRSRQILTTTAVRKIMNCGGFGMEATLLLVVGFSHTKGVAISFLVLAVGFSGFAISGFNVNHLDIAPRYASILMGISNGVGTLSGMVCPLIVGAMTRHKTREEWQNVFLIAALVHYSGVIFYGVFASGEKQEWADPENLSEEKCGIIDQDELAEEIELNHESFASPKKKMSYGATSQNCEVQKKEWKGQRGATLDEEELTSYQNEERNFSTIS

SEQ ID NO: 80596 - protein, 430 aa, Homo sapiens
  Payload ID: 16062
  Gene Symbol: SLC17A9
  Gene Name: solute carrier family 17 (vesicular nucleotide transporter), member 9
  Uniprot ID: Q9BYT1
  ENSP ID: ENSP00000359374
MTLTSRRQDSQEARPECQAWTGTLLLGTCLLYCARSSMPICTVSMSQDFGWNKKEAGIVLSSFFWGYCLTQVVGGHLGDRIGGEKVILLSASAWGSITAVTPLLAHLSSAHLAFMTFSRILMGLLQGVYFPALTSLLSQKVRESERAFTYSIVGAGSQFGTLLTGAVGSLLLEWYGWQSIFYFSGGLTLLWVWYVYRYLLSEKDLILALGVLAQSRPVSRHNRVPWRRLFRKPAVWAAVVSQLSAACSFFILLSWLPTFFEETFPDAKGWIFNVVPWLVAIPASLFSGFLSDHLINQGYRAITVRKLMQGMGLGLSSVFALCLGHTSSFCESVVFASASIGLQTFNHSGISVNIQDLAPSCAGFLFGVANTAGALAGVVGVCLGGYLMETTGSWTCLFNLVAIISNLGLCTFLVFGQAQRVDLSSTHEDL

SEQ ID NO: 80597 - protein, 436 aa, Homo sapiens
  Payload ID: 16062
  Gene Symbol: SLC17A9
  Gene Name: solute carrier family 17 (vesicular nucleotide transporter), member 9
  Uniprot ID: Q9BYT1
  ENSP ID: ENSP00000359376
MQPPPDEARRDMAGDTQWSRPECQAWTGTLLLGTCLLYCARSSMPICTVSMSQDFGWNKKEAGIVLSSFFWGYCLTQVVGGHLGDRIGGEKVILLSASAWGSITAVTPLLAHLSSAHLAFMTFSRILMGLLQGVYFPALTSLLSQKVRESERAFTYSIVGAGSQFGTLLTGAVGSLLLEWYGWQSIFYFSGGLTLLWVWYVYRYLLSEKDLILALGVLAQSRPVSRHNRVPWRRLFRKPAVWAAVVSQLSAACSFFILLSWLPTFFEETFPDAKGWIFNVVPWLVAIPASLFSGFLSDHLINQGYRAITVRKLMQGMGLGLSSVFALCLGHTSSFCESVVFASASIGLQTFNHSGISVNIQDLAPSCAGFLFGVANTAGALAGVVGVCLGGYLMETTGSWTCLFNLVAIISNLGLCTFLVFGQAQRVDLSSTHEDL

SEQ ID NO: 80598 - protein, 152 aa, Homo sapiens
  Payload ID: 16062
  Gene Symbol: SLC17A9
  Gene Name: solute carrier family 17 (vesicular nucleotide transporter), member 9
  ENSP ID: ENSP00000388215
MFPRPGALSWTVRRHTPRQVEPPCVCMTLTSRRQDSQEARPECQAWTGTLLLGTCLLYCARSSMPICTVSMSQDFGWNKKEAGIVLSSFFWGYCLTQVVGGHLGDRIGGEKVILLSASAWGSITAVTPLLAHLSSAHLAFMTFSRILMGLLQ

SEQ ID NO: 80599 - protein, 439 aa, Homo sapiens
  Payload ID: 16063
  Gene Symbol: SLC17A2
  Gene Name: solute carrier family 17, member 2
  Uniprot ID: O00624
  ENSP ID: ENSP00000265425
MDGKPATRKGPDFCSLRYGLALIMHFSNFTMITQRVSLSIAIIAMVNTTQQQGLSNASTEGPVADAFNNSSISIKEFDTKASVYQWSPETQGIIFSSINYGIILTLIPSGYLAGIFGAKKMLGAGLLISSLLTLFTPLAADFGVILVIMVRTVQGMAQGMAWTGQFTIWAKWAPPLERSKLTTIAGSGSAFGSFIILCVGGLISQALSWPFIFYIFGSTGCVCCLLWFTVIYDDPMHHPCISVREKEHILSSLAQQPSSPGRAVPIKAMVTCLPLWAIFLGFFSHFWLCTIILTYLPTYISTLLHVNIRDSGVLSSLPFIAAASCTILGGQLADFLLSRNLLRLITVRKLFSSLGLLLPSICAVALPFVASSYVITIILLILIPGTSNLCDSGFIINTLDIAPRYASFLMGISRGFGLIAGIISSTATGFLISQVGPVY

SEQ ID NO: 80600 - protein, 436 aa, Homo sapiens
  Payload ID: 16063
  Gene Symbol: SLC17A2
  Gene Name: solute carrier family 17, member 2
  Uniprot ID: O00624
  ENSP ID: ENSP00000353677
MDGKPATRKGPDFCSLRYGLALIMHFSNFTMITQRVSLSIAIIAMVNTTQQQGLSNASTEGPVADAFNNSSISIKEFDTKASVYQWSPETQGIIFSSINYGIILTLIPSGYLAGIFGAKKMLGAGLLISSLLTLFTPLAADFGVILVIMVRTVQGMAQGMAWTGQFTIWAKWAPPLERSKLTTIAGSGSAFGSFIILCVGGLISQALSWPFIFYIFGSTGCVCCLLWFTVIYDDPMHHPCISVREKEHILSSLAQQPSSPGRAVPIKAMVTCLPLWAIFLGFFSHFWLCTIILTYLPTYISTLLHVNIRDSGVLSSLPFIAAASCTILGGQLADFLLSRNLLRLITVRKLFSSLDMQVSSWESQGDLGSSQESSLPLPLDSSSVRILSLVGGMSFSCLLQSTCLAWSFTSRLDKQNFKTGPKRGPLPASEDIKLQT

SEQ ID NO: 80601 - protein, 478 aa, Homo sapiens
  Payload ID: 16063
  Gene Symbol: SLC17A2
  Gene Name: solute carrier family 17, member 2
  Uniprot ID: O00624
  ENSP ID: ENSP00000367081
MDGKPATRKGPDFCSLRYGLALIMHFSNFTMITQRVSLSIAIIAMVNTTQQQGLSNASTEGPVADAFNNSSISIKEFDTKASVYQWSPETQGIIFSSINYGIILTLIPSGYLAGIFGAKKMLGAGLLISSLLTLFTPLAADFGVILVIMVRTVQGMAQGMAWTGQFTIWAKWAPPLERSKLTTIAGSGSAFGSFIILCVGGLISQALSWPFIFYIFGSTGCVCCLLWFTVIYDDPMHHPCISVREKEHILSSLAQQPSSPGRAVPIKAMVTCLPLWAIFLGFFSHFWLCTIILTYLPTYISTLLHVNIRDSGVLSSLPFIAAASCTILGGQLADFLLSRNLLRLITVRKLFSSLGLLLPSICAVALPFVASSYVITIILLILIPGTSNLCDSGFIINTLDIAPRYASFLMGISRGFGLIAGIISSTATGFLISQDFESGWRNVFFLSAAVNMFGLVFYLTFGQAELQDWAKERTLTRL

SEQ ID NO: 80602 - protein, 497 aa, Homo sapiens
  Payload ID: 16064
  Gene Symbol: SLC17A4
  Gene Name: solute carrier family 17, member 4
  Uniprot ID: Q9Y2C5
  ENSP ID: ENSP00000367137
MSTGPDVKATVGDISSDGNLNVAQEECSRKGFCSVRHGLALILQLCNFSIYTQQMNLSIAIPAMVNNTAPPSQPNASTERPSTDSQGYWNETLKEFKAMAPAYDWSPEIQGIILSSLNYGSFLAPIPSGYVAGIFGAKYVVGAGLFISSFLTLFIPLAANAGVALLIVLRIVQGIAQVMVLTGQYSIWVKWAPPLERSQLTTIAGSGSMLGSFIVLLAGGLLCQTIGWPYVFYIFGGIGCACCPLWFPLIYDDPVNHPFISAGEKRYIVCSLAQQDCSPGWSLPIRAMIKSLPLWAILVSYFCEYWLFYTIMAYTPTYISSVLQANLRDSGILSALPFVVGCICIILGGLLADFLLSRKILRLITIRKLFTAIGVLFPSVILVSLPWVRSSHSMTMTFLVLSSAISSFCESGALVNFLDIAPRYTGFLKGLLQVFAHIAGAISPTAAGFFISQDSEFGWRNVFLLSAAVNISGLVFYLIFGRADVQDWAKEQTFTHL

SEQ ID NO: 80603 - protein, 221 aa, Homo sapiens
  Payload ID: 16064
  Gene Symbol: SLC17A4
  Gene Name: solute carrier family 17, member 4
  Uniprot ID: Q9Y2C5
  ENSP ID: ENSP00000380266
MNLSIAIPAMVNNTAPPSQPNASTERPSTDSQGYWNETLKEFKAMDCSPGWSLPIRAMIKSLPLWAILVSYFCEYWLFYTIMAYTPTYISSVLQANLRDSGILSALPFVVGCICIILGGLLADFLLSRKILRLITIRKLFTAIGKGETGHRGERGKLRAAFSLLCVCPPTPGVLFPSVILVSLPWVRSSHSMTMTFLVLSSAISSFCESGALVNFLDIAPR

SEQ ID NO: 80604 - protein, 443 aa, Homo sapiens
  Payload ID: 16064
  Gene Symbol: SLC17A4
  Gene Name: solute carrier family 17, member 4
  Uniprot ID: Q9Y2C5
  ENSP ID: ENSP00000391345
MNLSIAIPAMVNNTAPPSQPNASTERPSTDSQGYWNETLKEFKAMAPAYDWSPEIQGIILSSLNYGSFLAPIPSGYVAGIFGAKYVVGAGLFISSFLTLFIPLAANAGVALLIVLRIVQGIAQVMVLTGQYSIWVKWAPPLERSQLTTIAGSGSMLGSFIVLLAGGLLCQTIGWPYVFYIFGGIGCACCPLWFPLIYDDPVNHPFISAGEKRYIVCSLAQQDCSPGWSLPIRAMIKSLPLWAILVSYFCEYWLFYTIMAYTPTYISSVLQANLRDSGILSALPFVVGCICIILGGLLADFLLSRKILRLITIRKLFTAIGVLFPSVILVSLPWVRSSHSMTMTFLVLSSAISSFCESGALVNFLDIAPRYTGFLKGLLQVFAHIAGAISPTAAGFFISQDSEFGWRNVFLLSAAVNISGLVFYLIFGRADVQDWAKEQTFTHL

SEQ ID NO: 80605 - protein, 532 aa, Homo sapiens
  Payload ID: 16065
  Gene Symbol: SLC18A3
  Gene Name: solute carrier family 18 (vesicular acetylcholine transporter), member 3
  Uniprot ID: Q16572
  ENSP ID: ENSP00000363229
MESAEPAGQARAAATKLSEAVGAALQEPRRQRRLVLVIVCVALLLDNMLYMVIVPIVPDYIAHMRGGGEGPTRTPEVWEPTLPLPTPANASAYTANTSASPTAAWPAGSALRPRYPTESEDVKIGVLFASKAILQLLVNPLSGPFIDRMSYDVPLLIGLGVMFASTVLFAFAEDYATLFAARSLQGLGSAFADTSGIAMIADKYPEEPERSRALGVALAFISFGSLVAPPFGGILYEFAGKRVPFLVLAAVSLFDALLLLAVAKPFSAAARARANLPVGTPIHRLMLDPYIAVVAGALTTCNIPLAFLEPTIATWMKHTMAASEWEMGMAWLPAFVPHVLGVYLTVRLAARYPHLQWLYGALGLAVIGASSCIVPACRSFAPLVVSLCGLCFGIALVDTALLPTLAFLVDVRHVSVYGSVYAIADISYSVAYALGPIVAGHIVHSLGFEQLSLGMGLANLLYAPVLLLLRNVGLLTRSRSERDVLLDEPPQGLYDAVRLRERPVSGQDGEPRSPPGPFDACEDDYNYYYTRS

SEQ ID NO: 80606 - protein, 493 aa, Homo sapiens
  Payload ID: 16066
  Gene Symbol: SLC18A1
  Gene Name: solute carrier family 18 (vesicular monoamine transporter), member 1
  Uniprot ID: P54219
  ENSP ID: ENSP00000265808
MLRTILDAPQRLLKEGRASRQLVLVVVFVALLLDNMLFTVVVPIVPTFLYDMEFKEVNSSLHLGHAGSSPHALASPAFSTIFSFFNNNTVAVEESVPSGIAWMNDTASTIPPPATEAISAHKNNCLQGTGFLEEEITRVGVLFASKAVMQLLVNPFVGPLTNRIGYHIPMFAGFVIMFLSTVMFAFSGTYTLLFVARTLQGIGSSFSSVAGLGMLASVYTDDHERGRAMGTALGGLALGLLVGAPFGSVMYEFVGKSAPFLILAFLALLDGALQLCILQPSKVSPESAKGTPLFMLLKDPYILVAAGLAFLPASVSYLIGTNLFGVLANKMGRWLCSLIGMLVVGTSLLCVPLAHNIFGLIGPNAGLGLAIGMVDSSMMPIMGHLVDLRHTSVYGSVYAIADVAFCMGFAIGPSTGGAIVKAIGFPWLMVITGVINIVYAPLCYYLRSPPAKEEKLAILSQDCPMETRMYATQKPTKEFPLGEDSDEEPDHEE

SEQ ID NO: 80607 - protein, 525 aa, Homo sapiens
  Payload ID: 16066
  Gene Symbol: SLC18A1
  Gene Name: solute carrier family 18 (vesicular monoamine transporter), member 1
  Uniprot ID: P54219
  ENSP ID: ENSP00000276373
MLRTILDAPQRLLKEGRASRQLVLVVVFVALLLDNMLFTVVVPIVPTFLYDMEFKEVNSSLHLGHAGSSPHALASPAFSTIFSFFNNNTVAVEESVPSGIAWMNDTASTIPPPATEAISAHKNNCLQGTGFLEEEITRVGVLFASKAVMQLLVNPFVGPLTNRIGYHIPMFAGFVIMFLSTVMFAFSGTYTLLFVARTLQGIGSSFSSVAGLGMLASVYTDDHERGRAMGTALGGLALGLLVGAPFGSVMYEFVGKSAPFLILAFLALLDGALQLCILQPSKVSPESAKGTPLFMLLKDPYILVAAGSICFANMGVAILEPTLPIWMMQTMCSPKWQLGLAFLPASVSYLIGTNLFGVLANKMGRWLCSLIGMLVVGTSLLCVPLAHNIFGLIGPNAGLGLAIGMVDSSMMPIMGHLVDLRHTSVYGSVYAIADVAFCMGFAIGPSTGGAIVKAIGFPWLMVITGVINIVYAPLCYYLRSPPAKEEKLAILSQDCPMETRMYATQKPTKEFPLGEDSDEEPDHEE

SEQ ID NO: 80608 - protein, 472 aa, Homo sapiens
  Payload ID: 16066
  Gene Symbol: SLC18A1
  Gene Name: solute carrier family 18 (vesicular monoamine transporter), member 1
  Uniprot ID: P54219
  ENSP ID: ENSP00000371021
MLRTILDAPQRLLKEGRASRQLVLVVVFVALLLDNMLFTVVVPIVPTFLYDMEFKEVNSSLHLGHAGSSPHALASPAFSTIFSFFNNNTVAVEESVPSGIAWMNDTASTIPPPATEAISAHKNNCLQGTGFLEEEITRVGVLFASKAVMQLLVNPFVGPLTNRIGYHIPMFAGFVIMFLSTVMFAFSGTYTLLFVARTLQGIGSSFSSVAGLGMLASVYTDDHERGRAMGTALGGLALGLLVGAPFGSVMYEFVGKSAPFLILAFLALLDGALQLCILQPSKVSPESAKGTPLFMLLKDPYILVAAGSICFANMGVAILEPTLPIWMMQTMCSPKWQLGLAFLPASVSYLIGTNLFGVLANKMGRWLCSLIGMLVVGTSLLCVPLAHNIFGLIGPNAGLGLAIGMVDSSMMPIMGHLVDLRHTSVYGSVYAIADVAFCMGFAIGYSESGLPHGDPDVCNPEAHEGISSGGGQ

SEQ ID NO: 80609 - protein, 525 aa, Homo sapiens; identical to SEQ ID NO: 80607
  Payload ID: 16066
  Gene Symbol: SLC18A1
  Gene Name: solute carrier family 18 (vesicular monoamine transporter), member 1
  Uniprot ID: P54219
  ENSP ID: ENSP00000387549

SEQ ID NO: 80610 - protein, 472 aa, Homo sapiens; identical to SEQ ID NO: 80608
  Payload ID: 16066
  Gene Symbol: SLC18A1
  Gene Name: solute carrier family 18 (vesicular monoamine transporter), member 1
  Uniprot ID: P54219
  ENSP ID: ENSP00000413361

SEQ ID NO: 80611 - protein, 385 aa, Homo sapiens
  Payload ID: 16066
  Gene Symbol: SLC18A1
  Gene Name: solute carrier family 18 (vesicular monoamine transporter), member 1
  ENSP ID: ENSP00000428001
MLRTILDAPQRLLKEGRASRQLVLVVVFVALLLDNMLFTVVVPIVPTFLYDMEFKEVNSSLHLGHAGSSPHALASPAFSTIFSFFNNNTVAVEESVPSGIAWMNDTASTIPPPATEAISAHKNNCLQGTGFLEEEITRVGVLFASKAVMQLLVNPFVGPLTNRIGYHIPMFAGFVIMFLSTVMFAFSGTYTLLFVARTLQGIGSSFSSVAGLGMLASVYTDDHERGRAMGTALGGLALGLLVGAPFGSVMYEFVGKSAPFLILAFLALLDGALQLCILQPSKVSPESAKGTPLFMLLKDPYILVAAGSICFANMGVAILEPTLPIWMMQTMCSPKWQLGLAFLPASVSYLIGTNLFGVLANKMGRWLCSLIGMLVVGTSLLCLPS

SEQ ID NO: 80612 - protein, 258 aa, Homo sapiens
  Payload ID: 16066
  Gene Symbol: SLC18A1
  Gene Name: solute carrier family 18 (vesicular monoamine transporter), member 1
  ENSP ID: ENSP00000428999
MLRTILDAPQRLLKEGRASRQLVLVVVFVALLLDNMLFTVVVPIVPTFLYDMEFKEVNSSLHLGHAGSSPHALASPAFSTIFSFFNNNTVAVEESVPSGIAWMNDTASTIPPPATEAISAHKNNCLQGTGFLEEEITRVGVLFASKAVMQLLVNPFVGPLTNRIGYHIPMFAGFVIMFLSTVSLGMLASVYTDDHERGRAMGTALGGLALGLLVGAPFGSVMYEFVGKSAPFLILAFLALLDGALQLCILQPSKVSPE

SEQ ID NO: 80613 - protein, 493 aa, Homo sapiens; identical to SEQ ID NO: 80606
  Payload ID: 16066
  Gene Symbol: SLC18A1
  Gene Name: solute carrier family 18 (vesicular monoamine transporter), member 1
  Uniprot ID: P54219
  ENSP ID: ENSP00000429664

SEQ ID NO: 80614 - protein, 514 aa, Homo sapiens
  Payload ID: 16067
  Gene Symbol: SLC18A2
  Gene Name: solute carrier family 18 (vesicular monoamine transporter), member 2
  Uniprot ID: Q05940
  ENSP ID: ENSP00000298472
MALSELALVRWLQESRRSRKLILFIVFLALLLDNMLLTVVVPIIPSYLYSIKHEKNATEIQTARPVHTASISDSFQSIFSYYDNSTMVTGNATRDLTLHQTATQHMVTNASAVPSDCPSEDKDLLNENVQVGLLFASKATVQLITNPFIGLLTNRIGYPIPIFAGFCIMFVSTIMFAFSSSYAFLLIARSLQGIGSSCSSVAGMGMLASVYTDDEERGNVMGIALGGLAMGVLVGPPFGSVLYEFVGKTAPFLVLAALVLLDGAIQLFVLQPSRVQPESQKGTPLTTLLKDPYILIAAGSICFANMGIAMLEPALPIWMMETMCSRKWQLGVAFLPASISYLIGTNIFGILAHKMGRWLCALLGMIIVGVSILCIPFAKNIYGLIAPNFGVGFAIGMVDSSMMPIMGYLVDLRHVSVYGSVYAIADVAFCMGYAIGPSAGGAIAKAIGFPWLMTIIGIIDILFAPLCFFLRSPPAKEEKMAILMDHNCPIKTKMYTQNNIQSYPIGEDEESESD

SEQ ID NO: 80615 - protein, 456 aa, Homo sapiens
  Payload ID: 16068
  Gene Symbol: SLC18B1
  Gene Name: solute carrier family 18, subfamily B, member 1
  Uniprot ID: Q6NT16
  ENSP ID: ENSP00000275227
MEALGDLEGPRAPGGDDPAGSAGETPGWLSREQVFVLISAASVNLGSMMCYSILGPFFPKEAEKKGASNTIIGMIFGCFALFELLASLVFGNYLVHIGAKFMFVAGMFVSGGVTILFGVLDRVPDGPVFIAMCFLVRVMDAVSFAAAMTASSSILAKAFPNNVATVLGSLETFSGLGLILGPPVGGFLYQSFGYEVPFIVLGCVVLLMVPLNMYILPNYESDPGEHSFWKLIALPKVGLIAFVINSLSSCFGFLDPTLSLFVLEKFNLPAGYVGLVFLGMALSYAISSPLFGLLSDKRPPLRKWLLVFGNLITAGCYMLLGPVPILHIKSQLWLLVLILVVSGLSAGMSIIPTFPEILSCAHENGFEEGLSTLGLVSGLFSAMWSIGAFMGPTLGGFLYEKIGFEWAAAIQGLWALISGLAMGLFYLLEYSRRKRSKSQNILSTEEERTTLLPNET

SEQ ID NO: 80616 - protein, 107 aa, Homo sapiens
  Payload ID: 16068
  Gene Symbol: SLC18B1
  Gene Name: solute carrier family 18, subfamily B, member 1
  ENSP ID: ENSP00000356895
MEALGDLEGPRAPGGDDPAGSAGETPGWLSREQVFVLISAASVNLGSMMCYSILGPFFPKEAEKKGASNTIIGMIFGFQFTSWICGTSIPGYGTVLCHLFTTIWSPK

SEQ ID NO: 80617 - protein, 591 aa, Homo sapiens
  Payload ID: 16069
  Gene Symbol: SLC19A1
  Gene Name: solute carrier family 19 (folate transporter), member 1
  Uniprot ID: P41440
  ENSP ID: ENSP00000308895
MVPSSPAVEKQVPVEPGPDPELRSWRHLVCYLCFYGFMAQIRPGESFITPYLLGPDKNFTREQVTNEITPVLSYSYLAVLVPVFLLTDYLRYTPVLLLQGLSFVSVWLLLLLGHSVAHMQLMELFYSVTMAARIAYSSYIFSLVRPARYQRVAGYSRAAVLLGVFTSSVLGQLLVTVGRVSFSTLNYISLAFLTFSVVLALFLKRPKRSLFFNRDDRGRCETSASELERMNPGPGGKLGHALRVACGDSVLARMLRELGDSLRRPQLRLWSLWWVFNSAGYYLVVYYVHILWNEVDPTTNSARVYNGAADAASTLLGAITSFAAGFVKIRWARWSKLLIAGVTATQAGLVFLLAHTRHPSSIWLCYAAFVLFRGSYQFLVPIATFQIASSLSKELCALVFGVNTFFATIVKTIITFIVSDVRGLGLPVRKQFQLYSVYFLILSIIYFLGAMLDGLRHCQRGHHPRQPPAQGLRSAAEEKAAQALSVQDKGLGGLQPAQSPPLSPEDSLGAVGPASLEQRQSDPYLAQAPAPQAAEFLSPVTTPSPCTLCSAQASGPEAADETCPQLAVHPPGVSKLGLQCLPSDGVQNVNQ

SEQ ID NO: 80618 - protein, 489 aa, Homo sapiens
  Payload ID: 16069
  Gene Symbol: SLC19A1
  Gene Name: solute carrier family 19 (folate transporter), member 1
  Uniprot ID: P41440
  ENSP ID: ENSP00000369347
MVPSSPAVEKQVPVEPGPDPELRSWRHLVCYLCFYGFMAQIRPGESFITPYLLGPDKNFTREQVTNEITPVLSYSYLAVLVPVFLLTDYLRYTPVLLLQGLSFVSVWLLLLLGHSVAHMQLMELFYSVTMAARIAYSSYIFSLVRPARYQRVAGYSRAAVLLGVFTSSVLGQLLVTVGRVSFSTLNYISLAFLTFSVVLALFLKRPKRSLFFNRDDRGRCETSASELERMNPGPGGKLGHALRVACGDSVLARMLRELGDSLRRPQLRLWSLWWVFNSAGYYLVVYYVHILWNEVDPTTNSARVYNGAADAASTLLGAITSFAAGFVKIRWARWSKLLIAGVTATQAGLVFLLAHTRHPSSIWLCYAAFVLFRGSYQFLVPIATFQIASSLSKELCALVFGVNTFFATIVKTIITFIVSDVRGLGLPVRKQNEELHVASLSLWKSHLRLAADTLSSEGSSGSGPRSWFLSPTLRAALHGPVCPSEVCPS

SEQ ID NO: 80619 - protein, 269 aa, Homo sapiens
  Payload ID: 16069
  Gene Symbol: SLC19A1
  Gene Name: solute carrier family 19 (folate transporter), member 1
  ENSP ID: ENSP00000393988
  MOD_RES (1)..(1): Any amino acid
XLRLWSLWWVFNSAGYYLVVYYVHILWNEVDPTTNSARVYNGAADAASTLLGAITSFAAGFVKIRWARWSKLLIAGVTATQAGLVFLLAHTRHPSSIWLCYAAFVLFRGSYQFLVPIATFQIASSLSKELCALVFGVNTFFATIVKTIITFIVSDVRGLGLPVRKQALRMSRPRLGLCLPGPFPPQSAAPARAGMAASSAEDPGSERGPWRRAGTVAARGDPGGERGPWRREGTLAARGDPGGERGPWWREGTLAAKPRMQWVTRATAP

SEQ ID NO: 80620 - protein, 182 aa, Homo sapiens
  Payload ID: 16069
  Gene Symbol: SLC19A1
  Gene Name: solute carrier family 19 (folate transporter), member 1
  ENSP ID: ENSP00000401850
MVPSSPAVEKQVPVEPGPDPELRSWRHLVCYLCFYGFMAQIRPGESFITPYLLGPDKNFTREQVTNEITPVLSYSYLAVLVPVFLLTDYLRYTPVLLLQGLSFVSVWLLLLLGHSVAHMQLMELFYSVTMAARIAYSSYIFSLVRPARYQRVAGYSRAAVLLGVFTSSVLGQLLVTVGRVSF

SEQ ID NO: 80621 - protein, 154 aa, Homo sapiens
  Payload ID: 16069
  Gene Symbol: SLC19A1
  Gene Name: solute carrier family 19 (folate transporter), member 1
  ENSP ID: ENSP00000411345
MVPSSPAVEKQVPVEPGPDPELRSWRHLVCYLCFYGFMAQIRPGESFITPYLLGPDKNFTREQVTNEITPVLSYSYLAVLVPVFLLTDYLRYTPVLLLQGLSFVSVWLLLLLGHSVAHMQLMELFYSVTMAARIAYSSYIFSLVRPARYQRVAG

SEQ ID NO: 80622 - protein, 60 aa, Homo sapiens
  Payload ID: 16069
  Gene Symbol: SLC19A1
  Gene Name: solute carrier family 19 (folate transporter), member 1
  ENSP ID: ENSP00000435780
MVPSSPAVEKQVPVEPGPDPELRSWRHLVCYLCFYGFMAQIRPGESFITPYLLGPDKNFT

SEQ ID NO: 80623 - protein, 551 aa, Homo sapiens
  Payload ID: 16069
  Gene Symbol: SLC19A1
  Gene Name: solute carrier family 19 (folate transporter), member 1
  Uniprot ID: P41440
  ENSP ID: ENSP00000441772
MRPQPAEPAPGGRGNEACSIHSEVTNEITPVLSYSYLAVLVPVFLLTDYLRYTPVLLLQGLSFVSVWLLLLLGHSVAHMQLMELFYSVTMAARIAYSSYIFSLVRPARYQRVAGYSRAAVLLGVFTSSVLGQLLVTVGRVSFSTLNYISLAFLTFSVVLALFLKRPKRSLFFNRDDRGRCETSASELERMNPGPGGKLGHALRVACGDSVLARMLRELGDSLRRPQLRLWSLWWVFNSAGYYLVVYYVHILWNEVDPTTNSARVYNGAADAASTLLGAITSFAAGFVKIRWARWSKLLIAGVTATQAGLVFLLAHTRHPSSIWLCYAAFVLFRGSYQFLVPIATFQIASSLSKELCALVFGVNTFFATIVKTIITFIVSDVRGLGLPVRKQFQLYSVYFLILSIIYFLGAMLDGLRHCQRGHHPRQPPAQGLRSAAEEKAAQALSVQDKGLGGLQPAQSPPLSPEDSLGAVGPASLEQRQSDPYLAQAPAPQAAEFLSPVTTPSPCTLCSAQASGPEAADETCPQLAVHPPGVSKLGLQCLPSDGVQNVNQ

SEQ ID NO: 80624 - protein, 545 aa, Homo sapiens
  Payload ID: 16069
  Gene Symbol: SLC19A1
  Gene Name: solute carrier family 19 (folate transporter), member 1
  ENSP ID: ENSP00000457278
MVPSSPAVEKQVPVEPGPDPELRSWRHLVCYLCFYGFMAQIRPGESFITPYLLGPDKNFTREQVTNEITPVLSYSYLAVLVPVFLLTDYLRYTPVLLLQGLSFVSVWLLLLLGHSVAHMQLMELFYSVTMAARIAYSSYIFSLVRPARYQRVAGYSRAAVLLGVFTSSVLGQLLVTVGRVSFSTLNYISLAFLTFSVVLALFLKRPKRSLFFNRDDRGRCETSASELERMNPGPGGKLGHALRVACGDSVLARMLRELGDSLRRPQLRLWSLWWVFNSAGYYLVVYYVHILWNEVDPTTNSARVYNGAADAASTLLGAITSFAAGFVKIRWARWSKLLIAGVTATQAGLVFLLAHTRHPSSIWLCYAAFVLFRGSYQFLVPIATFQIASSLSKELCALVFGVNTFFATIVKTIITFIVSDVRGLGLPVRKQALRMSRPRLGLCLPGPFPPQSAAPARAGMAASSAEDPGSERGPWRRAGTVAARGDPGGERGPWRREGTLAARGDPGGERGPWWREGTLAVRGDPGGERGPWRREGTLVVKGARG

SEQ ID NO: 80625 - protein, 497 aa, Homo sapiens
  Payload ID: 16070
  Gene Symbol: SLC19A2
  Gene Name: solute carrier family 19 (thiamine transporter), member 2
  Uniprot ID: O60779
  ENSP ID: ENSP00000236137
MDVPGPVSRRAAAAAATVLLRTARVRRECWFLPTALLCAYGFFASLRPSEPFLTPYLLGPDKNLTEREVFNEIYPVWTYSYLVLLFPVFLATDYLRYKPVVLLQGLSLIVTWFMLLYAQGLLAIQFLEFFYGIATATEIAYYSYIYSVVDLGMYQKVTSYCRSATLVGFTVGSVLGQILVSVAGWSLFSLNVISLTCVSVAFAVAWFLPMPQKSLFFHHIPSTCQRVNGIKVQNGGIVTDTPASNHLPGWEDIESKIPLNMEEPPVEEPEPKPDRLLVLKVLWNDFLMCYSSRPLLCWSVWWALSTCGYFQVVNYTQGLWEKVMPSRYAAIYNGGVEAVSTLLGAVAVFAVGYIKISWSTWGEMTLSLFSLLIAAAVYIMDTVGNIWVCYASYVVFRIIYMLLITIATFQIAANLSMERYALVFGVNTFIALALQTLLTLIVVDASGLGLEITTQFLIYASYFALIAVVFLASGAVSVMKKCRKLEDPQSSSQVTTS

SEQ ID NO: 80626 - protein, 296 aa, Homo sapiens
  Payload ID: 16070
  Gene Symbol: SLC19A2
  Gene Name: solute carrier family 19 (thiamine transporter), member 2
  Uniprot ID: O60779
  ENSP ID: ENSP00000356778
MDVPGPVSRRAAAAAATVLLRTARVRRECWFLPTALLCAYGFFASLRPSEPFLTPYLLGPDKNLTEREEPKPDRLLVLKVLWNDFLMCYSSRPLLCWSVWWALSTCGYFQVVNYTQGLWEKVMPSRYAAIYNGGVEAVSTLLGAVAVFAVGYIKISWSTWGEMTLSLFSLLIAAAVYIMDTVGNIWVCYASYVVFRIIYMLLITIATFQIAANLSMERYALVFGVNTFIALALQTLLTLIVVDASGLGLEITTQFLIYASYFALIAVVFLASGAVSVMKKCRKLEDPQSSSQVTTS

SEQ ID NO: 80627 - protein, 496 aa, Homo sapiens
  Payload ID: 16071
  Gene Symbol: SLC19A3
  Gene Name: solute carrier family 19 (thiamine transporter), member 3
  Uniprot ID: Q9BZV2
  ENSP ID: ENSP00000258403
MDCYRTSLSSSWIYPTVILCLFGFFSMMRPSEPFLIPYLSGPDKNLTSAEITNEIFPVWTYSYLVLLLPVFVLTDYVRYKPVIILQGISFIITWLLLLFGQGVKTMQVVEFFYGMVTAAEVAYYAYIYSVVSPEHYQRVSGYCRSVTLAAYTAGSVLAQLLVSLANMSYFYLNVISLASVSVAFLFSLFLPMPKKSMFFHAKPSREIKKSSSVNPVLEETHEGEAPGCEEQKPTSEILSTSGKLNKGQLNSLKPSNVTVDVFVQWFQDLKECYSSKRLFYWSLWWAFATAGFNQVLNYVQILWDYKAPSQDSSIYNGAVEAIATFGGAVAAFAVGYVKVNWDLLGELALVVFSVVNAGSLFLMHYTANIWACYAGYLIFKSSYMLLITIAVFQIAVNLNVERYALVFGINTFIALVIQTIMTVIVVDQRGLNLPVSIQFLVYGSYFAVIAGIFLMRSMYITYSTKSQKDVQSPAPSENPDVSHPEEESNIIMSTKL

SEQ ID NO: 80628 - protein, 92 aa, Homo sapiens
  Payload ID: 16071
  Gene Symbol: SLC19A3
  Gene Name: solute carrier family 19 (thiamine transporter), member 3
  ENSP ID: ENSP00000386298
MDCYRTSLSSSWIYPTVILCLFGFFSMMRPSEPFLIPYLSGPDKNLTSAEITNEIFPVWTYSYLVLLLPVFVLTDYVRYKPVIILQGWNAMA

SEQ ID NO: 80629 - protein, 54 aa, Homo sapiens
  Payload ID: 16071
  Gene Symbol: SLC19A3
  Gene Name: solute carrier family 19 (thiamine transporter), member 3
  ENSP ID: ENSP00000387193
MDCYRTSLSSSWIYPTVILCLFGFFSMMRPSEPFLIPYLSGPDKNLTSAEITNE

SEQ ID NO: 80630 - protein, 496 aa, Homo sapiens; identical to SEQ ID NO: 80627
  Payload ID: 16071
  Gene Symbol: SLC19A3
  Gene Name: solute carrier family 19 (thiamine transporter), member 3
  Uniprot ID: Q9BZV2
  ENSP ID: ENSP00000397393

SEQ ID NO: 80631 - protein, 64 aa, Homo sapiens
  Payload ID: 16071
  Gene Symbol: SLC19A3
  Gene Name: solute carrier family 19 (thiamine transporter), member 3
  ENSP ID: ENSP00000398349
MDCYRTSLSSSWIYPTVILCLFGFFSMMRPSEPFLIPYLSGPDKNLTSAEITNEIFPVWTYSYL

SEQ ID NO: 80632 - protein, 132 aa, Homo sapiens
  Payload ID: 16071
  Gene Symbol: SLC19A3
  Gene Name: solute carrier family 19 (thiamine transporter), member 3
  ENSP ID: ENSP00000399001
MDCYRTSLSSSWIYPTVILCLFGFFSMMRPSEPFLIPYLSGPDKNLTSAEITNEIFPVWTYSYLVLLLPVFVLTDYVRYKPVIILQGISFIITWLLLLFGQGVKTMQVVEFFYGMVTAAEVAYYAYIYSVVS

SEQ ID NO: 80633 - protein, 56 aa, Homo sapiens
  Payload ID: 16071
  Gene Symbol: SLC19A3
  Gene Name: solute carrier family 19 (thiamine transporter), member 3
  ENSP ID: ENSP00000400627
MDCYRTSLSSSWIYPTVILCLFGFFSMMRPSEPFLIPYLSGPDKNLTSAEVEACHN

SEQ ID NO: 80634 - protein, 116 aa, Homo sapiens
  Payload ID: 16072
  Gene Symbol: SLC2A1
  Gene Name: solute carrier family 2 (facilitated glucose transporter), member 1
  ENSP ID: ENSP00000361578
MEPSSKVIEEFYNQTWVHRYGESILPTTLTTLWSLSVAIFSVGGMIGSFSVGLFVNRFGRRNSMLMMNLLAFVSAVLMGFSKLGKSFEMLILGRFIIGVYCGLTTGFVPMYVGEVS

SEQ ID NO: 80635 - protein, 44 aa, Homo sapiens
  Payload ID: 16072
  Gene Symbol: SLC2A1
  Gene Name: solute carrier family 2 (facilitated glucose transporter), member 1
  ENSP ID: ENSP00000395521
SLSVAIFSVGGMIGSFSVGLFVNRFGRVLPLTQPLGAQGMWALA

SEQ ID NO: 80636 - protein, 492 aa, Homo sapiens
  Payload ID: 16072
  Gene Symbol: SLC2A1
  Gene Name: solute carrier family 2 (facilitated glucose transporter), member 1
  Uniprot ID: P11166
  ENSP ID: ENSP00000416293
MEPSSKKLTGRLMLAVGGAVLGSLQFGYNTGVINAPQKVIEEFYNQTWVHRYGESILPTTLTTLWSLSVAIFSVGGMIGSFSVGLFVNRFGRRNSMLMMNLLAFVSAVLMGFSKLGKSFEMLILGRFIIGVYCGLTTGFVPMYVGEVSPTALRGALGTLHQLGIVVGILIAQVFGLDSIMGNKDLWPLLLSIIFIPALLQCIVLPFCPESPRFLLINRNEENRAKSVLKKLRGTADVTHDLQEMKEESRQMMREKKVTILELFRSPAYRQPILIAVVLQLSQQLSGINAVFYYSTSIFEKAGVQQPVYATIGSGIVNTAFTVVSLFVVERAGRRTLHLIGLAGMAGCAILMTIALALLEQLPWMSYLSIVAIFGFVAFFEVGPGPIPWFIVAELFSQGPRPAAIAVAGFSNWTSNFIVGMCFQYVEQLCGPYVFIIFTVLLVLFFIFTYFKVPETKGRTFDEIASGFRQGGASQSDKTPEELFHPLGADSQV

SEQ ID NO: 80637 - protein, 173 aa, Homo sapiens
  Payload ID: 16072
  Gene Symbol: SLC2A1
  Gene Name: solute carrier family 2 (facilitated glucose transporter), member 1
  ENSP ID: ENSP00000486694
MEPSSKKLTGRLMLAVGGAVLGSLQFGYNTGVINAPQKVIEEFYNQTWVHRYGESILPTTLTTLWSLSVAIFSVGGMIGSFSVGLFVNRFGRRNSMLMMNLLAFVSAVLMGFSKLGKSFEMLILGRFIIGVYCGLTTGFVPMYVGEVSPTALRGALGTLHQLGIVVGILIAQC

SEQ ID NO: 80638 - protein, 142 aa, Homo sapiens
  Payload ID: 16072
  Gene Symbol: SLC2A1
  Gene Name: solute carrier family 2 (facilitated glucose transporter), member 1
  ENSP ID: ENSP00000487213
  MOD_RES (1)..(1): Any amino acid
XAPQKVIEEFYNQTWVHRYGESILPTTLTTLWSLSVAIFSVGGMIGSFSVGLFVNRFGRRNSMLMMNLLAFVSAVLMGFSKLGKSFEMLILGRFIIGVYCGLTTGFVPMYVGEVSPTALRGALGTLHQLGIVVGILIAQAAG

SEQ ID NO: 80639 - protein, 541 aa, Homo sapiens
  Payload ID: 16073
  Gene Symbol: SLC2A10
  Gene Name: solute carrier family 2 (facilitated glucose transporter), member 10
  Uniprot ID: O95528
  ENSP ID: ENSP00000352216
MGHSPPVLPLCASVSLLGGLTFGYELAVISGALLPLQLDFGLSCLEQEFLVGSLLLGALLASLVGGFLIDCYGRKQAILGSNLVLLAGSLTLGLAGSLAWLVLGRAVVGFAISLSSMACCIYVSELVGPRQRGVLVSLYEAGITVGILLSYALNYALAGTPWGWRHMFGWATAPAVLQSLSLLFLPAGTDETATHKDLIPLQGGEAPKLGPGRPRYSFLDLFRARDNMRGRTTVGLGLVLFQQLTGQPNVLCYASTIFSSVGFHGGSSAVLASVGLGAVKVAATLTAMGLVDRAGRRALLLAGCALMALSVSGIGLVSFAVPMDSGPSCLAVPNATGQTGLPGDSGLLQDSSLPPIPRTNEDQREPILSTAKKTKPHPRSGDPSAPPRLALSSALPGPPLPARGHALLRWTALLCLMVFVSAFSFGFGPVTWLVLSEIYPVEIRGRAFAFCNSFNWAANLFISLSFLDLIGTIGLSWTFLLYGLTAVLGLGFIYLFVPETKGQSLAEIDQQFQKRRFTLSFGHRQNSTGIPYSRIEISAAS

SEQ ID NO: 80640 - protein, 13 aa, Homo sapiens
  Payload ID: 16073
  Gene Symbol: SLC2A10
  Gene Name: solute carrier family 2 (facilitated glucose transporter), member 10
  ENSP ID: ENSP00000478679
MAPTRAQALSRAP

SEQ ID NO: 80641 - protein, 98 aa, Homo sapiens
  Payload ID: 16074
  Gene Symbol: SLC2A11
  Gene Name: solute carrier family 2 (facilitated glucose transporter), member 11
  ENSP ID: ENSP00000255830
MRALRRLIQGRILLLTICAAGIGGTFQFGYNLSIINAPTLHIQEFTNETWQARTGEPLPDHLVLLMWSLIVSLYPLGGLFGALLAGPLAITLGRSPSW

SEQ ID NO: 80642 - protein, 499 aa, Homo sapiens
  Payload ID: 16074
  Gene Symbol: SLC2A11
  Gene Name: solute carrier family 2 (facilitated glucose transporter), member 11
  Uniprot ID: Q9BYW1
  ENSP ID: ENSP00000326748
MLHALLRSRMIQGRILLLTICAAGIGGTFQFGYNLSIINAPTLHIQEFTNETWQARTGEPLPDHLVLLMWSLIVSLYPLGGLFGALLAGPLAITLGRKKSLLVNNIFVVSAAILFGFSRKAGSFEMIMLGRLLVGVNAGVSMNIQPMYLGESAPKELRGAVAMSSAIFTALGIVMGQVVGLRELLGGPQAWPLLLASCLVPGALQLASLPLLPESPRYLLIDCGDTEACLAALRRLRGSGDLAGELEELEEERAACQGCRARRPWELFQHRALRRQVTSLVVLGSAMELCGNDSVYAYASSVFRKAGVPEAKIQYAIIGTGSCELLTAVVSCVVIERVGRRVLLIGGYSLMTCWGSIFTVALCLQSSFPWTLYLAMACIFAFILSFGIGPAGVTGILATELFDQMARPAACMVCGALMWIMLILVGLGFPFIMEALSHFLYVPFLGVCVCGAIYTGLFLPETKGKTFQEISKELHRLNFPRRAQGPTWRSLEVIQSTEL

SEQ ID NO: 80643 - protein, 496 aa, Homo sapiens
  Payload ID: 16074
  Gene Symbol: SLC2A11
  Gene Name: solute carrier family 2 (facilitated glucose transporter), member 11
  Uniprot ID: Q9BYW1
  ENSP ID: ENSP00000342542
MRALRRLIQGRILLLTICAAGIGGTFQFGYNLSIINAPTLHIQEFTNETWQARTGEPLPDHLVLLMWSLIVSLYPLGGLFGALLAGPLAITLGRKKSLLVNNIFVVSAAILFGFSRKAGSFEMIMLGRLLVGVNAGVSMNIQPMYLGESAPKELRGAVAMSSAIFTALGIVMGQVVGLRELLGGPQAWPLLLASCLVPGALQLASLPLLPESPRYLLIDCGDTEACLAALRRLRGSGDLAGELEELEEERAACQGCRARRPWELFQHRALRRQVTSLVVLGSAMELCGNDSVYAYASSVFRKAGVPEAKIQYAIIGTGSCELLTAVVSCVVIERVGRRVLLIGGYSLMTCWGSIFTVALCLQSSFPWTLYLAMACIFAFILSFGIGPAGVTGILATELFDQMARPAACMVCGALMWIMLILVGLGFPFIMEALSHFLYVPFLGVCVCGAIYTGLFLPETKGKTFQEISKELHRLNFPRRAQGPTWRSLEVIQSTEL

SEQ ID NO: 80644 - protein, 503 aa, Homo sapiens
  Payload ID: 16074
  Gene Symbol: SLC2A11
  Gene Name: solute carrier family 2 (facilitated glucose transporter), member 11
  Uniprot ID: Q9BYW1
  ENSP ID: ENSP00000381399
MEDELEPSLRPRTQIQGRILLLTICAAGIGGTFQFGYNLSIINAPTLHIQEFTNETWQARTGEPLPDHLVLLMWSLIVSLYPLGGLFGALLAGPLAITLGRKKSLLVNNIFVVSAAILFGFSRKAGSFEMIMLGRLLVGVNAGVSMNIQPMYLGESAPKELRGAVAMSSAIFTALGIVMGQVVGLRELLGGPQAWPLLLASCLVPGALQLASLPLLPESPRYLLIDCGDTEACLAALRRLRGSGDLAGELEELEEERAACQGCRARRPWELFQHRALRRQVTSLVVLGSAMELCGNDSVYAYASSVFRKAGVPEAKIQYAIIGTGSCELLTAVVSCVVIERVGRRVLLIGGYSLMTCWGSIFTVALCLQSSFPWTLYLAMACIFAFILSFGIGPAGVTGILATELFDQMARPAACMVCGALMWIMLILVGLGFPFIMEALSHFLYVPFLGVCVCGAIYTGLFLPETKGKTFQEISKELHRLNFPRRAQGPTWRSLEVIQSTEL

SEQ ID NO: 80645 - protein, 179 aa, Homo sapiens
  Payload ID: 16074
  Gene Symbol: SLC2A11
  Gene Name: solute carrier family 2 (facilitated glucose transporter), member 11
  ENSP ID: ENSP00000384987
MRALRRLIQGRILLLTICAAGIGGTFQFGYNLSIINAPTLHIQEFTNETWQARTGEPLPDHLVLLMWSLIVSLYPLGGLFGALLAGPLAITLGRKKSLLVNNIFVVSAAILFGFSRKAGSFEMIMLGRLLVGVNAGVSMNIQPMYLGESAPKELRGAVAMSSAIFTALGIVMGQVVGLR

SEQ ID NO: 80646 - protein, 222 aa, Homo sapiens
  Payload ID: 16074
  Gene Symbol: SLC2A11
  Gene Name: solute carrier family 2 (facilitated glucose transporter), member 11
  ENSP ID: ENSP00000385156
MFKNIVLIQGRILLLTICAAGIGGTFQFGYNLSIINAPTLHIQEFTNETWQARTGEPLPDHLVLLMWSLIVSLYPLGGLFGALLAGPLAITLGRKKSLLVNNIFVVSAAILFGFSRKAGSFEMIMLGRLLVGVNAGVSMNIQPMYLGESAPKELRGAVAMSSAIFTALGIVMGQVVGLRSGSKEQVFTEERVKIWAFKDKRVPVIPEKRGEGRAWTLGKRSC

SEQ ID NO: 80647 - protein, 104 aa, Homo sapiens
  Payload ID: 16074
  Gene Symbol: SLC2A11
  Gene Name: solute carrier family 2 (facilitated glucose transporter), member 11
  ENSP ID: ENSP00000385949
MRALRRLIQGRILLLTICAAGIGGTFQFGYNLSIINAPTLHIQEFTNETWQARTGEPLPDHLVLLMWSLIVSLYPLGGLFGALLAGPLAITLGRPTSKYRCIGN

SEQ ID NO: 80648 - protein, 48 aa, Homo sapiens
  Payload ID: 16074
  Gene Symbol: SLC2A11
  Gene Name: solute carrier family 2 (facilitated glucose transporter), member 11
  ENSP ID: ENSP00000398439
MEDELEPSLRPRTQIQGRILLLTICAAGIGGTFQFGYNLSIINAPTLI

SEQ ID NO: 80649 - protein, 113 aa, Homo sapiens
  Payload ID: 16074
  Gene Symbol: SLC2A11
  Gene Name: solute carrier family 2 (facilitated glucose transporter), member 11
  ENSP ID: ENSP00000398746
MLHALLRSRMIQGRILLLTICAAGIGGTFQFGYNLSIINAPTLHIQEFTNETWQARTGEPLPDHLVLLMWSLIVSLYPLGGLFGALLAGPLAITLGSLSFCVFHFPQGRSPSW

SEQ ID NO: 80650 - protein, 105 aa, Homo sapiens
  Payload ID: 16074
  Gene Symbol: SLC2A11
  Gene Name: solute carrier family 2 (facilitated glucose transporter), member 11
  ENSP ID: ENSP00000403654
MEDELEPSLRPRTQIQGRILLLTICAAGIGGTFQFGYNLSIINAPTLHIQEFTNETWQARTGEPLPDHLVLLMWSLIVSLYPLGGLFGALLAGPLAITLGRSPSW

SEQ ID NO: 80651 - protein, 535 aa, Homo sapiens
  Payload ID: 16074
  Gene Symbol: SLC2A11
  Gene Name: solute carrier family 2 (facilitated glucose transporter), member 11
  ENSP ID: ENSP00000479754
MEDELEPSLRPRTQIQGRILLLTICAAGIGGTFQFGYNLSIINAPTLHIQEFTNETWQARTGEPLPDHLVLLMWSLIVSLYPLGGLFGALLAGPLAITLGRKKSLLVNNIFVVSAAILFGFSRKAGSFEMIMLGRLLVGVNAGVSMNIQPMYLGESAPKELRGAVAMSSAIFTALGIVMGQVVGLRELLGGPQAWPLLLASCLVPGALQLASLPLLPESPRYLLIDCGDTEACLAALRRLRGSGDLAGELEELEEERAACQGCRARRPWELFQHRALRRQVTSLVVLGSAMELCGNDSVYAYASSVFRKAGVPEAKIQYAIIGTGSCELLTAVVSVAGVDEGWGVQAGLTSTSPPPRPRQSSFPWTLYLAMACIFAFILSFGIGPAGVTGILATELFDQMARPAACMVCGALMWIMLILVGLGFPFIMVLGSFLIRRRPCPTSSMSLSLVSVSVGPSTLACSFLRPKARPSKRSPRNYTDSTSPGGPRAPRGGAWRLSSQQNSSPKGVARAKASYCPVLCFLPGPWSSLPPAFLI

SEQ ID NO: 80652 - protein, 222 aa, Homo sapiens; identical to SEQ ID NO: 80646
  Payload ID: 16074
  Gene Symbol: SLC2A11
  Gene Name: solute carrier family 2 (facilitated glucose transporter), member 11
  ENSP ID: ENSP00000480019

SEQ ID NO: 80653 - protein, 503 aa, Homo sapiens; identical to SEQ ID NO: 80644
  Payload ID: 16074
  Gene Symbol: SLC2A11
  Gene Name: solute carrier family 2 (facilitated glucose transporter), member 11
  Uniprot ID: Q9BYW1
  ENSP ID: ENSP00000480839

SEQ ID NO: 80654 - protein, 496 aa, Homo sapiens; identical to SEQ ID NO: 80643
  Payload ID: 16074
  Gene Symbol: SLC2A11
  Gene Name: solute carrier family 2 (facilitated glucose transporter), member 11
  Uniprot ID: Q9BYW1
  ENSP ID: ENSP00000482495

SEQ ID NO: 80655 - protein, 535 aa, Homo sapiens; identical to SEQ ID NO: 80651
  Payload ID: 16074
  Gene Symbol: SLC2A11
  Gene Name: solute carrier family 2 (facilitated glucose transporter), member 11
  ENSP ID: ENSP00000483038

SEQ ID NO: 80656 - protein, 499 aa, Homo sapiens; identical to SEQ ID NO: 80642
  Payload ID: 16074
  Gene Symbol: SLC2A11
  Gene Name: solute carrier family 2 (facilitated glucose transporter), member 11
  Uniprot ID: Q9BYW1
  ENSP ID: ENSP00000483163

SEQ ID NO: 80657 - protein, 105 aa, Homo sapiens; identical to SEQ ID NO: 80650
  Payload ID: 16074
  Gene Symbol: SLC2A11
  Gene Name: solute carrier family 2 (facilitated glucose transporter), member 11
  ENSP ID: ENSP00000485995

SEQ ID NO: 80658 - protein, 179 aa, Homo sapiens; identical to SEQ ID NO: 80645
  Payload ID: 16074
  Gene Symbol: SLC2A11
  Gene Name: solute carrier family 2 (facilitated glucose transporter), member 11
  ENSP ID: ENSP00000486767

SEQ ID NO: 80659 - protein, 113 aa, Homo sapiens; identical to SEQ ID NO: 80649
  Payload ID: 16074
  Gene Symbol: SLC2A11
  Gene Name: solute carrier family 2 (facilitated glucose transporter), member 11
  ENSP ID: ENSP00000486841

SEQ ID NO: 80660 - protein, 48 aa, Homo sapiens; identical to SEQ ID NO: 80648
  Payload ID: 16074
  Gene Symbol: SLC2A11
  Gene Name: solute carrier family 2 (facilitated glucose transporter), member 11
  ENSP ID: ENSP00000486863

SEQ ID NO: 80661 - protein, 98 aa, Homo sapiens; identical to SEQ ID NO: 80641
  Payload ID: 16074
  Gene Symbol: SLC2A11
  Gene Name: solute carrier family 2 (facilitated glucose transporter), member 11
  ENSP ID: ENSP00000487395

SEQ ID NO: 80662 - protein, 617 aa, Homo sapiens
  Payload ID: 16075
  Gene Symbol: SLC2A12
  Gene Name: solute carrier family 2 (facilitated glucose transporter), member 12
  Uniprot ID: Q8TD20
  ENSP ID: ENSP00000275230
MVPVENTEGPSLLNQKGTAVETEGSGSRHPPWARGCGMFTFLSSVTAAVSGLLVGYELGIISGALLQIKTLLALSCHEQEMVVSSLVIGALLASLTGGVLIDRYGRRTAIILSSCLLGLGSLVLILSLSYTVLIVGRIAIGVSISLSSIATCVYIAEIAPQHRRGLLVSLNELMIVIGILSAYISNYAFANVFHGWKYMFGLVIPLGVLQAIAMYFLPPSPRFLVMKGQEGAASKVLGRLRALSDTTEELTVIKSSLKDEYQYSFWDLFRSKDNMRTRIMIGLTLVFFVQITGQPNILFYASTVLKSVGFQSNEAASLASTGVGVVKVISTIPATLLVDHVGSKTFLCIGSSVMAASLVTMGIVNLNIHMNFTHICRSHNSINQSLDESVIYGPGNLSTNNNTLRDHFKGISSHSRSSLMPLRNDVDKRGETTSASLLNAGLSHTEYQIVTDPGDVPAFLKWLSLASLLVYVAAFSIGLGPMPWLVLSEIFPGGIRGRAMALTSSMNWGINLLISLTFLTVTDLIGLPWVCFIYTIMSLASLLFVVMFIPETKGCSLEQISMELAKVNYVKNNICFMSHHQEELVPKQPQKRKPQEQLLECNKLCGRGQSRQLSPET

SEQ ID NO: 80663 - protein, 648 aa, Homo sapiens
  Payload ID: 16076
  Gene Symbol: SLC2A13
  Gene Name: solute carrier family 2 (facilitated glucose transporter), member 13
  Uniprot ID: Q96QE2
  ENSP ID: ENSP00000280871
MSRKASENVEYTLRSLSSLMGERRRKQPEPDAASAAGECSLLAAAESSTSLQSAGAGGGGVGDLERAARRQFQQDETPAFVYVVAVFSALGGFLFGYDTGVVSGAMLLLKRQLSLDALWQELLVSSTVGAAAVSALAGGALNGVFGRRAAILLASALFTAGSAVLAAANNKETLLAGRLVVGLGIGIASMTVPVYIAEVSPPNLRGRLVTINTLFITGGQFFASVVDGAFSYLQKDGWRYMLGLAAVPAVIQFFGFLFLPESPRWLIQKGQTQKARRILSQMRGNQTIDEEYDSIKNNIEEEEKEVGSAGPVICRMLSYPPTRRALIVGCGLQMFQQLSGINTIMYYSATILQMSGVEDDRLAIWLASVTAFTNFIFTLVGVWLVEKVGRRKLTFGSLAGTTVALIILALGFVLSAQVSPRITFKPIAPSGQNATCTRYSYCNECMLDPDCGFCYKMNKSTVIDSSCVPVNKASTNEAAWGRCENETKFKTEDIFWAYNFCPTPYSWTALLGLILYLVFFAPGMGPMPWTVNSEIYPLWARSTGNACSSGINWIFNVLVSLTFLHTAEYLTYYGAFFLYAGFAAVGLLFIYGCLPETKGKKLEEIESLFDNRLCTCGTSDSDEGRYIEYIRVKGSNYHLSDNDASDVE

SEQ ID NO: 80664 - protein, 357 aa, Homo sapiens
  Payload ID: 16076
  Gene Symbol: SLC2A13
  Gene Name: solute carrier family 2 (facilitated glucose transporter), member 13
  ENSP ID: ENSP00000370239
MSRKASENVEYTLRSLSSLMGERRRKQPEPDAASAAGECSLLAAAESSTSLQSAGAGGGGVGDLERAARRQFQQDETPAFVYVVAVFSALGGFLFGYDTGVVSGAMLLLKRQLSLDALWQELLVSSTVGAAAVSALAGGALNGVFGRRAAILLASALFTAGSAVLAAANNKETLLAGRLVVGLGIGIASMTVPVYIAEVSPPNLRGRLVTINTLFITGGQFFASVVDGAFSYLQKDGWRYMLGLAAVPAVIQFFGFLFLPESPRWLIQKGQTQKARRILSQMRGNQTIDEEYDSIKNNIEEEEKEVGSAGPVICRMLSYPPTRRALIVGCGLQMFQQLSGINTIMYVFLSGFLLKRL

SEQ ID NO: 80665 - protein, 497 aa, Homo sapiens
  Payload ID: 16077
  Gene Symbol: SLC2A14
  Gene Name: solute carrier family 2 (facilitated glucose transporter), member 14
  Uniprot ID: Q8TDB8
  ENSP ID: ENSP00000340450
MDNRQNVTPALIFAITVATIGSFQFGYNTGVINAPETIIKEFINKTLTDKANAPPSEVLLTNLWSLSVAIFSVGGMIGSFSVGLFVNRFGRRNSMLIVNLLAATGGCLMGLCKIAESVEMLILGRLVIGLFCGLCTGFVPMYIGEISPTALRGAFGTLNQLGIVIGILVAQIFGLELILGSEELWPVLLGFTILPAILQSAALPCCPESPRFLLINRKKEENATRILQRLWGTQDVSQDIQEMKDESARMSQEKQVTVLELFRVSSYRQPIIISIVLQLSQQLSGINAVFYYSTGIFKDAGVQQPIYATISAGVVNTIFTLLSLFLVERAGRRTLHMIGLGGMAFCSTLMTVSLLLKNHYNGMSFVCIGAILVFVACFEIGPGPIPWFIVAELFSQGPRPAAMAVAGCSNWTSNFLVGLLFPSAAYYLGAYVFIIFTGFLITFLAFTFFKVPETRGRTFEDITRAFEGQAHGADRSGKDGVMGMNSIEPAKETTTNV

SEQ ID NO: 80666 - protein, 520 aa, Homo sapiens
  Payload ID: 16077
  Gene Symbol: SLC2A14
  Gene Name: solute carrier family 2 (facilitated glucose transporter), member 14
  Uniprot ID: Q8TDB8
  ENSP ID: ENSP00000379834
MEFHNGGHVSGIGGFLVSLTSRMKPHTLAVTPALIFAITVATIGSFQFGYNTGVINAPETIIKEFINKTLTDKANAPPSEVLLTNLWSLSVAIFSVGGMIGSFSVGLFVNRFGRRNSMLIVNLLAATGGCLMGLCKIAESVEMLILGRLVIGLFCGLCTGFVPMYIGEISPTALRGAFGTLNQLGIVIGILVAQIFGLELILGSEELWPVLLGFTILPAILQSAALPCCPESPRFLLINRKKEENATRILQRLWGTQDVSQDIQEMKDESARMSQEKQVTVLELFRVSSYRQPIIISIVLQLSQQLSGINAVFYYSTGIFKDAGVQQPIYATISAGVVNTIFTLLSLFLVERAGRRTLHMIGLGGMAFCSTLMTVSLLLKNHYNGMSFVCIGAILVFVACFEIGPGPIPWFIVAELFSQGPRPAAMAVAGCSNWTSNFLVGLLFPSAAYYLGAYVFIIFTGFLITFLAFTFFKVPETRGRTFEDITRAFEGQAHGADRSGKDGVMGMNSIEPAKETTTNV

SEQ ID NO: 80667 - protein, 497 aa, Homo sapiens; identical to SEQ ID NO: 80665
  Payload ID: 16077
  Gene Symbol: SLC2A14
  Gene Name: solute carrier family 2 (facilitated glucose transporter), member 14
  Uniprot ID: Q8TDB8
  ENSP ID: ENSP00000407287

SEQ ID NO: 80668 - protein, 120 aa, Homo sapiens
  Payload ID: 16077
  Gene Symbol: SLC2A14
  Gene Name: solute carrier family 2 (facilitated glucose transporter), member 14
  ENSP ID: ENSP00000437653
MEFHNGGHVSGIGGFLVSLTSRMKPHTLAVTPALIFAITVATIGSFQFGYNTGVINAPETIIKEFINKTLTDKANAPPSEVLLTNLWSLSVAIFSVGGMIGSFSVGLFVNRFGRRNSMLI

SEQ ID NO: 80669 - protein, 152 aa, Homo sapiens
  Payload ID: 16077
  Gene Symbol: SLC2A14
  Gene Name: solute carrier family 2 (facilitated glucose transporter), member 14
  ENSP ID: ENSP00000438312
MDNRQNVTPALIFAITVATIGSFQFGYNTGVINAPETIIKEFINKTLTDKANAPPSEVLLTNLWSLSVAIFSVGGMIGSFSVGLFVNRFGRRNSMLIVNLLAATGGCLMGLCKIAESVEMLILGRLVIGLFCGLCTGFVPMYIGEISPTALR

SEQ ID NO: 80670 - protein, 161 aa, Homo sapiens
  Payload ID: 16077
  Gene Symbol: SLC2A14
  Gene Name: solute carrier family 2 (facilitated glucose transporter), member 14
  Uniprot ID: Q8TDB8
  ENSP ID: ENSP00000438484
MIGLGGMAFCSTLMTVSLLLKNHYNGMSFVCIGAILVFVACFEIGPGPIPWFIVAELFSQGPRPAAMAVAGCSNWTSNFLVGLLFPSAAYYLGAYVFIIFTGFLITFLAFTFFKVPETRGRTFEDITRAFEGQAHGADRSGKDGVMGMNSIEPAKETTTNV

SEQ ID NO: 80671 - protein, 22 aa, Homo sapiens
  Payload ID: 16077
  Gene Symbol: SLC2A14
  Gene Name: solute carrier family 2 (facilitated glucose transporter), member 14
  ENSP ID: ENSP00000438876
MDNRQNVTPALIFAITVATIGS

SEQ ID NO: 80672 - protein, 169 aa, Homo sapiens
  Payload ID: 16077
  Gene Symbol: SLC2A14
  Gene Name: solute carrier family 2 (facilitated glucose transporter), member 14
  ENSP ID: ENSP00000440043
MDNRQNVTPALIFAITVATIGSFQFGYNTGVINAPETIIKEFINKTLTDKANAPPSEVLLTNLWSLSVAIFSVGGMIGSFSVGLFVNRFGRRNSMLIVNLLAATGGCLMGLCKIAESVEMLILGRLVIGLFCGLCTGFVPMYIGEISPTALRGAFGTLNQLGIVIGILV

SEQ ID NO: 80673 - protein, 141 aa, Homo sapiens
  Payload ID: 16077
  Gene Symbol: SLC2A14
  Gene Name: solute carrier family 2 (facilitated glucose transporter), member 14
  ENSP ID: ENSP00000440044
MEFHNGGHVSGIGGFLVSLTSRMKPHTLAVTPALIFAITVATIGSFQFGYNTGVINAPETIIKEFINKTLTDKANAPPSEVLLTNLWSLSVAIFSVGGMIGSFSVGLFVNRFGRRNSMLIVNLLAATGGCLMGLCKIAESV

SEQ ID NO: 80674 - protein, 520 aa, Homo sapiens; identical to SEQ ID NO: 80666
  Payload ID: 16077
  Gene Symbol: SLC2A14
  Gene Name: solute carrier family 2 (facilitated glucose transporter), member 14
  Uniprot ID: Q8TDB8
  ENSP ID: ENSP00000440480

SEQ ID NO: 80675 - protein, 411 aa, Homo sapiens
  Payload ID: 16077
  Gene Symbol: SLC2A14
  Gene Name: solute carrier family 2 (facilitated glucose transporter), member 14
  Uniprot ID: Q8TDB8
  ENSP ID: ENSP00000440492
MLLRRRNSMLIVNLLAATGGCLMGLCKIAESVEMLILGRLVIGLFCGLCTGFVPMYIGEISPTALRGAFGTLNQLGIVIGILVAQIFGLELILGSEELWPVLLGFTILPAILQSAALPCCPESPRFLLINRKKEENATRILQRLWGTQDVSQDIQEMKDESARMSQEKQVTVLELFRVSSYRQPIIISIVLQLSQQLSGINAVFYYSTGIFKDAGVQQPIYATISAGVVNTIFTLLSLFLVERAGRRTLHMIGLGGMAFCSTLMTVSLLLKNHYNGMSFVCIGAILVFVACFEIGPGPIPWFIVAELFSQGPRPAAMAVAGCSNWTSNFLVGLLFPSAAYYLGAYVFIIFTGFLITFLAFTFFKVPETRGRTFEDITRAFEGQAHGADRSGKDGVMGMNSIEPAKETTTNV

SEQ ID NO: 80676 - protein, 38 aa, Homo sapiens
  Payload ID: 16077
  Gene Symbol: SLC2A14
  Gene Name: solute carrier family 2 (facilitated glucose transporter), member 14
  ENSP ID: ENSP00000440980
MDNRQNRQGLLVSPRLVQKGEIRTPGLKRSSRLDLQKC

SEQ ID NO: 80677 - protein, 84 aa, Homo sapiens
  Payload ID: 16077
  Gene Symbol: SLC2A14
  Gene Name: solute carrier family 2 (facilitated glucose transporter), member 14
  ENSP ID: ENSP00000442402
MDNRQNVTPALIFAITVATIGSFQFGYNTGVINAPETIIKEFINKTLTDKANAPPSEVLLTNLWSLSVAIFSVGGMIGSFSVGL

SEQ ID NO: 80678 - protein, 47 aa, Homo sapiens
  Payload ID: 16077
  Gene Symbol: SLC2A14
  Gene Name: solute carrier family 2 (facilitated glucose transporter), member 14
  ENSP ID: ENSP00000443076
MDNRQNVTPALIFAITVATIGSFQFGYNTGVINAPETIIKEFINKTL

SEQ ID NO: 80679 - protein, 141 aa, Homo sapiens
  Payload ID: 16077
  Gene Symbol: SLC2A14
  Gene Name: solute carrier family 2 (facilitated glucose transporter), member 14
  ENSP ID: ENSP00000443217
MDNRQNVTPALIFAITVATIGSFQFGYNTGVINAPETIIKEFINKTLTDKANAPPSEVLLTNLWSLSVAIFSVGGMIGSFSVGLFVNRFGRRNSMLIVNLLAATGGCLMGLCKIAESVEMLILGRLVIGLFCGLCTGFVPM

SEQ ID NO: 80680 - protein, 411 aa, Homo sapiens; identical to SEQ ID NO: 80675
  Payload ID: 16077
  Gene Symbol: SLC2A14
  Gene Name: solute carrier family 2 (facilitated glucose transporter), member 14
  Uniprot ID: Q8TDB8
  ENSP ID: ENSP00000443903

SEQ ID NO: 80681 - protein, 13 aa, Homo sapiens
  Payload ID: 16077
  Gene Symbol: SLC2A14
  Gene Name: solute carrier family 2 (facilitated glucose transporter), member 14
  ENSP ID: ENSP00000444692
MDNRQNRWSFTMV

SEQ ID NO: 80682 - protein, 535 aa, Homo sapiens
  Payload ID: 16077
  Gene Symbol: SLC2A14
  Gene Name: solute carrier family 2 (facilitated glucose transporter), member 14
  Uniprot ID: Q8TDB8
  ENSP ID: ENSP00000445929
MQRLQLLRVEVLLGVKQGDEMRHFFFSSQTSTLEKSQNGGVGEEVTPALIFAITVATIGSFQFGYNTGVINAPETIIKEFINKTLTDKANAPPSEVLLTNLWSLSVAIFSVGGMIGSFSVGLFVNRFGRRNSMLIVNLLAATGGCLMGLCKIAESVEMLILGRLVIGLFCGLCTGFVPMYIGEISPTALRGAFGTLNQLGIVIGILVAQIFGLELILGSEELWPVLLGFTILPAILQSAALPCCPESPRFLLINRKKEENATRILQRLWGTQDVSQDIQEMKDESARMSQEKQVTVLELFRVSSYRQPIIISIVLQLSQQLSGINAVFYYSTGIFKDAGVQQPIYATISAGVVNTIFTLLSLFLVERAGRRTLHMIGLGGMAFCSTLMTVSLLLKNHYNGMSFVCIGAILVFVACFEIGPGPIPWFIVAELFSQGPRPAAMAVAGCSNWTSNFLVGLLFPSAAYYLGAYVFIIFTGFLITFLAFTFFKVPETRGRTFEDITRAFEGQAHGADRSGKDGVMGMNSIEPAKETTTNV

SEQ ID NO: 80683 - protein, 520 aa, Homo sapiens; identical to SEQ ID NO: 80666
  Payload ID: 16077
  Gene Symbol: SLC2A14
  Gene Name: solute carrier family 2 (facilitated glucose transporter), member 14
  Uniprot ID: Q8TDB8
  ENSP ID: ENSP00000482927

SEQ ID NO: 80684 - protein, 524 aa, Homo sapiens
  Payload ID: 16078
  Gene Symbol: SLC2A2
  Gene Name: solute carrier family 2 (facilitated glucose transporter), member 2
  Uniprot ID: P11168
  ENSP ID: ENSP00000323568
MTEDKVTGTLVFTVITAVLGSFQFGYDIGVINAPQQVIISHYRHVLGVPLDDRKAINNYVINSTDELPTISYSMNPKPTPWAEEETVAAAQLITMLWSLSVSSFAVGGMTASFFGGWLGDTLGRIKAMLVANILSLVGALLMGFSKLGPSHILIIAGRSISGLYCGLISGLVPMYIGEIAPTALRGALGTFHQLAIVTGILISQIIGLEFILGNYDLWHILLGLSGVRAILQSLLLFFCPESPRYLYIKLDEEVKAKQSLKRLRGYDDVTKDINEMRKEREEASSEQKVSIIQLFTNSSYRQPILVALMLHVAQQFSGINGIFYYSTSIFQTAGISKPVYATIGVGAVNMVFTAVSVFLVEKAGRRSLFLIGMSGMFVCAIFMSVGLVLLNKFSWMSYVSMIAIFLFVSFFEIGPGPIPWFMVAEFFSQGPRPAALAIAAFSNWTCNFIVALCFQYIADFCGPYVFFLFAGVLLAFTLFTFFKVPETKGKSFEEIAAEFQKKSGSAHRPKAAVEMKFLGATETV

SEQ ID NO: 80685 - protein, 89 aa, Homo sapiens
  Payload ID: 16078
  Gene Symbol: SLC2A2
  Gene Name: solute carrier family 2 (facilitated glucose transporter), member 2
  ENSP ID: ENSP00000417918
MTEDKVTGTLVFTVITAVLGSFQFGYDIGVINAPQQNQSHVSSKHSVISWSSLDGVFKIGTISYTYNCWKKHIRTILWANFRPGSYVYR

SEQ ID NO: 80686 - protein, 135 aa, Homo sapiens
  Payload ID: 16078
  Gene Symbol: SLC2A2
  Gene Name: solute carrier family 2 (facilitated glucose transporter), member 2
  ENSP ID: ENSP00000418456
MTEDKVTGTLVFTVITAVLGSFQFGYDIGVINAPQQVIISHYRHVLGVPLDDRKAINNYVINSTDELPTISYSMNPKPTPWAEEETVAAAQLITMLWSLSVSSFAVGGMTASFFGGWLGDTLGRANFRPGSYVYR

SEQ ID NO: 80687 - protein, 103 aa, Homo sapiens
  Payload ID: 16078
  Gene Symbol: SLC2A2
  Gene Name: solute carrier family 2 (facilitated glucose transporter), member 2
  ENSP ID: ENSP00000418888
MYIGEIAPTALRGALGTFHQLAIVTGILISQIIGLEFILGNYDLWHILLGLSGVRAILQSLLLFFCPESPRYLYIKLDEEVKAKQSLKRLRGYDDVTKDINEM

SEQ ID NO: 80688 - protein, 496 aa, Homo sapiens
  Payload ID: 16079
  Gene Symbol: SLC2A3
  Gene Name: solute carrier family 2 (facilitated glucose transporter), member 3
  Uniprot ID: P11169
  ENSP ID: ENSP00000075120
MGTQKVTPALIFAITVATIGSFQFGYNTGVINAPEKIIKEFINKTLTDKGNAPPSEVLLTSLWSLSVAIFSVGGMIGSFSVGLFVNRFGRRNSMLIVNLLAVTGGCFMGLCKVAKSVEMLILGRLVIGLFCGLCTGFVPMYIGEISPTALRGAFGTLNQLGIVVGILVAQIFGLEFILGSEELWPLLLGFTILPAILQSAALPFCPESPRFLLINRKEEENAKQILQRLWGTQDVSQDIQEMKDESARMSQEKQVTVLELFRVSSYRQPIIISIVLQLSQQLSGINAVFYYSTGIFKDAGVQEPIYATIGAGVVNTIFTVVSLFLVERAGRRTLHMIGLGGMAFCSTLMTVSLLLKDNYNGMSFVCIGAILVFVAFFEIGPGPIPWFIVAELFSQGPRPAAMAVAGCSNWTSNFLVGLLFPSAAHYLGAYVFIIFTGFLITFLAFTFFKVPETRGRTFEDITRAFEGQAHGADRSGKDGVMEMNSIEPAKETTTNV

SEQ ID NO: 80689 - protein, 141 aa, Homo sapiens
  Payload ID: 16079
  Gene Symbol: SLC2A3
  Gene Name: solute carrier family 2 (facilitated glucose transporter), member 3
  ENSP ID: ENSP00000440750
MGTQKIIKEFINKTLTDKGNAPPSEVLLTSLWSLSVAIFSVGGMIGSFSVGLFVNRFGRRNSMLIVNLLAVTGGCFMGLCKVAKSVEMLILGRLVIGLFCGLCTGFVPMYIGEISPTALRGAFGTLNQLGIVVGILVAQIF

SEQ ID NO: 80690 - protein, 48 aa, Homo sapiens
  Payload ID: 16079
  Gene Symbol: SLC2A3
  Gene Name: solute carrier family 2 (facilitated glucose transporter), member 3
  ENSP ID: ENSP00000441496
MGTQKVTPALIFAITVATIGSFQFGYNTGVINAPEKSVLPPTLLFCRS

SEQ ID NO: 80691 - protein, 509 aa, Homo sapiens
  Payload ID: 16080
  Gene Symbol: SLC2A4
  Gene Name: solute carrier family 2 (facilitated glucose transporter), member 4
  Uniprot ID: P14672
  ENSP ID: ENSP00000320935
MPSGFQQIGSEDGEPPQQRVTGTLVLAVFSAVLGSLQFGYNIGVINAPQKVIEQSYNETWLGRQGPEGPSSIPPGTLTTLWALSVAIFSVGGMISSFLIGIISQWLGRKRAMLVNNVLAVLGGSLMGLANAAASYEMLILGRFLIGAYSGLTSGLVPMYVGEIAPTHLRGALGTLNQLAIVIGILIAQVLGLESLLGTASLWPLLLGLTVLPALLQLVLLPFCPESPRYLYIIQNLEGPARKSLKRLTGWADVSGVLAELKDEKRKLERERPLSLLQLLGSRTHRQPLIIAVVLQLSQQLSGINAVFYYSTSIFETAGVGQPAYATIGAGVVNTVFTLVSVLLVERAGRRTLHLLGLAGMCGCAILMTVALLLLERVPAMSYVSIVAIFGFVAFFEIGPGPIPWFIVAELFSQGPRPAAMAVAGFSNWTSNFIIGMGFQYVAEAMGPYVFLLFAVLLLGFFIFTFLRVPETRGRTFDQISAAFHRTPSLLEQEVKPSTELEYLGPDEND

SEQ ID NO: 80692 - protein, 451 aa, Homo sapiens
  Payload ID: 16080
  Gene Symbol: SLC2A4
  Gene Name: solute carrier family 2 (facilitated glucose transporter), member 4
  ENSP ID: ENSP00000396887
MDGEPPQQRVTGTLVLAVFSAVLGSLQFGYNIGVINAPQKVIEQSYNETWLGRQGPEGPSSIPPGTLTTLWALSVAIFSVGGMISSFLIGIISQWLGRKRAMLVNNVLAVLGGSLMGLANAAASYEMLILGRFLIGAYSGLTSGLVPMYVGEIAPTHLRGALGTLNQLAIVIGILIAQVLGLESLLGTASLWPLLLGLTVLPALLQLVLLPFCPESPRYLYIIQNLEGPARKSLKRLTGWADVSGVLAELKDEKRKLERERPLSLLQLLGSRTHRQPLIIAVVLQLSQQLSGINAVFYYSTSIFETAGVGQPAYATIGAGVVNTVFTLVSVLLVERAGRRTLHLLGLAGMCGCAILMTVALLLLERVPAMSYVSIVAIFGFVAFFEIGPGPIPWFIVAELFSQGPRPAAMAVAGFSNWTSNFIIGMGFQYVAVGPPAPASHTVGQRWASHS

SEQ ID NO: 80693 - protein, 219 aa, Homo sapiens
  Payload ID: 16080
  Gene Symbol: SLC2A4
  Gene Name: solute carrier family 2 (facilitated glucose transporter), member 4
  ENSP ID: ENSP00000459056
MPSGFQQIGSEDGEPPQQRVTGTLVLAVFSAVLGSLQFGYNIGVINAPQKVIEQSYNETWLGRQGPEGPSSIPPGTLTTLWALSVAIFSVGGMISSFLIGIISQWLGRKRAMLVNNVLAVLGGSLMGLANAAASYEMLILGRFLIGAYSGAGLGVPPGHCQPVATAPGPHSATCPPAAGPAALLSREPPLPLHHPESRGACQKESEAPDRLGRCFWSAG

SEQ ID NO: 80694 - protein, 461 aa, Homo sapiens
  Payload ID: 16080
  Gene Symbol: SLC2A4
  Gene Name: solute carrier family 2 (facilitated glucose transporter), member 4
  ENSP ID: ENSP00000459864
MPSGFQQIGSEDGEPPQQRVTGTLVLAVFSAVLGSLQFGYNIGVINAPQKVIEQSYNETWLGRQGPEGPSSIPPGTLTTLWALSVAIFSVGGMISSFLIGIISQWLGRKRAMLVNNVLAVLGGSLMGLANAAASYEMLILGRFLIGAYSGLTSGLVPMYVGEIAPTHLRGALGTLNQLAIVIGILIAQVLGLESLLGTASLWPLLLGLTVLPALLQLVLLPFCPESPRYLYIIQNLEGPARKSLKRLTGWADVSGVLAELKDEKRKLERERPLSLLQLLGSRTHRQPLIIAVVLQLSQQLSGINAVFYYSTSIFETAGVGQPAYATIGAGVVNTVFTLVSVLLVERAGRRTLHLLGLAGMCGCAILMTVALLLLERVPAMSYVSIVAIFGFVAFFEIGPGPIPWFIVAELFSQGPRPAAMAVAGFSNWTSNFIIGMGFQYVAVGPPAPASHTVGQRWASHS

SEQ ID NO: 80695 - protein, 415 aa, Homo sapiens
  Payload ID: 16080
  Gene Symbol: SLC2A4
  Gene Name: solute carrier family 2 (facilitated glucose transporter), member 4
  Uniprot ID: P14672
  ENSP ID: ENSP00000461086
MPSGFQQIGSEDGEPPQQRVTGTLVLAVFSAVLGSLQFGYNIGVINAPQKVIEQSYNETWLGRQGPEGPSSIPPGTLTTLWALSVAIFSVGGMISSFLIGIISQWLGRKRAMLVNNVLAVLGGSLMGLANAAASYEMLILGRFLIGAYSGLTSGLVPMYVGEIAPTHLRGALGTLNQLAIVIGILIAQVLGLESLLGTASLWPLLLGLTVLPALLQLVLLPFCPESPRYLYIIQNLEGPARKSLKRLTGWADVSGVLAELKDEKRKLERERPLSLLQLLGSRTHRQPLIIAVVLQLSQQLSGINAVFYYSTSIFETAGVGQPAYATIGAGVVNTVFTLVSVTAHLWNGPSHWLHLPGCPGGVVGGAGGAPDAPSPGPGGHVWLCHPDDCGSAPAGASSSHELRLHCGHLWLRGIF

SEQ ID NO: 80696 - protein, 445 aa, Homo sapiens
  Payload ID: 16081
  Gene Symbol: SLC2A6
  Gene Name: solute carrier family 2 (facilitated glucose transporter), member 6
  Uniprot ID: Q9UGQ3
  ENSP ID: ENSP00000360964
MQEPLLGAEGPDYDTFPEKPPPSPGDRARVGTLQNKRVFLATFAAVLGNFSFGYALVYTSPVIPALERSLDPDLHLTKSQASWFGSVFTLGAAAGGLSAMILNDLLGRKLSIMFSAVPSAAGYALMAGAHGLWMLLLGRTLTGFAGGLTAACIPVYVSEIAPPGVRGALGATPQLMAVFGSLSLYALGLLLPWRWLAVAGEAPVLIMILLLSFMPNSPRFLLSRGRDEEALRALAWLRGTDVDVHWEFEQIQDNVRRQSSRVSWAEARAPHVCRPITVALLMRLLQQLTGITPILVYLQSIFDSTAVLLPPKDDAAIVGAVRLLSVLIAALTMDLAGRKVLLFVSGYAVGWGPITWLLMSEVLPLRARGVASGLCVLASWLTAFVLTKSFLPVVSTFGLQVPFFFFAAICLVSLVFTGCCVPETKGRSLEQIESFFRTGRRSFLR

SEQ ID NO: 80697 - protein, 507 aa, Homo sapiens
  Payload ID: 16081
  Gene Symbol: SLC2A6
  Gene Name: solute carrier family 2 (facilitated glucose transporter), member 6
  Uniprot ID: Q9UGQ3
  ENSP ID: ENSP00000360966
MQEPLLGAEGPDYDTFPEKPPPSPGDRARVGTLQNKRVFLATFAAVLGNFSFGYALVYTSPVIPALERSLDPDLHLTKSQASWFGSVFTLGAAAGGLSAMILNDLLGRKLSIMFSAVPSAAGYALMAGAHGLWMLLLGRTLTGFAGGLTAACIPVYVSEIAPPGVRGALGATPQLMAVFGSLSLYALGLLLPWRWLAVAGEAPVLIMILLLSFMPNSPRFLLSRGRDEEALRALAWLRGTDVDVHWEFEQIQDNVRRQSSRVSWAEARAPHVCRPITVALLMRLLQQLTGITPILVYLQSIFDSTAVLLPPKDDAAIVGAVRLLSVLIAALTMDLAGRKVLLFVSAAIMFAANLTLGLYIHFGPRPLSPNSTAGLESESWGDLAQPLAAPAGYLTLVPLLATMLFIMGYAVGWGPITWLLMSEVLPLRARGVASGLCVLASWLTAFVLTKSFLPVVSTFGLQVPFFFFAAICLVSLVFTGCCVPETKGRSLEQIESFFRTGRRSFLR

SEQ ID NO: 80698 - protein, 146 aa, Homo sapiens
  Payload ID: 16081
  Gene Symbol: SLC2A6
  Gene Name: solute carrier family 2 (facilitated glucose transporter), member 6
  ENSP ID: ENSP00000398004
MILNDLLGRKLSIMFSAVPSAAGYALMAGAHGLWMLLLGRTLTGFAGGLTAACIPGLTLPSRPGLGTSIFSKTWCGGCVLQVYVSEIAPPGVRGALGATPQLMAVFGSLSLYALGKDEEALRALAWLRGTDVDVHWEFEQIQDNVR

SEQ ID NO: 80699 - protein, 219 aa, Homo sapiens
  Payload ID: 16081
  Gene Symbol: SLC2A6
  Gene Name: solute carrier family 2 (facilitated glucose transporter), member 6
  ENSP ID: ENSP00000405124
MQEPLLGAEGPDYDTFPEKPPPSPGDRARVGTLQNKRVFLATFAAVLGNFSFGYALVYTSPVIPALERSLDPDLHLTKSQASWFGSVFTLGAAAGGLSAMILNDLLGRKLSIMFSAVPSAAGYALMAGAHGLWMLLLGRTLTGFAGGLTAACIPVYVSEIAPPGVRGALGATPQLMAVFGSLSLYALGTKRPCGRWPGCVGRTSMSTGSSSRSRTTSGD

SEQ ID NO: 80700 - protein, 445 aa, Homo sapiens; identical to SEQ ID NO: 80696
  Payload ID: 16081
  Gene Symbol: SLC2A6
  Gene Name: Solute carrier family 2 (facilitated glucose transporter), member 6
  ENSP ID: ENSP00000486637

SEQ ID NO: 80701 - protein, 219 aa, Homo sapiens; identical to SEQ ID NO: 80699
  Payload ID: 16081
  Gene Symbol: SLC2A6
  Gene Name: Solute carrier family 2 (facilitated glucose transporter), member 6
  ENSP ID: ENSP00000486716

SEQ ID NO: 80702 - protein, 507 aa, Homo sapiens; identical to SEQ ID NO: 80697
  Payload ID: 16081
  Gene Symbol: SLC2A6
  Gene Name: Solute carrier family 2 (facilitated glucose transporter), member 6
  ENSP ID: ENSP00000487067

SEQ ID NO: 80703 - protein, 146 aa, Homo sapiens; identical to SEQ ID NO: 80698
  Payload ID: 16081
  Gene Symbol: SLC2A6
  Gene Name: Solute carrier family 2 (facilitated glucose transporter), member 6
  ENSP ID: ENSP00000487571

SEQ ID NO: 80704 - protein, 512 aa, Homo sapiens
  Payload ID: 16082
  Gene Symbol: SLC2A7
  Gene Name: solute carrier family 2 (facilitated glucose transporter), member 7
  Uniprot ID: Q6PXP3
  ENSP ID: ENSP00000383698
MENKEAGTPPPIPSREGRLQPTLLLATLSAAFGSAFQYGYNLSVVNTPHKVFKSFYNETYFERHATFMDGKLMLLLWSCTVSMFPLGGLLGSLLVGLLVDSCGRKGTLLINNIFAIIPAILMGVSKVAKAFELIVFSRVVLGVCAGISYSALPMYLGELAPKNLRGMVGTMTEVFVIVGVFLAQIFSLQAILGNPAGWPVLLALTGVPALLQLLTLPFFPESPRYSLIQKGDEATARQALRRLRGHTDMEAELEDMRAEARAERAEGHLSVLHLCALRSLRWQLLSIIVLMAGQQLSGINAINYYADTIYTSAGVEAAHSQYVTVGSGVVNIVMTITSAVLVERLGRRHLLLAGYGICGSACLVLTVVLLFQNRVPELSYLGIICVFAYIAGHSIGPSPVPSVVRTEIFLQSSRRAAFMVDGAVHWLTNFIIGFLFPSIQEAIGAYSFIIFAGICLLTAIYIYVVIPETKGKTFVEINRIFAKRNRVKLPEEKEETIDAGPPTASPAKETSF

SEQ ID NO: 80705 - protein, 214 aa, Homo sapiens
  Payload ID: 16083
  Gene Symbol: SLC2A8
  Gene Name: solute carrier family 2 (facilitated glucose transporter), member 8
  ENSP ID: ENSP00000362450
MAFQQLSGVNAVMFYAETIFEEAKFKDSSLASVVVGVIQVLFTAVAALIMDRAGRRLLLVLSGVVMVFSTSAFGAYFKLTQGGPGNSSHVAISAPVSAQPVDASVGLAWLAVGSMCLFIAGFAVGWGPIPWLLMSEIFPLHVKGVATGICVLTNWLMAFLVTKEFSSLMEVLRPYGAFWLASAFCIFSVLFTLFCVPETKGKTLEQITAHFEGR

SEQ ID NO: 80706 - protein, 411 aa, Homo sapiens
  Payload ID: 16083
  Gene Symbol: SLC2A8
  Gene Name: solute carrier family 2 (facilitated glucose transporter), member 8
  ENSP ID: ENSP00000362458
MTPEDPEETQPLLGPPGGSAPRGRRVFLAAFAAALGPLSFGFALGYSSPAIPSLQRAAPPAPRLDDAAASWFGAVVTLGAAAGGVLGGWLVDRAGRKLSLLLCSVPFVAGFAVITAAQDVWMLLGGRLLTGLACGVASLVAPVYISEIAYPAVRGLLGSCVQLMVVVGILLAYLAGWVLEWRWLAVLGCVPPSLMLLLMCFMPETPRFLLTQHRRQEAMAALRFLWGSEQGWEDPPIGAEQSFHLALLRQPGIYKPFIIGVSLMAFQQLSGVNAVMFYAETIFEEAKFKDSSLASVVVGVIQVLFTAVAALIMDRAGRRLLLVLSGVVMVFSTSAFGAYFKLTQGGPGNSSHVAISAPVSAQPVDASVGLAWLAVGSMCLFIAGGPQALWSLLACLRFLHLQCPFHFVLCP

SEQ ID NO: 80707 - protein, 477 aa, Homo sapiens
  Payload ID: 16083
  Gene Symbol: SLC2A8
  Gene Name: solute carrier family 2 (facilitated glucose transporter), member 8
  Uniprot ID: Q9NY64
  ENSP ID: ENSP00000362469
MTPEDPEETQPLLGPPGGSAPRGRRVFLAAFAAALGPLSFGFALGYSSPAIPSLQRAAPPAPRLDDAAASWFGAVVTLGAAAGGVLGGWLVDRAGRKLSLLLCSVPFVAGFAVITAAQDVWMLLGGRLLTGLACGVASLVAPVYISEIAYPAVRGLLGSCVQLMVVVGILLAYLAGWVLEWRWLAVLGCVPPSLMLLLMCFMPETPRFLLTQHRRQEAMAALRFLWGSEQGWEDPPIGAEQSFHLALLRQPGIYKPFIIGVSLMAFQQLSGVNAVMFYAETIFEEAKFKDSSLASVVVGVIQVLFTAVAALIMDRAGRRLLLVLSGVVMVFSTSAFGAYFKLTQGGPGNSSHVAISAPVSAQPVDASVGLAWLAVGSMCLFIAGFAVGWGPIPWLLMSEIFPLHVKGVATGICVLTNWLMAFLVTKEFSSLMEVLRPYGAFWLASAFCIFSVLFTLFCVPETKGKTLEQITAHFEGR

SEQ ID NO: 80708 - protein, 267 aa, Homo sapiens
  Payload ID: 16083
  Gene Symbol: SLC2A8
  Gene Name: solute carrier family 2 (facilitated glucose transporter), member 8
  ENSP ID: ENSP00000389070
MTCSLGKVYISEIAYPAVRGLLGSCVQLMVVVGILLAYLAGWVLEWRWLAVLGCVPPSLMLLLMCFMPETPRFLLTQHRRQEAMAALRFLWGSEQGWEDPPIGAEQSFHLALLRQPGIYKPFIIGVSLMAFQQLSGVNAVMFYAETIFEEAKFKDSSLASVVVGVIQVLFTAVAALIMDRAGRRLLLVLSGVVMVFSTSAFGAYFKLTQGGPGNSSHVAISAPVSAQPVDASVGLAWLAVGSMCLFIAGFAVGWGPIPWLLMSEIFP

SEQ ID NO: 80709 - protein, 276 aa, Homo sapiens
  Payload ID: 16083
  Gene Symbol: SLC2A8
  Gene Name: solute carrier family 2 (facilitated glucose transporter), member 8
  ENSP ID: ENSP00000391213
QLMVVVGILLAYLAGWVLEWRWLAVLGCVPPSLMLLLMCFMPETPRFLLTQHRRQEAMAALRFLWGSEQGWEDPPIGAEQSFHLALLRQPGIYKPFIIGVSLMAFQQLSGVNAVMFYAETIFEEAKFKDSSLASVVVGVIQVLFTAVAALIMDRAGRRLLLVLSGVVMVFSTSAFGAYFKLTQGGPGNSSHVAISAPVSAQPVDASVGLAWLAVGSMCLFIAGFAVGWGPIPWLLMSEIFPLHVKGVATGICVLTNWLMAFLVTKEFSSLMLLLLL

SEQ ID NO: 80710 - protein, 265 aa, Homo sapiens
  Payload ID: 16083
  Gene Symbol: SLC2A8
  Gene Name: solute carrier family 2 (facilitated glucose transporter), member 8
  ENSP ID: ENSP00000392434
MVVVGILLAYLAGWVLEWRWLAVLGCVPPSLMLLLMCFMPETPRFLLTQHRRQEAMAALRFLWGSEQGWEDPPIGAEQSFHLALLRQPGIYKPFIIGVSLMAFQQLSGVNAVMFYAETIFEEAKFKDSSLASVVVGVIQVLFTAVAALIMDRAGRRLLLVLSGVVMVFSTSAFGAYFKLTQGGPGNSSHVAISAPVSAQPVDASVGLAWLAVGSMCLFIAGFAVGWGPIPWLLMSEIFPLHVKGVATGICVLTNWLMAFLVTKEF

SEQ ID NO: 80711 - protein, 241 aa, Homo sapiens
  Payload ID: 16083
  Gene Symbol: SLC2A8
  Gene Name: solute carrier family 2 (facilitated glucose transporter), member 8
  ENSP ID: ENSP00000404893
MTCSLGKVYISEIAYPAVRGLLGSCVQLMVVVGILLAYLAGWVLEWRWLAVLGCVPPSLMLLLMCFMPETPRFLLTQHRRQEAMAALRFLWGSEQGWEDPPIGAEQQLSGVNAVMFYAETIFEEAKFKDSSLASVVVGVIQVLFTAVAALIMDRAGRRLLLVLSGVVMVFSTSAFGAYFKLTQGGPGNSSHVAISAPVSAQPVDASVGLAWLAVGSMCLFIAGFAVGWGPIPWLLMSEIFP

SEQ ID NO: 80712 - protein, 256 aa, Homo sapiens
  Payload ID: 16083
  Gene Symbol: SLC2A8
  Gene Name: solute carrier family 2 (facilitated glucose transporter), member 8
  ENSP ID: ENSP00000411726
MTPEDPEETQPLLGPPGGSAPRGRRVFLAAFAAALGPLSFGFALGYSSPAIPSLQRAAPPAPRLDDAAASWFGVYISEIAYPAVRGLLGSCVQLMVVVGILLAYLAGWVLEWRWLAVLGCVPPSLMLLLMCFMPETPRFLLTQHRRQEAMAALRFLWGSEQGWEDPPIGAEQSFHLALLRQPGIYKPFIIGVSLMAFQQLSGVNAVMFYAETIFEEAKFKDSSLASVVVGVIQVLFTAVAALIMDRAGRRLLLVLS

SEQ ID NO: 80713 - protein, 169 aa, Homo sapiens
  Payload ID: 16083
  Gene Symbol: SLC2A8
  Gene Name: solute carrier family 2 (facilitated glucose transporter), member 8
  ENSP ID: ENSP00000413973
  MOD_RES (1)..(1): Any amino acid
XGRRVFLAAFAAALGPLSFGFALGYSSPAIPSLQRAAPPAPRLDDAAASWFGVYISEIAYPAVRGLLGSCVQLMVVVGILLAYLAGWVLEWRWLAVLGCVPPSLMLLLMCFMPETPRFLLTQHRRQEAMAALRFLWGSEQGWEDPPIGAEQQLSGVNAVMFYAETIFEE

SEQ ID NO: 80714 - protein, 314 aa, Homo sapiens
  Payload ID: 16083
  Gene Symbol: SLC2A8
  Gene Name: solute carrier family 2 (facilitated glucose transporter), member 8
  ENSP ID: ENSP00000477568
MVVVGILLAYLAGWVLEWRWLAVLGCVPPSLMLLLMCFMPETPRFLLTQHRRQEAMAALRFLWGSEQGWEDPPIGAEQSFHLALLRQPGIYKPFIIGVSLMAFQQLSGVNAVMFYAETIFEEAKFKDSSLASVVVGVIQVLFTAVAALIMDRAGRRLLLVLSGVVMVFSTSAFGAYFKLTQGGPGNSSHVAISAPVSAQPVDASVGLAWLAVGSMCLFIAGFAVGWGPIPWLLMSEIFPLHVKGVATGICVLTNWLMAFLVTKEFSSLMEVLRPYGAFWLASAFCIFSVLFTLFCVPETKGKTLEQITAHFEGR

SEQ ID NO: 80715 - protein, 540 aa, Homo sapiens
  Payload ID: 16084
  Gene Symbol: SLC2A9
  Gene Name: solute carrier family 2 (facilitated glucose transporter), member 9
  Uniprot ID: Q9NRM0
  ENSP ID: ENSP00000264784
MARKQNRNSKELGLVPLTDDTSHAGPPGPGRALLECDHLRSGVPGGRRRKDWSCSLLVASLAGAFGSSFLYGYNLSVVNAPTPYIKAFYNESWERRHGRPIDPDTLTLLWSVTVSIFAIGGLVGTLIVKMIGKVLGRKHTLLANNGFAISAALLMACSLQAGAFEMLIVGRFIMGIDGGVALSVLPMYLSEISPKEIRGSLGQVTAIFICIGVFTGQLLGLPELLGKESTWPYLFGVIVVPAVVQLLSLPFLPDSPRYLLLEKHNEARAVKAFQTFLGKADVSQEVEEVLAESRVQRSIRLVSVLELLRAPYVRWQVVTVIVTMACYQLCGLNAIWFYTNSIFGKAGIPPAKIPYVTLSTGGIETLAAVFSGLVIEHLGRRPLLIGGFGLMGLFFGTLTITLTLQDHAPWVPYLSIVGILAIIASFCSGPGGIPFILTGEFFQQSQRPAAFIIAGTVNWLSNFAVGLLFPFIQKSLDTYCFLVFATICITGAIYLYFVLPETKNRTYAEISQAFSKRNKAYPPEEKIDSAVTDGKINGRP

SEQ ID NO: 80716 - protein, 511 aa, Homo sapiens
  Payload ID: 16084
  Gene Symbol: SLC2A9
  Gene Name: solute carrier family 2 (facilitated glucose transporter), member 9
  Uniprot ID: Q9NRM0
  ENSP ID: ENSP00000311383
MKLSKKDRGEDEESDSAKKKLDWSCSLLVASLAGAFGSSFLYGYNLSVVNAPTPYIKAFYNESWERRHGRPIDPDTLTLLWSVTVSIFAIGGLVGTLIVKMIGKVLGRKHTLLANNGFAISAALLMACSLQAGAFEMLIVGRFIMGIDGGVALSVLPMYLSEISPKEIRGSLGQVTAIFICIGVFTGQLLGLPELLGKESTWPYLFGVIVVPAVVQLLSLPFLPDSPRYLLLEKHNEARAVKAFQTFLGKADVSQEVEEVLAESRVQRSIRLVSVLELLRAPYVRWQVVTVIVTMACYQLCGLNAIWFYTNSIFGKAGIPPAKIPYVTLSTGGIETLAAVFSGLVIEHLGRRPLLIGGFGLMGLFFGTLTITLTLQDHAPWVPYLSIVGILAIIASFCSGPGGIPFILTGEFFQQSQRPAAFIIAGTVNWLSNFAVGLLFPFIQKSLDTYCFLVFATICITGAIYLYFVLPETKNRTYAEISQAFSKRNKAYPPEEKIDSAVTDGKINGRP

SEQ ID NO: 80717 - protein, 511 aa, Homo sapiens; identical to SEQ ID NO: 80716
  Payload ID: 16084
  Gene Symbol: SLC2A9
  Gene Name: solute carrier family 2 (facilitated glucose transporter), member 9
  Uniprot ID: Q9NRM0
  ENSP ID: ENSP00000422209

SEQ ID NO: 80718 - protein, 198 aa, Homo sapiens
  Payload ID: 16084
  Gene Symbol: SLC2A9
  Gene Name: solute carrier family 2 (facilitated glucose transporter), member 9
  ENSP ID: ENSP00000426800
MKLSKKDRGEDEESDSAKKKLDWSCSLLVASLAGAFGSSFLYGYNLSVVNAPTPYIKAFYNESWERRHGRPIDPDTLTLLWSVTVSIFAIGGLVGTLIVKMIGKVLGRKHTLLANNGFAISAALLMACSLQAGAFEMLIVGRFIMGIDGGVALSVLPMYLSEISPKEIRGSLGQVTAIFICIGVFTGQLLGLPELLGK

SEQ ID NO: 80719 - protein, 244 aa, Homo sapiens
  Payload ID: 16085
  Gene Symbol: SLC2A5
  Gene Name: solute carrier family 2 (facilitated glucose/fructose transporter), member 5
  Uniprot ID: P22732
  ENSP ID: ENSP00000366631
MEQQDQSMKEGRLTLVLALATLIAAFGSSFQYGYNVAAVNSPALLMQQFYNETYYGRTGEFMEDFPLTLLWSVTVSMFPFGGFIGSLLVGPLVNKFGRKGALLFNNIFSIVPAILMGCSRVATSFELIIISRLLVGICAGVSSNVVPMYLGELAPKNLRGALGVVPQLFITVGILVAQIFGLRNLLANVDGEFRTSREHPHPFTTTLGPLLVFQSHHHRTGLSADWSLLTGWMSLGGPSCPEPT

SEQ ID NO: 80720 - protein, 501 aa, Homo sapiens
  Payload ID: 16085
  Gene Symbol: SLC2A5
  Gene Name: solute carrier family 2 (facilitated glucose/fructose transporter), member 5
  Uniprot ID: P22732
  ENSP ID: ENSP00000366641
MEQQDQSMKEGRLTLVLALATLIAAFGSSFQYGYNVAAVNSPALLMQQFYNETYYGRTGEFMEDFPLTLLWSVTVSMFPFGGFIGSLLVGPLVNKFGRKGALLFNNIFSIVPAILMGCSRVATSFELIIISRLLVGICAGVSSNVVPMYLGELAPKNLRGALGVVPQLFITVGILVAQIFGLRNLLANVDGWPILLGLTGVPAALQLLLLPFFPESPRYLLIQKKDEAAAKKALQTLRGWDSVDREVAEIRQEDEAEKAAGFISVLKLFRMRSLRWQLLSIIVLMGGQQLSGVNAIYYYADQIYLSAGVPEEHVQYVTAGTGAVNVVMTFCAVFVVELLGRRLLLLLGFSICLIACCVLTAALALQDTVSWMPYISIVCVISYVIGHALGPSPIPALLITEIFLQSSRPSAFMVGGSVHWLSNFTVGLIFPFIQEGLGPYSFIVFAVICLLTTIYIFLIVPETKAKTFIEINQIFTKMNKVSEVYPEKEELKELPPVTSEQ

SEQ ID NO: 80721 - protein, 190 aa, Homo sapiens
  Payload ID: 16085
  Gene Symbol: SLC2A5
  Gene Name: solute carrier family 2 (facilitated glucose/fructose transporter), member 5
  ENSP ID: ENSP00000464880
MEQQDQSMKEGRLTLVLALATLIAAFGSSFQYGYNVAAVNSPALLMQQFYNETYYGRTGEFMEDFPLTLLWSVTVSMFPFGGFIGSLLVGPLVNKFGRKGALLFNNIFSIVPAILMGCSRVATSFELIIISRLLVGICAGVSSNVVPMYLGELAPKNLRGALGVVPQLFITVGILVAQIFGLRNLLANVD

SEQ ID NO: 80722 - protein, 81 aa, Homo sapiens
  Payload ID: 16085
  Gene Symbol: SLC2A5
  Gene Name: solute carrier family 2 (facilitated glucose/fructose transporter), member 5
  ENSP ID: ENSP00000465285
MEQQDQSMKEGRLTLVLALATLIAAFGSSFQYGYNVAAVNSPALLMQQFYNETYYGRTGEFMEDFPLTLLWSVTVSMFPFG

SEQ ID NO: 80723 - protein, 166 aa, Homo sapiens
  Payload ID: 16085
  Gene Symbol: SLC2A5
  Gene Name: solute carrier family 2 (facilitated glucose/fructose transporter), member 5
  ENSP ID: ENSP00000465382
MEQQDQSMKEGRLTLVLALATLIAAFGSSFQYGYNVAAVNSPALLMQQFYNETYYGRTGEFMEDFPLTLLWSVTVSMFPFGGFIGSLLVGPLVNKFGRKGALLFNNIFSIVPAILMGCSRVATSFELIIISRLLVGICAGVSSNVVPMYLGELAPKNLRGALGVVP

SEQ ID NO: 80724 - protein, 190 aa, Homo sapiens; identical to SEQ ID NO: 80721
  Payload ID: 16085
  Gene Symbol: SLC2A5
  Gene Name: solute carrier family 2 (facilitated glucose/fructose transporter), member 5
  ENSP ID: ENSP00000465507

SEQ ID NO: 80725 - protein, 190 aa, Homo sapiens; identical to SEQ ID NO: 80721
  Payload ID: 16085
  Gene Symbol: SLC2A5
  Gene Name: solute carrier family 2 (facilitated glucose/fructose transporter), member 5
  ENSP ID: ENSP00000467039

SEQ ID NO: 80726 - protein, 139 aa, Homo sapiens
  Payload ID: 16085
  Gene Symbol: SLC2A5
  Gene Name: solute carrier family 2 (facilitated glucose/fructose transporter), member 5
  ENSP ID: ENSP00000467840
MEQQDQSMKEGRLTLVLALATLIAAFGSSFQYGYNVAAVNSPALLMQQFYNETYYGRTGEFMEDFPLTLLWSVTVSMFPFGGFIGSLLVGPLVNKFGRKGALLFNNIFSIVPAILMGCSRVATSFELIIISRLLVGICA

SEQ ID NO: 80727 - protein, 190 aa, Homo sapiens; identical to SEQ ID NO: 80721
  Payload ID: 16085
  Gene Symbol: SLC2A5
  Gene Name: solute carrier family 2 (facilitated glucose/fructose transporter), member 5
  ENSP ID: ENSP00000468590

SEQ ID NO: 80728 - protein, 679 aa, Homo sapiens
  Payload ID: 16086
  Gene Symbol: SLC20A1
  Gene Name: solute carrier family 20 (phosphate transporter), member 1
  Uniprot ID: Q8WUM9
  ENSP ID: ENSP00000272542
MATLITSTTAATAASGPLVDYLWMLILGFIIAFVLAFSVGANDVANSFGTAVGSGVVTLKQACILASIFETVGSVLLGAKVSETIRKGLIDVEMYNSTQGLLMAGSVSAMFGSAVWQLVASFLKLPISGTHCIVGATIGFSLVAKGQEGVKWSELIKIVMSWFVSPLLSGIMSGILFFLVRAFILHKADPVPNGLRALPVFYACTVGINLFSIMYTGAPLLGFDKLPLWGTILISVGCAVFCALIVWFFVCPRMKRKIEREIKCSPSESPLMEKKNSLKEDHEETKLSVGDIENKHPVSEVGPATVPLQAVVEERTVSFKLGDLEEAPERERLPSVDLKEETSIDSTVNGAVQLPNGNLVQFSQAVSNQINSSGHYQYHTVHKDSGLYKELLHKLHLAKVGDCMGDSGDKPLRRNNSYTSYTMAICGMPLDSFRAKEGEQKGEEMEKLTWPNADSKKRIRMDSYTSYCNAVSDLHSASEIDMSVKAEMGLGDRKGSNGSLEEWYDQDKPEVSLLFQFLQILTACFGSFAHGGNDVSNAIGPLVALYLVYDTGDVSSKVATPIWLLLYGGVGICVGLWVWGRRVIQTMGKDLTPITPSSGFSIELASALTVVIASNIGLPISTTHCKVGSVVSVGWLRSKKAVDWRLFRNIFMAWFVTVPISGVISAAIMAIFRYVILRM

SEQ ID NO: 80729 - protein, 213 aa, Homo sapiens
  Payload ID: 16086
  Gene Symbol: SLC20A1
  Gene Name: solute carrier family 20 (phosphate transporter), member 1
  ENSP ID: ENSP00000390021
  MOD_RES (1)..(1): Any amino acid
XLFFLVRAFILHKADPVPNGLRALPVFYACTVGINLFSIMYTGAPLLGFDKLPLWGTILISVGCAVFCALIVWFFVCPRMKRKIERPATVPLQAVVEERTVSFKLGDLEEAPERERLPSVDLKEETSIDSTVNGAVQLPNGNLVQFSQAVSNQINSSGHYQYHTVHKDSGLYKELLHKLHLAKVGDCMGDSGDKPLRRNNSYTSYTMAICGMP

SEQ ID NO: 80730 - protein, 89 aa, Homo sapiens
  Payload ID: 16086
  Gene Symbol: SLC20A1
  Gene Name: solute carrier family 20 (phosphate transporter), member 1
  ENSP ID: ENSP00000392050
  MOD_RES (1)..(1): Any amino acid
XELIKIVMSWFVSPLLSGIMSGILFFLVRAFILHKADPVPNGLRALPVFYACTVGINLFSIMYTGAPWLKSPRRWLACAHFRRLQASVR

SEQ ID NO: 80731 - protein, 98 aa, Homo sapiens
  Payload ID: 16086
  Gene Symbol: SLC20A1
  Gene Name: solute carrier family 20 (phosphate transporter), member 1
  ENSP ID: ENSP00000403763
  MOD_RES (1)..(1): Any amino acid
XFFLVRAFILHKADPVPNGLRALPVFYACTVGINLFSIMYTGAPWLKSPRRWLACAHFRRLQASCWALTNFLCGVPSSSRWDVQFSVPLSSGSLYVPG

SEQ ID NO: 80732 - protein, 115 aa, Homo sapiens
  Payload ID: 16086
  Gene Symbol: SLC20A1
  Gene Name: solute carrier family 20 (phosphate transporter), member 1
  ENSP ID: ENSP00000413393
RAFILHKADPVPNGLRALPVFYACTVGINLFSIMYTGAPLLGFDKLPLWGTILISVGCAVFCALIVWFFVCPRMKRKIERCGGGENSLIQTWRFGGSSREREASQRGLERGNQHR

SEQ ID NO: 80733 - protein, 652 aa, Homo sapiens
  Payload ID: 16087
  Gene Symbol: SLC20A2
  Gene Name: solute carrier family 20 (phosphate transporter), member 2
  Uniprot ID: Q08357
  ENSP ID: ENSP00000340465
MAMDEYLWMVILGFIIAFILAFSVGANDVANSFGTAVGSGVVTLRQACILASIFETTGSVLLGAKVGETIRKGIIDVNLYNETVETLMAGEVSAMVGSAVWQLIASFLRLPISGTHCIVGSTIGFSLVAIGTKGVQWMELVKIVASWFISPLLSGFMSGLLFVLIRIFILKKEDPVPNGLRALPVFYAATIAINVFSIMYTGAPVLGLVLPMWAIALISFGVALLFAFFVWLFVCPWMRRKITGKLQKEGALSRVSDESLSKVQEAESPVFKELPGAKANDDSTIPLTGAAGETLGTSEGTSAGSHPRAAYGRALSMTHGSVKSPISNGTFGFDGHTRSDGHVYHTVHKDSGLYKDLLHKIHIDRGPEEKPAQESNYRLLRRNNSYTCYTAAICGLPVHATFRAADSSAPEDSEKLVGDTVSYSKKRLRYDSYSSYCNAVAEAEIEAEEGGVEMKLASELADPDQPREDPAEEEKEEKDAPEVHLLFHFLQVLTACFGSFAHGGNDVSNAIGPLVALWLIYKQGGVTQEAATPVWLLFYGGVGICTGLWVWGRRVIQTMGKDLTPITPSSGFTIELASAFTVVIASNIGLPVSTTHCKVGSVVAVGWIRSRKAVDWRLFRNIFVAWFVTVPVAGLFSAAVMALLMYGILPYV

SEQ ID NO: 80734 - protein, 70 aa, Homo sapiens
  Payload ID: 16087
  Gene Symbol: SLC20A2
  Gene Name: solute carrier family 20 (phosphate transporter), member 2
  ENSP ID: ENSP00000427756
MAMDEYLWMVILGFIIAFILAFSVGANDVANSFGTAVGSGVVTLRQACILASIFETTGSVLLGAKVGETI

SEQ ID NO: 80735 - protein, 47 aa, Homo sapiens
  Payload ID: 16087
  Gene Symbol: SLC20A2
  Gene Name: solute carrier family 20 (phosphate transporter), member 2
  ENSP ID: ENSP00000429299
MAMDEYLWMVILGFIIAFILAFSVGANDVANSFGTAVGSGVVTLRQA

SEQ ID NO: 80736 - protein, 652 aa, Homo sapiens; identical to SEQ ID NO: 80733
  Payload ID: 16087
  Gene Symbol: SLC20A2
  Gene Name: solute carrier family 20 (phosphate transporter), member 2
  Uniprot ID: Q08357
  ENSP ID: ENSP00000429712

SEQ ID NO: 80737 - protein, 652 aa, Homo sapiens; identical to SEQ ID NO: 80733
  Payload ID: 16087
  Gene Symbol: SLC20A2
  Gene Name: solute carrier family 20 (phosphate transporter), member 2
  Uniprot ID: Q08357
  ENSP ID: ENSP00000429754

SEQ ID NO: 80738 - protein, 105 aa, Homo sapiens
  Payload ID: 16087
  Gene Symbol: SLC20A2
  Gene Name: solute carrier family 20 (phosphate transporter), member 2
  ENSP ID: ENSP00000429989
MAMDEYLWMVILGFIIAFILAFSVGANDVANSFGTAVGSGVVTLRQACILASIFETTGSVLLGAKVGETIRKGIIDVNLYNETVETLMAGEVSAMVGRDDDTTDS

SEQ ID NO: 80739 - protein, 78 aa, Homo sapiens
  Payload ID: 16087
  Gene Symbol: SLC20A2
  Gene Name: solute carrier family 20 (phosphate transporter), member 2
  ENSP ID: ENSP00000430166
MAMDEYLWMVILGFIIAFILAFSVGANDVANSFGTAVGSGVVTLRQACILASIFETTGSVLLGAKVGETIRKGIIDVN

SEQ ID NO: 80740 - protein, 28 aa, Homo sapiens
  Payload ID: 16087
  Gene Symbol: SLC20A2
  Gene Name: solute carrier family 20 (phosphate transporter), member 2
  ENSP ID: ENSP00000430462
MAMDEYLWMVILGFIIAFILAFSVGAND

SEQ ID NO: 80741 - protein, 550 aa, Homo sapiens
  Payload ID: 16088
  Gene Symbol: SLC22A6
  Gene Name: solute carrier family 22 (organic anion transporter), member 6
  Uniprot ID: Q4U2R8
  ENSP ID: ENSP00000353597
MAFNDLLQQVGGVGRFQQIQVTLVVLPLLLMASHNTLQNFTAAIPTHHCRPPADANLSKNGGLEVWLPRDRQGQPESCLRFTSPQWGLPFLNGTEANGTGATEPCTDGWIYDNSTFPSTIVTEWDLVCSHRALRQLAQSLYMVGVLLGAMVFGYLADRLGRRKVLILNYLQTAVSGTCAAFAPNFPIYCAFRLLSGMALAGISLNCMTLNVEWMPIHTRACVGTLIGYVYSLGQFLLAGVAYAVPHWRHLQLLVSAPFFAFFIYSWFFIESARWHSSSGRLDLTLRALQRVARINGKREEGAKLSMEVLRASLQKELTMGKGQASAMELLRCPTLRHLFLCLSMLWFATSFAYYGLVMDLQGFGVSIYLIQVIFGAVDLPAKLVGFLVINSLGRRPAQMAALLLAGICILLNGVIPQDQSIVRTSLAVLGKGCLAASFNCIFLYTGELYPTMIRQTGMGMGSTMARVGSIVSPLVSMTAELYPSMPLFIYGAVPVAASAVTVLLPETLGQPLPDTVQDLESRKGKQTRQQQEHQKYMVPLQASAQEKNGL

SEQ ID NO: 80742 - protein, 563 aa, Homo sapiens
  Payload ID: 16088
  Gene Symbol: SLC22A6
  Gene Name: solute carrier family 22 (organic anion transporter), member 6
  Uniprot ID: Q4U2R8
  ENSP ID: ENSP00000367102
MAFNDLLQQVGGVGRFQQIQVTLVVLPLLLMASHNTLQNFTAAIPTHHCRPPADANLSKNGGLEVWLPRDRQGQPESCLRFTSPQWGLPFLNGTEANGTGATEPCTDGWIYDNSTFPSTIVTEWDLVCSHRALRQLAQSLYMVGVLLGAMVFGYLADRLGRRKVLILNYLQTAVSGTCAAFAPNFPIYCAFRLLSGMALAGISLNCMTLNVEWMPIHTRACVGTLIGYVYSLGQFLLAGVAYAVPHWRHLQLLVSAPFFAFFIYSWFFIESARWHSSSGRLDLTLRALQRVARINGKREEGAKLSMEVLRASLQKELTMGKGQASAMELLRCPTLRHLFLCLSMLWFATSFAYYGLVMDLQGFGVSIYLIQVIFGAVDLPAKLVGFLVINSLGRRPAQMAALLLAGICILLNGVIPQDQSIVRTSLAVLGKGCLAASFNCIFLYTGELYPTMIRQTGMGMGSTMARVGSIVSPLVSMTAELYPSMPLFIYGAVPVAASAVTVLLPETLGQPLPDTVQDLESRWAPTQKEAGIYPRKGKQTRQQQEHQKYMVPLQASAQEKNGL

SEQ ID NO: 80743 - protein, 506 aa, Homo sapiens
  Payload ID: 16088
  Gene Symbol: SLC22A6
  Gene Name: solute carrier family 22 (organic anion transporter), member 6
  Uniprot ID: Q4U2R8
  ENSP ID: ENSP00000396401
MAFNDLLQQVGGVGRFQQIQVTLVVLPLLLMASHNTLQNFTAAIPTHHCRPPADANLSKNGGLEVWLPRDRQGQPESCLRFTSPQWGLPFLNGTEANGTGATEPCTDGWIYDNSTFPSTIVTEWDLVCSHRALRQLAQSLYMVGVLLGAMVFGYLADRLGRRKVLILNYLQTAVSGTCAAFAPNFPIYCAFRLLSGMALAGISLNCMTLNVEWMPIHTRACVGTLIGYVYSLGQFLLAGVAYAVPHWRHLQLLVSAPFFAFFIYSWFFIESARWHSSSGRLDLTLRALQRVARINGKREEGAKLSMEVLRASLQKELTMGKGQASAMELLRCPTLRHLFLCLSMLWFATSFAYYGLVMDLQGFGVSIYLIQVIFGAVDLPAKLVGFLVINSLGRRPAQMAALLLAGICILLNGVIPQDQSIVRTSLAVLGKGCLAASFNCIFLYTGELYPTMIRAVTVLLPETLGQPLPDTVQDLESRKGKQTRQQQEHQKYMVPLQASAQEKNGL

SEQ ID NO: 80744 - protein, 519 aa, Homo sapiens
  Payload ID: 16088
  Gene Symbol: SLC22A6
  Gene Name: solute carrier family 22 (organic anion transporter), member 6
  Uniprot ID: Q4U2R8
  ENSP ID: ENSP00000404441
MAFNDLLQQVGGVGRFQQIQVTLVVLPLLLMASHNTLQNFTAAIPTHHCRPPADANLSKNGGLEVWLPRDRQGQPESCLRFTSPQWGLPFLNGTEANGTGATEPCTDGWIYDNSTFPSTIVTEWDLVCSHRALRQLAQSLYMVGVLLGAMVFGYLADRLGRRKVLILNYLQTAVSGTCAAFAPNFPIYCAFRLLSGMALAGISLNCMTLNVEWMPIHTRACVGTLIGYVYSLGQFLLAGVAYAVPHWRHLQLLVSAPFFAFFIYSWFFIESARWHSSSGRLDLTLRALQRVARINGKREEGAKLSMEVLRASLQKELTMGKGQASAMELLRCPTLRHLFLCLSMLWFATSFAYYGLVMDLQGFGVSIYLIQVIFGAVDLPAKLVGFLVINSLGRRPAQMAALLLAGICILLNGVIPQDQSIVRTSLAVLGKGCLAASFNCIFLYTGELYPTMIRAVTVLLPETLGQPLPDTVQDLESRWAPTQKEAGIYPRKGKQTRQQQEHQKYMVPLQASAQEKNGL

SEQ ID NO: 80745 - protein, 261 aa, Homo sapiens
  Payload ID: 16088
  Gene Symbol: SLC22A6
  Gene Name: solute carrier family 22 (organic anion transporter), member 6
  ENSP ID: ENSP00000445946
MAFNDLLQQVGGVGRFQQIQVTLVVLPLLLMASHNTLQNFTAAIPTHHCRPPADANLSKNGGLEVWLPRDRQGQPESCLRFTSPQWGLPFLNGTEANGTGATEPCTDGWIYDNSTFPSTIVTEGPTPAGPVLVHGGGAARSHGVRLPCRQARPPEGTHLELPADSCVRDLRSLRTQLPHLLRLPAPLGHGSGWHLPQLHDTECGVDAHSHTGLRGHLDWLCLQPGPVPPGWCGLRCAPLAPPAATGLCAFFCLLHLLLVLH

SEQ ID NO: 80746 - protein, 539 aa, Homo sapiens
  Payload ID: 16089
  Gene Symbol: SLC22A7
  Gene Name: solute carrier family 22 (organic anion transporter), member 7
  Uniprot ID: Q9Y694
  ENSP ID: ENSP00000361655
MGFEELLEQVGGFGPFQLRNVALLALPRVLLPLHFLLPIFLAAVPAHRCALPGAPANFSHQDVWLEAHLPREPDGTLSSCLRFAYPQALPNTTLGEERQSRGELEDEPATVPCSQGWEYDHSEFSSTIATEWDLVCEQKGLNRAASTFFFAGVLVGAVAFGYLSDRFGRRRLLLVAYVSTLVLGLASAASVSYVMFAITRTLTGSALAGFTIIVMPLELEWLDVEHRTVAGVLSSTFWTGGVMLLALVGYLIRDWRWLLLAVTLPCAPGILSLWWVPESARWLLTQGHVKEAHRYLLHCARLNGRPVCEDSFSQEAVSKVAAGERVVRRPSYLDLFRTPRLRHISLCCVVVWFGVNFSYYGLSLDVSGLGLNVYQTQLLFGAVELPSKLLVYLSVRYAGRRLTQAGTLLGTALAFGTRLLVSSDMKSWSTVLAVMGKAFSEAAFTTAYLFTSELYPTVLRQTGMGLTALVGRLGGSLAPLAALLDGVWLSLPKLTYGGIALLAAGTALLLPETRQAQLPETIQDVERKRCVHRTVSVYV

SEQ ID NO: 80747 - protein, 548 aa, Homo sapiens
  Payload ID: 16089
  Gene Symbol: SLC22A7
  Gene Name: solute carrier family 22 (organic anion transporter), member 7
  Uniprot ID: Q9Y694
  ENSP ID: ENSP00000361666
MGFEELLEQVGGFGPFQLRNVALLALPRVLLPLHFLLPIFLAAVPAHRCALPGAPANFSHQDVWLEAHLPREPDGTLSSCLRFAYPQALPNTTLGEERQSRGELEDEPATVPCSQGWEYDHSEFSSTIATESQWDLVCEQKGLNRAASTFFFAGVLVGAVAFGYLSDRFGRRRLLLVAYVSTLVLGLASAASVSYVMFAITRTLTGSALAGFTIIVMPLELEWLDVEHRTVAGVLSSTFWTGGVMLLALVGYLIRDWRWLLLAVTLPCAPGILSLWWVPESARWLLTQGHVKEAHRYLLHCARLNGRPVCEDSFSQEAVSKVAAGERVVRRPSYLDLFRTPRLRHISLCCVVVWFGVNFSYYGLSLDVSGLGLNVYQTQLLFGAVELPSKLLVYLSVRYAGRRLTQAGTLLGTALAFGTRLLVSSDMKSWSTVLAVMGKAFSEAAFTTAYLFTSELYPTVLRQTGMGLTALVGRLGGSLAPLAALLDGVWLSLPKLTYGGIALLAAGTALLLPETRQAQLPETIQDVERKSAPTSLQEEEMPMKQVQN

SEQ ID NO: 80748 - protein, 546 aa, Homo sapiens
  Payload ID: 16089
  Gene Symbol: SLC22A7
  Gene Name: solute carrier family 22 (organic anion transporter), member 7
  Uniprot ID: Q9Y694
  ENSP ID: ENSP00000361670
MGFEELLEQVGGFGPFQLRNVALLALPRVLLPLHFLLPIFLAAVPAHRCALPGAPANFSHQDVWLEAHLPREPDGTLSSCLRFAYPQALPNTTLGEERQSRGELEDEPATVPCSQGWEYDHSEFSSTIATEWDLVCEQKGLNRAASTFFFAGVLVGAVAFGYLSDRFGRRRLLLVAYVSTLVLGLASAASVSYVMFAITRTLTGSALAGFTIIVMPLELEWLDVEHRTVAGVLSSTFWTGGVMLLALVGYLIRDWRWLLLAVTLPCAPGILSLWWVPESARWLLTQGHVKEAHRYLLHCARLNGRPVCEDSFSQEAVSKVAAGERVVRRPSYLDLFRTPRLRHISLCCVVVWFGVNFSYYGLSLDVSGLGLNVYQTQLLFGAVELPSKLLVYLSVRYAGRRLTQAGTLLGTALAFGTRLLVSSDMKSWSTVLAVMGKAFSEAAFTTAYLFTSELYPTVLRQTGMGLTALVGRLGGSLAPLAALLDGVWLSLPKLTYGGIALLAAGTALLLPETRQAQLPETIQDVERKSAPTSLQEEEMPMKQVQN

SEQ ID NO: 80749 - protein, 211 aa, Homo sapiens
  Payload ID: 16089
  Gene Symbol: SLC22A7
  Gene Name: solute carrier family 22 (organic anion transporter), member 7
  ENSP ID: ENSP00000393836
MLQPHLLPYQAVSKVAAGERVVRRPSYLDLFRTPRLRHISLCCVVVWFGVNFSYYGLSLDVSGLGLNVYQTQLLFGAVELPSKLLVYLSVRYAGRRLTQAGTLLGTALAFGTRLLVSSDMKSWSTVLAVMGKAFSEAAFTTAYLFTSELYPTVLRQTGMGLTALVGRLGGSLAPLAALLDGVWLSLPKLTYGGIALLAAGTALLLPETRQA

SEQ ID NO: 80750 - protein, 278 aa, Homo sapiens
  Payload ID: 16089
  Gene Symbol: SLC22A7
  Gene Name: solute carrier family 22 (organic anion transporter), member 7
  ENSP ID: ENSP00000411818
MGFEELLEQVGGFGPFQLRNVALLALPRVLLPLHFLLPIFLAAVPAHRCALPGAPANFSHQDVWLEAHLPREPDGTLSSCLRFAYPQALPNTTLGEERQSRGELEDEPATVPCSQGWEYDHSEFSSTIATESQVGIYIIHLEVECRWRQSPWEAAGRGLPWEEAEAAGLGRDKVSYSPSWRESLGGLLSGMEWDLVCEQKGLNRAASTFFFAGVLVGAVAFGYLSDRFGRRRLLLVAYVSTLVLGLASAASVSYVMFAITRTLTGSALAGFTIIVMPL

SEQ ID NO: 80751 - protein, 147 aa, Homo sapiens
  Payload ID: 16089
  Gene Symbol: SLC22A7
  Gene Name: solute carrier family 22 (organic anion transporter), member 7
  ENSP ID: ENSP00000416052
MEWDLVCEQKGLNRAASTFFFAGVLVGAVAFGYLSDRFGRRRLLLVAYVSTLVLGLASAASVSYVMFAITRTLTGSALAGFTIIVMPLGEAELEWLDVEHRTVAGVLSSTFWTGGVMLLALVGYLIRDWRWLLLAVTLPCAPGILSL

SEQ ID NO: 80752 - protein, 235 aa, Homo sapiens
  Payload ID: 16089
  Gene Symbol: SLC22A7
  Gene Name: solute carrier family 22 (organic anion transporter), member 7
  ENSP ID: ENSP00000434707
MGFEELLEQVGGFGPFQLRNVALLALPRVLLPLHFLLPIFLAAVPAHRCALPGAPANFSHQDVWLEAHLPREPDGTLSSCLRFAYPQALPNTTLGEERQSRGELEDEPATVPCSQGWEYDHSEFSSTIATESQVGIYIIHLEVECRWRQSPWEAAGRGLPWEEAEAAGLGRDKVSYSPSWRESLGGLLSGMEVPEWQSSPQKAPGSGEEELVPAGEGLMFIGGPFLPVLAVGSGV

SEQ ID NO: 80753 - protein, 533 aa, Homo sapiens
  Payload ID: 16090
  Gene Symbol: SLC22A8
  Gene Name: solute carrier family 22 (organic anion transporter), member 8
  ENSP ID: ENSP00000311463
MTFSEILDRVGSMGHFQFLHVAILGLPILNMANHNLLQIFTAATPVHHCRPPHNASTGPWVLPMGPNGKPERCLRFVHPPNASLPNDTQRAMEPCLDGWVYNSTKDSIVTEWDLVCNSNKLKEMAQSIFMAGILIGGLVLGDLSDRFGRRPILTCSYLLLAASGSGAAFSPTFPIYMVFRFLCGFGISGITLSTVILNVEWVPTRMRAIMSTALGYCYTFGQFILPGLAYAIPQWRWLQLTVSIPFFVFFLSSWWTPESIRWLVLSGKSSKALKILRRVAVFNGKKEEGERLSLEELKLNLQKEISLAKAKYTASDLFRIPMLRRMTFCLSLAWFATGFAYYSLAMGVEEFGVNLYILQIIFGGVDVPAKFITILSLSYLGRHTTQAAALLLAGGAILALTFVPLDLQTVRTVLAVFGKGCLSSSFSCLFLYTSELYPTVIRQTGMGVSNLWTRVGSMVSPLVKITGEVQPFIPNIIYGITALLGGSAALFLPETLNQPLPETIEDLENWSVTASGPISAPPWGSRSGPRAFP

SEQ ID NO: 80754 - protein, 542 aa, Homo sapiens
  Payload ID: 16090
  Gene Symbol: SLC22A8
  Gene Name: solute carrier family 22 (organic anion transporter), member 8
  Uniprot ID: Q8TCC7
  ENSP ID: ENSP00000337335
MTFSEILDRVGSMGHFQFLHVAILGLPILNMANHNLLQIFTAATPVHHCRPPHNASTGPWVLPMGPNGKPERCLRFVHPPNASLPNDTQRAMEPCLDGWVYNSTKDSIVTEWDLVCNSNKLKEMAQSIFMAGILIGGLVLGDLSDRFGRRPILTCSYLLLAASGSGAAFSPTFPIYMVFRFLCGFGISGITLSTVILNVEWVPTRMRAIMSTALGYCYTFGQFILPGLAYAIPQWRWLQLTVSIPFFVFFLSSWWTPESIRWLVLSGKSSKALKILRRVAVFNGKKEEGERLSLEELKLNLQKEISLAKAKYTASDLFRIPMLRRMTFCLSLAWFATGFAYYSLAMGVEEFGVNLYILQIIFGGVDVPAKFITILSLSYLGRHTTQAAALLLAGGAILALTFVPLDLQTVRTVLAVFGKGCLSSSFSCLFLYTSELYPTVIRQTGMGVSNLWTRVGSMVSPLVKITGEVQPFIPNIIYGITALLGGSAALFLPETLNQPLPETIEDLENWSLRAKKPKQEPEVEKASQRIPLQPHGPGLGSS

SEQ ID NO: 80755 - protein, 542 aa, Homo sapiens; identical to SEQ ID NO: 80754
  Payload ID: 16090
  Gene Symbol: SLC22A8
  Gene Name: solute carrier family 22 (organic anion transporter), member 8
  Uniprot ID: Q8TCC7
  ENSP ID: ENSP00000398548

SEQ ID NO: 80756 - protein, 451 aa, Homo sapiens
  Payload ID: 16090
  Gene Symbol: SLC22A8
  Gene Name: solute carrier family 22 (organic anion transporter), member 8
  Uniprot ID: Q8TCC7
  ENSP ID: ENSP00000441658
MEPCLDGWVYNSTKDSIVTEWDLVCNSNKLKEMAQSIFMAGILIGGLVLGDLSDRFGRRPILTCSYLLLAASGSGAAFSPTFPIYMVFRFLCGFGISGITLSTVILNVEWVPTRMRAIMSTALGYCYTFGQFILPGLAYAIPQWRWLQLTVSIPFFVFFLSSWWTPESIRWLVLSGKSSKALKILRRVAVFNGKKEEGERLSLEELKLNLQKEISLAKAKYTASDLFRIPMLRRMTFCLSLAWFATGFAYYSLAMGVEEFGVNLYILQIIFGGVDVPAKFITILSLSYLGRHTTQAAALLLAGGAILALTFVPLDLQTVRTVLAVFGKGCLSSSFSCLFLYTSELYPTVIRQTGMGVSNLWTRVGSMVSPLVKITGEVQPFIPNIIYGITALLGGSAALFLPETLNQPLPETIEDLENWSLRAKKPKQEPEVEKASQRIPLQPHGPGLGSS

SEQ ID NO: 80757 - protein, 419 aa, Homo sapiens
  Payload ID: 16090
  Gene Symbol: SLC22A8
  Gene Name: solute carrier family 22 (organic anion transporter), member 8
  Uniprot ID: Q8TCC7
  ENSP ID: ENSP00000443368
MAQSIFMAGILIGGLVLGDLSDRFGRRPILTCSYLLLAASGSGAAFSPTFPIYMVFRFLCGFGISGITLSTVILNVEWVPTRMRAIMSTALGYCYTFGQFILPGLAYAIPQWRWLQLTVSIPFFVFFLSSWWTPESIRWLVLSGKSSKALKILRRVAVFNGKKEEGERLSLEELKLNLQKEISLAKAKYTASDLFRIPMLRRMTFCLSLAWFATGFAYYSLAMGVEEFGVNLYILQIIFGGVDVPAKFITILSLSYLGRHTTQAAALLLAGGAILALTFVPLDLQTVRTVLAVFGKGCLSSSFSCLFLYTSELYPTVIRQTGMGVSNLWTRVGSMVSPLVKITGEVQPFIPNIIYGITALLGGSAALFLPETLNQPLPETIEDLENWSLRAKKPKQEPEVEKASQRIPLQPHGPGLGSS

SEQ ID NO: 80758 - protein, 553 aa, Homo sapiens
  Payload ID: 16091
  Gene Symbol: SLC22A9
  Gene Name: solute carrier family 22 (organic anion transporter), member 9
  Uniprot ID: Q8IVM8
  ENSP ID: ENSP00000279178
MAFQDLLGHAGDLWRFQILQTVFLSIFAVATYLHFMLENFTAFIPGHRCWVHILDNDTVSDNDTGALSQDALLRISIPLDSNMRPEKCRRFVHPQWQLLHLNGTFPNTSDADMEPCVDGWVYDRISFSSTIVTEWDLVCDSQSLTSVAKFVFMAGMMVGGILGGHLSDRFGRRFVLRWCYLQVAIVGTCAALAPTFLIYCSLRFLSGIAAMSLITNTIMLIAEWATHRFQAMGITLGMCPSGIAFMTLAGLAFAIRDWHILQLVVSVPYFVIFLTSSWLLESARWLIINNKPEEGLKELRKAAHRSGMKNARDTLTLEILKSTMKKELEAAQKKKPSLCEMLHMPNICKRISLLSFTRFANFMAYFGLNLHVQHLGNNVFLLQTLFGAVILLANCVAPWALKYMNRRASQMLLMFLLAICLLAIIFVPQEMQTLREVLATLGLGASALANTLAFAHGNEVIPTIIRARAMGINATFANIAGALAPLMMILSVYSPPLPWIIYGVFPFISGFAFLLLPETRNKPLFDTIQDEKNERKDPREPKQEDPRVEVTQF

SEQ ID NO: 80759 - protein, 238 aa, Homo sapiens
  Payload ID: 16091
  Gene Symbol: SLC22A9
  Gene Name: solute carrier family 22 (organic anion transporter), member 9
  Uniprot ID: Q8IVM8
  ENSP ID: ENSP00000440206
MAFQDLLGHAGDLWRFQILQTVFLSIFAVATYLHFMLENFTAFIPGHRCWVHILDNDTVSDNDTGALSQDALLRISIPLDSNMRPEKCRRFVHPQWQLLHLNGTFPNTSDADMEPCVDGWVYDRISFSSTIVTEWDLVCDSQSLTSVAKFVFMAGMMVGGILGGHLSDSSRVGNTQIPGHGNYIGNVPFWYCIYDPGRPGFCHSRLAYPPAGGVCTILCDLSDLKLAARVCSVAHYQQ

SEQ ID NO: 80760 - protein, 550 aa, Homo sapiens
  Payload ID: 16092
  Gene Symbol: SLC22A11
  Gene Name: solute carrier family 22 (organic anion/urate transporter), member 11
  Uniprot ID: Q9NSA0
  ENSP ID: ENSP00000301891
MAFSKLLEQAGGVGLFQTLQVLTFILPCLMIPSQMLLENFSAAIPGHRCWTHMLDNGSAVSTNMTPKALLTISIPPGPNQGPHQCRRFRQPQWQLLDPNATATSWSEADTEPCVDGWVYDRSVFTSTIVAKWDLVCSSQGLKPLSQSIFMSGILVGSFIWGLLSYRFGRKPMLSWCCLQLAVAGTSTIFAPTFVIYCGLRFVAAFGMAGIFLSSLTLMVEWTTTSRRAVTMTVVGCAFSAGQAALGGLAFALRDWRTLQLAASVPFFAISLISWWLPESARWLIIKGKPDQALQELRKVARINGHKEAKNLTIEVLMSSVKEEVASAKEPRSVLDLFCVPVLRWRSCAMLVVNFSLLISYYGLVFDLQSLGRDIFLLQALFGAVDFLGRATTALLLSFLGRRTIQAGSQAMAGLAILANMLVPQDLQTLRVVFAVLGKGCFGISLTCLTIYKAELFPTPVRMTADGILHTVGRLGAMMGPLILMSRQALPLLPPLLYGVISIASSLVVLFFLPETQGLPLPDTIQDLESQKSTAAQGNRQEAVTVESTSL

SEQ ID NO: 80761 - protein, 481 aa, Homo sapiens
  Payload ID: 16092
  Gene Symbol: SLC22A11
  Gene Name: solute carrier family 22 (organic anion/urate transporter), member 11
  ENSP ID: ENSP00000366804
MAFSKLLEQAGGVGLFQTLQVLTFILPCLMIPSQMLLENFSAAIPGHRCWTHMLDNGSAVSTNMTPKALLTISIPPGPNQGPHQCRRFRQPQWQLLDPNATATSWSEADTEPCVDGWVYDRSVFTSTIVAKWDLVCSSQGLKPLSQSIFMSGILVGSFIWGLLSYRFGRKPMLSWCCLQLAVAGTSTIFAPTFVIYCGLRFVAAFGMAGIFLSSLTLMVEWTTTSRRAVTMTVVGCAFSAGQAALGGLAFALRDWRTLQLAASVPFFAISLISWWLPESARWLIIKGKPDQALQELRKVARINGHKEAKNLTIEVLMSSVKEEVASAKEPRSVLDLFCVPVLRWRSCAMLVVNFSLLISYYGLVFDLQSLGRDIFLLQALFGAVDFLGRATTALLLSFLGRRTIQAGSQAMAGLAILANMLVPQDLQTLRVVFAVLGKGCFGISLTCLTIYKAELFPTPVRKSTAAQGNRQEAVTVESTSL

SEQ ID NO: 80762 - protein, 442 aa, Homo sapiens
  Payload ID: 16092
  Gene Symbol: SLC22A11
  Gene Name: solute carrier family 22 (organic anion/urate transporter), member 11
  Uniprot ID: Q9NSA0
  ENSP ID: ENSP00000366809
MAFSKLLEQAGGVGLFQTLQVLTFILPCLMIPSQMLLENFSAAIPGHRCWTHMLDNGSAVSTNMTPKALLTISIPPGPNQGPHQCRRFRQPQWQLLDPNATATSWSEADTEPCVDGWVYDRSVFTSTIVAKWDLVCSSQGLKPLSQSIFMSGILVGSFIWGLLSYRFGRKPMLSWCCLQLAVAGTSTIFAPTFVIYCGLRFVAAFGMAGIFLSSLTLMVEWTTTSRRAVTMTVVGCAFSAGQAALGGLAFALRDWRTLQLAASVPFFAISLISWWLPESARWLIIKGKPDQALQELRKVARINGHKEAKNLTIEVLMSSVKEEVASAKEPRSVLDLFCVPVLRWRSCAMLVVKMTADGILHTVGRLGAMMGPLILMSRQALPLLPPLLYGVISIASSLVVLFFLPETQGLPLPDTIQDLESQKSTAAQGNRQEAVTVESTSL

SEQ ID NO: 80763 - protein, 73 aa, Homo sapiens
  Payload ID: 16092
  Gene Symbol: SLC22A11
  Gene Name: solute carrier family 22 (organic anion/urate transporter), member 11
  ENSP ID: ENSP00000394043
  MOD_RES (1)..(1): Any amino acid
XFSLLISYYGLVFDLQSLGRDIFLLQALFGAVDFLGRATTALLLSFLGRRTIQAGSQAMAGLAILANMLVPQG

SEQ ID NO: 80764 - protein, 153 aa, Homo sapiens
  Payload ID: 16092
  Gene Symbol: SLC22A11
  Gene Name: solute carrier family 22 (organic anion/urate transporter), member 11
  ENSP ID: ENSP00000413508
FSLLISYYGLVFDLQSLGRDIFLLQALFGAVDFLGRATTALLLSFLGRRTIQAGSQAMAGLAILANMLVPQDLQTLRVVFAVLGKGCFGISLTCLTIYKAELFPTPVRLVVLFFLPETQGLPLPDTIQDLESQKSTAAQGNRQEAVTVESTSL

SEQ ID NO: 80765 - protein, 519 aa, Homo sapiens
  Payload ID: 16093
  Gene Symbol: SLC22A12
  Gene Name: solute carrier family 22 (organic anion/urate transporter), member 12
  Uniprot ID: Q96S37
  ENSP ID: ENSP00000336836
MAFSELLDLVGGLGRFQVLQTMALMVSIMWLCTQSMLENFSAAVPSHRCWAPLLDNSTAQASILGSLSPEALLAISIPPGPNQRPHQCRRFRQPQWQLLDPNATATSWSEADTEPCVDGWVYDRSIFTSTIVAKWNLVCDSHALKPMAQSIYLAGILVGAAACGPASDRFGRRLVLTWSYLQMAVMVMEWTAARARPLVMTLNSLGFSFGHGLTAAVAYGVRDWTLLQLVVSVPFFLCFLYSWWLAESARWLLTTGRLDWGLQELWRVAAINGKGAVQDTLTPEVLLSAMREELSMGQPPASLGTLLRMPGLRFRTCISTLCWFAFGFTFFGLALDLQALGSNIFLLQMFIGVVDIPAKMGALLLLSHLGRRPTLAASLLLAGLCILANTLVPHEMGALRSALAVLGLGGVGAAFTCITIYSSELFPTVLRMTAVGLGQMAARGGAILGPLVRLLGVHGPWLPLLVYGTVPVLSGLAALLLPETQSLPLPDTIQDVQNQAVKKATHGTLGNSVLKSTQF

SEQ ID NO: 80766 - protein, 445 aa, Homo sapiens
  Payload ID: 16093
  Gene Symbol: SLC22A12
  Gene Name: solute carrier family 22 (organic anion/urate transporter), member 12
  Uniprot ID: Q96S37
  ENSP ID: ENSP00000366790
MAFSELLDLVGGLGRFQVLQTMALMVSIMWLCTQSMLENFSAAVPSHRCWAPLLDNSTAQASILGSLSPEALLAISIPPGPNQRPHQCRRFRQPQWQLLDPNATATSWSEADTEPCVDGWVYDRSIFTSTIVAKWNLVCDSHALKPMAQSIYLAGILVGAAACGPASDRWLAESARWLLTTGRLDWGLQELWRVAAINGKGAVQDTLTPEVLLSAMREELSMGQPPASLGTLLRMPGLRFRTCISTLCWFAFGFTFFGLALDLQALGSNIFLLQMFIGVVDIPAKMGALLLLSHLGRRPTLAASLLLAGLCILANTLVPHEMGALRSALAVLGLGGVGAAFTCITIYSSELFPTVLRMTAVGLGQMAARGGAILGPLVRLLGVHGPWLPLLVYGTVPVLSGLAALLLPETQSLPLPDTIQDVQNQAVKKATHGTLGNSVLKSTQF

SEQ ID NO: 80767 - protein, 445 aa, Homo sapiens; identical to SEQ ID NO: 80766
  Payload ID: 16093
  Gene Symbol: SLC22A12
  Gene Name: solute carrier family 22 (organic anion/urate transporter), member 12
  Uniprot ID: Q96S37
  ENSP ID: ENSP00000366795

SEQ ID NO: 80768 - protein, 553 aa, Homo sapiens
  Payload ID: 16093
  Gene Symbol: SLC22A12
  Gene Name: solute carrier family 22 (organic anion/urate transporter), member 12
  Uniprot ID: Q96S37
  ENSP ID: ENSP00000366797
MAFSELLDLVGGLGRFQVLQTMALMVSIMWLCTQSMLENFSAAVPSHRCWAPLLDNSTAQASILGSLSPEALLAISIPPGPNQRPHQCRRFRQPQWQLLDPNATATSWSEADTEPCVDGWVYDRSIFTSTIVAKWNLVCDSHALKPMAQSIYLAGILVGAAACGPASDRFGRRLVLTWSYLQMAVMGTAAAFAPAFPVYCLFRFLLAFAVAGVMMNTGTLLMEWTAARARPLVMTLNSLGFSFGHGLTAAVAYGVRDWTLLQLVVSVPFFLCFLYSWWLAESARWLLTTGRLDWGLQELWRVAAINGKGAVQDTLTPEVLLSAMREELSMGQPPASLGTLLRMPGLRFRTCISTLCWFAFGFTFFGLALDLQALGSNIFLLQMFIGVVDIPAKMGALLLLSHLGRRPTLAASLLLAGLCILANTLVPHEMGALRSALAVLGLGGVGAAFTCITIYSSELFPTVLRMTAVGLGQMAARGGAILGPLVRLLGVHGPWLPLLVYGTVPVLSGLAALLLPETQSLPLPDTIQDVQNQAVKKATHGTLGNSVLKSTQF

SEQ ID NO: 80769 - protein, 332 aa, Homo sapiens
  Payload ID: 16093
  Gene Symbol: SLC22A12
  Gene Name: solute carrier family 22 (organic anion/urate transporter), member 12
  Uniprot ID: Q96S37
  ENSP ID: ENSP00000438437
MEWTAARARPLVMTLNSLGFSFGHGLTAAVAYGVRDWTLLQLVVSVPFFLCFLYSWWLAESARWLLTTGRLDWGLQELWRVAAINGKGAVQDTLTPEVLLSAMREELSMGQPPASLGTLLRMPGLRFRTCISTLCWFAFGFTFFGLALDLQALGSNIFLLQMFIGVVDIPAKMGALLLLSHLGRRPTLAASLLLAGLCILANTLVPHEMGALRSALAVLGLGGVGAAFTCITIYSSELFPTVLRMTAVGLGQMAARGGAILGPLVRLLGVHGPWLPLLVYGTVPVLSGLAALLLPETQSLPLPDTIQDVQNQAVKKATHGTLGNSVLKSTQF

SEQ ID NO: 80770 - protein, 551 aa, Homo sapiens
  Payload ID: 16094
  Gene Symbol: SLC22A13
  Gene Name: solute carrier family 22 (organic anion/urate transporter), member 13
  Uniprot ID: Q9Y226
  ENSP ID: ENSP00000310241
MAQFVQVLAEIGDFGRFQIQLLILLCVLNFLSPFYFFAHVFMVLDEPHHCAVAWVKNHTFNLSAAEQLVLSVPLDTAGHPEPCLMFRPPPANASLQDILSHRFNETQPCDMGWEYPENRLPSLKNEFNLVCDRKHLKDTTQSVFMAGLLVGTLMFGPLCDRIGRKATILAQLLLFTLIGLATAFVPSFELYMALRFAVATAVAGLSFSNVTLLTEWVGPSWRTQAVVLAQCNFSLGQMVLAGLAYGFRNWRLLQITGTAPGLLLFFYFWALPESARWLLTRGRMDEAIQLIQKAASVNRRKLSPELMNQLVPEKTGPSGNALDLFRHPQLRKVTLIIFCVWFVDSLGYYGLSLQVGDFGLDVYLTQLIFGAVEVPARCSSIFMMQRFGRKWSQLGTLVLGGLMCIIIIFIPADLPVVVTMLAVVGKMATAAAFTISYVYSAELFPTILRQTGMGLVGIFSRIGGILTPLVILLGEYHAALPMLIYGSLPIVAGLLCTLLPETHGQGLKDTLQDLELGPHPRSPKSVPSEKETEAKGRTSSPGVAFVSSTYF

SEQ ID NO: 80771 - protein, 231 aa, Homo sapiens
  Payload ID: 16094
  Gene Symbol: SLC22A13
  Gene Name: solute carrier family 22 (organic anion/urate transporter), member 13
  ENSP ID: ENSP00000395106
RFQIQLLILLCVLNFLSPFYFFAHVFMVLDEPHHCAVAWVKNHTFNLSAAEQLVLSVPLDTAGHPEPCLMFRPPPANASLQDILSHRFNETQPCDMGWEYPENRLPSLKNEFNLVCDRKHLKDTTQSVFMAGLLVGTLMFGPLCDRDRMGGALMEDAGRGPGPVQLLPRADGACGTRLRFPQLEAPSDHRHCAWLTALLLLLGSARICTLAPDPWEDGRGDTTDPEGGLGQ

SEQ ID NO: 80772 - protein, 506 aa, Homo sapiens
  Payload ID: 16095
  Gene Symbol: SLC22A1
  Gene Name: solute carrier family 22 (organic cation transporter), member 1
  Uniprot ID: O15245
  ENSP ID: ENSP00000318103
MPTVDDILEQVGESGWFQKQAFLILCLLSAAFAPICVGIVFLGFTPDHHCQSPGVAELSQRCGWSPAEELNYTVPGLGPAGEAFLGQCRRYEVDWNQSALSCVDPLASLATNRSHLPLGPCQDGWVYDTPGSSIVTEFNLVCADSWKLDLFQSCLNAGFLFGSLGVGYFADRFGRKLCLLGTVLVNAVSGVLMAFSPNYMSMLLFRLLQGLVSKGNWMAGYTLITEFVGSGSRRTVAIMYQMAFTVGLVALTGLAYALPHWRWLQLAVSLPTFLFLLYYWCVPESPRWLLSQKRNTEAIKIMDHIAQKNGKLPPADLKMLSLEEDVTEKLSPSFADLFRTPRLRKRTFILMYLWFTDSVLYQGLILHMGATSGNLYLDFLYSALVEIPGAFIALITIDRVGRIYPMAMSNLLAGAACLVMIFISPDLHWLNIIIMCVGRMGITIAIQMICLVNAELYPTFVSGVGPACRGSDATSSRDQGGRFARDHEGRREPWEKSKAQRKHDLP

SEQ ID NO: 80773 - protein, 554 aa, Homo sapiens
  Payload ID: 16095
  Gene Symbol: SLC22A1
  Gene Name: solute carrier family 22 (organic cation transporter), member 1
  Uniprot ID: O15245
  ENSP ID: ENSP00000355930
MPTVDDILEQVGESGWFQKQAFLILCLLSAAFAPICVGIVFLGFTPDHHCQSPGVAELSQRCGWSPAEELNYTVPGLGPAGEAFLGQCRRYEVDWNQSALSCVDPLASLATNRSHLPLGPCQDGWVYDTPGSSIVTEFNLVCADSWKLDLFQSCLNAGFLFGSLGVGYFADRFGRKLCLLGTVLVNAVSGVLMAFSPNYMSMLLFRLLQGLVSKGNWMAGYTLITEFVGSGSRRTVAIMYQMAFTVGLVALTGLAYALPHWRWLQLAVSLPTFLFLLYYWCVPESPRWLLSQKRNTEAIKIMDHIAQKNGKLPPADLKMLSLEEDVTEKLSPSFADLFRTPRLRKRTFILMYLWFTDSVLYQGLILHMGATSGNLYLDFLYSALVEIPGAFIALITIDRVGRIYPMAMSNLLAGAACLVMIFISPDLHWLNIIIMCVGRMGITIAIQMICLVNAELYPTFVRNLGVMVCSSLCDIGGIITPFIVFRLREVWQALPLILFAVLGLLAAGVTLLLPETKGVALPETMKDAENLGRKAKPKENTIYLKVQTSEPSGT

SEQ ID NO: 80774 - protein, 483 aa, Homo sapiens
  Payload ID: 16095
  Gene Symbol: SLC22A1
  Gene Name: solute carrier family 22 (organic cation transporter), member 1
  Uniprot ID: O15245
  ENSP ID: ENSP00000409557
MPTVDDILEQVGESGWFQKQAFLILCLLSAAFAPICVGIVFLGFTPDHHCQSPGVAELSQRCGWSPAEELNYTVPGLGPAGEAFLGQCRRYEVDWNQSALSCVDPLASLATNRSHLPLGPCQDGWVYDTPGSSIVTEFNLVCADSWKLDLFQSCLNAGFLFGSLGVGYFADRFGRKLCLLGTVLVNAVSGVLMAFSPNYMSMLLFRLLQGLVSKGNWMAGYTLITEFVGSGSRRTVAIMYQMAFTVGLVALTGLAYALPHWRWLQLAVSLPTFLFLLYYWCVPESPRWLLSQKRNTEAIKIMDHIAQKNGKLPPADLKMLSLEEDVTEKLSPSFADLFRTPRLRKRTFILMYLWFTDSVLYQGLILHMGATSGNLYLDFLYSALVEIPGAFIALITIDRVGRIYPMAMSNLLAGAACLVMIFISPDLHWLNIIIMCVGRMGITIAIQMICLVNAELYPTFVRKAKPKENTIYLKVQTSEPSGT

SEQ ID NO: 80775 - protein, 353 aa, Homo sapiens
  Payload ID: 16095
  Gene Symbol: SLC22A1
  Gene Name: solute carrier family 22 (organic cation transporter), member 1
  Uniprot ID: O15245
  ENSP ID: ENSP00000439274
MPTVDDILEQVGESGWFQKQAFLILCLLSAAFAPICVGIVFLGFTPDHHCQSPGVAELSQRCGWSPAEELNYTVPGLGPAGEAFLGQCRRYEVDWNQSALSCVDPLASLATNRSHLPLGPCQDGWVYDTPGSSIVTEFNLVCADSWKLDLFQSCLNAGFLFGSLGVGYFADRFGRKLCLLGTVLVNAVSGVLMAFSPNYMSMLLFRLLQGLVSKGNWMAGYTLITEFVGSGSRRTVAIMYQMAFTVGLVALTGLAYALPHWRWLQLAVSLPTFLFLLYYWCVPESPRWLLSQKRNTEAIKIMDHIAQKNGKLPPADLKMLSLEEDVTEKLSPSFADLFRTPRLRKRTFILMYL

SEQ ID NO: 80776 - protein, 48 aa, Homo sapiens
  Payload ID: 16095
  Gene Symbol: SLC22A1
  Gene Name: solute carrier family 22 (organic cation transporter), member 1
  ENSP ID: ENSP00000440105
MAFSPNYMSMLLFRLLQGLVSKGNWMAGYTLITEFVGSGSRRTVAIMY

SEQ ID NO: 80777 - protein, 140 aa, Homo sapiens
  Payload ID: 16095
  Gene Symbol: SLC22A1
  Gene Name: solute carrier family 22 (organic cation transporter), member 1
  ENSP ID: ENSP00000443245
MPTVDDILEQVGESGWFQKQAFLILCLLSAAFAPICVGIVFLGFTPDHHCQSPGVAELSQRCGWSPAEELNYTVPGLGPAGEAFLGQCRRYEVDWNQSALSCVDPLASLATNRSHLPLGPCQDGWVYDTPGSSIVTEVWP

SEQ ID NO: 80778 - protein, 150 aa, Homo sapiens
  Payload ID: 16096
  Gene Symbol: SLC22A18AS
  Gene Name: solute carrier family 22 (organic cation transporter), member 18 antisense
  Uniprot ID: Q8N1D0
  ENSP ID: ENSP00000487669
MRCAEGAWWFSPDGPAGSAASIWPAEGAEGLPGQLGRDRLEVVYSVPDNVPGQNGSRRPLVCKITGKCLSVCSEENAKAGGCSAFPLLLSQLGARMTGREHAHKGPELTTPDSGLPRPPNPALAGFRALAQHSPPLGTSTPSAVLLSAAT

SEQ ID NO: 80779 - protein, 253 aa, Homo sapiens
  Payload ID: 16096
  Gene Symbol: SLC22A18AS
  Gene Name: solute carrier family 22 (organic cation transporter), member 18 antisense
  Uniprot ID: Q8N1D0
  ENSP ID: ENSP00000487968
MGELPGSEGMWENCPLGWVKKKASGTLAPLDFLLQRKRLWLWASEPVRPQPQGIHRFREARRQFCRMRGSRLTGGRKGFGSSGLRFGRGGFSEEVMPQPVLKAMRCAEGAWWFSPDGPAGSAASIWPAEGAEGLPGQLGRDRLEVVYSVPDNVPGQNGSRRPLVCKITGKCLSVCSEENAKAGGCSAFPLLLSQLGARMTGREHAHKGPELTTPDSGLPRPPNPALAGFRALAQHSPPLGTSTPSAVLLSAAT

SEQ ID NO: 80780 - protein, 150 aa, Homo sapiens; identical to SEQ ID NO: 80778
  Payload ID: 16096
  Gene Symbol: SLC22A18AS
  Gene Name: solute carrier family 22 (organic cation transporter), member 18 antisense
  Uniprot ID: Q8N1D0
  ENSP ID: ENSP00000488024

SEQ ID NO: 80781 - protein, 334 aa, Homo sapiens
  Payload ID: 16097
  Gene Symbol: SLC22A2
  Gene Name: solute carrier family 22 (organic cation transporter), member 2
  ENSP ID: ENSP00000355919
MFFLLALLSATFAPIYVGIVFLGFTPDHRCRSPGVAELSLRCGWSPAEELNYTVPGPGPAGEASPRQCRRYEVDWNQSTFDCVDPLASLDTNRSRLPLGPCRDGWVYETPGSSIVTEFNLVCANSWMLDLFQSSVNVGFFIGSMSIGYIADRFGRKLCLLTTVLINAAAGVLMAISPTYTWMLIFRLIQGLVSKAGWLIGYILITEFVGRRYRRTVGIFYQVAYTVGLLVLAGVAYALPHWRWLQFTVSLPNFFFLLYYWCIPESPRWLISQNKNAEAMRIIKHIAKKNGKSLPASLQRLRLEEETGKKLNPSFLDLVRTPQIRKHTMILMYNW

SEQ ID NO: 80782 - protein, 555 aa, Homo sapiens
  Payload ID: 16097
  Gene Symbol: SLC22A2
  Gene Name: solute carrier family 22 (organic cation transporter), member 2
  Uniprot ID: O15244
  ENSP ID: ENSP00000355920
MPTTVDDVLEHGGEFHFFQKQMFFLLALLSATFAPIYVGIVFLGFTPDHRCRSPGVAELSLRCGWSPAEELNYTVPGPGPAGEASPRQCRRYEVDWNQSTFDCVDPLASLDTNRSRLPLGPCRDGWVYETPGSSIVTEFNLVCANSWMLDLFQSSVNVGFFIGSMSIGYIADRFGRKLCLLTTVLINAAAGVLMAISPTYTWMLIFRLIQGLVSKAGWLIGYILITEFVGRRYRRTVGIFYQVAYTVGLLVLAGVAYALPHWRWLQFTVSLPNFFFLLYYWCIPESPRWLISQNKNAEAMRIIKHIAKKNGKSLPASLQRLRLEEETGKKLNPSFLDLVRTPQIRKHTMILMYNWFTSSVLYQGLIMHMGLAGDNIYLDFFYSALVEFPAAFMIILTIDRIGRRYPWAASNMVAGAACLASVFIPGDLQWLKIIISCLGRMGITMAYEIVCLVNAELYPTFIRNLGVHICSSMCDIGGIITPFLVYRLTNIWLELPLMVFGVLGLVAGGLVLLLPETKGKALPETIEEAENMQRPRKNKEKMIYLQVQKLDIPLN

SEQ ID NO: 80783 - protein, 556 aa, Homo sapiens
  Payload ID: 16098
  Gene Symbol: SLC22A3
  Gene Name: solute carrier family 22 (organic cation transporter), member 3
  Uniprot ID: O75751
  ENSP ID: ENSP00000275300
MPSFDEALQRVGEFGRFQRRVFLLLCLTGVTFAFLFVGVVFLGTQPDHYWCRGPSAAALAERCGWSPEEEWNRTAPASRGPEPPERRGRCQRYLLEAANDSASATSALSCADPLAAFPNRSAPLVPCRGGWRYAQAHSTIVSEFDLVCVNAWMLDLTQAILNLGFLTGAFTLGYAADRYGRIVIYLLSCLGVGVTGVVVAFAPNFPVFVIFRFLQGVFGKGTWMTCYVIVTEIVGSKQRRIVGIVIQMFFTLGIIILPGIAYFIPNWQGIQLAITLPSFLFLLYYWVVPESPRWLITRKKGDKALQILRRIAKCNGKYLSSNYSEITVTDEEVSNPSFLDLVRTPQMRKCTLILMFAWFTSAVVYQGLVMRLGIIGGNLYIDFFISGVVELPGALLILLTIERLGRRLPFAASNIVAGVACLVTAFLPEGIAWLRTTVATLGRLGITMAFEIVYLVNSELYPTTLRNFGVSLCSGLCDFGGIIAPFLLFRLAAVWLELPLIIFGILASICGGLVMLLPETKGIALPETVDDVEKLGSPHSCKCGRNKKTPVSRSHL

SEQ ID NO: 80784 - protein, 543 aa, Homo sapiens
  Payload ID: 16099
  Gene Symbol: SLC22A16
  Gene Name: solute carrier family 22 (organic cation/carnitine transporter), member 16
  Uniprot ID: Q86VW1
  ENSP ID: ENSP00000328583
MRTLHAVSHPYSNSMRFQRVLYFICAFQNISCGIHYLASVFMGVTPHHVCRPPGNLQNGEIWELSRCSRNKRENTSSLGYEYTGSKKEFPCVDGYIYDQNTWKSTAVTQWNLVCDRKWLAMLIQPLFMFGVLLGSVTFGYFSDRLGRRVVLWATSSSMFLFGIAAAFAVDYYTFMAARFFLAMVASGYLVVGFVYVMEFIGMKSRTWASVHLHSFFAVGTLLVALTGYLVRTWWLYQMILSTVTVPFILCCWVLPETPFWLLSEGRYEEAQKIVDIMAKWNRASSCKLSELLSLDLQGPVSNSPTEVQKHNLSYLFYNWSITKRTLTVWLIWFTGSLGFYSFSLNSVNLGGNEYLNLFLLGVVEIPAYTFVCIAMDKVGRRTVLAYSLFCSALACGVVMVIPQKHYILGVVTAMVGKFAIGAAFGLIYLYTAELYPTIVRSLAVGSGSMVCRLASILAPFSVDLSSIWIFIPQLFVGTMALLSGVLTLKLPETLGKRLATTWEEAAKLESENESKSSKLLLTTNNSGLEKTEAITPRDSGLGE

SEQ ID NO: 80785 - protein, 577 aa, Homo sapiens
  Payload ID: 16099
  Gene Symbol: SLC22A16
  Gene Name: solute carrier family 22 (organic cation/carnitine transporter), member 16
  Uniprot ID: Q86VW1
  ENSP ID: ENSP00000357915
MGSRHFEGIYDHVGHFGRFQRVLYFICAFQNISCGIHYLASVFMGVTPHHVCRPPGNVSQVVFHNHSNWSLEDTGALLSSGQKDYVTVQLQNGEIWELSRCSRNKRENTSSLGYEYTGSKKEFPCVDGYIYDQNTWKSTAVTQWNLVCDRKWLAMLIQPLFMFGVLLGSVTFGYFSDRLGRRVVLWATSSSMFLFGIAAAFAVDYYTFMAARFFLAMVASGYLVVGFVYVMEFIGMKSRTWASVHLHSFFAVGTLLVALTGYLVRTWWLYQMILSTVTVPFILCCWVLPETPFWLLSEGRYEEAQKIVDIMAKWNRASSCKLSELLSLDLQGPVSNSPTEVQKHNLSYLFYNWSITKRTLTVWLIWFTGSLGFYSFSLNSVNLGGNEYLNLFLLGVVEIPAYTFVCIAMDKVGRRTVLAYSLFCSALACGVVMVIPQKHYILGVVTAMVGKFAIGAAFGLIYLYTAELYPTIVRSLAVGSGSMVCRLASILAPFSVDLSSIWIFIPQLFVGTMALLSGVLTLKLPETLGKRLATTWEEAAKLESENESKSSKLLLTTNNSGLEKTEAITPRDSGLGE

SEQ ID NO: 80786 - protein, 432 aa, Homo sapiens
  Payload ID: 16099
  Gene Symbol: SLC22A16
  Gene Name: solute carrier family 22 (organic cation/carnitine transporter), member 16
  ENSP ID: ENSP00000395642
DYVTVQLQNGEIWELSRCSRNKRENTSSLGYEYTGSKKEFPCVDGYIYDQNTWKSTAVTQWNLVCDRKWLAMLIQPLFMFGVLLGSVTFGYFSDRLGRRVVLWATSSSMFLFGIAAAFAVDYYTFMAARFFLAMVASGYLVVGFVYVMEFIGMKSRTWASVHLHSFFAVGTLLVALTGYLVRTWWLYQMILSTVTVPFILCCWVLPETPFWLLSEGRYEEAQKIVDIMAKWNRASSCKLSELLSLDLQGPVSNSPTEVQKHNLSYLFYNWSITKRTLTVWLIWFTGSLGFYSFSLNSVNLGGNEYLNLFLLGVVEIPAYTFVCIAMDKVGRRTVLAYSLFCSALACGVVMVIPQKHYILGVVTAMVGKFAIGAAFGLIYLYTAELYPTIVRSLAVGSGSMVCRLASILAPFSVDLSSIWIFIPQLLGQHLQE

SEQ ID NO: 80787 - protein, 174 aa, Homo sapiens
  Payload ID: 16099
  Gene Symbol: SLC22A16
  Gene Name: solute carrier family 22 (organic cation/carnitine transporter), member 16
  ENSP ID: ENSP00000401007
MGVTPHHVCRPPGNVSQVVFHNHSNWSLEDTGALLSSGQKDYVTVQLQNGEIWELSRCSRNKRENTSSLGYEYTGSKKEFPCVDGYIYDQNTWKSTAVTQWNLVCDRKWLAMLIQPLFMFGVLLGSVTFGYFSDRLGRRVVLWATSSSMFLFGIAAAFAVDYYTFMAARFFLAM

SEQ ID NO: 80788 - protein, 267 aa, Homo sapiens
  Payload ID: 16099
  Gene Symbol: SLC22A16
  Gene Name: solute carrier family 22 (organic cation/carnitine transporter), member 16
  ENSP ID: ENSP00000409306
MSAGPQAMLGRRVVLWATSSSMFLFGIAAAFAVDYYTFMAARFFLAMVASGYLVVGFVYVMEFIGMKSRTWASVHLHSFFAVGTLLVALTGYLVRTWWLYQMILSTVTVPFILCCWVLPETPFWLLSEGRYEEAQKIVDIMAKWNRASSCKLSELLSLDLQGPVSNSPTEVQKHNLSYLFYNWSITKRTLTVWLIWFTGSLGFYSFSLNSVNLGGNEYLNLFLLGVVEIPAYTFVCIAMDKVGRRTVLAYSLFCSALACGVVMVIPQ

SEQ ID NO: 80789 - protein, 351 aa, Homo sapiens
  Payload ID: 16099
  Gene Symbol: SLC22A16
  Gene Name: solute carrier family 22 (organic cation/carnitine transporter), member 16
  ENSP ID: ENSP00000416310
MGVTPHHVCRPPGNVSQVVFHNHSNWSLEDTGALLSSGQKDYVTVQLQNGEIWELSRCSRNKRENTSSLGYEYTGSKKEFPCVDGYIYDQNTWKSTAVTQWNLVCDRKWLAMLIQPLFMFGVLLGSVTFGYFSDRLGRRVVLWATSSSMFLFGIAAAFAVDYYTFMAARFFLAMVASGYLVVGFVYVMEFIGMKSRTWASVHLHSFFAVGTLLVALTGYLVRTWWLYQMILSTVTVPFILCCWVLPETPFWLLSEGRYEEAQKIVDIMAKWNRASSCKLSELLSLDLQGPVSNSPTEVQKHNLSYLFYNWSITKRTLTVWLIWFTGSLGFYSFSLNSVNLGGNEYLNLFLL

SEQ ID NO: 80790 - protein, 557 aa, Homo sapiens
  Payload ID: 16100
  Gene Symbol: SLC22A5
  Gene Name: solute carrier family 22 (organic cation/carnitine transporter), member 5
  Uniprot ID: O76082
  ENSP ID: ENSP00000245407
MRDYDEVTAFLGEWGPFQRLIFFLLSASIIPNGFTGLSSVFLIATPEHRCRVPDAANLSSAWRNHTVPLRLRDGREVPHSCRRYRLATIANFSALGLEPGRDVDLGQLEQESCLDGWEFSQDVYLSTIVTEWNLVCEDDWKAPLTISLFFVGVLLGSFISGQLSDRFGRKNVLFVTMGMQTGFSFLQIFSKNFEMFVVLFVLVGMGQISNYVAAFVLGTEILGKSVRIIFSTLGVCIFYAFGYMVLPLFAYFIRDWRMLLVALTMPGVLCVALWWFIPESPRWLISQGRFEEAEVIIRKAAKANGIVVPSTIFDPSELQDLSSKKQQSHNILDLLRTWNIRMVTIMSIMLWMTISVGYFGLSLDTPNLHGDIFVNCFLSAMVEVPAYVLAWLLLQYLPRRYSMATALFLGGSVLLFMQLVPPDLYYLATVLVMVGKFGVTAAFSMVYVYTAELYPTVVRNMGVGVSSTASRLGSILSPYFVYLGAYDRFLPYILMGSLTILTAILTLFLPESFGTPLPDTIDQMLRVKGMKHRKTPSHTRMLKDGQERPTILKSTAF

SEQ ID NO: 80791 - protein, 240 aa, Homo sapiens
  Payload ID: 16100
  Gene Symbol: SLC22A5
  Gene Name: solute carrier family 22 (organic cation/carnitine transporter), member 5
  ENSP ID: ENSP00000388838
DVDLGQLEQESCLDGWEFSQDVYLSTIVTEQDSGAYNAMKNRMGKKPALCLPAQWNLVCEDDWKAPLTISLFFVGVLLGSFISGQLSDRFGRKNVLFVTMGMQTGFSFLQIFSKNFEMFVVLFVLVGMGQISNYVAAFVLGTEILGKSVRIIFSTLGVCIFYAFGYMVLPLFAYFIRDWRMLLVALTMPGVLCVALWWFIPESPRWLISQGRFEEAEVIIRKAAKANGIVVPSTIFDPSE

SEQ ID NO: 80792 - protein, 37 aa, Homo sapiens
  Payload ID: 16100
  Gene Symbol: SLC22A5
  Gene Name: solute carrier family 22 (organic cation/carnitine transporter), member 5
  ENSP ID: ENSP00000389284
  MOD_RES (1)..(1): Any amino acid
XFLQLQDLSSKKQQSHNILDLLRTWNIRMVTIMSIML

SEQ ID NO: 80793 - protein, 141 aa, Homo sapiens
  Payload ID: 16100
  Gene Symbol: SLC22A5
  Gene Name: solute carrier family 22 (organic cation/carnitine transporter), member 5
  ENSP ID: ENSP00000400553
MRDYDEVTAFLGEWGPFQRLIFFLLSASIIPNGFTGLSSVFLIATPEHRCRVPDAANLSSAWRNHTVPLRLRDGREVPHSCRRYRLATIANFSALGLEPGRDVDLGQLEQESCLDGWEFSQDVYLSTIVTEGQKFLASQFV

SEQ ID NO: 80794 - protein, 136 aa, Homo sapiens
  Payload ID: 16100
  Gene Symbol: SLC22A5
  Gene Name: solute carrier family 22 (organic cation/carnitine transporter), member 5
  ENSP ID: ENSP00000401860
  MOD_RES (1)..(1): Any amino acid
XTEILGKSVRIIFSTLGVCIFYAFGYMVLPLFAYFIRDWRMLLVALTMPGVLCVALWWFIPESPRWLISQGRFEEAEVIIRKAAKANGIVVPSTIFDPSELQDLSSKKQQSHNILDLLRTWNIRMVTIMSIMLCDG

SEQ ID NO: 80795 - protein, 581 aa, Homo sapiens
  Payload ID: 16100
  Gene Symbol: SLC22A5
  Gene Name: solute carrier family 22 (organic cation/carnitine transporter), member 5
  Uniprot ID: O76082
  ENSP ID: ENSP00000402760
MRDYDEVTAFLGEWGPFQRLIFFLLSASIIPNGFTGLSSVFLIATPEHRCRVPDAANLSSAWRNHTVPLRLRDGREVPHSCRRYRLATIANFSALGLEPGRDVDLGQLEQESCLDGWEFSQDVYLSTIVTEQDSGAYNAMKNRMGKKPALCLPAQWNLVCEDDWKAPLTISLFFVGVLLGSFISGQLSDRFGRKNVLFVTMGMQTGFSFLQIFSKNFEMFVVLFVLVGMGQISNYVAAFVLGTEILGKSVRIIFSTLGVCIFYAFGYMVLPLFAYFIRDWRMLLVALTMPGVLCVALWWFIPESPRWLISQGRFEEAEVIIRKAAKANGIVVPSTIFDPSELQDLSSKKQQSHNILDLLRTWNIRMVTIMSIMLWMTISVGYFGLSLDTPNLHGDIFVNCFLSAMVEVPAYVLAWLLLQYLPRRYSMATALFLGGSVLLFMQLVPPDLYYLATVLVMVGKFGVTAAFSMVYVYTAELYPTVVRNMGVGVSSTASRLGSILSPYFVYLGAYDRFLPYILMGSLTILTAILTLFLPESFGTPLPDTIDQMLRVKGMKHRKTPSHTRMLKDGQERPTILKSTAF

SEQ ID NO: 80796 - protein, 551 aa, Homo sapiens
  Payload ID: 16101
  Gene Symbol: SLC22A4
  Gene Name: solute carrier family 22 (organic cation/zwitterion transporter), member 4
  Uniprot ID: Q9H015
  ENSP ID: ENSP00000200652
MRDYDEVIAFLGEWGPFQRLIFFLLSASIIPNGFNGMSVVFLAGTPEHRCRVPDAANLSSAWRNNSVPLRLRDGREVPHSCSRYRLATIANFSALGLEPGRDVDLGQLEQESCLDGWEFSQDVYLSTVVTEWNLVCEDNWKVPLTTSLFFVGVLLGSFVSGQLSDRFGRKNVLFATMAVQTGFSFLQIFSISWEMFTVLFVIVGMGQISNYVVAFILGTEILGKSVRIIFSTLGVCTFFAVGYMLLPLFAYFIRDWRMLLLALTVPGVLCVPLWWFIPESPRWLISQRRFREAEDIIQKAAKMNNIAVPAVIFDSVEELNPLKQQKAFILDLFRTRNIAIMTIMSLLLWMLTSVGYFALSLDAPNLHGDAYLNCFLSALIEIPAYITAWLLLRTLPRRYIIAAVLFWGGGVLLFIQLVPVDYYFLSIGLVMLGKFGITSAFSMLYVFTAELYPTLVRNMAVGVTSTASRVGSIIAPYFVYLGAYNRMLPYIVMGSLTVLIGILTLFFPESLGMTLPETLEQMQKVKWFRSGKKTRDSMETEENPKVLITAF

SEQ ID NO: 80797 - protein, 541 aa, Homo sapiens
  Payload ID: 16102
  Gene Symbol: SLC22A10
  Gene Name: solute carrier family 22, member 10
  Uniprot ID: Q63ZE4
  ENSP ID: ENSP00000327569
MAFEELLSQVGGLGRFQMLHLVFILPSLMLLIPHILLENFAAAIPGHRCWVHMLDNNTGSGNETGILSEDALLRISIPLDSNLRPEKCRRFVHPQWQLLHLNGTIHSTSEADTEPCVDGWVYDQSYFPSTIVTKWDLVCDYQSLKSVVQFLLLTGMLVGGIIGGHVSDRFGRRFILRWCLLQLAITDTCAAFAPTFPVYCVLRFLAGFSSMIIISNNSLPITEWIRPNSKALVVILSSGALSIGQIILGGLAYVFRDWQTLHVVASVPFFVFFLLSRWLVESARWLIITNKLDEGLKALRKVARTNGIKNAEETLNIEVVRSTMQEELDAAQTKTTVCDLFRNPSMRKRICILVFLRFANTIPFYGTMVNLQHVGSNIFLLQVLYGAVALIVRCLALLTLNHMGRRISQILFMFLVGLSILANTFVPKEMQTLRVALACLGIGCSAATFSSVAVHFIELIPTVLRARASGIDLTASRIGAALAPLLMTLTVFFTTLPWIIYGIFPIIGGLIVFLLPETKNLPLPDTIKDVENQKKNLKEKA

SEQ ID NO: 80798 - protein, 372 aa, Homo sapiens
  Payload ID: 16102
  Gene Symbol: SLC22A10
  Gene Name: solute carrier family 22, member 10
  ENSP ID: ENSP00000433048
MLDNNTGSGNETGILSEDALLRISIPLDSNLRPEKCRRFVHPQWQLLHLNGTIHSTSEADTEPCVDGWVYDQSYFPSTIVTKWDLVCDYQSLKSVVQFLLLTGMLVGGIIGGHVSDRFGRRFILRWCLLQLAITDTCAAFAPTFPVYCVLRFLAGFSSMIIISNNSLPITEWIRPNSKALVVILSSGALSIGQIILGGLAYVFRDWQTLHVVASVPFFVFFLLSRWLVESARWLIITNKLDEGLKALRKVARTNGIKNAEETLNIEVVRSTMQEELDAAQTKTTVCDLFRNPSMRKRICILVFLRFANTIPFYGTMVNLQHVGSNIFLLQKCRPCVWLWHVWESAVLLLLFPVLLFTSLNSSPLFSGQELQE

SEQ ID NO: 80799 - protein, 264 aa, Homo sapiens
  Payload ID: 16102
  Gene Symbol: SLC22A10
  Gene Name: solute carrier family 22, member 10
  ENSP ID: ENSP00000433817
MLDNNTGSGNETGILSEDALLRISIPLDSNLRPEKCRRFVHPQWQLLHLNGTIHSTSEADTEPCVDGWVYDQSYFPSTIVTKWDLVCDYQSLKSVVQFLLLTGMLVGGIIGGHVSDRWLVESARWLIITNKLDEGLKALRKVARTNGIKNAEETLNIEVVRSTMQEELDAAQTKTTVCDLFRNPSMRKRICILVFLRFANTIPFYGTMVNLQHVGSNIFLLQKCRPCVWLWHVWESAVLLLLFPVLLFTSLNSSPLFSGQELQE

SEQ ID NO: 80800 - protein, 205 aa, Homo sapiens
  Payload ID: 16102
  Gene Symbol: SLC22A10
  Gene Name: solute carrier family 22, member 10
  ENSP ID: ENSP00000433908
MLDNNTGSGNETGILSEDALLRISIPLDSNLRPEKCRRFVHPQWQLLHLNGTIHSTSEADTEPCVDGWVYDQSYFPSTIVTKWDLVCDYQSLKSVVQFLLLTGMLVGGIIGGHVSDRWLVESARWLIITNKLDEGLKALRKVARTNGIKNAEETLNIEVVRSTMQEELDAAQTKTTVCDLFRNPSMRKRICILVFLRKKNLKEKA

SEQ ID NO: 80801 - protein, 594 aa, Homo sapiens
  Payload ID: 16103
  Gene Symbol: SLC22A14
  Gene Name: solute carrier family 22, member 14
  Uniprot ID: Q9Y267
  ENSP ID: ENSP00000273173
MAGEENFKEELRSQDASRNLNQHEVAGHPHSWSLEMLLRRLRAVHTKQDDKFANLLDAVGEFGTFQQRLVALTFIPSIMSAFFMFADHFVFTAQKPYCNTSWILAVGPHLSKAEQLNLTIPQAPNGSFLTCFMYLPVPWNLDSIIQFGLNDTDTCQDGWIYPDAKKRSLINEFDLVCGMETKKDTAQIMFMAGLPIGSLIFRLITDKMGRYPAILLSLLGLIIFGFGTAFMNSFHLYLFFRFGISQSVVGYAISSISLATEWLVGEHRAHAIILGHCFFAVGAVLLTGIAYSLPHWQLLFLVGGILVIPFISYIWILPESPRWLMMKGKVKEAKQVLCYAASVNKKTIPSNLLDELQLPRKKVTRASVLDFCKNRQLCKVTLVMSCVWFTVSYTYFTLSLRMRELGVSVHFRHVVPSIMEVPARLCCIFLLQQIGRKWSLAVTLLQAIIWCLLLLFLPEGEDGLRLKWPRCPATELKSMTILVLMLREFSLAATVTVFFLYTAELLPTVLRATGLGLVSLASVAGAILSLTIISQTPSLLPIFLCCVLAIVAFSLSSLLPETRDQPLSESLNHSSQIRNKVKDMKTKETSSDDV

SEQ ID NO: 80802 - protein, 594 aa, Homo sapiens; identical to SEQ ID NO: 80801
  Payload ID: 16103
  Gene Symbol: SLC22A14
  Gene Name: solute carrier family 22, member 14
  Uniprot ID: Q9Y267
  ENSP ID: ENSP00000396283

SEQ ID NO: 80803 - protein, 119 aa, Homo sapiens
  Payload ID: 16103
  Gene Symbol: SLC22A14
  Gene Name: solute carrier family 22, member 14
  ENSP ID: ENSP00000442528
MYLPVPWNLDSIIQFGLNDTDTCQDGWIYPDAKKRSLINEFDLVCGMETKKDTAQIMFMAGLPIGSLIFRLITDKMGRYPAILLSLLGLIIFGFGTAFMNSFHLYLFFRFGISQSVVGY

SEQ ID NO: 80804 - protein, 245 aa, Homo sapiens
  Payload ID: 16104
  Gene Symbol: SLC22A15
  Gene Name: solute carrier family 22, member 15
  Uniprot ID: Q8IZD6
  ENSP ID: ENSP00000358514
MEVEEAFQAVGEMGIYQMYLCFLLAVLLQLYVATEAILIALVGATPSYHWDLAELLPNQSHGNQSAGEDQAFGDWLLTANGSEIHKHVHFSSSFTSIASEWFLIANRSYKVSAASSFFFSGVFVGVISFGQLSDRFGRKKVYLTGFALDILFAIANGFSPSYEFFAVTRFLVGMMNGGMSLVAFVLLNECVGTAYWALAGSIGGLFFAVGIAQYALLGYFIRSWRTLAILVNLQGTVVFLLSLVD

SEQ ID NO: 80805 - protein, 547 aa, Homo sapiens
  Payload ID: 16104
  Gene Symbol: SLC22A15
  Gene Name: solute carrier family 22, member 15
  Uniprot ID: Q8IZD6
  ENSP ID: ENSP00000358515
MEVEEAFQAVGEMGIYQMYLCFLLAVLLQLYVATEAILIALVGATPSYHWDLAELLPNQSHGNQSAGEDQAFGDWLLTANGSEIHKHVHFSSSFTSIASEWFLIANRSYKVSAASSFFFSGVFVGVISFGQLSDRFGRKKVYLTGFALDILFAIANGFSPSYEFFAVTRFLVGMMNGGMSLVAFVLLNECVGTAYWALAGSIGGLFFAVGIAQYALLGYFIRSWRTLAILVNLQGTVVFLLSLFIPESPRWLYSQGRLSEAEEALYLIAKRNRKLKCTFSLTHPANRSCRETGSFLDLFRYRVLLGHTLILMFIWFVCSLVYYGLTLSAGDLGGSIYANLALSGLIEIPSYPLCIYLINQKWFGRKRTLSAFLCLGGLACLIVMFLPEKKDTGVFAVVNSHSLSLLGKLTISAAFNIVYIYTSELYPTVIRNVGLGTCSMFSRVGGIIAPFIPSLKYVQWSLPFIVFGATGLTSGLLSLLLPETLNSPLLETFSDLQVYSYRRLGEEALSLQALDPQQCVDKESSLGSESEEEEEFYDADEETQMIK

SEQ ID NO: 80806 - protein, 538 aa, Homo sapiens
  Payload ID: 16105
  Gene Symbol: SLC22A17
  Gene Name: solute carrier family 22, member 17
  Uniprot ID: Q8WUG5
  ENSP ID: ENSP00000206544
MASDPIFTLAPPLHCHYGAFPPNASGWEQPPNASGVSVASAALAASAASRVATSTDPSCSGFAPPDFNHCLKDWDYNGLPVLTTNAIGQWDLVCDLGWQVILEQILFILGFASGYLFLGYPADRFGRRGIVLLTLGLVGPCGVGGAAAGSSTGVMALRFLLGFLLAGVDLGVYLMRLELCDPTQRLRVALAGELVGVGGHFLFLGLALVSKDWRFLQRMITAPCILFLFYGWPGLFLESARWLIVKRQIEEAQSVLRILAERNRPHGQMLGEEAQEALQDLENTCPLPATSSFSFASLLNYRNIWKNLLILGFTNFIAHAIRHCYQPVGGGGSPSDFYLCSLLASGTAALACVFLGVTVDRFGRRGILLLSMTLTGIASLVLLGLWDCEHPIFPTVWAQQGNPNRDLNEAAITTFSVLGLFSSQAAAILSTLLAAEVIPTTVRGRGLGLIMALGALGGLSGPAQRLHMGHGAFLQHVVLAACALLCILSIMLLPETKRKLLPEVLRDGELCRRPSLLRQPPPTRCDHVPLLATPNPAL

SEQ ID NO: 80807 - protein, 520 aa, Homo sapiens
  Payload ID: 16105
  Gene Symbol: SLC22A17
  Gene Name: solute carrier family 22, member 17
  Uniprot ID: Q8WUG5
  ENSP ID: ENSP00000346824
MASDPIFTLAPPLHCHYGAFPPNASGWEQPPNASGVSVASAALAASAASRVATSTDPSCSGFAPPDFNHCLKDWDYNGLPVLTTNAIGQWDLVCDLGWQVILEQILFILGFASGYLFLGYPADRFGRRGIVLLTLGLVGPCGVGGAAAGSSTGVMALRFLLGFLLAGVDLGVYLMRLELCDPTQRLRVALAGELVGVGGHFLFLGLALVSKDWRFLQRMITAPCILFLFYGWPGLFLESARWLIVKRQIEEAQSVLRILAERNRPHGQMLGEEAQEALQDLENTCPLPATSSFSFASLLNYRNIWKNLLILGFTNFIAHAIRHCYQPVGGGGSPSDFYLCSLLASGTAALACVFLGVTVDRFGRRGILLLSMTLTGIASLVLLGLWDYLNEAAITTFSVLGLFSSQAAAILSTLLAAEVIPTTVRGRGLGLIMALGALGGLSGPAQRLHMGHGAFLQHVVLAACALLCILSIMLLPETKRKLLPEVLRDGELCRRPSLLRQPPPTRCDHVPLLATPNPAL

SEQ ID NO: 80808 - protein, 409 aa, Homo sapiens
  Payload ID: 16105
  Gene Symbol: SLC22A17
  Gene Name: solute carrier family 22, member 17
  ENSP ID: ENSP00000380430
MAFLCSPPTPSARFGRRGIVLLTLGLVGPCGVGGAAAGSSTGVMALRFLLGFLLAGVDLGVYLMRLELCDPTQRLRVALAGELVGVGGHFLFLGLALVSKDWRFLQRMITAPCILFLFYGWPGLFLESARWLIVKRQIEEAQSVLRILAERNRPHGQMLGEEAQEALQDLENTCPLPATSSFSFASLLNYRNIWKNLLILGFTNFIAHAIRHCYQPVGGGGSPSDFYLCSLLASGTAALACVFLGVTVDRFGRRGILLLSMTLTGIASLVLLGLWDYLNEAAITTFSVLGLFSSQAAAILSTLLAAEVIPTTVRGRGLGLIMALGALGGLSGPAQRLHMGHGAFLQHVVLAACALLCILSIMLLPETKRKLLPEVLRDGELCRRPSLLRQPPPTRCDHVPLLATPNPAL

SEQ ID NO: 80809 - protein, 538 aa, Homo sapiens; identical to SEQ ID NO: 80806
  Payload ID: 16105
  Gene Symbol: SLC22A17
  Gene Name: solute carrier family 22, member 17
  Uniprot ID: Q8WUG5
  ENSP ID: ENSP00000380437

SEQ ID NO: 80810 - protein, 424 aa, Homo sapiens
  Payload ID: 16106
  Gene Symbol: SLC22A18
  Gene Name: solute carrier family 22, member 18
  Uniprot ID: Q96BI1
  ENSP ID: ENSP00000307859
MQGARAPRDQGRSPGRMSALGRSSVILLTYVLAATELTCLFMQFSIVPYLSRKLGLDSIAFGYLQTTFGVLQLLGGPVFGRFADQRGARAALTLSFLAALALYLLLAAASSPALPGVYLLFASRLPGALMHTLPAAQMVITDLSAPEERPAALGRLGLCFGVGVILGSLLGGTLVSAYGIQCPAILAALATLLGAVLSFTCIPASTKGAKTDAQAPLPGGPRASVFDLKAIASLLRLPDVPRIFLVKVASNCPTGLFMVMFSIISMDFFQLEAAQAGYLMSFFGLLQMVTQGLVIGQLSSHFSEEVLLRASVLVFIVVGLAMAWMSSVFHFCLLVPGLVFSLCTLNVVTDSMLIKAVSTSDTGTMLGLCASVQPLLRTLGPTVGGLLYRSFGVPVFGHVQVAINTLVLLVLWRKPMPQRKDKVR

SEQ ID NO: 80811 - protein, 424 aa, Homo sapiens; identical to SEQ ID NO: 80810
  Payload ID: 16106
  Gene Symbol: SLC22A18
  Gene Name: solute carrier family 22, member 18
  Uniprot ID: Q96BI1
  ENSP ID: ENSP00000311139

SEQ ID NO: 80812 - protein, 424 aa, Homo sapiens; identical to SEQ ID NO: 80810
  Payload ID: 16106
  Gene Symbol: SLC22A18
  Gene Name: solute carrier family 22, member 18
  Uniprot ID: Q96BI1
  ENSP ID: ENSP00000369948

SEQ ID NO: 80813 - protein, 326 aa, Homo sapiens
  Payload ID: 16106
  Gene Symbol: SLC22A18
  Gene Name: solute carrier family 22, member 18
  ENSP ID: ENSP00000392072
MQGARAPRDQGRSPGRMSALGRSSVILLTYVLAATELTCLFMQFSIVPYLSRKLGLDSIAFGYLQTTFGVLQLLGGPVFGRIQCPAILAALATLLGAVLSFTCIPASTKGAKTDAQAPLPGGPRASVFDLKAIASLLRLPDVPRIFLVKVASNCPTGLFMVMFSIISMDFFQLEAAQAGYLMSFFGLLQMVTQGLVIGQLSSHFSEEVLLRASVLVFIVVGLAMAWMSSVFHFCLLVPGLVFSLCTLNVVTDSMLIKAVSTSDTGTMLGLCASVQPLLRTLGPTVGGLLYRSFGVPVFGHVQVAINTLVLLVLWRKPMPQRKDKVR

SEQ ID NO: 80814 - protein, 134 aa, Homo sapiens
  Payload ID: 16106
  Gene Symbol: SLC22A18
  Gene Name: solute carrier family 22, member 18
  ENSP ID: ENSP00000433019
MQGARAPRDQGRSPGRMSALGRSSVILLTYVLAATELTCLFMQFSIVPYLSRKLGLDSIAFGYLQTTFGVLQLLGGPVFGRFADQRGARAALTLSFLAALALYLLLAAASSPALPGVYLLFASRLPGALMHTLP

SEQ ID NO: 80815 - protein, 424 aa, Homo sapiens
  Payload ID: 16106
  Gene Symbol: SLC22A18
  Gene Name: solute carrier family 22, member 18
  ENSP ID: ENSP00000479357
MQGARAPRDQGQSPGRMSALGRSSVILLTYVLAATELTCLFMQFSIVPYLSRKLGLDSIAFGYLQTTFGVLQLLGGPVFGRFADQRGARAALTLSFLAALALYLLLAAASSPALPGVYLLFASRLPGALMHTLPAAQMVITDLSAPEERPAALGRLGLCFGVGVILGSLLGGTLVSAYGIQCPAILAALATLLGAVLSFTCIPASTKGAKTDAQAPLPGGPRASVFDLKAIASLLRLPDVPRIFLVKVASNCPTGLFMVMFSIISMDFFQLEAAQAGYLMSFFGLLQMVTQGLVIGQLSSHFSEEVLLRASVLVFIVVGLAMAWMSSVFHFCLLVPGLVFSLCTLNVVTDSMLIKAVSTSDTGTMLGLCASVQPLLRTLGPTVGGLLYRSFGVPVFGHVQVAINTLVLLVLWRKPMPQRKDKVR

SEQ ID NO: 80816 - protein, 424 aa, Homo sapiens; identical to SEQ ID NO: 80815
  Payload ID: 16106
  Gene Symbol: SLC22A18
  Gene Name: solute carrier family 22, member 18
  ENSP ID: ENSP00000480848

SEQ ID NO: 80817 - protein, 424 aa, Homo sapiens; identical to SEQ ID NO: 80815
  Payload ID: 16106
  Gene Symbol: SLC22A18
  Gene Name: solute carrier family 22, member 18
  ENSP ID: ENSP00000482330

SEQ ID NO: 80818 - protein, 326 aa, Homo sapiens
  Payload ID: 16106
  Gene Symbol: SLC22A18
  Gene Name: solute carrier family 22, member 18
  ENSP ID: ENSP00000488029
MQGARAPRDQGQSPGRMSALGRSSVILLTYVLAATELTCLFMQFSIVPYLSRKLGLDSIAFGYLQTTFGVLQLLGGPVFGRIQCPAILAALATLLGAVLSFTCIPASTKGAKTDAQAPLPGGPRASVFDLKAIASLLRLPDVPRIFLVKVASNCPTGLFMVMFSIISMDFFQLEAAQAGYLMSFFGLLQMVTQGLVIGQLSSHFSEEVLLRASVLVFIVVGLAMAWMSSVFHFCLLVPGLVFSLCTLNVVTDSMLIKAVSTSDTGTMLGLCASVQPLLRTLGPTVGGLLYRSFGVPVFGHVQVAINTLVLLVLWRKPMPQRKDKVR

SEQ ID NO: 80819 - protein, 134 aa, Homo sapiens
  Payload ID: 16106
  Gene Symbol: SLC22A18
  Gene Name: solute carrier family 22, member 18
  ENSP ID: ENSP00000488483
MQGARAPRDQGQSPGRMSALGRSSVILLTYVLAATELTCLFMQFSIVPYLSRKLGLDSIAFGYLQTTFGVLQLLGGPVFGRFADQRGARAALTLSFLAALALYLLLAAASSPALPGVYLLFASRLPGALMHTLP

SEQ ID NO: 80820 - protein, 361 aa, Homo sapiens
  Payload ID: 16107
  Gene Symbol: SLC22A23
  Gene Name: solute carrier family 22, member 23
  Uniprot ID: A1A5C7
  ENSP ID: ENSP00000369653
MAIDRRREAAGGGPGRQPAPAEENGSLPPGDAAASAPLGGRAGPGGGAEIQPLPPLHPGGGPHPSCCSAAAAPSLLLLDYDGSVLPFLGGLGGGYQKTLVLLTWIPALFIGFSQFSDSFLLDQPNFWCRGAGKGTELAGVTTTGRGGDMGNWTSLPTTPFATAPWEAAGNRSNSSGADGGDTPPLPSPPDKGDNASNCDCRAWDYGIRAGLVQNVVSKWDLVCDNAWKVHIAKFSLLVGLIFGYLITGCIADWVGRRPVLLFSIIFILIFGLTVALSVNVTMFSTLRFFEGFCLAGIILTLYALRIELCPPGKRFMITMVASFVAMAGQFLMPGLAALCRDWQVLQALIICPFLLMLLYWS

SEQ ID NO: 80821 - protein, 405 aa, Homo sapiens
  Payload ID: 16107
  Gene Symbol: SLC22A23
  Gene Name: solute carrier family 22, member 23
  Uniprot ID: A1A5C7
  ENSP ID: ENSP00000369657
MFSTLRFFEGFCLAGIILTLYALRIELCPPGKRFMITMVASFVAMAGQFLMPGLAALCRDWQVLQALIICPFLLMLLYWSIFPESLRWLMATQQFESAKRLILHFTQKNRMNPEGDIKGVIPELEKELSRRPKKVCIVKVVGTRNLWKNIVVLCVNSLTGYGIHHCFARSMMGHEVKVPLLENFYADYYTTASIALVSCLAMCVVVRFLGRRGGLLLFMILTALASLLQLGLLNLIGKYSQHPDSGMSDSVKDKFSIAFSIVGMFASHAVGSLSVFFCAEITPTVIRCGGLGLVLASAGFGMLTAPIIELHNQKGYFLHHIIFACCTLICIICILLLPESRDQNLPENISNGEHYTRQPLLPHKKGEQPLLLTNAELKDYSGLHDAAAAGDTLPEGATANGMKAM

SEQ ID NO: 80822 - protein, 686 aa, Homo sapiens
  Payload ID: 16107
  Gene Symbol: SLC22A23
  Gene Name: solute carrier family 22, member 23
  Uniprot ID: A1A5C7
  ENSP ID: ENSP00000385028
MAIDRRREAAGGGPGRQPAPAEENGSLPPGDAAASAPLGGRAGPGGGAEIQPLPPLHPGGGPHPSCCSAAAAPSLLLLDYDGSVLPFLGGLGGGYQKTLVLLTWIPALFIGFSQFSDSFLLDQPNFWCRGAGKGTELAGVTTTGRGGDMGNWTSLPTTPFATAPWEAAGNRSNSSGADGGDTPPLPSPPDKGDNASNCDCRAWDYGIRAGLVQNVVSKWDLVCDNAWKVHIAKFSLLVGLIFGYLITGCIADWVGRRPVLLFSIIFILIFGLTVALSVNVTMFSTLRFFEGFCLAGIILTLYALRIELCPPGKRFMITMVASFVAMAGQFLMPGLAALCRDWQVLQALIICPFLLMLLYWSIFPESLRWLMATQQFESAKRLILHFTQKNRMNPEGDIKGVIPELEKELSRRPKKVCIVKVVGTRNLWKNIVVLCVNSLTGYGIHHCFARSMMGHEVKVPLLENFYADYYTTASIALVSCLAMCVVVRFLGRRGGLLLFMILTALASLLQLGLLNLIGKYSQHPDSGMSDSVKDKFSIAFSIVGMFASHAVGSLSVFFCAEITPTVIRCGGLGLVLASAGFGMLTAPIIELHNQKGYFLHHIIFACCTLICIICILLLPESRDQNLPENISNGEHYTRQPLLPHKKGEQPLLLTNAELKDYSGLHDAAAAGDTLPEGATANGMKAM

SEQ ID NO: 80823 - protein, 694 aa, Homo sapiens
  Payload ID: 16107
  Gene Symbol: SLC22A23
  Gene Name: solute carrier family 22, member 23
  ENSP ID: ENSP00000410245
MAIDRRREAAGGGPGRQPAPAEENGSLPPGDAAASAPLGGRAGPGGGAEIQPLPPLHPGGGPHPSCCSAAAAPSLLLLDYDGSVLPFLGGLGGGYQKTLVLLTWIPALFIGFSQFSDSFLLDQPNFWCRGAGKGTELAGVTTTGRGGDMGNWTSLPTTPFATAPWEAAGNRSNSSGADGGDTPPLPSPPDKGDNASNCDCRAWDYGIRAGLVQNVVSKWDLVCDNAWKVHIAKFSLLVGLIFGYLITGCIADWVGRRPVLLFSIIFILIFGLTVALSVNVTMFSTLRFFEGFCLAGIILTLYALRIELCPPGKRFMITMVASFVAMAGQFLMPGLAALCRDWQVLQALIICPFLLMLLYWSIFPESLRWLMATQQFESAKRLILHFTQKNRMNPEGDIKGVIPELEKELSRRPKKVCIVKVVGTRNLWKNIVVLCVNSLTGYGIHHCFARSMMGHEVKVPLLENFYADYYTTASIALVSCLAMCVVVRFLGRRGGLLLFMILTALASLLQLGLLNLIGKYSQHPDSELQLKLAVGMSDSVKDKFSIAFSIVGMFASHAVGSLSVFFCAEITPTVIRCGGLGLVLASAGFGMLTAPIIELHNQKGYFLHHIIFACCTLICIICILLLPESRDQNLPENISNGEHYTRQPLLPHKKGEQPLLLTNAELKDYSGLHDAAAAGDTLPEGATANGMKAM

SEQ ID NO: 80824 - protein, 92 aa, Homo sapiens
  Payload ID: 16107
  Gene Symbol: SLC22A23
  Gene Name: solute carrier family 22, member 23
  ENSP ID: ENSP00000417737
MFSTLRFFEGFCLAGIILTLYALRIELCPPGKRFMITMVASFVAMAGQFLMPGLAALCRDWQVLQALIICPFLLMLLYWSYYLWLLSGYSQS

SEQ ID NO: 80825 - protein, 440 aa, Homo sapiens
  Payload ID: 16107
  Gene Symbol: SLC22A23
  Gene Name: solute carrier family 22, member 23
  ENSP ID: ENSP00000418134
NSSGADGGDTPPLPSPPDKGDNASNCDCRAWDYGIRAGLVQNVVSKWDLVCDNAWKVHIAKFSLLVGLIFGYLITGCIADWVGRRPVLLFSIIFILIFGLTVALSVNVTMFSTLRFFEGFCLAGIILTLYALRIELCPPGKRFMITMVASFVAMAGQFLMPGLAALCRDWQVLQALIICPFLLMLLYWSIFPESLRWLMATQQFESAKRLILHFTQKNRMNPEGDIKGVIPELEKELSRRPKKVCIVKVVGTRNLWKNIVVLCVNSLTGYGIHHCFARSMMGHEVKVPLLENFYADYYTTASIALVSCLAMCVVVRFLGRRGGLLLFMILTALASLLQLGLLNLIGKYSQHPDSGMSDSVKDKFSIAFSIVGMFASHAVGSLSVFFCAEITPTVIRCVMGDTPGDAGFSEIKDESLAPGWCGINQRQLCLWLWTHQLRGS

SEQ ID NO: 80826 - protein, 386 aa, Homo sapiens
  Payload ID: 16107
  Gene Symbol: SLC22A23
  Gene Name: solute carrier family 22, member 23
  ENSP ID: ENSP00000418985
MPVGPQHPSFKRSSLDTFHGCCQQQETGALPWDTDTKRWRPELNWDLVCDNAWKVHIAKFSLLVGLIFGYLITGCIADWVGRRPVLLFSIIFILIFGLTVALSVNVTMFSTLRFFEGFCLAGIILTLYALRIELCPPGKRFMITMVASFVAMAGQFLMPGLAALCRDWQVLQALIICPFLLMLLYWSIFPESLRWLMATQQFESAKRLILHFTQKNRMNPEGDIKGVIPELEKELSRRPKKVCIVKVVGTRNLWKNIVVLCVNSLTGYGIHHCFARSMMGHEVKVPLLENFYADYYTTASIALVSCLAMCVVVRFLGRRGGLLLFMILTALASLLQLGLLNLIGKYSQHPDSGMSDSVKDKFSIAFSIVGMFASHAVGSLSVFFCA

SEQ ID NO: 80827 - protein, 405 aa, Homo sapiens; identical to SEQ ID NO: 80821
  Payload ID: 16107
  Gene Symbol: SLC22A23
  Gene Name: solute carrier family 22, member 23
  Uniprot ID: A1A5C7
  ENSP ID: ENSP00000419463

SEQ ID NO: 80828 - protein, 322 aa, Homo sapiens
  Payload ID: 16108
  Gene Symbol: SLC22A24
  Gene Name: solute carrier family 22, member 24
  Uniprot ID: Q8N4F4
  ENSP ID: ENSP00000321549
MGFDVLLDQVGGMGRFQICLIAFFCITNILLFPNIVLENFTAFTPSHRCWVPLLDNDTVSDNDTGTLSKDDLLRISIPLDSNLRPQKCQRFIHPQWQLLHLNGTFPNTNEPDTEPCVDGWVYDRSSFLSTIVTEWDLVCESQSLKSMVQSLFMAGSLLGGLIYGHLSDRVGRKIICKLCFLQLAISNTCAAFAPTFLVYCILRFLAGFSTMTILGNTFILSLEWTLPRSRSMTIMVLLCSYSVGQMLLGGLAFAIQDWHILQLTVSTPIIVLFLSSWYEQSPHSLPVSEAMVDIERKILTPGICSVSGLVLSHDVHSTYCVT

SEQ ID NO: 80829 - protein, 551 aa, Homo sapiens
  Payload ID: 16108
  Gene Symbol: SLC22A24
  Gene Name: solute carrier family 22, member 24
  ENSP ID: ENSP00000396586
MGFDVLLDQVGGMGRFQICLIAFFCITNILLFPNIVLENFTAFTPSHRCWVPLLDNDTVSDNDTGTLSKDDLLRISIPLDSNLRPQKCQRFIHPQWQLLHLNGTFPNTNEPDTEPCVDGWVYDRSSFLSTIVTEWDLVCESQSLKSMVQSLFMAGSLLGGLIYGHLSDRVGRKIICKLCFLQLAISNTCAAFAPTFLVYCILRFLAGFSTMTILGNTFILSLEWTLPRSRSMTIMVLLCSYSVGQMLLGGLAFAIQDWHILQLTVSTPIIVLFLSSWKMVESARWLIINNQLDEGLKELRRVAHINGKKNTEETLTTELVRSTMKKELDAVRIKTSIFSLFRAPKLRMRVFGLCFVRFAITVPFYGLILNLQHLGSNVSLFQILCGAVTFTARCVSLLTLNHMGRRISQILFTFPVGLFILVNTFLPQEMQILRVVLATLGIGSVSAASNSASVHHNELVPTILRSTVAGINAVSGRTGAALAPLLMTLMAYSPHLPWISYGVFPILAVPVILLLPETRDLPLPNTIQDVENEKDSRNIKQEDTCMKVTQF

SEQ ID NO: 80830 - protein, 552 aa, Homo sapiens
  Payload ID: 16108
  Gene Symbol: SLC22A24
  Gene Name: solute carrier family 22, member 24
  ENSP ID: ENSP00000480336
MGFDVLLDQVGGMGRFQICLIAFFCITNILLFPNIVLENFTAFTPSHRCWVPLLDNDTVSDNDTGTLSKDDLLRISIPLDSNLRPQKCQRFIHPQWQLLHLNGTFPNTNEPDTEPCVDGWVYDRSSFLSTIVTEWDLVCESQSLKSMVQSLFMAGSLLGGLIYGHLSDRVGRKIICKLCFLQLAISNTCAAFAPTFLVYCILRFLAGFSTMTILGNTFILSLEWTLPRSRSMTIMVLLCSYSVGQMLLGGLAFAIQDWHILQLTVSTPIIVLFLSSWKMVESARWLIINNQLDEGLKELRRVAHINGKKNTEETLTTELVRSTMKKELDAVRIKTSIFSLFRAPKLRMRVFGLCFVRFAITVPFYGLILNLQHLGSNVSLFQILCGAVTFTARCVSLLTLNHMGRRISQILFTFPVGLFILVNTFLPQEMQILRVVLATLGIGSVSAASNSASVHHNELVPTILRSTVAGINAVSGRTGAALAPLLMTLMAYSPHLPWISYGVFPILAVPVILLLPETRDLPLPNTIQDVENDRKDSRNIKQEDTCMKVTQF

SEQ ID NO: 80831 - protein, 547 aa, Homo sapiens
  Payload ID: 16109
  Gene Symbol: SLC22A25
  Gene Name: solute carrier family 22, member 25
  Uniprot ID: Q6T423
  ENSP ID: ENSP00000307443
MAFQDLLDQVGGLGRFQILQMVFLIMFNVIVYHQTQLENFAAFILDHRCWVHILDNDTIPDNDPGTLSQDALLRISIPFDSNLRPEKCRRFVHPQWKLIHLNGTFPNTSEPDTEPCVDGWVYDQSSFPSTIVTKWDLVCESQPLNSVAKFLFMAGMMVGGNLYGHLSDRFGRKFVLRWSYLQLAIVGTCAAFAPTILVYCSLRFLAGAATFSIIVNTVLLIVEWITHQFCAMALTLTLCAASIGHITLGSLAFVIRDQCILQLVMSAPCFVFFLFSRWLAESARWLIINNKPEEGLKELRKAAHRNGMKNAEDILTMEVLKSTMKQELEAAQKKHSLCELLRIPNICKRICFLSFVRFASTIPFWGLTLHLQHLGNNVFLLQTLFGAVTLLANCVAPWALNHMSRRLSQMLLMFLLATCLLAIIFVPQEMQTLRVVLATLGVGAASLGITCSTAQENELIPSIIRGRATGITGNFANIGGALASLMMILSIYSRPLPWIIYGVFAILSGLVVLLLPETRNQPLLDSIQDVENEGVNSLAAPQRSSVL

SEQ ID NO: 80832 - protein, 202 aa, Homo sapiens
  Payload ID: 16109
  Gene Symbol: SLC22A25
  Gene Name: solute carrier family 22, member 25
  ENSP ID: ENSP00000431235
  MOD_RES (1)..(1): Any amino acid
XAFQDLLDQVGGLGRFQILQMVFLIMFNVIVYHQTQLENFAAFILDHRCWVHILDNDTIPDNDPGTLSQDALLRISIPFDSNLRPEKCRRFVHPQWKLIHLNGTFPNTSEPDTEPCVDGWVYDQSSFPSTIVTKWDLVCESQPLNSVAKFLFMAGMMVGGNLYGHLSDRKPLSSPNHVSTDCDEGLEVPIAIHQHHVFWYLS

SEQ ID NO: 80833 - protein, 399 aa, Homo sapiens
  Payload ID: 16109
  Gene Symbol: SLC22A25
  Gene Name: solute carrier family 22, member 25
  ENSP ID: ENSP00000432242
  MOD_RES (1)..(1): Any amino acid
XFQDLLDQVGGLGRFQILQMVFLIMFNVIVYHQTQLENFAAFILDHRCWVHILDNDTIPDNDPGTLSQDALLRISIPFDSNLRPEKCRRFVHPQWKLIHLNGTFPNTSEPDTEPCVDGWVYDQSSFPSTIVTKWDLVCESQPLNSVAKFLFMAGMMVGGNLYGHLSDRFGRKFVLRWSYLQLAIVGTCAAFAPTILVYCSLRFLAGAATFSIIVNTVLLIVEWITHQFCAMALTLTLCAASIGHITLGSLAFVIRDQCILQLVMSAPCFVFFLFSRWLAESARWLIINNKPEEGLKELRKAAHRNGMKNAEDILTMEVLKSTMKQELEAAQKKHSLCELLRIPNICKRICFLSFVRSAGVCWRSTPDPVCLGITSGGCRTAKIPACSFLWKLHFRGAPA

SEQ ID NO: 80834 - protein, 156 aa, Homo sapiens
  Payload ID: 16109
  Gene Symbol: SLC22A25
  Gene Name: solute carrier family 22, member 25
  ENSP ID: ENSP00000435614
MAFQDLLDQVGGLGRFQILQMVFLIMFNVIVYHQTQLENFAAFILDHRCWVHILDNDTIPDNDPGTLSQDALLRISIPFDSNLRPEKCRRFVHPQWKLIHLNGTFPNTSEPDTEPCVDGWVYDQSSFPSTIVTKVAGRVCSVAHYQQQTRRGLKGT

SEQ ID NO: 80835 - protein, 556 aa, Homo sapiens
  Payload ID: 16110
  Gene Symbol: SLC22A31
  Gene Name: solute carrier family 22, member 31
  ENSP ID: ENSP00000474621
MEQEARVLRAAGGFGRARRLLASASWVPCIVLGLVLSSEELLTAQPAPHCRPDPTLLPPALRALRGPALLDAAIPRLGPTRAPAEALGVLSPSYLAPLTRAPRPSSWASCSGAAAGPTWNLVCGDGWKVPLEQVSHLLGWLLGCVILGAGCDRFGRRAVFVASLVLTTGLGASEALAASFPTLLVLRLLHGGTLAGALLALYLARLELCDPPHRLAFSMGAGLFSVVGTLLLPGLAALVQDWRLLQGLGALMSGLLLLFWGFPALFPESPCWLLATGQVARARKILWRFAEASGVGPGDSSLEENSLATELTMLSARSPQPRYHSPLGLLRTRVTWRNGLILGFSSLVGGGIRASFRRSLAPQVPTFYLPYFLEAGLEAAALVFLLLTADCCGRRPVLLLGTMVTGLASLLLLAGAQYLPGWTVLFLSVLGLLASRAVSALSSLFAAEVFPTVIRGAGLGLVLGAGFLGQAAGPLDTLHGRQGFFLQQVVFASLAVLALLCVLLLPESRSRGLPQSLQDADRLRRSPLLRGRPRQDHLPLLPPSNSYWAGHTPEQH

SEQ ID NO: 80836 - protein, 338 aa, Homo sapiens
  Payload ID: 16110
  Gene Symbol: SLC22A31
  Gene Name: solute carrier family 22, member 31
  ENSP ID: ENSP00000481421
MGAGLFSVVGTLLLPGLAALVQDWRLLQGLGALMSGLLLLFWGFPALFPESPCWLLATGQVARARKILWRFAEASGVGPGDSSLEENSLATELTMLSARSPQPRYHSPLGLLRTRVTWRNGLILGFSSLVGGGIRASFRRSLAPQVPTFYLPYFLEAGLEAAALVFLLLTADCCGRRPVLLLGTMVTGLASLLLLAGAQYLPGWTVLFLSVLGLLASRAVSALSSLFAAEVFPTVIRGAGLGLVLGAGFLGQAAGPLDTLHGRQGFFLQQVVFASLAVLALLCVLLLPESRSRGLPQSLQDADRLRRSPLLRGRPRQDHLPLLPPSNSYWAGHTPEQH

SEQ ID NO: 80837 - protein, 598 aa, Homo sapiens
  Payload ID: 16111
  Gene Symbol: SLC23A1
  Gene Name: solute carrier family 23 (ascorbic acid transporter), member 1
  Uniprot ID: Q9UHI7
  ENSP ID: ENSP00000302701
MRAQEDLEGRTQHETTRDPSTPLPTEPKFDMLYKIEDVPPWYLCILLGFQHYLTCFSGTIAVPFLLAEALCVGHDQHMVSQLIGTIFTCVGITTLIQTTVGIRLPLFQASAFAFLVPAKAILALERWKCPPEEEIYGNWSLPLNTSHIWHPRIREVQGAIMVSSVVEVVIGLLGLPGALLNYIGPLTVTPTVSLIGLSVFQAAGDRAGSHWGISACSILLIILFSQYLRNLTFLLPVYRWGKGLTLLRIQIFKMFPIMLAIMTVWLLCYVLTLTDVLPTDPKAYGFQARTDARGDIMAIAPWIRIPYPCQWGLPTVTAAAVLGMFSATLAGIIESIGDYYACARLAGAPPPPVHAINRGIFTEGICCIIAGLLGTGNGSTSSSPNIGVLGITKVGSRRVVQYGAAIMLVLGTIGKFTALFASLPDPILGGMFCTLFGMITAVGLSNLQFVDMNSSRNLFVLGFSMFFGLTLPNYLESNPGAINTGILEVDQILIVLLTTEMFVGGCLAFILDNTVPGSPEERGLIQWKAGAHANSDMSSSLKSYDFPIGMGIVKRITFLKYIPICPVFKGFSSSSKDQIAIPEDTPENTETASVCTKV

SEQ ID NO: 80838 - protein, 602 aa, Homo sapiens
  Payload ID: 16111
  Gene Symbol: SLC23A1
  Gene Name: solute carrier family 23 (ascorbic acid transporter), member 1
  Uniprot ID: Q9UHI7
  ENSP ID: ENSP00000302851
MRAQEDLEGRTQHETTRDPSTPLPTEPKFDMLYKIEDVPPWYLCILLGFQHYLTCFSGTIAVPFLLAEALCVGHDQHMVSQLIGTIFTCVGITTLIQTTVGIRLPLFQASAFAFLVPAKAILALERWKCPPEEEIYGNWSLPLNTSHIWHPRIREVGLHVQGAIMVSSVVEVVIGLLGLPGALLNYIGPLTVTPTVSLIGLSVFQAAGDRAGSHWGISACSILLIILFSQYLRNLTFLLPVYRWGKGLTLLRIQIFKMFPIMLAIMTVWLLCYVLTLTDVLPTDPKAYGFQARTDARGDIMAIAPWIRIPYPCQWGLPTVTAAAVLGMFSATLAGIIESIGDYYACARLAGAPPPPVHAINRGIFTEGICCIIAGLLGTGNGSTSSSPNIGVLGITKVGSRRVVQYGAAIMLVLGTIGKFTALFASLPDPILGGMFCTLFGMITAVGLSNLQFVDMNSSRNLFVLGFSMFFGLTLPNYLESNPGAINTGILEVDQILIVLLTTEMFVGGCLAFILDNTVPGSPEERGLIQWKAGAHANSDMSSSLKSYDFPIGMGIVKRITFLKYIPICPVFKGFSSSSKDQIAIPEDTPENTETASVCTKV

SEQ ID NO: 80839 - protein, 136 aa, Homo sapiens
  Payload ID: 16111
  Gene Symbol: SLC23A1
  Gene Name: solute carrier family 23 (ascorbic acid transporter), member 1
  ENSP ID: ENSP00000422688
  MOD_RES (1)..(1): Any amino acid
XPLNTSHIWHPRIRELHSPDHPLLPVPAQPHLPAACLPLGQGPHSPPHPDLQNVSCQWGLPTVTAAAVLGMFSATLAGIIESIGDYYACARLAGAPPPPVHAINRGIFTEGICCIIAGLLGTGNGSTSSSPNIGVL

SEQ ID NO: 80840 - protein, 169 aa, Homo sapiens
  Payload ID: 16111
  Gene Symbol: SLC23A1
  Gene Name: solute carrier family 23 (ascorbic acid transporter), member 1
  ENSP ID: ENSP00000427271
KLVQQLWKLGAVAKRERRGQADRGTVWTPAGGRTQCCGMKLLPSWRAVLPLGPSGRAWPWAQRPRRTAQTCAPKMRAQEDLEGRTQHETTRDPSTPLPTEPKFDMLYKIEDVPPWYLCILLGFQHYLTCFSGTIAVPFLLAEALCVGHDQHMVSQLIGTIFTCVGITTL

SEQ ID NO: 80841 - protein, 650 aa, Homo sapiens
  Payload ID: 16112
  Gene Symbol: SLC23A2
  Gene Name: solute carrier family 23 (ascorbic acid transporter), member 2
  Uniprot ID: Q9UGH3
  ENSP ID: ENSP00000344322
MMGIGKNTTSKSMEAGSSTEGKYEDEAKHPAFFTLPVVINGGATSSGEQDNEDTELMAIYTTENGIAEKSSLAETLDSTGSLDPQRSDMIYTIEDVPPWYLCIFLGLQHYLTCFSGTIAVPFLLADAMCVGYDQWATSQLIGTIFFCVGITTLLQTTFGCRLPLFQASAFAFLAPARAILSLDKWKCNTTDVSVANGTAELLHTEHIWYPRIREIQGAIIMSSLIEVVIGLLGLPGALLKYIGPLTITPTVALIGLSGFQAAGERAGKHWGIAMLTIFLVLLFSQYARNVKFPLPIYKSKKGWTAYKLQLFKMFPIILAILVSWLLCFIFTVTDVFPPDSTKYGFYARTDARQGVLLVAPWFKVPYPFQWGLPTVSAAGVIGMLSAVVASIIESIGDYYACARLSCAPPPPIHAINRGIFVEGLSCVLDGIFGTGNGSTSSSPNIGVLGITKVGSRRVIQCGAALMLALGMIGKFSALFASLPDPVLGALFCTLFGMITAVGLSNLQFIDLNSSRNLFVLGFSIFFGLVLPSYLRQNPLVTGITGIDQVLNVLLTTAMFVGGCVAFILDNTIPGTPEERGIRKWKKGVGKGNKSLDGMESYNLPFGMNIIKKYRCFSYLPISPTFVGYTWKGLRKSDNSRSSDEDSQATG

SEQ ID NO: 80842 - protein, 650 aa, Homo sapiens; identical to SEQ ID NO: 80841
  Payload ID: 16112
  Gene Symbol: SLC23A2
  Gene Name: solute carrier family 23 (ascorbic acid transporter), member 2
  Uniprot ID: Q9UGH3
  ENSP ID: ENSP00000368637

SEQ ID NO: 80843 - protein, 304 aa, Homo sapiens
  Payload ID: 16112
  Gene Symbol: SLC23A2
  Gene Name: solute carrier family 23 (ascorbic acid transporter), member 2
  ENSP ID: ENSP00000396364
  MOD_RES (1)..(1): Any amino acid
XGYDQWATSQLIGTIFFCVGITTLLQTTFGCRTIFLVLLFSQYARNVKFPLPIYKSKKGWTAYKLQLFKMFPIILAILVSWLLCFIFTVTDVFPPDSTKYGFYARTDARQGVLLVAPWFKVPYPFQWGLPTVSAAGVIGMLSAVVASIIESIGDYYACARLSCAPPPPIHAINRGIFVEGLSCVLDGIFGTGNGSTSSSPNIGVLGITKVGSRRVIQCGAALMLALGMIGKFSALFASLPDPVLGALFCTLFGMITAVGLSNLQFIDLNSSRNLFVLGFSIFFGLVLPSYLRQNPLVTGITGID

SEQ ID NO: 80844 - protein, 493 aa, Homo sapiens
  Payload ID: 16113
  Gene Symbol: SLC23A3
  Gene Name: solute carrier family 23, member 3
  Uniprot ID: Q6PIS1
  ENSP ID: ENSP00000295738
MSRSPLNPSQLRSVGSQDALAPLPPPAPQNPSTHSWDPLCGSLPWGLSCLLALQHVLVMASLLCVSHLLLLCSLSPGGLSYSPSQLLASSFFSCGMSTILQTWMGSRLPLVQAPSLEFLIPALVLTSQKLPRAIQTPGNSSLMLHLCRGPSCHGLGHWNTSLQEVSGAVVVSGLLQGMMGLLGSPGHVFPHCGPLVLAPSLVVAGLSAHREVAQFCFTHWGLALLTWAPASFMCAPGGELQRHQLTLLSLSSGSFRNCLPPPRHHGFGCLTQAGSQQVAHLVGLLCVGLGLSPRLAQLLTTIPLPVVGGVLGVTQAVVLSAGFSSFYLADIDSGRNIFIVGFSIFMALLLPRWFREAPVLFSTGWSPLDVLLHSLLTQPIFLAGLSGFLLENTIPGTQLERGLGQGLPSPFTAQEARMPQKPREKAAQVYRLPFPIQNLCPCIPQPLHCLCPLPEDPGDEEGGSSEPEEMADLLPGSGEPCPESSREGFRSQK

SEQ ID NO: 80845 - protein, 610 aa, Homo sapiens
  Payload ID: 16113
  Gene Symbol: SLC23A3
  Gene Name: solute carrier family 23, member 3
  Uniprot ID: Q6PIS1
  ENSP ID: ENSP00000386473
MSRSPLNPSQLRSVGSQDALAPLPPPAPQNPSTHSWDPLCGSLPWGLSCLLALQHVLVMASLLCVSHLLLLCSLSPGGLSYSPSQLLASSFFSCGMSTILQTWMGSRLPLVQAPSLEFLIPALVLTSQKLPRAIQTPGNSSLMLHLCRGPSCHGLGHWNTSLQEVSGAVVVSGLLQGMMGLLGSPGHVFPHCGPLVLAPSLVVAGLSAHREVAQFCFTHWGLALLVILLMVVCSQHLGSCQFHVCPWRRASTSSTHTPLPVFRLLSVLIPVACVWIVSAFVGFSVIPQELSAPTKAPWIWLPHPGEWNWPLLTPRALAAGISMALAASTSSLGCYALCGRLLHLPPPPPHACSRGLSLEGLGSVLAGLLGSPMGTASSFPNVGKVGLIQAGSQQVAHLVGLLCVGLGLSPRLAQLLTTIPLPVVGGVLGVTQAVVLSAGFSSFYLADIDSGRNIFIVGFSIFMALLLPRWFREAPVLFSTGWSPLDVLLHSLLTQPIFLAGLSGFLLENTIPGTQLERGLGQGLPSPFTAQEARMPQKPREKAAQVYRLPFPIQNLCPCIPQPLHCLCPLPEDPGDEEGGSSEPEEMADLLPGSGEPCPESSREGFRSQK

SEQ ID NO: 80846 - protein, 259 aa, Homo sapiens
  Payload ID: 16113
  Gene Symbol: SLC23A3
  Gene Name: solute carrier family 23, member 3
  ENSP ID: ENSP00000386989
MSRSPLNPSQLRSVGSQDALAPLPPPAPQNPSTHSWDPLCGSLPWGLSCLLALQHVLVMASLLCVSHLLLLCSLSPGGLSYSPSQLLASSFFSCGMSTILQTWMGSRLPLVQAPSLEFLIPALVLTSQKLPRAIQTPGNSSLMLHLCRGPSCHGLGHWNTSLQEVSGAVVVSGLLQGMMGLLGSPGHVFPHCGPLVLAPSLVVAGLSAHREVAQFCFTHWGLALLVILLMVVCSQHLGSCQFHVCPWRRASTSSTHTPL

SEQ ID NO: 80847 - protein, 179 aa, Homo sapiens
  Payload ID: 16113
  Gene Symbol: SLC23A3
  Gene Name: solute carrier family 23, member 3
  ENSP ID: ENSP00000388907
MSRSPLNPSQLRSVGSQDALAPLPPPAPQNPSTHSWDPLCGSLPWGLSCLLALQHVLVMASLLCVSHLLLLCSLSPGGLSYSPSQLLASSFFSCASLMLHLCRGPSCHGLGHWNTSLQEVSGAVVVSGLLQGMMGLLGSPGHVFPHCGPLVLAPSLVVAGLSAHREVAQFCFTHWGLAL

SEQ ID NO: 80848 - protein, 11 aa, Homo sapiens
  Payload ID: 16113
  Gene Symbol: SLC23A3
  Gene Name: solute carrier family 23, member 3
  ENSP ID: ENSP00000404697
  MOD_RES (1)..(1): Any amino acid
XCGCLLSRLHP

SEQ ID NO: 80849 - protein, 618 aa, Homo sapiens
  Payload ID: 16113
  Gene Symbol: SLC23A3
  Gene Name: solute carrier family 23, member 3
  Uniprot ID: Q6PIS1
  ENSP ID: ENSP00000406546
MSRSPLNPSQLRSVGSQDALAPLPPPAPQNPSTHSWDPLCGSLPWGLSCLLALQHVLVMASLLCVSHLLLLCSLSPGGLSYSPSQLLASSFFSCGMSTILQTWMGSRLPLVQAPSLEFLIPALVLTSQKLPRAIQTPGNCEHRARARASLMLHLCRGPSCHGLGHWNTSLQEVSGAVVVSGLLQGMMGLLGSPGHVFPHCGPLVLAPSLVVAGLSAHREVAQFCFTHWGLALLVILLMVVCSQHLGSCQFHVCPWRRASTSSTHTPLPVFRLLSVLIPVACVWIVSAFVGFSVIPQELSAPTKAPWIWLPHPGEWNWPLLTPRALAAGISMALAASTSSLGCYALCGRLLHLPPPPPHACSRGLSLEGLGSVLAGLLGSPMGTASSFPNVGKVGLIQAGSQQVAHLVGLLCVGLGLSPRLAQLLTTIPLPVVGGVLGVTQAVVLSAGFSSFYLADIDSGRNIFIVGFSIFMALLLPRWFREAPVLFSTGWSPLDVLLHSLLTQPIFLAGLSGFLLENTIPGTQLERGLGQGLPSPFTAQEARMPQKPREKAAQVYRLPFPIQNLCPCIPQPLHCLCPLPEDPGDEEGGSSEPEEMADLLPGSGEPCPESSREGFRSQK

SEQ ID NO: 80850 - protein, 1099 aa, Homo sapiens
  Payload ID: 16114
  Gene Symbol: SLC24A1
  Gene Name: solute carrier family 24 (sodium/potassium/calcium exchanger), member 1
  Uniprot ID: O60721
  ENSP ID: ENSP00000261892
MGKLIRMGPQERWLLRTKRLHWSRLLFLLGMLIIGSTYQHLRRPRGLSSLWAAVSSHQPIKLASRDLSSEEMMMMSSSPSKPSSEMGGKMLVPQASVGSDEATLSMTVENIPSMPKRTAKMIPTTTKNNYSPTAAGTERRKEDTPTSSRTLTYYTSTSSRQIVKKYTPTPRGEMKSYSPTQVREKVKYTPSPRGRRVGTYVPSTFMTMETSHAITPRTTVKDSDITATYKILETNSLKRIMEETTPTTLKGMFDSTPTFLTHEVEANVLTSPRSVMEKNNLFPPRRVESNSSAHPWGLVGKSNPKTPQGTVLLHTPATSEGQVTISTMTGSSPAETKAFTAAWSLRNPSPRTSVSAIKTAPAIVWRLAKKPSTAPSTSTTPTVRAKLTMQVHHCVVVKPTPAMLTTPSPSLTTALLPEELSPSPSVLPPSLPDLHPKGEYPPDLFSVEERRQGWVVLHVFGMMYVFVALAIVCDEYFVPALGVITDKLQISEDVAGATFMAAGGSAPELFTSLIGVFISHSNVGIGTIVGSAVFNILFVIGTCSLFSREILNLTWWPLFRDVSFYILDLIMLILFFLDSLIAWWESLLLLLAYAFYVFTMKWNKHIEVWVKEQLSRRPVAKVMALEDLSKPGDGAIAVDELQDNKKLKLPSLLTRGSSSTSLHNSTIRSTIYQLMLHSLDPLREVRLAKEKEEESLNQGARAQPQAKAESKPEEEEPAKLPAVTVTPAPVPDIKGDQKENPGGQEDVAEAESTGEMPGEEGETAGEGETEEKSGGETQPEGEGETETQGKGEECEDENEAEGKGDNEGEDEGEIHAEDGEMKGNEGETESQELSAENHGEAKNDEKGVEDGGGSDGGDSEEEEEEEEEQEEEEEEEEQEEEEEEEEEEEEKGNEEPLSLDWPETRQKQAIYLFLLPIVFPLWLTVPDVRRQESRKFFVFTFLGSIMWIAMFSYLMVWWAHQVGETIGISEEIMGLTILAAGTSIPDLITSVIVARKGLGDMAVSSSVGSNIFDITVGLPVPWLLFSLINGLQPVPVSSNGLFCAIVLLFLMLLFVISSIASCKWRMNKILGFTMFLLYFVFLIISVMLEDRIISCPVSV

SEQ ID NO: 80851 - protein, 1069 aa, Homo sapiens
  Payload ID: 16114
  Gene Symbol: SLC24A1
  Gene Name: solute carrier family 24 (sodium/potassium/calcium exchanger), member 1
  Uniprot ID: O60721
  ENSP ID: ENSP00000341837
MGKLIRMGPQERWLLRTKRLHWSRLLFLLGMLIIGSTYQHLRRPRGLSSLWAAVSSHQPIKLASRDLSSEEMMMMSSSPSKPSSEMGGKMLVPQASVGSDEATLSMTVENIPSMPKRTAKMIPTTTKNNYSPTAAGTERRKEDTPTSSRTLTYYTSTSSRQIVKKYTPTPRGEMKSYSPTQVREKVKYTPSPRGRRVGTYVPSTFMTMETSHAITPRTTVKDSDITATYKILETNSLKRIMEETTPTTLKGMFDSTPTFLTHEVEANVLTSPRSVMEKNNLFPPRRVESNSSAHPWGLVGKSNPKTPQGTVLLHTPATSEGQVTISTMTGSSPAETKAFTAAWSLRNPSPRTSVSAIKTAPAIVWRLAKKPSTAPSTSTTPTVRAKLTMQVHHCVVVKPTPAMLTTPSPSLTTALLPEELSPSPSVLPPSLPDLHPKGEYPPDLFSVEERRQGWVVLHVFGMMYVFVALAIVCDEYFVPALGVITDKLQISEDVAGATFMAAGGSAPELFTSLIGVFISHSNVGIGTIVGSAVFNILFVIGTCSLFSREILNLTWWPLFRDVSFYILDLIMLILFFLDSLIAWWESLLLLLAYAFYVFTMKWNKHIEVWVKEQLSRRPVAKVMALEDLSKPGDGAIAVDELQDNKKLKLPSLLTRGSSSTSLHNSTIRSTIYQLMLHSLDPLREVRLAKEKEEESLNQGARAQPQAKAESKPEEEEPAKLPAVTVTPAPVPDIKGDQKENPGGQEDVAEAESTGEMPGEEGETAGEGETEEKSGGETQPEGEGETETQGKGEECEDENEAEGKGDNEGEDEGEIHAEDGEMKGNEGETESQELSAENHGEAKNDEKGVEDGGGSDGGDSEEEEEEEEEQEEEEEEEEQEEEEEEEEEEEEKGNEEPLSLDWPETRQKQAIYLFLLPIVFPLWLTVPDVRRQVGETIGISEEIMGLTILAAGTSIPDLITSVIVARKGLGDMAVSSSVGSNIFDITVGLPVPWLLFSLINGLQPVPVSSNGLFCAIVLLFLMLLFVISSIASCKWRMNKILGFTMFLLYFVFLIISVMLEDRIISCPVSV

SEQ ID NO: 80852 - protein, 1069 aa, Homo sapiens; identical to SEQ ID NO: 80851
  Payload ID: 16114
  Gene Symbol: SLC24A1
  Gene Name: solute carrier family 24 (sodium/potassium/calcium exchanger), member 1
  Uniprot ID: O60721
  ENSP ID: ENSP00000381991

SEQ ID NO: 80853 - protein, 1081 aa, Homo sapiens
  Payload ID: 16114
  Gene Symbol: SLC24A1
  Gene Name: solute carrier family 24 (sodium/potassium/calcium exchanger), member 1
  Uniprot ID: O60721
  ENSP ID: ENSP00000439190
MGKLIRMGPQERWLLRTKRLHWSRLLFLLGMLIIGSTYQHLRRPRGLSSLWAAVSSHQPIKLASRDLSSEEMMMMSSSPSKPSSEMGGKMLVPQASVGSDEATLSMTVENIPSMPKRTAKMIPTTTKNNYSPTAAGTERRKEDTPTSSRTLTYYTSTSSRQIVKKYTPTPRGEMKSYSPTQVREKVKYTPSPRGRRVGTYVPSTFMTMETSHAITPRTTVKDSDITATYKILETNSLKRIMEETTPTTLKGMFDSTPTFLTHEVEANVLTSPRSVMEKNNLFPPRRVESNSSAHPWGLVGKSNPKTPQGTVLLHTPATSEGQVTISTMTGSSPAETKAFTAAWSLRNPSPRTSVSAIKTAPAIVWRLAKKPSTAPSTSTTPTVRAKLTMQVHHCVVVKPTPAMLTTPSPSLTTALLPEELSPSPSVLPPSLPDLHPKGEYPPDLFSVEERRQGWVVLHVFGMMYVFVALAIVCDEYFVPALGVITDKLQISEDVAGATFMAAGGSAPELFTSLIGVFISHSNVGIGTIVGSAVFNILFVIGTCSLFSREILNLTWWPLFRDVSFYILDLIMLILFFLDSLIAWWESLLLLLAYAFYVFTMKWNKHIEVWVKEQLSRRPVAKVMALEDLSKLPSLLTRGSSSTSLHNSTIRSTIYQLMLHSLDPLREVRLAKEKEEESLNQGARAQPQAKAESKPEEEEPAKLPAVTVTPAPVPDIKGDQKENPGGQEDVAEAESTGEMPGEEGETAGEGETEEKSGGETQPEGEGETETQGKGEECEDENEAEGKGDNEGEDEGEIHAEDGEMKGNEGETESQELSAENHGEAKNDEKGVEDGGGSDGGDSEEEEEEEEEQEEEEEEEEQEEEEEEEEEEEEKGNEEPLSLDWPETRQKQAIYLFLLPIVFPLWLTVPDVRRQESRKFFVFTFLGSIMWIAMFSYLMVWWAHQVGETIGISEEIMGLTILAAGTSIPDLITSVIVARKGLGDMAVSSSVGSNIFDITVGLPVPWLLFSLINGLQPVPVSSNGLFCAIVLLFLMLLFVISSIASCKWRMNKILGFTMFLLYFVFLIISVMLEDRIISCPVSV

SEQ ID NO: 80854 - protein, 1012 aa, Homo sapiens
  Payload ID: 16114
  Gene Symbol: SLC24A1
  Gene Name: solute carrier family 24 (sodium/potassium/calcium exchanger), member 1
  ENSP ID: ENSP00000439693
MGKLIRMGPQERWLLRTKRLHWSRLLFLLGMLIIGSTYQHLRRPRGLSSLWAAVSSHQPIKLASRDLSSEEMMMMSSSPSKPSSEMGGKMLVPQASVGSDEATLSMTVENIPSMPKRTAKMIPTTTKNNYSPTAAGTERRKEDTPTSSRTLTYYTSTSSRQIVKKYTPTPRGEMKSYSPTQVREKVKYTPSPRGRRVGTYVPSTFMTMETSHAITPRTTVKDSDITATYKILETNSLKRIMEETTPTTLKGMFDSTPTFLTHEVEANVLTSPRSVMEKNNLFPPRRVESNSSAHPWGLVGKSNPKTPQGTVLLHTPATSEGQVTISTMTGSSPAETKAFTAAWSLRNPSPRTSVSAIKTAPAIVWRLAKKPSTAPSTSTTPTVRAKLTMQVHHCVVVKPTPAMLTTPSPSLTTALLPEELSPSPSVLPPSLPDLHPKGEYPPDLFSVEERRQGWVVLHVFGMMYVFVALAIVCDEYFVPALGVITDKLQISEDVAGATFMAAGGSAPELFTSLIGVFISHSNVGIGTIVGSAVFNILFVIGTCSLFSREILNLTWWPLFRDVSFYILDLIMLILFFLDSLIAWWESLLLLLAYAFYVFTMKWNKHIEVWVKEQLSRRPVAKVMALEDLSKLPSLLTRGSSSTSLHNSTIRSTIYQLMLHSLDPLREVRLAKEKEEESLNQGARAQPQAKAESKPEEEEPAKLPAVTVTPAPVPDIKGDQKENPGGQEDVAEAESTGEMPGEEGETAGEGETEEKSGGETQPEGEGETETQGKGEECEDENEAEGKGDNEGEDEGEIHAEDGEMKGNEGETESQELSAENHGEAKNDEKGVEDGGGSDGGDSEEEEEEEEEQEEEEEEEEQEEEEEEEEEEEEKGNEEPLSLDWPETRQKQAIYLFLLPIVFPLWLTVPDVRRQESRKFFVFTFLGSIMWIAMFSYLMVWWAHQVGETIGISEEIMGLTILAAGTSIPDLITSVIVARKGLGDMAVSSSVGSNIFDITVGVGSCEMFQHGAIH

SEQ ID NO: 80855 - protein, 985 aa, Homo sapiens
  Payload ID: 16114
  Gene Symbol: SLC24A1
  Gene Name: solute carrier family 24 (sodium/potassium/calcium exchanger), member 1
  ENSP ID: ENSP00000445163
MGKLIRMGPQERWLLRTKRLHWSRLLFLLGMLIIGSTYQHLRRPRGLSSLWAAVSSHQPIKLASRDLSSEEMMMMSSSPSKPSSEMGGKMLVPQASVGSDEATLSMTVENIPSMPKRTAKMIPTTTKNNYSPTAAGTERRKEDTPTSSRTLTYYTSTSSRQIVKKYTPTPRGEMKSYSPTQVREKVKYTPSPRGRRVGTYVPSTFMTMETSHAITPRTTVKDSDITATYKILETNSLKRIMEETTPTTLKGMFDSTPTFLTHEVEANVLTSPRSVMEKNNLFPPRRVESNSSAHPWGLVGKSNPKTPQGTVLLHTPATSEGQVTISTMTGSSPAETKAFTAAWSLRNPSPRTSVSAIKTAPAIVWRLAKKPSTAPSTSTTPTVRAKLTMQVHHCVVVKPTPAMLTTPSPSLTTALLPEELSPSPSVLPPSLPDLHPKGEYPPDLFSVEERRQGWVVLHVFGMMYVFVALAIVCDEYFVPALGVITDKLQISEDVAGATFMAAGGSAPELFTSLIGVFISHSNVGIGTIVGSAVFNILFVIGTCSLFSREILNLTWWPLFRDVSFYILDLIMLILFFLDSLIAWWESLLLLLAYAFYVFTMKWNKHIEVWVKEQLSRRPVAKVMALEDLSKEDVAEAESTGEMPGEEGETAGEGETEEKSGGETQPEGEGETETQGKGEECEDENEAEGKGDNEGEDEGEIHAEDGEMKGNEGETESQELSAENHGEAKNDEKGVEDGGGSDGGDSEEEEEEEEEQEEEEEEEEQEEEEEEEEEEEEKGNEEPLSLDWPETRQKQAIYLFLLPIVFPLWLTVPDVRRQESRKFFVFTFLGSIMWIAMFSYLMVWWAHQVGETIGISEEIMGLTILAAGTSIPDLITSVIVARKGLGDMAVSSSVGSNIFDITVGLPVPWLLFSLINGLQPVPVSSNGLFCAIVLLFLMLLFVISSIASCKWRMNKILGFTMFLLYFVFLIISVMLEDRIISCPVSV

SEQ ID NO: 80856 - protein, 56 aa, Homo sapiens
  Payload ID: 16114
  Gene Symbol: SLC24A1
  Gene Name: solute carrier family 24 (sodium/potassium/calcium exchanger), member 1
  ENSP ID: ENSP00000445577
  MOD_RES (1)..(1): Any amino acid
XRKGLGDMAVSSSVGSNIFDITVGVWLLLPRLVCNGVISAHHNLHLPGSSNSPASA

SEQ ID NO: 80857 - protein, 644 aa, Homo sapiens
  Payload ID: 16115
  Gene Symbol: SLC24A2
  Gene Name: solute carrier family 24 (sodium/potassium/calcium exchanger), member 2
  Uniprot ID: Q9UI40
  ENSP ID: ENSP00000286344
MDLQQSTTITSLEKWCLDESLSGCRRHYSVKKKLKLIRVLGLFMGLVAISTVSFSISAFSETDTQSTGEASVVSGPRVAQGYHQRTLLDLNDKILDYTPQPPLSKEGESENSTDHAQGDYPKDIFSLEERRKGAIILHVIGMIYMFIALAIVCDEFFVPSLTVITEKLGISDDVAGATFMAAGGSAPELFTSLIGVFIAHSNVGIGTIVGSAVFNILFVIGMCALFSREILNLTWWPLFRDVSFYIVDLIMLIIFFLDNVIMWWESLLLLTAYFCYVVFMKFNVQVEKWVKQMINRNKVVKVTAPEAQAKPSAARDKDEPTLPAKPRLQRGGSSASLHNSLMRNSIFQLMIHTLDPLAEGRFREKASILHKIAKKKCHVDENERQNGAANHVEKIELPNSTSTDVEMTPSSDASEPVQNGNLSHNIEGAEAQTADEEEDQPLSLAWPSETRKQVTFLIVFPIVFPLWITLPDVRKPSSRKFFPITFFGSITWIAVFSYLMVWWAHQVGETIGISEEIMGLTILAAGTSIPDLITSVIVARKGLGDMAVSSSVGSNIFDITVGLPLPWLLYTVIHRFQPVAVSSNGLFCAIVLLFIMLLFVILSIALCKWRMNKILGFIMFGLYFVFLVVSVLLEDRILTCPVSI

SEQ ID NO: 80858 - protein, 661 aa, Homo sapiens
  Payload ID: 16115
  Gene Symbol: SLC24A2
  Gene Name: solute carrier family 24 (sodium/potassium/calcium exchanger), member 2
  Uniprot ID: Q9UI40
  ENSP ID: ENSP00000344801
MDLQQSTTITSLEKWCLDESLSGCRRHYSVKKKLKLIRVLGLFMGLVAISTVSFSISAFSETDTQSTGEASVVSGPRVAQGYHQRTLLDLNDKILDYTPQPPLSKEGESENSTDHAQGDYPKDIFSLEERRKGAIILHVIGMIYMFIALAIVCDEFFVPSLTVITEKLGISDDVAGATFMAAGGSAPELFTSLIGVFIAHSNVGIGTIVGSAVFNILFVIGMCALFSREILNLTWWPLFRDVSFYIVDLIMLIIFFLDNVIMWWESLLLLTAYFCYVVFMKFNVQVEKWVKQMINRNKVVKVTAPEAQAKPSAARDKDEPTLPAKPRLQRGGSSASLHNSLMRNSIFQLMIHTLDPLAEELGSYGKLKYYDTMTEEGRFREKASILHKIAKKKCHVDENERQNGAANHVEKIELPNSTSTDVEMTPSSDASEPVQNGNLSHNIEGAEAQTADEEEDQPLSLAWPSETRKQVTFLIVFPIVFPLWITLPDVRKPSSRKFFPITFFGSITWIAVFSYLMVWWAHQVGETIGISEEIMGLTILAAGTSIPDLITSVIVARKGLGDMAVSSSVGSNIFDITVGLPLPWLLYTVIHRFQPVAVSSNGLFCAIVLLFIMLLFVILSIALCKWRMNKILGFIMFGLYFVFLVVSVLLEDRILTCPVSI

SEQ ID NO: 80859 - protein, 644 aa, Homo sapiens
  Payload ID: 16116
  Gene Symbol: SLC24A3
  Gene Name: solute carrier family 24 (sodium/potassium/calcium exchanger), member 3
  Uniprot ID: Q9HC58
  ENSP ID: ENSP00000333519
MRPSGDEDRARRRRRRRRRRDLLLSQLCFLASVALLLWSLSSLREQKELDLMDLVGEDRKWMMARKLMQVNDTLTSEDAGLRNSKNCTEPALHEFPNDIFTNEDRRQGAVVLHVLCAIYMFYALAIVCDDFFVPSLEKICERLHLSEDVAGATFMAAGSSAPELFTSVIGVFITKGDVGVGTIVGSAVFNILCIIGVCGLFAGQVVALSSWCLLRDSIYYTLSVIALIVFIYDEKVSWWESLVLVLMYLIYIVIMKYNACIHQCFERRTKGAGNMVNGLANNAEIDDSSNCDATVVLLKKANFHRKASVIMVDELLSAYPHQLSFSEAGLRIMITSHFPPKTRLSMASRMLINERQRLINSRAYTNGESEVAIKIPIKHTVENGTGPSSAPDRGVNGTRRDDVVAEAGNETENENEDNENDEEEEEDEDDDEGPYTPFDTPSGKLETVKWAFTWPLSFVLYFTVPNCNKPRWEKWFMVTFASSTLWIAAFSYMMVWMVTIIGYTLGIPDVIMGITFLAAGTSVPDCMASLIVARQGMGDMAVSNSIGSNVFDILIGLGLPWALQTLAVDYGSYIRLNSRGLIYSVGLLLASVFVTVFGVHLNKWQLDKKLGCGCLLLYGVFLCFSIMTEFNVFTFVNLPMCGDH

SEQ ID NO: 80860 - protein, 644 aa, Homo sapiens; identical to SEQ ID NO: 80859
  Payload ID: 16116
  Gene Symbol: SLC24A3
  Gene Name: solute carrier family 24 (sodium/potassium/calcium exchanger), member 3
  Uniprot ID: Q9HC58
  ENSP ID: ENSP00000482967

SEQ ID NO: 80861 - protein, 558 aa, Homo sapiens
  Payload ID: 16117
  Gene Symbol: SLC24A4
  Gene Name: solute carrier family 24 (sodium/potassium/calcium exchanger), member 4
  Uniprot ID: Q8NFF2
  ENSP ID: ENSP00000376948
MAPVNGTQTAKNCTDPAIHEFPTDLFSNKERQHGAVLLHILGALYMFYALAIVCDDFFVPSLEKICERLHLSEDVAGATFMAAGSSTPELFASVIGVFITHGDVGVGTIVGSAVFNILCIIGVCGLFAGQVVRLTWWAVCRDSVYYTISVIVLIVFIYDEQIVWWEGLVLIILYVFYILIMKYNVKMQAFFTVKQKSIANGNPVNSELEAGNDFYDGSYDDPSVPLLGQVKEKPQYGKNPVVMVDEIMSSSPPKFTFPEAGLRIMITNKFGPRTRLRMASRIIINERQRLINSANGVSSKPLQNGRHENIENGNVPVENPEDPQQNQEQQPPPQPPPPEPEPVEADFLSPFSVPEARGDKVKWVFTWPLIFLLCVTIPNCSKPRWEKFFMVTFITATLWIAVFSYIMVWLVTIIGYTLGIPDVIMGITFLAAGTSVPDCMASLIVARQGLGDMAVSNTIGSNVFDILVGLGVPWGLQTMVVNYGSTVKINSRGLVYSVVLLLGSVALTVLGIHLNKWRLDRKLGVYVLVLYAIFLCFSIMIEFNVFTFVNLPMCREDD

SEQ ID NO: 80862 - protein, 622 aa, Homo sapiens
  Payload ID: 16117
  Gene Symbol: SLC24A4
  Gene Name: solute carrier family 24 (sodium/potassium/calcium exchanger), member 4
  Uniprot ID: Q8NFF2
  ENSP ID: ENSP00000431840
MALRGTLRPLKVRRRREMLPQQVGFVCAVLALVCCASGLFGSLGHKTASASKRVLPDTWRNRKLMAPVNGTQTAKNCTDPAIHEFPTDLFSNKERQHGAVLLHILGALYMFYALAIVCDDFFVPSLEKICERLHLSEDVAGATFMAAGSSTPELFASVIGVFITHGDVGVGTIVGSAVFNILCIIGVCGLFAGQVVRLTWWAVCRDSVYYTISVIVLIVFIYDEQIVWWEGLVLIILYVFYILIMKYNVKMQAFFTVKQKSIANGNPVNSELEAGNDFYDGSYDDPSVPLLGQVKEKPQYGKNPVVMVDEIMSSSPPKFTFPEAGLRIMITNKFGPRTRLRMASRIIINERQRLINSANGVSSKPLQNGRHENIENGNVPVENPEDPQQNQEQQPPPQPPPPEPEPVEADFLSPFSVPEARGDKVKWVFTWPLIFLLCVTIPNCSKPRWEKFFMVTFITATLWIAVFSYIMVWLVTIIGYTLGIPDVIMGITFLAAGTSVPDCMASLIVARQGLGDMAVSNTIGSNVFDILVGLGVPWGLQTMVVNYGSTVKINSRGLVYSVVLLLGSVALTVLGIHLNKWRLDRKLGVYVLVLYAIFLCFSIMIEFNVFTFVNLPMCREDD

SEQ ID NO: 80863 - protein, 464 aa, Homo sapiens
  Payload ID: 16117
  Gene Symbol: SLC24A4
  Gene Name: solute carrier family 24 (sodium/potassium/calcium exchanger), member 4
  ENSP ID: ENSP00000432464
  MOD_RES (1)..(1): Any amino acid
XVCDDFFVPSLEKICERLHLSEDVAGATFMAAGSSTPELFASVIGVFITHGDVGVGTIVGSAVFNILCIIGVCGLFAGQVVRLTWWAVCRDSVYYTISVIVLIVFIYDEQIVWWEGLVLIILYVFYILIMKYNVKMQAFFTVKQKSIANGNPVNSELEAVKEKPQYGKNPVVMVDEIMSSSPPKFTFPEAGLRIMITNKFGPRTRLRMASRIIINERQRLINSANGVSSKPLQNGRHENIENGNVPVENPEDPQQNQEQQPPPQPPPPEPEPVEADFLSPFSVPEARGDKVKWVFTWPLIFLLCVTIPNCSKPRWEKFFMVTFITATLWIAVFSYIMVWLVTIIGYTLGIPDVIMGITFLAAGTSVPDCMASLIVARQGLGDMAVSNTIGSNVFDILVGLGVPWGLQTMVVNYGSTVKINSRGLVYSVVLLLGSVALTCSSEVPGIQPQEALIEGQGGRQWKER

SEQ ID NO: 80864 - protein, 603 aa, Homo sapiens
  Payload ID: 16117
  Gene Symbol: SLC24A4
  Gene Name: solute carrier family 24 (sodium/potassium/calcium exchanger), member 4
  Uniprot ID: Q8NFF2
  ENSP ID: ENSP00000433302
MALRGTLRPLKVRRRREMLPQQVGFVCAVLALVCCASGLFGSLGHKTASASKRVLPDTWRNRKLMAPVNGTQTAKNCTDPAIHEFPTDLFSNKERQHGAVLLHILGALYMFYALAIVCDDFFVPSLEKICERLHLSEDVAGATFMAAGSSTPELFASVIGVFITHGDVGVGTIVGSAVFNILCIIGVCGLFAGQVVRLTWWAVCRDSVYYTISVIVLIVFIYDEQIVWWEGLVLIILYVFYILIMKYNVKMQAFFTVKQKSIANGNPVNSELEAVKEKPQYGKNPVVMVDEIMSSSPPKFTFPEAGLRIMITNKFGPRTRLRMASRIIINERQRLINSANGVSSKPLQNGRHENIENGNVPVENPEDPQQNQEQQPPPQPPPPEPEPVEADFLSPFSVPEARGDKVKWVFTWPLIFLLCVTIPNCSKPRWEKFFMVTFITATLWIAVFSYIMVWLVTIIGYTLGIPDVIMGITFLAAGTSVPDCMASLIVARQGLGDMAVSNTIGSNVFDILVGLGVPWGLQTMVVNYGSTVKINSRGLVYSVVLLLGSVALTVLGIHLNKWRLDRKLGVYVLVLYAIFLCFSIMIEFNVFTFVNLPMCREDD

SEQ ID NO: 80865 - protein, 64 aa, Homo sapiens
  Payload ID: 16117
  Gene Symbol: SLC24A4
  Gene Name: solute carrier family 24 (sodium/potassium/calcium exchanger), member 4
  ENSP ID: ENSP00000452099
MFYALAIVCDDFFVPSLEKICERLHLSEDVAGATFMAAGSSTPELFASVIGVFITHGDVGVGTI

SEQ ID NO: 80866 - protein, 500 aa, Homo sapiens
  Payload ID: 16118
  Gene Symbol: SLC24A5
  Gene Name: solute carrier family 24 (sodium/potassium/calcium exchanger), member 5
  Uniprot ID: Q71RS6
  ENSP ID: ENSP00000341550
MQTKGGQTWARRALLLGILWATAHLPLSGTSLPQRLPRATGNSTQCVISPSSEFPEGFFTRQERRDGGIIIYFLIIVYMFMAISIVCDEYFLPSLEIISESLGLSQDVAGTTFMAAGSSAPELVTAFLGVFITKGDIGISTILGSAIYNLLGICAACGLLSNTVSTLSCWPLFRDCAAYTISAAAVLGIIYDNQVYWYEGALLLLIYGLYVLVLCFDIKINQYIIKKCSPCCACLAKAMERSEQQPLMGWEDEGQPFIRRQSRTDSGIFYEDSGYSQLSISLHGLSQVSEDPPSVFNMPEADLKRIFWVLSLPIITLLFLTTPDCRKKFWKNYFVITFFMSAIWISAFTYILVWMVTITGETLEIPDTVMGLTLLAAGTSIPDTIASVLVARKGKGDMAMSNIVGSNVFDMLCLGIPWFIKTAFINGSAPAEVNSRGLTYITISLNISIIFLFLAVHFNGWKLDRKLGIVCLLSYLGLATLSVLYELGIIGNNKIRGCGG

SEQ ID NO: 80867 - protein, 440 aa, Homo sapiens
  Payload ID: 16118
  Gene Symbol: SLC24A5
  Gene Name: solute carrier family 24 (sodium/potassium/calcium exchanger), member 5
  Uniprot ID: Q71RS6
  ENSP ID: ENSP00000389966
MQTKGGQTWARRALLLGILWATAHLPLSGTSLPQRLPRATALGLSQDVAGTTFMAAGSSAPELVTAFLGVFITKGDIGISTILGSAIYNLLGICAACGLLSNTVSTLSCWPLFRDCAAYTISAAAVLGIIYDNQVYWYEGALLLLIYGLYVLVLCFDIKINQYIIKKCSPCCACLAKAMERSEQQPLMGWEDEGQPFIRRQSRTDSGIFYEDSGYSQLSISLHGLSQVSEDPPSVFNMPEADLKRIFWVLSLPIITLLFLTTPDCRKKFWKNYFVITFFMSAIWISAFTYILVWMVTITGETLEIPDTVMGLTLLAAGTSIPDTIASVLVARKGKGDMAMSNIVGSNVFDMLCLGIPWFIKTAFINGSAPAEVNSRGLTYITISLNISIIFLFLAVHFNGWKLDRKLGIVCLLSYLGLATLSVLYELGIIGNNKIRGCGG

SEQ ID NO: 80868 - protein, 122 aa, Homo sapiens
  Payload ID: 16118
  Gene Symbol: SLC24A5
  Gene Name: solute carrier family 24 (sodium/potassium/calcium exchanger), member 5
  ENSP ID: ENSP00000453395
MQTKGGQTWARRALLLGILWATAHLPLSGTSLPQRLPRATGNSTQCVISPSSEFPEGFFTRQERRDGGIIIYFLIIVYMFMAISIVCDEYFLPSLEIISECKWLESCPVTFWESVPHRYDCL

SEQ ID NO: 80869 - protein, 87 aa, Homo sapiens
  Payload ID: 16119
  Gene Symbol: SLC25A12
  Gene Name: solute carrier family 25 (aspartate/glutamate carrier), member 12
  ENSP ID: ENSP00000263812
MAVKVQTTKRGDPHELRNIFLQYASTEVDGERYMTPEDFVQRYLGLYNDPNSNPKIVQLLAGVADQTKDGKCQRNFWTDYYSSSYPF

SEQ ID NO: 80870 - protein, 678 aa, Homo sapiens
  Payload ID: 16119
  Gene Symbol: SLC25A12
  Gene Name: solute carrier family 25 (aspartate/glutamate carrier), member 12
  Uniprot ID: O75746
  ENSP ID: ENSP00000388658
MAVKVQTTKRGDPHELRNIFLQYASTEVDGERYMTPEDFVQRYLGLYNDPNSNPKIVQLLAGVADQTKDGLISYQEFLAFESVLCAPDSMFIVAFQLFDKSGNGEVTFENVKEIFGQTIIHHHIPFNWDCEFIRLHFGHNRKKHLNYTEFTQFLQELQLEHARQAFALKDKSKSGMISGLDFSDIMVTIRSHMLTPFVEENLVSAAGGSISHQVSFSYFNAFNSLLNNMELVRKIYSTLAGTRKDVEVTKEEFAQSAIRYGQVTPLEIDILYQLADLYNASGRLTLADIERIAPLAEGALPYNLAELQRQQSPGLGRPIWLQIAESAYRFTLGSVAGAVGATAVYPIDLVKTRMQNQRGSGSVVGELMYKNSFDCFKKVLRYEGFFGLYRGLIPQLIGVAPEKAIKLTVNDFVRDKFTRRDGSVPLPAEVLAGGCAGGSQVIFTNPLEIVKIRLQVAGEITTGPRVSALNVLRDLGIFGLYKGAKACFLRDIPFSAIYFPVYAHCKLLLADENGHVGGLNLLAAGAMAGVPAASLVTPADVIKTRLQVAARAGQTTYSGVIDCFRKILREEGPSAFWKGTAARVFRSSPQFGVTLVTYELLQRWFYIDFGGLKPAGSEPTPKSRIADLPPANPDHIGGYRLATATFAGIENKFGLYLPKFKSPSVAVVQPKAAVAATQ

SEQ ID NO: 80871 - protein, 210 aa, Homo sapiens
  Payload ID: 16119
  Gene Symbol: SLC25A12
  Gene Name: solute carrier family 25 (aspartate/glutamate carrier), member 12
  ENSP ID: ENSP00000413968
MAVKVQTTKRGDPHELRNIFLQYASTEVDGERYMTPEDFVQRYLGLYNDPNSNPKIVQLLAGVADQTKDGLISYQEFLAFESVLCAPDSMFIVAFQLFDKSGNGEVTFGGVLWPHRWYSSSFQAHSWNRHGGSLGEECQPRSEKMSKKFLDRLLFIIISLLTGIVNLSDCILGITGRSILTTQNSRSFSRSCNWNMQDKPLHSKTKAKVA

SEQ ID NO: 80872 - protein, 175 aa, Homo sapiens
  Payload ID: 16119
  Gene Symbol: SLC25A12
  Gene Name: solute carrier family 25 (aspartate/glutamate carrier), member 12
  ENSP ID: ENSP00000437845
VQTTKRGDPHELRNIFLQYASTEVDGERYMTPEDFVQRYLGLYNDPNSNPKIVQLLAGVADQTKDGLISYQEFLAFESVLCAPDSMFIVAFQLFDKSGNGEVTFGFWIWGKGGVLWPHRWYSSSFQAHSWNRHGGSLGEECQPRSEGRNESCIPFQRKDENPISPVTSNAFFQLC

SEQ ID NO: 80873 - protein, 675 aa, Homo sapiens
  Payload ID: 16120
  Gene Symbol: SLC25A13
  Gene Name: solute carrier family 25 (aspartate/glutamate carrier), member 13
  Uniprot ID: Q9UJS0
  ENSP ID: ENSP00000265631
MAAAKVALTKRADPAELRTIFLKYASIEKNGEFFMSPNDFVTRYLNIFGESQPNPKTVELLSGVVDQTKDGLISFQEFVAFESVLCAPDALFMVAFQLFDKAGKGEVTFEDVKQVFGQTTIHQHIPFNWDSEFVQLHFGKERKRHLTYAEFTQFLLEIQLEHAKQAFVQRDNARTGRVTAIDFRDIMVTIRPHVLTPFVEECLVAAAGGTTSHQVSFSYFNGFNSLLNNMELIRKIYSTLAGTRKDVEVTKEEFVLAAQKFGQVTPMEVDILFQLADLYEPRGRMTLADIERIAPLEEGTLPFNLAEAQRQKASGDSARPVLLQVAESAYRFGLGSVAGAVGATAVYPIDLVKTRMQNQRSTGSFVGELMYKNSFDCFKKVLRYEGFFGLYRGLLPQLLGVAPEKAIKLTVNDFVRDKFMHKDGSVPLAAEILAGGCAGGSQVIFTNPLEIVKIRLQVAGEITTGPRVSALSVVRDLGFFGIYKGAKACFLRDIPFSAIYFPCYAHVKASFANEDGQVSPGSLLLAGAIAGMPAASLVTPADVIKTRLQVAARAGQTTYSGVIDCFRKILREEGPKALWKGAGARVFRSSPQFGVTLLTYELLQRWFYIDFGGVKPMGSEPVPKSRINLPAPNPDHVGGYKLAVATFAGIENKFGLYLPLFKPSVSTSKAIGGGP

SEQ ID NO: 80874 - protein, 676 aa, Homo sapiens
  Payload ID: 16120
  Gene Symbol: SLC25A13
  Gene Name: solute carrier family 25 (aspartate/glutamate carrier), member 13
  Uniprot ID: Q9UJS0
  ENSP ID: ENSP00000400101
MAAAKVALTKRADPAELRTIFLKYASIEKNGEFFMSPNDFVTRYLNIFGESQPNPKTVELLSGVVDQTKDGLISFQEFVAFESVLCAPDALFMVAFQLFDKAGKGEVTFEDVKQVFGQTTIHQHIPFNWDSEFVQLHFGKERKRHLTYAEFTQFLLEIQLEHAKQAFVQRDNARTGRVTAIDFRDIMVTIRPHVLTPFVEECLVAAAGGTTSHQVSFSYFNGFNSLLNNMELIRKIYSTLAGTRKDVEVTKEEFVLAAQKFGQVTPMEVDILFQLADLYEPRGRMTLADIERIAPLEEGTLPFNLAEAQRQQKASGDSARPVLLQVAESAYRFGLGSVAGAVGATAVYPIDLVKTRMQNQRSTGSFVGELMYKNSFDCFKKVLRYEGFFGLYRGLLPQLLGVAPEKAIKLTVNDFVRDKFMHKDGSVPLAAEILAGGCAGGSQVIFTNPLEIVKIRLQVAGEITTGPRVSALSVVRDLGFFGIYKGAKACFLRDIPFSAIYFPCYAHVKASFANEDGQVSPGSLLLAGAIAGMPAASLVTPADVIKTRLQVAARAGQTTYSGVIDCFRKILREEGPKALWKGAGARVFRSSPQFGVTLLTYELLQRWFYIDFGGVKPMGSEPVPKSRINLPAPNPDHVGGYKLAVATFAGIENKFGLYLPLFKPSVSTSKAIGGGP

SEQ ID NO: 80875 - protein, 73 aa, Homo sapiens
  Payload ID: 16120
  Gene Symbol: SLC25A13
  Gene Name: solute carrier family 25 (aspartate/glutamate carrier), member 13
  ENSP ID: ENSP00000473505
MAAAKVALTKRADPAELRTIFLKYASIEKNGEFFMSPNDFVTRYLNIFGESQPNPKTVELLSGVVDQTKDGGC

SEQ ID NO: 80876 - protein, 301 aa, Homo sapiens
  Payload ID: 16121
  Gene Symbol: SLC25A20
  Gene Name: solute carrier family 25 (carnitine/acylcarnitine translocase), member 20
  Uniprot ID: O43772
  ENSP ID: ENSP00000326305
MADQPKPISPLKNLLAGGFGGVCLVFVGHPLDTVKVRLQTQPPSLPGQPPMYSGTFDCFRKTLFREGITGLYRGMAAPIIGVTPMFAVCFFGFGLGKKLQQKHPEDVLSYPQLFAAGMLSGVFTTGIMTPGERIKCLLQIQASSGESKYTGTLDCAKKLYQEFGIRGIYKGTVLTLMRDVPASGMYFMTYEWLKNIFTPEGKRVSELSAPRILVAGGIAGIFNWAVAIPPDVLKSRFQTAPPGKYPNGFRDVLRELIRDEGVTSLYKGFNAVMIRAFPANAACFLGFEVAMKFLNWATPNL

SEQ ID NO: 80877 - protein, 76 aa, Homo sapiens
  Payload ID: 16121
  Gene Symbol: SLC25A20
  Gene Name: solute carrier family 25 (carnitine/acylcarnitine translocase), member 20
  ENSP ID: ENSP00000388563
MADQPKPISPLKNLLAGGFGGVCLVFVGHPLDTVKGRLCLTMGDLKDNMRDFGCKGPTADTATEFAWTTSHVLWDL

SEQ ID NO: 80878 - protein, 228 aa, Homo sapiens
  Payload ID: 16121
  Gene Symbol: SLC25A20
  Gene Name: solute carrier family 25 (carnitine/acylcarnitine translocase), member 20
  ENSP ID: ENSP00000388986
MADQPKPISPLKNLLAGGFGGVCLVFVGHPLDTVKVRLQTQPPSLPGQPPMYSGTFDCFRKTLFREIQASSGESKYTGTLDCAKKLYQEFGIRGIYKGTVLTLMRDVPASGMYFMTYEWLKNIFTPEGKRVSELSAPRILVAGGIAGIFNWAVAIPPDVLKSRFQTAPPGKYPNGFRDVLRELIRDEGVTSLYKGFNAVMIRAFPANAACFLGFEVAMKFLNWATPNL

SEQ ID NO: 80879 - protein, 315 aa, Homo sapiens
  Payload ID: 16122
  Gene Symbol: SLC25A18
  Gene Name: solute carrier family 25 (glutamate carrier), member 18
  Uniprot ID: Q9H1K4
  ENSP ID: ENSP00000329033
MTHQDLSITAKLINGGVAGLVGVTCVFPIDLAKTRLQNQHGKAMYKGMIDCLMKTARAEGFFGMYRGAAVNLTLVTPEKAIKLAANDFFRRLLMEDGMQRNLKMEMLAGCGAGMCQVVVTCPMEMLKIQLQDAGRLAVHHQGSASAPSTSRSYTTGSASTHRRPSATLIAWELLRTQGLAGLYRGLGATLLRDIPFSIIYFPLFANLNNLGFNELAGKASFAHSFVSGCVAGSIAAVAVTPLDVLKTRIQTLKKGLGEDMYSGITDCARKLWIQEGPSAFMKGAGCRALVIAPLFGIAQGVYFIGIGERILKCFD

SEQ ID NO: 80880 - protein, 315 aa, Homo sapiens; identical to SEQ ID NO: 80879
  Payload ID: 16122
  Gene Symbol: SLC25A18
  Gene Name: solute carrier family 25 (glutamate carrier), member 18
  Uniprot ID: Q9H1K4
  ENSP ID: ENSP00000382710

SEQ ID NO: 80881 - protein, 303 aa, Homo sapiens
  Payload ID: 16123
  Gene Symbol: SLC25A29
  Gene Name: solute carrier family 25 (mitochondrial carnitine/acylcarnitine carrier), member 29
  Uniprot ID: Q8N8R3
  ENSP ID: ENSP00000352167
MALDFLAGCAGGVAGVLVGHPFDTVKVRLQVQSVEKPQYRGTLHCFKSIIKQESVLGLYKGLGSPLMGLTFINALVFGVQGNTLRALGHDSPLNQFLAGAAAGAIQCVICCPMELAKTRLQLQDAGPARTYKGSLDCLAQIYGHEGLRGVNRGMVSTLLRETPSFGVYFLTYDALTRALGCEPGDRLLVPKLLLAGGTSGIVSWLSTYPVDVVKSRLQADGLRGAPRYRGILDCVHQSYRAEGWRVFTRGLASTLLRAFPVNAATFATVTVVLTYARGEEAGPEGEAVPAAPAGPALAQPSSL

SEQ ID NO: 80882 - protein, 145 aa, Homo sapiens
  Payload ID: 16123
  Gene Symbol: SLC25A29
  Gene Name: solute carrier family 25 (mitochondrial carnitine/acylcarnitine carrier), member 29
  Uniprot ID: Q8N8R3
  ENSP ID: ENSP00000376640
MALDFLAGCAGGTASGPERGEASVPRDVALLQVHHQARERAGPVQGPGLAAHGAHLHQRAGVRGAGQHPPGPGPRLAPQPVPGRCGGGRHPVRHLLPHGAGQDAAAAAGRGPSAHLQGLAGLPRADLRARGSAWRQPGHGVHVAA

SEQ ID NO: 80883 - protein, 237 aa, Homo sapiens
  Payload ID: 16123
  Gene Symbol: SLC25A29
  Gene Name: solute carrier family 25 (mitochondrial carnitine/acylcarnitine carrier), member 29
  Uniprot ID: Q8N8R3
  ENSP ID: ENSP00000450913
MGLTFINALVFGVQGNTLRALGHDSPLNQFLAGAAAGAIQCVICCPMELAKTRLQLQDAGPARTYKGSLDCLAQIYGHEGLRGVNRGMVSTLLRETPSFGVYFLTYDALTRALGCEPGDRLLVPKLLLAGGTSGIVSWLSTYPVDVVKSRLQADGLRGAPRYRGILDCVHQSYRAEGWRVFTRGLASTLLRAFPVNAATFATVTVVLTYARGEEAGPEGEAVPAAPAGPALAQPSSL

SEQ ID NO: 80884 - protein, 35 aa, Homo sapiens
  Payload ID: 16123
  Gene Symbol: SLC25A29
  Gene Name: solute carrier family 25 (mitochondrial carnitine/acylcarnitine carrier), member 29
  ENSP ID: ENSP00000451573
MALDFLAGCAGGVAGVLVGHPFDTVKGLSPSIAKV

SEQ ID NO: 80885 - protein, 138 aa, Homo sapiens
  Payload ID: 16123
  Gene Symbol: SLC25A29
  Gene Name: solute carrier family 25 (mitochondrial carnitine/acylcarnitine carrier), member 29
  ENSP ID: ENSP00000451644
MALDFLAGCAGGTASGPERGEASVPRDVALLQVHHQARERAGPVQGPGLAAHGAHLHQRAGVRGAGQHPPGPGPRLAPQPVPGRCGGGRHPVRHLLPHGAGQDAAAAAGRGPSAHLQGLAGLPRADLRARGSAWRQPG

SEQ ID NO: 80886 - protein, 122 aa, Homo sapiens
  Payload ID: 16123
  Gene Symbol: SLC25A29
  Gene Name: solute carrier family 25 (mitochondrial carnitine/acylcarnitine carrier), member 29
  ENSP ID: ENSP00000451808
MALDFLAGCAGGVAGVLVGHPFDTVKALGTERIQDLDLLYSAQNHSHRPEAHGLHTFLHEGSFLSCFLGHSNNQGAVVLTYDEGVTGHPWAWDGECGWGLAVGAPRLDVMLKFCVALTAFTF

SEQ ID NO: 80887 - protein, 35 aa, Homo sapiens; identical to SEQ ID NO: 80884
  Payload ID: 16123
  Gene Symbol: SLC25A29
  Gene Name: solute carrier family 25 (mitochondrial carnitine/acylcarnitine carrier), member 29
  ENSP ID: ENSP00000451952

SEQ ID NO: 80888 - protein, 237 aa, Homo sapiens; identical to SEQ ID NO: 80883
  Payload ID: 16123
  Gene Symbol: SLC25A29
  Gene Name: solute carrier family 25 (mitochondrial carnitine/acylcarnitine carrier), member 29
  Uniprot ID: Q8N8R3
  ENSP ID: ENSP00000452078

SEQ ID NO: 80889 - protein, 129 aa, Homo sapiens
  Payload ID: 16123
  Gene Symbol: SLC25A29
  Gene Name: solute carrier family 25 (mitochondrial carnitine/acylcarnitine carrier), member 29
  ENSP ID: ENSP00000452324
MGLTFINALVFGVQGNTLRALGHDSPLNQFLAGAAAGAIQCVICCPMELAKTRLQLQDAGPARTYKGSLDCLAQIYGHEGLRGVNRGMVSTLLRETPSFGVYFLTYDALTRALGCEPGDRLLVPKLLLA

SEQ ID NO: 80890 - protein, 237 aa, Homo sapiens; identical to SEQ ID NO: 80883
  Payload ID: 16123
  Gene Symbol: SLC25A29
  Gene Name: solute carrier family 25 (mitochondrial carnitine/acylcarnitine carrier), member 29
  Uniprot ID: Q8N8R3
  ENSP ID: ENSP00000452446

SEQ ID NO: 80891 - protein, 57 aa, Homo sapiens
  Payload ID: 16124
  Gene Symbol: SLC25A16
  Gene Name: solute carrier family 25 (mitochondrial carrier), member 16
  ENSP ID: ENSP00000476283
MAAATAAAALAAADPPPAMPQAAGAGGPTTRRDFYWLRSFLAGEEEEVTSNRTWQLD

SEQ ID NO: 80892 - protein, 92 aa, Homo sapiens
  Payload ID: 16124
  Gene Symbol: SLC25A16
  Gene Name: solute carrier family 25 (mitochondrial carrier), member 16
  ENSP ID: ENSP00000476555
MAAATAAAALAAADPPPAMPQAAGAGGPTTRRDFYWLRSFLAGEEEEFTSNRTWQSDKYLQVSVSVKMFQKKRRLLQTEPGSWINTLKCLSP

SEQ ID NO: 80893 - protein, 65 aa, Homo sapiens
  Payload ID: 16124
  Gene Symbol: SLC25A16
  Gene Name: solute carrier family 25 (mitochondrial carrier), member 16
  ENSP ID: ENSP00000476587
AFEHYKTLITTKLGISGHVHRLMAGSMAGKHILLFVLDCSCKLREEESCYHHYSRYDSSYLYLPS

SEQ ID NO: 80894 - protein, 332 aa, Homo sapiens
  Payload ID: 16124
  Gene Symbol: SLC25A16
  Gene Name: solute carrier family 25 (mitochondrial carrier), member 16
  Uniprot ID: P16260
  ENSP ID: ENSP00000476815
MAAATAAAALAAADPPPAMPQAAGAGGPTTRRDFYWLRSFLAGGIAGCCAKTTVAPLDRVKVLLQAHNHHYKHLGVFSALRAVPQKEGFLGLYKGNGAMMIRIFPYGAIQFMAFEHYKTLITTKLGISGHVHRLMAGSMAGMTAVICTYPLDMVRVRLAFQVKGEHSYTGIIHAFKTIYAKEGGFFGFYRGLMPTILGMAPYAGVSFFTFGTLKSVGLSHAPTLLGRPSSDNPNVLVLKTHVNLLCGGVAGAIAQTISYPFDVTRRRMQLGTVLPEFEKCLTMRDTMKYVYGHHGIRKGLYRGLSLNYIRCIPSQAVAFTTYELMKQFFHLN

SEQ ID NO: 80895 - protein, 65 aa, Homo sapiens
  Payload ID: 16124
  Gene Symbol: SLC25A16
  Gene Name: solute carrier family 25 (mitochondrial carrier), member 16
  ENSP ID: ENSP00000477328
  MOD_RES (1)..(1): Any amino acid
XLSHAPTLLGRPSSDNPNVLVLKTHVNLLCGGVAGAIAQTISYPFDVTRRRMQLGTVLPEFEKCL

SEQ ID NO: 80896 - protein, 325 aa, Homo sapiens
  Payload ID: 16125
  Gene Symbol: SLC25A14
  Gene Name: solute carrier family 25 (mitochondrial carrier, brain), member 14
  Uniprot ID: O95258
  ENSP ID: ENSP00000218197
MGIFPGIILIFLRVKFATAAVIVSGHQKSTTVSHEMSGLNWKPFVYGGLASIVAEFGTFPVDLTKTRLQVQGQSIDARFKEIKYRGMFHALFRICKEEGVLALYSGIAPALLRQASYGTIKIGIYQSLKRLFVERLEDETLLINMICGVVSGVISSTIANPTDVLKIRMQAQGSLFQGSMIGSFIDIYQQEGTRGLWRGVVPTAQRAAIVVGVELPVYDITKKHLILSGMMGDTILTHFVSSFTCGLAGALASNPVDVVRTRMMNQRAIVGHVDLYKGTVDGILKMWKHEGFFALYKGFWPNWLRLGPWNIIFFITYEQLKRLQI

SEQ ID NO: 80897 - protein, 353 aa, Homo sapiens
  Payload ID: 16125
  Gene Symbol: SLC25A14
  Gene Name: solute carrier family 25 (mitochondrial carrier, brain), member 14
  Uniprot ID: O95258
  ENSP ID: ENSP00000342797
MGIFPGIILIFLRVKFATAAVIHQKSTTVSHEMSGLNWKPFVYGGLASIVAEFGTFPVDLTKTRLQVQGQSIDARFKEIKYRGMFHALFRICKEEGVLALYSGIAPALLRQASYGTIKIGIYQSLKRLFVERLEDETLLINMICGVVSGVISSTIANPTDVLKIRMQAQGSLFQGSMIGSFIDIYQQEGTRGLWRCLCSKAVTGCVLWLMPVIPALWEANAGGSLEGVVPTAQRAAIVVGVELPVYDITKKHLILSGMMGDTILTHFVSSFTCGLAGALASNPVDVVRTRMMNQRAIVGHVDLYKGTVDGILKMWKHEGFFALYKGFWPNWLRLGPWNIIFFITYEQLKRLQI

SEQ ID NO: 80898 - protein, 322 aa, Homo sapiens
  Payload ID: 16125
  Gene Symbol: SLC25A14
  Gene Name: solute carrier family 25 (mitochondrial carrier, brain), member 14
  Uniprot ID: O95258
  ENSP ID: ENSP00000354455
MGIFPGIILIFLRVKFATAAVIHQKSTTVSHEMSGLNWKPFVYGGLASIVAEFGTFPVDLTKTRLQVQGQSIDARFKEIKYRGMFHALFRICKEEGVLALYSGIAPALLRQASYGTIKIGIYQSLKRLFVERLEDETLLINMICGVVSGVISSTIANPTDVLKIRMQAQGSLFQGSMIGSFIDIYQQEGTRGLWRGVVPTAQRAAIVVGVELPVYDITKKHLILSGMMGDTILTHFVSSFTCGLAGALASNPVDVVRTRMMNQRAIVGHVDLYKGTVDGILKMWKHEGFFALYKGFWPNWLRLGPWNIIFFITYEQLKRLQI

SEQ ID NO: 80899 - protein, 198 aa, Homo sapiens
  Payload ID: 16125
  Gene Symbol: SLC25A14
  Gene Name: solute carrier family 25 (mitochondrial carrier, brain), member 14
  ENSP ID: ENSP00000402578
MGIFPGIILIFLRVKFATAAVIVSGHQKSTTVSHEMSGLNWKPFVYGGLASIVAEFGTFPVDLTKTRLQVQGQSIDARFKEIKYRGMFHALFRICKEEGVLALYSGIAPALLRQASYGTIKIGIYQSLKRLFVERLEDETLLINMICGVVSGVISSTIANPTDVLKIRMQAQGSLFQGSMIGSFIDIYQQEGTRGLWR

SEQ ID NO: 80900 - protein, 325 aa, Homo sapiens; identical to SEQ ID NO: 80896
  Payload ID: 16125
  Gene Symbol: SLC25A14
  Gene Name: solute carrier family 25 (mitochondrial carrier, brain), member 14
  Uniprot ID: O95258
  ENSP ID: ENSP00000444642

SEQ ID NO: 80901 - protein, 290 aa, Homo sapiens
  Payload ID: 16125
  Gene Symbol: SLC25A14
  Gene Name: solute carrier family 25 (mitochondrial carrier, brain), member 14
  ENSP ID: ENSP00000445225
MSGLNWKPFVYGGLASIVAEFGTFPVDLTKTRLQVQGQSIDARFKEIKYRGMFHALFRICKEEGVLALYSGIAPALLRQASYGTIKIGIYQSLKRLFVERLEDETLLINMICGVVSGVISSTIANPTDVLKIRMQAQGSLFQGSMIGSFIDIYQQEGTRGLWRGVVPTAQRAAIVVGVELPVYDITKKHLILSGMMGDTILTHFVSSFTCGLAGALASNPVDVVRTRMMNQRAIVGHVDLYKGTVDGILKMWKHEGFFALYKGFWPNWLRLGPWNIIFFITYEQLKRLQI

SEQ ID NO: 80902 - protein, 353 aa, Homo sapiens; identical to SEQ ID NO: 80897
  Payload ID: 16125
  Gene Symbol: SLC25A14
  Gene Name: solute carrier family 25 (mitochondrial carrier, brain), member 14
  Uniprot ID: O95258
  ENSP ID: ENSP00000477981

SEQ ID NO: 80903 - protein, 323 aa, Homo sapiens
  Payload ID: 16126
  Gene Symbol: SLC25A22
  Gene Name: solute carrier family 25 (mitochondrial carrier: glutamate), member 22
  Uniprot ID: Q9H936
  ENSP ID: ENSP00000322020
MADKQISLPAKLINGGIAGLIGVTCVFPIDLAKTRLQNQQNGQRVYTSMSDCLIKTVRSEGYFGMYRGAAVNLTLVTPEKAIKLAANDFFRHQLSKDGQKLTLLKEMLAGCGAGTCQVIVTTPMEMLKIQLQDAGRIAAQRKILAAQGQLSAQGGAQPSVEAPAAPRPTATQLTRDLLRSRGIAGLYKGLGATLLRDVPFSVVYFPLFANLNQLGRPASEEKSPFYVSFLAGCVAGSAAAVAVNPCDVVKTRLQSLQRGVNEDTYSGILDCARKILRHEGPSAFLKGAYCRALVIAPLFGIAQVVYFLGIAESLLGLLQDPQA

SEQ ID NO: 80904 - protein, 114 aa, Homo sapiens
  Payload ID: 16126
  Gene Symbol: SLC25A22
  Gene Name: solute carrier family 25 (mitochondrial carrier: glutamate), member 22
  ENSP ID: ENSP00000392749
MADKQISLPAKLINGGIAGLIGVTCVFPIDLAKTRLQNQQNGQRVYTSMSDCLIKTVRSEGYFGMYRGAAVNLTLVTPEKAIKLAANDFFRHQLSKDGQKLTLLKEMLAGCGAG

SEQ ID NO: 80905 - protein, 190 aa, Homo sapiens
  Payload ID: 16126
  Gene Symbol: SLC25A22
  Gene Name: solute carrier family 25 (mitochondrial carrier: glutamate), member 22
  ENSP ID: ENSP00000431466
MADKQISLPAKLINGGIAGLIGVTCVFPIDLAKTRLQNQQNGQRVYTSMSDCLIKTVRSEGYFGMYRGAAVNLTLVTPEKAIKLAANDFFRHQLSKDGQKLTLLKEMLAGCGAGTCQVIVTTPMEMLKIQLQDAGRIAAQRKILAAQGQLSAQGGAQPSVEAPAAPRPTATQLTRDLLRSRGIAGLYKGL

SEQ ID NO: 80906 - protein, 313 aa, Homo sapiens
  Payload ID: 16126
  Gene Symbol: SLC25A22
  Gene Name: solute carrier family 25 (mitochondrial carrier: glutamate), member 22
  ENSP ID: ENSP00000431829
MADKQISLPAKLINGGIAGLIGVTCVFPIDLAKTRLQNQQNGQRVYTSIPRQSRDPGLRLAPAGPGSPCPLGHRSDCLIKTVRSEGYFGMYRGAAVNLTLVTPEKAIKLAANDFFRHQLSKDGQKLTLLKEMLAGCGAGTCQVIVTTPMEMLKIQLQDAGRIAAQRKILAAQGQLSAQGGAQPSVEAPAAPRPTATQLTRDLLRSRGIAGLYKGLGATLLRDVPFSVVYFPLFANLNQLGRPASEEKSPFYVSFLAGCVAGSAAAVAVNPCDVVKTRLQSLQRGVNEDTYSGILDCARKILRHEGPSAFLKGA

SEQ ID NO: 80907 - protein, 72 aa, Homo sapiens
  Payload ID: 16126
  Gene Symbol: SLC25A22
  Gene Name: solute carrier family 25 (mitochondrial carrier: glutamate), member 22
  ENSP ID: ENSP00000432222
MADKQISLPAKLINGGIAGLIGVTCVFPIDLAKTRLQNQQNGQRVYTSMSDCLIKTVRSEGYFGMYRGEELL

SEQ ID NO: 80908 - protein, 103 aa, Homo sapiens
  Payload ID: 16126
  Gene Symbol: SLC25A22
  Gene Name: solute carrier family 25 (mitochondrial carrier: glutamate), member 22
  ENSP ID: ENSP00000432817
MADKQISLPAKLINGGIAGLIGVTCVFPIDLAKTRLQNQQNGQRVYTSMSDCLIKTVRSEGYFGMYRGAAVNLTLVTPEKAIKLAANDFFRHQLSKDGQKLTL

SEQ ID NO: 80909 - protein, 78 aa, Homo sapiens
  Payload ID: 16126
  Gene Symbol: SLC25A22
  Gene Name: solute carrier family 25 (mitochondrial carrier: glutamate), member 22
  ENSP ID: ENSP00000433028
MADKQISLPAKLINGGIAGLIGVTCVFPIDLAKTRLQNQQNGQRVYTSMSDCLIKTVRSEGYFGMYRGAAVNLTLVTP

SEQ ID NO: 80910 - protein, 72 aa, Homo sapiens; identical to SEQ ID NO: 80907
  Payload ID: 16126
  Gene Symbol: SLC25A22
  Gene Name: solute carrier family 25 (mitochondrial carrier: glutamate), member 22
  ENSP ID: ENSP00000433655

SEQ ID NO: 80911 - protein, 72 aa, Homo sapiens; identical to SEQ ID NO: 80907
  Payload ID: 16126
  Gene Symbol: SLC25A22
  Gene Name: solute carrier family 25 (mitochondrial carrier: glutamate), member 22
  ENSP ID: ENSP00000433780

SEQ ID NO: 80912 - protein, 161 aa, Homo sapiens
  Payload ID: 16126
  Gene Symbol: SLC25A22
  Gene Name: solute carrier family 25 (mitochondrial carrier: glutamate), member 22
  ENSP ID: ENSP00000434287
MADKQISLPAKLINGGIAGLIGVTCVFPIDLAKTRLQNQQNGQRVYTSMSDCLIKTVRSEGYFGMYRGAAVNLTLVTPEKAIKLAANDFFRHQLSKDGQKLTLLKEMLAGCGAGTCQVIVTTPMEMLKIQLQDAGRIAAQRKILAAQGQLSAQGGAQPSVE

SEQ ID NO: 80913 - protein, 134 aa, Homo sapiens
  Payload ID: 16126
  Gene Symbol: SLC25A22
  Gene Name: solute carrier family 25 (mitochondrial carrier: glutamate), member 22
  ENSP ID: ENSP00000434479
MADKQISLPAKLINGGIAGLIGVTCVFPIDLAKTRLQNQQNGQRVYTSMSDCLIKTVRSEGYFGMYRGAAVNLTLVTPEKAIKLAANDFFRHQLSKDGQKLTLLKEMLAGCGAGTCQVIVTTPMEMLKIQLQDA

SEQ ID NO: 80914 - protein, 65 aa, Homo sapiens
  Payload ID: 16126
  Gene Symbol: SLC25A22
  Gene Name: solute carrier family 25 (mitochondrial carrier: glutamate), member 22
  ENSP ID: ENSP00000434850
MADKQISLPAKLINGGIAGLIGVTCVFPIDLAKTRLQNQQNGQRVYTSMSDCLIKTVRSEGYFGM

SEQ ID NO: 80915 - protein, 156 aa, Homo sapiens
  Payload ID: 16126
  Gene Symbol: SLC25A22
  Gene Name: solute carrier family 25 (mitochondrial carrier: glutamate), member 22
  ENSP ID: ENSP00000435402
MADKQISLPAKLINGGIAGLIGVTCVFPIDLAKTRLQNQQNGQRVYTSMSDCLIKTVRSEGYFGMYRGAAVNLTLVTPEKAIKLAANDFFRHQLSKDGQKLTLLKEMLAGCGAGTCQVIVTTPMEMLKIQLQDAGRIAAQRKILAAQGQLSAQGGA

SEQ ID NO: 80916 - protein, 196 aa, Homo sapiens
  Payload ID: 16126
  Gene Symbol: SLC25A22
  Gene Name: solute carrier family 25 (mitochondrial carrier: glutamate), member 22
  ENSP ID: ENSP00000435862
MADKQISLPAKLINGGIAGLIGVTCVFPIDLAKTRLQNQQNGQRVYTSMSDCLIKTVRSEGYFGAAVNLTLVTPEKAIKLAANDFFRHQLSKDGQKLTLLKEMLAGCGAGTCQVIVTTPMEMLKIQLQDAGRIAAQRKILAAQGQLSAQGGAQPSVEAPAAPRPTATQLTRDLLRSRGIAGLYKGLGATLLRDVPF

SEQ ID NO: 80917 - protein, 127 aa, Homo sapiens
  Payload ID: 16126
  Gene Symbol: SLC25A22
  Gene Name: solute carrier family 25 (mitochondrial carrier: glutamate), member 22
  ENSP ID: ENSP00000436745
MADKQISLPAKLINGGIAGLIGVTCVFPIDLAKTRLQNQQNGQRVYTSMSDCLIKTVRSEGYFGMYRGAAVNLTLVTPEKAIKLAANDFFRHQLSKDGQKLTLLKEMLAGCGAGTCQVIVTTPMEML

SEQ ID NO: 80918 - protein, 177 aa, Homo sapiens
  Payload ID: 16126
  Gene Symbol: SLC25A22
  Gene Name: solute carrier family 25 (mitochondrial carrier: glutamate), member 22
  ENSP ID: ENSP00000437045
MADKQISLPAKLINGGIAGLIGVTCVFPIDLAKTRLQNQQNGQRVYTSMSDCLIKTVRSEGYFGMYRGAAVNLTLVTPEKAIKLAANDFFRHQLSKDGQKLTLLKEMLAGCGAGTCQVIVTTPMEMLKIQLQDAGRIAAQRKILAAQGQLSAQGGAQPSVEAPAAPRPTATQLTRDL

SEQ ID NO: 80919 - protein, 323 aa, Homo sapiens; identical to SEQ ID NO: 80903
  Payload ID: 16126
  Gene Symbol: SLC25A22
  Gene Name: solute carrier family 25 (mitochondrial carrier: glutamate), member 22
  Uniprot ID: Q9H936
  ENSP ID: ENSP00000437236

SEQ ID NO: 80920 - protein, 197 aa, Homo sapiens
  Payload ID: 16126
  Gene Symbol: SLC25A22
  Gene Name: solute carrier family 25 (mitochondrial carrier: glutamate), member 22
  ENSP ID: ENSP00000485719
MADKQISLPAKLINGGIAGLIGVTCVFPIDLAKTRLQNQQNGQRVYTSMSDCLIKTVRSEGYFGMYRGAAVNLTLVTPEKAIKLAANDFFRHQLSKDGQKLTLLKEMLAGCGAGTCQVIVTTPMEMLKIQLQDAGRIAAQRKILAAQGQLSAQGGAQPSVEAPAAPRPTATQLTRDLLRSRGIAGLYKGLGATLLRD

SEQ ID NO: 80921 - protein, 323 aa, Homo sapiens; identical to SEQ ID NO: 80903
  Payload ID: 16126
  Gene Symbol: SLC25A22
  Gene Name: solute carrier family 25 (mitochondrial carrier: glutamate), member 22
  Uniprot ID: Q9H936
  ENSP ID: ENSP00000486058

SEQ ID NO: 80922 - protein, 97 aa, Homo sapiens
  Payload ID: 16126
  Gene Symbol: SLC25A22
  Gene Name: solute carrier family 25 (mitochondrial carrier: glutamate), member 22
  ENSP ID: ENSP00000486434
MADKQISLPAKLINGGIAGLIGVTCVFPIDLAKTRLQNQQNGQRVYTSMSDCLIKTVRSEGYFGMYRGAAVNLTLVTPEKAIKLAANDFFRHQLSKD

SEQ ID NO: 80923 - protein, 247 aa, Homo sapiens
  Payload ID: 16126
  Gene Symbol: SLC25A22
  Gene Name: solute carrier family 25 (mitochondrial carrier: glutamate), member 22
  ENSP ID: ENSP00000486512
MADKQISLPAKLINGGIAGLIGVTCVFPIDLAKTRLQNQQNGQRVYTSMSDCLIKTVRSEGYFGMYRGAAVNLTLVTPEKAIKLAANDFFRHQLSKDGQKLTLLKEMLAGCGAGTCQVIVTTPMEMLKIQLQDAGRIAAQRKILAAQGQLSAQGGAQPSVEAPAAPRPTATQLTRDLLRSRGIAGLYKGLGATLLRDVPFSVVYFPLFANLNQLGRPASEEKSPFYVSFLAGCVAGSAAAVAVNPCD

SEQ ID NO: 80924 - protein, 117 aa, Homo sapiens
  Payload ID: 16126
  Gene Symbol: SLC25A22
  Gene Name: solute carrier family 25 (mitochondrial carrier: glutamate), member 22
  ENSP ID: ENSP00000487237
MADKQISLPAKLINGGIAGLIGVTCVFPIDLAKTRLQNQQNGQRVYTSMSDCLIKTVRSEGYFGMYRGAAVNLTLVTPEKAIKLAANDFFRHQLSKDGQKLTLLKEMLAGCGAGTCQ

SEQ ID NO: 80925 - protein, 315 aa, Homo sapiens
  Payload ID: 16127
  Gene Symbol: SLC25A31
  Gene Name: solute carrier family 25 (mitochondrial carrier
  adenine nucleotide translocator), member 31
  Uniprot ID: Q9H0C2
  ENSP ID: ENSP00000281154
MHREPAKKKAEKRLFDASSFGKDLLAGGVAAAVSKTAVAPIERVKLLLQVQASSKQISPEARYKGMVDCLVRIPREQGFFSFWRGNLANVIRYFPTQALNFAFKDKYKQLFMSGVNKEKQFWRWFLANLASGGAAGATSLCVVYPLDFARTRLGVDIGKGPEERQFKGLGDCIMKIAKSDGIAGLYQGFGVSVQGIIVYRASYFGAYDTVKGLLPKPKKTPFLVSFFIAQVVTTCSGILSYPFDTVRRRMMMQSGEAKRQYKGTLDCFVKIYQHEGISSFFRGAFSNVLRGTGGALVLVLYDKIKEFFHIDIGGR

SEQ ID NO: 80926 - protein, 298 aa, Homo sapiens
  Payload ID: 16128
  Gene Symbol: SLC25A4
  Gene Name: solute carrier family 25 (mitochondrial carrier
  adenine nucleotide translocator), member 4
  Uniprot ID: P12235
  ENSP ID: ENSP00000281456
MGDHAWSFLKDFLAGGVAAAVSKTAVAPIERVKLLLQVQHASKQISAEKQYKGIIDCVVRIPKEQGFLSFWRGNLANVIRYFPTQALNFAFKDKYKQLFLGGVDRHKQFWRYFAGNLASGGAAGATSLCFVYPLDFARTRLAADVGKGAAQREFHGLGDCIIKIFKSDGLRGLYQGFNVSVQGIIIYRAAYFGVYDTAKGMLPDPKNVHIFVSWMIAQSVTAVAGLVSYPFDTVRRRMMMQSGRKGADIMYTGTVDCWRKIAKDEGAKAFFKGAWSNVLRGMGGAFVLVLYDEIKKYV

SEQ ID NO: 80927 - protein, 208 aa, Homo sapiens
  Payload ID: 16128
  Gene Symbol: SLC25A4
  Gene Name: solute carrier family 25 (mitochondrial carrier
  adenine nucleotide translocator), member 4
  ENSP ID: ENSP00000476711
MGDHAWSFLKDFLAGGVAAAVSKTAVAPIERVKLLLQVQHASKQISAEKQYKGIIDCVVRIPKEQGFLSFWRGNLANVIRYFPTQALNFAFKDKYKQLFLGGVDRHKQFWRYFAGNLASGGAAGATSLCFVYPLDFARTRLAADVGKGAAQREFHGLGDCIIKIFKSDGLRGLYQGFNVSVQGIIIYRAAYFGVYDTAKVSGIIEASE

SEQ ID NO: 80928 - protein, 298 aa, Homo sapiens
  Payload ID: 16129
  Gene Symbol: SLC25A5
  Gene Name: solute carrier family 25 (mitochondrial carrier
  adenine nucleotide translocator), member 5
  Uniprot ID: P05141
  ENSP ID: ENSP00000360671
MTDAAVSFAKDFLAGGVAAAISKTAVAPIERVKLLLQVQHASKQITADKQYKGIIDCVVRIPKEQGVLSFWRGNLANVIRYFPTQALNFAFKDKYKQIFLGGVDKRTQFWLYFAGNLASGGAAGATSLCFVYPLDFARTRLAADVGKAGAEREFRGLGDCLVKIYKSDGIKGLYQGFNVSVQGIIIYRAAYFGIYDTAKGMLPDPKNTHIVISWMIAQTVTAVAGLTSYPFDTVRRRMMMQSGRKGTDIMYTGTLDCWRKIARDEGGKAFFKGAWSNVLRGMGGAFVLVLYDEIKKYT

SEQ ID NO: 80929 - protein, 298 aa, Homo sapiens
  Payload ID: 16130
  Gene Symbol: SLC25A6
  Gene Name: solute carrier family 25 (mitochondrial carrier
  adenine nucleotide translocator), member 6
  Uniprot ID: P12236
  ENSP ID: ENSP00000370808
MTEQAISFAKDFLAGGIAAAISKTAVAPIERVKLLLQVQHASKQIAADKQYKGIVDCIVRIPKEQGVLSFWRGNLANVIRYFPTQALNFAFKDKYKQIFLGGVDKHTQFWRYFAGNLASGGAAGATSLCFVYPLDFARTRLAADVGKSGTEREFRGLGDCLVKITKSDGIRGLYQGFSVSVQGIIIYRAAYFGVYDTAKGMLPDPKNTHIVVSWMIAQTVTAVAGVVSYPFDTVRRRMMMQSGRKGADIMYTGTVDCWRKIFRDEGGKAFFKGAWSNVLRGMGGAFVLVLYDELKKVI

SEQ ID NO: 80930 - protein, 311 aa, Homo sapiens
  Payload ID: 16131
  Gene Symbol: SLC25A1
  Gene Name: solute carrier family 25 (mitochondrial carrier
  citrate transporter), member 1
  Uniprot ID: P53007
  ENSP ID: ENSP00000215882
MPAPRAPRALAAAAPASGKAKLTHPGKAILAGGLAGGIEICITFPTEYVKTQLQLDERSHPPRYRGIGDCVRQTVRSHGVLGLYRGLSSLLYGSIPKAAVRFGMFEFLSNHMRDAQGRLDSTRGLLCGLGAGVAEAVVVVCPMETIKVKFIHDQTSPNPKYRGFFHGVREIVREQGLKGTYQGLTATVLKQGSNQAIRFFVMTSLRNWYRGDNPNKPMNPLITGVFGAIAGAASVFGNTPLDVIKTRMQGLEAHKYRNTWDCGLQILKKEGLKAFYKGTVPRLGRVCLDVAIVFVIYDEVVKLLNKVWKTD

SEQ ID NO: 80931 - protein, 208 aa, Homo sapiens
  Payload ID: 16131
  Gene Symbol: SLC25A1
  Gene Name: solute carrier family 25 (mitochondrial carrier
  citrate transporter), member 1
  ENSP ID: ENSP00000401480
MFEFLSNHMRDAQGRLDSTRGLLCGLGAGVAEAVVVVCPMETIKVKFIHDQTSPNPKYRGFFHGVREIVREQGLKGTYQGLTATVLKQGSNQAIRFFVMTSLRNWYRGDNPNKPMNPLITGVFGAIAGAASVFGNTPLDVIKTRMQGLEAHKYRNTWDCGLQILKKEGLKAFYKGTVPRLGRVCLDVAIVFVIYDEVVKLLNKVWKTD

SEQ ID NO: 80932 - protein, 296 aa, Homo sapiens
  Payload ID: 16132
  Gene Symbol: SLC25A10
  Gene Name: solute carrier family 25 (mitochondrial carrier
  dicarboxylate transporter), member 10
  Uniprot ID: Q9UBX3
  ENSP ID: ENSP00000328403
MAAEARVSRWYFGGLASCGAACCTHPLDLLKVHLQTQQEVKLRMTGMALRVVRTDGILALYSGLSASLCRQMTYSLTRFAIYETVRDRVAKGSQGPLPFHEKVLLGSVSGLAGGFVGTPADLVNVRMQNDVKLPQGQRRNYAHALDGLYRVAREEGLRRLFSGATMASSRGALVTVGQLSCYDQAKQLVLSTGYLSDNIFTHFVASFIAAAGDEPPPQGGCATFLCQPLDVLKTRLMNSKGEYQGVFHCAVETAKLGPLAFYKGLVPAGIRLIPHTVLTFVFLEQLRKNFGIKVPS

SEQ ID NO: 80933 - protein, 287 aa, Homo sapiens
  Payload ID: 16132
  Gene Symbol: SLC25A10
  Gene Name: solute carrier family 25 (mitochondrial carrier
  dicarboxylate transporter), member 10
  Uniprot ID: Q9UBX3
  ENSP ID: ENSP00000345580
MAAEARVSRWYFGGLASCGAACCTHPLDLLKVHLQTQQEVKLRMTGMALRVVRTDGILALYSGLSASLCRQMTYSLTRFAIYETVRDRVAKGSQGPLPFHEKVLLGSVSGLAGGFVGTPADLVNVRMQNDVKLPQGQRRNYAHALDGLYRVAREEGLRRLFSGATMASSRGALVTVGQLSCYDQAKQLVLSTGYLSDNIFTHFVASFIAGGCATFLCQPLDVLKTRLMNSKGEYQGVFHCAVETAKLGPLAFYKGLVPAGIRLIPHTVLTFVFLEQLRKNFGIKVPS

SEQ ID NO: 80934 - protein, 406 aa, Homo sapiens
  Payload ID: 16132
  Gene Symbol: SLC25A10
  Gene Name: solute carrier family 25 (mitochondrial carrier
  dicarboxylate transporter), member 10
  ENSP ID: ENSP00000446242
MAAEARVSRWYFGGLASCGAACCTHPLDLLKVHLQTQQEVKLRMTGMALRVVRTDGILALYSGLSASLCRQMTYSLTRFAIYETVRDRVAKGSQGPLPFHEKVLLGSVSGLAGGFVGTPADLVNVRMQNDVKLPQGQRRNYAHALDGLYRVAREEGLRRLFSGATMASSRGALVTVGQLYCRWMCHVPVPAPGCAEDSPDELQGGVSGRFPLRRGDSEARASGLLQGPRPSWHPPHPPHRAHFCVSGTATQKLWHQSAILTSRGNGWAARPDTLGSSKESQAQHLLLGPRPPWPWPPVLRSRPLLSPHLLAELLLASSPLSCSCTTPALATRLSRLGTAWPCPSPAGSSSGEQGLPEADFSPLLGQGRGIIPASCPRCPKQHLPALSIEDLGGRVWVQPGCCSPKC

SEQ ID NO: 80935 - protein, 113 aa, Homo sapiens
  Payload ID: 16132
  Gene Symbol: SLC25A10
  Gene Name: solute carrier family 25 (mitochondrial carrier
  dicarboxylate transporter), member 10
  ENSP ID: ENSP00000458785
  MOD_RES (1)..(1): Any amino acid
XQTQQEVKLRMTGMALRVVRTDGILALYSGLSASLCRQMTYSLTRFAIYETVRDRVAKGSQGPLPFHEKVLLGSVSGLAGGFVGTPADLVNVRMQNDVKLPQGQRRKERSSGP

SEQ ID NO: 80936 - protein, 39 aa, Homo sapiens
  Payload ID: 16132
  Gene Symbol: SLC25A10
  Gene Name: solute carrier family 25 (mitochondrial carrier
  dicarboxylate transporter), member 10
  ENSP ID: ENSP00000460597
MAAEARVSRWYFGGLASCGAACCTHPLDLLKGQPRGVVF

SEQ ID NO: 80937 - protein, 301 aa, Homo sapiens
  Payload ID: 16133
  Gene Symbol: SLC25A15
  Gene Name: solute carrier family 25 (mitochondrial carrier
  ornithine transporter) member 15
  Uniprot ID: Q9Y619
  ENSP ID: ENSP00000342267
MKSNPAIQAAIDLTAGAAGGTACVLTGQPFDTMKVKMQTFPDLYRGLTDCCLKTYSQVGFRGFYKGTSPALIANIAENSVLFMCYGFCQQVVRKVAGLDKQAKLSDLQNAAAGSFASAFAALVLCPTELVKCRLQTMYEMETSGKIAKSQNTVWSVIKSILRKDGPLGFYHGLSSTLLREVPGYFFFFGGYELSRSFFASGRSKDELGPVPLMLSGGVGGICLWLAVYPVDCIKSRIQVLSMSGKQAGFIRTFINVVKNEGITALYSGLKPTMIRAFPANGALFLAYEYSRKLMMNQLEAY

SEQ ID NO: 80938 - protein, 133 aa, Homo sapiens
  Payload ID: 16133
  Gene Symbol: SLC25A15
  Gene Name: solute carrier family 25 (mitochondrial carrier
  ornithine transporter) member 15
  ENSP ID: ENSP00000415826
MKSNPAIQAAIDLTAGAAGGTACVLTGQPFDTMKVKMQTFPDLYRGLTDCCLKTYSQVGFRGFYKGTSPALIANIAENSVLFMCYGFCQQVVRKVAGLDKQAKLSTVWSVIKSILRKDGPLGFYHGLSSTLLR

SEQ ID NO: 80939 - protein, 57 aa, Homo sapiens
  Payload ID: 16133
  Gene Symbol: SLC25A15
  Gene Name: solute carrier family 25 (mitochondrial carrier
  ornithine transporter) member 15
  ENSP ID: ENSP00000431429
MKSNPAIQAAIDLTAGAAGGTACVLTGQPFDTMKVKMQTFPDLYRGLTDCCLKTYSQ

SEQ ID NO: 80940 - protein, 301 aa, Homo sapiens
  Payload ID: 16134
  Gene Symbol: SLC25A2
  Gene Name: solute carrier family 25 (mitochondrial carrier
  ornithine transporter) member 2
  Uniprot ID: Q9BXI2
  ENSP ID: ENSP00000239451
MKSGPGIQAAIDLTAGAAGGTACVLTGQPFDTIKVKMQTFPDLYKGLTDCFLKTYAQVGLRGFYKGTGPALMAYVAENSVLFMCYGFCQQFVRKVAGMDKQAKLSDLQTAAAGSFASAFAALALCPTELVKCRLQTMYEMEMSGKIAKSHNTIWSVVKGILKKDGPLGFYHGLSSTLLQEVPGYFFFFGGYELSRSFFASGRSKDELGPVHLMLSGGVAGICLWLVVFPVDCIKSRIQVLSMYGKQAGFIGTLLSVVRNEGIVALYSGLKATMIRAIPANGALFVAYEYSRKMMMKQLEAY

SEQ ID NO: 80941 - protein, 314 aa, Homo sapiens
  Payload ID: 16135
  Gene Symbol: SLC25A11
  Gene Name: solute carrier family 25 (mitochondrial carrier
  oxoglutarate carrier), member 11
  Uniprot ID: Q02978
  ENSP ID: ENSP00000225665
MAATASAGAGGIDGKPRTSPKSVKFLFGGLAGMGATVFVQPLDLVKNRMQLSGEGAKTREYKTSFHALTSILKAEGLRGIYTGLSAGLLRQATYTTTRLGIYTVLFERLTGADGTPPGFLLKAVIGMTAGATGAFVGTPAEVALIRMTADGRLPADQRRGYKNVFNALIRITREEGVLTLWRGCIPTMARAVVVNAAQLASYSQSKQFLLDSGYFSDNILCHFCASMISGLVTTAASMPVDIAKTRIQNMRMIDGKPEYKNGLDVLFKVVRYEGFFSLWKGFTPYYARLGPHTVLTFIFLEQMNKAYKRLFLSG

SEQ ID NO: 80942 - protein, 263 aa, Homo sapiens
  Payload ID: 16135
  Gene Symbol: SLC25A11
  Gene Name: solute carrier family 25 (mitochondrial carrier
  oxoglutarate carrier), member 11
  Uniprot ID: Q02978
  ENSP ID: ENSP00000440804
MAATASAGAGGIDGKPRTSPKSVKFLFGGLAGLSAGLLRQATYTTTRLGIYTVLFERLTGADGTPPGFLLKAVIGMTAGATGAFVGTPAEVALIRMTADGRLPADQRRGYKNVFNALIRITREEGVLTLWRGCIPTMARAVVVNAAQLASYSQSKQFLLDSGYFSDNILCHFCASMISGLVTTAASMPVDIAKTRIQNMRMIDGKPEYKNGLDVLFKVVRYEGFFSLWKGFTPYYARLGPHTVLTFIFLEQMNKAYKRLFLSG

SEQ ID NO: 80943 - protein, 296 aa, Homo sapiens
  Payload ID: 16135
  Gene Symbol: SLC25A11
  Gene Name: solute carrier family 25 (mitochondrial carrier
  oxoglutarate carrier), member 11
  ENSP ID: ENSP00000458993
MAATASAGAGGIDGKPRTSPKMGATVFVQPLDLVKNRMQLSGEGAKTREYKTSFHALTSILKAEGLRGIYTGLSAGLLRQATYTTTRLGIYTVLFERLTGADGTPPGFLLKAVIGMTAGATGAFVGTPAEVALIRMTADGRLPADQRRGYKNVFNALIRITREEGVLTLWRGCIPTMARAVVVNAAQLASYSQSKQFLLDSGYFSDNILCHFCASMISGLVTTAASMPVDIAKTRIQNMRMIDGKPEYKNGLDVLFKVVRYEGFFSLWKGFTPYYARLGPHTVLTFIFLEQMNKAY

SEQ ID NO: 80944 - protein, 63 aa, Homo sapiens
  Payload ID: 16136
  Gene Symbol: SLC25A17
  Gene Name: solute carrier family 25 (mitochondrial carrier
  peroxisomal membrane protein, 34kDa), member 17
  ENSP ID: ENSP00000263255
MASVLSYESLVHAVAGAVGSVTAMTVFFPLDTARLRLQVDEKRKSKTTHMVLLEIIKEEGLSG

SEQ ID NO: 80945 - protein, 225 aa, Homo sapiens
  Payload ID: 16136
  Gene Symbol: SLC25A17
  Gene Name: solute carrier family 25 (mitochondrial carrier
  peroxisomal membrane protein, 34kDa), member 17
  ENSP ID: ENSP00000385303
MEYWYVALKQQSLKADILPSLFLSIFLVKGVVNVLLTTPLWVVNTRLKLQGAKFRNEDIVPTNYKGIIDAFHQIIRDEGISALWNGTFPSLLLVFNPAIQFMFYEGLKRQLLKKRMKLSSLDVFIIGAVAKAIATTVTYPLQTVQSILRFGRHRLNPENRTLGSLRNILYLLHQRVRRFGIMGLYKGLEAKLLQTVLTAALMFLVYEKLTAATFTVMGLKRAHQH

SEQ ID NO: 80946 - protein, 45 aa, Homo sapiens
  Payload ID: 16136
  Gene Symbol: SLC25A17
  Gene Name: solute carrier family 25 (mitochondrial carrier
  peroxisomal membrane protein, 34kDa), member 17
  ENSP ID: ENSP00000387478
MASVLSYESLVHAVAGAVGSVTAMTVFFPLDTARLRLQDLFKLKL

SEQ ID NO: 80947 - protein, 148 aa, Homo sapiens
  Payload ID: 16136
  Gene Symbol: SLC25A17
  Gene Name: solute carrier family 25 (mitochondrial carrier
  peroxisomal membrane protein, 34kDa), member 17
  ENSP ID: ENSP00000388966
MASVLSYESLVHAVAGAVGSVTAMTVFFPLDTARLRLQVDEKRKSKTTHMVLLEIIKEEGLLAPYRGWFPVISSLCCSNFVYFYTFNSLKALWVKGQHSTTGKDLVVGFVADGGLSVLPRLVSNPWPQEILLPRPSKVLGLQEWLMCC

SEQ ID NO: 80948 - protein, 43 aa, Homo sapiens
  Payload ID: 16136
  Gene Symbol: SLC25A17
  Gene Name: solute carrier family 25 (mitochondrial carrier
  peroxisomal membrane protein, 34kDa), member 17
  ENSP ID: ENSP00000390502
MASVLSYESLVHAVAGAVPGTISRVVSSDFQSLLLQFCLFLHF

SEQ ID NO: 80949 - protein, 307 aa, Homo sapiens
  Payload ID: 16136
  Gene Symbol: SLC25A17
  Gene Name: solute carrier family 25 (mitochondrial carrier
  peroxisomal membrane protein, 34kDa), member 17
  Uniprot ID: O43808
  ENSP ID: ENSP00000390722
MASVLSYESLVHAVAGAVGSVTAMTVFFPLDTARLRLQVDEKRKSKTTHMVLLEIIKEEGLLAPYRGWFPVISSLCCSNFVYFYTFNSLKALWVKGQHSTTGKDLVVGFVAGVVNVLLTTPLWVVNTRLKLQGAKFRNEDIVPTNYKGIIDAFHQIIRDEGISALWNGTFPSLLLVFNPAIQFMFYEGLKRQLLKKRMKLSSLDVFIIGAVAKAIATTVTYPLQTVQSILRFGRHRLNPENRTLGSLRNILYLLHQRVRRFGIMGLYKGLEAKLLQTVLTAALMFLVYEKLTAATFTVMGLKRAHQH

SEQ ID NO: 80950 - protein, 239 aa, Homo sapiens
  Payload ID: 16136
  Gene Symbol: SLC25A17
  Gene Name: solute carrier family 25 (mitochondrial carrier
  peroxisomal membrane protein, 34kDa), member 17
  ENSP ID: ENSP00000394539
MASVLSYESLVHAVAGAVGSVTAMTVFFPLDTARLRLQVDEKRKSKTTHMVLLEIIKEEGLLAPYRGWFPVISSLCCSNFVYFYTFNSLKALWVKGQHSTTGKDLVVGFVAGVVNVLLTTPLWVVNTRLKLQGAKFRNEDIVPTNYKGIIDAFHQIIRDEGISALWNGTFPSLLLVFNPAIQFMFYEGLKRQLLKKRMKLSSLDVFIIGAVAKAIATTVTYPLQTVQSILRLFIHSNIY

SEQ ID NO: 80951 - protein, 48 aa, Homo sapiens
  Payload ID: 16136
  Gene Symbol: SLC25A17
  Gene Name: solute carrier family 25 (mitochondrial carrier
  peroxisomal membrane protein, 34kDa), member 17
  ENSP ID: ENSP00000400053
MASVLSYESLVHAVAGAVGSVTAMTVFFPLDTARLRLQAWHHIEGGFQ

SEQ ID NO: 80952 - protein, 92 aa, Homo sapiens
  Payload ID: 16136
  Gene Symbol: SLC25A17
  Gene Name: solute carrier family 25 (mitochondrial carrier
  peroxisomal membrane protein, 34kDa), member 17
  ENSP ID: ENSP00000404200
MGSVTAMTVFFPLDTARLRLQVDEKRKSKTTHMVLLEIIKEEGLLAPYRGWFPVISSLCCSNFVYFYTFNSLKALWVKGQHSTTGKDLVVGF

SEQ ID NO: 80953 - protein, 49 aa, Homo sapiens
  Payload ID: 16136
  Gene Symbol: SLC25A17
  Gene Name: solute carrier family 25 (mitochondrial carrier
  peroxisomal membrane protein, 34kDa), member 17
  ENSP ID: ENSP00000407096
MASVLSYESLVHAVAGAVLDFDFRPGTISRVVSSDFQSLLLQFCLFLHF

SEQ ID NO: 80954 - protein, 45 aa, Homo sapiens; identical to SEQ ID NO: 80946
  Payload ID: 16136
  Gene Symbol: SLC25A17
  Gene Name: solute carrier family 25 (mitochondrial carrier
  peroxisomal membrane protein, 34kDa), member 17
  ENSP ID: ENSP00000409781

SEQ ID NO: 80955 - protein, 45 aa, Homo sapiens; identical to SEQ ID NO: 80946
  Payload ID: 16136
  Gene Symbol: SLC25A17
  Gene Name: solute carrier family 25 (mitochondrial carrier
  peroxisomal membrane protein, 34kDa), member 17
  ENSP ID: ENSP00000410565

SEQ ID NO: 80956 - protein, 45 aa, Homo sapiens; identical to SEQ ID NO: 80946
  Payload ID: 16136
  Gene Symbol: SLC25A17
  Gene Name: solute carrier family 25 (mitochondrial carrier
  peroxisomal membrane protein, 34kDa), member 17
  ENSP ID: ENSP00000414908

SEQ ID NO: 80957 - protein, 56 aa, Homo sapiens
  Payload ID: 16136
  Gene Symbol: SLC25A17
  Gene Name: solute carrier family 25 (mitochondrial carrier
  peroxisomal membrane protein, 34kDa), member 17
  ENSP ID: ENSP00000416618
MASVLSYESLVHAVAGAVLDFDFRLMRKENPKLHTWCSWRSLKKKDSWHHIEGGFQ

SEQ ID NO: 80958 - protein, 234 aa, Homo sapiens
  Payload ID: 16136
  Gene Symbol: SLC25A17
  Gene Name: solute carrier family 25 (mitochondrial carrier
  peroxisomal membrane protein, 34kDa), member 17
  ENSP ID: ENSP00000438355
MASVLSYESLVHAVAGAVGSVTAMTVFFPLDTARLRLQGVVNVLLTTPLWVVNTRLKLQGAKFRNEDIVPTNYKGIIDAFHQIIRDEGISALWNGTFPSLLLVFNPAIQFMFYEGLKRQLLKKRMKLSSLDVFIIGAVAKAIATTVTYPLQTVQSILRFGRHRLNPENRTLGSLRNILYLLHQRVRRFGIMGLYKGLEAKLLQTVLTAALMFLVYEKLTAATFTVMGLKRAHQH

SEQ ID NO: 80959 - protein, 482 aa, Homo sapiens
  Payload ID: 16137
  Gene Symbol: SLC25A23
  Gene Name: solute carrier family 25 (mitochondrial carrier
  phosphate carrier), member 23
  Uniprot ID: Q9BV35
  ENSP ID: ENSP00000264088
MRGSPGDAERRQRWGRLFEELDSNKDGRVDVHELRQGLARLGGGNPDPGAQQGISSEGDADPDGGLDLEEFSRYLQEREQRLLLMFHSLDRNQDGHIDVSEIQQSFRALGISISLEQAEKILHSMDRDGTMTIDWQEWRDHFLLHSLENVEDVLYFWKHSTLSSAGFSAWIKDSTAEQNRSKTTVLARRSGSHLKSQHFGRPKWADHEVLDIGECLTVPDEFSKQEKLTGMWWKQLVAGAVAGAVSRTGTAPLDRLKVFMQVHASKTNRLNILGGLRSMVLEGGIRSLWRGNGINVLKIAPESAIKFMAYEQIKRAILGQQETLHVQERFVAGSLAGATAQTIIYPMEVLKTRLTLRRTGQYKGLLDCARRILEREGPRAFYRGYLPNVLGIIPYAGIDLAVYETLKNWWLQQYSHDSADPGILVLLACGTISSTCGQIASYPLALVRTRMQAQGWSTVARFQITATSAFQVQAILLPQPPE

SEQ ID NO: 80960 - protein, 468 aa, Homo sapiens
  Payload ID: 16137
  Gene Symbol: SLC25A23
  Gene Name: solute carrier family 25 (mitochondrial carrier
  phosphate carrier), member 23
  Uniprot ID: Q9BV35
  ENSP ID: ENSP00000301454
MRGSPGDAERRQRWGRLFEELDSNKDGRVDVHELRQGLARLGGGNPDPGAQQGISSEGDADPDGGLDLEEFSRYLQEREQRLLLMFHSLDRNQDGHIDVSEIQQSFRALGISISLEQAEKILHSMDRDGTMTIDWQEWRDHFLLHSLENVEDVLYFWKHSTVLDIGECLTVPDEFSKQEKLTGMWWKQLVAGAVAGAVSRTGTAPLDRLKVFMQVHASKTNRLNILGGLRSMVLEGGIRSLWRGNGINVLKIAPESAIKFMAYEQIKRAILGQQETLHVQERFVAGSLAGATAQTIIYPMEVLKTRLTLRRTGQYKGLLDCARRILEREGPRAFYRGYLPNVLGIIPYAGIDLAVYETLKNWWLQQYSHDSADPGILVLLACGTISSTCGQIASYPLALVRTRMQAQASIEGGPQLSMLGLLRHILSQEGMRGLYRGIAPNFMKVIPAVSISYVVYENMKQALGVTSR

SEQ ID NO: 80961 - protein, 438 aa, Homo sapiens
  Payload ID: 16137
  Gene Symbol: SLC25A23
  Gene Name: solute carrier family 25 (mitochondrial carrier
  phosphate carrier), member 23
  Uniprot ID: Q9BV35
  ENSP ID: ENSP00000334537
MRGSPGDAERRQRWGRLFEELDSNKDGRVDVHELRQGLARLGGGNPDPGAQQGISSEGDADPDGGLDLEEFSRYLQEREQRLLLMFHSLDRNQDGHIDVSEIQQSFRALGISISLEQAEKILHSMDRDGTMTIDWQEWRDHFLLHSLENVEDVLYFWKHSTVLDIGECLTVPDEFSKQEKLTGMWWKQLVAGAVAGAVSRTGTAPLDRLKVFMQVHASKTNRLNILGGLRSMVLEGGIRSLWRGNGINVLKIAPESAIKFMAYEQIKRAILGQQETLHVQERFVAGSLAGATAQTIIYPMEVLKTRLTLRRTGQYKGLLDCARRILEREGPRAFYRGYLPNVLGIIPYAGIDLAVYETLKNWWLQQYSHDSADPGILVLLACGTISSTCGQIASYPLALVRTRMQAQDVSVYKTDTVPTLIELTGRRGRKMLNKSFWN

SEQ ID NO: 80962 - protein, 236 aa, Homo sapiens
  Payload ID: 16137
  Gene Symbol: SLC25A23
  Gene Name: solute carrier family 25 (mitochondrial carrier
  phosphate carrier), member 23
  ENSP ID: ENSP00000470589
  MOD_RES (1)..(1): Any amino acid
XQEKLTGMWWKQLVAGAVAGAVSRTGTAPLDRLKVFMQVHASKTNRLNILGGLRSMVLEGGIRSLWRGNGINVLKIAPESAIKFMAYEQIKRAILGQQETLHVQERFVAGSLAGATAQTIIYPMETLKNWWLQQYSHDSADPGILVLLACGTISSTCGQIASYPLALVRTRMQAQASIEGGPQLSMLGLLRHILSQEGMRGLYRGIAPNFMKVIPAVSISYVVYENMKQALGVTSR

SEQ ID NO: 80963 - protein, 99 aa, Homo sapiens
  Payload ID: 16137
  Gene Symbol: SLC25A23
  Gene Name: solute carrier family 25 (mitochondrial carrier
  phosphate carrier), member 23
  ENSP ID: ENSP00000470688
NVLKIAPESAIKFMAYEQTLKNWWLQQYSHDSADPGILVLLACGTISSTCGQIASYPLALVRTRMQAQGSSDSPASASRVAGITAGGHAMSSLMERTMW

SEQ ID NO: 80964 - protein, 278 aa, Homo sapiens
  Payload ID: 16137
  Gene Symbol: SLC25A23
  Gene Name: solute carrier family 25 (mitochondrial carrier
  phosphate carrier), member 23
  ENSP ID: ENSP00000470757
  MOD_RES (1)..(1): Any amino acid
XRSLWRGNGINVLKIAPESAIKFMAYEQIKRAILGQQETLHVQERFVAGSLAGATAQTIIYPMEVLKTRLTLRRTGQYKGLLDCARRILEREGPRAFYRGYLPNVLGIIPYAGIDLAVYETLKNWWLQQYSHDSADPGILVLLACGTISSTCGQIASYPLALVRTRMQAQASIEGGPQLSMLGLLRHILSQEGMRGLYRGIAPNFMKVIPAVSISYVVYENMKQALGVTSRSTDSLYLNTQTLPPSGTRSSVLVKRWILDPQPQIPMPRALDLQAQLL

SEQ ID NO: 80965 - protein, 216 aa, Homo sapiens
  Payload ID: 16137
  Gene Symbol: SLC25A23
  Gene Name: solute carrier family 25 (mitochondrial carrier
  phosphate carrier), member 23
  ENSP ID: ENSP00000472153
  MOD_RES (1)..(1): Any amino acid
XQEKLTGMWWKQLVAGAVAGAVSRTGTAPLDRLKVFMQVHASKTNRLNILGGLRSMVLEGGIRSLWRGNGINVLKIAPESAIKFMAYEQTLKNWWLQQYSHDSADPGILVLLACGTISSTCGQIASYPLALVRTRMQAQGFHHVAQAHLELVGSRNSPAFSLPTCWDYSRWSCHEQPYGEDHVVRNSANSHVTELGRGSCCPGQHLTAILSVEFPG

SEQ ID NO: 80966 - protein, 77 aa, Homo sapiens
  Payload ID: 16137
  Gene Symbol: SLC25A23
  Gene Name: solute carrier family 25 (mitochondrial carrier
  phosphate carrier), member 23
  ENSP ID: ENSP00000472177
MFHSLDRNQDGHIDVSEIQQSFRALGISISLEQAEKILHSMDRDGTMTIDWQEWRDHFLLHSLENVEDVLYFWKHST

SEQ ID NO: 80967 - protein, 90 aa, Homo sapiens
  Payload ID: 16137
  Gene Symbol: SLC25A23
  Gene Name: solute carrier family 25 (mitochondrial carrier
  phosphate carrier), member 23
  ENSP ID: ENSP00000472517
  MOD_RES (1)..(1): Any amino acid
XAFYRGYLPNVLGIIPYAGIDLAVYETLKNWWLQQYSHDSADPGILVLLACGTISSTCGQIASYPLALVRTRMQAQDAVSLCFPGWSAMT

SEQ ID NO: 80968 - protein, 131 aa, Homo sapiens
  Payload ID: 16137
  Gene Symbol: SLC25A23
  Gene Name: solute carrier family 25 (mitochondrial carrier
  phosphate carrier), member 23
  ENSP ID: ENSP00000472590
  MOD_RES (1)..(1): Any amino acid
XAQTIIYPMEVLKTRLTLRRTGQYKGLLDCARRILEREGPRAFYRGYLPNVLGIIPYAGIDLAVYETLKNWWLQQYSHDSADPGILVLLACGTISSTCGQIASYPLALVRTRMQAQAGGHAMSSLMERTMW

SEQ ID NO: 80969 - protein, 110 aa, Homo sapiens
  Payload ID: 16138
  Gene Symbol: SLC25A24
  Gene Name: solute carrier family 25 (mitochondrial carrier
  phosphate carrier), member 24
  ENSP ID: ENSP00000264128
MLRWLRDFVLPTAACQDAEQPTRYETLFQALDRNGDGVVDIGELQEGLRNLGIPLGQDAEEKIFTTGDVNKDGKLDFEEFMKYLKDHEKKMKLAFKSLDKNNDALMLMGQ

SEQ ID NO: 80970 - protein, 458 aa, Homo sapiens
  Payload ID: 16138
  Gene Symbol: SLC25A24
  Gene Name: solute carrier family 25 (mitochondrial carrier
  phosphate carrier), member 24
  Uniprot ID: Q6NUK1
  ENSP ID: ENSP00000359058
MDSLYGDLFWYLDYNKDGTLDIFELQEGLEDVGAIQSLEEAKKIFTTGDVNKDGKLDFEEFMKYLKDHEKKMKLAFKSLDKNNDGKIEASEIVQSLQTLGLTISEQQAELILQSIDVDGTMTVDWNEWRDYFLFNPVTDIEEIIRFWKHSTGIDIGDSLTIPDEFTEDEKKSGQWWRQLLAGGIAGAVSRTSTAPLDRLKIMMQVHGSKSDKMNIFGGFRQMVKEGGIRSLWRGNGTNVIKIAPETAVKFWAYEQYKKLLTEEGQKIGTFERFISGSMAGATAQTFIYPMEVMKTRLAVGKTGQYSGIYDCAKKILKHEGLGAFYKGYVPNLLGIIPYAGIDLAVYELLKSYWLDNFAKDSVNPGVMVLLGCGALSSTCGQLASYPLALVRTRMQAQAMLEGSPQLNMVGLFRRIISKEGIPGLYRGITPNFMKVLPAVGISYVVYENMKQTLGVTQK

SEQ ID NO: 80971 - protein, 69 aa, Homo sapiens
  Payload ID: 16138
  Gene Symbol: SLC25A24
  Gene Name: solute carrier family 25 (mitochondrial carrier
  phosphate carrier), member 24
  ENSP ID: ENSP00000454393
MLRWLRDFVLPTAACQDAEQPTRYETLFQALDRNGDGVVDIGELQEGLRNLGIPLGQDAEEVGRRRGAA

SEQ ID NO: 80972 - protein, 477 aa, Homo sapiens
  Payload ID: 16138
  Gene Symbol: SLC25A24
  Gene Name: solute carrier family 25 (mitochondrial carrier
  phosphate carrier), member 24
  Uniprot ID: Q6NUK1
  ENSP ID: ENSP00000457733
MLRWLRDFVLPTAACQDAEQPTRYETLFQALDRNGDGVVDIGELQEGLRNLGIPLGQDAEEKIFTTGDVNKDGKLDFEEFMKYLKDHEKKMKLAFKSLDKNNDGKIEASEIVQSLQTLGLTISEQQAELILQSIDVDGTMTVDWNEWRDYFLFNPVTDIEEIIRFWKHSTGIDIGDSLTIPDEFTEDEKKSGQWWRQLLAGGIAGAVSRTSTAPLDRLKIMMQVHGSKSDKMNIFGGFRQMVKEGGIRSLWRGNGTNVIKIAPETAVKFWAYEQYKKLLTEEGQKIGTFERFISGSMAGATAQTFIYPMEVMKTRLAVGKTGQYSGIYDCAKKILKHEGLGAFYKGYVPNLLGIIPYAGIDLAVYELLKSYWLDNFAKDSVNPGVMVLLGCGALSSTCGQLASYPLALVRTRMQAQAMLEGSPQLNMVGLFRRIISKEGIPGLYRGITPNFMKVLPAVGISYVVYENMKQTLGVTQK

SEQ ID NO: 80973 - protein, 469 aa, Homo sapiens
  Payload ID: 16139
  Gene Symbol: SLC25A25
  Gene Name: solute carrier family 25 (mitochondrial carrier
  phosphate carrier), member 25
  Uniprot ID: Q6KCM7
  ENSP ID: ENSP00000362155
MLCLCLYVPVIGEAQTEFQYFESKGLPAELKSIFKLSVFIPSQEFSTYRQWKQKIVQAGDKDLDGQLDFEEFVHYLQDHEKKLRLVFKSLDKKNDGRIDAQEIMQSLRDLGVKISEQQAEKILKSMDKNGTMTIDWNEWRDYHLLHPVENIPEIILYWKHSTIFDVGENLTVPDEFTVEERQTGMWWRHLVAGGGAGAVSRTCTAPLDRLKVLMQVHASRSNNMGIVGGFTQMIREGGARSLWRGNGINVLKIAPESAIKFMAYEQIKRLVGSDQETLRIHERLVAGSLAGAIAQSSIYPMEVLKTRMALRKTGQYSGMLDCARRILAREGVAAFYKGYVPNMLGIIPYAGIDLAVYETLKNAWLQHYAVNSADPGVFVLLACGTMSSTCGQLASYPLALVRTRMQAQASIEGAPEVTMSSLFKHILRTEGAFGLYRGLAPNFMKVIPAVSISYVVYENLKITLGVQSR

SEQ ID NO: 80974 - protein, 501 aa, Homo sapiens
  Payload ID: 16139
  Gene Symbol: SLC25A25
  Gene Name: solute carrier family 25 (mitochondrial carrier
  phosphate carrier), member 25
  Uniprot ID: Q6KCM7
  ENSP ID: ENSP00000362157
MLQMLWHFLASFFPRAGCHGSREGDDREVRGTPAPAWRDQMASFLGKQDGRAEATEKRPTILLVVGPAEQFPKKIVQAGDKDLDGQLDFEEFVHYLQDHEKKLRLVFKSLDKKNDGRIDAQEIMQSLRDLGVKISEQQAEKILKRIRTGHFWGPVTYMDKNGTMTIDWNEWRDYHLLHPVENIPEIILYWKHSTIFDVGENLTVPDEFTVEERQTGMWWRHLVAGGGAGAVSRTCTAPLDRLKVLMQVHASRSNNMGIVGGFTQMIREGGARSLWRGNGINVLKIAPESAIKFMAYEQIKRLVGSDQETLRIHERLVAGSLAGAIAQSSIYPMEVLKTRMALRKTGQYSGMLDCARRILAREGVAAFYKGYVPNMLGIIPYAGIDLAVYETLKNAWLQHYAVNSADPGVFVLLACGTMSSTCGQLASYPLALVRTRMQAQASIEGAPEVTMSSLFKHILRTEGAFGLYRGLAPNFMKVIPAVSISYVVYENLKITLGVQSR

SEQ ID NO: 80975 - protein, 503 aa, Homo sapiens
  Payload ID: 16139
  Gene Symbol: SLC25A25
  Gene Name: solute carrier family 25 (mitochondrial carrier
  phosphate carrier), member 25
  Uniprot ID: Q6KCM7
  ENSP ID: ENSP00000362159
MVSSVLCRCVASPPPDAAATAASSSASSPASVGDPCGGAICGGPDHRLRLWRLFQTLDVNRDGGLCVNDLAVGLRRLGLHRTEGELQKIVQAGDKDLDGQLDFEEFVHYLQDHEKKLRLVFKSLDKKNDGRIDAQEIMQSLRDLGVKISEQQAEKILKSMDKNGTMTIDWNEWRDYHLLHPVENIPEIILYWKHSTIFDVGENLTVPDEFTVEERQTGMWWRHLVAGGGAGAVSRTCTAPLDRLKVLMQVHASRSNNMGIVGGFTQMIREGGARSLWRGNGINVLKIAPESAIKFMAYEQIKRLVGSDQETLRIHERLVAGSLAGAIAQSSIYPMEVLKTRMALRKTGQYSGMLDCARRILAREGVAAFYKGYVPNMLGIIPYAGIDLAVYETLKNAWLQHYAVNSADPGVFVLLACGTMSSTCGQLASYPLALVRTRMQAQASIEGAPEVTMSSLFKHILRTEGAFGLYRGLAPNFMKVIPAVSISYVVYENLKITLGVQSR

SEQ ID NO: 80976 - protein, 515 aa, Homo sapiens
  Payload ID: 16139
  Gene Symbol: SLC25A25
  Gene Name: solute carrier family 25 (mitochondrial carrier
  phosphate carrier), member 25
  Uniprot ID: Q6KCM7
  ENSP ID: ENSP00000362160
MVSSVLCRCVASPPPDAAATAASSSASSPASVGDPCGGAICGGPDHRLRLWRLFQTLDVNRDGGLCVNDLAVGLRRLGLHRTEGELQKIVQAGDKDLDGQLDFEEFVHYLQDHEKKLRLVFKSLDKKNDGRIDAQEIMQSLRDLGVKISEQQAEKILKRIRTGHFWGPVTYMDKNGTMTIDWNEWRDYHLLHPVENIPEIILYWKHSTIFDVGENLTVPDEFTVEERQTGMWWRHLVAGGGAGAVSRTCTAPLDRLKVLMQVHASRSNNMGIVGGFTQMIREGGARSLWRGNGINVLKIAPESAIKFMAYEQIKRLVGSDQETLRIHERLVAGSLAGAIAQSSIYPMEVLKTRMALRKTGQYSGMLDCARRILAREGVAAFYKGYVPNMLGIIPYAGIDLAVYETLKNAWLQHYAVNSADPGVFVLLACGTMSSTCGQLASYPLALVRTRMQAQASIEGAPEVTMSSLFKHILRTEGAFGLYRGLAPNFMKVIPAVSISYVVYENLKITLGVQSR

SEQ ID NO: 80977 - protein, 489 aa, Homo sapiens
  Payload ID: 16139
  Gene Symbol: SLC25A25
  Gene Name: solute carrier family 25 (mitochondrial carrier
  phosphate carrier), member 25
  Uniprot ID: Q6KCM7
  ENSP ID: ENSP00000410053
MLQMLWHFLASFFPRAGCHGSREGDDREVRGTPAPAWRDQMASFLGKQDGRAEATEKRPTILLVVGPAEQFPKKIVQAGDKDLDGQLDFEEFVHYLQDHEKKLRLVFKSLDKKNDGRIDAQEIMQSLRDLGVKISEQQAEKILKSMDKNGTMTIDWNEWRDYHLLHPVENIPEIILYWKHSTIFDVGENLTVPDEFTVEERQTGMWWRHLVAGGGAGAVSRTCTAPLDRLKVLMQVHASRSNNMGIVGGFTQMIREGGARSLWRGNGINVLKIAPESAIKFMAYEQIKRLVGSDQETLRIHERLVAGSLAGAIAQSSIYPMEVLKTRMALRKTGQYSGMLDCARRILAREGVAAFYKGYVPNMLGIIPYAGIDLAVYETLKNAWLQHYAVNSADPGVFVLLACGTMSSTCGQLASYPLALVRTRMQAQASIEGAPEVTMSSLFKHILRTEGAFGLYRGLAPNFMKVIPAVSISYVVYENLKITLGVQSR

SEQ ID NO: 80978 - protein, 165 aa, Homo sapiens
  Payload ID: 16139
  Gene Symbol: SLC25A25
  Gene Name: solute carrier family 25 (mitochondrial carrier
  phosphate carrier), member 25
  ENSP ID: ENSP00000418600
  MOD_RES (1)..(1): Any amino acid
XTVEERQTGMWWRHLVAGGGAGAVSRTCTAPLDRLKVLMQVLKTRMALRKTGQYSGMLDCARRILAREGVAAFYKGYVPNMLGIIPYAGIDLAVYETLKNAWLQHYAVNSADPGVFVLLACGTMSSTCGQLASYPLALVRTRMQAQGKAGPGQSPGRSGGADRSI

SEQ ID NO: 80979 - protein, 75 aa, Homo sapiens
  Payload ID: 16139
  Gene Symbol: SLC25A25
  Gene Name: solute carrier family 25 (mitochondrial carrier
  phosphate carrier), member 25
  ENSP ID: ENSP00000419685
MLCLCLYVPVIGEAQTEFQYFESKGLPAELKSIFKLSVFIPSQEFSTYRQWKQCPLCTKGDLQIQGRRQKEAQAL

SEQ ID NO: 80980 - protein, 361 aa, Homo sapiens
  Payload ID: 16140
  Gene Symbol: SLC25A3
  Gene Name: solute carrier family 25 (mitochondrial carrier
  phosphate carrier), member 3
  Uniprot ID: Q00325
  ENSP ID: ENSP00000188376
MFSSVAHLARANPFNTPHLQLVHDGLGDLRSSSPGPTGQPRRPRNLAAAAVEEYSCEFGSAKYYALCGFGGVLSCGLTHTAVVPLDLVKCRMQVDPQKYKGIFNGFSVTLKEDGVRGLAKGWAPTFLGYSMQGLCKFGFYEVFKVLYSNMLGEENTYLWRTSLYLAASASAEFFADIALAPMEAAKVRIQTQPGYANTLRDAAPKMYKEEGLKAFYKGVAPLWMRQIPYTMMKFACFERTVEALYKFVVPKPRSECSKPEQLVVTFVAGYIAGVFCAIVSHPADSVVSVLNKEKGSSASLVLKRLGFKGVWKGLFARIIMIGTLTALQWFIYDSVKVYFRLPRPPPPEMPESLKKKLGLTQ

SEQ ID NO: 80981 - protein, 362 aa, Homo sapiens
  Payload ID: 16140
  Gene Symbol: SLC25A3
  Gene Name: solute carrier family 25 (mitochondrial carrier
  phosphate carrier), member 3
  Uniprot ID: Q00325
  ENSP ID: ENSP00000228318
MFSSVAHLARANPFNTPHLQLVHDGLGDLRSSSPGPTGQPRRPRNLAAAAVEEQYSCDYGSGRFFILCGLGGIISCGTTHTALVPLDLVKCRMQVDPQKYKGIFNGFSVTLKEDGVRGLAKGWAPTFLGYSMQGLCKFGFYEVFKVLYSNMLGEENTYLWRTSLYLAASASAEFFADIALAPMEAAKVRIQTQPGYANTLRDAAPKMYKEEGLKAFYKGVAPLWMRQIPYTMMKFACFERTVEALYKFVVPKPRSECSKPEQLVVTFVAGYIAGVFCAIVSHPADSVVSVLNKEKGSSASLVLKRLGFKGVWKGLFARIIMIGTLTALQWFIYDSVKVYFRLPRPPPPEMPESLKKKLGLTQ

SEQ ID NO: 80982 - protein, 361 aa, Homo sapiens; identical to SEQ ID NO: 80980
  Payload ID: 16140
  Gene Symbol: SLC25A3
  Gene Name: solute carrier family 25 (mitochondrial carrier
  phosphate carrier), member 3
  Uniprot ID: Q00325
  ENSP ID: ENSP00000383898

SEQ ID NO: 80983 - protein, 362 aa, Homo sapiens; identical to SEQ ID NO: 80981
  Payload ID: 16140
  Gene Symbol: SLC25A3
  Gene Name: solute carrier family 25 (mitochondrial carrier
  phosphate carrier), member 3
  Uniprot ID: Q00325
  ENSP ID: ENSP00000447310

SEQ ID NO: 80984 - protein, 153 aa, Homo sapiens
  Payload ID: 16140
  Gene Symbol: SLC25A3
  Gene Name: solute carrier family 25 (mitochondrial carrier
  phosphate carrier), member 3
  ENSP ID: ENSP00000447339
MFSSVAHLARANPFNTPHLQLVHDGLGDLRSSSPGPTGQPRRPRNLAAAAVEEQYSCDYGSGRFFILCGLGGIISCGTTHTALVPLDLVKCRMQVDPQKYKGIFNGFSVTLKEDGVRGLAKGWAPTFLGYSMQGLCKFGFYEVFKVLYSNMLG

SEQ ID NO: 80985 - protein, 361 aa, Homo sapiens; identical to SEQ ID NO: 80980
  Payload ID: 16140
  Gene Symbol: SLC25A3
  Gene Name: solute carrier family 25 (mitochondrial carrier
  phosphate carrier), member 3
  Uniprot ID: Q00325
  ENSP ID: ENSP00000447740

SEQ ID NO: 80986 - protein, 361 aa, Homo sapiens; identical to SEQ ID NO: 80980
  Payload ID: 16140
  Gene Symbol: SLC25A3
  Gene Name: solute carrier family 25 (mitochondrial carrier
  phosphate carrier), member 3
  Uniprot ID: Q00325
  ENSP ID: ENSP00000448708

SEQ ID NO: 80987 - protein, 122 aa, Homo sapiens
  Payload ID: 16140
  Gene Symbol: SLC25A3
  Gene Name: solute carrier family 25 (mitochondrial carrier
  phosphate carrier), member 3
  ENSP ID: ENSP00000448969
MFSSVAHLARANPFNTPHLQLVHDGLGDLRSSSPGPTGQPRRPRNLAAAAVEGEIRPCPIQSCGLLVGRPAFEAWTRLGGQGRTSPARCTVGRRPVACPGVSAFSTIGGCQILGLPSRAWKR

SEQ ID NO: 80988 - protein, 104 aa, Homo sapiens
  Payload ID: 16140
  Gene Symbol: SLC25A3
  Gene Name: solute carrier family 25 (mitochondrial carrier
  phosphate carrier), member 3
  ENSP ID: ENSP00000449009
MFSSVAHLARANPFNTPHLQLVHDGLGDLRSSSPGPTGQPRRPRNLAAAAVEEQYSCDYGSGRFFILCGLGGIISCGTTHTALVPLDLVKCRMQVCFACWTRAY

SEQ ID NO: 80989 - protein, 324 aa, Homo sapiens
  Payload ID: 16140
  Gene Symbol: SLC25A3
  Gene Name: solute carrier family 25 (mitochondrial carrier
  phosphate carrier), member 3
  ENSP ID: ENSP00000449166
MFSSVAHLARANPFNTPHLQLVHDGLGDLRSSSPGPTGQPRRPRNLAAAAVEEYSCEFGSAKYYALCGFGGVLSCGLTHTAVVPLDLVKCRMQVDPQKYKGIFNGFSVTLKEDGVRGLAKGWAPTFLGYSMQGLCKFGFYEVFKVLYSNMLGEENTYLWRTSLYLAASASAEFFADIALAPMEAAKVRIQTQPGYANTLRDAAPKMYKEEGLKAFYKGVAPLWMRQIPYTMMKFACFERTVEALYKFVVPKPRSECSKPEQLVVTFVAGYIGVWKGLFARIIMIGTLTALQWFIYDSVKVYFRLPRPPPPEMPESLKKKLGLTQ

SEQ ID NO: 80990 - protein, 154 aa, Homo sapiens
  Payload ID: 16140
  Gene Symbol: SLC25A3
  Gene Name: solute carrier family 25 (mitochondrial carrier
  phosphate carrier), member 3
  ENSP ID: ENSP00000449479
MFSSVAHLARANPFNTPHLQLVHDGLGDLRSSSPGPTGQPRRPRNLAAAAVEEQYSCDYGSGRFFILCGLGGIISCGTTHTALVPLDLVKCRMQVDPQKYKGIFNGFSVTLKEDGVRGLAKGWAPTFLGYSMQGLCKFGFYEVFKVLYSNMLGE

SEQ ID NO: 80991 - protein, 156 aa, Homo sapiens
  Payload ID: 16140
  Gene Symbol: SLC25A3
  Gene Name: solute carrier family 25 (mitochondrial carrier
  phosphate carrier), member 3
  ENSP ID: ENSP00000449793
MFSSVAHLARANPFNTPHLQLVHDGLGDLRSSSPGPTGQPRRPRNLAAAAVEEYSCEFGSAKYYALCGFGGVLSCGLTHTAVVPLDLVKCRMQVDPQKYKGIFNGFSVTLKEDGVRGLAKGWAPTFLGYSMQGLCKFGFYEVFKVLYSNMLGEVCN

SEQ ID NO: 80992 - protein, 315 aa, Homo sapiens
  Payload ID: 16141
  Gene Symbol: SLC25A32
  Gene Name: solute carrier family 25 (mitochondrial folate carrier), member 32
  Uniprot ID: Q9H2D1
  ENSP ID: ENSP00000297578
MTGQGQSASGSSAWSTVFRHVRYENLIAGVSGGVLSNLALHPLDLVKIRFAVSDGLELRPKYNGILHCLTTIWKLDGLRGLYQGVTPNIWGAGLSWGLYFFFYNAIKSYKTEGRAERLEATEYLVSAAEAGAMTLCITNPLWVTKTRLMLQYDAVVNSPHRQYKGMFDTLVKIYKYEGVRGLYKGFVPGLFGTSHGALQFMAYELLKLKYNQHINRLPEAQLSTVEYISVAALSKIFAVAATYPYQVVRARLQDQHMFYSGVIDVITKTWRKEGVGGFYKGIAPNLIRVTPACCITFVVYENVSHFLLDLREKRK

SEQ ID NO: 80993 - protein, 123 aa, Homo sapiens
  Payload ID: 16141
  Gene Symbol: SLC25A32
  Gene Name: solute carrier family 25 (mitochondrial folate carrier), member 32
  ENSP ID: ENSP00000427737
MTGQGQSASGSSAWSTVFRHVRYENLIAGVSGGVLSNLALHPLDLVKIRFAVSDGLELRPKYNGILHCLTTIWKLDGLRGLYQGVTPNIWGAGLSWGLYFFLDLFLGCLEHRMVPFSLWHMNC

SEQ ID NO: 80994 - protein, 123 aa, Homo sapiens
  Payload ID: 16141
  Gene Symbol: SLC25A32
  Gene Name: solute carrier family 25 (mitochondrial folate carrier), member 32
  ENSP ID: ENSP00000430371
MTGQGQSASGSSAWSTVFRHVRYENLIAGVSGGVLSNLALHPLDLVKIRFAVSDGLELRPKYNGILHCLTTIWKLDGLRGLYQGVTPNIWGAGLSWGLYFFLSHDPLHYKPIMGNKNSPYVTV

SEQ ID NO: 80995 - protein, 149 aa, Homo sapiens
  Payload ID: 16141
  Gene Symbol: SLC25A32
  Gene Name: solute carrier family 25 (mitochondrial folate carrier), member 32
  ENSP ID: ENSP00000430989
MTGQGQSASGSSAWSTVFRHVRYENLIAGVSGGVLSNLALHPLDLVKIRFAVSDGLELRPKYNGILHCLTTIWKLDGLRGLYQGVTPNIWGAGLSWGLYFFFYNAIKSYKTEGRAERLEATEYLVSAAEAGICSWAVWNIAWCPSVYGI

SEQ ID NO: 80996 - protein, 364 aa, Homo sapiens
  Payload ID: 16142
  Gene Symbol: SLC25A28
  Gene Name: solute carrier family 25 (mitochondrial iron transporter), member 28
  Uniprot ID: Q96A46
  ENSP ID: ENSP00000359526
MELEGRGAGGVAGGPAAGPGRSPGESALLDGWLQRGVGRGAGGGEAGACRPPVRQDPDSGPDYEALPAGATVTTHMVAGAVAGILEHCVMYPIDCVKTRMQSLQPDPAARYRNVLEALWRIIRTEGLWRPMRGLNVTATGAGPAHALYFACYEKLKKTLSDVIHPGGNSHIANGAAGCVATLLHDAAMNPAEVVKQRMQMYNSPYHRVTDCVRAVWQNEGAGAFYRSYTTQLTMNVPFQAIHFMTYEFLQEHFNPQRRYNPSSHVLSGACAGAVAAAATTPLDVCKTLLNTQESLALNSHITGHITGMASAFRTVYQVGGVTAYFRGVQARVIYQIPSTAIAWSVYEFFKYLITKRQEEWRAGK

SEQ ID NO: 80997 - protein, 225 aa, Homo sapiens
  Payload ID: 16142
  Gene Symbol: SLC25A28
  Gene Name: solute carrier family 25 (mitochondrial iron transporter), member 28
  ENSP ID: ENSP00000399102
RGAAGWSHCHHAHGGRRRGRDPGALRDVPHRLRQGAAGCVATLLHDAAMNPAEVVKQRMQMYNSPYHRVTDCVRAVWQNEGAGAFYRSYTTQLTMNVPFQAIHFMTYEFLQEHFNPQRRYNPSSHVLSGACAGAVAAAATTPLDVCKTLLNTQESLALNSHITGHITGMASAFRTVYQVGGVTAYFRGVQARVIYQIPSTAIAWSVYEFFKYLITKRQEEWRAGK

SEQ ID NO: 80998 - protein, 155 aa, Homo sapiens
  Payload ID: 16143
  Gene Symbol: SLC25A37
  Gene Name: solute carrier family 25 (mitochondrial iron transporter), member 37
  Uniprot ID: Q9NYZ2
  ENSP ID: ENSP00000290075
MELRSGSVGSQAVARRMDGDSRDGGGGKDATGSEDYENLPTSASVSTHMTAGAMAGILEHSVMYPVDSVKTRMQSLSPDPKAQYTSIYGALKKIMRTEGFWRPLRGVNVMIMGAGPAHAMYFACYENMKRTLNDVFHHQGNSHLANGILKAFVWS

SEQ ID NO: 80999 - protein, 159 aa, Homo sapiens
  Payload ID: 16143
  Gene Symbol: SLC25A37
  Gene Name: solute carrier family 25 (mitochondrial iron transporter), member 37
  ENSP ID: ENSP00000402782
MELRSGSVGSQAVARRMDGDSRDGGGGKDATGSEDYENLPTSASVSTHMTAGAMAGILEHSVMYPVDSVKTRMQSLSPDPKAQYTSIYGALKKIMRTEGFWRPLRGVNVMIMGAGPAHAMYFACYENMKRTLNDVFHHQGNSHLANGSRNFLRTPDRRG

SEQ ID NO: 81000 - protein, 153 aa, Homo sapiens
  Payload ID: 16143
  Gene Symbol: SLC25A37
  Gene Name: solute carrier family 25 (mitochondrial iron transporter), member 37
  ENSP ID: ENSP00000428066
DSRDGGGGKDATGSEDYENLPTSASVSTHMTAGAMAGILEHSVMYPVDSVKTRMQSLSPDPKAQYTSIYGALKKIMRTEGFWRPLRGVNVMIMGAGPAHAMYFACYENMKRTLNDVFHHQGNSHLANGIAGSMATLLHDAVMNPAEVHPLHHL

SEQ ID NO: 81001 - protein, 338 aa, Homo sapiens
  Payload ID: 16143
  Gene Symbol: SLC25A37
  Gene Name: solute carrier family 25 (mitochondrial iron transporter), member 37
  Uniprot ID: Q9NYZ2
  ENSP ID: ENSP00000429200
MELRSGSVGSQAVARRMDGDSRDGGGGKDATGSEDYENLPTSASVSTHMTAGAMAGILEHSVMYPVDSVKTRMQSLSPDPKAQYTSIYGALKKIMRTEGFWRPLRGVNVMIMGAGPAHAMYFACYENMKRTLNDVFHHQGNSHLANGIAGSMATLLHDAVMNPAEVVKQRLQMYNSQHRSAISCIRTVWRTEGLGAFYRSYTTQLTMNIPFQSIHFITYEFLQEQVNPHRTYNPQSHIISGGLAGALAAAATTPLDVCKTLLNTQENVALSLANISGRLSGMANAFRTVYQLNGLAGYFKGIQARVIYQMPSTAISWSVYEFFKYFLTKRQLENRAPY

SEQ ID NO: 81002 - protein, 299 aa, Homo sapiens
  Payload ID: 16144
  Gene Symbol: SLC25A21
  Gene Name: solute carrier family 25 (mitochondrial oxoadipate carrier), member 21
  Uniprot ID: Q9BQT8
  ENSP ID: ENSP00000329452
MSAKPEVSLVREASRQIVAGGSAGLVEICLMHPLDVVKTRFQIQRCATDPNSYKSLVDSFRMIFQMEGLFGFYKGILPPILAETPKRAVKFFTFEQYKKLLGYVSLSPALTFAIAGLGSGLTEAIVVNPFEVVKVGLQANRNTFAEQPSTVGYARQIIKKEGWGLQGLNKGLTATLGRHGVFNMVYFGFYYNVKNMIPVNKDPILEFWRKFGIGLLSGTIASVINIPFDVAKSRIQGPQPVPGEIKYRTCFKTMATVYQEEGILALYKGLLPKIMRLGPGGAVMLLVYEYTYSWLQENW

SEQ ID NO: 81003 - protein, 298 aa, Homo sapiens
  Payload ID: 16144
  Gene Symbol: SLC25A21
  Gene Name: solute carrier family 25 (mitochondrial oxoadipate carrier), member 21
  Uniprot ID: Q9BQT8
  ENSP ID: ENSP00000451873
MSAKPEVSLVREASRQIVAGGSAGLVEICLMHPLDVVKTRFQIQRCATDPNSYKSLVDSFRMIFQMEGLFGFYKGILPPILAETPKRAVKFFTFEQYKKLLGYVSLSPALTFAIAGLGSGLTEAIVVNPFEVVKVGLQANRNTFAEQPSTVGYARQIIKKEGWGLQGLNKGLTATLGRHGVFNMVYFGFYYNVKNMIPVNKDPILEFWRKFGIGLLSGTIASVINIPFDVAKSRIQGPQPVPGEIKYRTCFKTMATVYQEEGILALYKGLLPKIMRLGPGGAVMLLVYEYTYSWLQEN

SEQ ID NO: 81004 - protein, 234 aa, Homo sapiens
  Payload ID: 16144
  Gene Symbol: SLC25A21
  Gene Name: solute carrier family 25 (mitochondrial oxoadipate carrier), member 21
  ENSP ID: ENSP00000481445
MEGLFGFYKGILPPILAETPKRAVKFFTFEQYKKLLGYVSLSPALTFAIAGLGSGLTEAIVVNPFEVVKVGLQANRNTFAEQPSTVGYARQIIKKEGWGLQGLNKGLTATLGRHGVFNMVYFGFYYNVKNMIPVNKDPILEFWRKFGIGLLSGTIASVINIPFDVAKSRIQGPQPVPGEIKYRTCFKTMATVYQEEGILALYKGLLPKIMRLGPGGAVMLLVYEYTYSWLQENW

SEQ ID NO: 81005 - protein, 320 aa, Homo sapiens
  Payload ID: 16145
  Gene Symbol: SLC25A19
  Gene Name: solute carrier family 25 (mitochondrial thiamine pyrophosphate carrier), member 19
  Uniprot ID: Q9HC21
  ENSP ID: ENSP00000319574
MVGYDPKPDGRNNTKFQVAVAGSVSGLVTRALISPFDVIKIRFQLQHERLSRSDPSAKYHGILQASRQILQEEGPTAFWKGHVPAQILSIGYGAVQFLSFEMLTELVHRGSVYDAREFSVHFVCGGLAACMATLTVHPVDVLRTRFAAQGEPKVYNTLRHAVGTMYRSEGPQVFYKGLAPTLIAIFPYAGLQFSCYSSLKHLYKWAIPAEGKKNENLQNLLCGSGAGVISKTLTYPLDLFKKRLQVGGFEHARAAFGQVRRYKGLMDCAKQVLQKEGALGFFKGLSPSLLKAALSTGFMFFSYEFFCNVFHCMNRTASQR

SEQ ID NO: 81006 - protein, 263 aa, Homo sapiens
  Payload ID: 16145
  Gene Symbol: SLC25A19
  Gene Name: solute carrier family 25 (mitochondrial thiamine pyrophosphate carrier), member 19
  Uniprot ID: Q9HC21
  ENSP ID: ENSP00000364410
MVGYDPKPDGRNNTKFQVAVAGSVSGLVTRALISPFDVIKIRFQLQHERLSRSDPSAKYHGILQASRQILQEEGPTAFWKGHVPAQILSIGYGAVQVYNTLRHAVGTMYRSEGPQVFYKGLAPTLIAIFPYAGLQFSCYSSLKHLYKWAIPAEGKKNENLQNLLCGSGAGVISKTLTYPLDLFKKRLQVGGFEHARAAFGQVRRYKGLMDCAKQVLQKEGALGFFKGLSPSLLKAALSTGFMFFSYEFFCNVFHCMNRTASQR

SEQ ID NO: 81007 - protein, 320 aa, Homo sapiens; identical to SEQ ID NO: 81005
  Payload ID: 16145
  Gene Symbol: SLC25A19
  Gene Name: solute carrier family 25 (mitochondrial thiamine pyrophosphate carrier), member 19
  Uniprot ID: Q9HC21
  ENSP ID: ENSP00000385312

SEQ ID NO: 81008 - protein, 320 aa, Homo sapiens; identical to SEQ ID NO: 81005
  Payload ID: 16145
  Gene Symbol: SLC25A19
  Gene Name: solute carrier family 25 (mitochondrial thiamine pyrophosphate carrier), member 19
  Uniprot ID: Q9HC21
  ENSP ID: ENSP00000397818

SEQ ID NO: 81009 - protein, 320 aa, Homo sapiens; identical to SEQ ID NO: 81005
  Payload ID: 16145
  Gene Symbol: SLC25A19
  Gene Name: solute carrier family 25 (mitochondrial thiamine pyrophosphate carrier), member 19
  Uniprot ID: Q9HC21
  ENSP ID: ENSP00000402202

SEQ ID NO: 81010 - protein, 182 aa, Homo sapiens
  Payload ID: 16145
  Gene Symbol: SLC25A19
  Gene Name: solute carrier family 25 (mitochondrial thiamine pyrophosphate carrier), member 19
  ENSP ID: ENSP00000462214
MVGYDPKPDGRNNTKFQVAVAGSVSGLVTRALISPFDVIKIRFQLQHERLSRSDPSAKYHGILQASRQILQEEGPTAFWKGHVPAQILSIGYGAVQFLSFEMLTELVHRGSVYDAREFSVHFVCGGLAACMATLTVHPVDVLRTRFAAQGEPKVRRYKGLMDCAKQVLQKEGALGFFKGLSP

SEQ ID NO: 81011 - protein, 151 aa, Homo sapiens
  Payload ID: 16145
  Gene Symbol: SLC25A19
  Gene Name: solute carrier family 25 (mitochondrial thiamine pyrophosphate carrier), member 19
  ENSP ID: ENSP00000462299
MVGYDPKPDGRNNTKFQVAVAGSVSGLVTRALISPFDVIKIRFQLQHERLSRSDPSAKYHGILQASRQILQEEGPTAFWKGHVPAQILSIGYGAVQFLSFEMLTELVHRGSVYDAREFSVHFVCGGLAACMATLTVHPVDVLRTRFAAQGE

SEQ ID NO: 81012 - protein, 67 aa, Homo sapiens
  Payload ID: 16145
  Gene Symbol: SLC25A19
  Gene Name: solute carrier family 25 (mitochondrial thiamine pyrophosphate carrier), member 19
  ENSP ID: ENSP00000462401
  MOD_RES (1)..(1): Any amino acid
XKFQVAVAGSVSGLVTRALISPFDVIKIRFQLQHERLSRSDPSAKYHGILQGSPHERIRGNAGRGLW

SEQ ID NO: 81013 - protein, 85 aa, Homo sapiens
  Payload ID: 16145
  Gene Symbol: SLC25A19
  Gene Name: solute carrier family 25 (mitochondrial thiamine pyrophosphate carrier), member 19
  ENSP ID: ENSP00000462504
MVGYDPKPDGRNNTKFQVAVAGSVSGLVTRALISPFDVIKIRFQLQHERLSRSDPSAKYHGILQASRQILQEEGPTAFWKGHVPA

SEQ ID NO: 81014 - protein, 84 aa, Homo sapiens
  Payload ID: 16145
  Gene Symbol: SLC25A19
  Gene Name: solute carrier family 25 (mitochondrial thiamine pyrophosphate carrier), member 19
  ENSP ID: ENSP00000463039
MLTELVHRGSVYDAREFSVHFVCGGLAACMATLTVHPVDVLRTRFAAQGEPKVYNTLRHAVGTMYRSEGPQVFYKGLAPTLIAI

SEQ ID NO: 81015 - protein, 105 aa, Homo sapiens
  Payload ID: 16145
  Gene Symbol: SLC25A19
  Gene Name: solute carrier family 25 (mitochondrial thiamine pyrophosphate carrier), member 19
  ENSP ID: ENSP00000463428
MVGYDPKPDGRNNTKFQVAVAGSVSGLVTRALISPFDVIKIRFQLQHERLSRSDPSAKYHGILQASRQILQEEGPTAFWKGHVPAQILSIGYGAVQFLSFEMLTE

SEQ ID NO: 81016 - protein, 153 aa, Homo sapiens
  Payload ID: 16145
  Gene Symbol: SLC25A19
  Gene Name: solute carrier family 25 (mitochondrial thiamine pyrophosphate carrier), member 19
  ENSP ID: ENSP00000463720
MVGYDPKPDGRNNTKFQVAVAGSVSGLVTRALISPFDVIKIRFQLQHERLSRSDPSAKYHGILQASRQILQEEGPTAFWKGHVPAQILSIGYGAVQFLSFEMLTELVHRGSVYDAREFSVHFVCGGLAACMATLTVHPVDVLRTRFAAQGEPK

SEQ ID NO: 81017 - protein, 320 aa, Homo sapiens; identical to SEQ ID NO: 81005
  Payload ID: 16145
  Gene Symbol: SLC25A19
  Gene Name: solute carrier family 25 (mitochondrial thiamine pyrophosphate carrier), member 19
  Uniprot ID: Q9HC21
  ENSP ID: ENSP00000463795

SEQ ID NO: 81018 - protein, 39 aa, Homo sapiens
  Payload ID: 16145
  Gene Symbol: SLC25A19
  Gene Name: solute carrier family 25 (mitochondrial thiamine pyrophosphate carrier), member 19
  ENSP ID: ENSP00000464457
MVGYDPKPDGRNNTKFQVAVAGSVSGLVTRALISPFDVI

SEQ ID NO: 81019 - protein, 321 aa, Homo sapiens
  Payload ID: 16146
  Gene Symbol: SLC25A33
  Gene Name: solute carrier family 25 (pyrimidine nucleotide carrier), member 33
  Uniprot ID: Q9BSK2
  ENSP ID: ENSP00000306328
MATGGQQKENTLLHLFAGGCGGTVGAIFTCPLEVIKTRLQSSRLALRTVYYPQVHLGTISGAGMVRPTSVTPGLFQVLKSILEKEGPKSLFRGLGPNLVGVAPSRAVYFACYSKAKEQFNGIFVPNSNIVHIFSAGSAAFITNSLMNPIWMVKTRMQLEQKVRGSKQMNTLQCARYVYQTEGIRGFYRGLTASYAGISETIICFAIYESLKKYLKEAPLASSANGTEKNSTSFFGLMAAAALSKGCASCIAYPHEVIRTRLREEGTKYKSFVQTARLVFREEGYLAFYRGLFAQLIRQIPNTAIVLSTYELIVYLLEDRTQ

SEQ ID NO: 81020 - protein, 311 aa, Homo sapiens
  Payload ID: 16147
  Gene Symbol: SLC25A36
  Gene Name: solute carrier family 25 (pyrimidine nucleotide carrier), member 36
  Uniprot ID: Q96CQ1
  ENSP ID: ENSP00000320688
MSQRDTLVHLFAGGCGGTVGAILTCPLEVVKTRLQSSSVTLYISEVQLNTMAGASVNRVVSPGPLHCLKVILEKEGPRSLFRGLGPNLVGVAPSRAIYFAAYSNCKEKLNDVFDPDSTQVHMISAAMAGFTAITATNPIWLIKTRLQLDARNRGERRMGAFECVRKVYQTDGLKGFYRGMSASYAGISETVIHFVIYESIKQKLLEYKTASTMENDEESVKEASDFVGMMLAAATSKTCATTIAYPHEVVRTRLREEGTKYRSFFQTLSLLVQEEGYGSLYRGLTTHLVRQIPNTAIMMATYELVVYLLNG

SEQ ID NO: 81021 - protein, 285 aa, Homo sapiens
  Payload ID: 16147
  Gene Symbol: SLC25A36
  Gene Name: solute carrier family 25 (pyrimidine nucleotide carrier), member 36
  ENSP ID: ENSP00000391521
MSQRDTLVHLFAGGCGGTVGAILTCPLEVVKTRLQSSSVTLYISEVQLNTMAGASVNRVVSPGPLHCLKAIYFAAYSNCKEKLNDVFDPDSTQVHMISAAMAGFTAITATNPIWLIKTRLQLDARNRGERRMGAFECVRKVYQTDGLKGFYRGMSASYAGISETVIHFVIYESIKQKLLEYKTASTMENDEESVKEASDFVGMMLAAATSKTCATTIAYPHEVVRTRLREEGTKYRSFFQTLSLLVQEEGYGSLYRGLTTHLVRQIPNTAIMMATYELVVYLLNG

SEQ ID NO: 81022 - protein, 310 aa, Homo sapiens
  Payload ID: 16147
  Gene Symbol: SLC25A36
  Gene Name: solute carrier family 25 (pyrimidine nucleotide carrier), member 36
  Uniprot ID: Q96CQ1
  ENSP ID: ENSP00000401938
MSQRDTLVHLFAGGCGGTVGAILTCPLEVVKTRLQSSSVTLYISEVQLNTMAGASVNRVVSPGPLHCLKVILEKEGPRSLFRGLGPNLVGVAPSRAIYFAAYSNCKEKLNDVFDPDSTQVHMISAAMAGFTAITATNPIWLIKTRLQLDARNRGERRMGAFECVRKVYQTDGLKGFYRGMSASYAGISETVIHFVIYESIKQKLLEYKTASTMENDEESVKEASDFVGMMLAAATSKTCATTIAYPHVVRTRLREEGTKYRSFFQTLSLLVQEEGYGSLYRGLTTHLVRQIPNTAIMMATYELVVYLLNG

SEQ ID NO: 81023 - protein, 132 aa, Homo sapiens
  Payload ID: 16147
  Gene Symbol: SLC25A36
  Gene Name: solute carrier family 25 (pyrimidine nucleotide carrier), member 36
  ENSP ID: ENSP00000421470
MSQRDTLVHLFAGGCGGTVGAILTCPLEVVKTRLQSSSVTLYISEVQLNTMAGASVNRVVSPGPLHCLKVILEKEGPRSLFRGLGPNLVGVAPSRAIYFAAYSNCKEKLNDVFDPDSTQVHMISAAMAGMNV

SEQ ID NO: 81024 - protein, 67 aa, Homo sapiens
  Payload ID: 16147
  Gene Symbol: SLC25A36
  Gene Name: solute carrier family 25 (pyrimidine nucleotide carrier), member 36
  ENSP ID: ENSP00000422265
MAGASVNRVVSPGPLHCLKAIYFAAYSNCKEKLNDVFDPDSTQVHMISAAMAGFTAITATNPIWLIK

SEQ ID NO: 81025 - protein, 132 aa, Homo sapiens
  Payload ID: 16147
  Gene Symbol: SLC25A36
  Gene Name: solute carrier family 25 (pyrimidine nucleotide carrier), member 36
  Uniprot ID: Q96CQ1
  ENSP ID: ENSP00000423319
MSQRDTLVHLFAGGCGGTVGAILTCPLEVVKTRLQSSSVTLYISEVQLNTMAGASVNRVVSPGPLHCLKVILEKEGPRSLFRGLGPNLVGVAPSRAIYFAAYSNCKEKLNDVFDPDSTQVHMISAAMAGHFL

SEQ ID NO: 81026 - protein, 89 aa, Homo sapiens
  Payload ID: 16147
  Gene Symbol: SLC25A36
  Gene Name: solute carrier family 25 (pyrimidine nucleotide carrier), member 36
  ENSP ID: ENSP00000423711
MAGASVNRVVSPGPLHCLKVILEKEGPRSLFRGLGPNLVGVAPSRAIYFAAYSNCKEKLNDVFDPDSTQVHMISAAMAGIYCTFLPRKE

SEQ ID NO: 81027 - protein, 86 aa, Homo sapiens
  Payload ID: 16147
  Gene Symbol: SLC25A36
  Gene Name: solute carrier family 25 (pyrimidine nucleotide carrier), member 36
  ENSP ID: ENSP00000424505
MAGASVNRVVSPGPLHCLKVILEKEGPRSLFRGLGPNLVGVAPSRAIYFAAYSNCKEKLNDVFDPDSTQVHMISAAMAEHKKLNTK

SEQ ID NO: 81028 - protein, 132 aa, Homo sapiens; identical to SEQ ID NO: 81025
  Payload ID: 16147
  Gene Symbol: SLC25A36
  Gene Name: solute carrier family 25 (pyrimidine nucleotide carrier), member 36
  Uniprot ID: Q96CQ1
  ENSP ID: ENSP00000487839

SEQ ID NO: 81029 - protein, 186 aa, Homo sapiens
  Payload ID: 16148
  Gene Symbol: SLC25A26
  Gene Name: solute carrier family 25 (S-adenosylmethionine carrier), member 26
  Uniprot ID: Q70HW3
  ENSP ID: ENSP00000336801
MKHMLAASAGEVVACLIRVPSEVVKQRAQVSASTRTFQIFSNILYEEGIQGLYRGYKSTVLREIPFSLVQFPLWESLKALWSWRQDHVVDSWQSAVCGAFAGGFAAAVTTPLDVAKTRITLAKAGSSTADGNVLSVLHGVWRSQGLAGLFAGVFPRMAAISLGGFIFLGAYDRTHSLLLEVGRKSP

SEQ ID NO: 81030 - protein, 274 aa, Homo sapiens
  Payload ID: 16148
  Gene Symbol: SLC25A26
  Gene Name: solute carrier family 25 (S-adenosylmethionine carrier), member 26
  ENSP ID: ENSP00000346955
MDRPGFVAALVAGGVAGVSVDLILFPLDTIKTRLQSPQGFSKAGGFHGIYAGVPSAAIGSFPNAAAFFITYEYVKWFLHADSSSYLTPMKHMLAASAGEVVACLIRVPSEVVKQRAQVSASTRTFQIFSNILYEEGIQGLYRGYKSTVLREIPFSLVQFPLWESLKALWSWRQDHVVDSWQSAVCGAFAGGFAAAVTTPLDVAKTRITLAKAGSSTADGNVLSVLHGVWRSQGLAGLFAGVFPRMAAISLGGFIFLGAYDRTHSLLLEVGRKSP

SEQ ID NO: 81031 - protein, 210 aa, Homo sapiens
  Payload ID: 16148
  Gene Symbol: SLC25A26
  Gene Name: solute carrier family 25 (S-adenosylmethionine carrier), member 26
  ENSP ID: ENSP00000415304
MKHMLAASAGEVVACLIRVPSEVVKQRAQVSASTRTFQIFSNILYEEGIQGLYRGYKSTVLREIPFSLVQFPLWESLKALWSWRQDHVVDSWQSAVCGAFAGGFAAAVTTPLDVAKTRITLAKAGSSTADGNVLSVLHGVWRSQGLAGDHIPGIFLQEQSSGLPLQRVGRQLPGLRASQLAVPPPHPDAELDHLCDCSFCVPLAVLISAI

SEQ ID NO: 81032 - protein, 86 aa, Homo sapiens
  Payload ID: 16148
  Gene Symbol: SLC25A26
  Gene Name: solute carrier family 25 (S-adenosylmethionine carrier), member 26
  ENSP ID: ENSP00000432574
MKHMLAASAGEVVACLIRVPSEVVKQRAQVSASTRTFQIFSNILYEEGIQGLYRGYKSTVLREIPFSLVQFPLWESLKGWKPYNCF

SEQ ID NO: 81033 - protein, 91 aa, Homo sapiens
  Payload ID: 16148
  Gene Symbol: SLC25A26
  Gene Name: solute carrier family 25 (S-adenosylmethionine carrier), member 26
  ENSP ID: ENSP00000437217
  MOD_RES (1)..(1): Any amino acid
XAAFFITYEYVKWFLHADSSSYLTPMKHMLAASAGEVVACLIRVPSEVVKQRAQVSASTRTFQIFSNILYEEGIQGLYRGYKSTVLREEED

SEQ ID NO: 81034 - protein, 86 aa, Homo sapiens; identical to SEQ ID NO: 81032
  Payload ID: 16148
  Gene Symbol: SLC25A26
  Gene Name: Solute carrier family 25 (S-adenosylmethionine carrier), member 26
  ENSP ID: ENSP00000487656

SEQ ID NO: 81035 - protein, 91 aa, Homo sapiens; identical to SEQ ID NO: 81033
  Payload ID: 16148
  Gene Symbol: SLC25A26
  Gene Name: Solute carrier family 25 (S-adenosylmethionine carrier), member 26
  ENSP ID: ENSP00000487788
  MOD_RES (1)..(1): Any amino acid

SEQ ID NO: 81036 - protein, 210 aa, Homo sapiens; identical to SEQ ID NO: 81031
  Payload ID: 16148
  Gene Symbol: SLC25A26
  Gene Name: Solute carrier family 25 (S-adenosylmethionine carrier), member 26
  ENSP ID: ENSP00000487996

SEQ ID NO: 81037 - protein, 274 aa, Homo sapiens; identical to SEQ ID NO: 81030
  Payload ID: 16148
  Gene Symbol: SLC25A26
  Gene Name: Solute carrier family 25 (S-adenosylmethionine carrier), member 26
  ENSP ID: ENSP00000488659

SEQ ID NO: 81038 - protein, 186 aa, Homo sapiens; identical to SEQ ID NO: 81029
  Payload ID: 16148
  Gene Symbol: SLC25A26
  Gene Name: Solute carrier family 25 (S-adenosylmethionine carrier), member 26
  ENSP ID: ENSP00000488865

SEQ ID NO: 81039 - protein, 323 aa, Homo sapiens
  Payload ID: 16149
  Gene Symbol: SLC25A27
  Gene Name: solute carrier family 25, member 27
  Uniprot ID: O95847
  ENSP ID: ENSP00000360398
MSVPEEEERLLPLTQRWPRASKFLLSGCAATVAELATFPLDLTKTRLQMQGEAALARLGDGARESAPYRGMVRTALGIIEEEGFLKLWQGVTPAIYRHVVYSGGRMVTYEHLREVVFGKSEDEHYPLWKSVIGGMMAGVIGQFLANPTDLVKVQMQMEGKRKLEGKPLRFRGVHHAFAKILAEGGIRGLWAGWVPNIQRAALVNMGDLTTYDTVKHYLVLNTPLEDNIMTHGLSSLCSGLVASILGTPADVIKSRIMNQPRDKQGRGLLYKSSTDCLIQAVQGEGFMSLYKGFLPSWLRMTPWSMVFWLTYEKIREMSGVSPF

SEQ ID NO: 81040 - protein, 245 aa, Homo sapiens
  Payload ID: 16149
  Gene Symbol: SLC25A27
  Gene Name: solute carrier family 25, member 27
  Uniprot ID: O95847
  ENSP ID: ENSP00000412024
MSVPEEEERLLPLTQRWPRASKFLLSGCAATVAELATFPLDLTKTRLQMQGEAALARLGDGARESAPYRGMVRTALGIIEEEGFLKLWQGVTPAIYRHVVYSGGRMVTYEHLREVVFGKSEDEHYPLWKSVIGGMMAGVIGQFLANPTDLVKVQMQMEGKRKLEGKPLRFRGVHHAFAKILAEGGIRGLWAGWVPNIQRAALVNMGDLTTYDTVKHYLVLNTPLEDNIMTHGLSSDLVGSHKAIQ

SEQ ID NO: 81041 - protein, 98 aa, Homo sapiens
  Payload ID: 16149
  Gene Symbol: SLC25A27
  Gene Name: solute carrier family 25, member 27
  ENSP ID: ENSP00000473804
  MOD_RES (1)..(1): Any amino acid
XNMGDLTTYDTVKHYLVLNTPLEDNIMTHGLSSLCSGLVASILGTPADVIKSRIMNQPRDKQGRGLLYKSSTDCLIQAVQGEGFMSLYKGFLPSWLRM

SEQ ID NO: 81042 - protein, 145 aa, Homo sapiens
  Payload ID: 16149
  Gene Symbol: SLC25A27
  Gene Name: solute carrier family 25, member 27
  ENSP ID: ENSP00000474429
  MOD_RES (1)..(1): Any amino acid
XMEGKRKLEGKPLRFRGVHHAFAKILAEGGIRGLWAGWVPNIQRAALVNMGDLTTYDTVKHYLVLNTPLEDNIMTHGLSSLCSGLVASILGTPADVIKSRIMNQPRDKQGRGLLYKSSTDCLIQAVQGEGFMSLYKGFLPSWLRM

SEQ ID NO: 81043 - protein, 149 aa, Homo sapiens
  Payload ID: 16149
  Gene Symbol: SLC25A27
  Gene Name: solute carrier family 25, member 27
  ENSP ID: ENSP00000474781
MSECPLILYIHKHIDTYSQSYLFNDLFYPVYSGGRMVTYEHLREVVFGKSEDEHYPLWKSVIGGMMAGVIGQFLANPTDLVKVQMQMEGKRKLEGKPLRFRGVHHAFAKILAEGGIRGLWAGWVPNIQRAALVNMGDLTTYDTVKHYLV

SEQ ID NO: 81044 - protein, 145 aa, Homo sapiens; identical to SEQ ID NO: 81042
  Payload ID: 16149
  Gene Symbol: SLC25A27
  Gene Name: solute carrier family 25, member 27
  ENSP ID: ENSP00000474828
  MOD_RES (1)..(1): Any amino acid

SEQ ID NO: 81045 - protein, 37 aa, Homo sapiens
  Payload ID: 16150
  Gene Symbol: SLC25A30
  Gene Name: solute carrier family 25, member 30
  ENSP ID: ENSP00000311856
MSALNWKPFVYGGLASITAECGLPPRCYARHPMAPSR

SEQ ID NO: 81046 - protein, 37 aa, Homo sapiens; identical to SEQ ID NO: 81045
  Payload ID: 16150
  Gene Symbol: SLC25A30
  Gene Name: solute carrier family 25, member 30
  ENSP ID: ENSP00000425603

SEQ ID NO: 81047 - protein, 291 aa, Homo sapiens
  Payload ID: 16150
  Gene Symbol: SLC25A30
  Gene Name: solute carrier family 25, member 30
  Uniprot ID: Q5SVS4
  ENSP ID: ENSP00000429168
MSALNWKPFVYGGLASITAECGTFPIDLTKTRLQIQGQTNDAKFKEIRYRGMLHALVRIGREEGLKALYSGIAPAMLRQASYGTIKIGTYQSLKRLFIERPEDETLPINVICGILSGVISSTIANPTDVLKIRMQAQSNTIQGGMIGNFMNIYQQEGTRGLWKGVSLTAQRAAIVVGVELPVYDITKKHLILSGLMGDTVYTHFLSSFTCGLAGALASNPVDVVRTRMMNQRVLRDGRCSGYTGTLDCLLQTWKNEGFFALYKGFWPNWLRLGPWNIIFFVTYEQLKKLDL

SEQ ID NO: 81048 - protein, 137 aa, Homo sapiens
  Payload ID: 16150
  Gene Symbol: SLC25A30
  Gene Name: solute carrier family 25, member 30
  ENSP ID: ENSP00000429308
MLHALVRIGREEGLKALYSGIAPAMLRQASYGTIKIGTYQSLKRLFIERPEDETLPINVICGILSGVISSTIANPTDVLKIRMQAQSNTIQGGMIGNFMNIYQQEGTRGLWKGVSLTAQRAAIVVGVELPVYDITKK

SEQ ID NO: 81049 - protein, 94 aa, Homo sapiens
  Payload ID: 16150
  Gene Symbol: SLC25A30
  Gene Name: solute carrier family 25, member 30
  ENSP ID: ENSP00000430687
MLRQASYGTIKIGTYQSLKRLFIERPEDETLPINVICGILSGVISSTIANPTDVLKIRMQAQSNTIQGGMIGNFMNIYQQEGTRGLWKGVSLTA

SEQ ID NO: 81050 - protein, 240 aa, Homo sapiens
  Payload ID: 16150
  Gene Symbol: SLC25A30
  Gene Name: solute carrier family 25, member 30
  Uniprot ID: Q5SVS4
  ENSP ID: ENSP00000443542
MLHALVRIGREEGLKALYSGIAPAMLRQASYGTIKIGTYQSLKRLFIERPEDETLPINVICGILSGVISSTIANPTDVLKIRMQAQSNTIQGGMIGNFMNIYQQEGTRGLWKGVSLTAQRAAIVVGVELPVYDITKKHLILSGLMGDTVYTHFLSSFTCGLAGALASNPVDVVRTRMMNQRVLRDGRCSGYTGTLDCLLQTWKNEGFFALYKGFWPNWLRLGPWNIIFFVTYEQLKKLDL

SEQ ID NO: 81051 - protein, 119 aa, Homo sapiens
  Payload ID: 16150
  Gene Symbol: SLC25A30
  Gene Name: solute carrier family 25, member 30
  ENSP ID: ENSP00000480455
  MOD_RES (1)..(1): Any amino acid
XQSNTIQGGMIGNFMNIYQQEGTRGLWKGVSLTAQRAAIVVGVELPVYDITKKHLILSGLMGDTVYTHFLSSFTCGLAGALASNPVDVVRTRMMNQRVLRDGRCSGYTGTLDCLLQVLP

SEQ ID NO: 81052 - protein, 304 aa, Homo sapiens
  Payload ID: 16151
  Gene Symbol: SLC25A34
  Gene Name: solute carrier family 25, member 34
  Uniprot ID: Q6PIV7
  ENSP ID: ENSP00000294454
METVPPAVDLVLGASACCLACVFTNPLEVVKTRLQLQGELQARGTYPRPYHGFIASVAAVARADGLWGLQKGLAAGLLYQGLMNGVRFYCYSLACQAGLTQQPGGTVVAGAVAGALGAFVGSPAYLIKTQLQAQTVAAVAVGHQHNHQTVLGALETIWRQQGLLGLWQGVGGAVPRVMVGSAAQLATFASAKAWVQKQQWLPEDSWLVALAGGMISSIAVVVVMTPFDVVSTRLYNQPVDTAGRGQLYGGLTDCMVKIWRQEGPLALYKGLGPAYLRLGPHTILSMLFWDELRKLAGRAQHKGT

SEQ ID NO: 81053 - protein, 295 aa, Homo sapiens
  Payload ID: 16152
  Gene Symbol: SLC25A35
  Gene Name: solute carrier family 25, member 35
  Uniprot ID: Q3KQZ1
  ENSP ID: ENSP00000369407
MDFLMSGLAACGACVFTNPLEVVKTRMQLQGELQAPGTYQRHYRNVFHAFITIGKVDGLAALQKGLAPALLYQFLMNGIRLGTYGLAEAGGYLHTAEGTHSPARSAAAGAMAGVMGAYLGSPIYMVKTHLQAQAASEIAVGHQYKHQGMFQALTEIGQKHGLVGLWRGALGGLPRVIVGSSTQLCTFSSTKDLLSQWEIFPPQSWKLALVAAMMSGIAVVLAMAPFDVACTRLYNQPTDAQGKNRVPKFSATSCSASAPLLGTKDVRIVKGQTGHQLFKVTQAPGCSPILLGTQS

SEQ ID NO: 81054 - protein, 295 aa, Homo sapiens; identical to SEQ ID NO: 81053
  Payload ID: 16152
  Gene Symbol: SLC25A35
  Gene Name: solute carrier family 25, member 35
  Uniprot ID: Q3KQZ1
  ENSP ID: ENSP00000462395

SEQ ID NO: 81055 - protein, 295 aa, Homo sapiens; identical to SEQ ID NO: 81053
  Payload ID: 16152
  Gene Symbol: SLC25A35
  Gene Name: solute carrier family 25, member 35
  Uniprot ID: Q3KQZ1
  ENSP ID: ENSP00000464071

SEQ ID NO: 81056 - protein, 291 aa, Homo sapiens
  Payload ID: 16152
  Gene Symbol: SLC25A35
  Gene Name: solute carrier family 25, member 35
  Uniprot ID: Q3KQZ1
  ENSP ID: ENSP00000464191
MDFLMSGLAACGACVFTNPLEVVKTRMQLQGELQAPGTYQRHYRNVFHAFITIGKVDGLAALQKGLAPALLYQFLMNGIRLGTYGLAEAGGYLHTAEGTHSPARSAAAGAMAGVMGAYLGSPIYMVKTHLQAQAASEIAVGHQYKHQGMFQALTEIGQKHGLVGLWRGALGGLPRVIVGSSTQLCTFSSTKDLLSQWEIFPPQSWKLALVAAMMSGIAVVLAMAPFDVACTRLYNQPTDAQGKGLMYRGILDALLQTARTEGIFGMYKEPSPQVLSNIMQCFSAFTGDQRC

SEQ ID NO: 81057 - protein, 300 aa, Homo sapiens
  Payload ID: 16152
  Gene Symbol: SLC25A35
  Gene Name: solute carrier family 25, member 35
  Uniprot ID: Q3KQZ1
  ENSP ID: ENSP00000464231
MDFLMSGLAACGACVFTNPLEVVKTRMQLQGELQAPGTYQRHYRNVFHAFITIGKVDGLAALQKGLAPALLYQFLMNGIRLGTYGLAEAGGYLHTAEGTHSPARSAAAGAMAGVMGAYLGSPIYMVKTHLQAQAASEIAVGHQYKHQGMFQALTEIGQKHGLVGLWRGALGGLPRVIVGSSTQLCTFSSTKDLLSQWEIFPPQSWKLALVAAMMSGIAVVLAMAPFDVACTRLYNQPTDAQGKGLMYRGILDALLQTARTEGIFGMYKGIGASYFRLGPHTILSLFFWDQLRSLYYTDTK

SEQ ID NO: 81058 - protein, 287 aa, Homo sapiens
  Payload ID: 16152
  Gene Symbol: SLC25A35
  Gene Name: solute carrier family 25, member 35
  Uniprot ID: Q3KQZ1
  ENSP ID: ENSP00000464307
MDFLMSGLAACGACVFTNPLEVVKTRMQLQGELQAPGTYQRHYRNVFHAFITIGKVDGLAALQKGLAPALLYQFLMNGIRLGTYGLAEAGGYLHTAEGTHSPARSAAAGAMAGVMGAYLGSPIYMVKTHLQAQAASEIAVGHQYKHQGMFQALTEIGQKHGLVGLWRGALGGLPRVIVGSSTQLCTFSSTKDLLSQWEIFPPQSWKLALVAAMMSGIAVVLAMAPFDVACTRLYNQPTDAQGKGLMYRGILDALLQTARTEGIFEPSPQVLSNIMQCFSAFTGDQRC

SEQ ID NO: 81059 - protein, 304 aa, Homo sapiens
  Payload ID: 16153
  Gene Symbol: SLC25A38
  Gene Name: solute carrier family 25, member 38
  Uniprot ID: Q96DW6
  ENSP ID: ENSP00000273158
MIQNSRPSLLQPQDVGDTVETLMLHPVIKAFLCGSISGTCSTLLFQPLDLLKTRLQTLQPSDHGSRRVGMLAVLLKVVRTESLLGLWKGMSPSIVRCVPGVGIYFGTLYSLKQYFLRGHPPTALESVMLGVGSRSVAGVCMSPITVIKTRYESGKYGYESIYAALRSIYHSEGHRGLFSGLTATLLRDAPFSGIYLMFYNQTKNIVPHDQVDATLIPITNFSCGIFAGILASLVTQPADVIKTHMQLYPLKFQWIGQAVTLIFKDYGLRGFFQGGIPRALRRTLMAAMAWTVYEEMMAKMGLKS

SEQ ID NO: 81060 - protein, 148 aa, Homo sapiens
  Payload ID: 16153
  Gene Symbol: SLC25A38
  Gene Name: solute carrier family 25, member 38
  ENSP ID: ENSP00000394244
MSETRWKRLWYEENMRHHQLHPVIKAFLCGSISGTCSTLLFQPLDLLKTRLQTLQPSDHGSRRVGMLAVLLKVVRTESLLGLWKGMSPSIVRCVPGVGIYFGTLYSLKQYFLRGHPPTALESVMLGVGSRSVAGVCMSPITVIKTRYE

SEQ ID NO: 81061 - protein, 351 aa, Homo sapiens
  Payload ID: 16154
  Gene Symbol: SLC25A39
  Gene Name: solute carrier family 25, member 39
  Uniprot ID: Q9BZJ4
  ENSP ID: ENSP00000225308
MADQDPAGISPLQQMVASGTGAVVTSLFMTPLDVVKVRLQSQRPSMASELMPSSRLWSLSYTKWKCLLYCNGVLEPLYLCPNGARCATWFQDPTRFTGTMDAFVKIVRHEGTRTLWSGLPATLVMTVPATAIYFTAYDQLKAFLCGRALTSDLYAPMVAGALARLGTVTVISPLELMRTKLQAQHVSYRELGACVRTAVAQGGWRSLWLGWGPTALRDVPFSALYWFNYELVKSWLNGFRPKDQTSVGMSFVAGGISGTVAAVLTLPFDVVKTQRQVALGAMEAVRVNPLHVDSTWLLLRRIRAESGTKGLFAGFLPRIIKAAPSCAIMISTYEFGKSFFQRLNQDRLLGG

SEQ ID NO: 81062 - protein, 359 aa, Homo sapiens
  Payload ID: 16154
  Gene Symbol: SLC25A39
  Gene Name: solute carrier family 25, member 39
  Uniprot ID: Q9BZJ4
  ENSP ID: ENSP00000366299
MADQDPAGISPLQQMVASGTGAVVTSLFMTPLDVVKVRLQSQRPSMASELMPSSRLWSLSYTKLPSSLQSTGKCLLYCNGVLEPLYLCPNGARCATWFQDPTRFTGTMDAFVKIVRHEGTRTLWSGLPATLVMTVPATAIYFTAYDQLKAFLCGRALTSDLYAPMVAGALARLGTVTVISPLELMRTKLQAQHVSYRELGACVRTAVAQGGWRSLWLGWGPTALRDVPFSALYWFNYELVKSWLNGFRPKDQTSVGMSFVAGGISGTVAAVLTLPFDVVKTQRQVALGAMEAVRVNPLHVDSTWLLLRRIRAESGTKGLFAGFLPRIIKAAPSCAIMISTYEFGKSFFQRLNQDRLLGG

SEQ ID NO: 81063 - protein, 336 aa, Homo sapiens
  Payload ID: 16154
  Gene Symbol: SLC25A39
  Gene Name: solute carrier family 25, member 39
  ENSP ID: ENSP00000444540
MADQDPAGISPLQQMVASGTGAVVTSLFMTPLDVVKVRLQSQRPSMASGKCLLYCNGVLEPLYLCPNGARCATWFQDPTRFTGTMDAFVKIVRHEGTRTLWSGLPATLVMTVPATAIYFTAYDQLKAFLCGRALTSDLYAPMVAGALARLGTVTVISPLELMRTKLQAQHVSYRELGACVRTAVAQGGWRSLWLGWGPTALRDVPFSALYWFNYELVKSWLNGFRPKDQTSVGMSFVAGGISGTVAAVLTLPFDVVKTQRQVALGAMEAVRVNPLHVDSTWLLLRRIRAESGTKGLFAGFLPRIIKAAPSCAIMISTYEFGKSFFQRLNQDRLLGG

SEQ ID NO: 81064 - protein, 164 aa, Homo sapiens
  Payload ID: 16154
  Gene Symbol: SLC25A39
  Gene Name: solute carrier family 25, member 39
  ENSP ID: ENSP00000465182
MADQDPAGISPLQQMVASGTGAVVTSLFMTPLDVVKVRLQSQRPSMASELMPSSRLWSLSYTKWKCLLYCNGVLEPLYLCPNGARCATWFQDPTRFTGTMDAFVKIVRHEGTRTLWSGLPATLVMTVPATAIYFTAYDQLKAFLCGRALTSDLYAPMVAGALAR

SEQ ID NO: 81065 - protein, 143 aa, Homo sapiens
  Payload ID: 16154
  Gene Symbol: SLC25A39
  Gene Name: solute carrier family 25, member 39
  ENSP ID: ENSP00000465554
MADQDPAGISPLQQMVASGTGAVVTSLFMTPLDVVKVRLQSQRPSMASVPSSLQSTGKCLLYCNGVLEPLYLCPNGARCATWFQDPTRFTGTMDAFVKIVRHEGTRTLWSGLPATLVMTVPATAIYFTAYDQLKAFLCGRALT

SEQ ID NO: 81066 - protein, 99 aa, Homo sapiens
  Payload ID: 16154
  Gene Symbol: SLC25A39
  Gene Name: solute carrier family 25, member 39
  ENSP ID: ENSP00000465594
MADQDPAGISPLQQMVASGTGAVVTSLFMTPLDVVKVRLQSQRPSMASELMPSSRLWSLSYTKWKCLLYCNGVLEPLYLCPNGARCATWFQDPTRFTGT

SEQ ID NO: 81067 - protein, 72 aa, Homo sapiens
  Payload ID: 16154
  Gene Symbol: SLC25A39
  Gene Name: solute carrier family 25, member 39
  ENSP ID: ENSP00000466144
MADQDPAGISPLQQMVASGTGAVVTSLFMTPLDVVKVRLQSQRPSMASELMPSSRLWSLSYTKLPSSLQSTG

SEQ ID NO: 81068 - protein, 266 aa, Homo sapiens
  Payload ID: 16154
  Gene Symbol: SLC25A39
  Gene Name: solute carrier family 25, member 39
  ENSP ID: ENSP00000466615
DPTRFTGTMDAFVKIVRHEGTRTLWSGLPATLVMTVPATAIYFTAYDQLKAFLCGRALTSDLYAPMVAGALARLGTVTVISPLELMRTKLQAQHVSYRELGACVRTAVAQGGWRSLWLGWGPTALRDVPFSVHPPPQALYWFNYELVKSWLNGFRPKDQTSVGMSFVAGGISGTVAAVLTLPFDVVKTQRQVALGAMEAVRVNPLHVDSTWLLLRRIRAESGTKGLFAGFLPRIIKAAPSCAIMISTYEFGKSFFQRLNQDRLLGG

SEQ ID NO: 81069 - protein, 227 aa, Homo sapiens
  Payload ID: 16154
  Gene Symbol: SLC25A39
  Gene Name: solute carrier family 25, member 39
  ENSP ID: ENSP00000466676
MTVPATAIYFTAYDQLKAFLCGRALTSDLYAPMVAGALARLGTVTVISPLELMRTKLQAQHVSYRELGACVRTAVAQGGWRSLWLGWGPTALRDVPFSALYWFNYELVKSWLNGFRPKDQTSVGMSFVAGGISGTVAAVLTLPFDVVKTQRQVALGAMEAVRVNPLHVDSTWLLLRRIRAESGTKGLFAGFLPRIIKAAPSCAIMISTYEFGKSFFQRLNQDRLLGG

SEQ ID NO: 81070 - protein, 351 aa, Homo sapiens; identical to SEQ ID NO: 81061
  Payload ID: 16154
  Gene Symbol: SLC25A39
  Gene Name: solute carrier family 25, member 39
  Uniprot ID: Q9BZJ4
  ENSP ID: ENSP00000467681

SEQ ID NO: 81071 - protein, 93 aa, Homo sapiens
  Payload ID: 16154
  Gene Symbol: SLC25A39
  Gene Name: solute carrier family 25, member 39
  ENSP ID: ENSP00000467956
MADQDPAGISPLQQMVASGTGAVVTSLFMTPLDVVKVRLQSQRPSMASELMPSSRLWSLSYTKWKCLLYCNGVLEPLYLCPNGARCATWFQDP

SEQ ID NO: 81072 - protein, 61 aa, Homo sapiens
  Payload ID: 16154
  Gene Symbol: SLC25A39
  Gene Name: solute carrier family 25, member 39
  ENSP ID: ENSP00000467964
TAYDQLKAFLCGRALTSDLYAPMVAGALARREHSLGPLTSLCPHLGPNPVSPSSQPQPLPA

SEQ ID NO: 81073 - protein, 338 aa, Homo sapiens
  Payload ID: 16155
  Gene Symbol: SLC25A40
  Gene Name: solute carrier family 25, member 40
  Uniprot ID: Q8TBP6
  ENSP ID: ENSP00000344831
MDPETRGQEIIKVTPLQQMLASCTGAILTSVIVTPLDVVKIRLQAQNNPLPKGKCFVYSNGLMDHLCVCEEGGNKLWYKKPGNFQGTLDAFFKIIRNEGIKSLWSGLPPTLVMAVPATVIYFTCYDQLSALLRSKLGENETCIPIVAGIVARFGAVTVISPLELIRTKMQSKKFSYVELHRFVSKKVSEDGWISLWRGWAPTVLRDVPFSAMYWYNYEILKKWLCEKSGLYEPTFMINFTSGALSGSFAAVATLPFDVVKTQKQTQLWTYESHKISMPLHMSTWIIMKNIVAKNGFSGLFSGLIPRLIKIAPACAIMISTYEFGKAFFQKQNVRRQQY

SEQ ID NO: 81074 - protein, 37 aa, Homo sapiens
  Payload ID: 16155
  Gene Symbol: SLC25A40
  Gene Name: solute carrier family 25, member 40
  ENSP ID: ENSP00000401473
MYWYNYEILKKWLCEKSGLYEPTFMINFTSGALSGSE

SEQ ID NO: 81075 - protein, 36 aa, Homo sapiens
  Payload ID: 16155
  Gene Symbol: SLC25A40
  Gene Name: solute carrier family 25, member 40
  ENSP ID: ENSP00000405566
MDPETRGQEIIKVTPLQQMLASCTGAILTSVIDTTR

SEQ ID NO: 81076 - protein, 36 aa, Homo sapiens; identical to SEQ ID NO: 81075
  Payload ID: 16155
  Gene Symbol: SLC25A40
  Gene Name: solute carrier family 25, member 40
  ENSP ID: ENSP00000407780

SEQ ID NO: 81077 - protein, 370 aa, Homo sapiens
  Payload ID: 16156
  Gene Symbol: SLC25A41
  Gene Name: solute carrier family 25, member 41
  Uniprot ID: Q8N5S1
  ENSP ID: ENSP00000322649
MGAQPGEPQNTCSRIQTLFRRVKTLLIKAPPPPQPPPPPPSWNPGCTHVYGYAFGHMHDNNLEHLPSQQVLDTGEQLMVPVEVLEVDNKEALWKFLLSGAMAGAVSRTGTAPLDRAKVYMQVYSSKTNFTNLLGGLQSMVQEGGFRSLWRGNGINVLKIAPEYAIKFSVFEQCKNYFCGIQGSPPFQERLLAGSLAVAISQTLINPMEVLKTRLTLRRTGQYKGLLDCARQILQREGTRALYRGYLPNMLGIIPYACTDLAVYEMLQCFWVKSGRDMGDPSGLVSLSSVTLSTTCGQMASYPLTLVRTRMQAQDTVEGSNPTMRGVLQRILAQQGWLGLYRGMTPTLLKVLPAGGISYVVYEAMKKTLGI

SEQ ID NO: 81078 - protein, 242 aa, Homo sapiens
  Payload ID: 16156
  Gene Symbol: SLC25A41
  Gene Name: solute carrier family 25, member 41
  Uniprot ID: Q8N5S1
  ENSP ID: ENSP00000405411
MGAQPGEPQNTCSRIQTLFRRVKTLLIKAPPPPQPPPPPPSWNPGCTHVYGYAFGHMHDNNLEHLPSQQVLDTGEQLMVPVEVLEVDNKEALWKFLLSGAMAGAVSRTGTAPLDRAKVYMQLLGRLRQENRLNLGGGGCSEPRSPDRTPAWATESTPPRRTSPTCWGGYRAWSRRAASAPCGGATASTCSRLLLSMPSSSPYSSSARITSVEYKGPRPSRSVSLLAPWLWPSPRPSSTPWRC

SEQ ID NO: 81079 - protein, 370 aa, Homo sapiens; identical to SEQ ID NO: 81077
  Payload ID: 16156
  Gene Symbol: SLC25A41
  Gene Name: solute carrier family 25, member 41
  Uniprot ID: Q8N5S1
  ENSP ID: ENSP00000471238

SEQ ID NO: 81080 - protein, 318 aa, Homo sapiens
  Payload ID: 16157
  Gene Symbol: SLC25A42
  Gene Name: solute carrier family 25, member 42
  Uniprot ID: Q86VD7
  ENSP ID: ENSP00000326693
MGNGVKEGPVRLHEDAEAVLSSSVSSKRDHRQVLSSLLSGALAGALAKTAVAPLDRTKIIFQVSSKRFSAKEAFRVLYYTYLNEGFLSLWRGNSATMVRVVPYAAIQFSAHEEYKRILGSYYGFRGEALPPWPRLFAGALAGTTAASLTYPLDLVRARMAVTPKEMYSNIFHVFIRISREEGLKTLYHGFMPTVLGVIPYAGLSFFTYETLKSLHREYSGRRQPYPFERMIFGACAGLIGQSASYPLDVVRRRMQTAGVTGYPRASIARTLRTIVREEGAVRGLYKGLSMNWVKGPIAVGISFTTFDLMQILLRHLQS

SEQ ID NO: 81081 - protein, 341 aa, Homo sapiens
  Payload ID: 16158
  Gene Symbol: SLC25A43
  Gene Name: solute carrier family 25, member 43
  Uniprot ID: Q8WUT9
  ENSP ID: ENSP00000217909
MATWRRDGRLTGGQRLLCAGLAGTLSLSLTAPLELATVLAQVGVVRGHARGPWATGHRVWRAEGLRALWKGNAVACLRLFPCSAVQLAAYRKFVVLFTDDLGHISQWSSIMAGSLAGMVSTIVTYPTDLIKTRLIMQNILEPSYRGLLHAFSTIYQQEGFLALYRGVSLTVVGALPFSAGSLLVYMNLEKIWNGPRDQFSLPQNFANVCLAAAVTQTLSFPFETVKRKMQAQSPYLPHSGGVDVHFSGAVDCFRQIVKAQGVLGLWNGLTANLLKIVPYFGIMFSTFEFCKRICLYQNGYILSPLSYKLTPGVDQSLQPQELRELKKFFKTRKPKPKKPTL

SEQ ID NO: 81082 - protein, 314 aa, Homo sapiens
  Payload ID: 16159
  Gene Symbol: SLC25A44
  Gene Name: solute carrier family 25, member 44
  Uniprot ID: Q96H78
  ENSP ID: ENSP00000352497
MEDKRNIQIIEWEHLDKKKFYVFGVAMTMMIRVSVYPFTLIRTRLQVQKGKSLYHGTFDAFIKILRADGITGLYRGFLVNTFTLISGQCYVTTYELTRKFVADYSQSNTVKSLVAGGSASLVAQSITVPIDVVSQHLMMQRKGEKMGRFQVRGNPEGQGVVAFGQTKDIIRQILQADGLRGFYRGYVASLLTYIPNSAVWWPFYHFYAEQLSYLCPKECPHIVFQAVSGPLAAATASILTNPMDVIRTRVQVEGKNSIILTFRQLMAEEGPWGLMKGLSARIISATPSTIVIVVGYESLKKLSLRPELVDSRHW

SEQ ID NO: 81083 - protein, 322 aa, Homo sapiens
  Payload ID: 16159
  Gene Symbol: SLC25A44
  Gene Name: solute carrier family 25, member 44
  ENSP ID: ENSP00000407560
MEDKRNIQIIEWEHLDKKKFYVFGVAMTMMIRVSVYPFTLIRTRLQVQKGKSLYHGTFDAFIKILRADGITGLYRGFLVNTFTLISGQCYVTTYELTRKFVADYSQSNTVKSLVAGGSASLVAQSITVPIDVVSQHLMMQRKGEKMGRFQVRGNPEGQGVVAFGQTKDIIRQILQADGLRGFYRGYVASLLTYIPNSAVWWPFYHFYAAIVFPWIPEQLSYLCPKECPHIVFQAVSGPLAAATASILTNPMDVIRTRVQVEGKNSIILTFRQLMAEEGPWGLMKGLSARIISATPSTIVIVVGYESLKKLSLRPELVDSRHW

SEQ ID NO: 81084 - protein, 246 aa, Homo sapiens
  Payload ID: 16160
  Gene Symbol: SLC25A45
  Gene Name: solute carrier family 25, member 45
  Uniprot ID: Q8N413
  ENSP ID: ENSP00000294187
MVKIYRHESLLGFFKGMSFPIASIAVVNSVLFGVYSNTLLVLTATSHQERRAQPPSYMHIFLAGCTGGFLQAYCLAPFDLIKVRLQNQTEPRAQPGSPPPRYQGPVHCAASIFREEGPRGLFRGAWALTLRDTPTVGIYFITYEGLCRQYTPEGQNPSSATVLVAGGFAGIASWVAATPLDMIKSRMQMDGLRRRVYQGMLDCMVSSIRQEGLGVFFRGVTINSARAFPVNAVTFLSYEYLLRWWG

SEQ ID NO: 81085 - protein, 288 aa, Homo sapiens
  Payload ID: 16160
  Gene Symbol: SLC25A45
  Gene Name: solute carrier family 25, member 45
  Uniprot ID: Q8N413
  ENSP ID: ENSP00000381782
MPVEEFVAGWISGALGLVLGHPFDTVKVRLQTQTTYRGIVDCMVKIYRHESLLGFFKGMSFPIASIAVVNSVLFGVYSNTLLVLTATSHQERRAQPPSYMHIFLAGCTGGFLQAYCLAPFDLIKVRLQNQTEPRAQPGSPPPRYQGPVHCAASIFREEGPRGLFRGAWALTLRDTPTVGIYFITYEGLCRQYTPEGQNPSSATVLVAGGFAGIASWVAATPLDMIKSRMQMDGLRRRVYQGMLDCMVSSIRQEGLGVFFRGVTINSARAFPVNAVTFLSYEYLLRWWG

SEQ ID NO: 81086 - protein, 118 aa, Homo sapiens
  Payload ID: 16160
  Gene Symbol: SLC25A45
  Gene Name: solute carrier family 25, member 45
  ENSP ID: ENSP00000431642
MPVEEFVAGWISGALGLVLGHPFDTVKVRLQTQTTYRGIVDCMVKIYRHESLLGFFKGMSFPIASIAVVNSVLFGVYSNTLLVLTATSHQERRAQPPSYMHIFLAGCTGGFLQAYCLA

SEQ ID NO: 81087 - protein, 264 aa, Homo sapiens
  Payload ID: 16160
  Gene Symbol: SLC25A45
  Gene Name: solute carrier family 25, member 45
  Uniprot ID: Q8N413
  ENSP ID: ENSP00000431769
MPVEEFVAGWISGALGLVLGHPFDTVKLLGFFKGMSFPIASIAVVNSVLFGVYSNTLLVLTATSHQERRAQPPSYMHIFLAGCTGGFLQAYCLAPFDLIKVRLQNQTEPRAQPGSPPPRYQGPVHCAASIFREEGPRGLFRGAWALTLRDTPTVGIYFITYEGLCRQYTPEGQNPSSATVLVAGGFAGIASWVAATPLDMIKSRMQMDGLRRRVYQGMLDCMVSSIRQEGLGVFFRGVTINSARAFPVNAVTFLSYEYLLRWWG

SEQ ID NO: 81088 - protein, 36 aa, Homo sapiens
  Payload ID: 16160
  Gene Symbol: SLC25A45
  Gene Name: solute carrier family 25, member 45
  ENSP ID: ENSP00000431891
MPVEEFVAGWISGETFFFLLSHHTQWRSGLGPGTPV

SEQ ID NO: 81089 - protein, 47 aa, Homo sapiens
  Payload ID: 16160
  Gene Symbol: SLC25A45
  Gene Name: solute carrier family 25, member 45
  ENSP ID: ENSP00000433693
MPVEEFVAGWISGETFFFLLSHHTQWALQFCVASWQQGLLWIPATTL

SEQ ID NO: 81090 - protein, 36 aa, Homo sapiens; identical to SEQ ID NO: 81088
  Payload ID: 16160
  Gene Symbol: SLC25A45
  Gene Name: solute carrier family 25, member 45
  ENSP ID: ENSP00000433729

SEQ ID NO: 81091 - protein, 47 aa, Homo sapiens; identical to SEQ ID NO: 81089
  Payload ID: 16160
  Gene Symbol: SLC25A45
  Gene Name: solute carrier family 25, member 45
  ENSP ID: ENSP00000434582

SEQ ID NO: 81092 - protein, 50 aa, Homo sapiens
  Payload ID: 16160
  Gene Symbol: SLC25A45
  Gene Name: solute carrier family 25, member 45
  ENSP ID: ENSP00000435000
MPVEEFVAGWISGETFFFLLSHHTQCSAWPAGSRACSGSRRRHYELKKEE

SEQ ID NO: 81093 - protein, 288 aa, Homo sapiens; identical to SEQ ID NO: 81085
  Payload ID: 16160
  Gene Symbol: SLC25A45
  Gene Name: solute carrier family 25, member 45
  Uniprot ID: Q8N413
  ENSP ID: ENSP00000435489

SEQ ID NO: 81094 - protein, 226 aa, Homo sapiens
  Payload ID: 16160
  Gene Symbol: SLC25A45
  Gene Name: solute carrier family 25, member 45
  ENSP ID: ENSP00000435547
MPVEEFVAGWISGALGLVLGHPFDTVKVRLQTQTTYRGIVDCMVKIYRHESAYCLAPFDLIKVRLQNQTEPRAQPGSPPPRYQGPVHCAASIFREEGPRGLFRGAWALTLRDTPTVGIYFITYEGLCRQYTPEGQNPSSATVLVAGGFAGIASWVAATPLDMIKSRMQMDGLRRRVYQGMLDCMVSSIRQEGLGVFFRGVTINSARAFPVNAVTFLSYEYLLRWWG

SEQ ID NO: 81095 - protein, 418 aa, Homo sapiens
  Payload ID: 16161
  Gene Symbol: SLC25A46
  Gene Name: solute carrier family 25, member 46
  Uniprot ID: Q96AG3
  ENSP ID: ENSP00000348211
MHPRRPDGFDGLGYRGGARDEQGFGGAFPARSFSTGSDLGHWVTTPPDIPGSRNLHWGEKSPPYGVPTTSTPYEGPTEEPFSSGGGGSVQGQSSEQLNRFAGFGIGLASLFTENVLAHPCIVLRRQCQVNYHAQHYHLTPFTVINIMYSFNKTQGPRALWKGMGSTFIVQGVTLGAEGIISEFTPLPREVLHKWSPKQIGEHLLLKSLTYVVAMPFYSASLIETVQSEIIRDNTGILECVKEGIGRVIGMGVPHSKRLLPLLSLIFPTVLHGVLHYIISSVIQKFVLLILKRKTYNSHLAESTSPVQSMLDAYFPELIANFAASLCSDVILYPLETVLHRLHIQGTRTIIDNTDLGYEVLPINTQYEGMRDCINTIRQEEGVFGFYKGFGAVIIQYTLHAAVLQITKIIYSTLLQNNI

SEQ ID NO: 81096 - protein, 337 aa, Homo sapiens
  Payload ID: 16161
  Gene Symbol: SLC25A46
  Gene Name: solute carrier family 25, member 46
  Uniprot ID: Q96AG3
  ENSP ID: ENSP00000399717
MHPRRPDGFDGLGYRGGARDEQGFGGAFPARSFSTGSDLGHWVTTPPDIPGSRNLHWGEKSPPYGVPTTSTPYEGPTEEPFSSGGGGSVQGQSSEQLNRFAGFGIGLASLFTENVLAHPCIVLRRQCQVNYHAQHYHLTPFTVINIMYSFNKTQGPRALWKGMGSTFIVQGVTLGAEGIISEFTPLPREVLHKWSPKQIGEHLLLKSLTYVVAMPFYSASLIETVQSMLDAYFPELIANFAASLCSDVILYPLETVLHRLHIQGTRTIIDNTDLGYEVLPINTQYEGMRDCINTIRQEEGVFGFYKGFGAVIIQYTLHAAVLQITKIIYSTLLQNNI

SEQ ID NO: 81097 - protein, 256 aa, Homo sapiens
  Payload ID: 16161
  Gene Symbol: SLC25A46
  Gene Name: solute carrier family 25, member 46
  ENSP ID: ENSP00000421134
MGSTFIVQGVTLGAEGIISEFTPLPREVLHKWSPKQIGEHLLLKSLTYVVAMPFYSASLIETVQSEIIRDNTGILECVKEGIGRVIGMGVPHSKRLLPLLSLIFPTVLHGVLHYIISSVIQKFVLLILKRKTYNSHLAESTSPVQSMLDAYFPELIANFAASLCSDVILYPLETVLHRLHIQGTRTIIDNTDLGYEVLPINTQYEGMRDCINTIRQEEGVFGFYKGFGAVIIQYTLHAAVLQITKIIYSTLLQNNI

SEQ ID NO: 81098 - protein, 272 aa, Homo sapiens
  Payload ID: 16161
  Gene Symbol: SLC25A46
  Gene Name: solute carrier family 25, member 46
  Uniprot ID: Q96AG3
  ENSP ID: ENSP00000425708
MYSFNKTQGPRALWKGMGSTFIVQGVTLGAEGIISEFTPLPREVLHKWSPKQIGEHLLLKSLTYVVAMPFYSASLIETVQSEIIRDNTGILECVKEGIGRVIGMGVPHSKRLLPLLSLIFPTVLHGVLHYIISSVIQKFVLLILKRKTYNSHLAESTSPVQSMLDAYFPELIANFAASLCSDVILYPLETVLHRLHIQGTRTIIDNTDLGYEVLPINTQYEGMRDCINTIRQEEGVFGFYKGFGAVIIQYTLHAAVLQITKIIYSTLLQNNI

SEQ ID NO: 81099 - protein, 205 aa, Homo sapiens
  Payload ID: 16161
  Gene Symbol: SLC25A46
  Gene Name: solute carrier family 25, member 46
  ENSP ID: ENSP00000426604
MPFYSASLIETVQSEIIRDNTGILECVKEGIGRVIGMGVPHSKRLLPLLSLIFPTVLHGVLHYIISSVIQKFVLLILKRKTYNSHLAESTSPVQSMLDAYFPELIANFAASLCSDVILYPLETVLHRLHIQGTRTIIDNTDLGYEVLPINTQYEGMRDCINTIRQEEGVFGFYKGFGAVIIQYTLHAAVLQITKIIYSTLLQNNI

SEQ ID NO: 81100 - protein, 308 aa, Homo sapiens
  Payload ID: 16162
  Gene Symbol: SLC25A47
  Gene Name: solute carrier family 25, member 47
  Uniprot ID: Q6Q0C1
  ENSP ID: ENSP00000354886
MDFVAGAIGGVCGVAVGYPLDTVKVRIQTEPKYTGIWHCVRDTYHRERVWGFYRGLSLPVCTVSLVSSVSFGTYRHCLAHICRLRYGNPDAKPTKADITLSGCASGLVRVFLTSPTEVAKVRLQTQTQAQKQQRRLSASGPLAVPPMCPVPPACPEPKYRGPLHCLATVAREEGLCGLYKGSSALVLRDGHSFATYFLSYAVLCEWLSPAGHSRPDVPGVLVAGGCAGVLAWAVATPMDVIKSRLQADGQGQRRYRGLLHCMVTSVREEGPRVLFKGLVLNCCRAFPVNMVVFVAYEAVLRLARGLLT

SEQ ID NO: 81101 - protein, 162 aa, Homo sapiens
  Payload ID: 16162
  Gene Symbol: SLC25A47
  Gene Name: solute carrier family 25, member 47
  ENSP ID: ENSP00000451078
MCPVPPACPEPKYRGPLHCLATVAREEGLCGLYKGSSALVLRDGHSFATYFLSYAVLCEWLSPAGHSRPDVPGVLVAGGCAGVLAWAVATPMDVIKSRLQADGQGQRRYRGLLHCMVTSVREEGPRVLFKGLVLNCCRAFPVNMVVFVAYEAVLRLARGLLT

SEQ ID NO: 81102 - protein, 291 aa, Homo sapiens
  Payload ID: 16163
  Gene Symbol: SLC25A48
  Gene Name: solute carrier family 25, member 48
  Uniprot ID: Q6ZT89
  ENSP ID: ENSP00000274513
MGSFQLEDFAAGWIGGAASVIVGHPLDTVKTRLQAGVGYGNTLSCIRVVYRRESMFGFFKGMSFPLASIAVYNSVVFGVFSNTQRFLSQHRCGEPEASPPRTLSDLLLASMVAGVVSVGLGGPVDLIKIRLQMQTQPFRDANLGLKSRAVAPAEQPAYQGPVHCITTIVRNEGLAGLYRGASAMLLRDVPGYCLYFIPYVFLSEWITPEACTGPSPCAVWLAGGMAGKGSSSWSRTPVQATAVGQLGNCHALLSPGGGQDTFRYSPNNSLLGTYSVPGPLPPQSHPFPMQL

SEQ ID NO: 81103 - protein, 257 aa, Homo sapiens
  Payload ID: 16163
  Gene Symbol: SLC25A48
  Gene Name: solute carrier family 25, member 48
  ENSP ID: ENSP00000399834
MFGFFKGMSFPLASIAVYNSVVFGVFSNTQRFLSQHRCGEPEASPPRTLSDLLLASMVAGVVSVGLGGPVDLIKIRLQMQTQPFRDANLGLKSRAVAPAEQPAYQGPVHCITTIVRNEGLAGLYRGASAMLLRDVPGYCLYFIPYVFLSEWITPEACTGPSPCAVWLAGGMAGAISWGTATPMDVVKSRLQADGVYLNKYKGVLDCISQSYQKEGLKVFFRGITVNAVRGFPMSAAMFLGYELSLQAIRGDHAVTSP

SEQ ID NO: 81104 - protein, 71 aa, Homo sapiens
  Payload ID: 16163
  Gene Symbol: SLC25A48
  Gene Name: solute carrier family 25, member 48
  ENSP ID: ENSP00000408750
MGSFQLEDFAAGWIGGAASVIVGHPLDTVKTRLQAGVGYGNTLSCIRVEAASNTFPWAVSPLFFLQLKSLT

SEQ ID NO: 81105 - protein, 157 aa, Homo sapiens
  Payload ID: 16163
  Gene Symbol: SLC25A48
  Gene Name: solute carrier family 25, member 48
  Uniprot ID: Q6ZT89
  ENSP ID: ENSP00000413049
MGSFQLEDFAAGWIGGAASVIVGHPLDTVKTRLQAGVGYGNTLSCIRVVYRRESMFGFFKGMSFPLASIAVYNSVVFGVFSNTQRFLSQHRCGEPEASPPRTLSDLLLASMVAGVVSVGLGGPVDLIKIRLQMQTQPFRDGGEHRMTTVFPGPHLCM

SEQ ID NO: 81106 - protein, 67 aa, Homo sapiens
  Payload ID: 16163
  Gene Symbol: SLC25A48
  Gene Name: solute carrier family 25, member 48
  ENSP ID: ENSP00000421427
MRCSQCHRWPPSGHSQDSPAGWRWLRKHPQLHPRGVQEGEYVRLLQGHVLPPRQHCRLQLRGVWGLQ

SEQ ID NO: 81107 - protein, 297 aa, Homo sapiens
  Payload ID: 16164
  Gene Symbol: SLC25A51
  Gene Name: solute carrier family 25, member 51
  Uniprot ID: Q9H1U9
  ENSP ID: ENSP00000242275
MMDSEAHEKRPPILTSSKQDISPHITNVGEMKHYLCGCCAAFNNVAITFPIQKVLFRQQLYGIKTRDAILQLRRDGFRNLYRGILPPLMQKTTTLALMFGLYEDLSCLLHKHVSAPEFATSGVAAVLAGTTEAIFTPLERVQTLLQDHKHHDKFTNTYQAFKALKCHGIGEYYRGLVPILFRNGLSNVLFFGLRGPIKEHLPTATTHSAHLVNDFICGGLLGAMLGFLFFPINVVKTRIQSQIGGEFQSFPKVFQKIWLERDRKLINLFRGAHLNYHRSLISWGIINATYEFLLKVI

SEQ ID NO: 81108 - protein, 297 aa, Homo sapiens; identical to SEQ ID NO: 81107
  Payload ID: 16164
  Gene Symbol: SLC25A51
  Gene Name: solute carrier family 25, member 51
  Uniprot ID: Q9H1U9
  ENSP ID: ENSP00000366945

SEQ ID NO: 81109 - protein, 297 aa, Homo sapiens; identical to SEQ ID NO: 81107
  Payload ID: 16164
  Gene Symbol: SLC25A51
  Gene Name: solute carrier family 25, member 51
  Uniprot ID: Q9H1U9
  ENSP ID: ENSP00000369964

SEQ ID NO: 81110 - protein, 307 aa, Homo sapiens
  Payload ID: 16165
  Gene Symbol: SLC25A52
  Gene Name: solute carrier family 25, member 52
  ENSP ID: ENSP00000372612
MPFMRKILSNMIDSEAHEKRPPILTSSKQDISPHITNVGEMKHYLCGCCAAFNNVAITYPIQKVLFRQQLYGIKTRDAVLQLRRDGFRNLYRGILPPLMQKTTTLALMFGLYEDLSCLLRKHVRAPEFATHGVAAVLAGTAEAIFTPLERVQTLLQNHKHHDKFTNTYQAFKALKCHGIGEYYRGLVPILFRNGLSNVLFFGLRGPIKEHLPTATTHSAHLVNDFIGGGLLGAMLGFLCFPINVVKTRLQSQIGGEFQSFPKVFQKIWLERDRKLINLFRGAHLNYHRSLISWGIINATYEFLLKFI

SEQ ID NO: 81111 - protein, 307 aa, Homo sapiens
  Payload ID: 16166
  Gene Symbol: SLC25A53
  Gene Name: solute carrier family 25, member 53
  Uniprot ID: Q5H9E4
  ENSP ID: ENSP00000468980
MGEQNHSPGKELQHRTRAEAPGKKSWHSQAYALGAVSNFMSTFLTFPIYKVVFRQQIHAMAVSEAVRQLWHEGPQYFYRGIYPPLLSKTLQGTLLFGTYDSLLCFLSPVGPHTLGHRWAAGLMSGVVEAVALSPFERVQNVLQDGRKQARFPSTFSILKEFNSYGLWGRLSLGYYRGFWPVLARNSLGSALYFSFKDPIQDGLAEQGLPHWVPALVSGSVNGTITCLVLYPLIVLVANMQSHIGWQNMPSLWASAQDVWNTRGRKLLLIYRGGSLVILRSSVTWGLTTAIHDFLQRKSHSRKELKTD

SEQ ID NO: 81112 - protein, 701 aa, Homo sapiens
  Payload ID: 16167
  Gene Symbol: SLC26A1
  Gene Name: solute carrier family 26 (anion exchanger), member 1
  Uniprot ID: Q9H2B4
  ENSP ID: ENSP00000354721
MDESPEPLQQGRGPVPVRRQRPAPRGLREMLKARLWCSCSCSVLCVRALVQDLLPATRWLRQYRPREYLAGDVMSGLVIGIILVPQAIAYSLLAGLQPIYSLYTSFFANLIYFLMGTSRHVSVGIFSLLCLMVGQVVDRELQLAGFDPSQDGLQPGANSSTLNGSAAMLDCGRDCYAIRVATALTLMTGLYQVLMGVLRLGFVSAYLSQPLLDGFAMGASVTILTSQLKHLLGVRIPRHQGPGMVVLTWLSLLRGAGQANVCDVVTSTVCLAVLLAAKELSDRYRHRLRVPLPTELLVIVVATLVSHFGQLHKRFGSSVAGDIPTGFMPPQVPEPRLMQRVALDAVALALVAAAFSISLAEMFARSHGYSVRANQELLAVGCCNVLPAFLHCFATSAALAKSLVKTATGCRTQLSSVVSATVVLLVLLALAPLFHDLQRSVLACVIVVSLRGALRKVWDLPRLWRMSPADALVWAGTAATCMLVSTEAGLLAGVILSLLSLAGRTQRPRTALLARIGDTAFYEDATEFEGLVPEPGVRVFRFGGPLYYANKDFFLQSLYSLTGLDAGCMAARRKEGGSETGVGEGGPAQGEDLGPVSTRAALVPAAAGFHTVVIDCAPLLFLDAAGVSTLQDLRRDYGALGISLLLACCSPPVRDILSRGGFLGEGPGDTAEEEQLFLSVHDAVQTARARHRELEATDAHL

SEQ ID NO: 81113 - protein, 701 aa, Homo sapiens; identical to SEQ ID NO: 81112
  Payload ID: 16167
  Gene Symbol: SLC26A1
  Gene Name: solute carrier family 26 (anion exchanger), member 1
  Uniprot ID: Q9H2B4
  ENSP ID: ENSP00000381528

SEQ ID NO: 81114 - protein, 224 aa, Homo sapiens
  Payload ID: 16167
  Gene Symbol: SLC26A1
  Gene Name: solute carrier family 26 (anion exchanger), member 1
  Uniprot ID: Q9H2B4
  ENSP ID: ENSP00000381532
MDESPEPLQQGRGPVPVRRQRPAPRGLREMLKARLWCSCSCSVLCVRALVQDLLPATRWLRQYRPREYLAGDVMSGLVIGIILVPQAIAYSLLAGLQPIYSLYTSFFANLIYFLMGTSRHVSVGIFSLLCLMVGQVVDRELQLAGFDPSQDGLQPGANSSTLNGSAAMLDCGRDCYAIRVATALTLMTGLYQTSWGRNSFQQHPWQLTQRSDSQELLEEEERSC

SEQ ID NO: 81115 - protein, 224 aa, Homo sapiens; identical to SEQ ID NO: 81114
  Payload ID: 16167
  Gene Symbol: SLC26A1
  Gene Name: solute carrier family 26 (anion exchanger), member 1
  Uniprot ID: Q9H2B4
  ENSP ID: ENSP00000483506

SEQ ID NO: 81116 - protein, 606 aa, Homo sapiens
  Payload ID: 16168
  Gene Symbol: SLC26A11
  Gene Name: solute carrier family 26 (anion exchanger), member 11
  Uniprot ID: Q86WA9
  ENSP ID: ENSP00000355384
MPSSVTALGQARSSGPGMAPSACCCSPAALQRRLPILAWLPSYSLQWLKMDFVAGLSVGLTAIPQALAYAEVAGLPPQYGLYSAFMGCFVYFFLGTSRDVTLGPTAIMSLLVSFYTFHEPAYAVLLAFLSGCIQLAMGVLRLGFLLDFISYPVIKGFTSAAAVTIGFGQIKNLLGLQNIPRPFFLQVYHTFLRIAETRVGDAVLGLVCMLLLLVLKLMRDHVPPVHPEMPPGVRLSRGLVWAATTARNALVVSFAALVAYSFEVTGYQPFILTGETAEGLPPVRIPPFSVTTANGTISFTEMVQDMGAGLAVVPLMGLLESIAVAKAFASQNNYRIDANQELLAIGLTNMLGSLVSSYPVTGSFGRTAVNAQSGVCTPAGGLVTGVLVLLSLDYLTSLFYYIPKSALAAVIIMAVAPLFDTKIFRTLWRVKRLDLLPLCVTFLLCFWEVQYGILAGALVSLLMLLHSAARPETKVSEGPVLVLQPASGLSFPAMEALREEILSRALEVSPPRCLVLECTHVCSIDYTVVLGLGELLQDFQKQGVALAFVGLQVPVLRVLLSADLKGFQYFSTLEEAEKHLRQEPGTQPYNIREDSILDQKVALLKA

SEQ ID NO: 81117 - protein, 606 aa, Homo sapiens; identical to SEQ ID NO: 81116
  Payload ID: 16168
  Gene Symbol: SLC26A11
  Gene Name: solute carrier family 26 (anion exchanger), member 11
  Uniprot ID: Q86WA9
  ENSP ID: ENSP00000403998

SEQ ID NO: 81118 - protein, 606 aa, Homo sapiens; identical to SEQ ID NO: 81116
  Payload ID: 16168
  Gene Symbol: SLC26A11
  Gene Name: solute carrier family 26 (anion exchanger), member 11
  Uniprot ID: Q86WA9
  ENSP ID: ENSP00000440724

SEQ ID NO: 81119 - protein, 197 aa, Homo sapiens
  Payload ID: 16168
  Gene Symbol: SLC26A11
  Gene Name: solute carrier family 26 (anion exchanger), member 11
  ENSP ID: ENSP00000458234
LLLLVLKLMRDHVPPVHPEMPPGVRLSRGLVWAATTARNALVVSFAALVAYSFEVTGYQPFILTGETAEGLPPVRIPPFSVTTANGTISFTEMVQGRFSCFGLQLRMNLPCSSQHLAPLQTRRRILQLTSTCSCYLWGGDMGAGLAVVPLMGLLESIAVAKAFASQNNYRIDANQELLAIGLTNMLGSLVSSYPVTG

SEQ ID NO: 81120 - protein, 153 aa, Homo sapiens
  Payload ID: 16168
  Gene Symbol: SLC26A11
  Gene Name: solute carrier family 26 (anion exchanger), member 11
  ENSP ID: ENSP00000458521
MPSSVTALGQARSSGPGMAPSACCCSPAALQRRLPILAWLPSYSLQWLKMDFVAGLSVGLTAIPQALAYAEVAGLPPQYGLYSAFMGCFVYFFLGTSRDVTLGPTAIMSLLVSFYTFHEPAYAVLLAFLSGCIQLAMGVLRLGFLLDFISYPV

SEQ ID NO: 81121 - protein, 210 aa, Homo sapiens
  Payload ID: 16168
  Gene Symbol: SLC26A11
  Gene Name: solute carrier family 26 (anion exchanger), member 11
  ENSP ID: ENSP00000458831
MPSSVTALGQARSSGPGMAPSACCCSPAALQRRLPILAWLPSYSLQWLKMDFVAGLSVGLTAIPQALAYAEVAGLPPQYGLYSAFMGCFVYFFLGTSRDVTLGPTAIMSLLVSFYTFHEPAYAVLLAFLSGCIQLAMGVLRLGFLLDFISYPVIKGFTSAAAVTIGFGQIKNLLGLQNIPRPFFLQVYHTFLRIAETRVGDAVLGLVCML

SEQ ID NO: 81122 - protein, 58 aa, Homo sapiens
  Payload ID: 16168
  Gene Symbol: SLC26A11
  Gene Name: solute carrier family 26 (anion exchanger), member 11
  ENSP ID: ENSP00000459379
  MOD_RES (1)..(1): Any amino acid
XLLMLLHSAARPETKVSEGPVLVLQPASGLSFPAMEALREEILSRALEGPRSPCPAVR

SEQ ID NO: 81123 - protein, 133 aa, Homo sapiens
  Payload ID: 16168
  Gene Symbol: SLC26A11
  Gene Name: solute carrier family 26 (anion exchanger), member 11
  ENSP ID: ENSP00000459420
MPSSVTALGQARSSGPGMAPSACCCSPAALQRRLPILAWLPSYSLQWLKMDFVAGLSVGLTAIPQALAYAEVAGLPPQGSCWTSFPTPSLKASPLLLPSPSALDRSRTCWDYRTSPGRSSCRCTTPSSGLQRP

SEQ ID NO: 81124 - protein, 606 aa, Homo sapiens; identical to SEQ ID NO: 81116
  Payload ID: 16168
  Gene Symbol: SLC26A11
  Gene Name: solute carrier family 26 (anion exchanger), member 11
  Uniprot ID: Q86WA9
  ENSP ID: ENSP00000459470

SEQ ID NO: 81125 - protein, 64 aa, Homo sapiens
  Payload ID: 16168
  Gene Symbol: SLC26A11
  Gene Name: solute carrier family 26 (anion exchanger), member 11
  ENSP ID: ENSP00000459735
MGCFVYFFLGTSRDVTLGPTAIMSLLVSFYTFHEPAYAVLLAFLSGCIQLAMGVLRLGFLLDFI

SEQ ID NO: 81126 - protein, 77 aa, Homo sapiens
  Payload ID: 16168
  Gene Symbol: SLC26A11
  Gene Name: solute carrier family 26 (anion exchanger), member 11
  ENSP ID: ENSP00000460535
MPSSVTALGQARSSGPGMAPSACCCSPAALQRRLPILAWLPSYSLQWLKMDFVAGLSVGLTAIPQALAYAEVAGLPP

SEQ ID NO: 81127 - protein, 739 aa, Homo sapiens
  Payload ID: 16169
  Gene Symbol: SLC26A2
  Gene Name: solute carrier family 26 (anion exchanger), member 2
  Uniprot ID: P50443
  ENSP ID: ENSP00000286298
MSSESKEQHNVSPRDSAEGNDSYPSGIHLELQRESSTDFKQFETNDQCRPYHRILIERQEKSDTNFKEFVIKKLQKNCQCSPAKAKNMILGFLPVLQWLPKYDLKKNILGDVMSGLIVGILLVPQSIAYSLLAGQEPVYGLYTSFFASIIYFLLGTSRHISVGIFGVLCLMIGETVDRELQKAGYDNAHSAPSLGMVSNGSTLLNHTSDRICDKSCYAIMVGSTVTFIAGVYQVAMGFFQVGFVSVYLSDALLSGFVTGASFTILTSQAKYLLGLNLPRTNGVGSLITTWIHVFRNIHKTNLCDLITSLLCLLVLLPTKELNEHFKSKLKAPIPIELVVVVAATLASHFGKLHENYNSSIAGHIPTGFMPPKVPEWNLIPSVAVDAIAISIIGFAITVSLSEMFAKKHGYTVKANQEMYAIGFCNIIPSFFHCFTTSAALAKTLVKESTGCHTQLSGVVTALVLLLVLLVIAPLFYSLQKSVLGVITIVNLRGALRKFRDLPKMWSISRMDTVIWFVTMLSSALLSTEIGLLVGVCFSIFCVILRTQKPKSSLLGLVEESEVFESVSAYKNLQIKPGIKIFRFVAPLYYINKECFKSALYKQTVNPILIKVAWKKAAKRKIKEKVVTLGGIQDEMSVQLSHDPLELHTIVIDCSAIQFLDTAGIHTLKEVRRDYEAIGIQVLLAQCNPTVRDSLTNGEYCKKEEENLLFYSVYEAMAFAEVSKNQKGVCVPNGLSLSSD

SEQ ID NO: 81128 - protein, 23 aa, Homo sapiens
  Payload ID: 16169
  Gene Symbol: SLC26A2
  Gene Name: solute carrier family 26 (anion exchanger), member 2
  ENSP ID: ENSP00000405496
MSSESKEQHNVSPRDSAEGNDSY

SEQ ID NO: 81129 - protein, 124 aa, Homo sapiens
  Payload ID: 16169
  Gene Symbol: SLC26A2
  Gene Name: solute carrier family 26 (anion exchanger), member 2
  ENSP ID: ENSP00000426053
GDVMSGLIVGILLVPQSIAYSLLAGQEPVYGLYTSFFASIIYFLLGTSRHISVGIFGVLCLMIGETVDRELQKAGYDNAHSAPSLGMVSNGSTLLNHTSDRICDKSCYAIMVGSTVTFIAGVYQ

SEQ ID NO: 81130 - protein, 764 aa, Homo sapiens
  Payload ID: 16170
  Gene Symbol: SLC26A3
  Gene Name: solute carrier family 26 (anion exchanger), member 3
  Uniprot ID: P40879
  ENSP ID: ENSP00000345873
MIEPFGNQYIVARPVYSTNAFEENHKKTGRHHKTFLDHLKVCCSCSPQKAKRIVLSLFPIASWLPAYRLKEWLLSDIVSGISTGIVAVLQGLAFALLVDIPPVYGLYASFFPAIIYLFFGTSRHISVGPFPILSMMVGLAVSGAVSKAVPDRNATTLGLPNNSNNSSLLDDERVRVAAAASVTVLSGIIQLAFGILRIGFVVIYLSESLISGFTTAAAVHVLVSQLKFIFQLTVPSHTDPVSIFKVLYSVFSQIEKTNIADLVTALIVLLVVSIVKEINQRFKDKLPVPIPIEFIMTVIAAGVSYGCDFKNRFKVAVVGDMNPGFQPPITPDVETFQNTVGDCFGIAMVAFAVAFSVASVYSLKYDYPLDGNQELIALGLGNIVCGVFRGFAGSTALSRSAVQESTGGKTQIAGLIGAIIVLIVVLAIGFLLAPLQKSVLAALALGNLKGMLMQFAEIGRLWRKDKYDCLIWIMTFIFTIVLGLGLGLAASVAFQLLTIVFRTQFPKCSTLANIGRTNIYKNKKDYYDMYEPEGVKIFRCPSPIYFANIGFFRRKLIDAVGFSPLRILRKRNKALRKIRKLQKQGLLQVTPKGFICTVDTIKDSDEELDNNQIEVLDQPINTTDLPFHIDWNDDLPLNIEVPKISLHSLILDFSAVSFLDVSSVRGLKSILQEFIRIKVDVYIVGTDDDFIEKLNRYEFFDGEVKSSIFFLTIHDAVLHILMKKDYSTSKFNPSQEKDGKIDFTINTNGGLRNRVYEVPVETKF

SEQ ID NO: 81131 - protein, 52 aa, Homo sapiens
  Payload ID: 16170
  Gene Symbol: SLC26A3
  Gene Name: solute carrier family 26 (anion exchanger), member 3
  ENSP ID: ENSP00000368375
MIEPFGNQYIVARPVYSTNAFEENHKKTGRHHKTFLDHLKVCCSILVASIPA

SEQ ID NO: 81132 - protein, 120 aa, Homo sapiens
  Payload ID: 16170
  Gene Symbol: SLC26A3
  Gene Name: solute carrier family 26 (anion exchanger), member 3
  ENSP ID: ENSP00000395955
MIEPFGNQYIVARPVYSTNAFEENHKKTGRHHKTFLDHLKVCCSCSPQKAKRIVLSLFPIASWLPAYRLKEWLLSDIVSGISTGIVAVLQGLAFALLVDIPPVYGLYASFFPAIIYLFFG

SEQ ID NO: 81133 - protein, 780 aa, Homo sapiens
  Payload ID: 16171
  Gene Symbol: SLC26A4
  Gene Name: solute carrier family 26 (anion exchanger), member 4
  Uniprot ID: O43511
  ENSP ID: ENSP00000265715
MAAPGGRSEPPQLPEYSCSYMVSRPVYSELAFQQQHERRLQERKTLRESLAKCCSCSRKRAFGVLKTLVPILEWLPKYRVKEWLLSDVISGVSTGLVATLQGMAYALLAAVPVGYGLYSAFFPILTYFIFGTSRHISVGPFPVVSLMVGSVVLSMAPDEHFLVSSSNGTVLNTTMIDTAARDTARVLIASALTLLVGIIQLIFGGLQIGFIVRYLADPLVGGFTTAAAFQVLVSQLKIVLNVSTKNYNGVLSIIYTLVEIFQNIGDTNLADFTAGLLTIVVCMAVKELNDRFRHKIPVPIPIEVIVTIIATAISYGANLEKNYNAGIVKSIPRGFLPPELPPVSLFSEMLAASFSIAVVAYAIAVSVGKVYATKYDYTIDGNQEFIAFGISNIFSGFFSCFVATTALSRTAVQESTGGKTQVAGIISAAIVMIAILALGKLLEPLQKSVLAAVVIANLKGMFMQLCDIPRLWRQNKIDAVIWVFTCIVSIILGLDLGLLAGLIFGLLTVVLRVQFPSWNGLGSIPSTDIYKSTKNYKNIEEPQGVKILRFSSPIFYGNVDGFKKCIKSTVGFDAIRVYNKRLKALRKIQKLIKSGQLRATKNGIISDAVSTNNAFEPDEDIEDLEELDIPTKEIEIQVDWNSELPVKVNVPKVPIHSLVLDCGAISFLDVVGVRSLRVIVKEFQRIDVNVYFASLQDYVIEKLEQCGFFDDNIRKDTFFLTVHDAILYLQNQVKSQEGQGSILETITLIQDCKDTLELIETELTEEELDVQDEAMRTLAS

SEQ ID NO: 81134 - protein, 131 aa, Homo sapiens
  Payload ID: 16171
  Gene Symbol: SLC26A4
  Gene Name: solute carrier family 26 (anion exchanger), member 4
  ENSP ID: ENSP00000394760
MAAPGGRSEPPQLPEYSCSYMVSRPVYSELAFQQQHERRLQERKTLRESLAKCCSCSRKRAFGVLKTLVPILEWLPKYRVKEWLLSDVISGVSTGLVATLQGMAYALLAAVPVGYGLYSAFFPILTYFIFG

SEQ ID NO: 81135 - protein, 744 aa, Homo sapiens
  Payload ID: 16172
  Gene Symbol: SLC26A5
  Gene Name: solute carrier family 26 (anion exchanger), member 5
  Uniprot ID: P58743
  ENSP ID: ENSP00000304783
MDHAEENEILAATQRYYVERPIFSHPVLQERLHTKDKVPDSIADKLKQAFTCTPKKIRNIIYMFLPITKWLPAYKFKEYVLGDLVSGISTGVLQLPQGLAFAMLAAVPPIFGLYSSFYPVIMYCFLGTSRHISIGPFAVISLMIGGVAVRLVPDDIVIPGGVNATNGTEARDALRVKVAMSVTLLSGIIQFCLGVCRFGFVAIYLTEPLVRGFTTAAAVHVFTSMLKYLFGVKTKRYSGIFSVVYSTVAVLQNVKNLNVCSLGVGLMVFGLLLGGKEFNERFKEKLPAPIPLEFFAVVMGTGISAGFNLKESYNVDVVGTLPLGLLPPANPDTSLFHLVYVDAIAIAIVGFSVTISMAKTLANKHGYQVDGNQELIALGLCNSIGSLFQTFSISCSLSRSLVQEGTGGKTQLAGCLASLMILLVILATGFLFESLPQAVLSAIVIVNLKGMFMQFSDLPFFWRTSKIELTIWLTTFVSSLFLGLDYGLITAVIIALLTVIYRTQSPSYKVLGKLPETDVYIDIDAYEEVKEIPGIKIFQINAPIYYANSDLYSNALKRKTGVNPAVIMGARRKAMRKYAKEVGNANMANATVVKADAEVDGEDATKPEEEDGEVKYPPIVIKSTFPEEMQRFMPPGDNVHTVILDFTQVNFIDSVGVKTLAGIVKEYGDVGIYVYLAGCSAQVVNDLTRNRFFENPALWELLFHSIHDAVLGSQLREALAEQEASAPPSQEDLEPNATPATPEA

SEQ ID NO: 81136 - protein, 685 aa, Homo sapiens
  Payload ID: 16172
  Gene Symbol: SLC26A5
  Gene Name: solute carrier family 26 (anion exchanger), member 5
  Uniprot ID: P58743
  ENSP ID: ENSP00000342396
MDHAEENEILAATQRYYVERPIFSHPVLQERLHTKDKVPDSIADKLKQAFTCTPKKIRNIIYMFLPITKWLPAYKFKEYVLGDLVSGISTGVLQLPQGLAFAMLAAVPPIFGLYSSFYPVIMYCFLGTSRHISIGPFAVISLMIGGVAVRLVPDDIVIPGGVNATNGTEARDALRVKVAMSVTLLSGIIQFCLGVCRFGFVAIYLTEPLVRGFTTAAAVHVFTSMLKYLFGVKTKRYSGIFSVVYSTVAVLQNVKNLNVCSLGVGLMVFGLLLGGKEFNERFKEKLPAPIPLEFFAVVMGTGISAGFNLKESYNVDVVGTLPLGLLPPANPDTSLFHLVYVDAIAIAIVGFSVTISMAKTLANKHGYQVDGNQELIALGLCNSIGSLFQTFSISCSLSRSLVQEGTGGKTQLAGCLASLMILLVILATGFLFESLPQAVLSAIVIVNLKGMFMQFSDLPFFWRTSKIELTIWLTTFVSSLFLGLDYGLITAVIIALLTVIYRTQSPSYKVLGKLPETDVYIDIDAYEEVKEIPGIKIFQINAPIYYANSDLYSNALKRKTGVNPAVIMGARRKAMRKYAKEVGNANMANATVVKADAEVDGEDATKPEEEDGEVKYPPIVIKSTFPEEMQRFMPPGDNVHTVILDFTQVNFIDSVGVKTLAGIVKEYGDVGIYVYLAGCSAFIQR

SEQ ID NO: 81137 - protein, 746 aa, Homo sapiens
  Payload ID: 16172
  Gene Symbol: SLC26A5
  Gene Name: solute carrier family 26 (anion exchanger), member 5
  ENSP ID: ENSP00000346325
MDHAEENEILAATQRYYVERPIFSHPVLQERLHTKDKVPDSIADKLKQAFTCTPKKIRNIIYMFLPITKWLPAYKFKEYVLGDLVSGISTGVLQLPQGLAFAMLAAVPPIFGLYSSFYPVIMYCFLGTSRHISIGPFAVISLMIGGVAVRLVPDDIVIPGGVNATNGTEARDALRVKVAMSVTLLSGIIQFCLGVCRFGFVAIYLTEPLVRGFTTAAAVHVFTSMLKYLFGVKTKRYSGIFSVVYSTVAVLQNVKNLNVCSLGVGLMVFGLLLGGKEFNERFKEKLPAPIPLEFFAVVMGTGISAGFNLKESYNVDVVGTLPLGLLPPANPDTSLFHLVYVDAIAIAIVGFSVTISMAKTLANKHGYQVDGNQELIALGLCNSIGSLFQTFSISCSLSRSLVQEGTGGKTQLAGCLASLMILLVILATGFLFESLPQAVLSAIVIVNLKGMFMQFSDLPFFWRTSKIELTIWLTTFVSSLFLGLDYGLITAVIIALLTVIYRTQSPSYKVLGKLPETDVYIDIDAYEEVKEIPGIKIFQINAPIYYANSDLYSNALKRKTGVNPAVIMGARRKAMRKYAKEVGNANMANATVVKATQDAEVDGEDATKPEEEDGEVKYPPIVIKSTFPEEMQRFMPPGDNVHTVILDFTQVNFIDSVGVKTLAGIVKEYGDVGIYVYLAGCSAQVVNDLTRNRFFENPALWELLFHSIHDAVLGSQLREALAEQEASAPPSQEDLEPNATPATPEA

SEQ ID NO: 81138 - protein, 335 aa, Homo sapiens
  Payload ID: 16172
  Gene Symbol: SLC26A5
  Gene Name: solute carrier family 26 (anion exchanger), member 5
  Uniprot ID: P58743
  ENSP ID: ENSP00000349210
MDHAEENEILAATQRYYVERPIFSHPVLQERLHTKDKVPDSIADKLKQAFTCTPKKIRNIIYMFLPITKWLPAYKFKEYVLGDLVSGISTGVLQLPQGLAFAMLAAVPPIFGLYSSFYPVIMYCFLGTSRHISIGPFAVISLMIGGVAVRLVPDDIVIPGGVNATNGTEARDALRVKVAMSVTLLSGIIQFCLGVCRFGFVAIYLTEPLVRGFTTAAAVHVFTSMLKYLFGVKTKRYSGIFSVVYSTVAVLQNVKNLNVCSLGVGLMVFGLLLGGKEFNERFKEKLPAPIPLEFFAVVMGTGISAGFNLKESYNVDVVGTLPLGFHTEMTRRWRP

SEQ ID NO: 81139 - protein, 714 aa, Homo sapiens
  Payload ID: 16172
  Gene Symbol: SLC26A5
  Gene Name: solute carrier family 26 (anion exchanger), member 5
  Uniprot ID: P58743
  ENSP ID: ENSP00000377324
MDHAEENEILAATQRYYVERPIFSHPVLQERLHTKDKVPDSIADKLKQAFTCTPKKIRNIIYMFLPITKWLPAYKFKEYVLGDLVSGISTGVLQLPQGLAFAMLAAVPPIFGLYSSFYPVIMYCFLGTSRHISIGPFAVISLMIGGVAVRLVPDDIVIPGGVNATNGTEARDALRVKVAMSVTLLSGIIQFCLGVCRFGFVAIYLTEPLVRGFTTAAAVHVFTSMLKYLFGVKTKRYSGIFSVVYSTVAVLQNVKNLNVCSLGVGLMVFGLLLGGKEFNERFKEKLPAPIPLEFFAVVMGTGISAGFNLKESYNVDVVGTLPLGLLPPANPDTSLFHLVYVDAIAIAIVGFSVTISMAKTLANKHGYQVDGNQELIALGLCNSIGSLFQTFSISCSLSRSLVQEGTGGKTQLAGCLASLMILLVILATGFLFESLPQTIWLTTFVSSLFLGLDYGLITAVIIALLTVIYRTQSPSYKVLGKLPETDVYIDIDAYEEVKEIPGIKIFQINAPIYYANSDLYSNALKRKTGVNPAVIMGARRKAMRKYAKEVGNANMANATVVKATQDAEVDGEDATKPEEEDGEVKYPPIVIKSTFPEEMQRFMPPGDNVHTVILDFTQVNFIDSVGVKTLAGIVKEYGDVGIYVYLAGCSAQVVNDLTRNRFFENPALWELLFHSIHDAVLGSQLREALAEQEASAPPSQEDLEPNATPATPEA

SEQ ID NO: 81140 - protein, 746 aa, Homo sapiens; identical to SEQ ID NO: 81137
  Payload ID: 16172
  Gene Symbol: SLC26A5
  Gene Name: solute carrier family 26 (anion exchanger), member 5
  ENSP ID: ENSP00000377328

SEQ ID NO: 81141 - protein, 707 aa, Homo sapiens
  Payload ID: 16172
  Gene Symbol: SLC26A5
  Gene Name: solute carrier family 26 (anion exchanger), member 5
  ENSP ID: ENSP00000377330
MDHAEENEILAATQRYYVERPIFSHPVLQERLHTKDKVPDSIADKLKQAFTCTPKKIRNIIYMFLPITKWLPAYKFKEYVLGDLVSGISTGVLQLPQGPFAVISLMIGGVAVRLVPDDIVIPGGVNATNGTEARDALRVKVAMSVTLLSGIIQFCLGVCRFGFVAIYLTEPLVRGFTTAAAVHVFTSMLKYLFGVKTKRYSGIFSVVYSTVAVLQNVKNLNVCSLGVGLMVFGLLLGGKEFNERFKEKLPAPIPLEFFAVVMGTGISAGFNLKESYNVDVVGTLPLGLLPPANPDTSLFHLVYVDAIAIAIVGFSVTISMAKTLANKHGYQVDGNQELIALGLCNSIGSLFQTFSISCSLSRSLVQEGTGGKTQLAGCLASLMILLVILATGFLFESLPQAVLSAIVIVNLKGMFMQFSDLPFFWRTSKIELTIWLTTFVSSLFLGLDYGLITAVIIALLTVIYRTQSPSYKVLGKLPETDVYIDIDAYEEVKEIPGIKIFQINAPIYYANSDLYSNALKRKTGVNPAVIMGARRKAMRKYAKEVGNANMANATVVKADAEVDGEDATKPEEEDGEVKYPPIVIKSTFPEEMQRFMPPGDNVHTVILDFTQVNFIDSVGVKTLAGIVKEYGDVGIYVYLAGCSAQVVNDLTRNRFFENPALWELLFHSIHDAVLGSQLREALAEQEASAPPSQEDLEPNATPATPEA

SEQ ID NO: 81142 - protein, 712 aa, Homo sapiens
  Payload ID: 16172
  Gene Symbol: SLC26A5
  Gene Name: solute carrier family 26 (anion exchanger), member 5
  Uniprot ID: P58743
  ENSP ID: ENSP00000377331
MDHAEENEILAATQRYYVERPIFSHPVLQERLHTKDKVPDSIADKLKQAFTCTPKKIRNIIYMFLPITKWLPAYKFKEYVLGDLVSGISTGVLQLPQGLAFAMLAAVPPIFGLYSSFYPVIMYCFLGTSRHISIGPFAVISLMIGGVAVRLVPDDIVIPGGVNATNGTEARDALRVKVAMSVTLLSGIIQFCLGVCRFGFVAIYLTEPLVRGFTTAAAVHVFTSMLKYLFGVKTKRYSGIFSVVYSTVAVLQNVKNLNVCSLGVGLMVFGLLLGGKEFNERFKEKLPAPIPLEFFAVVMGTGISAGFNLKESYNVDVVGTLPLGLLPPANPDTSLFHLVYVDAIAIAIVGFSVTISMAKTLANKHGYQVDGNQELIALGLCNSIGSLFQTFSISCSLSRSLVQEGTGGKTQLAGCLASLMILLVILATGFLFESLPQTIWLTTFVSSLFLGLDYGLITAVIIALLTVIYRTQSPSYKVLGKLPETDVYIDIDAYEEVKEIPGIKIFQINAPIYYANSDLYSNALKRKTGVNPAVIMGARRKAMRKYAKEVGNANMANATVVKADAEVDGEDATKPEEEDGEVKYPPIVIKSTFPEEMQRFMPPGDNVHTVILDFTQVNFIDSVGVKTLAGIVKEYGDVGIYVYLAGCSAQVVNDLTRNRFFENPALWELLFHSIHDAVLGSQLREALAEQEASAPPSQEDLEPNATPATPEA

SEQ ID NO: 81143 - protein, 516 aa, Homo sapiens
  Payload ID: 16172
  Gene Symbol: SLC26A5
  Gene Name: solute carrier family 26 (anion exchanger), member 5
  Uniprot ID: P58743
  ENSP ID: ENSP00000377336
MDHAEENEILAATQRYYVERPIFSHPVLQERLHTKDKVPDSIADKLKQAFTCTPKKIRNIIYMFLPITKWLPAYKFKEYVLGDLVSGISTGVLQLPQGLAFAMLAAVPPIFGLYSSFYPVIMYCFLGTSRHISIGPFAVISLMIGGVAVRLVPDDIVIPGGVNATNGTEARDALRVKVAMSVTLLSGIIQFCLGVCRFGFVAIYLTEPLVRGFTTAAAVHVFTSMLKYLFGVKTKRYSGIFSVVYSTVAVLQNVKNLNVCSLGVGLMVFGLLLGGKEFNERFKEKLPAPIPLEFFAVVMGTGISAGFNLKESYNVDVVGTLPLGLLPPANPDTSLFHLVYVDAIAIAIVGFSVTISMAKTLANKHGYQVDGNQELIALGLCNSIGSLFQTFSISCSLSRSLVQEGTGGKTQLAGCLASLMILLVILATGFLFESLPQAVLSAIVIVNLKGMFMQFSDLPFFWRTSKIELTIWLTTFVSSLFLGLDYGLITAVIIALLTVIYRTQSFHTEMTRRWRP

SEQ ID NO: 81144 - protein, 473 aa, Homo sapiens
  Payload ID: 16172
  Gene Symbol: SLC26A5
  Gene Name: solute carrier family 26 (anion exchanger), member 5
  ENSP ID: ENSP00000389018
MDHAEENEILAATQRYYVERPIFSHPVLQERLHTKDKVPDSIADKLKQAFTCTPKKIRNIIYMFLPITKWLPAYKFKEYVLGDLVSGISTGVLQLPQGLAFAMLAAVPPIFGLYSSFYPVIMYCFLGTSRHISIGPFAVISLMIGGVAVRLVPDDIVIPGGVNATNGTEARDALRVKVAMSVTLLSGIIQFCLGVCRFGFVAIYLTEPLVRGFTTAAAVHVFTSMLKYLFGVKTKRYSGIFSVVYSTVAVLQNVKNLNVCSLGVGLMVFGLLLGGKEFNERFKEKLPAPIPLEFFAVVMGTGISAGFNLKESYNVDVVGTLPLGLLPPANPDTSLFHLVYVDAIAIAIVGFSVTISMAKTLANKHGYQVDGNQELIALGLCNSIGSLFQTFSISCSLSRSLVQEGTGGKTQLAGCLASLMILLVILATGFLFESLPQTIWLTTFVSSLFLGLDYGLITAVIIALLTVIYRTQR

SEQ ID NO: 81145 - protein, 712 aa, Homo sapiens; identical to SEQ ID NO: 81142
  Payload ID: 16172
  Gene Symbol: SLC26A5
  Gene Name: solute carrier family 26 (anion exchanger), member 5
  Uniprot ID: P58743
  ENSP ID: ENSP00000389733

SEQ ID NO: 81146 - protein, 211 aa, Homo sapiens
  Payload ID: 16172
  Gene Symbol: SLC26A5
  Gene Name: solute carrier family 26 (anion exchanger), member 5
  ENSP ID: ENSP00000395568
MDHAEENEILAATQRYYVERPIFSHPVLQERLHTKDKVPDSIADKLKQAFTCTPKKIRNIIYMFLPITKWLPAYKFKEYVLGDLVSGISTGVLQLPQGPFAVISLMIGGVAVRLVPDDIVIPGGVNATNGTEARDALRVKVAMSVTLLSGIIQFCLGVCRFGFVAIYLTEPLVRGFTTAAAVHVFTSMLKYLFGVKTKRYSGIFSVVYASG

SEQ ID NO: 81147 - protein, 248 aa, Homo sapiens
  Payload ID: 16172
  Gene Symbol: SLC26A5
  Gene Name: solute carrier family 26 (anion exchanger), member 5
  ENSP ID: ENSP00000396833
MDHAEENEILAATQRYYVERPIFSHPVLQERLHTKDKVPDSIADKLKQAFTCTPKKIRNIIYMFLPITKWLPAYKFKEYVLGDLVSGISTGVLQLPQGLAFAMLAAVPPIFGLYSSFYPVIMYCFLGTSRHISIGPFAVISLMIGGVAVRLVPDDIVIPGGVNATNGTEARDALRVKVAMSVTLLSGIIQFCLGVCRFGFVAIYLTEPLVRGFTTAAAVHVFTSMLKYLFGVKTKRYSGIFSVVYASG

SEQ ID NO: 81148 - protein, 447 aa, Homo sapiens
  Payload ID: 16172
  Gene Symbol: SLC26A5
  Gene Name: solute carrier family 26 (anion exchanger), member 5
  ENSP ID: ENSP00000416502
MDHAEENEILAATQRYYVERPIFSHPVLQERLHTKDKVPDSIADKLKQAFTCTPKKIRNIIYMFLPITKWLPAYKFKEYVLGDLVSGISTGVLQLPQGLAFAMLAAVPPIFGLYSSFYPVIMYCFLGTSRHISIGPFAVISLMIGGVAVRLVPDDIVIPGGVNATNGTEARDALRVKVAMSVTLLSGIIQFCLGVCRFGFVAIYLTEPLVRGFTTAAAVHVFTSMLKYLFGVKTKRYSGIFSVVYSTVAVLQNVKNLNVCSLGVGLMVFGLLLGGKEFNERFKEKLPAPIPLEFFAVVMGTGISAGFNLKESYNVDVVGTLPLGLLPPANPDTSLFHLVYVDAIAIAIVGFSVTISMAKTLANKHGYQVDGNQELIALGLCNSIGSLFQTFSISCSLSRSLVQEGTGGKTQTIWLTTFVSSLFLGLDYGLITAVIIALLTVIYRTQR

SEQ ID NO: 81149 - protein, 120 aa, Homo sapiens
  Payload ID: 16173
  Gene Symbol: SLC26A6
  Gene Name: solute carrier family 26 (anion exchanger), member 6
  ENSP ID: ENSP00000307089
MGLADASGPRDTQALLSATQAMDLRRRDYHMERPLLNQEHLEELGRWGSAPRTHQWRTWLQCSRARAYALLLQHLPVLVWLPRYPVRDWLLGDLLSGLSVAIMQLPQDLLSRPALLPFYP

SEQ ID NO: 81150 - protein, 651 aa, Homo sapiens
  Payload ID: 16173
  Gene Symbol: SLC26A6
  Gene Name: solute carrier family 26 (anion exchanger), member 6
  ENSP ID: ENSP00000337648
MGLADASGPRDTQALLSATQAMDLRRRDYHMERPLLNQEHLEELGRWGSAPRTHQWRTWLQCSRARAYALLLQHLPVLVWLPRYPVRDWLLGDLLSGLSVAIMQLPQGLAYALLAGLPPVFGLYSSFYPVFIYFLFGTSRHISVVLEVCWKLPQSKVGTVVTAAVAGVVLVVVKLLNDKLQQQLPMPIPGELLTLIGATGISYGMGLKHRFEVDVVGNIPAGLVPPVAPNTQLFSKLVGSAFTIAVVGFAIAISLGKIFALRHGYRVDSNQELVALGLSNLIGGIFQCFPVSCSMSRSLVQESTGGNSQVAGAISSLFILLIIVKLGELFHDLPKAVLAAIIIVNLKGMLRQLSDMRSLWKANRADLLIWLVTFTATILLNLDLGLVVAVIFSLLLVVVRTQMPHYSVLGQVPDTDIYRDVAEYSEAKEVRGVKVFRSSATVYFANAEFYSDALKQRCGVDVDFLISQKKKLLKKQEQLKLKQLQKEEKLRKQAASPKGASVSINVNTSLEDMRSNNVEDCKMMVSSGDKMEDATANGQEDSKAPDGSTLKALGLPQPDFHSLILDLGALSFVDTVCLKSLKNIFHDFREIEVEVYMAACHSPVVSQLEAGHFFDASITKKHLFASVHDAVTFALQHPRPVPDSPVSVTRL

SEQ ID NO: 81151 - protein, 738 aa, Homo sapiens
  Payload ID: 16173
  Gene Symbol: SLC26A6
  Gene Name: solute carrier family 26 (anion exchanger), member 6
  ENSP ID: ENSP00000351597
MDLRRRDYHMERPLLNQEHLEELGRWGSAPRTHQWRTWLQCSRARAYALLLQHLPVLVWLPRYPVRDWLLGDLLSGLSVAIMQLPQGLAYALLAGLPPVFGLYSSFYPVFIYFLFGTSRHISVGTFAVMSVMVGSVTESLAPQALNDSMINETARDAARVQVASTLSVLVGLFQVGLGLIHFGFVVTYLSEPLVRGYTTAAAVQVFVSQLKYVFGLHLSSHSGPLSLIYTVLEVCWKLPQSKVGTVVTAAVAGVVLVVVKLLNDKLQQQLPMPIPGELLTLIGATGISYGMGLKHRFEVDVVGNIPAGLVPPVAPNTQLFSKLVGSAFTIAVVGFAIAISLGKIFALRHGYRVDSNQELVALGLSNLIGGIFQCFPVSCSMSRSLVQESTGGNSQVAGAISSLFILLIIVKLGELFHDLPKAVLAAIIIVNLKGMLRQLSDMRSLWKANRADLLIWLVTFTATILLNLDLGLVVAVIFSLLLVVVRTQMPHYSVLGQVPDTDIYRDVAEYSEAKEVRGVKVFRSSATVYFANAEFYSDALKQRCGVDVDFLISQKKKLLKKQEQLKLKQLQKEEKLRKQAASPKGASVSINVNTSLEDMRSNNVEDCKMMQVSSGDKMEDATANGQEDSKAPDGSTLKALGLPQPDFHSLILDLGALSFVDTVCLKSLKNIFHDFREIEVEVYMAACHSPVVSQLEAGHFFDASITKKHLFASVHDAVTFALQHPRPVPDSPVSVTRL

SEQ ID NO: 81152 - protein, 740 aa, Homo sapiens
  Payload ID: 16173
  Gene Symbol: SLC26A6
  Gene Name: solute carrier family 26 (anion exchanger), member 6
  Uniprot ID: Q9BXS9
  ENSP ID: ENSP00000373239
MGLADASGPRDTQALLSATQAMDLRRRDYHMERPLLNQEHLEELGRWGSAPRTHQWRTWLQCSRARAYALLLQHLPVLVWLPRYPVRDWLLGDLLSGLSVAIMQLPQGLAYALLAGLPPVFGLYSSFYPVFIYFLFGTSRHISVGTFAVMSVMVGSVTESLAPQALNDSMINETARDAARVQVASTLSVLVGLFQVGLGLIHFGFVVTYLSEPLVRGYTTAAAVQVFVSQLKYVFGLHLSSHSGPLSLIYTVLEVCWKLPQSKVGTVVTAAVAGVVLVVVKLLNDKLQQQLPMPIPGELLTLIGATGISYGMGLKHRFEVDVVGNIPAGLVPPVAPNTQLFSKLVGSAFTIAVVGFAIAISLGKIFALRHGYRVDSNQELVALGLSNLIGGIFQCFPVSCSMSRSLVQESTGGNSQVAGAISSLFILLIIVKLGELFHDLPKAVLAAIIIVNLKGMLRQLSDMRSLWKANRADLLIWLVTFTATILLNLDLGLVVAVIFSLLLVVVRTQMPHYSVLGQVPDTDIYRDVAEYSEAKEVRGVKVFRSSATVYFANAEFYSDALKQRCGVDVDFLISQKKKLLKKQEQLKLKQLQKEEKLRKQAGPLLSACLAPQQVSSGDKMEDATANGQEDSKAPDGSTLKALGLPQPDFHSLILDLGALSFVDTVCLKSLKNIFHDFREIEVEVYMAACHSPVVSQLEAGHFFDASITKKHLFASVHDAVTFALQHPRPVPDSPVSVTRL

SEQ ID NO: 81153 - protein, 759 aa, Homo sapiens
  Payload ID: 16173
  Gene Symbol: SLC26A6
  Gene Name: solute carrier family 26 (anion exchanger), member 6
  Uniprot ID: Q9BXS9
  ENSP ID: ENSP00000378920
MGLADASGPRDTQALLSATQAMDLRRRDYHMERPLLNQEHLEELGRWGSAPRTHQWRTWLQCSRARAYALLLQHLPVLVWLPRYPVRDWLLGDLLSGLSVAIMQLPQGLAYALLAGLPPVFGLYSSFYPVFIYFLFGTSRHISVGTFAVMSVMVGSVTESLAPQALNDSMINETARDAARVQVASTLSVLVGLFQVGLGLIHFGFVVTYLSEPLVRGYTTAAAVQVFVSQLKYVFGLHLSSHSGPLSLIYTVLEVCWKLPQSKVGTVVTAAVAGVVLVVVKLLNDKLQQQLPMPIPGELLTLIGATGISYGMGLKHRFEVDVVGNIPAGLVPPVAPNTQLFSKLVGSAFTIAVVGFAIAISLGKIFALRHGYRVDSNQELVALGLSNLIGGIFQCFPVSCSMSRSLVQESTGGNSQVAGAISSLFILLIIVKLGELFHDLPKAVLAAIIIVNLKGMLRQLSDMRSLWKANRADLLIWLVTFTATILLNLDLGLVVAVIFSLLLVVVRTQMPHYSVLGQVPDTDIYRDVAEYSEAKEVRGVKVFRSSATVYFANAEFYSDALKQRCGVDVDFLISQKKKLLKKQEQLKLKQLQKEEKLRKQAASPKGASVSINVNTSLEDMRSNNVEDCKMMQVSSGDKMEDATANGQEDSKAPDGSTLKALGLPQPDFHSLILDLGALSFVDTVCLKSLKNIFHDFREIEVEVYMAACHSPVVSQLEAGHFFDASITKKHLFASVHDAVTFALQHPRPVPDSPVSVTRL

SEQ ID NO: 81154 - protein, 88 aa, Homo sapiens
  Payload ID: 16173
  Gene Symbol: SLC26A6
  Gene Name: solute carrier family 26 (anion exchanger), member 6
  ENSP ID: ENSP00000387532
ARAYALLLQHLPVLVWLPRYPVRDWLLGDLLSGLSVAIMQLPQGLAYALLAGLPPVFGLYSSFYPVFIYFLFGTSRHISVGLERLHDQ

SEQ ID NO: 81155 - protein, 194 aa, Homo sapiens
  Payload ID: 16173
  Gene Symbol: SLC26A6
  Gene Name: solute carrier family 26 (anion exchanger), member 6
  ENSP ID: ENSP00000388721
  MOD_RES (1)..(1): Any amino acid
XGGLHTQCPGWPLPGGAGPDPLRLRGHLPVRTSCPRLYHSCSCAGLRLTAQVCVWPPSEQPLWATVPHLLLEVCWKLPQSKVGTVVTAAVAGVVLVVVKLLNDKLQQQLPMPIPGELLTLIGATGISYGMGLKHRFEAGAPSGPQHPAVLKARGQRLHHRCGWVCHCHLTGEDLRPEARLPGGQQPGAGGPGPQ

SEQ ID NO: 81156 - protein, 303 aa, Homo sapiens
  Payload ID: 16173
  Gene Symbol: SLC26A6
  Gene Name: solute carrier family 26 (anion exchanger), member 6
  ENSP ID: ENSP00000389922
GSVTESLAPQALNDSMINETARDAARVQVASTLSVLVGLFQVGLGLIHFGFVVTYLSEPLVRGYTTAAAVQVFVSQLKYVFGLHLSSHSGPLSLIYTVLEVCWKLPQSKLIGATGISYGMGLKHRFEVDVVGNIPAGLVPPVAPNTQLFSKLVGSAFTIAVVGFAIAISLGKIFALRHGYRVDSNQELVALGLSNLIGGIFQCFPVSCSMSRSLVQESTGGNSQVAGAISSLFILLIIVKLGELFHDLPKAVLAAIIIVNLKGMLRQLSDMRSLWKANRADLLIWLVTFTATILLNLDLGLVV

SEQ ID NO: 81157 - protein, 723 aa, Homo sapiens
  Payload ID: 16173
  Gene Symbol: SLC26A6
  Gene Name: solute carrier family 26 (anion exchanger), member 6
  Uniprot ID: Q9BXS9
  ENSP ID: ENSP00000401066
MGLADASGPRDTQALLSATQAMDLRRRDYHMERPLLNQEHLEELGRWGSAPRTHQWRTWLQCSRARAYALLLQHLPVLVWLPRYPVRDWLLGDLLSGLSVAIMQLPQGLAYALLAGLPPVFGLYSSFYPVFIYFLFGTSRHISVATPGPLPLLTAPGRPTGGAGPDPLRLRGHLPVRTSCPRLYHSCSCAGLRLTAQVCVWPPSEQPLWATVPHLLLEVCWKLPQSKVGTVVTAAVAGVVLVVVKLLNDKLQQQLPMPIPGELLTLIGATGISYGMGLKHRFEVDVVGNIPAGLVPPVAPNTQLFSKLVGSAFTIAVVGFAIAISLGKIFALRHGYRVDSNQELVALGLSNLIGGIFQCFPVSCSMSRSLVQESTGGNSQVAGAISSLFILLIIVKLGELFHDLPKAVLAAIIIVNLKGMLRQLSDMRSLWKANRADLLIWLVTFTATILLNLDLGLVVAVIFSLLLVVVRTQMPHYSVLGQVPDTDIYRDVAEYSEAKEVRGVKVFRSSATVYFANAEFYSDALKQRCGVDVDFLISQKKKLLKKQEQLKLKQLQKEEKLRKQAASPKGASVSINVNTSLEDMRSNNVEDCKMMQVSSGDKMEDATANGQEDSKAPDGSTLKALGLPQPDFHSLILDLGALSFVDTVCLKSLKNIFHDFREIEVEVYMAACHSPVVSQLEAGHFFDASITKKHLFASVHDAVTFALQHPRPVPDSPVSVTRL

SEQ ID NO: 81158 - protein, 180 aa, Homo sapiens
  Payload ID: 16173
  Gene Symbol: SLC26A6
  Gene Name: solute carrier family 26 (anion exchanger), member 6
  ENSP ID: ENSP00000401813
MGLADASGPRDTQALLSATQAMDLRRRDYHMERPLLNQEHLEELGRWGSAPRTHQWRTWLQCSRARAYALLLQHLPVLVWLPRYPVRDWLLGDLLSGLSVAIMQLPQGLAYALLAGLPPVFGLYSSFYPVFIYFLFGTSRHISVGGAGPDPLRLRGHLPVRTSCPRLYHSCSCAGLRLTA

SEQ ID NO: 81159 - protein, 217 aa, Homo sapiens
  Payload ID: 16173
  Gene Symbol: SLC26A6
  Gene Name: solute carrier family 26 (anion exchanger), member 6
  ENSP ID: ENSP00000404607
ALNDSMINETARDAARVQVASTLSVLVGLFQVGLGLIHFGFVVTYLSEPLVRGYTTAAAVQVFVSQLKYVFGLHLSSHSGPLSLIYTVLEVCWKLPQSKVGTVVTAAVAGVVLVVVKLLNDKLQQQLPMPIPGELLTLIGATGISYGMGLKHRFEVDVVGNIPAGGPQHPAVLKARGQRLHHRCGWVCHCHLTGEDLRPEARLPGGQQPGAGGPGPQ

SEQ ID NO: 81160 - protein, 758 aa, Homo sapiens
  Payload ID: 16173
  Gene Symbol: SLC26A6
  Gene Name: solute carrier family 26 (anion exchanger), member 6
  Uniprot ID: Q9BXS9
  ENSP ID: ENSP00000404684
MGLADASGPRDTQALLSATQAMDLRRRDYHMERPLLNQEHLEELGRWGSAPRTHQWRTWLQCSRARAYALLLQHLPVLVWLPRYPVRDWLLGDLLSGLSVAIMQLPQGLAYALLAGLPPVFGLYSSFYPVFIYFLFGTSRHISVGTFAVMSVMVGSVTESLAPQALNDSMINETARDAARVQVASTLSVLVGLFQVGLGLIHFGFVVTYLSEPLVRGYTTAAAVQVFVSQLKYVFGLHLSSHSGPLSLIYTVLEVCWKLPQSKVGTVVTAAVAGVVLVVVKLLNDKLQQQLPMPIPGELLTLIGATGISYGMGLKHRFEVDVVGNIPAGLVPPVAPNTQLFSKLVGSAFTIAVVGFAIAISLGKIFALRHGYRVDSNQELVALGLSNLIGGIFQCFPVSCSMSRSLVQESTGGNSQVAGAISSLFILLIIVKLGELFHDLPKAVLAAIIIVNLKGMLRQLSDMRSLWKANRADLLIWLVTFTATILLNLDLGLVVAVIFSLLLVVVRTQMPHYSVLGQVPDTDIYRDVAEYSEAKEVRGVKVFRSSATVYFANAEFYSDALKQRCGVDVDFLISQKKKLLKKQEQLKLKQLQKEEKLRKQAASPKGASVSINVNTSLEDMRSNNVEDCKMMVSSGDKMEDATANGQEDSKAPDGSTLKALGLPQPDFHSLILDLGALSFVDTVCLKSLKNIFHDFREIEVEVYMAACHSPVVSQLEAGHFFDASITKKHLFASVHDAVTFALQHPRPVPDSPVSVTRL

SEQ ID NO: 81161 - protein, 169 aa, Homo sapiens
  Payload ID: 16173
  Gene Symbol: SLC26A6
  Gene Name: solute carrier family 26 (anion exchanger), member 6
  ENSP ID: ENSP00000405872
MGLADASGPRDTQALLSATQAMDLRRRDYHMERPLLNQEHLEELGRWGSAPRTHQWRTWLQCSRARAYALLLQHLPVLVWLPRYPVRDWLLGDLLSGLSVAIMQLPQGLAYALLAGLPPVFGLYSSFYPVFIYFLFGTSRHISVATPGPLPLLTAPGRPTGGAGPDPLR

SEQ ID NO: 81162 - protein, 753 aa, Homo sapiens
  Payload ID: 16173
  Gene Symbol: SLC26A6
  Gene Name: solute carrier family 26 (anion exchanger), member 6
  ENSP ID: ENSP00000483669
MGLADASGPRDTQALLSATQAMDLRRRDYHMERPLLNQEHLEELGRWGSAPRTHQWRTWLQCSRARAYALLLQHLPVLVWLPRYPVRDWLLGDLLSGLSVAIMQLPQDLLSRLHCYHSTLGLAYALLAGLPPVFGLYSSFYPVFIYFLFGTSRHISVGTFAVMSVMVGSVTESLAPQALNDSMINETARDAARVQVASTLSVLVGLFQVGLGLIHFGFVVTYLSEPLVRGYTTAAAVQVFVSQLKYVFGLHLSSHSGPLSLIYTVLEVCWKLPQSKVGTVVTAAVAGVVLVVVKLLNDKLQQQLPMPIPGELLTLIGATGISYGMGLKHRFEVDVVGNIPAGLVPPVAPNTQLFSKLVGSAFTIAVVGFAIAISLGKIFALRHGYRVDSNQELVALGLSNLIGGIFQCFPVSCSMSRSLVQESTGGNSQVAGAISSLFILLIIVKLGELFHDLPKAVLAAIIIVNLKGMLRQLSDMRSLWKANRADLLIWLVTFTATILLNLDLGLVVAVIFSLLLVVVRTQMPHYSVLGQVPDTDIYRDVAEYSEAKEVRGVKVFRSSATVYFANAEFYSDALKQRCGVDVDFLISQKKKLLKKQEQLKLKQLQKEEKLRKQAGPLLSACLAPQQVSSGDKMEDATANGQEDSKAPDGSTLKALGLPQPDFHSLILDLGALSFVDTVCLKSLKNIFHDFREIEVEVYMAACHSPVVSQLEAGHFFDASITKKHLFASVHDAVTFALQHPRPVPDSPVSVTRL

SEQ ID NO: 81163 - protein, 656 aa, Homo sapiens
  Payload ID: 16174
  Gene Symbol: SLC26A7
  Gene Name: solute carrier family 26 (anion exchanger), member 7
  Uniprot ID: Q8TE54
  ENSP ID: ENSP00000276609
MTGAKRKKKSMLWSKMHTPQCEDIIQWCRRRLPILDWAPHYNLKENLLPDTVSGIMLAVQQVTQGLAFAVLSSVHPVFGLYGSLFPAIIYAIFGMGHHVATGTFALTSLISANAVERIVPQNMQNLTTQSNTSVLGLSDFEMQRIHVAAAVSFLGGVIQVAMFVLQLGSATFVVTEPVISAMTTGAATHVVTSQVKYLLGMKMPYISGPLGFFYIYAYVFENIKSVRLEALLLSLLSIVVLVLVKELNEQFKRKIKVVLPVDLVLIIAASFACYCTNMENTYGLEVVGHIPQGIPSPRAPPMNILSAVITEAFGVALVGYVASLALAQGSAKKFKYSIDDNQEFLAHGLSNIVSSFFFCIPSAAAMGRTAGLYSTGAKTQVACLISCIFVLIVIYAIGPLLYWLPMCVLASIIVVGLKGMLIQFRDLKKYWNVDKIDWGIWVSTYVFTICFAANVGLLFGVVCTIAIVIGRFPRAMTVSIKNMKEMEFKVKTEMDSETLQQVKIISINNPLVFLNAKKFYTDLMNMIQKENACNQPLDDISKCEQNTLLNSLSNGNCNEEASQSCPNEKCYLILDCSGFTFFDYSGVSMLVEVYMDCKGRSVDVLLAHCTASLIKAMTYYGNLDSEKPIFFESVSAAISHIHSNKNLSKLSDHSEV

SEQ ID NO: 81164 - protein, 663 aa, Homo sapiens
  Payload ID: 16174
  Gene Symbol: SLC26A7
  Gene Name: solute carrier family 26 (anion exchanger), member 7
  Uniprot ID: Q8TE54
  ENSP ID: ENSP00000309504
MTGAKRKKKSMLWSKMHTPQCEDIIQWCRRRLPILDWAPHYNLKENLLPDTVSGIMLAVQQVTQGLAFAVLSSVHPVFGLYGSLFPAIIYAIFGMGHHVATGTFALTSLISANAVERIVPQNMQNLTTQSNTSVLGLSDFEMQRIHVAAAVSFLGGVIQVAMFVLQLGSATFVVTEPVISAMTTGAATHVVTSQVKYLLGMKMPYISGPLGFFYIYAYVFENIKSVRLEALLLSLLSIVVLVLVKELNEQFKRKIKVVLPVDLVLIIAASFACYCTNMENTYGLEVVGHIPQGIPSPRAPPMNILSAVITEAFGVALVGYVASLALAQGSAKKFKYSIDDNQEFLAHGLSNIVSSFFFCIPSAAAMGRTAGLYSTGAKTQVACLISCIFVLIVIYAIGPLLYWLPMCVLASIIVVGLKGMLIQFRDLKKYWNVDKIDWGIWVSTYVFTICFAANVGLLFGVVCTIAIVIGRFPRAMTVSIKNMKEMEFKVKTEMDSETLQQVKIISINNPLVFLNAKKFYTDLMNMIQKENACNQPLDDISKCEQNTLLNSLSNGNCNEEASQSCPNEKCYLILDCSGFTFFDYSGVSMLVEVYMDCKGRSVDVLLAHCTASLIKAMTYYGNLDSEKPIFFESVSAAISHIHSNKASYKLLFDNLDLPTMPPL

SEQ ID NO: 81165 - protein, 269 aa, Homo sapiens
  Payload ID: 16174
  Gene Symbol: SLC26A7
  Gene Name: solute carrier family 26 (anion exchanger), member 7
  ENSP ID: ENSP00000427712
MTGAKRKKKSMLWSKMHTPQCEDIIQWCRRRLPILDWAPHYNLKENLLPDTVSGIMLAVQQVTQGLAFAVLSSVHPVFGLYGSLFPAIIYAIFGMGHHVATGTFALTSLISANAVERIVPQNMQNLTTQSNTSVLGLSDFEMQRIHVAAAVSFLGGVIQVAMFVLQLGSATFVVTEPVISAMTTGAATHVVTSQVKYLLGMKMPYISGPLGFFYIYAYVFENIKSVRLEALLLSLLSIVVLVLVKELNEQFKRKIKVVLPVDLVLNSLT

SEQ ID NO: 81166 - protein, 237 aa, Homo sapiens
  Payload ID: 16174
  Gene Symbol: SLC26A7
  Gene Name: solute carrier family 26 (anion exchanger), member 7
  ENSP ID: ENSP00000428747
  MOD_RES (1)..(1): Any amino acid
XVLGLSDFEMQRIHVAAAVSFLGGVIQVAMFVLQLGSATFVVTEPVISAMTTGAATHVVTSQVKYLLGMKMPYISGPLGFFYIYAYVFENIKSVRLEALLLSLLSIVVLVLVKELNEQFKRKIKVVLPVDLVLIIAASFACYCTNMENTYGLEVVGHIPQGIPSPRAPPMNILSAVITEAFGVALVGYVASLALAQGSAKKFKYSIDDNQVECAPSPSPLQLYHCTVHSQILKMMNL

SEQ ID NO: 81167 - protein, 656 aa, Homo sapiens; identical to SEQ ID NO: 81163
  Payload ID: 16174
  Gene Symbol: SLC26A7
  Gene Name: solute carrier family 26 (anion exchanger), member 7
  Uniprot ID: Q8TE54
  ENSP ID: ENSP00000428849

SEQ ID NO: 81168 - protein, 207 aa, Homo sapiens
  Payload ID: 16174
  Gene Symbol: SLC26A7
  Gene Name: solute carrier family 26 (anion exchanger), member 7
  ENSP ID: ENSP00000428881
MTGAKRKKKSMLWSKMHTPQCEDIIQWCRRRLPILDWAPHYNLKENLLPDTVSGIMLAVQQVTQGLAFAVLSSVHPVFGLYGSLFPAIIYAIFGMGHHVATGTFALTSLISANAVERIVPQNMQNLTTQSNTSVLGLSDFEMQRIHVAAAVSFLGGVIQVAMFVLQLGSATFVVTEPVISAMTTGAATHVVTSQVKYLLGMKMPYIS

SEQ ID NO: 81169 - protein, 656 aa, Homo sapiens; identical to SEQ ID NO: 81163
  Payload ID: 16174
  Gene Symbol: SLC26A7
  Gene Name: solute carrier family 26 (anion exchanger), member 7
  Uniprot ID: Q8TE54
  ENSP ID: ENSP00000482549

SEQ ID NO: 81170 - protein, 355 aa, Homo sapiens
  Payload ID: 16174
  Gene Symbol: SLC26A7
  Gene Name: solute carrier family 26 (anion exchanger), member 7
  ENSP ID: ENSP00000482686
MNILSAVITEAFGVALVGYVASLALAQGSAKKFKYSIDDNQEFLAHGLSNIVSSFFFCIPSAAAMGRTAGLYSTGAKTQVACLISCIFVLIVIYAIGPLLYWLPMCVLASIIVVGLKGMLIQFRDLKKYWNVDKIDWGIWVSTYVFTICFAANVGLLFGVVCTIAIVIGRFPRAMTVSIKNMKEMEFKVKTEMDSETLQQVKIISINNPLVFLNAKKFYTDLMNMIQKENACNQPLDDISKCEQNTLLNSLSNGNCNEEASQSCPNEKCYLILDCSGFTFFDYSGVSMLVEVYMDCKGRSVDVLLAHCTASLIKAMTYYGNLDSEKPIFFESVSAAISHIHSNKNLSKLSDHSEV

SEQ ID NO: 81171 - protein, 970 aa, Homo sapiens
  Payload ID: 16175
  Gene Symbol: SLC26A8
  Gene Name: solute carrier family 26 (anion exchanger), member 8
  Uniprot ID: Q96RN1
  ENSP ID: ENSP00000347778
MAQLERSAISGFSSKSRRNSFAYDVKREVYNEETFQQEHKRKASSSGNMNINITTFRHHVQCRCSWHRFLRCVLTIFPFLEWMCMYRLKDWLLGDLLAGISVGLVQVPQGLTLSLLARQLIPPLNIAYAAFCSSVIYVIFGSCHQMSIGSFFLVSALLINVLKVSPFNNGQLVMGSFVKNEFSAPSYLMGYNKSLSVVATTTFLTGIIQLIMGVLGLGFIATYLPESAMSAYLAAVALHIMLSQLTFIFGIMISFHAGPISFFYDIINYCVALPKANSTSILVFLTVVVALRINKCIRISFNQYPIEFPMELFLIIGFTVIANKISMATETSQTLIDMIPYSFLLPVTPDFSLLPKIILQAFSLSLVSSFLLIFLGKKIASLHNYSVNSNQDLIAIGLCNVVSSFFRSCVFTGAIARTIIQDKSGGRQQFASLVGAGVMLLLMVKMGHFFYTLPNAVLAGIILSNVIPYLETISNLPSLWRQDQYDCALWMMTFSSSIFLGLDIGLIISVVSAFFITTVRSHRAKILLLGQIPNTNIYRSINDYREIITIPGVKIFQCCSSITFVNVYYLKHKLLKEVDMVKVPLKEEEIFSLFNSSDTNLQGGKICRCFCNCDDLEPLPRILYTERFENKLDPEASSINLIHCSHFESMNTSQTASEDQVPYTVSSVSQKNQGQQYEEVEEVWLPNNSSRNSSPGLPDVAESQGRRSLIPYSDASLLPSVHTIILDFSMVHYVDSRGLVVLRQICNAFQNANILILIAGCHSSIVRAFERNDFFDAGITKTQLFLSVHDAVLFALSRKVIGSSELSIDESETVIRETYSETDKNDNSRYKMSSSFLGSQKNVSPGFIKIQQPVEEESELDLELESEQEAGLGLDLDLDRELEPEMEPKAETETKTQTEMEPQPETEPEMEPNPKSRPRAHTFPQQRYWPMYHPSMASTQSQTQTRTWSVERRRHPMDSYSPEGNSNEDV

SEQ ID NO: 81172 - protein, 865 aa, Homo sapiens
  Payload ID: 16175
  Gene Symbol: SLC26A8
  Gene Name: solute carrier family 26 (anion exchanger), member 8
  Uniprot ID: Q96RN1
  ENSP ID: ENSP00000378100
MAQLERSAISGFSSKSRRNSFAYDVKREVYNEETFQQEHKRKASSSGNMNINITTFRHHVQCRCSWHRFLRCVLTIFPFLEWMCMYRLKDWLLGDLLAGISVGLVQVPQGLTLSLLARQLIPPLNIAYAAFCSSVIYVIFGSCHQMSIGSFFLVSALLINVLKVSPFNNGQLVMGSFVKNEFSAPSYLMGYNKSLSVVATTTFLTGIIQIIGFTVIANKISMATETSQTLIDMIPYSFLLPVTPDFSLLPKIILQAFSLSLVSSFLLIFLGKKIASLHNYSVNSNQDLIAIGLCNVVSSFFRSCVFTGAIARTIIQDKSGGRQQFASLVGAGVMLLLMVKMGHFFYTLPNAVLAGIILSNVIPYLETISNLPSLWRQDQYDCALWMMTFSSSIFLGLDIGLIISVVSAFFITTVRSHRAKILLLGQIPNTNIYRSINDYREIITIPGVKIFQCCSSITFVNVYYLKHKLLKEVDMVKVPLKEEEIFSLFNSSDTNLQGGKICRCFCNCDDLEPLPRILYTERFENKLDPEASSINLIHCSHFESMNTSQTASEDQVPYTVSSVSQKNQGQQYEEVEEVWLPNNSSRNSSPGLPDVAESQGRRSLIPYSDASLLPSVHTIILDFSMVHYVDSRGLVVLRQICNAFQNANILILIAGCHSSIVRAFERNDFFDAGITKTQLFLSVHDAVLFALSRKVIGSSELSIDESETVIRETYSETDKNDNSRYKMSSSFLGSQKNVSPGFIKIQQPVEEESELDLELESEQEAGLGLDLDLDRELEPEMEPKAETETKTQTEMEPQPETEPEMEPNPKSRPRAHTFPQQRYWPMYHPSMASTQSQTQTRTWSVERRRHPMDSYSPEGNSNEDV

SEQ ID NO: 81173 - protein, 970 aa, Homo sapiens; identical to SEQ ID NO: 81171
  Payload ID: 16175
  Gene Symbol: SLC26A8
  Gene Name: solute carrier family 26 (anion exchanger), member 8
  Uniprot ID: Q96RN1
  ENSP ID: ENSP00000417638

SEQ ID NO: 81174 - protein, 320 aa, Homo sapiens
  Payload ID: 16175
  Gene Symbol: SLC26A8
  Gene Name: solute carrier family 26 (anion exchanger), member 8
  ENSP ID: ENSP00000418107
  MOD_RES (1)..(1): Any amino acid
XFYTLPNAVLAGIILSNVIPYLETISNLPSLWRQDQYDCALWMMTFSSSIFLGLDIGLIISVVSAFFITTVRSHRAKILLLGQIPNTNIYRSINDYREIITIPGVKIFQCCSSITFVNVYYLKHKLLKEVDMVKVPLKEEEIFSLFNSSDTNLQGGKICRCFCNCDDLEPLPRILYTERFENKLDPEASSINLIHCSHFESMNTSQTASEDQVPYTVSSVSQKNQGQQYEEVEEVWLPNNSSRNSSPGLPDVAESQGRRSLIPYSDASLLPSVHTIILDFSMVHYVDSRGLVVLRQVSTEEALAGALIPLLPSQPHPDPD

SEQ ID NO: 81175 - protein, 184 aa, Homo sapiens
  Payload ID: 16175
  Gene Symbol: SLC26A8
  Gene Name: solute carrier family 26 (anion exchanger), member 8
  ENSP ID: ENSP00000419700
  MOD_RES (1)..(1): Any amino acid
XVYRFTKYQGDPTTQPARNARGLGHNGSGTAAGIRVRSAASQARAVWDPSARTPAPAKEPGEPLLGDAWAPGAAGPRAGAASVTGRYPGMAQLERSAISGFSSKSRRNSFAYDVKREVYNEETFQQEHKRKASSSGNMNINITTFRHHVQCRMDVYVSIKGLASGRLTCWYKCWPCASSPRPDT

SEQ ID NO: 81176 - protein, 190 aa, Homo sapiens
  Payload ID: 16175
  Gene Symbol: SLC26A8
  Gene Name: solute carrier family 26 (anion exchanger), member 8
  ENSP ID: ENSP00000420488
MFRTRGLAPNRPSIKNSKTSEREGALVYRFTKYQGDPTTQPARNARGLGHNGSGTAAGIRVRSAASQARAVWDPSARTPAPAKEPGMAQLERSAISGFSSKSRRNSFAYDVKREVYNEETFQQEHKRKASSSGNMNINITTFRHHVQCRCSWHRFLRCVLTIFPFLEWMCMYRLKDWLLGDLLAGISVGL

SEQ ID NO: 81177 - protein, 887 aa, Homo sapiens
  Payload ID: 16176
  Gene Symbol: SLC26A9
  Gene Name: solute carrier family 26 (anion exchanger), member 9
  Uniprot ID: Q7LBE3
  ENSP ID: ENSP00000341682
MSQPRPRYVVDRAAYSLTLFDDEFEKKDRTYPVGEKLRNAFRCSSAKIKAVVFGLLPVLSWLPKYKIKDYIIPDLLGGLSGGSIQVPQGMAFALLANLPAVNGLYSSFFPLLTYFFLGGVHQMVPGTFAVISILVGNICLQLAPESKFQVFNNATNESYVDTAAMEAERLHVSATLACLTAIIQMGLGFMQFGFVAIYLSESFIRGFMTAAGLQILISVLKYIFGLTIPSYTGPGSIVFTFIDICKNLPHTNIASLIFALISGAFLVLVKELNARYMHKIRFPIPTEMIVVVVATAISGGCKMPKKYHMQIVGEIQRGFPTPVSPVVSQWKDMIGTAFSLAIVSYVINLAMGRTLANKHGYDVDSNQEMIALGCSNFFGSFFKIHVICCALSVTLAVDGAGGKSQVASLCVSLVVMITMLVLGIYLYPLPKSVLGALIAVNLKNSLKQLTDPYYLWRKSKLDCCIWVVSFLSSFFLSLPYGVAVGVAFSVLVVVFQTQFRNGYALAQVMDTDIYVNPKTYNRAQDIQGIKIITYCSPLYFANSEIFRQKVIAKTGMDPQKVLLAKQKYLKKQEKRRMRPTQQRRSLFMKTKTVSLQELQQDFENAPPTDPNNNQTPANGTSVSYITFSPDSSSPAQSEPPASAEAPGEPSDMLASVPPFVTFHTLILDMSGVSFVDLMGIKALAKLSSTYGKIGVKVFLVNIHAQVYNDISHGGVFEDGSLECKHVFPSIHDAVLFAQANARDVTPGHNFQGAPGDAELSLYDSEEDIRSYWDLEQEMFGSMFHAETLTALESLSAAGGCYPYRSESLVSPLFTRQALAAMDKPPAHSTPPTSALSLAAEGHLDFQLLRVSQKQKDKYNCAGLLYKLQKVSQSPHGSVSDGVRLSRT

SEQ ID NO: 81178 - protein, 887 aa, Homo sapiens; identical to SEQ ID NO: 81177
  Payload ID: 16176
  Gene Symbol: SLC26A9
  Gene Name: solute carrier family 26 (anion exchanger), member 9
  Uniprot ID: Q7LBE3
  ENSP ID: ENSP00000356102

SEQ ID NO: 81179 - protein, 791 aa, Homo sapiens
  Payload ID: 16176
  Gene Symbol: SLC26A9
  Gene Name: solute carrier family 26 (anion exchanger), member 9
  Uniprot ID: Q7LBE3
  ENSP ID: ENSP00000356103
MSQPRPRYVVDRAAYSLTLFDDEFEKKDRTYPVGEKLRNAFRCSSAKIKAVVFGLLPVLSWLPKYKIKDYIIPDLLGGLSGGSIQVPQGMAFALLANLPAVNGLYSSFFPLLTYFFLGGVHQMVPGTFAVISILVGNICLQLAPESKFQVFNNATNESYVDTAAMEAERLHVSATLACLTAIIQMGLGFMQFGFVAIYLSESFIRGFMTAAGLQILISVLKYIFGLTIPSYTGPGSIVFTFIDICKNLPHTNIASLIFALISGAFLVLVKELNARYMHKIRFPIPTEMIVVVVATAISGGCKMPKKYHMQIVGEIQRGFPTPVSPVVSQWKDMIGTAFSLAIVSYVINLAMGRTLANKHGYDVDSNQEMIALGCSNFFGSFFKIHVICCALSVTLAVDGAGGKSQVASLCVSLVVMITMLVLGIYLYPLPKSVLGALIAVNLKNSLKQLTDPYYLWRKSKLDCCIWVVSFLSSFFLSLPYGVAVGVAFSVLVVVFQTQFRNGYALAQVMDTDIYVNPKTYNRAQDIQGIKIITYCSPLYFANSEIFRQKVIAKTGMDPQKVLLAKQKYLKKQEKRRMRPTQQRRSLFMKTKTVSLQELQQDFENAPPTDPNNNQTPANGTSVSYITFSPDSSSPAQSEPPASAEAPGEPSDMLASVPPFVTFHTLILDMSGVSFVDLMGIKALAKLSSTYGKIGVKVFLVNIHAQVYNDISHGGVFEDGSLECKHVFPSIHDAVLFAQANARDVTPGHNFQGAPGDAELSLYDSEEDIRSYWDLEQEMFGSMFHAETLTAL

SEQ ID NO: 81180 - protein, 563 aa, Homo sapiens
  Payload ID: 16177
  Gene Symbol: SLC26A10
  Gene Name: solute carrier family 26, member 10
  Uniprot ID: Q8NG04
  ENSP ID: ENSP00000320217
MRLDLASLMSAPKSLGSAFKSWRLDKAPSPQHTFPSTSIPGMAFALLASVPPVFGLYTSFFPVLIYSLLGTGRHLSTGTFAILSLMTGSAVERLVPEPLVGNLSGIEKEQLDAQRVGVAAAVAFGSGALMLGMFVLQLGVLSTFLSEPVVKALTSGAALHVLLSQLPSLLGLSLPRQIGCFSLFKTLASLLTALPRSSPAELTISALSLALLVPVKELNVRFRDRLPTPIPGEVVLVLLASVLCFTSSVDTRYQVQIVGLLPGGFPQPLLPNLAELPRILADSLPIALVSFAVSASLASIHADKYSYTIDSNQEFLAHGASNLISSLFSCFPNSATLATTNLLVDAGGKTQLAGLFSCTVVLSVLLWLGPFFYYLPKAVLACINISSMRQVFCQMQELPQLWHISRVDFLLQVPGLCILSYPTPLYFGTRGQFRCNLEWHLGLGEGEKETSKPDGPMVAVAEPVRVVVLDFSGVTFADAAGAREVVQVRERLASRCRDARIRLLLAQCNALVQGTLTRVGLLDRVTPDQLFVSVQDAAAYALGSLLRGSSTRSGSQEALGCGK

SEQ ID NO: 81181 - protein, 412 aa, Homo sapiens
  Payload ID: 16177
  Gene Symbol: SLC26A10
  Gene Name: solute carrier family 26, member 10
  ENSP ID: ENSP00000403619
  MOD_RES (1)..(1): Any amino acid
XFALLASVPPVFGLYTSFFPVLIYSLLGTGRHLSTGTFAILSLMTGSAVERLVPEPLVGNLSGIEKEQLDAQRVGVAAAVAFGSGALMLGMFVLQLGVLSTFLSEPVVKALTSGAALHVLLSQLPSLLGLSLPRQIGCFSLFKTLASLLTALPRSSPAELTISALSLALLVPVKELNVRFRDRLPTPIPGEVVLVLLASVLCFTSSVDTRYQVQIVGLLPGGFPQPLLPNLAELPRILADSLPIALVSFAVSASLASIHADKYSYTIDSNQEFLAHGASNLISSLFSCFPNSATLATTNLLVDAGGKTQLAGLFSCTVVLSVLLWLGPFFYYLPKAVLACINISSMRQVFCQMQELPQLWHISRVDFAVWMVTWVAVVTLSVDLGLAVGVVFSMMTVVCRTRSSSRSRGSAS

SEQ ID NO: 81182 - protein, 520 aa, Homo sapiens
  Payload ID: 16177
  Gene Symbol: SLC26A10
  Gene Name: solute carrier family 26, member 10
  ENSP ID: ENSP00000431994
MSGIQGTRTYPGAGDTSDLKYPLATRLREALTEARFHQLFRGEEQEPELPEERGFPRLFGLWRLRARACSGTGAWRLLLARLPALHWLPHYRWRAWLLGDAVAGVTVGIVHVPQGMAFALLASVPPVFGLYTSFFPVLIYSLLGTGRHLSTGTFAILSLMTGSAVERLVPEPLVGNLSGIEKEQLDAQRVGVAAAVAFGSGALMLGMFVLQLGVLSTFLSEPVVKALTSGAALHVLLSQLPSLLGLSLPRQIGCFSLFKTLASLLTALPRSSPAELTISALSLALLVPVKELNVRFRDRLPTPIPGEVVLVLLASVLCFTSSVDTRYQVQIVGLLPGGFPQPLLPNLAELPRILADSLPIALVSFAVSASLASIHADKYSYTIDSNQEFLAHGASNLISSLFSCFPNSATLATTNLLVDAGGKTQLAGLFSCTVVLSVLLWLGPFFYYLPKAVLACINISSMRQVFCQMQELPQLWHISRVDFAVWMVTWVAVVTLSVDLGLAVGVVFSMMTVVCRTRRV

SEQ ID NO: 81183 - protein, 646 aa, Homo sapiens
  Payload ID: 16178
  Gene Symbol: SLC27A1
  Gene Name: solute carrier family 27 (fatty acid transporter), member 1
  Uniprot ID: Q6PCB7
  ENSP ID: ENSP00000252595
MRAPGAGAASVVSLALLWLLGLPWTWSAAAALGVYVGSGGWRFLRIVCKTARRDLFGLSVLIRVRLELRRHQRAGHTIPRIFQAVVQRQPERLALVDAGTGECWTFAQLDAYSNAVANLFRQLGFAPGDVVAIFLEGRPEFVGLWLGLAKAGMEAALLNVNLRREPLAFCLGTSGAKALIFGGEMVAAVAEVSGHLGKSLIKFCSGDLGPEGILPDTHLLDPLLKEASTAPLAQIPSKGMDDRLFYIYTSGTTGLPKAAIVVHSRYYRMAAFGHHAYRMQAADVLYDCLPLYHSAGNIIGVGQCLIYGLTVVLRKKFSASRFWDDCIKYNCTVVQYIGEICRYLLKQPVREAERRHRVRLAVGNGLRPAIWEEFTERFGVRQIGEFYGATECNCSIANMDGKVGSCGFNSRILPHVYPIRLVKVNEDTMELLRDAQGLCIPCQAGEPGLLVGQINQQDPLRRFDGYVSESATSKKIAHSVFSKGDSAYLSGDVLVMDELGYMYFRDRSGDTFRWRGENVSTTEVEGVLSRLLGQTDVAVYGVAVPGVEGKAGMAAVADPHSLLDPNAIYQELQKVLAPYARPIFLRLLPQVDTTGTFKIQKTRLQREGFDPRQTSDRLFFLDLKQGHYLPLNEAVYTRICSGAFAL

SEQ ID NO: 81184 - protein, 96 aa, Homo sapiens
  Payload ID: 16178
  Gene Symbol: SLC27A1
  Gene Name: solute carrier family 27 (fatty acid transporter), member 1
  ENSP ID: ENSP00000469459
MRAPGAGAASVVSLALLWLLGLPWTWSAAAALGVYVGSGGWRFLRIVCKTARRDLLSSFLHLHVGDHRAAQGCHCRAQQVLPHGSLRPPRLPHAGG

SEQ ID NO: 81185 - protein, 224 aa, Homo sapiens
  Payload ID: 16178
  Gene Symbol: SLC27A1
  Gene Name: solute carrier family 27 (fatty acid transporter), member 1
  ENSP ID: ENSP00000469881
MRAPGAGAASVVSLALLWLLGLPWTWSAAAALGVYVGSGGWRFLRIVCKTARRDLFGLSVLIRVRLELRRHQRAGHTIPRIFQAVVQRQPERLALVDAGTGECWTFAQLDAYSNAVANLFRQLGFAPGDVVAIFLEGRPEFVGLWLGLAKAGMEAALLNVNLRREPLAFCLGTSGAKALIFGGEMVAGEARRGHQVGGDPGLAPGRAGRCCAPGLGRRPPWTWA

SEQ ID NO: 81186 - protein, 166 aa, Homo sapiens
  Payload ID: 16178
  Gene Symbol: SLC27A1
  Gene Name: solute carrier family 27 (fatty acid transporter), member 1
  ENSP ID: ENSP00000470457
  MOD_RES (1)..(1): Any amino acid
XRDAQGLCIPCQAGEPGLLVGQINQQDPLRRFDGYVSESATSKKIAHSVFSKGDSAYLSGDVLVMDELGYMYFRDRSGDTFRWRGENVSTTEVEGVLSRLLGQTDVAVYGVAVPGTFKIQKTRLQREGFDPRQTSDRLFFLDLKQGHYLPLNEAVYTRICSGAFAL

SEQ ID NO: 81187 - protein, 224 aa, Homo sapiens; identical to SEQ ID NO: 81185
  Payload ID: 16178
  Gene Symbol: SLC27A1
  Gene Name: solute carrier family 27 (fatty acid transporter), member 1
  ENSP ID: ENSP00000472082

SEQ ID NO: 81188 - protein, 467 aa, Homo sapiens
  Payload ID: 16178
  Gene Symbol: SLC27A1
  Gene Name: solute carrier family 27 (fatty acid transporter), member 1
  Uniprot ID: Q6PCB7
  ENSP ID: ENSP00000472313
MTHVLGTTAVAEVSGHLGKSLIKFCSGDLGPEGILPDTHLLDPLLKEASTAPLAQIPSKGMDDRLFYIYTSGTTGLPKAAIVVHSRYYRMAAFGHHAYRMQAADVLYDCLPLYHSAGNIIGVGQCLIYGLTVVLRKKFSASRFWDDCIKYNCTVVQYIGEICRYLLKQPVREAERRHRVRLAVGNGLRPAIWEEFTERFGVRQIGEFYGATECNCSIANMDGKVGSCGFNSRILPHVYPIRLVKVNEDTMELLRDAQGLCIPCQAGEPGLLVGQINQQDPLRRFDGYVSESATSKKIAHSVFSKGDSAYLSGDVLVMDELGYMYFRDRSGDTFRWRGENVSTTEVEGVLSRLLGQTDVAVYGVAVPGVEGKAGMAAVADPHSLLDPNAIYQELQKVLAPYARPIFLRLLPQVDTTGTFKIQKTRLQREGFDPRQTSDRLFFLDLKQGHYLPLNEAVYTRICSGAFAL

SEQ ID NO: 81189 - protein, 620 aa, Homo sapiens
  Payload ID: 16179
  Gene Symbol: SLC27A2
  Gene Name: solute carrier family 27 (fatty acid transporter), member 2
  Uniprot ID: O14975
  ENSP ID: ENSP00000267842
MLSAIYTVLAGLLFLPLLVNLCCPYFFQDIGYFLKVAAVGRRVRSYGKRRPARTILRAFLEKARQTPHKPFLLFRDETLTYAQVDRRSNQVARALHDHLGLRQGDCVALLMGNEPAYVWLWLGLVKLGCAMACLNYNIRAKSLLHCFQCCGAKVLLVSPELQAAVEEILPSLKKDDVSIYYVSRTSNTDGIDSFLDKVDEVSTEPIPESWRSEVTFSTPALYIYTSGTTGLPKAAMITHQRIWYGTGLTFVSGLKADDVIYITLPFYHSAALLIGIHGCIVAGATLALRTKFSASQFWDDCRKYNVTVIQYIGELLRYLCNSPQKPNDRDHKVRLALGNGLRGDVWRQFVKRFGDICIYEFYAATEGNIGFMNYARKVGAVGRVNYLQKKIITYDLIKYDVEKDEPVRDENGYCVRVPKGEVGLLVCKITQLTPFNGYAGAKAQTEKKKLRDVFKKGDLYFNSGDLLMVDHENFIYFHDRVGDTFRWKGENVATTEVADTVGLVDFVQEVNVYGVHVPDHEGRIGMASIKMKENHEFDGKKLFQHIADYLPSYARPRFLRIQDTIEITGTFKHRKMTLVEEGFNPAVIKDALYFLDDTAKMYVPMTEDIYNAISAKTLKL

SEQ ID NO: 81190 - protein, 567 aa, Homo sapiens
  Payload ID: 16179
  Gene Symbol: SLC27A2
  Gene Name: solute carrier family 27 (fatty acid transporter), member 2
  Uniprot ID: O14975
  ENSP ID: ENSP00000370289
MLSAIYTVLAGLLFLPLLVNLCCPYFFQDIGYFLKVAAVGRRVRSYGKRRPARTILRAFLEKARQTPHKPFLLFRDETLTYAQVDRRSNQVARALHDHLGLRQGDCVALLMGNEPAYVWLWLGLVKLGCAMACLNYNIRAKSLLHCFQCCGAKVLLVSPELQAAVEEILPSLKKDDVSIYYVSRTSNTDGIDSFLDKVDEVSTEPIPESWRSEVTFSTPALYIYTSGTTGATLALRTKFSASQFWDDCRKYNVTVIQYIGELLRYLCNSPQKPNDRDHKVRLALGNGLRGDVWRQFVKRFGDICIYEFYAATEGNIGFMNYARKVGAVGRVNYLQKKIITYDLIKYDVEKDEPVRDENGYCVRVPKGEVGLLVCKITQLTPFNGYAGAKAQTEKKKLRDVFKKGDLYFNSGDLLMVDHENFIYFHDRVGDTFRWKGENVATTEVADTVGLVDFVQEVNVYGVHVPDHEGRIGMASIKMKENHEFDGKKLFQHIADYLPSYARPRFLRIQDTIEITGTFKHRKMTLVEEGFNPAVIKDALYFLDDTAKMYVPMTEDIYNAISAKTLKL

SEQ ID NO: 81191 - protein, 385 aa, Homo sapiens
  Payload ID: 16179
  Gene Symbol: SLC27A2
  Gene Name: solute carrier family 27 (fatty acid transporter), member 2
  ENSP ID: ENSP00000444549
MITHQRIWYGTGLTFVSGLKADDVIYITLPFYHSAALLIGIHGCIVAGATLALRTKFSASQFWDDCRKYNVTVIQYIGELLRYLCNSPQKPNDRDHKVRLALGNGLRGDVWRQFVKRFGDICIYEFYAATEGNIGFMNYARKVGAVGRVNYLQKKIITYDLIKYDVEKDEPVRDENGYCVRVPKGEVGLLVCKITQLTPFNGYAGAKAQTEKKKLRDVFKKGDLYFNSGDLLMVDHENFIYFHDRVGDTFRWKGENVATTEVADTVGLVDFVQEVNVYGVHVPDHEGRIGMASIKMKENHEFDGKKLFQHIADYLPSYARPRFLRIQDTIEITGTFKHRKMTLVEEGFNPAVIKDALYFLDDTAKMYVPMTEDIYNAISAKTLKL

SEQ ID NO: 81192 - protein, 811 aa, Homo sapiens
  Payload ID: 16180
  Gene Symbol: SLC27A3
  Gene Name: solute carrier family 27 (fatty acid transporter), member 3
  ENSP ID: ENSP00000271857
MPKPPKPRNNLEDRHNPGIQGRREHRPGPGRVRAASSPGGSAPRAERRLWGEGWESGAAPHPHSSRVSALRPCGVVGAWVGMGVCQRTRAPWKEKSQLERAALGFRKGGSGMFASGWNQTVPIEEAGSMAALLLLPLLLLLPLLLLKLHLWPQLRWLPADLAFAVRALCCKRALRARALAAAAADPEGPEGGCSLAWRLAELAQQRAAHTFLIHGSRRFSYSEAERESNRAARAFLRALGWDWGPDGGDSGEGSAGEGERAAPGAGDAAAGSGAEFAGGDGAARGGGAAAPLSPGATVALLLPAGPEFLWLWFGLAKAGLRTAFVPTALRRGPLLHCLRSCGARALVLAPEFLESLEPDLPALRAMGLHLWAAGPGTHPAGISDLLAEVSAEVDGPVPGYLSSPQSITDTCLYIFTSGTTGLPKAARISHLKILQCQGFYQLCGVHQEDVIYLALPLYHMSGSLLGIVGCMGIGATVVLKSKFSAGQFWEDCQQHRVTVFQYIGELCRYLVNQPPSKAERGHKVRLAVGSGLRPDTWERFVRRFGPLQVLETYGLTEGNVATINYTGQRGAVGRASWLYKHIFPFSLIRYDVTTGEPIRDPQGHCMATSPGEPGLLVAPVSQQSPFLGYAGGPELAQGKLLKDVFRPGDVFFNTGDLLVCDDQGFLRFHDRTGDTFRWKGENVATTEVAEVFEALDFLQEVNVYGVTVPGHEGRAGMAALVLRPPHALDLMQLYTHVSENLPPYARPRFLRLQESLATTETFKQQKVRMANEGFDPSTLSDPLYVLDQAVGAYLPLTTARYSALLAGNLRI

SEQ ID NO: 81193 - protein, 730 aa, Homo sapiens
  Payload ID: 16180
  Gene Symbol: SLC27A3
  Gene Name: solute carrier family 27 (fatty acid transporter), member 3
  Uniprot ID: Q5K4L6
  ENSP ID: ENSP00000357650
MGVCQRTRAPWKEKSQLERAALGFRKGGSGMFASGWNQTVPIEEAGSMAALLLLPLLLLLPLLLLKLHLWPQLRWLPADLAFAVRALCCKRALRARALAAAAADPEGPEGGCSLAWRLAELAQQRAAHTFLIHGSRRFSYSEAERESNRAARAFLRALGWDWGPDGGDSGEGSAGEGERAAPGAGDAAAGSGAEFAGGDGAARGGGAAAPLSPGATVALLLPAGPEFLWLWFGLAKAGLRTAFVPTALRRGPLLHCLRSCGARALVLAPEFLESLEPDLPALRAMGLHLWAAGPGTHPAGISDLLAEVSAEVDGPVPGYLSSPQSITDTCLYIFTSGTTGLPKAARISHLKILQCQGFYQLCGVHQEDVIYLALPLYHMSGSLLGIVGCMGIGATVVLKSKFSAGQFWEDCQQHRVTVFQYIGELCRYLVNQPPSKAERGHKVRLAVGSGLRPDTWERFVRRFGPLQVLETYGLTEGNVATINYTGQRGAVGRASWLYKHIFPFSLIRYDVTTGEPIRDPQGHCMATSPGEPGLLVAPVSQQSPFLGYAGGPELAQGKLLKDVFRPGDVFFNTGDLLVCDDQGFLRFHDRTGDTFRWKGENVATTEVAEVFEALDFLQEVNVYGVTVPGHEGRAGMAALVLRPPHALDLMQLYTHVSENLPPYARPRFLRLQESLATTETFKQQKVRMANEGFDPSTLSDPLYVLDQAVGAYLPLTTARYSALLAGNLRI

SEQ ID NO: 81194 - protein, 400 aa, Homo sapiens
  Payload ID: 16180
  Gene Symbol: SLC27A3
  Gene Name: solute carrier family 27 (fatty acid transporter), member 3
  ENSP ID: ENSP00000389603
  MOD_RES (1)..(1): Any amino acid
XHPAGISDLLAEVSAEVDGPVPGYLSSPQSITDTCLYIFTSGTTGLPKAARISHLKILQCQGFYQLCGVHQEDVIYLALPLYHMSGSLLGIVGCMGIGATVVLKSKFSAGQFWEDCQQHRVTVFQYIGELCRYLVNQPPSKAERGHKVRLAVGSGLRPDTWERFVRRFGPLQVLETYGLTEGNVATINYTGQRGAVGRASWLYKHIFPFSLIRYDVTTGEPIRDPQGHCMATSPGEPGLLVAPVSQQSPFLGYAGGPELAQGKLLKDVFRPGDVFFNTGDLLVCDDQGFLRFHDRTGDTFRWKGENVATTEVAEVFEALDFLQEVNVYGVTVPGHEGRAGMAALVLRPPHALDLMQLYTHVSENLPPYARPRFLRLQAVGAYLPLTTARYSALLAGNLRI

SEQ ID NO: 81195 - protein, 144 aa, Homo sapiens
  Payload ID: 16180
  Gene Symbol: SLC27A3
  Gene Name: solute carrier family 27 (fatty acid transporter), member 3
  ENSP ID: ENSP00000433959
VGSGLRPDTWERFVRRFGPLQVLETYGLTEGNVATINYTGQRGAVGRASWLYKHIFPFSLIRYDVTTGEPIRDPQGHCMATSPGFLRFHDRTGDTFRWKGENVATTEVAEVFEALDFLQEVNVYGVTVPGHEGRAGMAALVLRP

SEQ ID NO: 81196 - protein, 152 aa, Homo sapiens
  Payload ID: 16180
  Gene Symbol: SLC27A3
  Gene Name: solute carrier family 27 (fatty acid transporter), member 3
  ENSP ID: ENSP00000434025
QFGTPRGTVWPHLQLAQGKLLKDVFRPGDVFFNTGDLLVCDDQGFLRFHDRTGDTFRWKGENVATTEVAEVFEALDFLQEVNVYGVTVPGHEGRAGMAALVLRPPHALDLMQLYTHVSENLPPYARPRFLRLQESLATTETFKQQKVRMANE

SEQ ID NO: 81197 - protein, 811 aa, Homo sapiens; identical to SEQ ID NO: 81192
  Payload ID: 16180
  Gene Symbol: SLC27A3
  Gene Name: solute carrier family 27 (fatty acid transporter), member 3
  ENSP ID: ENSP00000458504

SEQ ID NO: 81198 - protein, 152 aa, Homo sapiens; identical to SEQ ID NO: 81196
  Payload ID: 16180
  Gene Symbol: SLC27A3
  Gene Name: solute carrier family 27 (fatty acid transporter), member 3
  ENSP ID: ENSP00000458639

SEQ ID NO: 81199 - protein, 400 aa, Homo sapiens; identical to SEQ ID NO: 81194
  Payload ID: 16180
  Gene Symbol: SLC27A3
  Gene Name: solute carrier family 27 (fatty acid transporter), member 3
  ENSP ID: ENSP00000461019
  MOD_RES (1)..(1): Any amino acid

SEQ ID NO: 81200 - protein, 144 aa, Homo sapiens; identical to SEQ ID NO: 81195
  Payload ID: 16180
  Gene Symbol: SLC27A3
  Gene Name: solute carrier family 27 (fatty acid transporter), member 3
  ENSP ID: ENSP00000461185

SEQ ID NO: 81201 - protein, 730 aa, Homo sapiens; identical to SEQ ID NO: 81193
  Payload ID: 16180
  Gene Symbol: SLC27A3
  Gene Name: solute carrier family 27 (fatty acid transporter), member 3
  Uniprot ID: Q5K4L6
  ENSP ID: ENSP00000485061

SEQ ID NO: 81202 - protein, 730 aa, Homo sapiens; identical to SEQ ID NO: 81193
  Payload ID: 16180
  Gene Symbol: SLC27A3
  Gene Name: solute carrier family 27 (fatty acid transporter), member 3
  Uniprot ID: Q5K4L6
  ENSP ID: ENSP00000485585

SEQ ID NO: 81203 - protein, 643 aa, Homo sapiens
  Payload ID: 16181
  Gene Symbol: SLC27A4
  Gene Name: solute carrier family 27 (fatty acid transporter), member 4
  Uniprot ID: Q6P1M0
  ENSP ID: ENSP00000300456
MLLGASLVGVLLFSKLVLKLPWTQVGFSLLFLYLGSGGWRFIRVFIKTIRRDIFGGLVLLKVKAKVRQCLQERRTVPILFASTVRRHPDKTALIFEGTDTHWTFRQLDEYSSSVANFLQARGLASGDVAAIFMENRNEFVGLWLGMAKLGVEAALINTNLRRDALLHCLTTSRARALVFGSEMASAICEVHASLDPSLSLFCSGSWEPGAVPPSTEHLDPLLKDAPKHLPSCPDKGFTDKLFYIYTSGTTGLPKAAIVVHSRYYRMAALVYYGFRMRPNDIVYDCLPLYHSAGNIVGIGQCLLHGMTVVIRKKFSASRFWDDCIKYNCTIVQYIGELCRYLLNQPPREAENQHQVRMALGNGLRQSIWTNFSSRFHIPQVAEFYGATECNCSLGNFDSQVGACGFNSRILSFVYPIRLVRVNEDTMELIRGPDGVCIPCQPGEPGQLVGRIIQKDPLRRFDGYLNQGANNKKIAKDVFKKGDQAYLTGDVLVMDELGYLYFRDRTGDTFRWKGENVSTTEVEGTLSRLLDMADVAVYGVEVPGTEGRAGMAAVASPTGNCDLERFAQVLEKELPLYARPIFLRLLPELHKTGTYKFQKTELRKEGFDPAIVKDPLFYLDAQKGRYVPLDQEAYSRIQAGEEKL

SEQ ID NO: 81204 - protein, 237 aa, Homo sapiens
  Payload ID: 16181
  Gene Symbol: SLC27A4
  Gene Name: solute carrier family 27 (fatty acid transporter), member 4
  Uniprot ID: Q6P1M0
  ENSP ID: ENSP00000361961
MPLTLSTLLQPGRIWTGRRAAEPTPGHNAAWSLSGGGAAVLQAGAETALDPGGILPVVPLLGIWRLALHPGLHQDHQAYLTGDVLVMDELGYLYFRDRTGDTFRWKGENVSTTEVEGTLSRLLDMADVAVYGVEVPGTEGRAGMAAVASPTGNCDLERFAQVLEKELPLYARPIFLRLLPELHKTGTYKFQKTELRKEGFDPAIVKDPLFYLDAQKGRYVPLDQEAYSRIQAGEEKL

SEQ ID NO: 81205 - protein, 690 aa, Homo sapiens
  Payload ID: 16182
  Gene Symbol: SLC27A5
  Gene Name: solute carrier family 27 (fatty acid transporter), member 5
  Uniprot ID: Q9Y2P5
  ENSP ID: ENSP00000263093
MGVRQQLALLLLLLLLLWGLGQPVWPVAVALTLRWLLGDPTCCVLLGLAMLARPWLGPWVPHGLSLAAAALALTLLPARLPPGLRWLPADVIFLAKILHLGLKIRGCLSRQPPDTFVDAFERRARAQPGRALLVWTGPGAGSVTFGELDARACQAAWALKAELGDPASLCAGEPTALLVLASQAVPALCMWLGLAKLGCPTAWINPHGRGMPLAHSVLSSGARVLVVDPDLRESLEEILPKLQAENIRCFYLSHTSPTPGVGALGAALDAAPSHPVPADLRAGITWRSPALFIYTSGTTGLPKPAILTHERVLQMSKMLSLSGATADDVVYTVLPLYHVMGLVVGILGCLDLGATCVLAPKFSTSCFWDDCRQHGVTVILYVGELLRYLCNIPQQPEDRTHTVRLAMGNGLRADVWETFQQRFGPIRIWEVYGSTEGNMGLVNYVGRCGALGKMSCLLRMLSPFELVQFDMEAAEPVRDNQGFCIPVGLGEPGLLLTKVVSQQPFVGYRGPRELSERKLVRNVRQSGDVYYNTGDVLAMDREGFLYFRDRLGDTFRWKGENVSTHEVEGVLSQVDFLQQVNVYGVCVPGCEGKVGMAAVQLAPGQTFDGEKLYQHVRAWLPAYATPHFIRIQDAMEVTSTFKLMKTRLVREGFNVGIVVDPLFVLDNRAQSFRPLTAEMYQAVCEGTWRL

SEQ ID NO: 81206 - protein, 95 aa, Homo sapiens
  Payload ID: 16182
  Gene Symbol: SLC27A5
  Gene Name: solute carrier family 27 (fatty acid transporter), member 5
  ENSP ID: ENSP00000469512
MAAVQLAPGQTFDGEKLYQHVRAWLPAYATPHFIRIQDAMEVTSTFKLMKTRLVREGFNVGIVVDPLFVLDNRAQSFRPLTAEMYQAVCEGTWRL

SEQ ID NO: 81207 - protein, 606 aa, Homo sapiens
  Payload ID: 16182
  Gene Symbol: SLC27A5
  Gene Name: solute carrier family 27 (fatty acid transporter), member 5
  Uniprot ID: Q9Y2P5
  ENSP ID: ENSP00000470368
MGVRQQLALLLLLLLLLWGLGQPVWPVAVALTLRWLLGDPTCCVLLGLAMLARPWLGPWVPHGLSLAAAALALTLLPARLPPGLRWLPADVIFLAKILHLGLKIRGCLSRQPPDTFVDAFERRARAQPGRALLVWTGPGAGSVTFDLRESLEEILPKLQAENIRCFYLSHTSPTPGVGALGAALDAAPSHPVPADLRAGITWRSPALFIYTSGTTGLPKPAILTHERVLQMSKMLSLSGATADDVVYTVLPLYHVMGLVVGILGCLDLGATCVLAPKFSTSCFWDDCRQHGVTVILYVGELLRYLCNIPQQPEDRTHTVRLAMGNGLRADVWETFQQRFGPIRIWEVYGSTEGNMGLVNYVGRCGALGKMSCLLRMLSPFELVQFDMEAAEPVRDNQGFCIPVGLGEPGLLLTKVVSQQPFVGYRGPRELSERKLVRNVRQSGDVYYNTGDVLAMDREGFLYFRDRLGDTFRWKGENVSTHEVEGVLSQVDFLQQVNVYGVCVPGCEGKVGMAAVQLAPGQTFDGEKLYQHVRAWLPAYATPHFIRIQDAMEVTSTFKLMKTRLVREGFNVGIVVDPLFVLDNRAQSFRPLTAEMYQAVCEGTWRL

SEQ ID NO: 81208 - protein, 95 aa, Homo sapiens; identical to SEQ ID NO: 81206
  Payload ID: 16182
  Gene Symbol: SLC27A5
  Gene Name: solute carrier family 27 (fatty acid transporter), member 5
  ENSP ID: ENSP00000471065

SEQ ID NO: 81209 - protein, 619 aa, Homo sapiens
  Payload ID: 16183
  Gene Symbol: SLC27A6
  Gene Name: solute carrier family 27 (fatty acid transporter), member 6
  Uniprot ID: Q9Y2P4
  ENSP ID: ENSP00000262462
MLLSWLTVLGAGMVVLHFLQKLLFPYFWDDFWFVLKVVLIIIRLKKYEKRGELVTVLDKFLSHAKRQPRKPFIIYEGDIYTYQDVDKRSSRVAHVFLNHSSLKKGDTVALLMSNEPDFVHVWFGLAKLGCVVAFLNTNIRSNSLLNCIRACGPRALVVGADLLGTVEEILPSLSENISVWGMKDSVPQGVISLKEKLSTSPDEPVPRSHHVVSLLKSTCLYIFTSGTTGLPKAAVISQLQVLRGSAVLWAFGCTAHDIVYITLPLYHSSAAILGISGCVELGATCVLKKKFSASQFWSDCKKYDVTVFQYIGELCRYLCKQSKREGEKDHKVRLAIGNGIRSDVWREFLDRFGNIKVCELYAATESSISFMNYTGRIGAIGRTNLFYKLLSTFDLIKYDFQKDEPMRNEQGWCIHVKKGEPGLLISRVNAKNPFFGYAGPYKHTKDKLLCDVFKKGDVYLNTGDLIVQDQDNFLYFWDRTGDTFRWKGENVATTEVADVIGMLDFIQEANVYGVAISGYEGRAGMASIILKPNTSLDLEKVYEQVVTFLPAYACPRFLRIQEKMEATGTFKLLKHQLVEDGFNPLKISEPLYFMDNLKKSYVLLTRELYDQIMLGEIKL

SEQ ID NO: 81210 - protein, 619 aa, Homo sapiens; identical to SEQ ID NO: 81209
  Payload ID: 16183
  Gene Symbol: SLC27A6
  Gene Name: solute carrier family 27 (fatty acid transporter), member 6
  Uniprot ID: Q9Y2P4
  ENSP ID: ENSP00000378684

SEQ ID NO: 81211 - protein, 619 aa, Homo sapiens; identical to SEQ ID NO: 81209
  Payload ID: 16183
  Gene Symbol: SLC27A6
  Gene Name: solute carrier family 27 (fatty acid transporter), member 6
  Uniprot ID: Q9Y2P4
  ENSP ID: ENSP00000421024

SEQ ID NO: 81212 - protein, 162 aa, Homo sapiens
  Payload ID: 16183
  Gene Symbol: SLC27A6
  Gene Name: solute carrier family 27 (fatty acid transporter), member 6
  ENSP ID: ENSP00000421759
MKDSVPQGVISLKEKLSTSPDEPVPRSHHVVSLLKSTCLYIFTSGTTGLPKAAVISQLQVLRGSAVLWAFGCTAHDIVYITLPLYHSSAAILGISGCVELGATCVLKKKFSASQFWSDCKKYDVTVFQYIGELCRYLCKQSKREGEKDHKVRLAIGNGIRSD

SEQ ID NO: 81213 - protein, 649 aa, Homo sapiens
  Payload ID: 16184
  Gene Symbol: SLC28A1
  Gene Name: solute carrier family 28 (concentrative nucleoside transporter), member 1
  Uniprot ID: O00337
  ENSP ID: ENSP00000286749
MENDPSRRRESISLTPVAKGLENMGADFLESLEEGQLPRSDLSPAEIRSSWSEAAPKPFSRWRNLQPALRARSFCREHMQLFRWIGTGLLCTGLSAFLLVACLLDFQRALALFVLTCVVLTFLGHRLLKRLLGPKLRRFLKPQGHPRLLLWFKRGLALAAFLGLVLWLSLDTSQRPEQLVSFAGICVFVALLFACSKHHCAVSWRAVSWGLGLQFVLGLLVIRTEPGFIAFEWLGEQIRIFLSYTKAGSSFVFGEALVKDVFAFQVLPIIVFFSCVISVLYHVGLMQWVILKIAWLMQVTMGTTATETLSVAGNIFVSQTEAPLLIRPYLADMTLSEVHVVMTGGYATIAGSLLGAYISFGIDATSLIAASVMAAPCALALSKLVYPEVEESKFRREEGVKLTYGDAQNLIEAASTGAAISVKVVANIAANLIAFLAVLDFINAALSWLGDMVDIQGLSFQLICSYILRPVAFLMGVAWEDCPVVAELLGIKLFLNEFVAYQDLSKYKQRRLAGAEEWVGDRKQWISVRAEVLTTFALCGFANFSSIGIMLGGLTSMVPQRKSDFSQIVLRALFTGACVSLVNACMAGILYMPRGAEVDCMSLLNTTLSSSSFEIYQCCREAFQSVNPEFSPEALDNCCRFYNHTICAQ

SEQ ID NO: 81214 - protein, 175 aa, Homo sapiens
  Payload ID: 16184
  Gene Symbol: SLC28A1
  Gene Name: solute carrier family 28 (concentrative nucleoside transporter), member 1
  Uniprot ID: O00337
  ENSP ID: ENSP00000341629
MENDPSRRRESISLTPVAKGLENMGADFLESLEEGQLPRSDLSPAEIRSSWSEAAPKPFSRWRNLQPALRARSFCREHMQLFRWIGTGLLCTGLSAFLLVACLLDFQRALALFVLTCVVLTFLGHRLLKRLLGPKLRRFLKPQGHPRLLLWFKRDPRPWSKEGPNQYLPQITWTV

SEQ ID NO: 81215 - protein, 649 aa, Homo sapiens; identical to SEQ ID NO: 81213
  Payload ID: 16184
  Gene Symbol: SLC28A1
  Gene Name: solute carrier family 28 (concentrative nucleoside transporter), member 1
  Uniprot ID: O00337
  ENSP ID: ENSP00000378074

SEQ ID NO: 81216 - protein, 483 aa, Homo sapiens
  Payload ID: 16184
  Gene Symbol: SLC28A1
  Gene Name: solute carrier family 28 (concentrative nucleoside transporter), member 1
  ENSP ID: ENSP00000443752
MENDPSRRRESISLTPVAKGLENMGADFLESLEEGQLPRSDLSPAEIRSSWSEAAPKPFSRWRNLQPALRARSFCREHMQLFRWIGTGLLCTGLSAFLLVACLLDFQRALALFVLTCVVLTFLGHRLLKRLLGPKLRRFLKPQGHPRLLLWFKRGLALAAFLGLVLWLSLDTSQRPEQLVSFAGICVFVALLFACSKHHCAVSWRAVSWGLGLQFVLGLLVIRTEPGFIAFEWLGEQIRIFLSYTKAGSSFVFGEALVKDVFAFQVLPIIVFFSCVISVLYHVGLMQWVILKIAWLMQVTMGTTATETLSVAGNIFVSQTEAPLLIRPYLADMTLSEVHVVMTGGYATIAGSLLGAYISFGVRAEVLTTFALCGFANFSSIGIMLGGLTSMVPQRKSDFSQIVLRALFTGACVSLVNACMAGILYMPRGAEVDCMSLLNTTLSSSSFEIYQCCREAFQSVNPEFSPEALDNCCRFYNHTICAQ

SEQ ID NO: 81217 - protein, 658 aa, Homo sapiens
  Payload ID: 16185
  Gene Symbol: SLC28A2
  Gene Name: solute carrier family 28 (concentrative nucleoside transporter), member 2
  Uniprot ID: O43868
  ENSP ID: ENSP00000315006
MEKASGRQSIALSTVETGTVNPGLELMEKEVEPEGSKRTDAQGHSLGDGLGPSTYQRRSRWPFSKARSFCKTHASLFKKILLGLLCLAYAAYLLAACILNFQRALALFVITCLVIFVLVHSFLKKLLGKKLTRCLKPFENSRLRLWTKWVFAGVSLVGLILWLALDTAQRPEQLIPFAGICMFILILFACSKHHSAVSWRTVFSGLGLQFVFGILVIRTDLGYTVFQWLGEQVQIFLNYTVAGSSFVFGDTLVKDVFAFQALPIIIFFGCVVSILYYLGLVQWVVQKVAWFLQITMGTTATETLAVAGNIFVGMTEAPLLIRPYLGDMTLSEIHAVMTGGFATISGTVLGAFIAFGVDASSLISASVMAAPCALASSKLAYPEVEESKFKSEEGVKLPRGKERNVLEAASNGAVDAIGLATNVAANLIAFLAVLAFINAALSWLGELVDIQGLTFQVICSYLLRPMVFMMGVEWTDCPMVAEMVGIKFFINEFVAYQQLSQYKNKRLSGMEEWIEGEKQWISVRAEIITTFSLCGFANLSSIGITLGGLTSIVPHRKSDLSKVVVRALFTGACVSLISACMAGILYVPRGAEADCVSFPNTSFTNRTYETYMCCRGLFQSTSLNGTNPPSFSGPWEDKEFSAMALTNCCGFYNNTVCA

SEQ ID NO: 81218 - protein, 71 aa, Homo sapiens
  Payload ID: 16185
  Gene Symbol: SLC28A2
  Gene Name: solute carrier family 28 (concentrative nucleoside transporter), member 2
  ENSP ID: ENSP00000454046
  MOD_RES (1)..(1): Any amino acid
XYAAYLLAACILNFQRALALFVITCLVIFVLVHSFLKKLLGKKLTRCLKPFENSRLRLWTKWCPGGQCFRA

SEQ ID NO: 81219 - protein, 193 aa, Homo sapiens
  Payload ID: 16185
  Gene Symbol: SLC28A2
  Gene Name: solute carrier family 28 (concentrative nucleoside transporter), member 2
  ENSP ID: ENSP00000454074
SPSLRSQRESIPQAGEKEVEPEGSKRTDAQGHSLGDGLGPSTYQRRSRWPFSKARSFCKTHASLFKKILLGLLCLAYAAYLLAACILNFQRALALFVITCLVIFVLVHSFLKKLLGKKLTRCLKPFENSRLRLWTKWVFAGVSLVGLILWLALDTAQRPEQLIPFAGICMFILILFACSKHHSAVSWRTVFSG

SEQ ID NO: 81220 - protein, 691 aa, Homo sapiens
  Payload ID: 16186
  Gene Symbol: SLC28A3
  Gene Name: solute carrier family 28 (concentrative nucleoside transporter), member 3
  Uniprot ID: Q9HAS3
  ENSP ID: ENSP00000365413
MELRSTAAPRAEGYSNVGFQNEENFLENENTSGNNSIRSRAVQSREHTNTKQDEEQVTVEQDSPRNREHMEDDDEEMQQKGCLERRYDTVCGFCRKHKTTLRHIIWGILLAGYLVMVISACVLNFHRALPLFVITVAAIFFVVWDHLMAKYEHRIDEMLSPGRRLLNSHWFWLKWVIWSSLVLAVIFWLAFDTAKLGQQQLVSFGGLIMYIVLLFLFSKYPTRVYWRPVLWGIGLQFLLGLLILRTDPGFIAFDWLGRQVQTFLEYTDAGASFVFGEKYKDHFFAFKVLPIVVFFSTVMSMLYYLGLMQWIIRKVGWIMLVTTGSSPIESVVASGNIFVGQTESPLLVRPYLPYITKSELHAIMTAGFSTIAGSVLGAYISFGVPSSHLLTASVMSAPASLAAAKLFWPETEKPKITLKNAMKMESGDSGNLLEAATQGASSSISLVANIAVNLIAFLALLSFMNSALSWFGNMFDYPQLSFELICSYIFMPFSFMMGVEWQDSFMVARLIGYKTFFNEFVAYEHLSKWIHLRKEGGPKFVNGVQQYISIRSEIIATYALCGFANIGSLGIVIGGLTSMAPSRKRDIASGAVRALIAGTVACFMTACIAGILSSTPVDINCHHVLENAFNSTFPGNTTKVIACCQSLLSSTVAKGPGEVIPGGNHSLYSLKGCCTLLNPSTFNCNGISNTF

SEQ ID NO: 81221 - protein, 456 aa, Homo sapiens [sequence omitted]

SEQ ID NO: 81222 - protein, 456 aa, Homo sapiens [sequence omitted]

SEQ ID NO: 81223 - protein, 456 aa, Homo sapiens [sequence omitted]

SEQ ID NO: 81224 - protein, 456 aa, Homo sapiens [sequence omitted]

SEQ ID NO: 81225 - protein, 456 aa, Homo sapiens [sequence omitted]

SEQ ID NO: 81226 - protein, 456 aa, Homo sapiens [sequence omitted]

SEQ ID NO: 81227 - protein, 456 aa, Homo sapiens [sequence omitted]

SEQ ID NO: 81228 - protein, 456 aa, Homo sapiens [sequence omitted]

SEQ ID NO: 81229 - protein, 456 aa, Homo sapiens [sequence omitted]

SEQ ID NO: 81230 - protein, 361 aa, Homo sapiens
  Payload ID: 16188
  Gene Symbol: SLC29A2
  Gene Name: solute carrier family 29 (equilibrative nucleoside transporter), member 2
  ENSP ID: ENSP00000311250
MARGDAPRDSYHLVGISFFILGLGTLLPWNFFITAIPYFQARLAGAGNSTARILSTNHTGPEDAFNFNNWVTLLSQLPLLLFTLLNSFLYQCVPETVRILGSLLAILLLFALTAALVKVDMSPGPFFSITMASVCFINSFSAVLQGSLFGQLGTMPSTYSTLFLSGQGLAGIFAALAMLLSMASGVDAETSALGYFITPCVGILMSIVCYLSLPHLKFARYYLANKSSQAQAQELETKAELLQSDLADSAVPCVGLHSHPVRLPRHHSHGDQLHQSWEVESVLQPHLLLPPLQHHGLAGTEPDLLLPVARRGQPAAAPAGLPAVPVRAPLHAVPRAPEVPAAHPLPTGCLLHHLHAALCRF

SEQ ID NO: 81231 - protein, 456 aa, Homo sapiens
  Payload ID: 16188
  Gene Symbol: SLC29A2
  Gene Name: solute carrier family 29 (equilibrative nucleoside transporter), member 2
  Uniprot ID: Q14542
  ENSP ID: ENSP00000350024
MARGDAPRDSYHLVGISFFILGLGTLLPWNFFITAIPYFQARLAGAGNSTARILSTNHTGPEDAFNFNNWVTLLSQLPLLLFTLLNSFLYQCVPETVRILGSLLAILLLFALTAALVKVDMSPGPFFSITMASVCFINSFSAVLQGSLFGQLGTMPSTYSTLFLSGQGLAGIFAALAMLLSMASGVDAETSALGYFITPCVGILMSIVCYLSLPHLKFARYYLANKSSQAQAQELETKAELLQSDENGIPSSPQKVALTLDLDLEKEPESEPDEPQKPGKPSVFTVFQKIWLTALCLVLVFTVTLSVFPAITAMVTSSTSPGKWSQFFNPICCFLLFNIMDWLGRSLTSYFLWPDEDSRLLPLLVCLRFLFVPLFMLCHVPQRSRLPILFPQDAYFITFMLLFAVSNGYLVSLTMCLAPRQVLPHEREVAGALMTFFLALGLSCGASLSFLFKALL

SEQ ID NO: 81232 - protein, 456 aa, Homo sapiens; identical to SEQ ID NO: 81231
  Payload ID: 16188
  Gene Symbol: SLC29A2
  Gene Name: solute carrier family 29 (equilibrative nucleoside transporter), member 2
  Uniprot ID: Q14542
  ENSP ID: ENSP00000439456

SEQ ID NO: 81233 - protein, 456 aa, Homo sapiens; identical to SEQ ID NO: 81231
  Payload ID: 16188
  Gene Symbol: SLC29A2
  Gene Name: solute carrier family 29 (equilibrative nucleoside transporter), member 2
  Uniprot ID: Q14542
  ENSP ID: ENSP00000440329

SEQ ID NO: 81234 - protein, 202 aa, Homo sapiens
  Payload ID: 16188
  Gene Symbol: SLC29A2
  Gene Name: solute carrier family 29 (equilibrative nucleoside transporter), member 2
  Uniprot ID: Q14542
  ENSP ID: ENSP00000442116
MARGDAPRDSYHLVGISFFILGLGTLLPWNFFITAIPYFQARLAGAGNSTARILSTNHTGPEDAFNFNNWVTLLSQLPLLLFTLLNSFLYQCAGQGGHEPRTLLLHHHGLRLLHQLLQCSPTGQPLRAAGHHALHLQHPLPQRPGPGWDLCCPCHAPVHGQWRGRRDLCPGVLYHALCGHPHVHRVLPEPASPEVCPLLPGQ

SEQ ID NO: 81235 - protein, 301 aa, Homo sapiens
  Payload ID: 16188
  Gene Symbol: SLC29A2
  Gene Name: solute carrier family 29 (equilibrative nucleoside transporter), member 2
  Uniprot ID: Q14542
  ENSP ID: ENSP00000444870
MARGDAPRDSYHLVGISFFILGLGTLLPWNFFITAIPYFQARLAGAGNSTARILSTNHTGPEDAFNFNNWVTLLSQLPLLLFTLLNSFLYQCVPETVRILGSLLAILLLFALTAALVKVDMSPGPFFSITMASVCFINSFSAVLQGSLFGQLGTMPSTYSTLFLSGQGLAGIFAALAMLLSMASGVDAETSALGYFITPCVGILMSIVCYLSLPHLKFARYYLANKSSQAQAQELETKAELLQSDENGIPSSPQKVALTLDLDLEKEPESEPDEPQKPGKPSVFTVFQKSPCPSSPPSQPW

SEQ ID NO: 81236 - protein, 361 aa, Homo sapiens; identical to SEQ ID NO: 81230
  Payload ID: 16188
  Gene Symbol: SLC29A2
  Gene Name: solute carrier family 29 (equilibrative nucleoside transporter), member 2
  ENSP ID: ENSP00000481944

SEQ ID NO: 81237 - protein, 475 aa, Homo sapiens
  Payload ID: 16189
  Gene Symbol: SLC29A3
  Gene Name: solute carrier family 29 (equilibrative nucleoside transporter), member 3
  Uniprot ID: Q9BZD2
  ENSP ID: ENSP00000362285
MAVVSEDDFQHSSNSTYRTTSSSLRADQEALLEKLLDRPPPGLQRPEDRFCGTYIIFFSLGIGSLLPWNFFITAKEYWMFKLRNSSSPATGEDPEGSDILNYFESYLAVASTVPSMLCLVANFLLVNRVAVHIRVLASLTVILAIFMVITALVKVDTSSWTRGFFAVTIVCMVILSGASTVFSSSIYGMTGSFPMRNSQALISGGAMGGTVSAVASLVDLAASSDVRNSALAFFLTATVFLVLCMGLYLLLSRLEYARYYMRPVLAAHVFSGEEELPQDSLSAPSVASRFIDSHTPPLRPILKKTASLGFCVTYVFFITSLIYPAICTNIESLNKGSGSLWTTKFFIPLTTFLLYNFADLCGRQLTAWIQVPGPNSKALPGFVLLRTCLIPLFVLCNYQPRVHLKTVVFQSDVYPALLSSLLGLSNGYLSTLALLYGPKIVPRELAEATGVVMSFYVCLGLTLGSACSTLLVHLI

SEQ ID NO: 81238 - protein, 530 aa, Homo sapiens
  Payload ID: 16190
  Gene Symbol: SLC29A4
  Gene Name: solute carrier family 29 (equilibrative nucleoside transporter), member 4
  Uniprot ID: Q7RTT9
  ENSP ID: ENSP00000297195
MGSVGSQRLEEPSVAGTPDPGVVMSFTFDSHQLEEAAEAAQGQGLRARGVPAFTDTTLDEPVPDDRYHAIYFAMLLAGVGFLLPYNSFITDVDYLHHKYPGTSIVFDMSLTYILVALAAVLLNNVLVERLTLHTRITAGYLLALGPLLFISICDVWLQLFSRDQAYAINLAAVGTVAFGCTVQQSSFYGYTGMLPKRYTQGVMTGESTAGVMISLSRILTKLLLPDERASTLIFFLVSVALELLCFLLHLLVRRSRFVLFYTTRPRDSHRGRPGLGRGYGYRVHHDVVAGDVHFEHPAPALAPNESPKDSPAHEVTGSGGAYMRFDVPRPRVQRSWPTFRALLLHRYVVARVIWADMLSIAVTYFITLCLFPGLESEIRHCILGEWLPILIMAVFNLSDFVGKILAALPVDWRGTHLLACSCLRVVFIPLFILCVYPSGMPALRHPAWPCIFSLLMGISNGYFGSVPMILAAGKVSPKQRELAGNTMTVSYMSGLTLGSAVAYCTYSLTRDAHGSCLHASTANGSILAGL

SEQ ID NO: 81239 - protein, 530 aa, Homo sapiens; identical to SEQ ID NO: 81238
  Payload ID: 16190
  Gene Symbol: SLC29A4
  Gene Name: solute carrier family 29 (equilibrative nucleoside transporter), member 4
  Uniprot ID: Q7RTT9
  ENSP ID: ENSP00000380081

SEQ ID NO: 81240 - protein, 516 aa, Homo sapiens
  Payload ID: 16190
  Gene Symbol: SLC29A4
  Gene Name: solute carrier family 29 (equilibrative nucleoside transporter), member 4
  Uniprot ID: Q7RTT9
  ENSP ID: ENSP00000385845
MGSVGSQRLEEPSVAGTPDPGVVMSFTFDSHQLEEAAEAAQGQGLRARGVPAFTDTTLDEPVPDDRYHAIYFAMLLAGVGFLLPYNSFITDVDYLHHKYPGTSIVFDMSLTYILVALAAVLLNNVLVERLTLHTRITAASATCGCSSSLGTRPTPSTWPLWAPWPSAAQQSSFYGYTGMLPKRYTQGVMTGESTAGVMISLSRILTKLLLPDERASTLIFFLVSVALELLCFLLHLLVRRSRFVLFYTTRPRDSHRGRPGLGRGYGYRVHHDVVAGDVHFEHPAPALAPNESPKDSPAHEVTGSGGAYMRFDVPRPRVQRSWPTFRALLLHRYVVARVIWADMLSIAVTYFITLCLFPGLESEIRHCILGEWLPILIMAVFNLSDFVGKILAALPVDWRGTHLLACSCLRVVFIPLFILCVYPSGMPALRHPAWPCIFSLLMGISNGYFGSVPMILAAGKVSPKQRELAGNTMTVSYMSGLTLGSAVAYCTYSLTRDAHGSCLHASTANGSILAGL

SEQ ID NO: 81241 - protein, 163 aa, Homo sapiens
  Payload ID: 16190
  Gene Symbol: SLC29A4
  Gene Name: solute carrier family 29 (equilibrative nucleoside transporter), member 4
  ENSP ID: ENSP00000406803
MGSVGSQRLEEPSVAGTPDPGVVMSFTFDSHQLEEAAEAAQGQGLRARGVPAFTDTTLDEPVPDDRYHAIYFAMLLAGVGFLLPYNSFITDVDYLHHKYPGTSIVFDMSLTYILVALAAVLLNNVLVERLTLHTRITAGYLLALGPLLFISICDVWLQLFSRD

SEQ ID NO: 81242 - protein, 151 aa, Homo sapiens
  Payload ID: 16190
  Gene Symbol: SLC29A4
  Gene Name: solute carrier family 29 (equilibrative nucleoside transporter), member 4
  ENSP ID: ENSP00000413271
MGSVGSQRLEEPSVAGTPDPGVVMSFTFDSHQLEEAAEAAQGQGLRARGVPAFTDTTLDEPVPDDRYHAIYFAMLLAGVGFLLPYNSFITDVDYLHHKYPGTSIVFDMSLTYILVALAAVLLNNVLVERLTLHTRITAASATCGCSSSLGT

SEQ ID NO: 81243 - protein, 685 aa, Homo sapiens
  Payload ID: 16191
  Gene Symbol: SLC3A1
  Gene Name: solute carrier family 3 (amino acid transporter heavy chain), member 1
  Uniprot ID: Q07837
  ENSP ID: ENSP00000260649
MAEDKSKRDSIEMSMKGCQTNNGFVHNEDILEQTPDPGSSTDNLKHSTRGILGSQEPDFKGVQPYAGMPKEVLFQFSGQARYRIPREILFWLTVASVLVLIAATIAIIALSPKCLDWWQEGPMYQIYPRSFKDSNKDGNGDLKGIQDKLDYITALNIKTVWITSFYKSSLKDFRYGVEDFREVDPIFGTMEDFENLVAAIHDKGLKLIIDFIPNHTSDKHIWFQLSRTRTGKYTDYYIWHDCTHENGKTIPPNNWLSVYGNSSWHFDEVRNQCYFHQFMKEQPDLNFRNPDVQEEIKEILRFWLTKGVDGFSLDAVKFLLEAKHLRDEIQVNKTQIPDTVTQYSELYHDFTTTQVGMHDIVRSFRQTMDQYSTEPGRYRFMGTEAYAESIDRTVMYYGLPFIQEADFPFNNYLSMLDTVSGNSVYEVITSWMENMPEGKWPNWMIGGPDSSRLTSRLGNQYVNVMNMLLFTLPGTPITYYGEEIGMGNIVAANLNESYDINTLRSKSPMQWDNSSNAGFSEASNTWLPTNSDYHTVNVDVQKTQPRSALKLYQDLSLLHANELLLNRGWFCHLRNDSHYVVYTRELDGIDRIFIVVLNFGESTLLNLHNMISGLPAKMRIRLSTNSADKGSKVDTSGIFLDKGEGLIFEHNTKNLLHRQTAFRDRCFVSNRACYSSVLNILYTSC

SEQ ID NO: 81244 - protein, 564 aa, Homo sapiens
  Payload ID: 16191
  Gene Symbol: SLC3A1
  Gene Name: solute carrier family 3 (amino acid transporter heavy chain), member 1
  Uniprot ID: Q07837
  ENSP ID: ENSP00000386620
MAEDKSKRDSIEMSMKGCQTNNGFVHNEDILEQTPDPGSSTDNLKHSTRGILGSQEPDFKGVQPYAGMPKEVLFQFSGQARYRIPREILFWLTVASVLVLIAATIAIIALSPKCLDWWQEGPMYQIYPRSFKDSNKDGNGDLKGIQDKLDYITALNIKTVWITSFYKSSLKDFRYGVEDFREVDPIFGTMEDFENLVAAIHDKGLKLIIDFIPNHTSDKHIWFQLSRTRTGKYTDYYIWHDCTHENGKTIPPNNWLSVYGNSSWHFDEVRNQCYFHQFMKEQPDLNFRNPDVQEEIKEILRFWLTKGVDGFSLDAVKFLLEAKHLRDEIQVNKTQIPDTVTQYSELYHDFTTTQVGMHDIVRSFRQTMDQYSTEPGRYRFMGTEAYAESIDRTVMYYGLPFIQEADFPFNNYLSMLDTVSGNSVYEVITSWMENMPEGKWPNWMIGGPDSSRLTSRLGNQYVNVMNMLLFTLPGTPITYYGEEIGMGNIVAANLNESYDINTLRSKSPMQWDNSSNAGFSEASNTWLPTNSDYHTVNVDVSISENFMLILETKKWVSTESTHSP

SEQ ID NO: 81245 - protein, 316 aa, Homo sapiens
  Payload ID: 16191
  Gene Symbol: SLC3A1
  Gene Name: solute carrier family 3 (amino acid transporter heavy chain), member 1
  Uniprot ID: Q07837
  ENSP ID: ENSP00000386677
MTLNLVNSYRFMGTEAYAESIDRTVMYYGLPFIQEADFPFNNYLSMLDTVSGNSVYEVITSWMENMPEGKWPNWMIGGPDSSRLTSRLGNQYVNVMNMLLFTLPGTPITYYGEEIGMGNIVAANLNESYDINTLRSKSPMQWDNSSNAGFSEASNTWLPTNSDYHTVNVDVQKTQPRSALKLYQDLSLLHANELLLNRGWFCHLRNDSHYVVYTRELDGIDRIFIVVLNFGESTLLNLHNMISGLPAKMRIRLSTNSADKGSKVDTSGIFLDKGEGLIFEHNTKNLLHRQTAFRDRCFVSNRACYSSVLNILYTSC

SEQ ID NO: 81246 - protein, 407 aa, Homo sapiens
  Payload ID: 16191
  Gene Symbol: SLC3A1
  Gene Name: solute carrier family 3 (amino acid transporter heavy chain), member 1
  Uniprot ID: Q07837
  ENSP ID: ENSP00000386709
MKEQPDLNFRNPDVQEEIKEILRFWLTKGVDGFSLDAVKFLLEAKHLRDEIQVNKTQIPDTVTQYSELYHDFTTTQVGMHDIVRSFRQTMDQYSTEPGRYRFMGTEAYAESIDRTVMYYGLPFIQEADFPFNNYLSMLDTVSGNSVYEVITSWMENMPEGKWPNWMIGGPDSSRLTSRLGNQYVNVMNMLLFTLPGTPITYYGEEIGMGNIVAANLNESYDINTLRSKSPMQWDNSSNAGFSEASNTWLPTNSDYHTVNVDVQKTQPRSALKLYQDLSLLHANELLLNRGWFCHLRNDSHYVVYTRELDGIDRIFIVVLNFGESTLLNLHNMISGLPAKMRIRLSTNSADKGSKVDTSGIFLDKGEGLIFEHNTKNLLHRQTAFRDRCFVSNRACYSSVLNILYTSC

SEQ ID NO: 81247 - protein, 184 aa, Homo sapiens
  Payload ID: 16191
  Gene Symbol: SLC3A1
  Gene Name: solute carrier family 3 (amino acid transporter heavy chain), member 1
  ENSP ID: ENSP00000386852
MGTEAYAESIDRTVMYYGLPFIQEADFPFNNYLSMLDTVSGNSVYEVITSWMENMPEGKWPNWMIGGPDSSRLTSRLGNQYVNVMNMLLFTLPGTPITYYGEEIGMGNIVAANLNESYDINTLRSKSPMQWDNSSNAGFSEASNTWLPTNSDYHTVNVDVSISENFMLILETKKWVSTESTHSP

SEQ ID NO: 81248 - protein, 502 aa, Homo sapiens
  Payload ID: 16191
  Gene Symbol: SLC3A1
  Gene Name: solute carrier family 3 (amino acid transporter heavy chain), member 1
  Uniprot ID: Q07837
  ENSP ID: ENSP00000386954
MAEDKSKRDSIEMSMKGCQTNNGFVHNEDILEQTPDPGSSTDNLKHSTRGILGSQEPDFKGVQPYAGMPKEVLFQFSGQARYRIPREILFWLTVASVLVLIAATIAIIALSPKCLDWWQEGPMYQIYPRSFKDSNKDGNGDLKGIQDKLDYITALNIKTVWITSFYKSSLKDFRYGVEDFREVDPIFGTMEDFENLVAAIHDKGLKLIIDFIPNHTSDKHIWFQLSRTRTGKYTDYYIWHDCTHENGKTIPPNNWLSVYGNSSWHFDEVRNQCYFHQFMKEQPDLNFRNPDVQEEIKEILRFWLTKGVDGFSLDAVKFLLEAKHLRDEIQVNKTQIPDTVTQYSELYHDFTTTQVGMHDIVRSFRQTMDQYSTEPGRYRFMGTEAYAESIDRTVMYYGLPFIQEADFPFNNYLSMLDTVSGNSVYEVITSWMENMPEGKWPNWMIGGPDSSRLTSRLGNQYVNVMNMLLFTLPGTPITYYGEEIGMGNIVAANLNESYDIVS

SEQ ID NO: 81249 - protein, 564 aa, Homo sapiens
  Payload ID: 16191
  Gene Symbol: SLC3A1
  Gene Name: solute carrier family 3 (amino acid transporter heavy chain), member 1
  ENSP ID: ENSP00000387308
MAEDKSKRDSIEMSMKGCQTNNGFVHNEDILEQTPDPGSSTDNLKHSTRGILGSQEPDFKGVQPYAGMPKEVLFQFSGQARYRIPREILFWLTVASVLVLIAATIAIIALSPKCLDWWQEGPMYQIYPRSFKDSNKDGNGDLKGIQDKLDYITALNIKTVWITSFYKSSLKDFRYGVEDFREVDPIFGTMEDFENLVAAIHDKGLKLIIDFIPNHTSDKHIWFQLSRTRTGKYTDYYIWHDCTHENGKTIPPNNWLSVYGNSSWHFDEVRNQCYFHQFMKEQPDLNFRNPDVQEEIKEILRFWLTKGVDGFSLDAVKFLLEAKHLRDEIQVNKTQIPDTVTQYSELYHDFTTTQVGMHDIVRSFRQTMDQYSTEPGRYRFMGTEAYAESIDRTVMYYGLPFIQEADFPFNNYLSMLDTVSGNSVYEVITSWMENMPEGKWPNWMIGGPDSSRLTSRLGNQYVNVMNMLLFTLPGTPITYYGEEIGMGNIVAANLNESYDINTLRSKSPMQWDNSSNAGFSEASNTWLPTNSDYHTVNVDSCSVTHARVQWRDLGTLQPLLPGFK

SEQ ID NO: 81250 - protein, 391 aa, Homo sapiens
  Payload ID: 16191
  Gene Symbol: SLC3A1
  Gene Name: solute carrier family 3 (amino acid transporter heavy chain), member 1
  Uniprot ID: Q07837
  ENSP ID: ENSP00000387337
MAEDKSKRDSIEMSMKGCQTNNGFVHNEDILEQTPDPGSSTDNLKHSTRGILGSQEPDFKGVQPYAGMPKEVLFQFSGQARYRIPREILFWLTVASVLVLIAATIAIIALSPKCLDWWQEGPMYQIYPRSFKDSNKDGNGDLKGIQDKLDYITALNIKTVWITSFYKSSLKDFRYGVEDFREVDPIFGTMEDFENLVAAIHDKGLKLIIDFIPNHTSDKHIWFQLSRTRTGKYTDYYIWHDCTHENGKTIPPNNWLSVYGNSSWHFDEVRNQCYFHQFMKEQPDLNFRNPDVQEEIKEILRFWLTKGVDGFSLDAVKFLLEAKHLRDEIQVNKTQIPDTVTQYSELYHDFTTTQVGMHDIVRSFRQTMDQYSTEPGRYRLTTAYALISSQA

SEQ ID NO: 81251 - protein, 143 aa, Homo sapiens
  Payload ID: 16191
  Gene Symbol: SLC3A1
  Gene Name: solute carrier family 3 (amino acid transporter heavy chain), member 1
  ENSP ID: ENSP00000391642
MSGMFLSSKLTTILLLFTNKSLDPGQKIQENTLLSVYGNSSWHFDEVRNQCYFHQFMKEQPDLNFRNPDVQEEIKEILRFWLTKGVDGFSLDAVKFLLEAKHLRDEIQVNKTQIPDTVTQYSELYHDFTTTQVGMHDIVRSFR

SEQ ID NO: 81252 - protein, 552 aa, Homo sapiens
  Payload ID: 16191
  Gene Symbol: SLC3A1
  Gene Name: solute carrier family 3 (amino acid transporter heavy chain), member 1
  ENSP ID: ENSP00000483618
MAEDKSKRDSIEMSMKGCQTNNGFVHNEDILEQTPDPGSSTDNLKHSTRGILGSQEPDFKGVQPYAGMPKEVLFQFSGQARYRIPREILFWLTVASVLVLIAATIAIIALSPKCLDWWQEGPMYQIYPRSFKDSNKDGNGDLKGIQDKLDYITALNIKTVWITSFYKSSLKDFRYGVEDFREVDPIFGTMEDFENLVAAIHDKGLKLIIDFIPNHTSDKHIWFQLSRTRTGKYTDYYIWHDCTHENGKTIPPNNWLSVYGNSSWHFDEVRNQCYFHQFMKEQPDLNFRNPDVQEEIKEILRFWLTKGVDGFSLDAVKFLLEAKHLRDEIQVNKTQIPDTVTQYSELYHDFTTTQVGMHDIVRSFRQTMDQYSTEPGRYRFMGTEAYAESIDRTVMYYGLPFIQEADFPFNNYLSMLDTVSGNSVYEVITSWMENMPEGKWPNWMIGGPDSSRLTSRLGNQYVNVMNMLLFTLPGTPITYYGEEIGMGNIVAANLNESYDINTLRSKSPMQWDNSSNAGFSEASNTWLPTNSDYHTVNVDVILLRHPCSSAVA

SEQ ID NO: 81253 - protein, 529 aa, Homo sapiens
  Payload ID: 16192
  Gene Symbol: SLC3A2
  Gene Name: solute carrier family 3 (amino acid transporter heavy chain), member 2
  Uniprot ID: P08195
  ENSP ID: ENSP00000340815
MSQDTEVDMKEVELNELEPEKQPMNAASGAAMSLAGAEKNGLVKIKVAEDEAEAAAAAKFTGLSKEELLKVAGSPGWVRTRWALLLLFWLGWLGMLAGAVVIIVRAPRCRELPAQKWWHTGALYRIGDLQAFQGHGAGNLAGLKGRLDYLSSLKVKGLVLGPIHKNQKDDVAQTDLLQIDPNFGSKEDFDSLLQSAKKKSIRVILDLTPNYRGENSWFSTQVDTVATKVKDALEFWLQAGVDGFQVRDIENLKDASSFLAEWQNITKGFSEDRLLIAGTNSSDLQQILSLLESNKDLLLTSSYLSDSGSTGEHTKSLVTQYLNATGNRWCSWSLSQARLLTSFLPAQLLRLYQLMLFTLPGTPVFSYGDEIGLDAAALPGQPMEAPVMLWDESSFPDIPGAVSANMTVKGQSEDPGSLLSLFRRLSDQRSKERSLLHGDFHAFSAGPGLFSYIRHWDQNERFLVVLNFGDVGLSAGLQASDLPASASLPAKADLLLSTQPGREEGSPLELERLKLEPHEGLLLRFPYAA

SEQ ID NO: 81254 - protein, 568 aa, Homo sapiens
  Payload ID: 16192
  Gene Symbol: SLC3A2
  Gene Name: solute carrier family 3 (amino acid transporter heavy chain), member 2
  Uniprot ID: P08195
  ENSP ID: ENSP00000367121
MELQPPEASIAVVSIPRQLPGSHSEAGVQGLSAGDDSGTMSQDTEVDMKEVELNELEPEKQPMNAASGAAMSLAGAEKNGLVKIKVAEDEAEAAAAAKFTGLSKEELLKVAGSPGWVRTRWALLLLFWLGWLGMLAGAVVIIVRAPRCRELPAQKWWHTGALYRIGDLQAFQGHGAGNLAGLKGRLDYLSSLKVKGLVLGPIHKNQKDDVAQTDLLQIDPNFGSKEDFDSLLQSAKKKSIRVILDLTPNYRGENSWFSTQVDTVATKVKDALEFWLQAGVDGFQVRDIENLKDASSFLAEWQNITKGFSEDRLLIAGTNSSDLQQILSLLESNKDLLLTSSYLSDSGSTGEHTKSLVTQYLNATGNRWCSWSLSQARLLTSFLPAQLLRLYQLMLFTLPGTPVFSYGDEIGLDAAALPGQPMEAPVMLWDESSFPDIPGAVSANMTVKGQSEDPGSLLSLFRRLSDQRSKERSLLHGDFHAFSAGPGLFSYIRHWDQNERFLVVLNFGDVGLSAGLQASDLPASASLPAKADLLLSTQPGREEGSPLELERLKLEPHEGLLLRFPYAA

SEQ ID NO: 81255 - protein, 630 aa, Homo sapiens
  Payload ID: 16192
  Gene Symbol: SLC3A2
  Gene Name: solute carrier family 3 (amino acid transporter heavy chain), member 2
  Uniprot ID: P08195
  ENSP ID: ENSP00000367122
MELQPPEASIAVVSIPRQLPGSHSEAGVQGLSAGDDSELGSHCVAQTGLELLASGDPLPSASQNAEMIETGSDCVTQAGLQLLASSDPPALASKNAEVTGTMSQDTEVDMKEVELNELEPEKQPMNAASGAAMSLAGAEKNGLVKIKVAEDEAEAAAAAKFTGLSKEELLKVAGSPGWVRTRWALLLLFWLGWLGMLAGAVVIIVRAPRCRELPAQKWWHTGALYRIGDLQAFQGHGAGNLAGLKGRLDYLSSLKVKGLVLGPIHKNQKDDVAQTDLLQIDPNFGSKEDFDSLLQSAKKKSIRVILDLTPNYRGENSWFSTQVDTVATKVKDALEFWLQAGVDGFQVRDIENLKDASSFLAEWQNITKGFSEDRLLIAGTNSSDLQQILSLLESNKDLLLTSSYLSDSGSTGEHTKSLVTQYLNATGNRWCSWSLSQARLLTSFLPAQLLRLYQLMLFTLPGTPVFSYGDEIGLDAAALPGQPMEAPVMLWDESSFPDIPGAVSANMTVKGQSEDPGSLLSLFRRLSDQRSKERSLLHGDFHAFSAGPGLFSYIRHWDQNERFLVVLNFGDVGLSAGLQASDLPASASLPAKADLLLSTQPGREEGSPLELERLKLEPHEGLLLRFPYAA

SEQ ID NO: 81256 - protein, 631 aa, Homo sapiens
  Payload ID: 16192
  Gene Symbol: SLC3A2
  Gene Name: solute carrier family 3 (amino acid transporter heavy chain), member 2
  ENSP ID: ENSP00000367123
MELQPPEASIAVVSIPRQLPGSHSEAGVQGLSAGDDSETGSDCVTQAGLQLLASSDPPALASKNAEVTVETGFHHVSQADIEFLTSIDPTASASGSAGITGTMSQDTEVDMKEVELNELEPEKQPMNAASGAAMSLAGAEKNGLVKIKVAEDEAEAAAAAKFTGLSKEELLKVAGSPGWVRTRWALLLLFWLGWLGMLAGAVVIIVRAPRCRELPAQKWWHTGALYRIGDLQAFQGHGAGNLAGLKGRLDYLSSLKVKGLVLGPIHKNQKDDVAQTDLLQIDPNFGSKEDFDSLLQSAKKKSIRVILDLTPNYRGENSWFSTQVDTVATKVKDALEFWLQAGVDGFQVRDIENLKDASSFLAEWQNITKGFSEDRLLIAGTNSSDLQQILSLLESNKDLLLTSSYLSDSGSTGEHTKSLVTQYLNATGNRWCSWSLSQARLLTSFLPAQLLRLYQLMLFTLPGTPVFSYGDEIGLDAAALPGQPMEAPVMLWDESSFPDIPGAVSANMTVKGQSEDPGSLLSLFRRLSDQRSKERSLLHGDFHAFSAGPGLFSYIRHWDQNERFLVVLNFGDVGLSAGLQASDLPASASLPAKADLLLSTQPGREEGSPLELERLKLEPHEGLLLRFPYAA

SEQ ID NO: 81257 - protein, 145 aa, Homo sapiens
  Payload ID: 16192
  Gene Symbol: SLC3A2
  Gene Name: solute carrier family 3 (amino acid transporter heavy chain), member 2
  ENSP ID: ENSP00000438032
MSQDTEVDMKEVELNELEPEKQPMNAASGAAMSLAGAEKNGLVKIKVAEDEAEAAAAAKFTGLSKEELLKVAGSPGWVRTRWALLLLFWLGWLGMLAGLKGRLDYLSSLKVKGLVLGPIHKNQKDDVAQTDLLQIDPNFGSKEDF

SEQ ID NO: 81258 - protein, 67 aa, Homo sapiens
  Payload ID: 16192
  Gene Symbol: SLC3A2
  Gene Name: solute carrier family 3 (amino acid transporter heavy chain), member 2
  ENSP ID: ENSP00000438353
MLFTLPGTPVFSYGDEIGLDAAALPGQPMEAPVMLWDESSFPDIPGAVSANMTVKGQSEDPGSLLSL

SEQ ID NO: 81259 - protein, 247 aa, Homo sapiens
  Payload ID: 16192
  Gene Symbol: SLC3A2
  Gene Name: solute carrier family 3 (amino acid transporter heavy chain), member 2
  ENSP ID: ENSP00000440001
  MOD_RES (1)..(1): Any amino acid
XSQNAEMIETGSDCVTQAGLQLLASSDPPALASKNAEVTETGFHHVSQADIEFLTSIDPTASASGSAGITGTMSQDTEVDMKEVELNELEPEKQPMNAASGAAMSLAGAEKNGLVKIKVAEDEAEAAAAAKFTGLSKEELLKVAGSPGWVRTRWALLLLFWLGWLGMLAGAVVIIVRAPRCRELPAQKWWHTGALYRIGDLQAFQGHGAGNLAGLKGRLDYLSSLKVKGLVLGPIHKNQKDDVAQTD

SEQ ID NO: 81260 - protein, 122 aa, Homo sapiens
  Payload ID: 16192
  Gene Symbol: SLC3A2
  Gene Name: solute carrier family 3 (amino acid transporter heavy chain), member 2
  ENSP ID: ENSP00000440819
  MOD_RES (1)..(1): Any amino acid
XLLIAGTNSSDLQQILSLLESNKDLLLTSSYLSDSGSTGEHTKSLVTQYLNATGNRWCSWSLSQARLLTSFLPAQLLRLYQLMLFTLPGTPVFSYGDEIGLDAAALPGQPHEGLLLRFPYAA

SEQ ID NO: 81261 - protein, 135 aa, Homo sapiens
  Payload ID: 16192
  Gene Symbol: SLC3A2
  Gene Name: solute carrier family 3 (amino acid transporter heavy chain), member 2
  ENSP ID: ENSP00000442135
MSQDTEVDMKEVELNELEPEKQPMNAASGAAMSLAGAEKNGLVKIKVAEDEAEAAAAAKFTGLSKEELLKVAGSPGWVRTRWALLLLFWLGWLGMLAGAVVIIVRAPRCRELPAQKWWHTGALYRIGDLQAFQGH

SEQ ID NO: 81262 - protein, 599 aa, Homo sapiens
  Payload ID: 16192
  Gene Symbol: SLC3A2
  Gene Name: solute carrier family 3 (amino acid transporter heavy chain), member 2
  ENSP ID: ENSP00000444236
MELQPPEASIAVVSIPRQLPGSHSEAGVQGLSAGDDSETGSDCVTQAGLQLLASSDPPALASKNAEVTGTMSQDTEVDMKEVELNELEPEKQPMNAASGAAMSLAGAEKNGLVKIKVAEDEAEAAAAAKFTGLSKEELLKVAGSPGWVRTRWALLLLFWLGWLGMLAGAVVIIVRAPRCRELPAQKWWHTGALYRIGDLQAFQGHGAGNLAGLKGRLDYLSSLKVKGLVLGPIHKNQKDDVAQTDLLQIDPNFGSKEDFDSLLQSAKKKSIRVILDLTPNYRGENSWFSTQVDTVATKVKDALEFWLQAGVDGFQVRDIENLKDASSFLAEWQNITKGFSEDRLLIAGTNSSDLQQILSLLESNKDLLLTSSYLSDSGSTGEHTKSLVTQYLNATGNRWCSWSLSQARLLTSFLPAQLLRLYQLMLFTLPGTPVFSYGDEIGLDAAALPGQPMEAPVMLWDESSFPDIPGAVSANMTVKGQSEDPGSLLSLFRRLSDQRSKERSLLHGDFHAFSAGPGLFSYIRHWDQNERFLVVLNFGDVGLSAGLQASDLPASASLPAKADLLLSTQPGREEGSPLELERLKLEPHEGLLLRFPYAA

SEQ ID NO: 81263 - protein, 47 aa, Homo sapiens
  Payload ID: 16192
  Gene Symbol: SLC3A2
  Gene Name: solute carrier family 3 (amino acid transporter heavy chain), member 2
  ENSP ID: ENSP00000444250
MSQDTEVDMKEAAAAAKFTGLSKEELLKVAGSPGWVRTRWALLLLFW

SEQ ID NO: 81264 - protein, 175 aa, Homo sapiens
  Payload ID: 16192
  Gene Symbol: SLC3A2
  Gene Name: solute carrier family 3 (amino acid transporter heavy chain), member 2
  ENSP ID: ENSP00000444439
MLFTLPGTPVFSYGDEIGLDAAALPGQPMEAPVMLWDESSFPDIPGAVSANMTVKGQSEDPGSLLSLFRRLSDQRSKERSLLHGDFHAFSAGPGLFSYIRHWDQNERFLVVLNFGDVGLSAGLQASDLPASASLPAKADLLLSTQPGREEGSPLELERLKLEPHEGLLLRFPYAA

SEQ ID NO: 81265 - protein, 24 aa, Homo sapiens
  Payload ID: 16192
  Gene Symbol: SLC3A2
  Gene Name: solute carrier family 3 (amino acid transporter heavy chain), member 2
  ENSP ID: ENSP00000445858
FSTQVDTVATKVKASGNWERGDLD

SEQ ID NO: 81266 - protein, 507 aa, Homo sapiens
  Payload ID: 16193
  Gene Symbol: SLC30A1
  Gene Name: solute carrier family 30 (zinc transporter), member 1
  Uniprot ID: Q9Y6M5
  ENSP ID: ENSP00000355968
MGCWGRNRGRLLCMLALTFMFMVLEVVVSRVTSSLAMLSDSFHMLSDVLALVVALVAERFARRTHATQKNTFGWIRAEVMGALVNAIFLTGLCFAILLEAIERFIEPHEMQQPLVVLGVGVAGLLVNVLGLCLFHHHSGFSQDSGHGHSHGGHGHGHGLPKGPRVKSTRPGSSDINVAPGEQGPDQEETNTLVANTSNSNGLKLDPADPENPRSGDTVEVQVNGNLVREPDHMELEEDRAGQLNMRGVFLHVLGDALGSVIVVVNALVFYFSWKGCSEGDFCVNPCFPDPCKAFVEIINSTHASVYEAGPCWVLYLDPTLCVVMVCILLYTTYPLLKESALILLQTVPKQIDIRNLIKELRNVEGVEEVHELHVWQLAGSRIIATAHIKCEDPTSYMEVAKTIKDVFHNHGIHATTIQPEFASVGSKSSVVPCELACRTQCALKQCCGTLPQAPSGKDAEKTPAVSISCLELSNNLEKKPRRTKAENIPAVVIEIKNMPNKQPESSL

SEQ ID NO: 81267 - protein, 372 aa, Homo sapiens
  Payload ID: 16194
  Gene Symbol: SLC30A2
  Gene Name: solute carrier family 30 (zinc transporter), member 2
  Uniprot ID: Q9BRI3
  ENSP ID: ENSP00000363394
MEAKEKQHLLDARPAIRSYTGSLWQEGAGWIPLPRPGLDLQAIELAAQSNHHCHAQKGPDSHCDPKKGKAQRQLYVASAICLLFMIGEVVGGYLAHSLAVMTDAAHLLTDFASMLISLFSLWMSSRPATKTMNFGWQRAEILGALVSVLSIWVVTGVLVYLAVERLISGDYEIDGGTMLITSGCAVAVNIIMGLTLHQSGHGHSHGTTNQQEENPSVRAAFIHVIGDFMQSMGVLVAAYILYFKPEYKYVDPICTFVFSILVLGTTLTILRDVILVLMEGTPKGVDFTAVRDLLLSVEGVEALHSLHIWALTVAQPVLSVHIAIAQNTDAQAVLKTASSRLQGKFHFHTVTIQIEDYSEDMKDCQACQGPSD

SEQ ID NO: 81268 - protein, 323 aa, Homo sapiens
  Payload ID: 16194
  Gene Symbol: SLC30A2
  Gene Name: solute carrier family 30 (zinc transporter), member 2
  Uniprot ID: Q9BRI3
  ENSP ID: ENSP00000363396
MEAKEKQHLLDARPAIRSYTGSLWQEGAGWIPLPRPGLDLQAIELAAQSNHHCHAQKGPDSHCDPKKGKAQRQLYVASAICLLFMIGEVVEILGALVSVLSIWVVTGVLVYLAVERLISGDYEIDGGTMLITSGCAVAVNIIMGLTLHQSGHGHSHGTTNQQEENPSVRAAFIHVIGDFMQSMGVLVAAYILYFKPEYKYVDPICTFVFSILVLGTTLTILRDVILVLMEGTPKGVDFTAVRDLLLSVEGVEALHSLHIWALTVAQPVLSVHIAIAQNTDAQAVLKTASSRLQGKFHFHTVTIQIEDYSEDMKDCQACQGPSD

SEQ ID NO: 81269 - protein, 388 aa, Homo sapiens
  Payload ID: 16195
  Gene Symbol: SLC30A3
  Gene Name: solute carrier family 30 (zinc transporter), member 3
  Uniprot ID: Q99726
  ENSP ID: ENSP00000233535
MEPSPAAGGLETTRLVSPRDRGGAGGSLRLKSLFTEPSEPLPEESKPVEMPFHHCHRDPLPPPGLTPERLHARRQLYAACAVCFVFMAGEVVGGYLAHSLAIMTDAAHLLADVGSMMGSLFSLWLSTRPATRTMTFGWHRSETLGALASVVSLWMVTGILLYLAFVRLLHSDYHIEGGAMLLTASIAVCANLLMAFVLHQAGPPHSHGSRGAEYAPLEEGPEEPLPLGNTSVRAAFVHVLGDLLQSFGVLAASILIYFKPQYKAADPISTFLFSICALGSTAPTLRDVLRILMEGTPRNVGFEPVRDTLLSVPGVRATHELHLWALTLTYHVASAHLAIDSTADPEAVLAEASSRLYSRFGFSSCTLQVEQYQPEMAQCLRCQEPPQA

SEQ ID NO: 81270 - protein, 302 aa, Homo sapiens
  Payload ID: 16195
  Gene Symbol: SLC30A3
  Gene Name: solute carrier family 30 (zinc transporter), member 3
  ENSP ID: ENSP00000388219
  MOD_RES (1)..(1): Any amino acid
XTRLVSPRDRGGAGGSLRLKSLFTEPSEPLPEESKPVEMPFHHCHRDPLPPPGLTPERLHARRQLYAACAVCFVFMAGEVVGGYLAHSLAIMTDAAHLLADVGSMMGSLFSLWLSTRPATRTMTFGWHRSEWPLCCTRLGPPTATGLGEQSMHRWRRGLKSPCPWGTPASGRHLCTCWGTSCRALGYWLPPSSSTSSLNTRQPTPSAPSSSPSVPLDPPLPPSETFFESSWKVPPAMWGSNLCGIRCCRCQESGQPMSCTCGPLRSLTMLPLHTWPSTPPLTLKPSWLKPHPGSTPGLDSPA

SEQ ID NO: 81271 - protein, 98 aa, Homo sapiens
  Payload ID: 16195
  Gene Symbol: SLC30A3
  Gene Name: solute carrier family 30 (zinc transporter), member 3
  ENSP ID: ENSP00000392673
MPFHHCHRDPLPPPGLTPERLHARRQLYAACAVCFVFMAGEVVGGYLAHSLAIMTDAAHLLADVGSMMGSLFSLWLSTRPATRTMTFGWHRSETLGAL

SEQ ID NO: 81272 - protein, 230 aa, Homo sapiens
  Payload ID: 16195
  Gene Symbol: SLC30A3
  Gene Name: solute carrier family 30 (zinc transporter), member 3
  ENSP ID: ENSP00000393545
MAQLTPGNTMGLLTVADESLFTEPSEPLPEESKPVEMPFHHCHRDPLPPPGLTPERLHARRQLYAACAVCFVFMAGEVVGGYLAHSLAIMTDAAHLLADVGSMMGSLFSLWLSTRPATRTMTFGWHRSETLGALASVVSLWMVTGILLYLAFVRLLHSDYHIEGGAMLLTASIAVCANLLMAFVLHQAGPPHSHGSRGAEYAPLEEGPEEPLPLGNTSVRAAFVHVLGDL

SEQ ID NO: 81273 - protein, 110 aa, Homo sapiens
  Payload ID: 16195
  Gene Symbol: SLC30A3
  Gene Name: solute carrier family 30 (zinc transporter), member 3
  ENSP ID: ENSP00000403912
MPFHHCHRDPLPPPGLTPERLHARRQLYAACAVCFVFMAGEVVGGYLAHSLAIMTDAAHLLADVGSMMGSLFSLWLSTRPATRTMTFGWHRSETLGALASVVSLWMVTGI

SEQ ID NO: 81274 - protein, 170 aa, Homo sapiens
  Payload ID: 16195
  Gene Symbol: SLC30A3
  Gene Name: solute carrier family 30 (zinc transporter), member 3
  ENSP ID: ENSP00000403959
MHRVVVVGRSLFTEPSEPLPEESKPVEMPFHHCHRDPLPPPGLTPERLHARRQLYAACAVCFVFMAGEVVGGYLAHSLAIMTDAAHLLADVGSMMGSLFSLWLSTRPATRTMTFGWHRSETLGALASVVSLWMVTGILLYLAFVRLLHSDYHIEGGAMLLTASIAVCANL

SEQ ID NO: 81275 - protein, 240 aa, Homo sapiens
  Payload ID: 16195
  Gene Symbol: SLC30A3
  Gene Name: solute carrier family 30 (zinc transporter), member 3
  ENSP ID: ENSP00000414320
MPFHHCHRDPLPPPGLTPERLHARRQLYAACAVCFVFMAGEVVGGYLAHSLAIMTDAAHLLADVGSMMGSLFSLWLSTRPATRTMTFGWHRSETLGALASVVSLWMVTGILLYLAFVRLLHSDYHIEGGAMLLTASIAVCANLLMAFVLHQAGPPHSHGSRGAEYAPLEEGPEEPLPLGNTSVRAAFVHVLGDLLQSFGVLAASILIYFKPQYKAADPISTFLFSICALGSTAPTLRDVL

SEQ ID NO: 81276 - protein, 429 aa, Homo sapiens
  Payload ID: 16196
  Gene Symbol: SLC30A4
  Gene Name: solute carrier family 30 (zinc transporter), member 4
  Uniprot ID: O14863
  ENSP ID: ENSP00000261867
MAGSGAWKRLKSMLRKDDAPLFLNDTSAFDFSDEAGDEGLSRFNKLRVVVADDGSEAPERPVNGAHPTLQADDDSLLDQDLPLTNSQLSLKVDSCDNCSKQREILKQRKVKARLTIAAVLYLLFMIGELVGGYIANSLAIMTDALHMLTDLSAIILTLLALWLSSKSPTKRFTFGFHRLEVLSAMISVLLVYILMGFLLYEAVQRTIHMNYEINGDIMLITAAVGVAVNVIMGFLLNQSGHRHSHSHSLPSNSPTRGSGCERNHGQDSLAVRAAFVHALGDLVQSVGVLIAAYIIRFKPEYKIADPICTYVFSLLVAFTTFRIIWDTVVIILEGVPSHLNVDYIKEALMKIEDVYSVEDLNIWSLTSGKSTAIVHIQLIPGSSSKWEEVQSKANHLLLNTFGMYRCTIQLQSYRQEVDRTCANCQSSSP

SEQ ID NO: 81277 - protein, 118 aa, Homo sapiens
  Payload ID: 16197
  Gene Symbol: SLC30A5
  Gene Name: solute carrier family 30 (zinc transporter), member 5
  Uniprot ID: Q8TAD4
  ENSP ID: ENSP00000370241
MEEKYGGDVLAGPGGGGGLGPVDVPSARLTKYIVLLCFTKFLKAVGLFESYDLLKAVHIVQFIFILKLGTAFFMVLFQKPFSSGKTITKHQIIGSLKIPGRKEFKDKKLNDPRKLVGN

SEQ ID NO: 81278 - protein, 765 aa, Homo sapiens
  Payload ID: 16197
  Gene Symbol: SLC30A5
  Gene Name: solute carrier family 30 (zinc transporter), member 5
  Uniprot ID: Q8TAD4
  ENSP ID: ENSP00000379836
MEEKYGGDVLAGPGGGGGLGPVDVPSARLTKYIVLLCFTKFLKAVGLFESYDLLKAVHIVQFIFILKLGTAFFMVLFQKPFSSGKTITKHQWIKIFKHAVAGCIISLLWFFGLTLCGPLRTLLLFEHSDIVVISLLSVLFTSSGGGPAKTRGAAFFIIAVICLLLFDNDDLMAKMAEHPEGHHDSALTHMLYTAIAFLGVADHKGGVLLLVLALCCKVGFHTASRKLSVDVGGAKRLQALSHLVSVLLLCPWVIVLSVTTESKVESWFSLIMPFATVIFFVMILDFYVDSICSVKMEVSKCARYGSFPIFISALLFGNFWTHPITDQLRAMNKAAHQESTEHVLSGGVVVSAIFFILSANILSSPSKRGQKGTLIGYSPEGTPLYNFMGDAFQHSSQSIPRFIKESLKQILEESDSRQIFYFLCLNLLFTFVELFYGVLTNSLGLISDGFHMLFDCSALVMGLFAALMSRWKATRIFSYGYGRIEILSGFINGLFLIVIAFFVFMESVARLIDPPELDTHMLTPVSVGGLIVNLIGICAFSHAHSHAHGASQGSCHSSDHSHSHHMHGHSDHGHGHSHGSAGGGMNANMRGVFLHVLADTLGSIGVIVSTVLIEQFGWFIADPLCSLFIAILIFLSVVPLIKDACQVLLLRLPPEYEKELHIALEKIQKIEGLISYRDPHFWRHSASIVAGTIHIQVTSDVLEQRIVQQVTGILKDAGVNNLTIQVEKEAYFQHMSGLSTGFHDVLAMTKQMESMKYCKDGTYIM

SEQ ID NO: 81279 - protein, 77 aa, Homo sapiens
  Payload ID: 16197
  Gene Symbol: SLC30A5
  Gene Name: solute carrier family 30 (zinc transporter), member 5
  Uniprot ID: Q8TAD4
  ENSP ID: ENSP00000421251
MEEKYGGDVLAGPGGGGGLGPVDVPSARTAFFMVLFQKPFSSGKTITKHQIIGSLKIPGRKEFKDKKLNDPRKLVGN

SEQ ID NO: 81280 - protein, 84 aa, Homo sapiens
  Payload ID: 16197
  Gene Symbol: SLC30A5
  Gene Name: solute carrier family 30 (zinc transporter), member 5
  ENSP ID: ENSP00000423078
  MOD_RES (1)..(1): Any amino acid
XLIKDACQVLLLRLPPEYEKELHIALEKVTGILKDAGVNNLTIQVEKEAYFQHMSGLSTGFHDVLAMTKQMESMKYCKDGTYIM

SEQ ID NO: 81281 - protein, 71 aa, Homo sapiens
  Payload ID: 16197
  Gene Symbol: SLC30A5
  Gene Name: solute carrier family 30 (zinc transporter), member 5
  ENSP ID: ENSP00000426751
MEEKYGGDVLAGPGGGGGLGPVDVPSARTAFFMVLFQKPFSSGKTITKHQWIKIFKHAVAGCIISLLWFFG

SEQ ID NO: 81282 - protein, 65 aa, Homo sapiens
  Payload ID: 16197
  Gene Symbol: SLC30A5
  Gene Name: solute carrier family 30 (zinc transporter), member 5
  ENSP ID: ENSP00000427111
  MOD_RES (1)..(1): Any amino acid
XLFAALMSRWKATRIFSYGYGRIEILSGFINGLFLIVIAFFVFMESVARLIDPPELDTHMLTPCP

SEQ ID NO: 81283 - protein, 360 aa, Homo sapiens [sequence omitted]

SEQ ID NO: 81284 - protein, 461 aa, Homo sapiens
  Payload ID: 16198
  Gene Symbol: SLC30A6
  Gene Name: solute carrier family 30 (zinc transporter), member 6
  Uniprot ID: Q6NXT4
  ENSP ID: ENSP00000282587
MGTIHLFRKPQRSFFGKLLREFRLVAADRRSWKILLFGVINLICTGFLLMWCSSTNSIALTAYTYLTIFDLFSLMTCLISYWVTLRKPSPVYSFGFERLEVLAVFASTVLAQLGALFILKESAERFLEQPEIHTGRLLVGTFVALCFNLFTMLSIRNKPFAYVSEAASTSWLQEHVADLSRSLCGIIPGLSSIFLPRMNPFVLIDLAGAFALCITYMLIEINNYFAVDTASAIAIALMTFGTMYPMSVYSGKVLLQTTPPHVIGQLDKLIREVSTLDGVLEVRNEHFWTLGFGSLAGSVHVRIRRDANEQMVLAHVTNRLYTLVSTLTVQIFKDDWIRPALLSGPVAANVLNFSDHHVIPMPLLKGTDDLNPVTSTPAKPSSPPPEFSFNTPGKNVNPVILLNTQTRPYGFGLNHGHTPYSSMLNQGLGVPGIGATQGLRTGFTNIPSRYGTNNRIGQPRP

SEQ ID NO: 81285 - protein, 432 aa, Homo sapiens
  Payload ID: 16198
  Gene Symbol: SLC30A6
  Gene Name: solute carrier family 30 (zinc transporter), member 6
  Uniprot ID: Q6NXT4
  ENSP ID: ENSP00000349563
MSWKILLFGVINLICTGFLLMWCSSTNSIALTAYTYLTIFDLFSLMTCLISYWVTLRKPSPVYSFGFERLEVLAVFASTVLAQLGALFILKESAERFLEQPEIHTGRLLVGTFVALCFNLFTMLSIRNKPFAYVSEAASTSWLQEHVADLSRSLCGIIPGLSSIFLPRMNPFVLIDLAGAFALCITYMLIEINNYFAVDTASAIAIALMTFGTMYPMSVYSGKVLLQTTPPHVIGQLDKLIREVSTLDGVLEVRNEHFWTLGFGSLAGSVHVRIRRDANEQMVLAHVTNRLYTLVSTLTVQIFKDDWIRPALLSGPVAANVLNFSDHHVIPMPLLKGTDDLNPVTSTPAKPSSPPPEFSFNTPGKNVNPVILLNTQTRPYGFGLNHGHTPYSSMLNQGLGVPGIGATQGLRTGFTNIPSRYGTNNRIGQPRP

SEQ ID NO: 81286 - protein, 501 aa, Homo sapiens
  Payload ID: 16198
  Gene Symbol: SLC30A6
  Gene Name: solute carrier family 30 (zinc transporter), member 6
  Uniprot ID: Q6NXT4
  ENSP ID: ENSP00000368648
MGTIHLFRKPQRSFFGKLLREFRLVAADRRSWKILLFGVINLICTGFLLMWCSSTNSIALTAYTYLTIFDLFRDGVSPFWLGWSQTPDLKWSTHLGLPKCWDNRRELPCLSNSLMTCLISYWVTLRKPSPVYSFGFERLEVLAVFASTVLAQLGALFILKESAERFLEQPEIHTGRLLVGTFVALCFNLFTMLSIRNKPFAYVSEAASTSWLQEHVADLSRSLCGIIPGLSSIFLPRMNPFVLIDLAGAFALCITYMLIEINNYFAVDTASAIAIALMTFGTMYPMSVYSGKVLLQTTPPHVIGQLDKLIREVSTLDGVLEVRNEHFWTLGFGSLAGSVHVRIRRDANEQMVLAHVTNRLYTLVSTLTVQIFKDDWIRPALLSGPVAANVLNFSDHHVIPMPLLKGTDDLNPVTSTPAKPSSPPPEFSFNTPGKNVNPVILLNTQTRPYGFGLNHGHTPYSSMLNQGLGVPGIGATQGLRTGFTNIPSRYGTNNRIGQPRP

SEQ ID NO: 81287 - protein, 387 aa, Homo sapiens
  Payload ID: 16198
  Gene Symbol: SLC30A6
  Gene Name: solute carrier family 30 (zinc transporter), member 6
  ENSP ID: ENSP00000384041
MTCLISYWVTLRKPSPVYSFGFERLEVLAVFASTVLAQLGALFILKESAERFLEQPEIHTGRLLVGTFVALCFNLFTMLSIRNKPFAYVSEAASTSWLQEHVADLSRSLCGIIPGLSSIFLPRMNPFVLIDLAGAFALCITYMLIEINNYFAVDTASAIAIALMTFGTMYPMSVYSGKVLLQTTPPHVIGQLDKLIREVSTLDGVLEVRNEHFWTLGFGSLAGSVHVRIRRDANEQMVLAHVTNRLYTLVSTLTVQIFKDDWIRPALLSGPVAANVLNFSDHHVIPMPLLKGTDDLNPVTSTPAKPSSPPPEFSFNTPGKNVNPVILLNTQTRPYGFGLNHGHTPYSSMLNQGLGVPGIGATQGLRTGFTNIPSRYGTNNRIGQPRP

SEQ ID NO: 81288 - protein, 31 aa, Homo sapiens
  Payload ID: 16198
  Gene Symbol: SLC30A6
  Gene Name: solute carrier family 30 (zinc transporter), member 6
  ENSP ID: ENSP00000388013
MGTIHLFRKPQRSFFGKLLREFRLVAADRRV

SEQ ID NO: 81289 - protein, 178 aa, Homo sapiens
  Payload ID: 16198
  Gene Symbol: SLC30A6
  Gene Name: solute carrier family 30 (zinc transporter), member 6
  ENSP ID: ENSP00000393946
MSWKILLFGVINLICTGFLLMWCSSTNSIALTAYTYLTIFDLFSLMTCLISYWVTLRKPSPVYSFGFERLEVLAVFASTVLAQLGALFILKESAERFLEQPEIHTGRLLVGTFVALCFNLFTMLSIRNKPFAYVSEAASTSWLQEHVADLSRSLCGIIPGLSSIFLPRMNPFVLIDLA

SEQ ID NO: 81290 - protein, 122 aa, Homo sapiens
  Payload ID: 16198
  Gene Symbol: SLC30A6
  Gene Name: solute carrier family 30 (zinc transporter), member 6
  ENSP ID: ENSP00000396634
MGTIHLFRKPQRSFFGKLLREFRLVAADRRSWKILLFGVINLICTGFLLMWCSSTNSIALTAYTYLTIFDLFSLMTCLISYWVTLRKPSPVYSFGPAFLCMSCSVSQTTFLHQSEMMLLSRP

SEQ ID NO: 81291 - protein, 438 aa, Homo sapiens
  Payload ID: 16198
  Gene Symbol: SLC30A6
  Gene Name: solute carrier family 30 (zinc transporter), member 6
  Uniprot ID: Q6NXT4
  ENSP ID: ENSP00000399005
MGTIHLFRKPQRSFFGKLLREFRLVAADRRSWKILLFGVINLICTGFLLMWCSSTNSIALTAYTYLTIFDLFSLMTCLISYWVTLRKPSPVYSFGFERLEVLAVFASTVLAQLGALFILKESAERFLEQPEIHTGRLLVGTFVALCFNLFTMLSIRNKPFAYVSEAASTSWLQEHVADLSRSLCGIIPGLSSIFLPRMNPFVLIDLAGAFALCITYMLIEINNYFAVDTASAIAIALMTFGTMYPMSVYSGKVLLQTTPPHVIGQLDKLIREAGSVHVRIRRDANEQMVLAHVTNRLYTLVSTLTVQIFKDDWIRPALLSGPVAANVLNFSDHHVIPMPLLKGTDDLNPVTSTPAKPSSPPPEFSFNTPGKNVNPVILLNTQTRPYGFGLNHGHTPYSSMLNQGLGVPGIGATQGLRTGFTNIPSRYGTNNRIGQPRP

SEQ ID NO: 81292 - protein, 59 aa, Homo sapiens
  Payload ID: 16198
  Gene Symbol: SLC30A6
  Gene Name: solute carrier family 30 (zinc transporter), member 6
  ENSP ID: ENSP00000415790
MGTIHLFRKPQRSFFGKLLREFRLVAADRRSWKILLFGVINLICTGFLLMWCSSTNSIV

SEQ ID NO: 81293 - protein, 376 aa, Homo sapiens
  Payload ID: 16199
  Gene Symbol: SLC30A7
  Gene Name: solute carrier family 30 (zinc transporter), member 7
  Uniprot ID: Q8NEW0
  ENSP ID: ENSP00000350278
MLPLSIKDDEYKPPKFNLFGKISGWFRSILSDKTSRNLFFFLCLNLSFAFVELLYGIWSNCLGLISDSFHMFFDSTAILAGLAASVISKWRDNDAFSYGYVRAEVLAGFVNGLFLIFTAFFIFSEGVERALAPPDVHHERLLLVSILGFVVNLIGIFVFKHGGHGHSHGSGHGHSHSLFNGALDQAHGHVDHCHSHEVKHGAAHSHDHAHGHGHFHSHDGPSLKETTGPSRQILQGVFLHILADTLGSIGVIASAIMMQNFGLMIADPICSILIAILIVVSVIPLLRESVGILMQRTPPLLENSLPQCYQRVQQLQGVYSLQEQHFWTLCSDVYVGTLKLIVAPDADARWILSQTHNIFTQAGVRQLYVQIDFAAM

SEQ ID NO: 81294 - protein, 87 aa, Homo sapiens
  Payload ID: 16199
  Gene Symbol: SLC30A7
  Gene Name: solute carrier family 30 (zinc transporter), member 7
  ENSP ID: ENSP00000359129
  MOD_RES (1)..(1): Any amino acid
XVIPLLRESVGILMQRTPPLLENSLPQCYQRVQQLQGVYSLQEQHFWTLCSDVYVGTLKLIVAPDADARWILSQTHNIFTQETGRGK

SEQ ID NO: 81295 - protein, 376 aa, Homo sapiens; identical to SEQ ID NO: 81293
  Payload ID: 16199
  Gene Symbol: SLC30A7
  Gene Name: solute carrier family 30 (zinc transporter), member 7
  Uniprot ID: Q8NEW0
  ENSP ID: ENSP00000359130

SEQ ID NO: 81296 - protein, 320 aa, Homo sapiens
  Payload ID: 16200
  Gene Symbol: SLC30A8
  Gene Name: solute carrier family 30 (zinc transporter), member 8
  Uniprot ID: Q8IWU4
  ENSP ID: ENSP00000407505
MYHCHSGSKPTEKGANEYAYAKWKLCSASAICFIFMIAEVVGGHIAGSLAVVTDAAHLLIDLTSFLLSLFSLWLSSKPPSKRLTFGWHRAEILGALLSILCIWVVTGVLVYLACERLLYPDYQIQATVMIIVSSCAVAANIVLTVVLHQRCLGHNHKEVQANASVRAAFVHALGDLFQSISVLISALIIYFKPEYKIADPICTFIFSILVLASTITILKDFSILLMEGVPKSLNYSGVKELILAVDGVLSVHSLHIWSLTMNQVILSAHVATAASRDSQVVRREIAKALSKSFTMHSLTIQMESPVDQDPDCLFCEDPCD

SEQ ID NO: 81297 - protein, 369 aa, Homo sapiens
  Payload ID: 16200
  Gene Symbol: SLC30A8
  Gene Name: solute carrier family 30 (zinc transporter), member 8
  Uniprot ID: Q8IWU4
  ENSP ID: ENSP00000415011
MEFLERTYLVNDKAAKMYAFTLESVELQQKPVNKDQCPRERPEELESGGMYHCHSGSKPTEKGANEYAYAKWKLCSASAICFIFMIAEVVGGHIAGSLAVVTDAAHLLIDLTSFLLSLFSLWLSSKPPSKRLTFGWHRAEILGALLSILCIWVVTGVLVYLACERLLYPDYQIQATVMIIVSSCAVAANIVLTVVLHQRCLGHNHKEVQANASVRAAFVHALGDLFQSISVLISALIIYFKPEYKIADPICTFIFSILVLASTITILKDFSILLMEGVPKSLNYSGVKELILAVDGVLSVHSLHIWSLTMNQVILSAHVATAASRDSQVVRREIAKALSKSFTMHSLTIQMESPVDQDPDCLFCEDPCD

SEQ ID NO: 81298 - protein, 87 aa, Homo sapiens
  Payload ID: 16200
  Gene Symbol: SLC30A8
  Gene Name: solute carrier family 30 (zinc transporter), member 8
  ENSP ID: ENSP00000427760
MYHCHSGSKPTEKGANEYAYAKWKLCSASAICFIFMIAEVVGGHIAGSLAVVTDAAHLLIDLTSFLLSLFSLWLSSKPPSKRLTFGW

SEQ ID NO: 81299 - protein, 320 aa, Homo sapiens; identical to SEQ ID NO: 81296
  Payload ID: 16200
  Gene Symbol: SLC30A8
  Gene Name: solute carrier family 30 (zinc transporter), member 8
  Uniprot ID: Q8IWU4
  ENSP ID: ENSP00000428545

SEQ ID NO: 81300 - protein, 320 aa, Homo sapiens; identical to SEQ ID NO: 81296
  Payload ID: 16200
  Gene Symbol: SLC30A8
  Gene Name: solute carrier family 30 (zinc transporter), member 8
  Uniprot ID: Q8IWU4
  ENSP ID: ENSP00000431069

SEQ ID NO: 81301 - protein, 36 aa, Homo sapiens
  Payload ID: 16200
  Gene Symbol: SLC30A8
  Gene Name: solute carrier family 30 (zinc transporter), member 8
  ENSP ID: ENSP00000485167
MYHCHSGSKPTEKGANEYAYAKWKLCSASAICFIFM

SEQ ID NO: 81302 - protein, 52 aa, Homo sapiens
  Payload ID: 16200
  Gene Symbol: SLC30A8
  Gene Name: solute carrier family 30 (zinc transporter), member 8
  ENSP ID: ENSP00000485566
MYHCHSGSKPTEKGANEYAYAKWKLCSASAICFIFMIAEVVGGHIAGSLAVV

SEQ ID NO: 81303 - protein, 568 aa, Homo sapiens
  Payload ID: 16201
  Gene Symbol: SLC30A9
  Gene Name: solute carrier family 30 (zinc transporter), member 9
  Uniprot ID: Q6PML9
  ENSP ID: ENSP00000264451
MLPGLAAAAAHRCSWSSLCRLRLRCRAAACNPSDRQEWQNLVTFGSFSNMVPCSHPYIGTLSQVKLYSTNVQKEGQGSQTLRVEKVPSFETAEGIGTELKAPLKQEPLQVRVKAVLKKREYGSKYTQNNFITGVRAINEFCLKSSDLEQLRKIRRRSPHEDTESFTVYLRSDVEAKSLEVWGSPEALAREKKLRKEAEIEYRERLFRNQKILREYRDFLGNTKPRSRTASVFFKGPGKVVMVAICINGLNCFFKFLAWIYTGSASMFSEAIHSLSDTCNQGLLALGISKSVQTPDPSHPYGFSNMRYISSLISGVGIFMMGAGLSWYHGVMGLLHPQPIESLLWAYCILAGSLVSEGATLLVAVNELRRNARAKGMSFYKYVMESRDPSTNVILLEDTAAVLGVIIAATCMGLTSITGNPLYDSLGSLGVGTLLGMVSAFLIYTNTEALLGRSIQPEQVQRLTELLENDPSVRAIHDVKATDLGLGKVRFKAEVDFDGRVVTRSYLEKQDFDQMLQEIQEVKTPEELETFMLKHGENIIDTLGAEVDRLEKELKKRNPEVRHVDLEIL

SEQ ID NO: 81304 - protein, 119 aa, Homo sapiens
  Payload ID: 16201
  Gene Symbol: SLC30A9
  Gene Name: solute carrier family 30 (zinc transporter), member 9
  ENSP ID: ENSP00000423529
MLPGLAAAAAHRCSWSSLCRLRLRCRAAACNPSDRQEWQNLVTFGSFSNMVPCSHPYIGTLSQVKLYSTNVQKEGQGSQTLRVEKVPSFETAEGIGTELKAPLKQEPLQVRAQERNNGK

SEQ ID NO: 81305 - protein, 223 aa, Homo sapiens
  Payload ID: 16202
  Gene Symbol: SLC30A10
  Gene Name: solute carrier family 30, member 10
  Uniprot ID: Q6XR72
  ENSP ID: ENSP00000349018
MGRYSGKTCRLLFMLVLTVAFFVAELVSGYLGNSIALLSDSFNMLSDLISLCVGLSAGYIARRPTRGFSATYGYARAEVVGALSNAVFLTALCFTIFVEAVLRLARPERIDDPELVLIVGVLGLLVNVVGLLIFQDCAAWFACCLRGRSRRLQQRQQLAEGCVPGAFGGPQGAEDPRRAADPTAPGSDSAVTLRGTSVERKREKGATVFANVAELIHNTRFLL

SEQ ID NO: 81306 - protein, 485 aa, Homo sapiens
  Payload ID: 16202
  Gene Symbol: SLC30A10
  Gene Name: solute carrier family 30, member 10
  Uniprot ID: Q6XR72
  ENSP ID: ENSP00000355893
MGRYSGKTCRLLFMLVLTVAFFVAELVSGYLGNSIALLSDSFNMLSDLISLCVGLSAGYIARRPTRGFSATYGYARAEVVGALSNAVFLTALCFTIFVEAVLRLARPERIDDPELVLIVGVLGLLVNVVGLLIFQDCAAWFACCLRGRSRRLQQRQQLAEGCVPGAFGGPQGAEDPRRAADPTAPGSDSAVTLRGTSVERKREKGATVFANVAGDSFNTQNEPEDMMKKEKKSEALNIRGVLLHVMGDALGSVVVVITAIIFYVLPLKSEDPCNWQCYIDPSLTVLMVIIILSSAFPLIKETAAILLQMVPKGVNMEELMSKLSAVPGISSVHEVHIWELVSGKIIATLHIKYPKDRGYQDASTKIREIFHHAGIHNVTIQFENVDLKEPLEQKDLLLLCNSPCISKGCAKQLCCPPGALPLAHVNGCAEHNGGPSLDTYGSDGLSRRDAREVAIEVSLDSCLSDHGQSLNKTQEDQCYVNRTHF

SEQ ID NO: 81307 - protein, 190 aa, Homo sapiens
  Payload ID: 16203
  Gene Symbol: SLC31A1
  Gene Name: solute carrier family 31 (copper transporter), member 1
  Uniprot ID: O15431
  ENSP ID: ENSP00000363329
MDHSHHMGMSYMDSNSTMQPSHHHPTTSASHSHGGGDSSMMMMPMTFYFGFKNVELLFSGLVINTAGEMAGAFVAVFLLAMFYEGLKIARESLLRKSQVSIRYNSMPVPGPNGTILMETHKTVGQQMLSFPHLLQTVLHIIQVVISYFLMLIFMTYNGYLCIAVAAGAGTGYFLFSWKKAVVVDITEHCH

SEQ ID NO: 81308 - protein, 143 aa, Homo sapiens
  Payload ID: 16204
  Gene Symbol: SLC31A2
  Gene Name: solute carrier family 31 (copper transporter), member 2
  Uniprot ID: O15432
  ENSP ID: ENSP00000259392
MAMHFIFSDTAVLLFDFWSVHSPAGMALSVLVLLLLAVLYEGIKVGKAKLLNQVLVNLPTSISQQTIAETDGDSAGSDSFPVGRTHHRWYLCHFGQSLIHVIQVVIGYFIMLAVMSYNTWIFLGVVLGSAVGYYLAYPLLSTA

SEQ ID NO: 81309 - protein, 73 aa, Homo sapiens
  Payload ID: 16204
  Gene Symbol: SLC31A2
  Gene Name: solute carrier family 31 (copper transporter), member 2
  ENSP ID: ENSP00000363337
MAMHFIFSDTAVLLFDFWSVHSPAGQETKAQRQEERLVQGHTAWPFRCWCSCFWLYCMKASRLAKPSCSTRYW

SEQ ID NO: 81310 - protein, 525 aa, Homo sapiens
  Payload ID: 16205
  Gene Symbol: SLC32A1
  Gene Name: solute carrier family 32 (GABA vesicular transporter), member 1
  Uniprot ID: Q9H598
  ENSP ID: ENSP00000217420
MATLLRSKLSNVATSVSNKSQAKMSGMFARMGFQAATDEEAVGFAHCDDLDFEHRQGLQMDILKAEGEPCGDEGAEAPVEGDIHYQRGSGAPLPPSGSKDQVGGGGEFGGHDKPKITAWEAGWNVTNAIQGMFVLGLPYAILHGGYLGLFLIIFAAVVCCYTGKILIACLYEENEDGEVVRVRDSYVAIANACCAPRFPTLGGRVVNVAQIIELVMTCILYVVVSGNLMYNSFPGLPVSQKSWSIIATAVLLPCAFLKNLKAVSKFSLLCTLAHFVINILVIAYCLSRARDWAWEKVKFYIDVKKFPISIGIIVFSYTSQIFLPSLEGNMQQPSEFHCMMNWTHIAACVLKGLFALVAYLTWADETKEVITDNLPGSIRAVVNIFLVAKALLSYPLPFFAAVEVLEKSLFQEGSRAFFPACYSGDGRLKSWGLTLRCALVVFTLLMAIYVPHFALLMGLTGSLTGAGLCFLLPSLFHLRLLWRKLLWHQVFFDVAIFVIGGICSVSGFVHSLEGLIEAYRTNAED

SEQ ID NO: 81311 - protein, 549 aa, Homo sapiens
  Payload ID: 16206
  Gene Symbol: SLC33A1
  Gene Name: solute carrier family 33 (acetyl-CoA transporter), member 1
  Uniprot ID: O00400
  ENSP ID: ENSP00000352456
MSPTISHKDSSRQRRPGNFSHSLDMKSGPLPPGGWDDSHLDSAGREGDREALLGDTGTGDFLKAPQSFRAELSSILLLLFLYVLQGIPLGLAGSIPLILQSKNVSYTDQAFFSFVFWPFSLKLLWAPLVDAVYVKNFGRRKSWLVPTQYILGLFMIYLSTQVDRLLGNTDDRTPDVIALTVAFFLFEFLAATQDIAVDGWALTMLSRENVGYASTCNSVGQTAGYFLGNVLFLALESADFCNKYLRFQPQPRGIVTLSDFLFFWGTVFLITTTLVALLKKENEVSVVKEETQGITDTYKLLFAIIKMPAVLTFCLLILTAKIGFSAADAVTGLKLVEEGVPKEHLALLAVPMVPLQIILPLIISKYTAGPQPLNTFYKAMPYRLLLGLEYALLVWWTPKVEHQGGFPIYYYIVVLLSYALHQVTVYSMYVSIMAFNAKVSDPLIGGTYMTLLNTVSNLGGNWPSTVALWLVDPLTVKECVGASNQNCRTPDAVELCKKLGGSCVTALDGYYVESIICVFIGFGWWFFLGPKFKKLQDEGSSSWKCKRNN

SEQ ID NO: 81312 - protein, 549 aa, Homo sapiens; identical to SEQ ID NO: 81311
  Payload ID: 16206
  Gene Symbol: SLC33A1
  Gene Name: solute carrier family 33 (acetyl-CoA transporter), member 1
  Uniprot ID: O00400
  ENSP ID: ENSP00000376587

SEQ ID NO: 81313 - protein, 109 aa, Homo sapiens
  Payload ID: 16206
  Gene Symbol: SLC33A1
  Gene Name: solute carrier family 33 (acetyl-CoA transporter), member 1
  ENSP ID: ENSP00000418847
  MOD_RES (1)..(1): Any amino acid
XGNVLFLALESADFCNKYLRFQPQPRGIVTLSDWFFSSRCCNRTEIGRRGSTQRTFSLIGSSNGSFADNTASDYQQIHCRSPAIKHILQSHALQIIAWVRICPTGLVDS

SEQ ID NO: 81314 - protein, 269 aa, Homo sapiens
  Payload ID: 16206
  Gene Symbol: SLC33A1
  Gene Name: solute carrier family 33 (acetyl-CoA transporter), member 1
  ENSP ID: ENSP00000419066
  MOD_RES (1)..(1): Any amino acid
XDDRTPDVIALTVAFFLFEFLAATQDIAVDGWALTMLSRENIGFSAADAVTGLKLVEEGVPKEHLALLAVPMVPLQIILPLIISKYTAGPQPLNTFYKAMPYRLLLGLEYALLVWWTPKVEHQGGFPIYYYIVVLLSYALHQVTVYSMYVSIMAFNAKVSDPLIGGTYMTLLNTVSNLGGNWPSTVALWLVDPLTVKECVGASNQNCRTPDAVELCKKLGGSCVTALDGYYVESIICVFIGFGWWFFLGPKFKKLQDEGSSSWKCKRNN

SEQ ID NO: 81315 - protein, 185 aa, Homo sapiens
  Payload ID: 16206
  Gene Symbol: SLC33A1
  Gene Name: solute carrier family 33 (acetyl-CoA transporter), member 1
  ENSP ID: ENSP00000419165
WGTVFLITTTLVALLKKENEVSVVKEETQGITDTYKLLFAIIKMPAVLTFCLLILTAKVTVYSMYVSIMAFNAKVSDPLIGGTYMTLLNTVSNLGGNWPSTVALWLVDPLTVKECVGASNQNCRTPDAVELCKKLGGSCVTALDGYYVESIICVFIGFGWWFFLGPKFKKLQDEGSSSWKCKRNN

SEQ ID NO: 81316 - protein, 639 aa, Homo sapiens
  Payload ID: 16207
  Gene Symbol: SLC34A1
  Gene Name: solute carrier family 34 (type II sodium/phosphate cotransporter), member 1
  Uniprot ID: Q06495
  ENSP ID: ENSP00000321424
MLSYGERLGSPAVSPLPVRGGHVMRGTAFAYVPSPQVLHRIPGTSAYAFPSLGPVALAEHTCPCGEVLERHEPLPAKLALEEEQKPESRLVPKLRQAGAMLLKVPLMLTFLYLFVCSLDMLSSAFQLAGGKVAGDIFKDNAILSNPVAGLVVGILVTVLVQSSSTSTSIIVSMVSSGLLEVSSAIPIIMGSNIGTSVTNTIVALMQAGDRTDFRRAFAGATVHDCFNWLSVLVLLPLEAATGYLHHITRLVVASFNIHGGRDAPDLLKIITEPFTKLIIQLDESVITSIATGDESLRNHSLIQIWCHPDSLQAPTSMSRAEANSSQTLGNATMEKCNHIFVDTGLPDLAVGLILLAGSLVLLCTCLILLVKMLNSLLKGQVAKVIQKVINTDFPAPFTWVTGYFAMVVGASMTFVVQSSSVFTSAITPLIGLGVISIERAYPLTLGSNIGTTTTAILAALASPREKLSSAFQIALCHFFFNISGILLWYPVPCTRLPIRMAKALGKRTAKYRWFAVLYLLVCFLLLPSLVFGISMAGWQVMVGVGTPFGALLAFVVLINVLQSRSPGHLPKWLQTWDFLPRWMHSLKPLDHLITRATLCCARPEPRSPPLPPRVFLEELPPATPSPRLALPAHHNATRL

SEQ ID NO: 81317 - protein, 340 aa, Homo sapiens
  Payload ID: 16207
  Gene Symbol: SLC34A1
  Gene Name: solute carrier family 34 (type II sodium/phosphate cotransporter), member 1
  Uniprot ID: Q06495
  ENSP ID: ENSP00000423022
MLSYGERLGSPAVSPLPVRGGHVMRGTAFAYVPSPQVLHRIPGTSAYAFPSLGPVALAEHTCPCGEVLERHEPLPAKLALEEEQKPESRLVPKLRQAGAMLLKVPLMLTFLYLFVCSLDMLSSAFQLAGGKVAGDIFKDNAILSNPVAGLVVGILVTVLVQSSSTSTSIIVSMVSSGLLEVSSAIPIIMGSNIGTSVTNTIVALMQAGDRTDFRRAFAGATVHDCFNWLSVLVLLPLEAATGYLHHITRLVVASFNIHGGRDAPDLLKIITEPFTKLIIQLDESVITSIATGDESLRNHSLIQIWCHPDSLQQNLEGREITHFDLRKKQAMEDSSVPHCP

SEQ ID NO: 81318 - protein, 109 aa, Homo sapiens
  Payload ID: 16207
  Gene Symbol: SLC34A1
  Gene Name: solute carrier family 34 (type II sodium/phosphate cotransporter), member 1
  ENSP ID: ENSP00000423733
MLSYGERLGSPAVSPLPVRGGHVMRGTAFAYVPSPQVLHRIPGTSAYAFPSLGPVALAEHTCPCGEVLERHEPLPAKLALEEEQKPESRLVPKLRQAGAMLLKVPLMLT

SEQ ID NO: 81319 - protein, 690 aa, Homo sapiens
  Payload ID: 16208
  Gene Symbol: SLC34A2
  Gene Name: solute carrier family 34 (type II sodium/phosphate cotransporter), member 2
  Uniprot ID: O95436
  ENSP ID: ENSP00000371483
MAPWPELGDAQPNPDKYLEGAAGQQPTAPDKSKETNKTDNTEAPVTKIELLPSYSTATLIDEPTEVDDPWNLPTLQDSGIKWSERDTKGKILCFFQGIGRLILLLGFLYFFVCSLDILSSAFQLVGGKMAGQFFSNSSIMSNPLLGLVIGVLVTVLVQSSSTSTSIVVSMVSSSLLTVRAAIPIIMGANIGTSITNTIVALMQVGDRSEFRRAFAGATVHDFFNWLSVLVLLPVEVATHYLEIITQLIVESFHFKNGEDAPDLLKVITKPFTKLIVQLDKKVISQIAMNDEKAKNKSLVKIWCKTFTNKTQINVTVPSTANCTSPSLCWTDGIQNWTMKNVTYKENIAKCQHIFVNFHLPDLAVGTILLILSLLVLCGCLIMIVKILGSVLKGQVATVIKKTINTDFPFPFAWLTGYLAILVGAGMTFIVQSSSVFTSALTPLIGIGVITIERAYPLTLGSNIGTTTTAILAALASPGNALRSSLQIALCHFFFNISGILLWYPIPFTRLPIRMAKGLGNISAKYRWFAVFYLIIFFFLIPLTVFGLSLAGWRVLVGVGVPVVFIIILVLCLRLLQSRCPRVLPKKLQNWNFLPLWMRSLKPWDAVVSKFTGCFQMRCCCCCRVCCRACCLLCDCPKCCRCSKCCEDLEEAQEGQDVPVKAPETFDNITISREAQGEVPASDSKTECTAL

SEQ ID NO: 81320 - protein, 689 aa, Homo sapiens
  Payload ID: 16208
  Gene Symbol: SLC34A2
  Gene Name: solute carrier family 34 (type II sodium/phosphate cotransporter), member 2
  Uniprot ID: O95436
  ENSP ID: ENSP00000423021
MAPWPELGDAQPNPDKYLEGAAGQQPTAPDKSKETNKNNTEAPVTKIELLPSYSTATLIDEPTEVDDPWNLPTLQDSGIKWSERDTKGKILCFFQGIGRLILLLGFLYFFVCSLDILSSAFQLVGGKMAGQFFSNSSIMSNPLLGLVIGVLVTVLVQSSSTSTSIVVSMVSSSLLTVRAAIPIIMGANIGTSITNTIVALMQVGDRSEFRRAFAGATVHDFFNWLSVLVLLPVEVATHYLEIITQLIVESFHFKNGEDAPDLLKVITKPFTKLIVQLDKKVISQIAMNDEKAKNKSLVKIWCKTFTNKTQINVTVPSTANCTSPSLCWTDGIQNWTMKNVTYKENIAKCQHIFVNFHLPDLAVGTILLILSLLVLCGCLIMIVKILGSVLKGQVATVIKKTINTDFPFPFAWLTGYLAILVGAGMTFIVQSSSVFTSALTPLIGIGVITIERAYPLTLGSNIGTTTTAILAALASPGNALRSSLQIALCHFFFNISGILLWYPIPFTRLPIRMAKGLGNISAKYRWFAVFYLIIFFFLIPLTVFGLSLAGWRVLVGVGVPVVFIIILVLCLRLLQSRCPRVLPKKLQNWNFLPLWMRSLKPWDAVVSKFTGCFQMRCCCCCRVCCRACCLLCDCPKCCRCSKCCEDLEEAQEGQDVPVKAPETFDNITISREAQGEVPASDSKTECTAL

SEQ ID NO: 81321 - protein, 163 aa, Homo sapiens
  Payload ID: 16208
  Gene Symbol: SLC34A2
  Gene Name: solute carrier family 34 (type II sodium/phosphate cotransporter), member 2
  ENSP ID: ENSP00000423038
MAPWPELGDAQPNPDKYLEGAAGQQPTAPDKSKETNKNNTEAPVTKIELLPSYSTATLIDEPTEVDDPWNLPTLQDSGIKWSERDTKGKILCFFQGIGRLILLLGFLYFFVCSLDILSSAFQLVGGKMAGQFFSNSSIMSNPLLGLVIGVLVTVLVQSSSTST

SEQ ID NO: 81322 - protein, 161 aa, Homo sapiens
  Payload ID: 16208
  Gene Symbol: SLC34A2
  Gene Name: solute carrier family 34 (type II sodium/phosphate cotransporter), member 2
  ENSP ID: ENSP00000424266
MAPWPELGDAQPNPDKYLEGAAGQQPTAPDKSKETNKTDNTEAPVTKIELLPSYSTATLIDEPTEVDDPWNLPTLQDSGIKWSERDTKGKILCFFQGIGRLILLLGFLYFFVCSLDILSSAFQLVGGKMAGQFFSNSSIMSNPLLGLVIGVLVTVLVQSSS

SEQ ID NO: 81323 - protein, 689 aa, Homo sapiens; identical to SEQ ID NO: 81320
  Payload ID: 16208
  Gene Symbol: SLC34A2
  Gene Name: solute carrier family 34 (type II sodium/phosphate cotransporter), member 2
  Uniprot ID: O95436
  ENSP ID: ENSP00000425501

SEQ ID NO: 81324 - protein, 599 aa, Homo sapiens
  Payload ID: 16209
  Gene Symbol: SLC34A3
  Gene Name: solute carrier family 34 (type II sodium/phosphate cotransporter), member 3
  Uniprot ID: Q8N130
  ENSP ID: ENSP00000355353
MPSSLPGSQVPHPTLDAVDLVEKTLRNEGTSSSAPVLEEGDTDPWTLPQLKDTSQPWKELRVAGRLRRVAGSVLKACGLLGSLYFFICSLDVLSSAFQLLGSKVAGDIFKDNVVLSNPVAGLVIGVLVTALVQSSSTSSSIVVSMVAAKLLTVRVSVPIIMGVNVGTSITSTLVSMAQSGDRDEFQRAFSGSAVHGIFNWLTVLVLLPLESATALLERLSELALGAASLTPRAQAPDILKVLTKPLTHLIVQLDSDMIMSSATGNATNSSLIKHWCGTTGQPTQENSSCGAFGPCTEKNSTAPADRLPCRHLFAGTELTDLAVGCILLAGSLLVLCGCLVLIVKLLNSVLRGRVAQVVRTVINADFPFPLGWLGGYLAVLAGAGLTFALQSSSVFTAAVVPLMGVGVISLDRAYPLLLGSNIGTTTTALLAALASPADRMLSALQVALIHFFFNLAGILLWYLVPALRLPIPLARHFGVVTARYRWVAGVYLLLGFLLLPLAAFGLSLAGGMELAAVGGPLVGLVLLVILVTVLQRRRPAWLPVRLRSWAWLPVWLHSLEPWDRLVTRCCPCNVCSPPKATTKEAYCYENPEILASQQL

SEQ ID NO: 81325 - protein, 599 aa, Homo sapiens; identical to SEQ ID NO: 81324
  Payload ID: 16209
  Gene Symbol: SLC34A3
  Gene Name: solute carrier family 34 (type II sodium/phosphate cotransporter), member 3
  Uniprot ID: Q8N130
  ENSP ID: ENSP00000442397

SEQ ID NO: 81326 - protein, 94 aa, Homo sapiens
  Payload ID: 16210
  Gene Symbol: SLC35B2
  Gene Name: solute carrier family 35 (adenosine 3'-phospho 5'-phosphosulfate transporter), member B2
  ENSP ID: ENSP00000377399
MDARWWAVVVLAAFPSLGAGGETPEAPPESWTQLWFFRFVVNAAGYASFMVPGYLLVQYFRRKNYLETGVLSDLGCAAGKSDDPQLWGHSHITG

SEQ ID NO: 81327 - protein, 432 aa, Homo sapiens
  Payload ID: 16210
  Gene Symbol: SLC35B2
  Gene Name: solute carrier family 35 (adenosine 3'-phospho 5'-phosphosulfate transporter), member B2
  Uniprot ID: Q8TB61
  ENSP ID: ENSP00000377401
MDARWWAVVVLAAFPSLGAGGETPEAPPESWTQLWFFRFVVNAAGYASFMVPGYLLVQYFRRKNYLETGRGLCFPLVKACVFGNEPKASDEVPLAPRTEAAETTPMWQALKLLFCATGLQVSYLTWGVLQERVMTRSYGATATSPGERFTDSQFLVLMNRVLALIVAGLSCVLCKQPRHGAPMYRYSFASLSNVLSSWCQYEALKFVSFPTQVLAKASKVIPVMLMGKLVSRRSYEHWEYLTATLISIGVSMFLLSSGPEPRSSPATTLSGLILLAGYIAFDSFTSNWQDALFAYKMSSVQMMFGVNFFSCLFTVGSLLEQGALLEGTRFMGRHSEFAAHALLLSICSACGQLFIFYTIGQFGAAVFTIIMTLRQAFAILLSCLLYGHTVTVVGGLGVAVVFAALLLRVYARGRLKQRGKKAVPVESPVQKV

SEQ ID NO: 81328 - protein, 299 aa, Homo sapiens
  Payload ID: 16210
  Gene Symbol: SLC35B2
  Gene Name: solute carrier family 35 (adenosine 3'-phospho 5'-phosphosulfate transporter), member B2
  Uniprot ID: Q8TB61
  ENSP ID: ENSP00000440340
MTRSYGATATSPGERFTDSQFLVLMNRVLALIVAGLSCVLCKQPRHGAPMYRYSFASLSNVLSSWCQYEALKFVSFPTQVLAKASKVIPVMLMGKLVSRRSYEHWEYLTATLISIGVSMFLLSSGPEPRSSPATTLSGLILLAGYIAFDSFTSNWQDALFAYKMSSVQMMFGVNFFSCLFTVGSLLEQGALLEGTRFMGRHSEFAAHALLLSICSACGQLFIFYTIGQFGAAVFTIIMTLRQAFAILLSCLLYGHTVTVVGGLGVAVVFAALLLRVYARGRLKQRGKKAVPVESPVQKV

SEQ ID NO: 81329 - protein, 339 aa, Homo sapiens
  Payload ID: 16210
  Gene Symbol: SLC35B2
  Gene Name: solute carrier family 35 (adenosine 3'-phospho 5'-phosphosulfate transporter), member B2
  Uniprot ID: Q8TB61
  ENSP ID: ENSP00000443845
MLLAMPALWYLATSWCSTSGGRTTWRPVSYLTWGVLQERVMTRSYGATATSPGERFTDSQFLVLMNRVLALIVAGLSCVLCKQPRHGAPMYRYSFASLSNVLSSWCQYEALKFVSFPTQVLAKASKVIPVMLMGKLVSRRSYEHWEYLTATLISIGVSMFLLSSGPEPRSSPATTLSGLILLAGYIAFDSFTSNWQDALFAYKMSSVQMMFGVNFFSCLFTVGSLLEQGALLEGTRFMGRHSEFAAHALLLSICSACGQLFIFYTIGQFGAAVFTIIMTLRQAFAILLSCLLYGHTVTVVGGLGVAVVFAALLLRVYARGRLKQRGKKAVPVESPVQKV

SEQ ID NO: 81330 - protein, 383 aa, Homo sapiens
  Payload ID: 16210
  Gene Symbol: SLC35B2
  Gene Name: solute carrier family 35 (adenosine 3'-phospho 5'-phosphosulfate transporter), member B2
  Uniprot ID: Q8TB61
  ENSP ID: ENSP00000480681
MVPGYLLVQYFRRKNYLETGRGLCFPLVKACVFGNEPKASDEVPLAPRTEAAETTPMWQALKLLFCATGLQVSYLTWGVLQERVMTRSYGATATSPGERFTDSQFLVLMNRVLALIVAGLSCVLCKQPRHGAPMYRYSFASLSNVLSSWCQYEALKFVSFPTQVLAKASKVIPVMLMGKLVSRRSYEHWEYLTATLISIGVSMFLLSSGPEPRSSPATTLSGLILLAGYIAFDSFTSNWQDALFAYKMSSVQMMFGVNFFSCLFTVGSLLEQGALLEGTRFMGRHSEFAAHALLLSICSACGQLFIFYTIGQFGAAVFTIIMTLRQAFAILLSCLLYGHTVTVVGGLGVAVVFAALLLRVYARGRLKQRGKKAVPVESPVQKV

SEQ ID NO: 81331 - protein, 383 aa, Homo sapiens; identical to SEQ ID NO: 81330
  Payload ID: 16210
  Gene Symbol: SLC35B2
  Gene Name: solute carrier family 35 (adenosine 3'-phospho 5'-phosphosulfate transporter), member B2
  Uniprot ID: Q8TB61
  ENSP ID: ENSP00000483181

SEQ ID NO: 81332 - protein, 401 aa, Homo sapiens
  Payload ID: 16211
  Gene Symbol: SLC35B3
  Gene Name: solute carrier family 35 (adenosine 3'-phospho 5'-phosphosulfate transporter), member B3
  Uniprot ID: Q9H1N7
  ENSP ID: ENSP00000368981
MDLTQQAKDIQNITVQETNKNNSESIECSKITMDLKFNNSRKYISITVPSKTQTMSPHIKSVDDVVVLGMNLSKFNKLTQFFICVAGVFVFYLIYGYLQELIFSVEGFKSCGWYLTLVQFAFYSIFGLIELQLIQDKRRRIPGKTYMIIAFLTVGTMGLSNTSLGYLNYPTQVIFKCCKLIPVMLGGVFIQGKRYNVADVSAAICMSLGLIWFTLADSTTAPNFNLTGVVLISLALCADAVIGNVQEKAMKLHNASNSEMVLYSYSIGFVYILLGLTCTSGLGPAVTFCAKNPVRTYGYAFLFSLTGYFGISFVLALIKIFGALIAVTVTTGRKAMTIVLSFIFFAKPFTFQYVWSGLLVVLGIFLNVYSKNMDKIRLPSLYDLINKSVEARKSRTLAQTV

SEQ ID NO: 81333 - protein, 337 aa, Homo sapiens
  Payload ID: 16212
  Gene Symbol: SLC35A1
  Gene Name: solute carrier family 35 (CMP-sialic acid transporter), member A1
  Uniprot ID: P78382
  ENSP ID: ENSP00000358565
MAAPRDNVTLLFKLYCLAVMTLMAAVYTIALRYTRTSDKELYFSTTAVCITEVIKLLLSVGILAKETGSLGRFKASLRENVLGSPKELLKLSVPSLVYAVQNNMAFLALSNLDAAVYQVTYQLKIPCTALCTVLMLNRTLSKLQWVSVFMLCAGVTLVQWKPAQATKVVVEQNPLLGFGAIAIAVLCSGFAGVYFEKVLKSSDTSLWVRNIQMYLSGIIVTLAGVYLSDGAEIKEKGFFYGYTYYVWFVIFLASVGGLYTSVVVKYTDNIMKGFSAAAAIVLSTIASVMLFGLQITLTFALGTLLVCVSIYLYGLPRQDTTSIQQGETASKERVIGV

SEQ ID NO: 81334 - protein, 278 aa, Homo sapiens
  Payload ID: 16212
  Gene Symbol: SLC35A1
  Gene Name: solute carrier family 35 (CMP-sialic acid transporter), member A1
  Uniprot ID: P78382
  ENSP ID: ENSP00000358569
MAAPRDNVTLLFKLYCLAVMTLMAAVYTIALRYTRTSDKELYFSTTAVCITEVIKLLLSVGILAKETGSLGRFKASLRENVLGSPKELLKLSVPSLVYAVQNNMAFLALSNLDAAVYQVTYQLKIPCTALCTVLMLNRTLSKLQWVSVFMLCAGVTLVQWKPAQATKVVVEQNPLLGFGAIAIAVLCSGFAVLASVGGLYTSVVVKYTDNIMKGFSAAAAIVLSTIASVMLFGLQITLTFALGTLLVCVSIYLYGLPRQDTTSIQQGETASKERVIGV

SEQ ID NO: 81335 - protein, 189 aa, Homo sapiens
  Payload ID: 16212
  Gene Symbol: SLC35A1
  Gene Name: solute carrier family 35 (CMP-sialic acid transporter), member A1
  ENSP ID: ENSP00000358570
MAAPRDNVTLLFKLYCLAVMTLMAAVYTIALRYTRTSDKELYFSTTAVCITEVIKLLLSVGILAKETGSLGRFKASLRENVLGSPKELLKLSVPSLVYAVQNNMAFLALSNLDAAVYQVTYQLKIPCTALCTVLMLNRTLSKLQWVSVFMLCAGVTLVQWKPAQATKVVFLQVLVASTLLLWLSTQTTS

SEQ ID NO: 81336 - protein, 65 aa, Homo sapiens
  Payload ID: 16212
  Gene Symbol: SLC35A1
  Gene Name: solute carrier family 35 (CMP-sialic acid transporter), member A1
  ENSP ID: ENSP00000438603
MAAPRDNVTLLFKLYCLAVMTLMAAVYTIALRYTRTSDKELYFSTTAVCITEVIKLLLSVGILAK

SEQ ID NO: 81337 - protein, 189 aa, Homo sapiens
  Payload ID: 16212
  Gene Symbol: SLC35A1
  Gene Name: solute carrier family 35 (CMP-sialic acid transporter), member A1
  ENSP ID: ENSP00000479535
MTLMAAVYTIALRYTRTSDKELYFSTTAVCITEVIKLLLSVGILAKETGSLGRFKASLRENVLGSPKELLKLSVPSLVYAVQNNMAFLALSNLDAAVYQVTYQLKIPCTALCTVLMLNRTLSKLQWVSVFMLCAGVTLVQWKPAQATKVVEYILKKFKEFRYFSLGEKHSNVSIRDYCDISWRLLVRWS

SEQ ID NO: 81338 - protein, 364 aa, Homo sapiens
  Payload ID: 16213
  Gene Symbol: SLC35C1
  Gene Name: solute carrier family 35 (GDP-fucose transporter), member C1
  Uniprot ID: Q96A29
  ENSP ID: ENSP00000313318
MNRAPLKRSRILHMALTGASDPSAEAEANGEKPFLLRALQIALVVSLYWVTSISMVFLNKYLLDSPSLRLDTPIFVTFYQCLVTTLLCKGLSALAACCPGAVDFPSLRLDLRVARSVLPLSVVFIGMITFNNLCLKYVGVAFYNVGRSLTTVFNVLLSYLLLKQTTSFYALLTCGIIIGGFWLGVDQEGAEGTLSWLGTVFGVLASLCVSLNAIYTTKVLPAVDGSIWRLTFYNNVNACILFLPLLLLLGELQALRDFAQLGSAHFWGMMTLGGLFGFAIGYVTGLQIKFTSPLTHNVSGTAKACAQTVLAVLYYEETKSFLWWTSNMMVLGGSSAYTWVRGWEMKKTPEEPSPKDSEKSAMGV

SEQ ID NO: 81339 - protein, 351 aa, Homo sapiens
  Payload ID: 16213
  Gene Symbol: SLC35C1
  Gene Name: solute carrier family 35 (GDP-fucose transporter), member C1
  Uniprot ID: Q96A29
  ENSP ID: ENSP00000412408
MALTGASDPSAEAEANGEKPFLLRALQIALVVSLYWVTSISMVFLNKYLLDSPSLRLDTPIFVTFYQCLVTTLLCKGLSALAACCPGAVDFPSLRLDLRVARSVLPLSVVFIGMITFNNLCLKYVGVAFYNVGRSLTTVFNVLLSYLLLKQTTSFYALLTCGIIIGGFWLGVDQEGAEGTLSWLGTVFGVLASLCVSLNAIYTTKVLPAVDGSIWRLTFYNNVNACILFLPLLLLLGELQALRDFAQLGSAHFWGMMTLGGLFGFAIGYVTGLQIKFTSPLTHNVSGTAKACAQTVLAVLYYEETKSFLWWTSNMMVLGGSSAYTWVRGWEMKKTPEEPSPKDSEKSAMGV

SEQ ID NO: 81340 - protein, 72 aa, Homo sapiens
  Payload ID: 16213
  Gene Symbol: SLC35C1
  Gene Name: solute carrier family 35 (GDP-fucose transporter), member C1
  ENSP ID: ENSP00000432145
MALTGASDPSAEAEANGEKPFLLRALQIALVVSLYWVTSISMVFLNKYLLDSPSLRLDTPIFVTFYQCLVTT

SEQ ID NO: 81341 - protein, 165 aa, Homo sapiens
  Payload ID: 16213
  Gene Symbol: SLC35C1
  Gene Name: solute carrier family 35 (GDP-fucose transporter), member C1
  ENSP ID: ENSP00000432669
MALTGASDPSAEAEANGEKPFLLRALQIALVVSLYWVTSISMVFLNKYLLDSPSLRLDTPIFVTFYQCLVTTLLCKGLSALAACCPGAVDFPSLRLDLRVARSVLPLSVVFIGMITFNNLCLKYVGVAFYNVGRSLTTVFNVLLSYLLLKQTTSFYALLTCGIII

SEQ ID NO: 81342 - protein, 365 aa, Homo sapiens
  Payload ID: 16214
  Gene Symbol: SLC35C2
  Gene Name: solute carrier family 35 (GDP-fucose transporter), member C2
  Uniprot ID: Q9NQQ7
  ENSP ID: ENSP00000243896
MGRWALDVAFLWKAVLTLGLVLLYYCFSIGITFYNKWLTKSFHFPLFMTMLHLAVIFLFSALSRALVQCSSHRARVVLSWADYLRRVAPTALATALDVGLSNWSFLYVTVSLYTMTKSSAVLFILIFSLIFKLEELRAALVLVVLLIAGGLFMFTYKSTQFNVEGFALVLGASFIGGIRWTLTQMLLQKAELGLQNPIDTMFHLQPLMFLGLFPLFAVFEGLHLSTSEKIFRFQDTGLLLRVLGSLFLGGILAFGLGFSEFLLVSRTSSLTLSIAGIFKEVCTLLLAAHLLGDQISLLNWLGFALCLSGISLHVALKALHSRGDGGPKALKGLGSSPDLELLLRSSQREEGDNEEEEYFVAQGQQ

SEQ ID NO: 81343 - protein, 394 aa, Homo sapiens
  Payload ID: 16214
  Gene Symbol: SLC35C2
  Gene Name: solute carrier family 35 (GDP-fucose transporter), member C2
  Uniprot ID: Q9NQQ7
  ENSP ID: ENSP00000318960
MGRVSTSHQPLRGVPAPADSGAPVLQPPRMGRWALDVAFLWKAVLTLGLVLLYYCFSIGITFYNKWLTKSFHFPLFMTMLHLAVIFLFSALSRALVQCSSHRARVVLSWADYLRRVAPTALATALDVGLSNWSFLYVTVSLYTMTKSSAVLFILIFSLIFKLEELRAALVLVVLLIAGGLFMFTYKSTQFNVEGFALVLGASFIGGIRWTLTQMLLQKAELGLQNPIDTMFHLQPLMFLGLFPLFAVFEGLHLSTSEKIFRFQDTGLLLRVLGSLFLGGILAFGLGFSEFLLVSRTSSLTLSIAGIFKEVCTLLLAAHLLGDQISLLNWLGFALCLSGISLHVALKALHSRGDGGPKALKGLGSSPDLELLLRSSQREEGDNEEEEYFVAQGQQ

SEQ ID NO: 81344 - protein, 365 aa, Homo sapiens; identical to SEQ ID NO: 81342
  Payload ID: 16214
  Gene Symbol: SLC35C2
  Gene Name: solute carrier family 35 (GDP-fucose transporter), member C2
  Uniprot ID: Q9NQQ7
  ENSP ID: ENSP00000361301

SEQ ID NO: 81345 - protein, 365 aa, Homo sapiens; identical to SEQ ID NO: 81342
  Payload ID: 16214
  Gene Symbol: SLC35C2
  Gene Name: solute carrier family 35 (GDP-fucose transporter), member C2
  Uniprot ID: Q9NQQ7
  ENSP ID: ENSP00000361304

SEQ ID NO: 81346 - protein, 196 aa, Homo sapiens
  Payload ID: 16214
  Gene Symbol: SLC35C2
  Gene Name: solute carrier family 35 (GDP-fucose transporter), member C2
  ENSP ID: ENSP00000397142
MGRWALDVAFLWKAVLTLGLVLLYYCFSIGITFYNKWLTKSFHFPLFMTMLHLAVIFLFSALSRALVQCSSHRARVVLSWADYLRRVAPTALATALDVGLSNWSFLYVTVSLPHSSTWRASPWCWGPRSSVAFAGPSPRCSCRRLNSASRIPSTPCSTCSHSCSWGSSLSLLYLKVSICPHLRKSSVSRTQGCSCG

SEQ ID NO: 81347 - protein, 157 aa, Homo sapiens
  Payload ID: 16214
  Gene Symbol: SLC35C2
  Gene Name: solute carrier family 35 (GDP-fucose transporter), member C2
  ENSP ID: ENSP00000415736
MGRWALDVAFLWKAVLTLGLVLLYYCFSIGITFYNKWLTKSFHFPLFMTMLHLAVIFLFSALSRALVQCSSHRARVVLSWADYLRRVAPTALATALDVGLSNWSFLYVTVSLARHWSWWSSSSPGVSSCSPTSPHSSTWRASPWCWGPRSSVAFAGP

SEQ ID NO: 81348 - protein, 344 aa, Homo sapiens
  Payload ID: 16214
  Gene Symbol: SLC35C2
  Gene Name: solute carrier family 35 (GDP-fucose transporter), member C2
  Uniprot ID: Q9NQQ7
  ENSP ID: ENSP00000439974
MGRWALDVAFLWKAVLTLGLVLLYYCFSIGITFYNKWLTKSFHFPLFMTMLHLAVIFLFSALSRALVQCSSHRARVVLSWADYLRRVAPTALATALDVGLSNWSFLYVTVSLYTMTKSSAVLFILIFSLIFKLEELSTQFNVEGFALVLGASFIGGIRWTLTQMLLQKAELGLQNPIDTMFHLQPLMFLGLFPLFAVFEGLHLSTSEKIFRFQDTGLLLRVLGSLFLGGILAFGLGFSEFLLVSRTSSLTLSIAGIFKEVCTLLLAAHLLGDQISLLNWLGFALCLSGISLHVALKALHSRGDGGPKALKGLGSSPDLELLLRSSQREEGDNEEEEYFVAQGQQ

SEQ ID NO: 81349 - protein, 396 aa, Homo sapiens
  Payload ID: 16215
  Gene Symbol: SLC35A2
  Gene Name: solute carrier family 35 (UDP-galactose transporter), member A2
  Uniprot ID: P78381
  ENSP ID: ENSP00000247138
MAAVGAGGSTAAPGPGAVSAGALEPGTASAAHRRLKYISLAVLVVQNASLILSIRYARTLPGDRFFATTAVVMAEVLKGLTCLLLLFAQKRGNVKHLVLFLHEAVLVQYVDTLKLAVPSLIYTLQNNLQYVAISNLPAATFQVTYQLKILTTALFSVLMLNRSLSRLQWASLLLLFTGVAIVQAQQAGGGGPRPLDQNPGAGLAAVVASCLSSGFAGVYFEKILKGSSGSVWLRNLQLGLFGTALGLVGLWWAEGTAVATRGFFFGYTPAVWGVVLNQAFGGLLVAVVVKYADNILKGFATSLSIVLSTVASIRLFGFHVDPLFALGAGLVIGAVYLYSLPRGAAKAIASASASASGPCVHQQPPGQPPPPQLSSHRGDLITEPFLPKLLTKVKGS

SEQ ID NO: 81350 - protein, 163 aa, Homo sapiens
  Payload ID: 16215
  Gene Symbol: SLC35A2
  Gene Name: solute carrier family 35 (UDP-galactose transporter), member A2
  ENSP ID: ENSP00000365695
MAAVGAGGSTAAPGPGAVSAGALEPGTASAAHRRLKYISLAVLVVQNASLILSIRYARTLPGDRFFATTAVVMAEVLKGLTCLLLLFAQKRGNVKHLVLFLHEAVLVQYVDTLKLAVPSLIYTLQNNLQYVAISNLPAATFQVSPKPSMAPEELTGLGTGVWE

SEQ ID NO: 81351 - protein, 218 aa, Homo sapiens
  Payload ID: 16215
  Gene Symbol: SLC35A2
  Gene Name: solute carrier family 35 (UDP-galactose transporter), member A2
  ENSP ID: ENSP00000365698
MKLCRDAHRRLKYISLAVLVVQNASLILSIRYARTLPGDRFFATTAVVMAEVLKGLTCLLLLFAQKRGNVKHLVLFLHEAVLVQYVDTLKLAVPSLIYTLQNNLQYVAISNLPAATFQPSPRCSQSHSLCLCLRLRALRSPAASRAATTTAAVFPPWRPHHGALSAKVSAGEVRAGSNGGTQGRGTGVEGVGHLQDPSRHPPGPGSSGFGRWSFLPGH

SEQ ID NO: 81352 - protein, 393 aa, Homo sapiens
  Payload ID: 16215
  Gene Symbol: SLC35A2
  Gene Name: solute carrier family 35 (UDP-galactose transporter), member A2
  Uniprot ID: P78381
  ENSP ID: ENSP00000365704
MAAVGAGGSTAAPGPGAVSAGALEPGTASAAHRRLKYISLAVLVVQNASLILSIRYARTLPGDRFFATTAVVMAEVLKGLTCLLLLFAQKRGNVKHLVLFLHEAVLVQYVDTLKLAVPSLIYTLQNNLQYVAISNLPAATFQVTYQLKILTTALFSVLMLNRSLSRLQWASLLLLFTGVAIVQAQQAGGGGPRPLDQNPGAGLAAVVASCLSSGFAGVYFEKILKGSSGSVWLRNLQLGLFGTALGLVGLWWAEGTAVATRGFFFGYTPAVWGVVLNQAFGGLLVAVVVKYADNILKGFATSLSIVLSTVASIRLFGFHVDPLFALGAGLVIGAVYLYSLPRGAAKAIASASASASGPCVHQQPPGQPPPPQLSSHRGDLITEPFLPKSVLVK

SEQ ID NO: 81353 - protein, 224 aa, Homo sapiens
  Payload ID: 16215
  Gene Symbol: SLC35A2
  Gene Name: solute carrier family 35 (UDP-galactose transporter), member A2
  ENSP ID: ENSP00000365712
MAAVGAGGSTAAPGPGAVSAGALEPGTASAAHRRLKYISLAVLVVQNASLILSIRYARTLPGDRFFATTAVVMAEVLKGLTCLLLLFAQKRGNVKHLVLFLHEAVLVQYVDTLKLAVPSLIYTLQNNLQYVAISNLPAATFQPSPRCSQSHSLCLCLRLRALRSPAASRAATTTAAVFPPWRPHHGALSAKVAHQGEGFLAAGIEDIGLASFSLLALGPAGTKL

SEQ ID NO: 81354 - protein, 202 aa, Homo sapiens
  Payload ID: 16215
  Gene Symbol: SLC35A2
  Gene Name: solute carrier family 35 (UDP-galactose transporter), member A2
  Uniprot ID: P78381
  ENSP ID: ENSP00000393233
  MOD_RES (1)..(1): Any amino acid
XMAEVLKGLTCLLLLFAQKRGNVKHLVLFLHEAVLVQYVDTLKLAVPSLIYTLQNNLQYVAISNLPAATFQVSTLRRSSKAAQAPCGCATCNWASSAQHWAWWGSGGLRVPPWPPVVSFLGTHLLSGAWCSTRPSAGYWWLWLSSTLTISSRALPPPCPLCCPLLPPFASLASTWTHYLPLALDSSLVLSTSTAFPEVQPKP

SEQ ID NO: 81355 - protein, 242 aa, Homo sapiens
  Payload ID: 16215
  Gene Symbol: SLC35A2
  Gene Name: solute carrier family 35 (UDP-galactose transporter), member A2
  Uniprot ID: P78381
  ENSP ID: ENSP00000402726
MAAVGAGGSTAAPGPGAVSAGALEPGTASAAHRRLKYISLAVLVVQNASLILSIRYARTLPGDRFFATTAVVMAEVLKGLTCLLLLFAQKRGNVKHLVLFLHEAVLVQYVDTLKLAVPSLIYTLQNNLQYVAISNLPAATFQPSPRCSQSHSLCLCLRLRALRSPAASRAATTTAAVFPPWRPHHGALSAKVSAGEVRAGSNGGTQGRGTGVEGVGHLQDPSRHPPGPGSSGFGRWSFLPGH

SEQ ID NO: 81356 - protein, 175 aa, Homo sapiens
  Payload ID: 16215
  Gene Symbol: SLC35A2
  Gene Name: solute carrier family 35 (UDP-galactose transporter), member A2
  ENSP ID: ENSP00000415518
MAEVLKGLTCLLLLFAQKRGNVKHLVLFLHEAVLVQYVDTLKLAVPSLIYTLQNNLQYVAISNLPAATFQVTYQLKILTTALFSVLMLNRSLSRLQWASLLLLFTGVAIVQAQQAGGGGPRPLDQNPGAGLAAVVASCLSSGFAGVYFEKILKGSSGSVWLRNLQLGLFGTALGL

SEQ ID NO: 81357 - protein, 421 aa, Homo sapiens
  Payload ID: 16215
  Gene Symbol: SLC35A2
  Gene Name: solute carrier family 35 (UDP-galactose transporter), member A2
  Uniprot ID: P78381
  ENSP ID: ENSP00000416002
MAAVGAGGSTAAPGPGAVSAGALEPGTASAELLLTWEEAEARGQGLPQPLPDTSVRIPAHRRLKYISLAVLVVQNASLILSIRYARTLPGDRFFATTAVVMAEVLKGLTCLLLLFAQKRGNVKHLVLFLHEAVLVQYVDTLKLAVPSLIYTLQNNLQYVAISNLPAATFQVTYQLKILTTALFSVLMLNRSLSRLQWASLLLLFTGVAIVQAQQAGGGGPRPLDQNPGAGLAAVVASCLSSGFAGVYFEKILKGSSGSVWLRNLQLGLFGTALGLVGLWWAEGTAVATRGFFFGYTPAVWGVVLNQAFGGLLVAVVVKYADNILKGFATSLSIVLSTVASIRLFGFHVDPLFALGAGLVIGAVYLYSLPRGAAKAIASASASASGPCVHQQPPGQPPPPQLSSHRGDLITEPFLPKSVLVK

SEQ ID NO: 81358 - protein, 406 aa, Homo sapiens
  Payload ID: 16215
  Gene Symbol: SLC35A2
  Gene Name: solute carrier family 35 (UDP-galactose transporter), member A2
  ENSP ID: ENSP00000478617
MAAVGAGGSTAAPGPGAVSAGALEPGTASAGETVCPSSRMGGGAHRRLKYISLAVLVVQNASLILSIRYARTLPGDRFFATTAVVMAEVLKGLTCLLLLFAQKRGNVKHLVLFLHEAVLVQYVDTLKLAVPSLIYTLQNNLQYVAISNLPAATFQVTYQLKILTTALFSVLMLNRSLSRLQWASLLLLFTGVAIVQAQQAGGGGPRPLDQNPGAGLAAVVASCLSSGFAGVYFEKILKGSSGSVWLRNLQLGLFGTALGLVGLWWAEGTAVATRGFFFGYTPAVWGVVLNQAFGGLLVAVVVKYADNILKGFATSLSIVLSTVASIRLFGFHVDPLFALGAGLVIGAVYLYSLPRGAAKAIASASASASGPCVHQQPPGQPPPPQLSSHRGDLITEPFLPKSVLVK

SEQ ID NO: 81359 - protein, 176 aa, Homo sapiens
  Payload ID: 16215
  Gene Symbol: SLC35A2
  Gene Name: solute carrier family 35 (UDP-galactose transporter), member A2
  ENSP ID: ENSP00000489089
MAAVGAGGSTAAPGPGAVSAGALEPGTASAGETVCPSSRMGGGAHRRLKYISLAVLVVQNASLILSIRYARTLPGDRFFATTAVVMAEVLKGLTCLLLLFAQKRGNVKHLVLFLHEAVLVQYVDTLKLAVPSLIYTLQNNLQYVAISNLPAATFQVSPKPSMAPEELTGLGTGVWE

SEQ ID NO: 81360 - protein, 332 aa, Homo sapiens
  Payload ID: 16215
  Gene Symbol: SLC35A2
  Gene Name: solute carrier family 35 (UDP-galactose transporter), member A2
  ENSP ID: ENSP00000489197
MAAVGAGGSTAAPGPGAVSAGALEPGTASAGNVKHLVLFLHEAVLVQYVDTLKLAVPSLIYTLQNNLQYVAISNLPAATFQVTYQLKILTTALFSVLMLNRSLSRLQWASLLLLFTGVAIVQAQQAGGGGPRPLDQNPGAGLAAVVASCLSSGFAGVYFEKILKGSSGSVWLRNLQLGLFGTALGLVGLWWAEGTAVATRGFFFGYTPAVWGVVLNQAFGGLLVAVVVKYADNILKGFATSLSIVLSTVASIRLFGFHVDPLFALGAGLVIGAVYLYSLPRGAAKAIASASASASGPCVHQQPPGQPPPPQLSSHRGDLITEPFLPKSVLVK

SEQ ID NO: 81361 - protein, 175 aa, Homo sapiens
  Payload ID: 16215
  Gene Symbol: SLC35A2
  Gene Name: solute carrier family 35 (UDP-galactose transporter), member A2
  ENSP ID: ENSP00000489339
  MOD_RES (1)..(1): Any amino acid
XAAVGAGGSTAAPGPGAVSAGALEPGTASAAHRRLKYISLAVLVVQNASLILSIRYARTLPGDRFFATTAVVMAEVLKGLTCLLLLFAQKRGNVKHLVLFLHEAVLVQYVDTLKLAVPSLIYTLQNNLQYVAISNLPAATFQVAHQGEGFLAAGIEDIGLASFSLLALGPAGTKL

SEQ ID NO: 81362 - protein, 114 aa, Homo sapiens
  Payload ID: 16215
  Gene Symbol: SLC35A2
  Gene Name: solute carrier family 35 (UDP-galactose transporter), member A2
  ENSP ID: ENSP00000489356
MAAVGAGGSTAAPGPGAVSAGALEPGTASAAHRRLKYISLAVLVVQNASLILSIRYARTLPGDRFFATTAVVMAEVLKGLTCLLLLFAQKRGCPGAVCGHAQARSALSHLHLAE

SEQ ID NO: 81363 - protein, 102 aa, Homo sapiens
  Payload ID: 16215
  Gene Symbol: SLC35A2
  Gene Name: solute carrier family 35 (UDP-galactose transporter), member A2
  ENSP ID: ENSP00000489440
MAAVGAGGSTAAPGPGAVSAGALEPGTASAGNVKHLVLFLHEAVLVQYVDTLKLAVPSLIYTLQNNLQYVAISNLPAATFQVSPKPSMAPEELTGLGTGVWE

SEQ ID NO: 81364 - protein, 393 aa, Homo sapiens; identical to SEQ ID NO: 81352
  Payload ID: 16215
  Gene Symbol: SLC35A2
  Gene Name: solute carrier family 35 (UDP-galactose transporter), member A2
  ENSP ID: ENSP00000489484

SEQ ID NO: 81365 - protein, 191 aa, Homo sapiens
  Payload ID: 16215
  Gene Symbol: SLC35A2
  Gene Name: solute carrier family 35 (UDP-galactose transporter), member A2
  ENSP ID: ENSP00000489515
MAAVGAGGSTAAPGPGAVSAGALEPGTASAAHRRLKYISLAVLVVQNASLILSIRYARTLPGDRFFATTAVVMAEVLKGNVKHLVLFLHEAVLVQYVDTLKLAVPSLIYTLQNNLQYVAISNLPAATFQVTYQLKILTTALFSVLMLNRSLSRLQWASLLLLFTGVAIVQAQQAGGGGPRPLDQNPGAGLA

SEQ ID NO: 81366 - protein, 60 aa, Homo sapiens
  Payload ID: 16215
  Gene Symbol: SLC35A2
  Gene Name: solute carrier family 35 (UDP-galactose transporter), member A2
  ENSP ID: ENSP00000489613
MAAVGAGGSTAAPGPGAVSAGALEPGTASAGETVCPSSRMGGGGRDRWESGMFLTKLTGA

SEQ ID NO: 81367 - protein, 355 aa, Homo sapiens
  Payload ID: 16216
  Gene Symbol: SLC35D1
  Gene Name: solute carrier family 35 (UDP-GlcA/UDP-GalNAc transporter), member D1
  Uniprot ID: Q9NTN3
  ENSP ID: ENSP00000235345
MAEVHRRQHARVKGEAPAKSSTLRDEEELGMASAETLTVFLKLLAAGFYGVSSFLIVVVNKSVLTNYRFPSSLCVGLGQMVATVAVLWVGKALRVVKFPDLDRNVPRKTFPLPLLYFGNQITGLFSTKKLNLPMFTVLRRFSILFTMFAEGVLLKKTFSWGIKMTVFAMIIGAFVAASSDLAFDLEGYAFILINDVLTAANGAYVKQKLDSKELGKYGLLYYNALFMILPTLAIAYFTGDAQKAVEFEGWADTLFLLQFTLSCVMGFILMYATVLCTQYNSALTTTIVGCIKNILITYIGMVFGGDYIFTWTNFIGLNISIAGSLVYSYITFTEEQLSKQSEANNKLDIKGKGAV

SEQ ID NO: 81368 - protein, 337 aa, Homo sapiens
  Payload ID: 16217
  Gene Symbol: SLC35D2
  Gene Name: solute carrier family 35 (UDP-GlcNAc/UDP-glucose transporter), member D2
  Uniprot ID: Q76EJ3
  ENSP ID: ENSP00000253270
MTAGGQAEAEGAGGEPGAARLPSRVARLLSALFYGTCSFLIVLVNKALLTTYGFPSPIFLGIGQMAATIMILYVSKLNKIIHFPDFDKKIPVKLFPLPLLYVGNHISGLSSTSKLSLPMFTVLRKFTIPLTLLLETIILGKQYSLNIILSVFAIILGAFIAAGSDLAFNLEGYIFVFLNDIFTAANGVYTKQKMDPKELGKYGVLFYNACFMIIPTLIISVSTGDLQQATEFNQWKNVVFILQFLLSCFLGFLLMYSTVLCSYYNSALTTAVVGAIKNVSVAYIGILIGGDYIFSLLNFVGLNICMAGGLRYSFLTLSSQLKPKPVGEENICLDLKS

SEQ ID NO: 81369 - protein, 163 aa, Homo sapiens
  Payload ID: 16217
  Gene Symbol: SLC35D2
  Gene Name: solute carrier family 35 (UDP-GlcNAc/UDP-glucose transporter), member D2
  ENSP ID: ENSP00000364406
MTAGGQAEAEGAGGEPGAARLPSRVARLLSALFYGTCSFLIVLVNKALLTTYGFPSPIFLGIGQMAATIMILYVSKLNKIIHFPDFDKKIPVKLFPLPLLYVGNHISGLSSTSKLSLPMFTVLRKFTIPLTLLLETIILGKQYSLNIILSVFAIILGAFIAAG

SEQ ID NO: 81370 - protein, 249 aa, Homo sapiens
  Payload ID: 16217
  Gene Symbol: SLC35D2
  Gene Name: solute carrier family 35 (UDP-GlcNAc/UDP-glucose transporter), member D2
  Uniprot ID: Q76EJ3
  ENSP ID: ENSP00000364408
MTAGGQAEAEGAGGEPGAARLPSRVARLLSALFYGTCSFLIVLVNKALLTTYGFPSPIFLGIGQMAATIMILYVSKLNKIIHFPDFDKKIPVKLFPLPLLYVGNHISGLSSTSKLSLPMFTVLRKFTIPLTLLLETIILGKQYSLNIILSVFAIILGAFIAAGFLLMYSTVLCSYYNSALTTAVVGAIKNVSVAYIGILIGGDYIFSLLNFVGLNICMAGGLRYSFLTLSSQLKPKPVGEENICLDLKS

SEQ ID NO: 81371 - protein, 367 aa, Homo sapiens
  Payload ID: 16218
  Gene Symbol: SLC35A3
  Gene Name: solute carrier family 35 (UDP-N-acetylglucosamine (UDP-GlcNAc) transporter), member A3
  Uniprot ID: Q9Y2D2
  ENSP ID: ENSP00000359172
MSSRSVLSPVVGTDAPDQHLELKKPQELKEMERLPLANEDKTMFANLKYVSLGILVFQTTSLVLTMRYSRTLKEEGPRYLSSTAVVVAELLKIMACILLVYKDSKCSLRALNRVLHDEILNKPMETLKLAIPSGIYTLQNNLLYVALSNLDAATYQVTYQLKILTTALFSVSMLSKKLGVYQWLSLVILMTGVAFVQWPSDSQLDSKELSAGSQFVGLMAVLTACFSSGFAGVYFEKILKETKQSVWIRNIQLGFFGSIFGLMGVYIYDGELVSKNGFFQGYNRLTWIVVVLQALGGLVIAAVIKYADNILKGFATSLSIILSTLISYFWLQDFVPTSVFFLGAILVITATFLYGYDPKPAGNPTKA

SEQ ID NO: 81372 - protein, 325 aa, Homo sapiens
  Payload ID: 16218
  Gene Symbol: SLC35A3
  Gene Name: solute carrier family 35 (UDP-N-acetylglucosamine (UDP-GlcNAc) transporter), member A3
  Uniprot ID: Q9Y2D2
  ENSP ID: ENSP00000359174
MFANLKYVSLGILVFQTTSLVLTMRYSRTLKEEGPRYLSSTAVVVAELLKIMACILLVYKDSKCSLRALNRVLHDEILNKPMETLKLAIPSGIYTLQNNLLYVALSNLDAATYQVTYQLKILTTALFSVSMLSKKLGVYQWLSLVILMTGVAFVQWPSDSQLDSKELSAGSQFVGLMAVLTACFSSGFAGVYFEKILKETKQSVWIRNIQLGFFGSIFGLMGVYIYDGELVSKNGFFQGYNRLTWIVVVLQALGGLVIAAVIKYADNILKGFATSLSIILSTLISYFWLQDFVPTSVFFLGAILVITATFLYGYDPKPAGNPTKA

SEQ ID NO: 81373 - protein, 224 aa, Homo sapiens
  Payload ID: 16218
  Gene Symbol: SLC35A3
  Gene Name: solute carrier family 35 (UDP-N-acetylglucosamine (UDP-GlcNAc) transporter), member A3
  ENSP ID: ENSP00000401679
MFANLKYVSLGILVFQTTSLVLTMRYSRTLKEEGPRYLSSTAVVVAELLKIMACILLVYKDSKCSLRALNRVLHDEILNKPMETLKLAIPSGIYTLQNNLLYVALSNLDAATYQVTYQLKILTTALFSVSMLSKKLGVYQWLSLVILMTGVAFVQWPSDSQLDSKELSAGSQFVGLMAVLTACFSSGFAGVYFEKILKETKQSVWIRNIQLGFFGSIFGLMGVY

SEQ ID NO: 81374 - protein, 325 aa, Homo sapiens; identical to SEQ ID NO: 81372
  Payload ID: 16218
  Gene Symbol: SLC35A3
  Gene Name: solute carrier family 35 (UDP-N-acetylglucosamine (UDP-GlcNAc) transporter), member A3
  Uniprot ID: Q9Y2D2
  ENSP ID: ENSP00000414947

SEQ ID NO: 81375 - protein, 220 aa, Homo sapiens
  Payload ID: 16218
  Gene Symbol: SLC35A3
  Gene Name: solute carrier family 35 (UDP-N-acetylglucosamine (UDP-GlcNAc) transporter), member A3
  Uniprot ID: Q9Y2D2
  ENSP ID: ENSP00000418527
MFANLKYVSLGILVFQTTSLVLTMRYSRTLKEEGPRYLSSTAVVVAELLKIMACILLVYKDSKCSLRALNRVLHDEILNKPMETLKLAIPSGIYTLQNNLLYVALSNLDAATYQVTYQLKILTTALFSVSMLSKKLGVYQWLSLVILMTGVAFVQWPSDSQLDSKELSAGSQFVGLMAVLTACFSSGFAGVYFEKILKETKQSVWIRNIQLVSFSLEPSL

SEQ ID NO: 81376 - protein, 325 aa, Homo sapiens; identical to SEQ ID NO: 81372
  Payload ID: 16218
  Gene Symbol: SLC35A3
  Gene Name: solute carrier family 35 (UDP-N-acetylglucosamine (UDP-GlcNAc) transporter), member A3
  Uniprot ID: Q9Y2D2
  ENSP ID: ENSP00000433849

SEQ ID NO: 81377 - protein, 84 aa, Homo sapiens
  Payload ID: 16218
  Gene Symbol: SLC35A3
  Gene Name: solute carrier family 35 (UDP-N-acetylglucosamine (UDP-GlcNAc) transporter), member A3
  ENSP ID: ENSP00000436938
MFANLKYVSLGILVFQTTSLVLTMRYSRTLKEEGPRYLSSTAVVVAELLKIMACILLVYKDSKCSLRALNRVLHDEILNKPMET

SEQ ID NO: 81378 - protein, 331 aa, Homo sapiens
  Payload ID: 16219
  Gene Symbol: SLC35B4
  Gene Name: solute carrier family 35 (UDP-xylose/UDP-N-acetylglucosamine transporter), member B4
  Uniprot ID: Q969S0
  ENSP ID: ENSP00000367770
MRPALAVGLVFAGCCSNVIFLELLARKHPGCGNIVTFAQFLFIAVEGFLFEADLGRKPPAIPIRYYAIMVTMFFTVSVVNNYALNLNIAMPLHMIFRSGSLIANMILGIIILKKRYSIFKYTSIALVSVGIFICTFMSAKQVTSQSSLSENDGFQAFVWWLLGIGALTFALLMSARMGIFQETLYKRFGKHSKEALFYNHALPLPGFVFLASDIYDHAVLFNKSELYEIPVIGVTLPIMWFYLLMNIITQYVCIRGVFILTTECASLTVTLVVTLRKFVSLIFSILYFQNPFTLWHWLGTLFVFIGTLMYTEVWNNLGTTKSEPQKDSKKN

SEQ ID NO: 81379 - protein, 132 aa, Homo sapiens
  Payload ID: 16219
  Gene Symbol: SLC35B4
  Gene Name: solute carrier family 35 (UDP-xylose/UDP-N-acetylglucosamine transporter), member B4
  ENSP ID: ENSP00000405445
MRPALAVGLVFAGCCSNVIFLELLARKHPGCGNIVTFAQFLFIAVEGFLFEADLGRKPPAIPIRYYAIMVTMFFTVSVVNNYALNLNIAMPLHMIFRSIQYIQIYLHCPGVCGDIYLHFYVSKAGDFPVQLE

SEQ ID NO: 81380 - protein, 231 aa, Homo sapiens
  Payload ID: 16219
  Gene Symbol: SLC35B4
  Gene Name: solute carrier family 35 (UDP-xylose/UDP-N-acetylglucosamine transporter), member B4
  Uniprot ID: Q969S0
  ENSP ID: ENSP00000485857
MRPALAVGLVFAGCCSNVIFLELLARKHPGCGNIVTFAQFLFIAVEGFLFEADLGRKPPAIPIRYYAIMVTMFFTVSVVNNYALNLNIAMPLHMIFRSGSLIANMILGIIILKKRYSIFKYTSIALVSVGIFICTFMSAKQVTSQSSLSENDGFQAFVWWLLGIGALTFALLMSARMGIFQETLYKRFGKHSKEALFYNHALPLPGFVFLASDIYDHAVLFNKSGEFGVRQ

SEQ ID NO: 81381 - protein, 324 aa, Homo sapiens
  Payload ID: 16220
  Gene Symbol: SLC35A4
  Gene Name: solute carrier family 35, member A4
  Uniprot ID: Q96G79
  ENSP ID: ENSP00000327133
MSVEDGGMPGLGRPRQARWTLMLLLSTAMYGAHAPLLALCHVDGRVPFRPSSAVLLTELTKLLLCAFSLLVGWQAWPQGPPPWRQAAPFALSALLYGANNNLVIYLQRYMDPSTYQVLSNLKIGSTAVLYCLCLRHRLSVRQGLALLLLMAAGACYAAGGLQVPGNTLPSPPPAAAASPMPLHITPLGLLLLILYCLISGLSSVYTELLMKRQRLPLALQNLFLYTFGVLLNLGLHAGGGSGPGLLEGFSGWAALVVLSQALNGLLMSAVMKHGSSITRLFVVSCSLVVNAVLSAVLLRLQLTAAFFLATLLIGLAMRLYYGSR

SEQ ID NO: 81382 - protein, 324 aa, Homo sapiens; identical to SEQ ID NO: 81381
  Payload ID: 16220
  Gene Symbol: SLC35A4
  Gene Name: solute carrier family 35, member A4
  Uniprot ID: Q96G79
  ENSP ID: ENSP00000424566

SEQ ID NO: 81383 - protein, 324 aa, Homo sapiens; identical to SEQ ID NO: 81381
  Payload ID: 16220
  Gene Symbol: SLC35A4
  Gene Name: solute carrier family 35, member A4
  Uniprot ID: Q96G79
  ENSP ID: ENSP00000479255

SEQ ID NO: 81384 - protein, 103 aa, Homo sapiens
  Payload ID: 16220
  Gene Symbol: SLC35A4
  Gene Name: solute carrier family 35, member A4
  ENSP ID: ENSP00000485218
MADDKDSLPKLKDLAFLKNQLESLQRRVEDEVNSGVGQDGSLLSSPFLKGFLAGYVVAKLRASAVLGFAVGTCTGIYAAQAYAVPNVEKTLRDYLQLLRKGPD

SEQ ID NO: 81385 - protein, 235 aa, Homo sapiens
  Payload ID: 16221
  Gene Symbol: SLC35A5
  Gene Name: solute carrier family 35, member A5
  ENSP ID: ENSP00000261034
MEKQCCSHPVICSLSTMYTFLLGAIFIALSSSRILLVKYSANEENKYDYLPTTVNVCSELVKLVFCVLVSFCVIKKDHQSRNLKYASWKEFSDFMKWSIPAFLYFLDNLIVFYVLSYLQPAMAVIFSNFSIITTALLFRIVLKRRLNWIQWASLLTLFLSIVALTAGTKTLQHNLAGRGFHHDAFFSPSNSCLLFRSPPWNFSWKPHQSFSLYLFIMPASLKFRNTHLGKKGSEI

SEQ ID NO: 81386 - protein, 424 aa, Homo sapiens
  Payload ID: 16221
  Gene Symbol: SLC35A5
  Gene Name: solute carrier family 35, member A5
  Uniprot ID: Q9BS91
  ENSP ID: ENSP00000417654
MEKQCCSHPVICSLSTMYTFLLGAIFIALSSSRILLVKYSANEENKYDYLPTTVNVCSELVKLVFCVLVSFCVIKKDHQSRNLKYASWKEFSDFMKWSIPAFLYFLDNLIVFYVLSYLQPAMAVIFSNFSIITTALLFRIVLKRRLNWIQWASLLTLFLSIVALTAGTKTLQHNLAGRGFHHDAFFSPSNSCLLFRSECPRKDNCTAKEWTFPEAKWNTTARVFSHIRLGMGHVLIIVQCFISSMANIYNEKILKEGNQLTESIFIQNSKLYFFGILFNGLTLGLQRSNRDQIKNCGFFYGHSAFSVALIFVTAFQGLSVAFILKFLDNMFHVLMAQVTTVIITTVSVLVFDFRPSLEFFLEAPSVLLSIFIYNASKPQVPEYAPRQERIRDLSGNLWERSSGDGEELERLTKPKSDESDEDTF

SEQ ID NO: 81387 - protein, 88 aa, Homo sapiens
  Payload ID: 16221
  Gene Symbol: SLC35A5
  Gene Name: solute carrier family 35, member A5
  ENSP ID: ENSP00000418265
MEKQCCSHPVICSLSTMYTFLLGAIFIALSSSRILLVKYSANEENKYDYLPTTVNVCSELVKLVFCVLVSFCVIKKDHQSRNLKYASW

SEQ ID NO: 81388 - protein, 147 aa, Homo sapiens
  Payload ID: 16221
  Gene Symbol: SLC35A5
  Gene Name: solute carrier family 35, member A5
  ENSP ID: ENSP00000419958
MEKQCCSHPVICSLSTMYTFLLGAIFIALSSSRILLVKYSANEENKYDYLPTTVNVCSELVKLVFCVLVSFCVIKKDHQSRNLKYASWKEFSDFMKWSIPAFLYFLDNLIVFYVLSYLQPAMAVIFSNFSIITTALLFRIVLKRRLN

SEQ ID NO: 81389 - protein, 119 aa, Homo sapiens
  Payload ID: 16221
  Gene Symbol: SLC35A5
  Gene Name: solute carrier family 35, member A5
  ENSP ID: ENSP00000420398
MKWSIPAFLYFLDNLIVFYVLSYLQPAMAVIFSNFSIITTALLFRIVLKRRLNWIQWASLLTLFLSIVALTAGTKTLQHNLAGRGFHHDAFFSPSNSCLLFRTSLKFRNTHLGKKGSEI

SEQ ID NO: 81390 - protein, 359 aa, Homo sapiens
  Payload ID: 16222
  Gene Symbol: SLC35B1
  Gene Name: solute carrier family 35, member B1
  Uniprot ID: P78383
  ENSP ID: ENSP00000240333
MRPLPPVGDVRLELSPPPPLLPVPVVSGSPVGSSGRLMASSSSLVPDRLRLPLCFLGVFVCYFYYGILQEKITRGKYGEGAKQETFTFALTLVFIQCVINAVFAKILIQFFDTARVDRTRSWLYAACSISYLGAMVSSNSALQFVNYPTQVLGKSCKPIPVMLLGVTLLKKKYPLAKYLCVLLIVAGVALFMYKPKKVVGIEEHTVGYGELLLLLSLTLDGLTGVSQDHMRAHYQTGSNHMMLNINLWSTLLLGMGILFTGELWEFLSFAERYPAIIYNILLFGLTSALGQSFIFMTVVYFGPLTCSIITTTRKFFTILASVILFANPISPMQWVGTVLVFLGLGLDAKFGKGAKKTSH

SEQ ID NO: 81391 - protein, 194 aa, Homo sapiens
  Payload ID: 16222
  Gene Symbol: SLC35B1
  Gene Name: solute carrier family 35, member B1
  ENSP ID: ENSP00000422104
  MOD_RES (1)..(1): Any amino acid
XPLPPVGDVRLELSPPPPLLPVPVVSGSPVGSSGRLMASSSSLVPDRLRLPLCFLGVFVCYFYYGILQEKMVDRTRSWLYAACSISYLGAMVSSNSALQFVNYPTQVLGKSCKPIPVMLLGVTLLKKKYPLAKYLCVLLIVAGVALFMYKPKKVVGIEEHTVGYGELLLLLSLTLDGLTGVSQDHMRAHYQTGS

SEQ ID NO: 81392 - protein, 227 aa, Homo sapiens
  Payload ID: 16222
  Gene Symbol: SLC35B1
  Gene Name: solute carrier family 35, member B1
  ENSP ID: ENSP00000423323
MCDQCCVCQDLVDRTRSWLYAACSISYLGAMVSSNSALQFVNYPTQVLGKSCKPIPVMLLGVTLLKKKYPLAKYLCVLLIVAGVALFMYKPKKVVGIEEHTVGYGELLLLLSLTLDGLTGVSQDHMRAHYQTGSNHMMLNINLWSTLLLGMGILFTGELWEFLSFAERYPAIIYNILLFGLTSALGQSFIFMTVVYFGPLTCSIITTTRKFFTILASVILFANPISP

SEQ ID NO: 81393 - protein, 254 aa, Homo sapiens
  Payload ID: 16222
  Gene Symbol: SLC35B1
  Gene Name: solute carrier family 35, member B1
  ENSP ID: ENSP00000424367
MEPRTRVGPLLVLPDACKQPIRPRPWCHSRNTVSSCLGTRGKYGEGAKQETFTFALTLVFIQCVINAVFAKILIQFFDTARVDRTRSWLYAACSISYLGAMVSSNSALQFVNYPTQVLGKSCKPIPVMLLGVTLLKKKYPLAKYLCVLLIVAGVALFMYKPKKVVGIEEHTVGYGELLLLLSLTLDGLTGVSQDHMRAHYQTGSNHMMLNINLWSTLLLGMGILFTGELWEFLSFAERYPAIIYNILLFGLTSA

SEQ ID NO: 81394 - protein, 37 aa, Homo sapiens
  Payload ID: 16222
  Gene Symbol: SLC35B1
  Gene Name: solute carrier family 35, member B1
  ENSP ID: ENSP00000424857
TRGKYGEGAKQETFTFALTLVFIQCVINAVFAKICPW

SEQ ID NO: 81395 - protein, 157 aa, Homo sapiens
  Payload ID: 16222
  Gene Symbol: SLC35B1
  Gene Name: solute carrier family 35, member B1
  ENSP ID: ENSP00000425179
MRPLPPVGDVRLELSPPPPLLPVPVVSGSPVGSSGRLMASSSSLVPDRLRLPLCFLGVFVCYFYYGILQEKITRGKYGEGAKQETFTFALTLVFIQCVINAVFAKIWWIVPGAGSMLPVLSPIWVPWSPAIQHYSLSTTQLRSLVNPASQSQSCSLG

SEQ ID NO: 81396 - protein, 76 aa, Homo sapiens
  Payload ID: 16222
  Gene Symbol: SLC35B1
  Gene Name: solute carrier family 35, member B1
  ENSP ID: ENSP00000426402
MCDQCCVCQDLVDRTRSWLYAACSISYLGAMVSSNSALQFVNYPTQVLGKSCKPIPVMLLGVTLLKKKYPLAKYLC

SEQ ID NO: 81397 - protein, 187 aa, Homo sapiens
  Payload ID: 16222
  Gene Symbol: SLC35B1
  Gene Name: solute carrier family 35, member B1
  ENSP ID: ENSP00000426961
MEPRTRGKYGEGAKQETFTFALTLVFIQCVINAVFAKILIQFFDTARVDRTRSWLYAACSISYLGAMVSSNSALQFVNYPTQVLGKSCKPIPVMLLGVTLLKKKYPLAKYLCVLLIVAGVALFMYKPKKVVGIEEHTVGYGELLLLLSLTLDGLTGVSQDHMRAHYQTGSNHMMLNINLWSTLLLGM

SEQ ID NO: 81398 - protein, 285 aa, Homo sapiens
  Payload ID: 16222
  Gene Symbol: SLC35B1
  Gene Name: solute carrier family 35, member B1
  ENSP ID: ENSP00000427689
MRPLPPVGDVRLELSPPPPLLPVPVVSGSPVGSSGRLMASSSSLVPDRLRLPLCFLGVFVCYFYYGILQEKMTRVGPLLVLPDACKQPIRPRPWCHSRNTVSSCLGTRGKYGEGAKQETFTFALTLVFIQCVINAVFAKILIQFFDTARVDRTRSWLYAACSISYLGAMVSSNSALQFVNYPTQVLGKSCKPIPVMLLGVTLLKKKYPLAKYLCVLLIVAGVALFMYKPKKVVGIEEHTVGYGELLLLLSLTLDGLTGVSQDHMRAHYQTGSNHMMLNINLWSTL

SEQ ID NO: 81399 - protein, 416 aa, Homo sapiens
  Payload ID: 16223
  Gene Symbol: SLC35D3
  Gene Name: solute carrier family 35, member D3
  Uniprot ID: Q5M8T2
  ENSP ID: ENSP00000333591
MRQLCRGRVLGISVAIAHGVFSGSLNILLKFLISRYQFSFLTLVQCLTSSTAALSLELLRRLGLIAVPPFGLSLARSFAGVAVLSTLQSSLTLWSLRGLSLPMYVVFKRCLPLVTMLIGVLVLKNGAPSPGVLAAVLITTCGAALAGAGDLTGDPIGYVTGVLAVLVHAAYLVLIQKASADTEHGPLTAQYVIAVSATPLLVICSFASTDSIHAWTFPGWKDPAMVCIFVACILIGCAMNFTTLHCTYINSAVTTSFVGVVKSIATITVGMVAFSDVEPTSLFIAGVVVNTLGSIIYCVAKFMETRKQSNYEDLEAQPRGEEAQLSGDQLPFVMEELPGEGGNGRSEGGEAAGGPAQESRQEVRGSPRGVPLVAGSSEEGSRRSLKDAYLEVWRLVRGTRYMKKDYLIENEELPSP

SEQ ID NO: 81400 - protein, 105 aa, Homo sapiens
  Payload ID: 16224
  Gene Symbol: SLC35E1
  Gene Name: solute carrier family 35, member E1
  ENSP ID: ENSP00000387152
  MOD_RES (1)..(1): Any amino acid
XMKEKQSTKVYLSLIPIISGVLLATVTELSFDMWGLVSALAATLCFSLQNIFSKKVLRDSRIHHLRLLNILGCHAVFFMIPTWVLVDLSAFLVSSDLGLPSENVL

SEQ ID NO: 81401 - protein, 116 aa, Homo sapiens
  Payload ID: 16224
  Gene Symbol: SLC35E1
  Gene Name: solute carrier family 35, member E1
  ENSP ID: ENSP00000394092
MAQTYVYQWPWTLLLLAVSGFCNFAQNVIAFSILNLVSPLSYSVANATKRIMVITVSLIMLRNPVTSTNVLGMMTAILGVFLYNKTKYDANQQARKHLLPVTTADLSSKERHRSPL

SEQ ID NO: 81402 - protein, 344 aa, Homo sapiens
  Payload ID: 16224
  Gene Symbol: SLC35E1
  Gene Name: solute carrier family 35, member E1
  ENSP ID: ENSP00000400435
SGGAREGARVAALCLLWYALSAGGNVVNKVILSAFPFPVTVSLCHILALCAGLPPLLRAWRVPPAPPVSGPGPSPHPSSGPLLPPRFYPRYVLPLAFGKYFASVSAHVSIWKVPVSYAHTVKATMPIWVVLLSRIIMKEKQSTKVLRDSRIHHLRLLNILGCHAVFFMIPTWVLVDLSAFLVSSDLTYVYQWPWTLLLLAVSGFCNFAQNVIAFSILNLVSPLSYSVANATKRIMVITVSLIMLRNPVTSTNVLGMMTAILGVFLYNKTKYDANQQARKHLLPVTTADLSSKERHRSPLEKPHNGLLFPQHGDYQYGRNNILTDHFQYSRQSYPNSYSLNRYDV

SEQ ID NO: 81403 - protein, 410 aa, Homo sapiens
  Payload ID: 16224
  Gene Symbol: SLC35E1
  Gene Name: solute carrier family 35, member E1
  Uniprot ID: Q96K37
  ENSP ID: ENSP00000470652
MAAAAVGAGHGAGGPGAASSSGGAREGARVAALCLLWYALSAGGNVVNKVILSAFPFPVTVSLCHILALCAGLPPLLRAWRVPPAPPVSGPGPSPHPSSGPLLPPRFYPRYVLPLAFGKYFASVSAHVSIWKVPVSYAHTVKATMPIWVVLLSRIIMKEKQSTKVYLSLIPIISGVLLATVTELSFDMWGLVSALAATLCFSLQNIFSKKVLRDSRIHHLRLLNILGCHAVFFMIPTWVLVDLSAFLVSSDLTYVYQWPWTLLLLAVSGFCNFAQNVIAFSILNLVSPLSYSVANATKRIMVITVSLIMLRNPVTSTNVLGMMTAILGVFLYNKTKYDANQQARKHLLPVTTADLSSKERHRSPLEKPHNGLLFPQHGDYQYGRNNILTDHFQYSRQSYPNSYSLNRYDV

SEQ ID NO: 81404 - protein, 107 aa, Homo sapiens
  Payload ID: 16224
  Gene Symbol: SLC35E1
  Gene Name: solute carrier family 35, member E1
  ENSP ID: ENSP00000484120
MVITVSLIMLRNPVTSTNVLGMMTAILGVFLYNKTKYDANQQARKHLLPVTTADLSSKERHRSPLEKPHNGSSSPSTGTISTAQQHLNRPLPIQPAELPKLVQFEPL

SEQ ID NO: 81405 - protein, 266 aa, Homo sapiens
  Payload ID: 16225
  Gene Symbol: SLC35E2
  Gene Name: solute carrier family 35, member E2
  Uniprot ID: P0CK97
  ENSP ID: ENSP00000246421
MSSSVKTPALEELVPGSEEKPKGRSPLSWGSLFGHRSEKIVFAKSDGGTDENVLTVTITETTVIESDLGVWSSRALLYLTLWFFFSFCTLFLNKYILSLLGGEPSMLGAVQMLSTTVIGCVKTLVPCCLYQHKARLSYPPNFLMTMLFVGLMRFATVVLGLVSLKNVAVSFAETVKSSAPIFTVIMSRMILGEYTGRPSDREEREELQLQPGRGAAASDRRSPVPPSERHGVRPHGENLPGDFQVPQALHRVALSMALPCPMLPAS

SEQ ID NO: 81406 - protein, 246 aa, Homo sapiens
  Payload ID: 16225
  Gene Symbol: SLC35E2
  Gene Name: solute carrier family 35, member E2
  Uniprot ID: P0CK97
  ENSP ID: ENSP00000347614
MSSSVKTPALEELVPGSEEKPKGRSPLSWGSLFGHRSEKIVFAKSDGGTDENVLTVTITETTVIESDLGVWSSRALLYLTLWFFFSFCTLFLNKYILSLLGGEPSMLGAVQMLSTTVIGCVKTLVPCCLYQHKARLSYPPNFLMTMLFVGLMRFATVVLGLVSLKNVAVSFAETVKSSAPIFTVIMSRMILGEYTGRPSDREEREELQLQPGRGAAASDRRSPVPPSERHGVRPHGENLPGDFQAQ

SEQ ID NO: 81407 - protein, 246 aa, Homo sapiens
  Payload ID: 16226
  Gene Symbol: SLC35E2B
  Gene Name: solute carrier family 35, member E2B
  ENSP ID: ENSP00000478733
MSSSVKTPALEELVPGSEEKPKGRSPLSWGSLFGHRSEKIVFAKSDGGTDENVLTVTITETTVIESDLGVWSSRALLYLTLWFFFSFCTLFLNKYILSLLGGEPSMLGAVQMLSTTVIGCVKTLVPCCLYQHKARLSYPPNFLMTMLFVGLMRFATVVLGLVSLKNVAVSFAETVKSSAPIFTVIMSRMILGEYTGRPSDREEWEELQLQPGRGAAASDRRSPVPPSERHGVRPHGENLPGDFQAQ

SEQ ID NO: 81408 - protein, 405 aa, Homo sapiens
  Payload ID: 16226
  Gene Symbol: SLC35E2B
  Gene Name: solute carrier family 35, member E2B
  Uniprot ID: P0CK96
  ENSP ID: ENSP00000481694
MSSSVKTPALEELVPGSEEKPKGRSPLSWGSLFGHRSEKIVFAKSDGGTDENVLTVTITETTVIESDLGVWSSRALLYLTLWFFFSFCTLFLNKYILSLLGGEPSMLGAVQMLSTTVIGCVKTLVPCCLYQHKARLSYPPNFLMTMLFVGLMRFATVVLGLVSLKNVAVSFAETVKSSAPIFTVIMSRMILGEYTGLLVNLSLIPVMGGLALCTATEISFNVLGFSAALSTNIMDCLQNVFSKKLLSGDKYRFSAPELQFYTSAAAVAMLVPARVFFTDVPVIGRSGKSFSYNQDVVLLLLTDGVLFHLQSVTAYALMGKISPVTFSVASTVKHALSIWLSVIVFGNKITSLSAVGTALVTVGVLLYNKARQHQQEALQSLAAATGRAPDDTVEPLLPQDPRQHP

SEQ ID NO: 81409 - protein, 405 aa, Homo sapiens; identical to SEQ ID NO: 81408
  Payload ID: 16226
  Gene Symbol: SLC35E2B
  Gene Name: solute carrier family 35, member E2B
  Uniprot ID: P0CK96
  ENSP ID: ENSP00000484635

SEQ ID NO: 81410 - protein, 313 aa, Homo sapiens
  Payload ID: 16227
  Gene Symbol: SLC35E3
  Gene Name: solute carrier family 35, member E3
  Uniprot ID: Q7Z769
  ENSP ID: ENSP00000381089
MALLVDRVRGHWRIAAGLLFNLLVSICIVFLNKWIYVYHGFPNMSLTLVHFVVTWLGLYICQKLDIFAPKSLPPSRLLLLALSFCGFVVFTNLSLQNNTIGTYQLAKAMTTPVIIAIQTFCYQKTFSTRIQLTLIPITLGVILNSYYDVKFNFLGMVFAALGVLVTSLYQVWVGAKQHELQVNSMQLLYYQAPMSSAMLLVAVPFFEPVFGEGGIFGPWSVSALLMVLLSGVIAFMVNLSIYWIIGNTSPVTYNMFGHFKFCITLFGGYVLFKDPLSINQALGILCTLFGILAYTHFKLSEQEGSRSKLAQRP

SEQ ID NO: 81411 - protein, 125 aa, Homo sapiens
  Payload ID: 16227
  Gene Symbol: SLC35E3
  Gene Name: solute carrier family 35, member E3
  ENSP ID: ENSP00000403769
QAPMSSAMLLVAVPFFEPVFGEGGIFGPWSVSALSTRLECSGTIMAHCSLSLLGSSNPPASTSPVAGTTGAHQHTWLIFIFFVETEFCHVAQADLKLLSSSHLSASASRSAGITGLSHHTWPVIS

SEQ ID NO: 81412 - protein, 350 aa, Homo sapiens
  Payload ID: 16228
  Gene Symbol: SLC35E4
  Gene Name: solute carrier family 35, member E4
  Uniprot ID: Q6ICL7
  ENSP ID: ENSP00000339626
MCRCPPEHHDGRMTSAEVGAAAGGAQAAGPPEWPPGSPQALRQPGRARVAMAALVWLLAGASMSSLNKWIFTVHGFGRPLLLSALHMLVAALACHRGARRPMPGGTRCRVLLLSLTFGTSMACGNVGLRAVPLDLAQLVTTTTPLFTLALSALLLGRRHHPLQLAAMGPLCLGAACSLAGEFRTPPTGCGFLLAATCLRGLKSVQQSALLQEERLDAVTLLYATSLPSFCLLAGAALVLEAGVAPPPTAGDSRLWACILLSCLLSVLYNLASFSLLALTSALTVHVLGNLTVVGNLILSRLLFGSRLSALSYVGIALTLSGMFLYHNCEFVASWAARRGLWRRDQPSKGL

SEQ ID NO: 81413 - protein, 234 aa, Homo sapiens
  Payload ID: 16228
  Gene Symbol: SLC35E4
  Gene Name: solute carrier family 35, member E4
  Uniprot ID: Q6ICL7
  ENSP ID: ENSP00000384377
MCRCPPEHHDGRMTSAEVGAAAGGAQAAGPPEWPPGSPQALRQPGRARVAMAALVWLLAGASMSSLNKWIFTVHGFGRPLLLSALHMLVAALACHRGARRPMPGGTRCRVLLLSLTFGTSMACGNVGLRAVPLDLAQLVTTTTPLFTLALSALLLGRRHHPLQLAAMGPLCLGAACSLAGEFRTPPTGCGFLLAATCLRGLKSVQQSLSFQICKMELMIPMERVRMRSAGQGQE

SEQ ID NO: 81414 - protein, 203 aa, Homo sapiens
  Payload ID: 16228
  Gene Symbol: SLC35E4
  Gene Name: solute carrier family 35, member E4
  ENSP ID: ENSP00000413552
AQAAGPPEWPPGSPQALRQPGRARVAMAALVWLLAGASMSSLNKWIFTVHGFGRPLLLSALHMLVAALACHRGARRPMPGGTRCRVLLLSLTFGTSMACGNVGLRAVPLDLAQLVTTTTPLFTLALSALLLGRRHHPLQLAAMGPLCLGAACSLAGEFRTPPTGCGFLLAATCLRGLKSVQQNPDLVHSAEDCRSLRSLKIST

SEQ ID NO: 81415 - protein, 408 aa, Homo sapiens
  Payload ID: 16229
  Gene Symbol: SLC35F1
  Gene Name: solute carrier family 35, member F1
  Uniprot ID: Q5T1Q4
  ENSP ID: ENSP00000353557
MIPPEQPQQQLQPPSPAPPNHVVTTIENLPAEGSGGGGSLSASSRAGVRQRIRKVLNREMLISVALGQVLSLLICGIGLTSKYLSEDFHANTPVFQSFLNYILLFLVYTTTLAVRQGEENLLAILRRRWWKYMILGLIDLEANYLVVKAYQYTTLTSIQLLDCFVIPVVILLSWFFLLIRYKAVHFIGIVVCILGMGCMVGADVLVGRHQGAGENKLVGDLLVLGGATLYGISNVWEEYIIRTLSRVEFLGMIGLFGAFFSGIQLAIMEHKELLKVPWDWQIGLLYVGFSACMFGLYSFMPVVIKKTSATSVNLSLLTADLYSLFCGLFLFHYKFSGLYLLSFFTILIGLVLYSSTSTYIAQDPRVYKQFRNPSGPVVDLPTTAQVEPSVTYTSLGQETEEEPHVRVA

SEQ ID NO: 81416 - protein, 349 aa, Homo sapiens
  Payload ID: 16229
  Gene Symbol: SLC35F1
  Gene Name: solute carrier family 35, member F1
  Uniprot ID: Q5T1Q4
  ENSP ID: ENSP00000484738
MLISVALGQVLSLLICGIGLTSKYLSEDFHANTPVFQSFLNYILLFLVYTTTLAVRQGEENLLAILRRRWWKYMILGLIDLEANYLVVKAYQYTTLTSIQLLDCFVIPVVILLSWFFLLIRYKAVHFIGIVVCILGMGCMVGADVLVGRHQGAGENKLVGDLLVLGGATLYGISNVWEEYIIRTLSRVEFLGMIGLFGAFFSGIQLAIMEHKELLKVPWDWQIGLLYVGFSACMFGLYSFMPVVIKKTSATSVNLSLLTADLYSLFCGLFLFHYKFSGLYLLSFFTILIGLVLYSSTSTYIAQDPRVYKQFRNPSGPVVDLPTTAQVEPSVTYTSLGQETEEEPHVRVA

SEQ ID NO: 81417 - protein, 327 aa, Homo sapiens
  Payload ID: 16230
  Gene Symbol: SLC35F2
  Gene Name: solute carrier family 35, member F2
  Uniprot ID: Q8IXU6
  ENSP ID: ENSP00000364834
MLSLCICGTAITSQYLAERYKVNTPMLQSFINYCLLFLIYTVMLAFRSGSDNLLVILKRKWWKYILLGLADVEANYVIVRAYQYTTLTSVQLLDCFGIPVLMALSWFILHARYRVIHFIAVAVCLLGVGTMVGADILAGREDNSGSDVLIGDILVLLGASLYAISNVCEEYIVKKLSRQEFLGMVGLFGTIISGIQLLIVEYKDIASIHWDWKIALLFVAFALCMFCLYSFMPLVIKVTSATSVNLGILTADLYSLFVGLFLFGYKFSGLYILSFTVIMVGFILYCSTPTRTAEPAESSVPPVTSIGIDNLGLKLEENLQETHSAVL

SEQ ID NO: 81418 - protein, 36 aa, Homo sapiens
  Payload ID: 16230
  Gene Symbol: SLC35F2
  Gene Name: solute carrier family 35, member F2
  ENSP ID: ENSP00000433461
MEADSPAGPGAPEPLAEGAAAEFSSLLRRIKGKLFT

SEQ ID NO: 81419 - protein, 265 aa, Homo sapiens
  Payload ID: 16230
  Gene Symbol: SLC35F2
  Gene Name: solute carrier family 35, member F2
  ENSP ID: ENSP00000433783
MEADSPAGPGAPEPLAEGAAAEFSSLLRRIKGKLFTWNILKTIALGQMLSLCICGTAITSQYLAERYKVNTPMLQSFINYCLLFLIYTVMLAFRSGSDNLLVILKRKWWKYILLGLADVEANYVIVRAYQYTTLTSVQLLDCFGIPVLMALSWFILHARYRVIHFIAVAVCLLGVGTMVGADILAGREDNSGSDVLIGDILVLLGASLYAISNVCEEYIVKKLSRQEFLGMVGLFGTIISGIQLPAVRGICPVYVLPVQLHAIGD

SEQ ID NO: 81420 - protein, 38 aa, Homo sapiens
  Payload ID: 16230
  Gene Symbol: SLC35F2
  Gene Name: solute carrier family 35, member F2
  ENSP ID: ENSP00000434076
MEADSPAGPGAPEPLAEGAAAEFSSLLRRIKGKLFTWQ

SEQ ID NO: 81421 - protein, 357 aa, Homo sapiens
  Payload ID: 16230
  Gene Symbol: SLC35F2
  Gene Name: solute carrier family 35, member F2
  Uniprot ID: Q8IXU6
  ENSP ID: ENSP00000434307
MEADSPAGPGAPEPLAEGAAAEFSSLLRRIKGKLFTWNILKTIALGQMLSLCICGTAITSQYLAERYKVNTPMLQSFINYCLLFLIYTVMLAFRSGSDNLLVILKRKWWKYILLGLADVEANYVIVRAYQYTTLTSVQLLDCFGIPVLMALSWFILHARYRVIHFIAVAVCLLGVGTMVGADILAGREDNSGSDVLIGDILVLLGASLYAISNVCEEYIVKKLSRQEFLGMVGLFGTIISGIQLLIVEYKDIASIHWDWKIALLFVAFALCMFCLYSFMPLVIKVTSATSVNLGILTADLYSLFVGLFLFGYKDSTSCPSLSSWWGLSCTAPPLLARPSRLKAACLQSPALGLTTWG

SEQ ID NO: 81422 - protein, 374 aa, Homo sapiens
  Payload ID: 16230
  Gene Symbol: SLC35F2
  Gene Name: solute carrier family 35, member F2
  Uniprot ID: Q8IXU6
  ENSP ID: ENSP00000436785
MEADSPAGPGAPEPLAEGAAAEFSSLLRRIKGKLFTWNILKTIALGQMLSLCICGTAITSQYLAERYKVNTPMLQSFINYCLLFLIYTVMLAFRSGSDNLLVILKRKWWKYILLGLADVEANYVIVRAYQYTTLTSVQLLDCFGIPVLMALSWFILHARYRVIHFIAVAVCLLGVGTMVGADILAGREDNSGSDVLIGDILVLLGASLYAISNVCEEYIVKKLSRQEFLGMVGLFGTIISGIQLLIVEYKDIASIHWDWKIALLFVAFALCMFCLYSFMPLVIKVTSATSVNLGILTADLYSLFVGLFLFGYKFSGLYILSFTVIMVGFILYCSTPTRTAEPAESSVPPVTSIGIDNLGLKLEENLQETHSAVL

SEQ ID NO: 81423 - protein, 421 aa, Homo sapiens
  Payload ID: 16231
  Gene Symbol: SLC35F3
  Gene Name: solute carrier family 35, member F3
  Uniprot ID: Q8IY50
  ENSP ID: ENSP00000355576
MKKHSARVAPLSACNSPVLTLTKVEGEERPRDSPGPAEAQAPAGVEAGGRASRRCWTCSRAQLKKIFWGVAVVLCVCSSWAGSTQLAKLTFRKFDAPFTLTWFATNWNFLFFPLYYVGHVCKSTEKQSVKQRYRECCRFFGDNGLTLKVFFTKAAPFGVLWTLTNYLYLHAIKKINTTDVSVLFCCNKAFVFLLSWIVLRDRFMGVRIVAAILAIAGIVMMTYADGFHSHSVIGIALVVASASMSALYKVLFKLLLGSAKFGEAALFLSILGVFNILFITCIPIILYFTKVEYWSSFDDIPWGNLCGFSVLLLTFNIVLNFGIAVTYPTLMSLGIVLSIPVNAVIDHYTSQIVFNGVRVIAIIIIGLGFLLLLLPEEWDVWLIKLLTRLKVRKKEEPAEGAADLSSGPQSKNRRARPSFAR

SEQ ID NO: 81424 - protein, 490 aa, Homo sapiens
  Payload ID: 16231
  Gene Symbol: SLC35F3
  Gene Name: solute carrier family 35, member F3
  Uniprot ID: Q8IY50
  ENSP ID: ENSP00000355577
MGIREFPSGAPRGKSIAVGMRRSPDVSPRRLSDISPQLRQLKYLVVDEAIKEDLKWSRSVEDLTSGPVGLTSIEERILRITGYYGYQPWAASCKREERPRDSPGPAEAQAPAGVEAGGRASRRCWTCSRAQLKKIFWGVAVVLCVCSSWAGSTQLAKLTFRKFDAPFTLTWFATNWNFLFFPLYYVGHVCKSTEKQSVKQRYRECCRFFGDNGLTLKVFFTKAAPFGVLWTLTNYLYLHAIKKINTTDVSVLFCCNKAFVFLLSWIVLRDRFMGVRIVAAILAIAGIVMMTYADGFHSHSVIGIALVVASASMSALYKVLFKLLLGSAKFGEAALFLSILGVFNILFITCIPIILYFTKVEYWSSFDDIPWGNLCGFSVLLLTFNIVLNFGIAVTYPTLMSLGIVLSIPVNAVIDHYTSQIVFNGVRVIAIIIIGLGFLLLLLPEEWDVWLIKLLTRLKVRKKEEPAEGAADLSSGPQSKNRRARPSFAR

SEQ ID NO: 81425 - protein, 521 aa, Homo sapiens
  Payload ID: 16232
  Gene Symbol: SLC35F4
  Gene Name: solute carrier family 35, member F4
  Uniprot ID: A4IF30
  ENSP ID: ENSP00000342518
MDELLLDLFHKLTSGRQLAAGNGLCGISHKEQEVWKPGHNILVKMRKEDKSLVWLIHSTLARYTQVTNFLGTSRSSVTRCKPGANCPSSHSGISRQLSPLSVTEDSSAPILELQNQGSSGVCGHRVERQNRSADDGTQTHSENSSQENRIKARCLSCTSMVLKGIWGLLIILSVSSSWVGTTQIVKITYKNFYCPFFMTWFSTNWNIMFFPVYYSGHLATAQEKQSPMKKFRECSRIFGEDGLTLKLFLKRTAPFSILWTLTNYLYLLALKKLTATDVSALFCCNKAFVFLLSWIVLKDRFMGVRIVAAIMAITGIVMMAYADNFHADSIIGVAFAVGSASTSALYKVLFKMFLGSANFGEAAHFVSTLGFFNLIFISFTPVILYFTKVEHWSSFAALPWGCLCGMAGLWLAFNILVNVGVVLTYPILISIGTVLSVPGNAAVDLLKQEVIFNVVRLAATIIICIGFLLMLLPEEWDEITLRFINSLKEKKSEEHVDDVTDPSIHLRGRGRANGTVSIPLA

SEQ ID NO: 81426 - protein, 151 aa, Homo sapiens
  Payload ID: 16232
  Gene Symbol: SLC35F4
  Gene Name: solute carrier family 35, member F4
  ENSP ID: ENSP00000450836
MVLKGIWGLLIILSVSSSWVGTTQIVKITYKNFYCPFFMTWFSTNWNIMFFPVYYSGHLATAQEKQSPMKKFRECSRIFGEDGLTLKLFLKRTAPFSILWTLTNYLYLLALKKLTATDVSALFCCNKAFVFLLSWIVLKDRFMGVRIAGKP

SEQ ID NO: 81427 - protein, 362 aa, Homo sapiens
  Payload ID: 16232
  Gene Symbol: SLC35F4
  Gene Name: solute carrier family 35, member F4
  Uniprot ID: A4IF30
  ENSP ID: ENSP00000451990
MVLKGIWGLLIILSVSSSWVGTTQIVKITYKNFYCPFFMTWFSTNWNIMFFPVYYSGHLATAQEKQSPMKKFRECSRIFGEDGLTLKLFLKRTAPFSILWTLTNYLYLLALKKLTATDVSALFCCNKAFVFLLSWIVLKDRFMGVRIVAAIMAITGIVMMAYADNFHADSIIGVAFAVGSASTSALYKVLFKMFLGSANFGEAAHFVSTLGFFNLIFISFTPVILYFTKVEHWSSFAALPWGCLCGMAGLWLAFNILVNVGVVLTYPILISIGTVLSVPGNAAVDLLKQEVIFNVVRLAATIIICIGFLLMLLPEEWDEITLRFINSLKEKKSEEHVDDVTDPSIHLRGRGRANGTVSIPLA

SEQ ID NO: 81428 - protein, 485 aa, Homo sapiens
  Payload ID: 16232
  Gene Symbol: SLC35F4
  Gene Name: solute carrier family 35, member F4
  ENSP ID: ENSP00000452086
MDVKAAPNGVATIEDRILRITGYYGYYPGYSSQKSTSRSSVTRCKPGANCPSSHSGISRQLSPLSVTEDSSAPILELQNQGSSGVCGHRVERQNRSADDGTQTHSENSSQENRIKARCLSCTSMVLKGIWGLLIILSVSSSWVGTTQIVKITYKNFYCPFFMTWFSTNWNIMFFPVYYSGHLATAQEKQSPMKKFRECSRIFGEDGLTLKLFLKRTAPFSILWTLTNYLYLLALKKLTATDVSALFCCNKAFVFLLSWIVLKDRFMGVRIVAAIMAITGIVMMAYADNFHADSIIGVAFAVGSASTSALYKVLFKMFLGSANFGEAAHFVSTLGFFNLIFISFTPVILYFTKVEHWSSFAALPWGCLCGMAGLWLAFNILVNVGVVLTYPILISIGTVLSVPGNAAVDLLKQEVIFNVVRLAATIIICIGFLLMLLPEEWDEITLRFINSLKEKKSEEHVDDVTDPSIHLRGRGRANGTVSIPLA

SEQ ID NO: 81429 - protein, 46 aa, Homo sapiens
  Payload ID: 16232
  Gene Symbol: SLC35F4
  Gene Name: solute carrier family 35, member F4
  ENSP ID: ENSP00000452196
  MOD_RES (1)..(1): Any amino acid
XYLLALKKLTATDVSALFCCNKAFVFLLSWIVLKDRFMGVRIAGKP

SEQ ID NO: 81430 - protein, 523 aa, Homo sapiens
  Payload ID: 16233
  Gene Symbol: SLC35F5
  Gene Name: solute carrier family 35, member F5
  Uniprot ID: Q8WV83
  ENSP ID: ENSP00000245680
MVPPRRHRGAGRPGVLSSSPPFRLRSAKFSGIALEDLRRALKTRLQMVCVFVMNRMNSQNSGFTQRRRMALGIVILLLVDVIWVASSELTSYVFTQYNKPFFSTFAKTSMFVLYLLGFIIWKPWRQQCTRGLRGKHAAFFADAEGYFAACTTDTTMNSSLSEPLYVPVKFHDLPSEKPESTNIDTEKTPKKSRVRFSNIMEIRQLPSSHALEAKLSRMSYPVKEQESILKTVGKLTATQVAKISFFFCFVWFLANLSYQEALSDTQVAIVNILSSTSGLFTLILAAVFPSNSGDRFTLSKLLAVILSIGGVVLVNLAGSEKPAGRDTVGSIWSLAGAMLYAVYIVMIKRKVDREDKLDIPMFFGFVGLFNLLLLWPGFFLLHYTGFEDFEFPNKVVLMCIIINGLIGTVLSEFLWLWGCFLTSSLIGTLALSLTIPLSIIADMCMQKVQFSWLFFAGAIPVFFSFFIVTLLCHYNNWDPVMVGIRRIFAFICRKHRIQRVPEDSEQCESLISMHSVSQEDGAS

SEQ ID NO: 81431 - protein, 517 aa, Homo sapiens
  Payload ID: 16233
  Gene Symbol: SLC35F5
  Gene Name: solute carrier family 35, member F5
  ENSP ID: ENSP00000386754
MDSSGWRGVLSSSPPFRLRSAKFSGIALEDLRRALKTRLQMVCVFVMNRMNSQNSGFTQRRRMALGIVILLLVDVIWVASSELTSYVFTQYNKPFFSTFAKTSMFVLYLLGFIIWKPWRQQCTRGLRGKHAAFFADAEGYFAACTTDTTMNSSLSEPLYVPVKFHDLPSEKPESTNIDTEKTPKKSRVRFSNIMEIRQLPSSHALEAKLSRMSYPVKEQESILKTVGKLTATQVAKISFFFCFVWFLANLSYQEALSDTQVAIVNILSSTSGLFTLILAAVFPSNSGDRFTLSKLLAVILSIGGVVLVNLAGSEKPAGRDTVGSIWSLAGAMLYAVYIVMIKRKVDREDKLDIPMFFGFVGLFNLLLLWPGFFLLHYTGFEDFEFPNKVVLMCIIINGLIGTVLSEFLWLWGCFLTSSLIGTLALSLTIPLSIIADMCMQKVQFSWLFFAGAIPVFFSFFIVTLLCHYNNWDPVMVGIRRIFAFICRKHRIQRVPEDSEQCESLISMHSVSQEDGAS

SEQ ID NO: 81432 - protein, 248 aa, Homo sapiens
  Payload ID: 16233
  Gene Symbol: SLC35F5
  Gene Name: solute carrier family 35, member F5
  ENSP ID: ENSP00000386991
MDSSGWRGVLSSSPPFRLRSAKFSGIALEDLRRALKTRLQMVCVFVMNRMNSQNSGFTQRRRMALGIVILLLVDVIWVASSELTSYVFTQYNKPFFSTFAKTSMFVLYLLGFIIWKPWRQQCTRGLRGKHAAFFADAEGYFAACTTDTTMNSSLSEPLYVPVKFHDLPSEKPESTNIDTEKTPKKSRVRFSNIMEIRQLPSSHALEAKLSRMSYPVKEQESILKTVGKLTATQVAKISFFFCFVVGLL

SEQ ID NO: 81433 - protein, 242 aa, Homo sapiens
  Payload ID: 16233
  Gene Symbol: SLC35F5
  Gene Name: solute carrier family 35, member F5
  ENSP ID: ENSP00000396456
  MOD_RES (1)..(1): Any amino acid
XFLANLSYQEALSDTQVAIVNILSSTSGLFTLILAAVFPSNSGDRFTLSKLLAVILRLDKEGNGYKILNFIGGVVLVNLAGSEKPAGRDTVGSIWSLAGAMLYAVYIVMIKRKVDREDKLDIPMFFGFVGLFNLLLLWPGFFLLHYTGFEDFEFPNKVVLMCIIINGLIGTVLSEFLWLWGCFLTSSLIGTLALSLTIPLSIIADMCMQKVQFSWLFFAGAIPVFFSFFIVTLLCHYNNWDP

SEQ ID NO: 81434 - protein, 38 aa, Homo sapiens
  Payload ID: 16233
  Gene Symbol: SLC35F5
  Gene Name: solute carrier family 35, member F5
  ENSP ID: ENSP00000406253
  MOD_RES (1)..(1): Any amino acid
XLLCHYNNWDPVMVGIRRIFAFICRKHRIQSSRRQRTV

SEQ ID NO: 81435 - protein, 371 aa, Homo sapiens
  Payload ID: 16234
  Gene Symbol: SLC35F6
  Gene Name: solute carrier family 35, member F6
  Uniprot ID: Q8N357
  ENSP ID: ENSP00000345528
MAWTKYQLFLAGLMLVTGSINTLSAKWADNFMAEGCGGSKEHSFQHPFLQAVGMFLGEFSCLAAFYLLRCRAAGQSDSSVDPQQPFNPLLFLPPALCDMTGTSLMYVALNMTSASSFQMLRGAVIIFTGLFSVAFLGRRLVLSQWLGILATIAGLVVVGLADLLSKHDSQHKLSEVITGDLLIIMAQIIVAIQMVLEEKFVYKHNVHPLRAVGTEGLFGFVILSLLLVPMYYIPAGSFSGNPRGTLEDALDAFCQVGQQPLIAVALLGNISSIAFFNFAGISVTKELSATTRMVLDSLRTVVIWALSLALGWEAFHALQILGFLILLIGTALYNGLHRPLLGRLSRGRPLAEESEQERLLGGTRTPINDAS

SEQ ID NO: 81436 - protein, 51 aa, Homo sapiens
  Payload ID: 16234
  Gene Symbol: SLC35F6
  Gene Name: solute carrier family 35, member F6
  ENSP ID: ENSP00000396256
MAWTKYQLFLAGLMLVTGSINTLSAKWADNFMAEGCGGSKEHSFQHPFLQL

SEQ ID NO: 81437 - protein, 55 aa, Homo sapiens
  Payload ID: 16234
  Gene Symbol: SLC35F6
  Gene Name: solute carrier family 35, member F6
  ENSP ID: ENSP00000397623
MAWTKYQLFLAGLMLVTGSINTLSAKQWACSWENSPAWLPSTSSDAELQGNQTPA

SEQ ID NO: 81438 - protein, 364 aa, Homo sapiens
  Payload ID: 16235
  Gene Symbol: SLC35G1
  Gene Name: solute carrier family 35, member G1
  Uniprot ID: Q2M3R5
  ENSP ID: ENSP00000360462
MRPQDSTGVAELQEPGLPLTDDAPPGATEEPAAAEAAGAPDRGRCWLCLSSPCCSRTEPAKKKAPCPGLGLFYTLLSAFLFSVGSLFVKKVQDVHAVEISAFRCVFQMLVVIPCLIYRKTGFIGPKGQRIFLILRGVLGSTAMMLIYYAYQTMSLADATVITFSSPVFTSIFAWICLKEKYSPWDALFTVFTITGVILIVRPPFLFGSDTSGMEESYSGHLKGTFAAIGSAVFAASTLVILRKMGKSVDYFLSIWYYVVLGLVESVIILSVLGEWSLPYCGLDRLFLIFIGLFGLGGQIFITKALQIEKAGPVAIMKTMDVVFAFIFQIIFFNNVPTWWTVGGALCVVASNVGAAIRKWYQSSK

SEQ ID NO: 81439 - protein, 365 aa, Homo sapiens
  Payload ID: 16235
  Gene Symbol: SLC35G1
  Gene Name: solute carrier family 35, member G1
  Uniprot ID: Q2M3R5
  ENSP ID: ENSP00000400932
MRPQDSTGVAELQEPGLPLTDDAPPGATEEPAAAEAAGAPDRGRCWLCLSSPCCSRTEPEAKKKAPCPGLGLFYTLLSAFLFSVGSLFVKKVQDVHAVEISAFRCVFQMLVVIPCLIYRKTGFIGPKGQRIFLILRGVLGSTAMMLIYYAYQTMSLADATVITFSSPVFTSIFAWICLKEKYSPWDALFTVFTITGVILIVRPPFLFGSDTSGMEESYSGHLKGTFAAIGSAVFAASTLVILRKMGKSVDYFLSIWYYVVLGLVESVIILSVLGEWSLPYCGLDRLFLIFIGLFGLGGQIFITKALQIEKAGPVAIMKTMDVVFAFIFQIIFFNNVPTWWTVGGALCVVASNVGAAIRKWYQSSK

SEQ ID NO: 81440 - protein, 46 aa, Homo sapiens
  Payload ID: 16235
  Gene Symbol: SLC35G1
  Gene Name: solute carrier family 35, member G1
  ENSP ID: ENSP00000473766
MRPQDSTGVAELQEPGLPLTDDAPPGATEEPAAAEAAGAPDRATLL

SEQ ID NO: 81441 - protein, 63 aa, Homo sapiens
  Payload ID: 16235
  Gene Symbol: SLC35G1
  Gene Name: solute carrier family 35, member G1
  ENSP ID: ENSP00000473862
MRPQDSTGVAELQEPGLPLTDDAPPGATEEPAAAEAAGAPDRGRCWLCLSSPCCSRTEPATLL

SEQ ID NO: 81442 - protein, 63 aa, Homo sapiens; identical to SEQ ID NO: 81441
  Payload ID: 16235
  Gene Symbol: SLC35G1
  Gene Name: solute carrier family 35, member G1
  ENSP ID: ENSP00000474294

SEQ ID NO: 81443 - protein, 63 aa, Homo sapiens; identical to SEQ ID NO: 81441
  Payload ID: 16235
  Gene Symbol: SLC35G1
  Gene Name: solute carrier family 35, member G1
  ENSP ID: ENSP00000474890

SEQ ID NO: 81444 - protein, 412 aa, Homo sapiens
  Payload ID: 16236
  Gene Symbol: SLC35G2
  Gene Name: solute carrier family 35, member G2
  Uniprot ID: Q8TBE7
  ENSP ID: ENSP00000376794
MDTSPSRKYPVKKRVKIHPNTVMVKYTSHYPQPGDDGYEEINEGYGNFMEENPKKGLLSEMKKKGRAFFGTMDTLPPPTEDPMINEIGQFQSFAEKNIFQSRKMWIVLFGSALAHGCVALITRLVSDRSKVPSLELIFIRSVFQVLSVLVVCYYQEAPFGPSGYRLRLFFYGVCNVISITCAYTSFSIVPPSNGTTMWRATTTVFSAILAFLLVDEKMAYVDMATVVCSILGVCLVMIPNIVDEDNSLLNAWKEAFGYTMTVMAGLTTALSMIVYRSIKEKISMWTALFTFGWTGTIWGISTMFILQEPIIPLDGETWSYLIAICVCSTAAFLGVYYALDKFHPALVSTVQHLEIVVAMVLQLLVLHIFPSIYDVFGGVIIMISVFVLAGYKLYWRNLRKQDYQEILDSPIK

SEQ ID NO: 81445 - protein, 412 aa, Homo sapiens; identical to SEQ ID NO: 81444
  Payload ID: 16236
  Gene Symbol: SLC35G2
  Gene Name: solute carrier family 35, member G2
  Uniprot ID: Q8TBE7
  ENSP ID: ENSP00000400839

SEQ ID NO: 81446 - protein, 338 aa, Homo sapiens
  Payload ID: 16237
  Gene Symbol: SLC35G3
  Gene Name: solute carrier family 35, member G3
  Uniprot ID: Q8N808
  ENSP ID: ENSP00000297307
MAGSHPYFNQPDSTHPSPPSAPPSLRWYQRCQPSDATSGLLVALLGGGLPAGFVGPLSRMAYQASNLPSLELLIWRCLFHLPIALLLKLRGDPLLGTPDIRSRAFFCALLNILSIGCAYSAVQVVPAGNAATVRKGSSTVCSAVLTLCLESQGLSGYDWCGLLGCILGLIIIVGPGLWTLQEGTTGVYTALGYVEAFLGGLALSLRLLVYRSLHFPPCLPTVAFLSGLVGLLGSVPGLFVLQAPVLPSDLLSWSCVGAVGILALVSFTCVGYAVTKAHPALVCAVLHSEVVVALILQYYMLHETVAPSDIVAAGVVLGSIAIITAQNLSCERTGRVEE

SEQ ID NO: 81447 - protein, 338 aa, Homo sapiens
  Payload ID: 16238
  Gene Symbol: SLC35G5
  Gene Name: solute carrier family 35, member G5
  Uniprot ID: Q96KT7
  ENSP ID: ENSP00000371872
MAGSHPYFNLPDSTHPSPPSAPPSLRWHQRCQPSGATNGLLVALLGGGLPAGFVGPLSRMAYQGSNLPSLELLICRCLFHLPIALLLKLRGDPLLGPPDIRGWACFCALLNVLSIGCAYSAVQVVPAGNAATVRKGSSTVCSAVLTLCLESQGLGGYEWCGLLGSILGLIIILGPGLWTLQEGTTGVYTTLGYVQAFLGGLALSLGLLVYRSLHFPSCLPTVAFLSGLVGLLGCVPGLFVLQTPVLPSDLLSWSCVGAEGILALVSFTCVGYAVTKAHPALVCAVLHSEVVVALILQYYMLHETVALSDIMGAGVVLGSIAIITARNLSCERTGKVEE

SEQ ID NO: 81448 - protein, 338 aa, Homo sapiens
  Payload ID: 16239
  Gene Symbol: SLC35G6
  Gene Name: solute carrier family 35, member G6
  Uniprot ID: P0C7Q6
  ENSP ID: ENSP00000396523
MAGSHPYLNPPDSTHPSPPSAPPSLRWHQCCQPSDATNGLLVALLGGGLPAGFVGPLSHMAYQASNLPSLELLICRCLFHLPIALLLKLRGDPLLGPPDIRGRAYFYALLNVLSIGCAYSAVQVVPAGNAATVRKGSSTVCSAVLTLCLESQGLSGYDWCGLLGSILGLIIIVGPGLWTLQEGITGVYTALGYGQAFVGGLALSLGLLVYRSLHFPSCLPTVAFLSGLVGLLGSVPGLFVLQPPVLPSDLPSWSCVGAVGILALVSFTCVSYAVTKAHPALVCAVLHSEVVVALILQYYMLHETVAPSDIVGAGVVLGSIAIITAWNLSCEREGKVEE

SEQ ID NO: 81449 - protein, 476 aa, Homo sapiens
  Payload ID: 16240
  Gene Symbol: SLC36A1
  Gene Name: solute carrier family 36 (proton/amino acid symporter), member 1
  Uniprot ID: Q7Z2H8
  ENSP ID: ENSP00000243389
MSTQRLRNEDYHDYSSTDVSPEESPSEGLNNLSSPGSYQRFGQSNSTTWFQTLIHLLKGNIGTGLLGLPLAVKNAGIVMGPISLLIIGIVAVHCMGILVKCAHHFCRRLNKSFVDYGDTVMYGLESSPCSWLRNHAHWGRRVVDFFLIVTQLGFCCVYFVFLADNFKQVIEAANGTTNNCHNNETVILTPTMDSRLYMLSFLPFLVLLVFIRNLRALSIFSLLANITMLVSLVMIYQFIVQRIPDPSHLPLVAPWKTYPLFFGTAIFSFEGIGMVLPLENKMKDPRKFPLILYLGMVIVTILYISLGCLGYLQFGANIQGSITLNLPNCWLYQSVKLLYSIGIFFTYALQFYVPAEIIIPFFVSRAPEHCELVVDLFVRTVLVCLTCILAILIPRLDLVISLVGSVSSSALALIIPPLLEVTTFYSEGMSPLTIFKDALISILGFVGFVVGTYEALYELIQPSNAPIFINSTCAFI

SEQ ID NO: 81450 - protein, 243 aa, Homo sapiens
  Payload ID: 16240
  Gene Symbol: SLC36A1
  Gene Name: solute carrier family 36 (proton/amino acid symporter), member 1
  Uniprot ID: Q7Z2H8
  ENSP ID: ENSP00000395640
MSTQRLRNEDYHDYSSTDVSPEESPSEGLNNLSSPGSYQRFGQSNSTTWFQTLIHLLKGNIGTGLLGLPLAVKNAGIVMGPISLLIIGIVAVHCMGILVKCAHHFCRRLNKSFVDYGDTVMYGLESSPCSWLRNHAHWGRRVVDFFLIVTQLGFCCVYFVFLADNFKQVIEAANGTTNNCHNNETVILTPTMDSRLYMLSFLPFLVLLVFIRNLRALSIFSLLANITMLVSLVMIYQFIVQIL

SEQ ID NO: 81451 - protein, 70 aa, Homo sapiens
  Payload ID: 16240
  Gene Symbol: SLC36A1
  Gene Name: solute carrier family 36 (proton/amino acid symporter), member 1
  ENSP ID: ENSP00000427804
MSTQRLRNEDYHDYSSTDVSPEESPSEGLNNLSSPGSYQRFGQSNSTTWFQTLIHLLKGNIGTGLLGLPL

SEQ ID NO: 81452 - protein, 476 aa, Homo sapiens; identical to SEQ ID NO: 81449
  Payload ID: 16240
  Gene Symbol: SLC36A1
  Gene Name: solute carrier family 36 (proton/amino acid symporter), member 1
  Uniprot ID: Q7Z2H8
  ENSP ID: ENSP00000428140

SEQ ID NO: 81453 - protein, 71 aa, Homo sapiens
  Payload ID: 16240
  Gene Symbol: SLC36A1
  Gene Name: solute carrier family 36 (proton/amino acid symporter), member 1
  ENSP ID: ENSP00000428471
MSTQRLRNEDYHDYSSTDVSPEESPSEGLNNLSSPGSYQRFGQSNSTTWFQTLIHLLKGNIGTGLLGLPLA

SEQ ID NO: 81454 - protein, 145 aa, Homo sapiens
  Payload ID: 16240
  Gene Symbol: SLC36A1
  Gene Name: solute carrier family 36 (proton/amino acid symporter), member 1
  ENSP ID: ENSP00000428738
RIPDPSHLPLVAPWKTYPLFFGTAIFSFEGIGMVLPLENKMKDPRKFPLILYLGMVIVTILYISLGCLGYLQFGANIQGSITLNLPNCWLYQSVKLLYSIGIFFTYALQFYVPAEIIIPFFVSRAPEHCELVVDLFVRTVLVCLT

SEQ ID NO: 81455 - protein, 99 aa, Homo sapiens
  Payload ID: 16240
  Gene Symbol: SLC36A1
  Gene Name: solute carrier family 36 (proton/amino acid symporter), member 1
  ENSP ID: ENSP00000429796
MSTQRLRNEDYHDYSSTDVSPEESPSEGLNNLSSPGSYQRFGQSNSTTWFQTLIHLLKGNIGTGLLGLPLAVKNAGIVMGPISLLIIGIVAVHCMGILV

SEQ ID NO: 81456 - protein, 89 aa, Homo sapiens
  Payload ID: 16240
  Gene Symbol: SLC36A1
  Gene Name: solute carrier family 36 (proton/amino acid symporter), member 1
  ENSP ID: ENSP00000430181
  MOD_RES (1)..(1): Any amino acid
XVLPLENKMKDPRKFPLILYLGMVIVTILYISLGCLGYLQFGANIQGSITLNLPNCCPLHSSPPSPATASPHWLPWTAFCLGNSCRAFC

SEQ ID NO: 81457 - protein, 388 aa, Homo sapiens
  Payload ID: 16240
  Gene Symbol: SLC36A1
  Gene Name: solute carrier family 36 (proton/amino acid symporter), member 1
  ENSP ID: ENSP00000430305
MSTQRLRNEDYHDYSSTDVSPEESPSEGLNNLSSPGSYQRFGQSNSTTWFQTLIHLLKGNIGTGLLGLPLAVKNAGIVMGPISLLIIGIVAVHCMGILVKCAHHFCRRLNKSFVDYGDTVMYGLESSPCSWLRNHAHWGRRVVDFFLIVTQLGFCCVYFVFLADNFKQVIEAANGTTNNCHNNETVILTPTMDSRLYMLSFLPFLVLLVFIRNLRALSIFSLLANITMLVSLVMIYQFIVQRIPDPSHLPLVAPWKTYPLFFGTAIFSFEGIGMVLPLENKMKDPRKFPLILYLGMVIVTILYISLGCLGYLQFGANIQGSITLNLPNCWLYQSVKLLYSIGIFFTYALQFYVPAEIIIPFFVSRAPEHCELVVDLFVRTVLVCLTCE

SEQ ID NO: 81458 - protein, 386 aa, Homo sapiens
  Payload ID: 16240
  Gene Symbol: SLC36A1
  Gene Name: solute carrier family 36 (proton/amino acid symporter), member 1
  Uniprot ID: Q7Z2H8
  ENSP ID: ENSP00000480948
MSTQRLRNEDYHDYSSTDVSPEESPSEGLNNLSSPGSYQRFGQSNSTTWFQTLIHLLKGNIGTGLLGLPLAVKNAGIVMGPISLLIIGIVAVHCMGILVKCAHHFCRRLNKSFVDYGDTVMYGLESSPCSWLRNHAHWGRRVVDFFLIVTQLGFCCVYFVFLADNFKQVIEAANGTTNNCHNNETVILTPTMDSRLYMLSFLPFLVLLVFIRNLRALSIFSLLANITMLVSLVMIYQFIVQRIPDPSHLPLVAPWKTYPLFFGTAIFSFEGIGMVLPLENKMKDPRKFPLILYLGMVIVTILYISLGCLGYLQFGANIQGSITLNLPNCWLYQSVKLLYSIGIFFTYALQFYVPAEIIIPFFVSRAPEHCELVVDLFVRTVLVCLT

SEQ ID NO: 81459 - protein, 483 aa, Homo sapiens
  Payload ID: 16241
  Gene Symbol: SLC36A2
  Gene Name: solute carrier family 36 (proton/amino acid symporter), member 2
  Uniprot ID: Q495M3
  ENSP ID: ENSP00000334223
MSVTKSTEGPQGAVAIKLDLMSPPESAKKLENKDSTFLDESPSESAGLKKTKGITVFQALIHLVKGNMGTGILGLPLAVKNAGILMGPLSLLVMGFIACHCMHILVKCAQRFCKRLNKPFMDYGDTVMHGLEANPNAWLQNHAHWGRHIVSFFLIITQLGFCCVYIVFLADNLKQVVEAVNSTTNNCYSNETVILTPTMDSRLYMLSFLPFLVLLVLIRNLRILTIFSMLANISMLVSLVIIIQYITQEIPDPSRLPLVASWKTYPLFFGTAIFSFESIGVVLPLENKMKNARHFPAILSLGMSIVTSLYIGMAALGYLRFGDDIKASISLNLPNCWLYQSVKLLYIAGILCTYALQFYVPAEIIIPFAISRVSTRWALPLDLSIRLVMVCLTCLLAILIPRLDLVISLVGSVSGTALALIIPPLLEVTTFYSEGMSPLTIFKDALISILGFVGFVVGTYQALDELLKSEDSHPFSNSTTFVR

SEQ ID NO: 81460 - protein, 147 aa, Homo sapiens
  Payload ID: 16241
  Gene Symbol: SLC36A2
  Gene Name: solute carrier family 36 (proton/amino acid symporter), member 2
  ENSP ID: ENSP00000428453
MSVTKSTEGPQGAVAIKLDLMSPPESAKKLENKDSTFLDESPSESAGLKKTKGITVFQALIHLVKGNMGTGILGLPLAVKNAGILMGPLSLLVMGFIACHCMHILVKCAQRFCKRLNKPFMDYGDTVMHGLEANPNAWLQNHAHWGR

SEQ ID NO: 81461 - protein, 107 aa, Homo sapiens
  Payload ID: 16241
  Gene Symbol: SLC36A2
  Gene Name: solute carrier family 36 (proton/amino acid symporter), member 2
  ENSP ID: ENSP00000428634
  MOD_RES (1)..(1): Any amino acid
XEIPDPSRLPLVASWKTYPLFFGTAIFSFESIGVVLPLENKMKNARHFPAILSLGMSIVTSLYIGMAALGYLRFGDDIKASISLNLPNCWYLHGLSGGGDSGMGGNV

SEQ ID NO: 81462 - protein, 147 aa, Homo sapiens; identical to SEQ ID NO: 81460
  Payload ID: 16241
  Gene Symbol: SLC36A2
  Gene Name: solute carrier family 36 (proton/amino acid symporter), member 2
  ENSP ID: ENSP00000430149

SEQ ID NO: 81463 - protein, 395 aa, Homo sapiens
  Payload ID: 16241
  Gene Symbol: SLC36A2
  Gene Name: solute carrier family 36 (proton/amino acid symporter), member 2
  ENSP ID: ENSP00000430535
MSVTKSTEGPQGAVAIKLDLMSPPESAKKLENKDSTFLDESPSESAGLKKTKGITVFQALIHLVKGNMGTGILGLPLAVKNAGILMGPLSLLVMGFIACHCMHILVKCAQRFCKRLNKPFMDYGDTVMHGLEANPNAWLQNHAHWGRHIVSFFLIITQLGFCCVYIVFLADNLKQVVEAVNSTTNNCYSNETVILTPTMDSRLYMLSFLPFLVLLVLIRNLRILTIFSMLANISMLVSLVIIIQYITQEIPDPSRLPLVASWKTYPLFFGTAIFSFESIGVVLPLENKMKNARHFPAILSLGMSIVTSLYIGMAALGYLRFGDDIKASISLNLPNCWLYQSVKLLYIAGILCTYALQFYVPAEIIIPFAISRVSTRWALPLDLSIRLVMVCLTCE

SEQ ID NO: 81464 - protein, 504 aa, Homo sapiens
  Payload ID: 16242
  Gene Symbol: SLC36A4
  Gene Name: solute carrier family 36 (proton/amino acid symporter), member 4
  Uniprot ID: Q6YBV0
  ENSP ID: ENSP00000317382
MEAAATPAAAGAARREELDMDVMRPLINEQNFDGTSDEEHEQELLPVQKHYQLDDQEGISFVQTLMHLLKGNIGTGLLGLPLAIKNAGIVLGPISLVFIGIISVHCMHILVRCSHFLCLRFKKSTLGYSDTVSFAMEVSPWSCLQKQAAWGRSVVDFFLVITQLGFCSVYIVFLAENVKQVHEGFLESKVFISNSTNSSNPCERRSVDLRIYMLCFLPFIILLVFIRELKNLFVLSFLANVSMAVSLVIIYQYVVRNMPDPHNLPIVAGWKKYPLFFGTAVFAFEGIGVVLPLENQMKESKRFPQALNIGMGIVTTLYVTLATLGYMCFHDEIKGSITLNLPQDVWLYQSVKILYSFGIFVTYSIQFYVPAEIIIPGITSKFHTKWKQICEFGIRSFLVSITCAGAILIPRLDIVISFVGAVSSSTLALILPPLVEILTFSKEHYNIWMVLKNISIAFTGVVGFLLGTYITVEEIIYPTPKVVAGTPQSPFLNLNSTCLTSGLK

SEQ ID NO: 81465 - protein, 280 aa, Homo sapiens
  Payload ID: 16242
  Gene Symbol: SLC36A4
  Gene Name: solute carrier family 36 (proton/amino acid symporter), member 4
  ENSP ID: ENSP00000432061
MHILVRCSHFLCLRFKKSTLGYSDTVSFAMEVSPWSCLQKQAAWGRSVVDFFLVITQLGFCSVYIVFLAENVKQVHEGFLESKVFISNSTNSSNPCERRSVDLRIYMLCFLPFIILLVFIRELKNLFVLSFLANVSMAVSLVIIYQYVVRNMPDPHNLPIVAGWKKYPLFFGTAVFAFEGIGVVLPLENQMKESKRFPQALNIGMGIVTTLYVTLATLGYMCFHDEIKGSITLNLPQDVWLYQSVKILYSFGIFVTYSIQFYVPAEIIIPGITSKFHTKW

SEQ ID NO: 81466 - protein, 111 aa, Homo sapiens
  Payload ID: 16242
  Gene Symbol: SLC36A4
  Gene Name: solute carrier family 36 (proton/amino acid symporter), member 4
  ENSP ID: ENSP00000434879
MEAAATPAAAGAARREELDMDVMRPLINEQNFDGTSDEEHEQELLPVQKHYQLDDQEGISFVQTLMHLLKGNIGTGLLGLPLAIKNAGIVLGPISLVFIGIISVHCMHILV

SEQ ID NO: 81467 - protein, 369 aa, Homo sapiens
  Payload ID: 16242
  Gene Symbol: SLC36A4
  Gene Name: solute carrier family 36 (proton/amino acid symporter), member 4
  Uniprot ID: Q6YBV0
  ENSP ID: ENSP00000436570
MEVSPWSCLQKQAAWGRSVVDFFLVITQLGFCSVYIVFLAENVKQVHEGFLESKVFISNSTNSSNPCERRSVDLRIYMLCFLPFIILLVFIRELKNLFVLSFLANVSMAVSLVIIYQYVVRNMPDPHNLPIVAGWKKYPLFFGTAVFAFEGIGVVLPLENQMKESKRFPQALNIGMGIVTTLYVTLATLGYMCFHDEIKGSITLNLPQDVWLYQSVKILYSFGIFVTYSIQFYVPAEIIIPGITSKFHTKWKQICEFGIRSFLVSITCAGAILIPRLDIVISFVGAVSSSTLALILPPLVEILTFSKEHYNIWMVLKNISIAFTGVVGFLLGTYITVEEIIYPTPKVVAGTPQSPFLNLNSTCLTSGLK

SEQ ID NO: 81468 - protein, 470 aa, Homo sapiens
  Payload ID: 16243
  Gene Symbol: SLC36A3
  Gene Name: solute carrier family 36, member 3
  Uniprot ID: Q495N2
  ENSP ID: ENSP00000334750
MSLLGRDYNSELNSLDNGPQSPSESSSSITSENVHPAGEAGLSMMQTLIHLLKCNIGTGLLGLPLAIKNAGLLVGPVSLLAIGVLTVHCMVILLNCAQHLSQRLQKTFVNYGEATMYGLETCPNTWLRAHAVWGRYTVSFLLVITQLGFCSVYFMFMADNLQQMVEKAHVTSNICQPREILTLTPILDIRFYMLIILPFLILLVFIQNLKVLSVFSTLANITTLGSMALIFEYIMEGIPYPSNLPLMANWKTFLLFFGTAIFTFEGVGMVLPLKNQMKHPQQFSFVLYLGMSIVIILYILLGTLGYMKFGSDTQASITLNLPNCWLYQSVKLMYSIGIFFTYALQFHVPAEIIIPFAISQVSESWALFVDLSVRSALVCLTCVSAILIPRLDLVISLVGSVSSSALALIIPALLEIVIFYSEDMSCVTIAKDIMISIVGLLGCIFGTYQALYELPQPISHSMANSTGVHA

SEQ ID NO: 81469 - protein, 511 aa, Homo sapiens
  Payload ID: 16243
  Gene Symbol: SLC36A3
  Gene Name: solute carrier family 36, member 3
  Uniprot ID: Q495N2
  ENSP ID: ENSP00000366942
MSLLGRDYNSELNSLDNGPQSPSESSSSITSENVHPAGEAGLSMMQTLIHLLKCNIGTGLLGLPLAIKNAGLLVGPVSLLAIGVLTVHCMVILLNCAQHLSQRLQKTFVNYGEATMYGLETCPNTWLRAHAVWGRWNLALSPRLECSGKISAHCNPHLQGSSNSPAQASRVAGIYRYTVSFLLVITQLGFCSVYFMFMADNLQQMVEKAHVTSNICQPREILTLTPILDIRFYMLIILPFLILLVFIQNLKVLSVFSTLANITTLGSMALIFEYIMEGIPYPSNLPLMANWKTFLLFFGTAIFTFEGVGMVLPLKNQMKHPQQFSFVLYLGMSIVIILYILLGTLGYMKFGSDTQASITLNLPNCWLYQSVKLMYSIGIFFTYALQFHVPAEIIIPFAISQVSESWALFVDLSVRSALVCLTCVSAILIPRLDLVISLVGSVSSSALALIIPALLEIVIFYSEDMSCVTIAKDIMISIVGLLGCIFGTYQALYELPQPISHSMANSTGVHA

SEQ ID NO: 81470 - protein, 533 aa, Homo sapiens
  Payload ID: 16244
  Gene Symbol: SLC37A1
  Gene Name: solute carrier family 37 (glucose-6-phosphate transporter), member 1
  Uniprot ID: P57057
  ENSP ID: ENSP00000344648
MARLPAGIRFIISFSRDQWYRAFIFILTFLLYASFHLSRKPISIVKGELHKYCTAWDEADVRFSSQNRKSGSAAPHQLPDNETDCGWAPFDKNNYQQLLGALDYSFLCAYAVGMYLSGIIGERLPIRYYLTFGMLASGAFTALFGLGYFYNIHSFGFYVVTQVINGLVQTTGWPSVVTCLGNWFGKGRRGLIMGVWNSHTSVGNILGSLIAGYWVSTCWGLSFVVPGAIVAAMGIVCFLFLIEHPNDVRCSSTLVTHSKGYENGTNRLRLQKQILKSEKNKPLDPEMQCLLLSDGKGSIHPNHVVILPGDGGSGTAAISFTGALKIPGVIEFSLCLLFAKLVSYTFLFWLPLYITNVDHLDAKKAGELSTLFDVGGIFGGILAGVISDRLEKRASTCGLMLLLAAPTLYIFSTVSKMGLEATIAMLLLSGALVSGPYTLITTAVSADLGTHKSLKGNAHALSTVTAIIDGTGSVGAALGPLLAGLLSPSGWSNVFYMLMFADACALLFLIRLIHKELSCPGSATGDQVPFKEQ

SEQ ID NO: 81471 - protein, 533 aa, Homo sapiens; identical to SEQ ID NO: 81470
  Payload ID: 16244
  Gene Symbol: SLC37A1
  Gene Name: solute carrier family 37 (glucose-6-phosphate transporter), member 1
  Uniprot ID: P57057
  ENSP ID: ENSP00000381383

SEQ ID NO: 81472 - protein, 18 aa, Homo sapiens
  Payload ID: 16244
  Gene Symbol: SLC37A1
  Gene Name: solute carrier family 37 (glucose-6-phosphate transporter), member 1
  ENSP ID: ENSP00000381385
MARLPAGIRFIISFSRDQ

SEQ ID NO: 81473 - protein, 18 aa, Homo sapiens
  Payload ID: 16244
  Gene Symbol: SLC37A1
  Gene Name: solute carrier family 37 (glucose-6-phosphate transporter), member 1
  ENSP ID: ENSP00000410129
MARLPAGIRFIISFSRDQ

SEQ ID NO: 81474 - protein, 505 aa, Homo sapiens
  Payload ID: 16245
  Gene Symbol: SLC37A2
  Gene Name: solute carrier family 37 (glucose-6-phosphate transporter), member 2
  Uniprot ID: Q8TED4
  ENSP ID: ENSP00000311833
MRSSLAPGVWFFRAFSRDSWFRGLILLLTFLIYACYHMSRKPISIVKSRLHQNCSEQIKPINDTHSLNDTMWCSWAPFDKDNYKELLGGVDNAFLIAYAIGMFISGVFGERLPLRYYLSAGMLLSGLFTSLFGLGYFWNIHELWYFVVIQVCNGLVQTTGWPSVVTCVGNWFGKGKRGFIMGIWNSHTSVGNILGSLIAGIWVNGQWGLSFIVPGIITAVMGVITFLFLIEHPEDVDCAPPQHHGEPAENQDNPEDPGNSPCSIRESGLETVAKCSKGPCEEPAAISFFGALRIPGVVEFSLCLLFAKLVSYTFLYWLPLYIANVAHFSAKEAGDLSTLFDVGGIIGGIVAGLVSDYTNGRATTCCVMLILAAPMMFLYNYIGQDGIASSIVMLIICGGLVNGPYALITTAVSADLGTHKSLKGNAKALSTVTAIIDGTGSIGAALGPLLAGLISPTGWNNVFYMLISADVLACLLLCRLVYKEILAWKVSLSRGSGSSMVLTHQ

SEQ ID NO: 81475 - protein, 501 aa, Homo sapiens
  Payload ID: 16245
  Gene Symbol: SLC37A2
  Gene Name: solute carrier family 37 (glucose-6-phosphate transporter), member 2
  Uniprot ID: Q8TED4
  ENSP ID: ENSP00000384407
MRSSLAPGVWFFRAFSRDSWFRGLILLLTFLIYACYHMSRKPISIVKSRLHQNCSEQIKPINDTHSLNDTMWCSWAPFDKDNYKELLGGVDNAFLIAYAIGMFISGVFGERLPLRYYLSAGMLLSGLFTSLFGLGYFWNIHELWYFVVIQVCNGLVQTTGWPSVVTCVGNWFGKGKRGFIMGIWNSHTSVGNILGSLIAGIWVNGQWGLSFIVPGIITAVMGVITFLFLIEHPEDVDCAPPQHHGEPAENQDNPEDPGNSPCSIRESGLETVAKCSKGPCEEPAAISFFGALRIPGVVEFSLCLLFAKLVSYTFLYWLPLYIANVAHFSAKEAGDLSTLFDVGGIIGGIVAGLVSDYTNGRATTCCVMLILAAPMMFLYNYIGQDGIASSIVMLIICGGLVNGPYALITTAVSADLGTHKSLKGNAKALSTVTAIIDGTGSIGAALGPLLAGLISPTGWNNVFYMLISADVLACLLLCRLVYKEILAWKVSLSRGSGYKEI

SEQ ID NO: 81476 - protein, 150 aa, Homo sapiens
  Payload ID: 16245
  Gene Symbol: SLC37A2
  Gene Name: solute carrier family 37 (glucose-6-phosphate transporter), member 2
  ENSP ID: ENSP00000432254
MSRKPISIVKSRLHQNCSEQIKPINDTHSLNDTMWCSWAPFDKDNYKELLGGVDNAFLIAYAIGMFISGVFGERLPLRYYLSAGMLLSGLFTSLFGLGYFWNIHELWYFVVIQVCNGLVQTTGWPSVVTCVGNWFGKGKRGFIMGIWNSH

SEQ ID NO: 81477 - protein, 429 aa, Homo sapiens
  Payload ID: 16246
  Gene Symbol: SLC37A4
  Gene Name: solute carrier family 37 (glucose-6-phosphate transporter), member 4
  ENSP ID: ENSP00000475241
MAAQGYGYYRTVIFSAMFGGYSLYYFNRKTFSFVMPSLVEEIPLDKDDLGFITSSQSAAYAISKFVSGVLSDQMSARWLFSSGLLLVGLVNIFFAWSSTVPVFAALWFLNGLAQGLGWPPCGKVLRKWFEPSQFGTWWAILSTSMNLAGGLGPILATILAQSYSWRSTLALSGALWVVVSFLCLLLIHNEPADVGLRNLDPMPSEGKKGSLKEESTLQELLLSPYLWVLSTGYLVVFGVKTCCTDWGQFFLIQEKGQSALVGSSYMSALEVGGLVGSIAAGYLSDRAMAKAGLSNYGNPRHGLLLFMMAGMTVSMYLFRVTVTSDSPKLWILVLGAVFGFSSYGPIALFGVIANESAPPNLCGTSHAIVGLMANVGGFLAGLPFSTIAKHYSWSTAFWVAEVICAASTAAFFLLRNIRTKMGRVSKKAE

SEQ ID NO: 81478 - protein, 356 aa, Homo sapiens
  Payload ID: 16246
  Gene Symbol: SLC37A4
  Gene Name: solute carrier family 37 (glucose-6-phosphate transporter), member 4
  ENSP ID: ENSP00000475991
MSARWLFSSGLLLVGLVNIFFAWSSTVPVFAALWFLNGLAQGLGWPPCGKVLRKWFEPSQFGTWWAILSTSMNLAGGLGPILATILAQSYSWRSTLALSGALWVVVSFLCLLLIHNEPADVGLRNLDPMPSEGKKGSLKEESTLQELLLSPYLWVLSTGYLVVFGVKTCCTDWGQFFLIQEKGQSALVGSSYMSALEVGGLVGSIAAGYLSDRAMAKAGLSNYGNPRHGLLLFMMAGMTVSMYLFRVTVTSDSPKLWILVLGAVFGFSSYGPIALFGVIANESAPPNLCGTSHAIVGLMANVGGFLAGLPFSTIAKHYSWSTAFWVAEVICAASTAAFFLLRNIRTKMGRVSKKAE

SEQ ID NO: 81479 - protein, 451 aa, Homo sapiens
  Payload ID: 16246
  Gene Symbol: SLC37A4
  Gene Name: solute carrier family 37 (glucose-6-phosphate transporter), member 4
  ENSP ID: ENSP00000476176
MAAQGYGYYRTVIFSAMFGGYSLYYFNRKTFSFVMPSLVEEIPLDKDDLGFITSSQSAAYAISKFVSGVLSDQMSARWLFSSGLLLVGLVNIFFAWSSTVPVFAALWFLNGLAQGLGWPPCGKVLRKWFEPSQFGTWWAILSTSMNLAGGLGPILATILAQSYSWRSTLALSGALWVVVSFLCLLLIHNEPADVGLRNLDPMPSEGKKGSLKEESTLQELLLSPYLWVLSTGYLVVFGVKTCCTDWGQFFLIQEKGQSALVGSSYMSALEVGGLVGSIAAGYLSDRAMAKAGLSNYGNPRHGLLLFMMAGMTVSMYLFRVTVTSDSPKDVAFWTLALHPLAELTGFTEHELWILVLGAVFGFSSYGPIALFGVIANESAPPNLCGTSHAIVGLMANVGGFLAGLPFSTIAKHYSWSTAFWVAEVICAASTAAFFLLRNIRTKMGRVSKKAE

SEQ ID NO: 81480 - protein, 429 aa, Homo sapiens; identical to SEQ ID NO: 81477
  Payload ID: 16246
  Gene Symbol: SLC37A4
  Gene Name: solute carrier family 37 (glucose-6-phosphate transporter), member 4
  ENSP ID: ENSP00000476242

SEQ ID NO: 81481 - protein, 494 aa, Homo sapiens
  Payload ID: 16247
  Gene Symbol: SLC37A3
  Gene Name: solute carrier family 37, member 3
  Uniprot ID: Q8NCC5
  ENSP ID: ENSP00000321498
MAWPNVFQRGSLLSQFSHHHVVVFLLTFFSYSLLHASRKTFSNVKVSISEQWTPSAFNTSVELPVEIWSSNHLFPSAEKATLFLGTLDTIFLFSYAVGLFISGIVGDRLNLRWVLSFGMCSSALVVFVFGALTEWLRFYNKWLYCCLWIVNGLLQSTGWPCVVAVMGNWFGKAGRGVVFGLWSACASVGNILGACLASSVLQYGYEYAFLVTASVQFAGGIVIFFGLLVSPEEIGLSGIEAEENFEEDSHRPLINGGENEDEYEPNYSIQDDSSVAQVKAISFYQACCLPGVIPYSLAYACLKLVNYSFFFWLPFYLSNNFGWKEAEADKLSIWYDVGGIIGGTLQGFISDVLQKRAPVLALSLLLAVGSLIGYSRSPNDKSINALLMTVTGFFIGGPSNMISSAISADLGRQELIQRSSEALATVTGIVDGSGSIGAAVGQYLVSLIRDKLGWMWVFYFFILMTSCTIVFISPLIVREIFSLVLRRQAHILRE

SEQ ID NO: 81482 - protein, 443 aa, Homo sapiens
  Payload ID: 16247
  Gene Symbol: SLC37A3
  Gene Name: solute carrier family 37, member 3
  Uniprot ID: Q8NCC5
  ENSP ID: ENSP00000343358
MAWPNVFQRGSLLSQFSHHHVVVFLLTFFSYSLLHASRKTFSNVKVSISEQWTPSAFNTSVELPVEIWSSNHLFPSAEKATLFLGTLDTIFLFSYAVGLFISGIVGDRLNLRWVLSFGMCSSALVVFVFGALTEWLRFYNKWLYCCLWIVNGLLQSTGWPCVVAVMGNWFGKAGRGVVFGLWSACASVGNILGACLASSVLQYGYEYAFLVTASVQFAGGIVIFFGLLVSPEEIGLSGIEAEENFEEDSHRPLINGGENEDEYEPNYSIQDDSSVAQVKAISFYQACCLPGVIPYSLAYACLKLVNYSFFFWLPFYLSNNFGWKEAEADKLSIWYDVGGIIVFSVSDPGQARMDVGFLLFHSHDKLYNCVYLAINSEGNILSRAKETGSHIEGVTGARETERTMSATSGPLGLRVCPNLGLSRSSSLILDCQASLNTASHLRC

SEQ ID NO: 81483 - protein, 478 aa, Homo sapiens
  Payload ID: 16247
  Gene Symbol: SLC37A3
  Gene Name: solute carrier family 37, member 3
  Uniprot ID: Q8NCC5
  ENSP ID: ENSP00000397481
MAWPNVFQRGSLLSQFSHHHVVVFLLTFFSYSLLHASRKTFSNVKVSISEQWTPSAFNTSVELPVEIWSSNHLFPSAEKATLFLGTLDTIFLFSYAVGLFISGIVGDRLNLRWVLSFGMCSSALVVFVFGALTEWLRFYNKWLYCCLWIVNGLLQSTGWPCVVAVMGNWFGKAGRGVVFGLWSACASVGNILGACLASSVLQYGYEYAFLVTASVQFAGGIVIFFGLLVSPEEIGLSGIEAEENFEEDSHRPLINGGENEDEYEPNYSIQDDSSVAQVKAISFYQACCLPGVIPYSLAYACLKLVNYSFFFWLPFYLSNNFGWKEAEADKLSIWYDVGGIIGGTLQGFISDVLQKRAPVLALSLLLAVGSLIGYSRFFIGGPSNMISSAISADLGRQELIQRSSEALATVTGIVDGSGSIGAAVGQYLVSLIRDKLGWMWVFYFFILMTSCTIVFISPLIVREIFSLVLRRQAHILRE

SEQ ID NO: 81484 - protein, 14 aa, Homo sapiens
  Payload ID: 16247
  Gene Symbol: SLC37A3
  Gene Name: solute carrier family 37, member 3
  ENSP ID: ENSP00000417181
MAWPNVFQRGSLLS

SEQ ID NO: 81485 - protein, 224 aa, Homo sapiens
  Payload ID: 16247
  Gene Symbol: SLC37A3
  Gene Name: solute carrier family 37, member 3
  ENSP ID: ENSP00000417365
MAWPNVFQRGSLLSQFSHHHVVVFLLTFFSYSLLHASRKTFSNVKVSISEQWTPSAFNTSVELPVEIWSSNHLFPSAEKATLFLGTLDTIFLFSYAVGLFISGIVGDRLNLRWVLSFGMCSSALVVFVFGALTEWLRFYNKWLYCCLWIVNGLLQSTGWPCVVAVMGNWFGKAGRGVVFGLWSACASVGNILGACLASSVLQYGYEVSRVLRQKKTLKKTHTGH

SEQ ID NO: 81486 - protein, 98 aa, Homo sapiens
  Payload ID: 16247
  Gene Symbol: SLC37A3
  Gene Name: solute carrier family 37, member 3
  ENSP ID: ENSP00000417380
  MOD_RES (1)..(1): Any amino acid
XSAISADLGRQELIQRSSEALATVTGIVDGSGSIGAAVGQETGSHIEGVTGARETERTMSATSGPLGLRVCPNLGLSRSSSLILDCQASLNTASHLRC

SEQ ID NO: 81487 - protein, 81 aa, Homo sapiens
  Payload ID: 16247
  Gene Symbol: SLC37A3
  Gene Name: solute carrier family 37, member 3
  ENSP ID: ENSP00000417447
  MOD_RES (1)..(1): Any amino acid
XYSIQDDSSVAQVKAISFYQACCLPGVIPYLVSLIRDKLGWMWVFYFFILMTSCTIVFISPLIVREIFSLVLRRQAHILRE

SEQ ID NO: 81488 - protein, 150 aa, Homo sapiens
  Payload ID: 16247
  Gene Symbol: SLC37A3
  Gene Name: solute carrier family 37, member 3
  ENSP ID: ENSP00000417449
  MOD_RES (1)..(1): Any amino acid
XFPSAEKATLFLGTLDTIFLFSYAVGLFISGIVGDRLNLRWVLSFGMCSSALVVFVFGALTEWLRFYNKWLYCCLWIVNGLLQSTGWPCVVAVMGNWFGKAGRGVVFGLWSACASVGNILGACLASSVLQYGYEICKDHLSPLSSSMPFW

SEQ ID NO: 81489 - protein, 151 aa, Homo sapiens
  Payload ID: 16247
  Gene Symbol: SLC37A3
  Gene Name: solute carrier family 37, member 3
  ENSP ID: ENSP00000417461
  MOD_RES (1)..(1): Any amino acid
XLLLAVGSLIGYSRSPNDKSINALLMTVTGFFIGGPSNMISSAISADLGRQELIQRSSEALATVTGIVDGSGSIGAAVGQYLVSLIRDKLGWMWVFYFFILMTGSHIEGVTGARETERTMSATSGPLGLRVCPNLGLSRSSSLILDCQASL

SEQ ID NO: 81490 - protein, 122 aa, Homo sapiens
  Payload ID: 16247
  Gene Symbol: SLC37A3
  Gene Name: solute carrier family 37, member 3
  ENSP ID: ENSP00000418136
GWKEAEADKLSIWYDVGGIIVFSVSDPGQARMDVGFLLFHSHDKLYNCVYLAINSEGNILSRAKETGSHIEGVTGARETERTMSATSGPLGLRVCPNLGLSRSSSLILDCQASLNTASHLRC

SEQ ID NO: 81491 - protein, 161 aa, Homo sapiens
  Payload ID: 16247
  Gene Symbol: SLC37A3
  Gene Name: solute carrier family 37, member 3
  ENSP ID: ENSP00000418158
LSLLLAVGSLIGYSRSPNDKSINALLMTVTGFFIGGPSNMISSAISADLGRQELIQRSSEALATVTGIVDGSGSIGAAVGQYLVSLIRDKLGWMWVFYFFILMETGSHIEGVTGARETERTMSATSGPLGLRVCPNLGLSRSSSLILDCQASLNTASHLRC

SEQ ID NO: 81492 - protein, 54 aa, Homo sapiens
  Payload ID: 16247
  Gene Symbol: SLC37A3
  Gene Name: solute carrier family 37, member 3
  ENSP ID: ENSP00000418585
MAWPNVFQRGSLLSQFSHHHVVVFLLTFFRCLSLVRSQNGCVSTTNGCTAACGL

SEQ ID NO: 81493 - protein, 56 aa, Homo sapiens
  Payload ID: 16247
  Gene Symbol: SLC37A3
  Gene Name: solute carrier family 37, member 3
  ENSP ID: ENSP00000418610
QRSSEALATVTGIVDGSGSIGAAVGQTSCTIVFISPLIVREIFSLVLRRQAHILRE

SEQ ID NO: 81494 - protein, 153 aa, Homo sapiens
  Payload ID: 16247
  Gene Symbol: SLC37A3
  Gene Name: solute carrier family 37, member 3
  ENSP ID: ENSP00000419024
MAWPNVFQRGSLLSQFSHHHVVVFLLTFFSYSLLHASRKTFSNVKVSISEQWTPSAFNTSVELPVEIWSSNHLFPSAEKATLFLGTLDTIFLFSYAVGLFISGIVGDRLNLRWVLSFGMCSSALVYAFLVTASVQFAGGIVIFFGLLVSPEEI

SEQ ID NO: 81495 - protein, 193 aa, Homo sapiens
  Payload ID: 16247
  Gene Symbol: SLC37A3
  Gene Name: solute carrier family 37, member 3
  ENSP ID: ENSP00000419285
  MOD_RES (1)..(1): Any amino acid
XIFFGLLVSPEEIGLSGIEAEENFEEDSHRPLINGGENEDEYEPNYSIQDDSSVAQVKAISFYQACCLPGVIPYSLAYACLKLVNYSFFFWLPFYLSNNFGWKEAEADKLSIWYDVGGIIGGTLQGFISDVLQKRAPVLALSLLLAVGSLIGYSLFSVSDPGQARMDVGFLLFHSHDKLYNCVYLAINSEGNI

SEQ ID NO: 81496 - protein, 66 aa, Homo sapiens
  Payload ID: 16247
  Gene Symbol: SLC37A3
  Gene Name: solute carrier family 37, member 3
  ENSP ID: ENSP00000419410
MAWPNVFQRGSLLSQFSHHHVVVFLLTFFSYSLLHASRKTFSNVKVSISEQWTPSAFNTSVELPVE

SEQ ID NO: 81497 - protein, 125 aa, Homo sapiens
  Payload ID: 16247
  Gene Symbol: SLC37A3
  Gene Name: solute carrier family 37, member 3
  ENSP ID: ENSP00000419701
GLFISGIVGDRLNLRWVLSFGMCSSALVVFVFGALTEWLRFYNKWLYCCLWIVNGLLQSTGWPCVVAVMGNWFGKAGRGVVFGLWSACASVGNILGACLASSVLQYGYEICKDHLSPLSSSMPFW

SEQ ID NO: 81498 - protein, 178 aa, Homo sapiens
  Payload ID: 16247
  Gene Symbol: SLC37A3
  Gene Name: solute carrier family 37, member 3
  ENSP ID: ENSP00000420771
  MOD_RES (1)..(1): Any amino acid
XAEKATLFLGTLDTIFLFSYAVGLFISGIVGDRLNLRWVLSFGMCSSALVVFVFGALTEWLRFYNKWLYCCLWIVNGLLQSTGWPCVVAVMGNWFGKAGRGVVFGLWSACASVGNILGACLASSVLQYGYEYSLAYACLKLVNYSFFFWLPFYLSNNFGWKEAEADKLSIWYDVGGII

SEQ ID NO: 81499 - protein, 487 aa, Homo sapiens
  Payload ID: 16248
  Gene Symbol: SLC38A1
  Gene Name: solute carrier family 38, member 1
  Uniprot ID: Q9H2H9
  ENSP ID: ENSP00000381634
MMHFKSGLELTELQNMTVPEDDNISNDSNDFTEVENGQINSKFISDRESRRSLTNSHLEKKKCDEYIPGTTSLGMSVFNLSNAIMGSGILGLAFALANTGILLFLVLLTSVTLLSIYSINLLLICSKETGCMVYEKLGEQVFGTTGKFVIFGATSLQNTGAMLSYLFIVKNELPSAIKFLMGKEETFSAWYVDGRVLVVIVTFGIILPLCLLKNLGYLGYTSGFSLSCMVFFLIVVIYKKFQIPCIVPELNSTISANSTNADTCTPKYVTFNSKTVYALPTIAFAFVCHPSVLPIYSELKDRSQKKMQMVSNISFFAMFVMYFLTAIFGYLTFYDNVQSDLLHKYQSKDDILILTVRLAVIVAVILTVPVLFFTVRSSLFELAKKTKFNLCRHTVVTCILLVVINLLVIFIPSMKDIFGVVGVTSANMLIFILPSSLYLKITDQDGDKGTQRIWAALFLGLGVLFSLVSIPLVIYDWACSSSSDEGH

SEQ ID NO: 81500 - protein, 487 aa, Homo sapiens; identical to SEQ ID NO: 81499
  Payload ID: 16248
  Gene Symbol: SLC38A1
  Gene Name: solute carrier family 38, member 1
  Uniprot ID: Q9H2H9
  ENSP ID: ENSP00000398142

SEQ ID NO: 81501 - protein, 487 aa, Homo sapiens; identical to SEQ ID NO: 81499
  Payload ID: 16248
  Gene Symbol: SLC38A1
  Gene Name: solute carrier family 38, member 1
  Uniprot ID: Q9H2H9
  ENSP ID: ENSP00000447853

SEQ ID NO: 81502 - protein, 487 aa, Homo sapiens; identical to SEQ ID NO: 81499
  Payload ID: 16248
  Gene Symbol: SLC38A1
  Gene Name: solute carrier family 38, member 1
  Uniprot ID: Q9H2H9
  ENSP ID: ENSP00000449607

SEQ ID NO: 81503 - protein, 78 aa, Homo sapiens
  Payload ID: 16248
  Gene Symbol: SLC38A1
  Gene Name: solute carrier family 38, member 1
  ENSP ID: ENSP00000449744
MMHFKSGLELTELQNMTVPEDDNISNDSNDFTEVENGQINSKFISDRESRRSLTNSHLEKKKCDEYIPGTTSLGMSVF

SEQ ID NO: 81504 - protein, 503 aa, Homo sapiens
  Payload ID: 16248
  Gene Symbol: SLC38A1
  Gene Name: solute carrier family 38, member 1
  ENSP ID: ENSP00000449756
MMHFKSGLELTELQNMTVPEDDNISNDSNDFTEVENGQINSKFISDRESRRSLTNSHLEKKKCDEYIPGTTSLGMSVFNLSNAIMGSGILGLAFALANTGILLFLVLLTSVTLLSIYSINLLLICSKETGCMVYEKLGEQVFGTTGKFVIFGATSLQNTGAMLSYLFIVKNELPSAIKFLMGKEETFSAWYVDGRVLVVIVTFGIILPLCLLKNLGYLGYTSGFSLSCMVFFLIVVIYKKFQIPCIVPELNSTISANSTNADTCTPKYVTFNSKTVYALPTIAFAFVCHPSVLPIYSELKDRSQKKMQMVSNISFFAMFVMYFLTAIFGYLTFYDNVQSDLLHKYQSKDDILILTVRLAVIVAVILTVPVLFFTVRSSLFELAKKTKFNLCRHTVVTCILLVVINLLVIFIPSMKDIFGVVGVTSANMLIFILPSSLYLKITDQDGDKGTQRIWLFLFLQFPVQPCWLSECIILLPAALSLNMLKRKELIILCSLDSGFSNLY

SEQ ID NO: 81505 - protein, 503 aa, Homo sapiens; identical to SEQ ID NO: 81504
  Payload ID: 16248
  Gene Symbol: SLC38A1
  Gene Name: solute carrier family 38, member 1
  ENSP ID: ENSP00000478907

SEQ ID NO: 81506 - protein, 780 aa, Homo sapiens
  Payload ID: 16249
  Gene Symbol: SLC38A10
  Gene Name: solute carrier family 38, member 10
  Uniprot ID: Q9HBR0
  ENSP ID: ENSP00000288439
MTAAAASNWGLITNIVNSIVGVSVLTMPFCFKQCGIVLGALLLVFCSWMTHQSCMFLVKSASLSKRRTYAGLAFHAYGKAGKMLVETSMIGLMLGTCIAFYVVIGDLGSNFFARLFGFQVGGTFRMFLLFAVSLCIVLPLSLQRNMMASIQSFSAMALLFYTVFMFVIVLSSLKHGLFSGQWLRRVSYVRWEGVFRCIPIFGMSFACQSQVLPTYDSLDEPSVKTMSSIFASSLNVVTTFYVMVGFFGYVSFTEATAGNVLMHFPSNLVTEMLRVGFMMSVAVGFPMMILPCRQALSTLLCEQQQKDGTFAAGGYMPPLRFKALTLSVVFGTMVGGILIPNVETILGLTGATMGSLICFICPALIYKKIHKNALSSQVVLWVGLGVLVVSTVTTLSVSEEVPEDLAEEAPGGRLGEAEGLMKVEAARLSAQDPVVAVAEDGREKPKLPKEREELEQAQIKGPVDVPGREDGKEAPEEAQLDRPGQGIAVPVGEAHRHEPPVPHDKVVVDEGQDREVPEENKPPSRHAGGKAPGVQGQMAPPLPDSEREKQEPEQGEVGKRPGQAQALEEAGDLPEDPQKVPEADGQPAVQPAKEDLGPGDRGLHPRPQAVLSEQQNGLAVGGGEKAKGGPPPGNAAGDTGQPAEDSDHGGKPPLPAEKPAPGPGLPPEPREQRDVERAGGNQAASQLEGKASALQPPASGPGSGSPLPQPWGDAQVILGSPARPPFSFQPPAEQTPRRAFCSLPISSLLSGNLLSALLPFKHLRHRHMACDYRFISLAPL

SEQ ID NO: 81507 - protein, 1119 aa, Homo sapiens
  Payload ID: 16249
  Gene Symbol: SLC38A10
  Gene Name: solute carrier family 38, member 10
  Uniprot ID: Q9HBR0
  ENSP ID: ENSP00000363891
MTAAAASNWGLITNIVNSIVGVSVLTMPFCFKQCGIVLGALLLVFCSWMTHQSCMFLVKSASLSKRRTYAGLAFHAYGKAGKMLVETSMIGLMLGTCIAFYVVIGDLGSNFFARLFGFQVGGTFRMFLLFAVSLCIVLPLSLQRNMMASIQSFSAMALLFYTVFMFVIVLSSLKHGLFSGQWLRRVSYVRWEGVFRCIPIFGMSFACQSQVLPTYDSLDEPSVKTMSSIFASSLNVVTTFYVMVGFFGYVSFTEATAGNVLMHFPSNLVTEMLRVGFMMSVAVGFPMMILPCRQALSTLLCEQQQKDGTFAAGGYMPPLRFKALTLSVVFGTMVGGILIPNVETILGLTGATMGSLICFICPALIYKKIHKNALSSQVVLWVGLGVLVVSTVTTLSVSEEVPEDLAEEAPGGRLGEAEGLMKVEAARLSAQDPVVAVAEDGREKPKLPKEREELEQAQIKGPVDVPGREDGKEAPEEAQLDRPGQGIAVPVGEAHRHEPPVPHDKVVVDEGQDREVPEENKPPSRHAGGKAPGVQGQMAPPLPDSEREKQEPEQGEVGKRPGQAQALEEAGDLPEDPQKVPEADGQPAVQPAKEDLGPGDRGLHPRPQAVLSEQQNGLAVGGGEKAKGGPPPGNAAGDTGQPAEDSDHGGKPPLPAEKPAPGPGLPPEPREQRDVERAGGNQAASQLEEAGRAEMLDHAVLLQVIKEQQVQQKRLLDQQEKLLAVIEEQHKEIHQQRQEDEEDKPRQVEVHQEPGAAVPRGQEAPEGKARETVENLPPLPLDPVLRAPGGRPAPSQDLNQRSLEHSEGPVGRDPAGPPDGGPDTEPRAAQAKLRDGQKDAAPRAAGTVKELPKGPEQVPVPDPAREAGGPEERLAEEFPGQSQDVTGGSQDRKKPGKEVAATGTSILKEANWLVAGPGAETGDPRMKPKQVSRDLGLAADLPGGAEGAAAQPQAVLRQPELRVISDGEQGGQQGHRLDHGGHLEMRKARGGDHVPVSHEQPRGGEDAAVQEPRQRPEPELGLKRAVPGGQRPDNAKPNRDLKLQAGSDLRRRRRDLGPHAEGQLAPRDGVIIGLNPLPDVQVNDLRGALDAQLRQAAGGALQVVHSRQLRQAPGPPEES

SEQ ID NO: 81508 - protein, 298 aa, Homo sapiens
  Payload ID: 16249
  Gene Symbol: SLC38A10
  Gene Name: solute carrier family 38, member 10
  ENSP ID: ENSP00000437601
GEKAKGGPPPGNAAGDTGQPAEDSDHGGKPPLPAEKPAPGPGLPPEPREQRDVERAGGNQAASQLEAEIKKIVAEAGRAEMLDHAVLLQVIKEQQVQQKRLLDQQEKLLAVIEEQHKEIHQQRQEDEEDKPRQVEVHQEPGAAVPRGQEAPEGKARETVENLPPLPLDPVLRAPGGRPAPSQDLNQRSLEHSEGPVGRDPAGPPDGGPDTEPRAAQAKLRDGQKDAAPRAAGTVKELPKGPEQVPVPDPAREAGGPEERLAEEFPGQSQDVTGGSQDRKKPGKEVAATGTSILKEANW

SEQ ID NO: 81509 - protein, 119 aa, Homo sapiens
  Payload ID: 16249
  Gene Symbol: SLC38A10
  Gene Name: solute carrier family 38, member 10
  ENSP ID: ENSP00000439115
MTHQSCMFLVKSASLSKRRTYAGLAFHAYGKAGKMLVETSMIGLMLGTCIAFYVVIGDLGSNFFARLFGFQVGGTFRMFLLFAVSLCIVLPLSLQRNMMASIQSFSAMALLFYTVFMFV

SEQ ID NO: 81510 - protein, 70 aa, Homo sapiens
  Payload ID: 16249
  Gene Symbol: SLC38A10
  Gene Name: solute carrier family 38, member 10
  ENSP ID: ENSP00000444523
  MOD_RES (1)..(1): Any amino acid
XQRNMMASIQSFSAMALLFYTVFMFVIVLSSLKHGLFSGQWLRRVSYVRWEGVFRCIPIFGMSFACQSAL

SEQ ID NO: 81511 - protein, 258 aa, Homo sapiens
  Payload ID: 16249
  Gene Symbol: SLC38A10
  Gene Name: solute carrier family 38, member 10
  ENSP ID: ENSP00000458273
  MOD_RES (1)..(1): Any amino acid
XEKAKGGPPPGNAAGDTGQPAEDSDHGGKPPLPAEKPAPGPGLPPEPREQRDVERAGGNQAASQLEAGRAEMLDHAVLLQVIKEQQVQQKRLLDQQEKLLAVIEEQHKEIHQQRQEDEEDKPRQVEVHQEPGAAVPRGQEAPEGKARETVENLPPLPLDPVLRAPGGRPAPSQDLNQRSLEHSEGPVGRDPAGPPDGGPDTEPRAAQAKLRDGQKDAAPRAAGTVKELPKGPEQVPVPDPAREAGGPEERLAEEFPGQ

SEQ ID NO: 81512 - protein, 384 aa, Homo sapiens
  Payload ID: 16250
  Gene Symbol: SLC38A11
  Gene Name: solute carrier family 38, member 11
  Uniprot ID: Q08AI6
  ENSP ID: ENSP00000306178
MKQAGFPLGILLLFWVSYVTDFSLVLLIKGGALSGTDTYQSLVNKTFGFPGYLLLSVLQFLYPFIVDPENVFIGRHFIIGLSTVTFTLPLSLYRNIAKLGKVSLISTGLTTLILGIVMARAISLGPHIPKTEDAWVFAKPNAIQAVGVMSFAFICHHNSFLVYSSLEEPTVAKWSRLIHMSIVISVFICIFFATCGYLTFTGFTQGDLFENYCRNDDLVTFGRFCYGVTVILTYPMECFVTREVIANVFFGGNLSSVFHIVVTVMVITVATLVSLLIDCLGIVLELNGVLCATPLIFIIPSACYLKLSEEPRTHSDKIMSCVMLPIGAVVMVFGFVMAITNTQDCTHGQEMFYCFPDNFSLTNTSESHVQQTTQLSTLNISIFQ

SEQ ID NO: 81513 - protein, 406 aa, Homo sapiens
  Payload ID: 16250
  Gene Symbol: SLC38A11
  Gene Name: solute carrier family 38, member 11
  Uniprot ID: Q08AI6
  ENSP ID: ENSP00000386272
MKQAGFPLGILLLFWVSYVTDFSLVLLIKGGALSGTDTYQSLVNKTFGFPGYLLLSVLQFLYPFIAMISYNIIAGDTLSKVFQRIPGVDPENVFIGRHFIIGLSTVTFTLPLSLYRNIAKLGKVSLISTGLTTLILGIVMARAISLGPHIPKTEDAWVFAKPNAIQAVGVMSFAFICHHNSFLVYSSLEEPTVAKWSRLIHMSIVISVFICIFFATCGYLTFTGFTQGDLFENYCRNDDLVTFGRFCYGVTVILTYPMECFVTREVIANVFFGGNLSSVFHIVVTVMVITVATLVSLLIDCLGIVLELNGVLCATPLIFIIPSACYLKLSEEPRTHSDKIMSCVMLPIGAVVMVFGFVMAITNTQDCTHGQEMFYCFPDNFSLTNTSESHVQQTTQLSTLNISIFQ

SEQ ID NO: 81514 - protein, 406 aa, Homo sapiens; identical to SEQ ID NO: 81513
  Payload ID: 16250
  Gene Symbol: SLC38A11
  Gene Name: solute carrier family 38, member 11
  Uniprot ID: Q08AI6
  ENSP ID: ENSP00000386774

SEQ ID NO: 81515 - protein, 437 aa, Homo sapiens
  Payload ID: 16250
  Gene Symbol: SLC38A11
  Gene Name: solute carrier family 38, member 11
  ENSP ID: ENSP00000387345
MGYQRQEPVIPPQRDLDDRETLVSEHEYKEKTCQSAALFNVVNSIIGSGIIDFSLVLLIKGGALSGTDTYQSLVNKTFGFPGYLLLSVLQFLYPFIAMISYNIIAGDTLSKVFQRIPGVDPENVFIGRHFIIGLSTVTFTLPLSLYRNIAKLGKVSLISTGLTTLILGIVMARAISLGPHIPKTEDAWVFAKPNAIQAVGVMSFAFICHHNSFLVYSSLEEPTVAKWSRLIHMSIVISVFICIFFATCGYLTFTGFTQGDLFENYCRNDDLVTFGRFCYGVTVILTYPMECFVTREVIANVFFGGNLSSVFHIVVTVMVITVATLVSLLIDCLGIVLELNGVLCATPLIFIIPSACYLKLSEEPRTHSDKIMSCVMLPIGAVVMVFGFVMAITNTQDCTHGQEMFYCFPDNFSLTNTSESHVQQTTQLSTLNISIFQ

SEQ ID NO: 81516 - protein, 150 aa, Homo sapiens
  Payload ID: 16250
  Gene Symbol: SLC38A11
  Gene Name: solute carrier family 38, member 11
  ENSP ID: ENSP00000401448
LISTGLTTLILGIVMARAISLGPHIPKTEDAWVFAKPNAIQAVGVMSFGDLFENYCRNDDLVTFGRFCYGVTVILTYPMECFVTREVIANVFFGGNLSSVFHIVVTVMVITVATLVSLLIDCLGIVLELNGVLCATPLIFIIPSACYLKL

SEQ ID NO: 81517 - protein, 506 aa, Homo sapiens
  Payload ID: 16251
  Gene Symbol: SLC38A2
  Gene Name: solute carrier family 38, member 2
  Uniprot ID: Q96QD8
  ENSP ID: ENSP00000256689
MKKAEMGRFSISPDEDSSSYSSNSDFNYSYPTKQAALKSHYADVDPENQNFLLESNLGKKKYETEFHPGTTSFGMSVFNLSNAIVGSGILGLSYAMANTGIALFIILLTFVSIFSLYSVHLLLKTANEGGSLLYEQLGYKAFGLVGKLAASGSITMQNIGAMSSYLFIVKYELPLVIQALTNIEDKTGLWYLNGNYLVLLVSLVVILPLSLFRNLGYLGYTSGLSLLCMVFFLIVVICKKFQVPCPVEAALIINETINTTLTQPTALVPALSHNVTENDSCRPHYFIFNSQTVYAVPILIFSFVCHPAVLPIYEELKDRSRRRMMNVSKISFFAMFLMYLLAALFGYLTFYEHVESELLHTYSSILGTDILLLIVRLAVLMAVTLTVPVVIFPIRSSVTHLLCASKDFSWWRHSLITVSILAFTNLLVIFVPTIRDIFGFIGASAASMLIFILPSAFYIKLVKKEPMKSVQKIGALFFLLSGVLVMTGSMALIVLDWVHNAPGGGH

SEQ ID NO: 81518 - protein, 88 aa, Homo sapiens
  Payload ID: 16251
  Gene Symbol: SLC38A2
  Gene Name: solute carrier family 38, member 2
  ENSP ID: ENSP00000449695
MKKAEMGRFSISPDEDSSSYSSNSDFNYSYPTKQAALKSHYADVDPENQNFLLESNLGKKKYETEFNSLDICVNIFPVFCSSPFEDCQ

SEQ ID NO: 81519 - protein, 344 aa, Homo sapiens
  Payload ID: 16251
  Gene Symbol: SLC38A2
  Gene Name: solute carrier family 38, member 2
  ENSP ID: ENSP00000450406
MSPVRRCVYFSEDICDCFDLVSVFFRLWYLNGNYLVLLVSLVVILPLSLFRNLGYLGYTSGLSLLCMVFFLIVVICKKFQVPCPVEAALIINETINTTLTQPTALVPALSHNVTENDSCRPHYFIFNSQTVYAVPILIFSFVCHPAVLPIYEELKDRSRRRMMNVSKISFFAMFLMYLLAALFGYLTFYEHVESELLHTYSSILGTDILLLIVRLAVLMAVTLTVPVVIFPIRSSVTHLLCASKDFSWWRHSLITVSILAFTNLLVIFVPTIRDIFGFIGASAASMLIFILPSAFYIKLVKKEPMKSVQKIGALFFLLSGVLVMTGSMALIVLDWVHNAPGGGH

SEQ ID NO: 81520 - protein, 406 aa, Homo sapiens
  Payload ID: 16251
  Gene Symbol: SLC38A2
  Gene Name: solute carrier family 38, member 2
  Uniprot ID: Q96QD8
  ENSP ID: ENSP00000482873
MKQNLILLTFVSIFSLYSVHLLLKTANEGGSLLYEQLGYKAFGLVGKLAASGSITMQNIGAMSSYLFIVKYELPLVIQALTNIEDKTGLWYLNGNYLVLLVSLVVILPLSLFRNLGYLGYTSGLSLLCMVFFLIVVICKKFQVPCPVEAALIINETINTTLTQPTALVPALSHNVTENDSCRPHYFIFNSQTVYAVPILIFSFVCHPAVLPIYEELKDRSRRRMMNVSKISFFAMFLMYLLAALFGYLTFYEHVESELLHTYSSILGTDILLLIVRLAVLMAVTLTVPVVIFPIRSSVTHLLCASKDFSWWRHSLITVSILAFTNLLVIFVPTIRDIFGFIGASAASMLIFILPSAFYIKLVKKEPMKSVQKIGALFFLLSGVLVMTGSMALIVLDWVHNAPGGGH

SEQ ID NO: 81521 - protein, 96 aa, Homo sapiens
  Payload ID: 16252
  Gene Symbol: SLC38A3
  Gene Name: solute carrier family 38, member 3
  ENSP ID: ENSP00000479737
MEAPLQTEMVELVPNGKHSEGLLPVITPMAGNQRVEDPARSCMEGKSFLQKSPSKEPHFTDFEGKTSFGMSVFNLSNAIMGSGILGLAYAMANTGI

SEQ ID NO: 81522 - protein, 216 aa, Homo sapiens
  Payload ID: 16252
  Gene Symbol: SLC38A3
  Gene Name: solute carrier family 38, member 3
  ENSP ID: ENSP00000480466
MSSYLYIIKSELPLVIQTFLNLEEKTSDWYMNGNYLVILVSVTIILPLALMRQLGYLGYSSGFSLSCMVFFLIAVIYKKFHVPCPLPPNFNNTTGNFSHVEIVKEKVQLQVEPEASAFCTPSYFTLNSQTAYTIPIMAFAFVCHPEVLPIYTELKDPSKKKMQHISNLSIAVMYIMYFLAALFGYLTFYNGVESELLHTYSKVDPFDVLILCVRVA

SEQ ID NO: 81523 - protein, 504 aa, Homo sapiens
  Payload ID: 16252
  Gene Symbol: SLC38A3
  Gene Name: solute carrier family 38, member 3
  Uniprot ID: Q99624
  ENSP ID: ENSP00000481301
MEAPLQTEMVELVPNGKHSEGLLPVITPMAGNQRVEDPARSCMEGKSFLQKSPSKEPHFTDFEGKTSFGMSVFNLSNAIMGSGILGLAYAMANTGIILFLFLLTAVALLSSYSIHLLLKSSGVVGIRAYEQLGYRAFGTPGKLAAALAITLQNIGAMSSYLYIIKSELPLVIQTFLNLEEKTSDWYMNGNYLVILVSVTIILPLALMRQLGYLGYSSGFSLSCMVFFLIAVIYKKFHVPCPLPPNFNNTTGNFSHVEIVKEKVQLQVEPEASAFCTPSYFTLNSQTAYTIPIMAFAFVCHPEVLPIYTELKDPSKKKMQHISNLSIAVMYIMYFLAALFGYLTFYNGVESELLHTYSKVDPFDVLILCVRVAVLTAVTLTVPIVLFPVRRAIQQMLFPNQEFSWLRHVLIAVGLLTCINLLVIFAPNILGIFGVIGATSAPFLIFIFPAIFYFRIMPTEKEPARSTPKILALCFAMLGFLLMTMSLSFIIIDWASGTSRHGGNH

SEQ ID NO: 81524 - protein, 104 aa, Homo sapiens
  Payload ID: 16252
  Gene Symbol: SLC38A3
  Gene Name: solute carrier family 38, member 3
  ENSP ID: ENSP00000483959
MEAPLQTEMVELVPNGKHSEGLLPVITPMAGNQRVEDPARSCMEGKSFLQKSPSKEPHFTDFEGKTSFGMSVFNLSNAIMGSGILGLAYAMANTGIILFLHPCL

SEQ ID NO: 81525 - protein, 99 aa, Homo sapiens
  Payload ID: 16252
  Gene Symbol: SLC38A3
  Gene Name: solute carrier family 38, member 3
  ENSP ID: ENSP00000484379
MEAPLQTEMVELVPNGKHSEGLLPVITPMAGNQRVEDPARSCMEGKSFLQKSPSKEPHFTDFEGKTSFGMSVFNLSNAIMGSGILGLAYAMANTGIILF

SEQ ID NO: 81526 - protein, 547 aa, Homo sapiens
  Payload ID: 16253
  Gene Symbol: SLC38A4
  Gene Name: solute carrier family 38, member 4
  Uniprot ID: Q969I6
  ENSP ID: ENSP00000266579
MDPMELRNVNIEPDDESSSGESAPDSYIGIGNSEKAAMSSQFANEDTESQKFLTNGFLGKKKLADYADEHHPGTTSFGMSSFNLSNAIMGSGILGLSYAMANTGIILFIIMLLAVAILSLYSVHLLLKTAKEGGSLIYEKLGEKAFGWPGKIGAFVSITMQNIGAMSSYLFIIKYELPEVIRAFMGLEENTGEWYLNGNYLIIFVSVGIILPLSLLKNLGYLGYTSGFSLTCMVFFVSVVIYKKFQIPCPLPVLDHSVGNLSFNNTLPMHVVMLPNNSESSDVNFMMDYTHRNPAGLDENQAKGSLHDSGVEYEAHSDDKCEPKYFVFNSRTAYAIPILVFAFVCHPEVLPIYSELKDRSRRKMQTVSNISITGMLVMYLLAALFGYLTFYGEVEDELLHAYSKVYTLDIPLLMVRLAVLVAVTLTVPIVLFPIRTSVITLLFPKRPFSWIRHFLIAAVLIALNNVLVILVPTIKYIFGFIGASSATMLIFILPAVFYLKLVKKETFRSPQKVGALIFLVVGIFFMIGSMALIIIDWIYDPPNSKHH

SEQ ID NO: 81527 - protein, 547 aa, Homo sapiens; identical to SEQ ID NO: 81526
  Payload ID: 16253
  Gene Symbol: SLC38A4
  Gene Name: solute carrier family 38, member 4
  Uniprot ID: Q969I6
  ENSP ID: ENSP00000389843

SEQ ID NO: 81528 - protein, 141 aa, Homo sapiens
  Payload ID: 16253
  Gene Symbol: SLC38A4
  Gene Name: solute carrier family 38, member 4
  ENSP ID: ENSP00000448186
  MOD_RES (1)..(1): Any amino acid
XYIFGFIGASSATMLIFILPAVFYLKLVKKETFRSPQKVGEITGRFQRRLPVISPGTCRRGKSLFLSRMVVYVFKIKPVVHISTQVLLEQCEMMKVYFCCFTSRIRVTACNNHQIVLFPLPSPHPAPPKKVPNICILRTSN

SEQ ID NO: 81529 - protein, 191 aa, Homo sapiens
  Payload ID: 16253
  Gene Symbol: SLC38A4
  Gene Name: solute carrier family 38, member 4
  ENSP ID: ENSP00000448543
MDPMELRNVNIEPDDESSSGESAPDSYIGIGNSEKAAMSSQFANEDTESQKFLTNGFLGKKKLADYADEHHPGTTSFGMSSFNLSNAIMGSGILGLSYAMANTGIILFIIMLLAVAILSLYSVHLLLKTAKEGGSLIYEKLGEKAFGWPGKIGAFVSITMQNIGAMSSYLFIIKYELPEVIRAFMGLEENT

SEQ ID NO: 81530 - protein, 219 aa, Homo sapiens
  Payload ID: 16253
  Gene Symbol: SLC38A4
  Gene Name: solute carrier family 38, member 4
  ENSP ID: ENSP00000450071
MDPMELRNVNIEPDDESSSGESAPDSYIGIGNSEKAAMSSQFANEDTESQKFLTNGFLGKKKLADYADEHHPGTTSFGMSSFNLSNAIMGSGILGLSYAMANTGIILFIIMLLAVAILSLYSVHLLLKTAKEGGSLIYEKLGEKAFGWPGKIGAFVSITMQNIGAMSSYLFIIKYELPEVIRAFMGLEENTGEWYLNGNYLIIFVSVGIILPLSLLKNL

SEQ ID NO: 81531 - protein, 191 aa, Homo sapiens
  Payload ID: 16254
  Gene Symbol: SLC38A5
  Gene Name: solute carrier family 38, member 5
  ENSP ID: ENSP00000389644
MELQDPKMNGALPSDAVGYRQEREGFLPSRGPAPGSKPVQFMDFEGKTSFGMSVFNLSNAIMGSGILGLAYAMAHTGVIFFLALLLCIALLSSYSIHLLLTCAGIAGIRAYEQLGQRAFGPAGKVVVATVICLHNVGAMSSYLFIIKSELPLVIGTFLYMDPEGDWFLKGNLLIIIVSVLIILPLALMKHL

SEQ ID NO: 81532 - protein, 279 aa, Homo sapiens
  Payload ID: 16254
  Gene Symbol: SLC38A5
  Gene Name: solute carrier family 38, member 5
  ENSP ID: ENSP00000402988
MELQDPKMNGALPSDAVGYRQEREGFLPSRGPAPGSKPVQFMDFEGKTSFGMSVFNLSNAIMGSGILGLAYAMAHTGVIFFLALLLCIALLSSYSIHLLLTCAGIAGIRAYEQLGQRAFGPAGKVVVATVICLHNVGAMSSYLFIIKSELPLVIGTFLYMDPEGDWFLKGNLLIIIVSVLIILPLALMKHLGYLGYTSGLSLTCMLFFLVSVIYKKFQLGCAIGHNETAMESEALVGLPSQGLNSSCEAQMFTVDSQMSYTVPIMAFAFVCHPEVLPIY

SEQ ID NO: 81533 - protein, 218 aa, Homo sapiens
  Payload ID: 16254
  Gene Symbol: SLC38A5
  Gene Name: solute carrier family 38, member 5
  ENSP ID: ENSP00000403976
MELQDPKMNGALPSDAVGYRQEREGFLPSRGPAPGSKPVQFMDFEGKTSFGMSVFNLSNAIMGSGILGLAYAMAHTGVIFFLALLLCIALLSSYSIHLLLTCAGIAGIRAYEQLGQRAFGPAGKVVVATVICLHNVGAMSSYLFIIKSELPLVIGTFLYMDPEGDWFLKGNLLIIIVSVLIILPLALMKHLGYLGYTSGLSLTCMLFFLVSVIYKKFQ

SEQ ID NO: 81534 - protein, 272 aa, Homo sapiens
  Payload ID: 16254
  Gene Symbol: SLC38A5
  Gene Name: solute carrier family 38, member 5
  ENSP ID: ENSP00000407258
MELQDPKMNGALPSDAVGYRQEREGFLPSRGPAPGSKPVQFMDFEGKTSFGMSVFNLSNAIMGSGILGLAYAMAHTGVIFFLALLLCIALLSSYSIHLLLTCAGIAGIRAYEQLGQRAFGPAGKVVVATVICLHNVGAMSSYLFIIKSELPLVIGTFLYMDPEGDWFLKGNLLIIIVSVLIILPLALMKHLGYLGYTSGLSLTCMLFFLVSVIYKKFQLGCAIGHNETAMESEALVGLPSQGLNSSCEAQMFTVDSQMSYTVPIMAFAFVCH

SEQ ID NO: 81535 - protein, 163 aa, Homo sapiens
  Payload ID: 16254
  Gene Symbol: SLC38A5
  Gene Name: solute carrier family 38, member 5
  ENSP ID: ENSP00000416948
MELQDPKMNGALPSDAVGYRQEREGFLPSRGPAPGSKPVQFMDFEGKTSFGMSVFNLSNAIMGSGILGLAYAMAHTGVIFFLALLLCIALLSSYSIHLLLTCAGIAGIRAYEQLGQRAFGPAGKVVVATVICLHNVGAMSSYLFIIKSELPLVIGTFLYMDPE

SEQ ID NO: 81536 - protein, 472 aa, Homo sapiens
  Payload ID: 16254
  Gene Symbol: SLC38A5
  Gene Name: solute carrier family 38, member 5
  Uniprot ID: Q8WUX1
  ENSP ID: ENSP00000471683
MELQDPKMNGALPSDAVGYRQEREGFLPSRGPAPGSKPVQFMDFEGKTSFGMSVFNLSNAIMGSGILGLAYAMAHTGVIFFLALLLCIALLSSYSIHLLLTCAGIAGIRAYEQLGQRAFGPAGKVVVATVICLHNVGAMSSYLFIIKSELPLVIGTFLYMDPEGDWFLKGNLLIIIVSVLIILPLALMKHLGYLGYTSGLSLTCMLFFLVSVIYKKFQLGCAIGHNETAMESEALVGLPSQGLNSSCEAQMFTVDSQMSYTVPIMAFAFVCHPEVLPIYTELCRPSKRRMQAVANVSIGAMFCMYGLTATFGYLTFYSSVKAEMLHMYSQKDPLILCVRLAVLLAVTLTVPVVLFPIRRALQQLLFPGKAFSWPRHVAIALILLVLVNVLVICVPTIRDIFGVIGSTSAPSLIFILPSIFYLRIVPSEVEPFLSWPKIQALCFGVLGVLFMAVSLGFMFANWATGQSRMSGH

SEQ ID NO: 81537 - protein, 421 aa, Homo sapiens
  Payload ID: 16254
  Gene Symbol: SLC38A5
  Gene Name: solute carrier family 38, member 5
  Uniprot ID: Q8WUX1
  ENSP ID: ENSP00000478807
MSVFNLSNAIMGSGILGLAYAMAHTGVIFFLALLLCIALLSSYSIHLLLTCAGIAGIRAYEQLGQRAFGPAGKVVVATVICLHNVGAMSSYLFIIKSELPLVIGTFLYMDPEGDWFLKGNLLIIIVSVLIILPLALMKHLGYLGYTSGLSLTCMLFFLVSVIYKKFQLGCAIGHNETAMESEALVGLPSQGLNSSCEAQMFTVDSQMSYTVPIMAFAFVCHPEVLPIYTELCRPSKRRMQAVANVSIGAMFCMYGLTATFGYLTFYSSVKAEMLHMYSQKDPLILCVRLAVLLAVTLTVPVVLFPIRRALQQLLFPGKAFSWPRHVAIALILLVLVNVLVICVPTIRDIFGVIGSTSAPSLIFILPSIFYLRIVPSEVEPFLSWPKIQALCFGVLGVLFMAVSLGFMFANWATGQSRMSGH

SEQ ID NO: 81538 - protein, 472 aa, Homo sapiens; identical to SEQ ID NO: 81536
  Payload ID: 16254
  Gene Symbol: SLC38A5
  Gene Name: solute carrier family 38, member 5
  Uniprot ID: Q8WUX1
  ENSP ID: ENSP00000481291

SEQ ID NO: 81539 - protein, 29 aa, Homo sapiens
  Payload ID: 16254
  Gene Symbol: SLC38A5
  Gene Name: solute carrier family 38, member 5
  ENSP ID: ENSP00000482638
  MOD_RES (1)..(1): Any amino acid
XALLLCIALLSSYSIHLLLTCAGIAGTGS

SEQ ID NO: 81540 - protein, 163 aa, Homo sapiens; identical to SEQ ID NO: 81535
  Payload ID: 16254
  Gene Symbol: SLC38A5
  Gene Name: solute carrier family 38, member 5
  ENSP ID: ENSP00000483716

SEQ ID NO: 81541 - protein, 403 aa, Homo sapiens
  Payload ID: 16254
  Gene Symbol: SLC38A5
  Gene Name: solute carrier family 38, member 5
  ENSP ID: ENSP00000484236
MLGPCPVTCSSSNLSSPWLSAPSCTWTPRGDWFLKGNLLIIIVSVLIILPLALMKHLGYLGYTSGLSLTCMLFFLVSVIYKKFQLGCAIGHNETAMESEALVGLPSQGLNSSCEAQMFTVDSQMSYTVPIMAFAFVCHPEVLPIYTELCRPSKRRMQAVANVSIGAMFCMYGLTATFGYLTFYSSVKAEMLHMYSQKDPLILCVRLAVLLAVTLTVPVVLFPIRRALQQLLFPGKAFSWPRHVAIALILLVLVNVLVICVPTIRDIFGVIGSTSAPSLIFILPSIFYLRIVPSEVEPFLSWPKIQALCFGVLGVLFMAVSLGFMFANWATGRAACLDTDQALLAQVPVRMHMEGSGPLPRVPPAQHVEVAGSHERGCQRRGTAEAADWPTSLLPRDAKLGSWP

SEQ ID NO: 81542 - protein, 456 aa, Homo sapiens
  Payload ID: 16255
  Gene Symbol: SLC38A6
  Gene Name: solute carrier family 38, member 6
  Uniprot ID: Q8IZM9
  ENSP ID: ENSP00000267488
MEASWGSFNAERGWYVSVQQPEEAEAEELSPLLSNELHRQRSPGVSFGLSVFNLMNAIMGSGILGLAYVLANTGVFGFSFLLLTVALLASYSVHLLLSMCIQTAVTSYEDLGLFAFGLPGKLVVAGTIIIQNIGAMSSYLLIIKTELPAAIAEFLTGDYSRYWYLDGQTLLIIICVGIVFPLALLPKIGFLGYTSSLSFFFMMFFALVVIIKKWSIPCPLTLNYVEKGFQISNVTDDCKPKLFHFSKESAYALPTMAFSFLCHTSILPIYCELQSPSKKRMQNVTNTAIALSFLIYFISALFGYLTFYDKVESELLKGYSKYLSHDVVVMTVKLCILFAVLLTVPLIHFPARKAVTMMFFSNFPFSWIRHFLITLALNIIIVLLAIYVPDIRNVFGVVGASTSTCLIFIFPGLFYLKLSREDFLSWKKLGAFVLLIFGILVGNFSLALIIFDWINK

SEQ ID NO: 81543 - protein, 521 aa, Homo sapiens
  Payload ID: 16255
  Gene Symbol: SLC38A6
  Gene Name: solute carrier family 38, member 6
  Uniprot ID: Q8IZM9
  ENSP ID: ENSP00000346959
MEASWGSFNAERGWYVSVQQPEEAEAEELSPLLSNELHRQRSPGVSFGLSVFNLMNAIMGSGILGLAYVLANTGVFGFSFLLLTVALLASYSVHLLLSMCIQTAVTSYEDLGLFAFGLPGKLVVAGTIIIQNIGAMSSYLLIIKTELPAAIAEFLTGDYSRYWYLDGQTLLIIICVGIVFPLALLPKIGFLGYTSSLSFFFMMFFALVVIIKKWSIPCPLTLNYVEKGFQISNVTDDCKPKLFHFSKESAYALPTMAFSFLCHTSILPIYCELQSPSKKRMQNVTNTAIALSFLIYFISALFGYLTFYDKVESELLKGYSKYLSHDVVVMTVKLCILFAVLLTVPLIHFPARKAVTMMFFSNFPFSWIRHFLITLALNIIIVLLAIYVPDIRNVFGVVGASTSTCLIFIFPGLFYLKLSREDFLSWKKLGGLILSHRLACSGVISAHCNLCLPDSSNPPTSASRVAETTGRDTMEMCTQRKGHARTQQEGNCLQAKGRGLRRTKRVHTLILHFPTSRTVSK

SEQ ID NO: 81544 - protein, 516 aa, Homo sapiens
  Payload ID: 16255
  Gene Symbol: SLC38A6
  Gene Name: solute carrier family 38, member 6
  ENSP ID: ENSP00000395851
GSFNAERGWYVSVQQPEEAEAEELSPLLSNELHRQRSPGVSFGLSVFNLMNAIMGSGILGLAYVLANTGVFGFSFLLLTVALLASYSVHLLLSMCIQTAVTSYEDLGLFAFGLPGKLVVAGTIIIQNIGAMSSYLLIIKTELPAAIAEFLTGDYSRYWYLDGQTLLIIICVGIVFPLALLPKIGFLGYTSSLSFFFMMFFALVVIIKKWSIPCPLTLNYVEKGFQISNVTDDCKPKLFHFSKESAYALPTMAFSFLCHTSILPIYCELQSPSKKRMQNVTNTAIALSFLIYFISALFGYLTFYDKVESELLKGYSKYLSHDVVVMTVKLCILFAVLLTVPLIHFPARKAVTMMFFSNFPFSWIRHFLITLALNIIIVLLAIYVPDIRNVFGVVGASTSTCLIFIFPGLFYLKLSREDFLSWKKLGGLILSHRLACSGVISAHCNLCLPDSSNPPTSASRVAETTGRDTMEMCTQRKGHARTQQEGNCLQAKGRGLRRTKRVHTLILHFPTSRTVSK

SEQ ID NO: 81545 - protein, 108 aa, Homo sapiens
  Payload ID: 16255
  Gene Symbol: SLC38A6
  Gene Name: solute carrier family 38, member 6
  ENSP ID: ENSP00000431212
MEASWGSFNAERGWYVSVQQPEEAEAEELSPLLSNELHRQRSPGVSFGLSVFNLMNAIMGSGILGLAYVLANTGVFGFSFLLLTVALLASYSVHLLLSMCIQTAYLGP

SEQ ID NO: 81546 - protein, 73 aa, Homo sapiens
  Payload ID: 16255
  Gene Symbol: SLC38A6
  Gene Name: solute carrier family 38, member 6
  ENSP ID: ENSP00000431260
MEASWGSFNAERGWYVSVQQPEEAEAEELSPLLSNVSGLCSLPRADALRLPSSACQIRPRKGGPHRDRGDAGA

SEQ ID NO: 81547 - protein, 194 aa, Homo sapiens
  Payload ID: 16255
  Gene Symbol: SLC38A6
  Gene Name: solute carrier family 38, member 6
  ENSP ID: ENSP00000434543
  MOD_RES (1)..(1): Any amino acid
XNLMNAIMGSGILGLAYVLANTGVFGFSFLLLTVALLASYSVHLLLSMCIQTAMSSYLLIIKTELPAAIAEFLTGDYSRYWYLDGQTLLIIICVGIVFPLALLPKIGFLGYTSSLSFFFMMFFALVVIIKKWSIPCPLTLNYVEKGFQISNVTDDCKPKLFHFSKESAYALPTMAFSFLCHTSILPIYCELQSP

SEQ ID NO: 81548 - protein, 20 aa, Homo sapiens
  Payload ID: 16255
  Gene Symbol: SLC38A6
  Gene Name: solute carrier family 38, member 6
  ENSP ID: ENSP00000434737
ACQIRPRKGGPHRDRGDAGA

SEQ ID NO: 81549 - protein, 18 aa, Homo sapiens
  Payload ID: 16255
  Gene Symbol: SLC38A6
  Gene Name: solute carrier family 38, member 6
  ENSP ID: ENSP00000435833
  MOD_RES (1)..(1): Any amino acid
XIRPRKGGPHRDRGDAGA

SEQ ID NO: 81550 - protein, 229 aa, Homo sapiens
  Payload ID: 16255
  Gene Symbol: SLC38A6
  Gene Name: solute carrier family 38, member 6
  ENSP ID: ENSP00000437190
IIKKWSIPCPLTLNYVEKGFQSAYALPTMAFSFLCHTSILPIYCELQSPSKKRMQNVTNTAIALSFLIYFISALFGYLTFYDKVESELLKGYSKYLSHDVVVMTVKLCILFAVLLTVPLIHFPARKAVTMMFFSNFPFSWIRHFLITLALNIIIVLLAIYVPDIRNVFGVVGASTSTCLIFIFPGLFYLKLSREDFLSWKKLGAFVLLIFGILVGNFSLALIIFDWINK

SEQ ID NO: 81551 - protein, 21 aa, Homo sapiens
  Payload ID: 16255
  Gene Symbol: SLC38A6
  Gene Name: solute carrier family 38, member 6
  ENSP ID: ENSP00000450996
IALSFLIYFISALFGYLTFYG

SEQ ID NO: 81552 - protein, 126 aa, Homo sapiens
  Payload ID: 16255
  Gene Symbol: SLC38A6
  Gene Name: solute carrier family 38, member 6
  ENSP ID: ENSP00000451244
MNAIMGSGILGLAYVLANTGVFGFSFLLLTVALLASYSVHLLLSMCIQTAVTSYEDLGLFAFGLPGKLVVAGTIIIQNIGAMSSYLLIIKTELPAAIAEFLTGDYSRYWYLDGQTLLIIICVGIVF

SEQ ID NO: 81553 - protein, 89 aa, Homo sapiens
  Payload ID: 16255
  Gene Symbol: SLC38A6
  Gene Name: solute carrier family 38, member 6
  ENSP ID: ENSP00000451434
LSPLHSHPIFISCSHKELHRQRSPGVSFGLSVFNLMNAIMGSGILGLAYVLANTGVFGFSFLLLTVALLASYSVHLLLSMCIQTAYLGP

SEQ ID NO: 81554 - protein, 57 aa, Homo sapiens
  Payload ID: 16255
  Gene Symbol: SLC38A6
  Gene Name: solute carrier family 38, member 6
  ENSP ID: ENSP00000452125
  MOD_RES (1)..(1): Any amino acid
XNLMNAIMGSGILGLAYVLANTGVFGFSFLLLTVALLASYSVHLLLSMCIQTAYLGP

SEQ ID NO: 81555 - protein, 42 aa, Homo sapiens
  Payload ID: 16255
  Gene Symbol: SLC38A6
  Gene Name: solute carrier family 38, member 6
  ENSP ID: ENSP00000482800
  MOD_RES (1)..(1): Any amino acid
XQLVVAGTIIIQNIGAMSSYLLIIKTELPAAIAEFLTGDYSR

SEQ ID NO: 81556 - protein, 462 aa, Homo sapiens
  Payload ID: 16256
  Gene Symbol: SLC38A7
  Gene Name: solute carrier family 38, member 7
  Uniprot ID: Q9NVC3
  ENSP ID: ENSP00000219320
MAQVSINNDYSEWDLSTDAGERARLLQSPCVDTAPKSEWEASPGGLDRGTTSTLGAIFIVVNACLGAGLLNFPAAFSTAGGVAAGIALQMGMLVFIISGLVILAYCSQASNERTYQEVVWAVCGKLTGVLCEVAIAVYTFGTCIAFLIIIGDQQDKIIAVMAKEPEGASGPWYTDRKFTISLTAFLFILPLSIPREIGFQKYASFLSVVGTWYVTAIVIIKYIWPDKEMTPGNILTRPASWMAVFNAMPTICFGFQCHVSSVPVFNSMQQPEVKTWGGVVTAAMVIALAVYMGTGICGFLTFGAAVDPDVLLSYPSEDMAVAVARAFIILSVLTSYPILHFCGRAVVEGLWLRYQGVPVEEDVGRERRRRVLQTLVWFLLTLLLALFIPDIGKVISVIGGLAACFIFVFPGLCLIQAKLSEMEEVKPASWWVLVSYGVLLVTLGAFIFGQTTANAIFVDLLA

SEQ ID NO: 81557 - protein, 354 aa, Homo sapiens
  Payload ID: 16256
  Gene Symbol: SLC38A7
  Gene Name: solute carrier family 38, member 7
  ENSP ID: ENSP00000454325
MAQVSINNDYSEWDLSTDAGERARLLQSPCVDTAPKSEWEASPGGLDRGTTSTLGAIFIVVNACLGAGLLNFPAAFSTAGGVAAGIALQMGMLVFIISGLVILAYCSQASNERTYQEVVWAVCGKLTGVLCEVAIAVYTFGTCIAFLIIIGDQQDKIIAVMAKEPEGASGPWYTDRKFTISLTAFLFILPLSIPREIGFQKYASFLSVVGTWYVTAIVIIKYIWPDKEMTPGNILTRPASWMAVFNAMPTICFGFQCHVSSVPVFNSMQQPEVKTWGGVVTAAMVIALAVYMGTAGGCWSATESSWSPWEPSSSARPQPTPSLWISWHNHCLPGNTRPLPLVAGTHLLELWGHS

SEQ ID NO: 81558 - protein, 462 aa, Homo sapiens; identical to SEQ ID NO: 81556
  Payload ID: 16256
  Gene Symbol: SLC38A7
  Gene Name: solute carrier family 38, member 7
  Uniprot ID: Q9NVC3
  ENSP ID: ENSP00000454646

SEQ ID NO: 81559 - protein, 94 aa, Homo sapiens
  Payload ID: 16256
  Gene Symbol: SLC38A7
  Gene Name: solute carrier family 38, member 7
  ENSP ID: ENSP00000454734
MAQVSINNDYSEWDLSTDAGERARLLQSPCVDTAPKSEWEASPGGLDRGTTSTLGAIFIVVNACLGAGLLNFPAAFSTAGGVAAGIALQMGMLV

SEQ ID NO: 81560 - protein, 260 aa, Homo sapiens
  Payload ID: 16256
  Gene Symbol: SLC38A7
  Gene Name: solute carrier family 38, member 7
  ENSP ID: ENSP00000455119
MAQVSINNDYSEWDLSTDAGERARLLQSPCVDTAPKSEWEASPGGLDRGTTSTLGAIFIVVNACLGAGLLNFPAAFSTAGGVAAGIALQMGMLVFIISGLVILAYCSQASNERTYQEVVWAVCGKLTGVLCEVAIAVYTFGTCIAFLIIIGDQQDKIIAVMAKEPEGASGPWYTDRKFTISLTAFLFILPLSIPREIGFQKYASFLSVVGTWYVTAIVIIKYIWPDKEMTPGNILTRPASWMAVFNAMPTICFGFQHAAA

SEQ ID NO: 81561 - protein, 373 aa, Homo sapiens
  Payload ID: 16256
  Gene Symbol: SLC38A7
  Gene Name: solute carrier family 38, member 7
  ENSP ID: ENSP00000455362
MGMLVFIISGLVILAYCSQASNERTYQEVVWAVCGKLTGVLCEVAIAVYTFGTCIAFLIIIGDQQDKIIAVMAKEPEGASGPWYTDRKFTISLTAFLFILPLSIPREIGFQKYASFLSVVGTWYVTAIVIIKYIWPDKEMTPGNILTRPASWMAVFNAMPTICFGFQCHVSSVPVFNSMQQPEVKTWGGVVTAAMVIALAVYMGTGICGFLTFGAAVDPDVLLSYPSEDMAVAVARAFIILSVLTSYPILHFCGRAVVEGLWLRYQGVPVEEDVGRERRRRVLQTLVWFLLTLLLALFIPDIGKVISVIGGLAACFIFVFPGLCLIQAKLSEMEEVKPASWWVLVSYGVLLVTLGAFIFGQTTANAIFVDLLA

SEQ ID NO: 81562 - protein, 140 aa, Homo sapiens
  Payload ID: 16256
  Gene Symbol: SLC38A7
  Gene Name: solute carrier family 38, member 7
  ENSP ID: ENSP00000455490
MAQVSINNDYSEWDLSTDAGERARLLQSPCVDTAPKSEWEASPGGLDRGTTSTLGAIFIVVNACLGAGLLNFPAAFSTAGGVAAGIALQMGMLVFIISGLVILAYCSQASNERTYQEVVWAVCGKLTGVLCEVAIAVYTF

SEQ ID NO: 81563 - protein, 65 aa, Homo sapiens
  Payload ID: 16256
  Gene Symbol: SLC38A7
  Gene Name: solute carrier family 38, member 7
  ENSP ID: ENSP00000456464
MTPGNILTRPASWMAVFNAMPTICFGFQCHVSSVPVFNSMQQPEVKTWGGVVTAAMVIALAVYMG

SEQ ID NO: 81564 - protein, 135 aa, Homo sapiens
  Payload ID: 16256
  Gene Symbol: SLC38A7
  Gene Name: solute carrier family 38, member 7
  ENSP ID: ENSP00000457462
MAQVSINNDYSEWDLSTDAGERARLLQSPCVDTAPKSEWEASPGGLDRGTTSTLGAIFIVVNACLGAGLLNFPAAFSTAGGVAAGIALQMVSALAGRAEVQFSWALCLKREASGQGWPVSDTRTALPSLTHGRHD

SEQ ID NO: 81565 - protein, 170 aa, Homo sapiens
  Payload ID: 16256
  Gene Symbol: SLC38A7
  Gene Name: solute carrier family 38, member 7
  ENSP ID: ENSP00000457988
  MOD_RES (1)..(1): Any amino acid
XIAVYTFGTCIAFLIIIGDQQDKIIAVMAKEPEGASGPWYTDRKFTISLTAFLFILPLSIPREIGFQKYASFLSVVGTWYVTAIVIIKYIWPDKEMTPGNILTRPASWMAVFNAMPTICFGFQCHVSSVPVFNSMQQPEVKTWGGVVTAAMVIALAVYMGTAETRSHYVA

SEQ ID NO: 81566 - protein, 435 aa, Homo sapiens
  Payload ID: 16257
  Gene Symbol: SLC38A8
  Gene Name: solute carrier family 38, member 8
  Uniprot ID: A6NNN8
  ENSP ID: ENSP00000299709
MEGQTPGSRGLPEKPHPATAAATLSSMGAVFILMKSALGAGLLNFPWAFSKAGGVVPAFLVELVSLVFLISGLVILGYAAAVSGQATYQGVVRGLCGPAIGKLCEACFLLNLLMISVAFLRVIGDQLEKLCDSLLSGTPPAPQPWYADQRFTLPLLSVLVILPLSAPREIAFQKYTSILGTLAACYLALVITVQYYLWPQGLVRESHPSLSPASWTSVFSVFPTICFGFQCHEAAVSIYCSMRKRSLSHWALVSVLSLLACCLIYSLTGVYGFLTFGTEVSADVLMSYPGNDMVIIVARVLFAVSIVTVYPIVLFLGRSVMQDFWRRSCLGGWGPSALADPSGLWVRMPLTILWVTVTLAMALFMPDLSEIVSIIGGISSFFIFIFPGLCLICAMGVEPIGPRVKCCLEVWGVVSVLVGTFIFGQSTAAAVWEMF

SEQ ID NO: 81567 - protein, 46 aa, Homo sapiens
  Payload ID: 16257
  Gene Symbol: SLC38A8
  Gene Name: solute carrier family 38, member 8
  ENSP ID: ENSP00000455085
MISVAFLRVIGDQLEKLCDSLLSGTPPAPQPWYADQRFTLPLLSVL

SEQ ID NO: 81568 - protein, 262 aa, Homo sapiens
  Payload ID: 16257
  Gene Symbol: SLC38A8
  Gene Name: solute carrier family 38, member 8
  ENSP ID: ENSP00000457737
MEGQTPGSRGLPEKPHPATAAATLSSMGAVFILMKSALGAGLLNFPWAFSKAGGVVPAFLVELVSLVFLISGLVILGYAAAVSGQATYQGVVRGLCGPAIGKLCEACFLLNLLMISVAFLRVIGDQLEKLCDSLLSGTPPAPQPWYADQRFTLPLLSVLVILPLSAPREIAFQKYTSILGTLAACYLALVITVQYYLWPQGLVRESHPSLSPASWTSVFSVFPTICFGFQCHEAAVSIYCSMRKRSLSHWALVSVLSLLACC

SEQ ID NO: 81569 - protein, 561 aa, Homo sapiens
  Payload ID: 16258
  Gene Symbol: SLC38A9
  Gene Name: solute carrier family 38, member 9
  Uniprot ID: Q8NBW4
  ENSP ID: ENSP00000316596
MANMNSDSRHLGTSEVDHERDPGPMNIQFEPSDLRSKRPFCIEPTNIVNVNHVIQRVSDHASAMNKRIHYYSRLTTPADKALIAPDHVVPAPEECYVYSPLGSAYKLQSYTEGYGKNTSLVTIFMIWNTMMGTSILSIPWGIKQAGFTTGMCVIILMGLLTLYCCYRVVKSRTMMFSLDTTSWEYPDVCRHYFGSFGQWSSLLFSLVSLIGAMIVYWVLMSNFLFNTGKFIFNFIHHINDTDTILSTNNSNPVICPSAGSGGHPDNSSMIFYANDTGAQQFEKWWDKSRTVPFYLVGLLLPLLNFKSPSFFSKFNILGTVSVLYLIFLVTFKAVRLGFHLEFHWFIPTEFFVPEIRFQFPQLTGVLTLAFFIHNCIITLLKNNKKQENNVRDLCIAYMLVTLTYLYIGVLVFASFPSPPLSKDCIEQNFLDNFPSSDTLSFIARIFLLFQMMTVYPLLGYLARVQLLGHIFGDIYPSIFHVLILNLIIVGAGVIMACFYPNIGGIIRYSGAACGLAFVFIYPSLIYIISLHQEERLTWPKLIFHVFIIILGVANLIVQFFM

SEQ ID NO: 81570 - protein, 561 aa, Homo sapiens; identical to SEQ ID NO: 81569
  Payload ID: 16258
  Gene Symbol: SLC38A9
  Gene Name: solute carrier family 38, member 9
  Uniprot ID: Q8NBW4
  ENSP ID: ENSP00000380074

SEQ ID NO: 81571 - protein, 437 aa, Homo sapiens
  Payload ID: 16258
  Gene Symbol: SLC38A9
  Gene Name: solute carrier family 38, member 9
  ENSP ID: ENSP00000397429
MIWNTMMGTSILSIPWGIKQAGFTTGMCVIILMGLLTLYCCYRVVKSRTMMFSLDTTSWEYPDVCRHYFGSFGQWSSLLFSLVSLIGAMIVYWVLMSNFLFNTGKFIFNFIHHINDTDTILSTNNSNPVICPSAGSGGHPDNSSMIFYANDTGAQQFEKWWDKSRTVPFYLVGLLLPLLNFKSPSFFSKFNILGTVSVLYLIFLVTFKAVRLGFHLEFHWFIPTEFFVPEIRFQFPQLTGVLTLAFFIHNCIITLLKNNKKQENNVRDLCIAYMLVTLTYLYIGVLVFASFPSPPLSKDCIEQNFLDNFPSSDTLSFIARIFLLFQMMTVYPLLGYLARVQLLGHIFGDIYPSIFHVLILNLIIVGAGVIMACFYPNIGGIIRYSGAACGLAFVFIYPSLIYIISLHQEERLTWPKLIFHVFIIILGVANLIVQFFM

SEQ ID NO: 81572 - protein, 498 aa, Homo sapiens
  Payload ID: 16258
  Gene Symbol: SLC38A9
  Gene Name: solute carrier family 38, member 9
  Uniprot ID: Q8NBW4
  ENSP ID: ENSP00000420934
MNKRIHYYSRLTTPADKALIAPDHVVPAPEECYVYSPLGSAYKLQSYTEGYGKNTSLVTIFMIWNTMMGTSILSIPWGIKQAGFTTGMCVIILMGLLTLYCCYRVVKSRTMMFSLDTTSWEYPDVCRHYFGSFGQWSSLLFSLVSLIGAMIVYWVLMSNFLFNTGKFIFNFIHHINDTDTILSTNNSNPVICPSAGSGGHPDNSSMIFYANDTGAQQFEKWWDKSRTVPFYLVGLLLPLLNFKSPSFFSKFNILGTVSVLYLIFLVTFKAVRLGFHLEFHWFIPTEFFVPEIRFQFPQLTGVLTLAFFIHNCIITLLKNNKKQENNVRDLCIAYMLVTLTYLYIGVLVFASFPSPPLSKDCIEQNFLDNFPSSDTLSFIARIFLLFQMMTVYPLLGYLARVQLLGHIFGDIYPSIFHVLILNLIIVGAGVIMACFYPNIGGIIRYSGAACGLAFVFIYPSLIYIISLHQEERLTWPKLIFHVFIIILGVANLIVQFFM

SEQ ID NO: 81573 - protein, 37 aa, Homo sapiens
  Payload ID: 16258
  Gene Symbol: SLC38A9
  Gene Name: solute carrier family 38, member 9
  ENSP ID: ENSP00000420950
MANMNSDSRHLGTSEVDHERDPGPMNIQFEPSDLRSK

SEQ ID NO: 81574 - protein, 96 aa, Homo sapiens
  Payload ID: 16258
  Gene Symbol: SLC38A9
  Gene Name: solute carrier family 38, member 9
  ENSP ID: ENSP00000422843
MANMNSDSRHLGTSEVDHERDPGPMNIQFEPSDLRSKRPFCIEPTNIVNVNHVIQRVSDHASAMNKRIHYYSRLTTPADKALIAPDHVVPAPEECY

SEQ ID NO: 81575 - protein, 455 aa, Homo sapiens
  Payload ID: 16258
  Gene Symbol: SLC38A9
  Gene Name: solute carrier family 38, member 9
  ENSP ID: ENSP00000423219
MANMNSDSRHLGTSEVDHERDPGPMNIQFEPSDLRSKRPFCIEPTNIVNVNHVIQRVSDHASAMNKRIHYYSRLTTPADKALIAPDHVVPAPEECYVYSPLGSAYKLQSYTEGYGKNTSLVTIFMIWNTMMGTSILSIPWGIKQAGFTTGMCVIILMGLLTLYCCYRVVKSRTMMFSLDTTSWEYPDVCRHYFGSFGQWSSLLFSLVSLIGAMIVYWVLMSNFLFNTGKFIFSTVSVLYLIFLVTFKAVRLGFHLEFHWFIPTEFFVPEIRFQFPQLTGVLTLAFFIHNCIITLLKNNKKQENNVRDLCIAYMLVTLTYLYIGVLVFASFPSPPLSKDCIEQNFLDNFPSSDTLSFIARIFLLFQMMTVYPLLGYLARVQLLGHIFGDIYPSIFHVLILNLIIVGAGVIMACFYPNIGGIIRYSGAACGLAFVFIYPSLIYIISLHQEERLTWPK

SEQ ID NO: 81576 - protein, 43 aa, Homo sapiens
  Payload ID: 16258
  Gene Symbol: SLC38A9
  Gene Name: solute carrier family 38, member 9
  ENSP ID: ENSP00000424271
MANMNSDSRHLGTSEVDHERDPGPMNIQFEPSDLRSKRQGLTL

SEQ ID NO: 81577 - protein, 102 aa, Homo sapiens
  Payload ID: 16258
  Gene Symbol: SLC38A9
  Gene Name: solute carrier family 38, member 9
  ENSP ID: ENSP00000424918
MNKRIHYYSRLTTPADKALIAPDHVVPAPEECYVYSPLGSAYKLQSYTEGYGKNTSLVTIFMIWNTMMGTSILSIPWGIKQAGFTTGMCVIILMGLLTLYCC

SEQ ID NO: 81578 - protein, 131 aa, Homo sapiens
  Payload ID: 16258
  Gene Symbol: SLC38A9
  Gene Name: solute carrier family 38, member 9
  ENSP ID: ENSP00000425055
MANMNSDSRHLGTSEVDHERDPGPMNIQFEPSDLRSKRPFCIEPTNIVNVNHVIQRVSDHASAMNKRIHYYSRLTTPADKALIAPDHVVPAPEECYVYSPLGSAYKLQSYTEGYGKNTSLVTIFMIWNTMM

SEQ ID NO: 81579 - protein, 37 aa, Homo sapiens; identical to SEQ ID NO: 81573
  Payload ID: 16258
  Gene Symbol: SLC38A9
  Gene Name: solute carrier family 38, member 9
  ENSP ID: ENSP00000425259

SEQ ID NO: 81580 - protein, 26 aa, Homo sapiens
  Payload ID: 16258
  Gene Symbol: SLC38A9
  Gene Name: solute carrier family 38, member 9
  ENSP ID: ENSP00000425842
MANMNSDSRHLGTSEVDHERDPGPMN

SEQ ID NO: 81581 - protein, 187 aa, Homo sapiens
  Payload ID: 16258
  Gene Symbol: SLC38A9
  Gene Name: solute carrier family 38, member 9
  ENSP ID: ENSP00000426413
MNKRIHYYSRLTTPADKALIAPDHVVPAPEECYVYSPLGSAYKLQSYTEGYGKNTSLVTIFMIWNTMMGTSILSIPWGIKQAGFTTGMCVIILMGLLTLYCCYRVVKSRTMMFSLDTTSWEYPDVCRHYFGSFGQWSSLLFSLVSLIGAMIVYWVLMSNFLFNTGKFIFNFIHHINDTDTILSTNNS

SEQ ID NO: 81582 - protein, 43 aa, Homo sapiens
  Payload ID: 16258
  Gene Symbol: SLC38A9
  Gene Name: solute carrier family 38, member 9
  ENSP ID: ENSP00000426925
MANMNSDSRHLGTSEVDHERDPGPMNIQFEPSDLRSKRLPQTM

SEQ ID NO: 81583 - protein, 498 aa, Homo sapiens
  Payload ID: 16258
  Gene Symbol: SLC38A9
  Gene Name: solute carrier family 38, member 9
  Uniprot ID: Q8NBW4
  ENSP ID: ENSP00000427335
MAICILTWRIRPFCIEPTNIVNVNHVIQRVSDHASAMNKRIHYYSRLTTPADKALIAPDHVVPAPEECYVYSPLGSAYKLQSYTEGYGKNTSLVTIFMIWNTMMGTSILSIPWGIKQAGFTTGMCVIILMGLLTLYCCYRVVKSRTMMFSLDTTSWEYPDVCRHYFGSFGQWSSLLFSLVSLIGAMIVYWVLMSNFLFNTGKFIFNFIHHINDTDTILSTNNSNPVICPSAGSGGHPDNSSMIFYANDTGAQQFEKWWDKSRTVPFYLVGLLLPLLNFKSPSFFSKFNILEIRFQFPQLTGVLTLAFFIHNCIITLLKNNKKQENNVRDLCIAYMLVTLTYLYIGVLVFASFPSPPLSKDCIEQNFLDNFPSSDTLSFIARIFLLFQMMTVYPLLGYLARVQLLGHIFGDIYPSIFHVLILNLIIVGAGVIMACFYPNIGGIIRYSGAACGLAFVFIYPSLIYIISLHQEERLTWPKLIFHVFIIILGVANLIVQFFM

SEQ ID NO: 81584 - protein, 36 aa, Homo sapiens
  Payload ID: 16258
  Gene Symbol: SLC38A9
  Gene Name: solute carrier family 38, member 9
  ENSP ID: ENSP00000427624
MNKRIHYYSRLTTPADKALIAPDHVVPAPEECYVYS

SEQ ID NO: 81585 - protein, 397 aa, Homo sapiens
  Payload ID: 16258
  Gene Symbol: SLC38A9
  Gene Name: solute carrier family 38, member 9
  ENSP ID: ENSP00000427707
MNKRIHYYSRLTTPADKALIAPDHVVPAPEECYVYSPLGSAYKLQSYTEGYGKNTSLVTIFMIWNTMMGTSILSIPWGIKQAGFTTGMCVIILMGLLTLYCCYRVVKSRTMMFSLDTTSWEYPDVCRHYFGSFGQWSSLLFSLVSLIGAMIVYWVLMSNFLFNTGKFIFNFIHHINDTDTILSTNNSNPVICPSAGSGGHPDNSSMIFYANDTGAQQFEKWWDKSRTVPFYLVGLLLPLLNFKSPSFFSKFNILGTVSVLYLIFLVTFKAVRLGFHLEFHWFIPTEFFVPEIRFQFPQLTGVLTLAFFIHNCIITLLKNNKKQENNVRDLCIAYMLVTLTYLYIGVLVFASFPSPPLSKDCIEQATWLVSSFWAISSVTFILGKGSSLDQQDVPSNK

SEQ ID NO: 81586 - protein, 324 aa, Homo sapiens
  Payload ID: 16259
  Gene Symbol: SLC39A1
  Gene Name: solute carrier family 39 (zinc transporter), member 1
  Uniprot ID: Q9NY26
  ENSP ID: ENSP00000309710
MGPWGEPELLVWRPEAVASEPPVPVGLEVKLGALVLLLVLTLLCSLVPICVLRRPGANHEGSASRQKALSLVSCFAGGVFLATCLLDLLPDYLAAIDEALAALHVTLQFPLQEFILAMGFFLVLVMEQITLAYKEQSGPSPLEETRALLGTVNGGPQHWHDGPGVPQASGAPATPSALRACVLVFSLALHSVFEGLAVGLQRDRARAMELCLALLLHKGILAVSLSLRLLQSHLRAQVVAGCGILFSCMTPLGIGLGAALAESAGPLHQLAQSVLEGMAAGTFLYITFLEILPQELASSEQRILKVILLLAGFALLTGLLFIQI

SEQ ID NO: 81587 - protein, 324 aa, Homo sapiens; identical to SEQ ID NO: 81586
  Payload ID: 16259
  Gene Symbol: SLC39A1
  Gene Name: solute carrier family 39 (zinc transporter), member 1
  Uniprot ID: Q9NY26
  ENSP ID: ENSP00000348535

SEQ ID NO: 81588 - protein, 324 aa, Homo sapiens; identical to SEQ ID NO: 81586
  Payload ID: 16259
  Gene Symbol: SLC39A1
  Gene Name: solute carrier family 39 (zinc transporter), member 1
  Uniprot ID: Q9NY26
  ENSP ID: ENSP00000357610

SEQ ID NO: 81589 - protein, 324 aa, Homo sapiens; identical to SEQ ID NO: 81586
  Payload ID: 16259
  Gene Symbol: SLC39A1
  Gene Name: solute carrier family 39 (zinc transporter), member 1
  Uniprot ID: Q9NY26
  ENSP ID: ENSP00000357612

SEQ ID NO: 81590 - protein, 240 aa, Homo sapiens
  Payload ID: 16259
  Gene Symbol: SLC39A1
  Gene Name: solute carrier family 39 (zinc transporter), member 1
  ENSP ID: ENSP00000392229
MGPWGEPELLVWRPEAVASEPPVPVGLEVKLGALVLLLVLTLLCSLVPICVLRRPGANHEGSASRQKALSLVSCFAGGVFLATCLLDLLPDYLAAIDEALAALHVTLQFPLQEFILAMGFFLVLVMEQITLAYKEQSGPSPLEETRALLGTVNGGPQHWHDGPGVPQASGAPATPSALRACVLVFSLALHSVFEGLAVGLQRDRARAMELCLALLLHKGILAVSLSLRLLQSHLRAQVVA

SEQ ID NO: 81591 - protein, 321 aa, Homo sapiens
  Payload ID: 16259
  Gene Symbol: SLC39A1
  Gene Name: solute carrier family 39 (zinc transporter), member 1
  ENSP ID: ENSP00000392950
MGPWGEPELLVWRPEAVASEPPVPVGLEVKLGALVLLLVLTLLCSLVPICVLRRPGANHEGSASRQKALSLVSCFAGGVFLATCLLDLLPDYLAAIDEALAALHVTLQFPLQEFILAMGFFLVLVMEQITLAYKEQSGPSPLEETRALLGTVNGGPQHWHDGPGVPQASGAPATPSALRACVLVFSLALHSVFEGLAVGLQRDRARAMELCLALLLHKGILAVSLSLRLLQSHLRAQVVAGCGILFSCMTPLGIGLGAALAESAGPLHQLAQSVLEGMAAGTFLYITFLEILPQELASSEQRILKVILLLAGFALLTGLLF

SEQ ID NO: 81592 - protein, 206 aa, Homo sapiens
  Payload ID: 16259
  Gene Symbol: SLC39A1
  Gene Name: solute carrier family 39 (zinc transporter), member 1
  ENSP ID: ENSP00000407717
MGPWGEPELLVWRPEAVASEPPVPVGLEVKLGALVLLLVLTLLCSLVPICVLRRPGANHEGSASRQKALSLVSCFAGGVFLATCLLDLLPDYLAAIDEALAALHVTLQFPLQEFILAMGFFLVLVMEQITLAYKEQSGPSPLEETRALLGTVNGGPQHWHDGPGVPQASGAPATPSALRACVLVFSLALHSVFEGLAVGLQRDRAR

SEQ ID NO: 81593 - protein, 116 aa, Homo sapiens
  Payload ID: 16259
  Gene Symbol: SLC39A1
  Gene Name: solute carrier family 39 (zinc transporter), member 1
  ENSP ID: ENSP00000443632
MGPWGEPELLVWRPEAVASEPPVPVGLEVKLGALVLLLVLTLLCSLVPICVLRRPGANHEGSAPVPTARVHPGHGLLPGPGDGADHTGLQGAVRAVTSGGNKGSAGNSEWWAAALA

SEQ ID NO: 81594 - protein, 324 aa, Homo sapiens; identical to SEQ ID NO: 81586
  Payload ID: 16259
  Gene Symbol: SLC39A1
  Gene Name: solute carrier family 39 (zinc transporter), member 1
  Uniprot ID: Q9NY26
  ENSP ID: ENSP00000479421

SEQ ID NO: 81595 - protein, 324 aa, Homo sapiens; identical to SEQ ID NO: 81586
  Payload ID: 16259
  Gene Symbol: SLC39A1
  Gene Name: solute carrier family 39 (zinc transporter), member 1
  Uniprot ID: Q9NY26
  ENSP ID: ENSP00000484182

SEQ ID NO: 81596 - protein, 831 aa, Homo sapiens
  Payload ID: 16260
  Gene Symbol: SLC39A10
  Gene Name: solute carrier family 39 (zinc transporter), member 10
  Uniprot ID: Q9ULF5
  ENSP ID: ENSP00000352655
MKVHMHTKFCLICLLTFIFHHCNHCHEEHDHGPEALHRQHRGMTELEPSKFSKQAAENEKKYYIEKLFERYGENGRLSFFGLEKLLTNLGLGERKVVEINHEDLGHDHVSHLDILAVQEGKHFHSHNHQHSHNHLNSENQTVTSVSTKRNHKCDPEKETVEVSVKSDDKHMHDHNHRLRHHHRLHHHLDHNNTHHFHNDSITPSERGEPSNEPSTETNKTQEQSDVKLPKGKRKKKGRKSNENSEVITPGFPPNHDQGEQYEHNRVHKPDRVHNPGHSHVHLPERNGHDPGRGHQDLDPDNEGELRHTRKREAPHVKNNAIISLRKDLNEDDHHHECLNVTQLLKYYGHGANSPISTDLFTYLCPALLYQIDSRLCIEHFDKLLVEDINKDKNLVPEDEANIGASAWICGIISITVISLLSLLGVILVPIINQGCFKFLLTFLVALAVGTMSGDALLHLLPHSQGGHDHSHQHAHGHGHSHGHESNKFLEEYDAVLKGLVALGGIYLLFIIEHCIRMFKHYKQQRGKQKWFMKQNTEESTIGRKLSDHKLNNTPDSDWLQLKPLAGTDDSVVSEDRLNETELTDLEGQQESPPKNYLCIEEEKIIDHSHSDGLHTIHEHDLHAAAHNHHGENKTVLRKHNHQWHHKHSHHSHGPCHSGSDLKETGIANIAWMVIMGDGIHNFSDGLAIGAAFSAGLTGGISTSIAVFCHELPHELGDFAVLLKAGMTVKQAIVYNLLSAMMAYIGMLIGTAVGQYANNITLWIFAVTAGMFLYVALVDMLPEMLHGDGDNEEHGFCPVGQFILQNLGLLFGFAIMLVIALYEDKIVFDIQF

SEQ ID NO: 81597 - protein, 831 aa, Homo sapiens; identical to SEQ ID NO: 81596
  Payload ID: 16260
  Gene Symbol: SLC39A10
  Gene Name: solute carrier family 39 (zinc transporter), member 10
  Uniprot ID: Q9ULF5
  ENSP ID: ENSP00000386766

SEQ ID NO: 81598 - protein, 126 aa, Homo sapiens
  Payload ID: 16260
  Gene Symbol: SLC39A10
  Gene Name: solute carrier family 39 (zinc transporter), member 10
  ENSP ID: ENSP00000389640
MKVHMHTKFCLICLLTFIFHHCNHCHEEHDHGPEALHRQHRGMTELEPSKFSKQAAENEKKYYIEKLFERYGENGRLSFFGLEKLLTNLGLGERKVVEINHEDLGHDHVSHLDILAVQEGKHFHSH

SEQ ID NO: 81599 - protein, 39 aa, Homo sapiens
  Payload ID: 16260
  Gene Symbol: SLC39A10
  Gene Name: solute carrier family 39 (zinc transporter), member 10
  ENSP ID: ENSP00000394469
MKNVMVMILVVDTKILILIMKVNFDILEREKHHMLKIMQ

SEQ ID NO: 81600 - protein, 39 aa, Homo sapiens; identical to SEQ ID NO: 81599
  Payload ID: 16260
  Gene Symbol: SLC39A10
  Gene Name: solute carrier family 39 (zinc transporter), member 10
  ENSP ID: ENSP00000394995

SEQ ID NO: 81601 - protein, 38 aa, Homo sapiens
  Payload ID: 16260
  Gene Symbol: SLC39A10
  Gene Name: solute carrier family 39 (zinc transporter), member 10
  ENSP ID: ENSP00000406590
MKVHMHTKFCLICLLTFIFHHCNHCHEEHDHGPEALHR

SEQ ID NO: 81602 - protein, 130 aa, Homo sapiens
  Payload ID: 16260
  Gene Symbol: SLC39A10
  Gene Name: solute carrier family 39 (zinc transporter), member 10
  ENSP ID: ENSP00000409272
MKVHMHTKFCLICLLTFIFHHCNHCHEEHDHGPEALHRQHRGMTELEPSKFSKQAAENEKKYYIEKLFERYGENGRLSFFGLEKLLTNLGLGERKVVEINHEDLGHDHVSHLDILAVQEGKHFHSHNHQH

SEQ ID NO: 81603 - protein, 691 aa, Homo sapiens
  Payload ID: 16261
  Gene Symbol: SLC39A12
  Gene Name: solute carrier family 39 (zinc transporter), member 12
  Uniprot ID: Q504Y0
  ENSP ID: ENSP00000366586
MCFRTKLSVSWVPLFLLLSRVFSTETDKPSAQDSRSRGSSGQPADLLQVLSAGDHPPHNHSRSLIKTLLEKTGCPRRRNGMQGDCNLCFEPDALLLIAGGNFEDQLREEVVQRVSLLLLYYIIHQEEICSSKLNMSNKEYKFYLHSLLSLRQDEDSSFLSQNETEDILAFTRQYFDTSQSQCMETKTLQKKSGIVSSEGANESTLPQLAAMIITLSLQGVCLGQGNLPSPDYFTEYIFSSLNRTNTLRLSELDQLLNTLWTRSTCIKNEKIHQFQRKQNNIITHDQDYSNFSSSMEKESEDGPVSWDQTCFSARQLVEIFLQKGLSLISKEDFKQMSPGIIQQLLSCSCHLPKDQQAKLPPTTLEKYGYSTVAVTLLTLGSMLGTALVLFHSCEENYRLILQLFVGLAVGTLSGDALLHLIPQVLGLHKQEAPEFGHFHESKGHIWKLMGLIGGIHGFFLIEKCFILLVSPNDKQGLSLVNGHVGHSHHLALNSELSDQAGRGKSASTIQLKSPEDSQAAEMPIGSMTASNRKCKAISLLAIMILVGDSLHNFADGLAIGAAFSSSSESGVTTTIAILCHEIPHEMGDFAVLLSSGLSMKTAILMNFISSLTAFMGLYIGLSVSADPCVQDWIFTVTAGMFLYLSLVEMLPEMTHVQTQRPWMMFLLQNFGLILGWLSLLLLAIYEQNIKI

SEQ ID NO: 81604 - protein, 690 aa, Homo sapiens
  Payload ID: 16261
  Gene Symbol: SLC39A12
  Gene Name: solute carrier family 39 (zinc transporter), member 12
  Uniprot ID: Q504Y0
  ENSP ID: ENSP00000366588
MCFRTKLSVSWVPLFLLLSRVFSTETDKPSAQDSRSRGSSGQPADLLQVLSAGDHPPHNHSRSLIKTLLEKTGCPRRRNGMQGDCNLCFEPDALLLIAGGNFEDQLREEVVQRVSLLLLYYIIHQEEICSSKLNMSNKEYKFYLHSLLSLRQDEDSSFLSQNETEDILAFTRQYFDTSQSQCMETKTLQKKSGIVSSEGANESTLPQLAAMIITLSLQGVCLGQGNLPSPDYFTEYIFSSLNRTNTLRLSELDQLLNTLWTRSTCIKNEKIHQFQRKQNNIITHDQDYSNFSSSMEKESEDGPVSWDQTCFSARQLVEIFLQKGLSLISKEDFKQMSPGIIQQLLSCSCHLPKDQQAKLPPTTLEKYGYSTVAVTLLTLGSMLGTALVLFHSCEENYRLILQLFVGLAVGTLSGDALLHLIPQVLGLHKQEAPEFGHFHESKGHIWKLMGLIGGIHGFFLIEKCFILLVSPNDKGLSLVNGHVGHSHHLALNSELSDQAGRGKSASTIQLKSPEDSQAAEMPIGSMTASNRKCKAISLLAIMILVGDSLHNFADGLAIGAAFSSSSESGVTTTIAILCHEIPHEMGDFAVLLSSGLSMKTAILMNFISSLTAFMGLYIGLSVSADPCVQDWIFTVTAGMFLYLSLVEMLPEMTHVQTQRPWMMFLLQNFGLILGWLSLLLLAIYEQNIKI

SEQ ID NO: 81605 - protein, 654 aa, Homo sapiens
  Payload ID: 16261
  Gene Symbol: SLC39A12
  Gene Name: solute carrier family 39 (zinc transporter), member 12
  Uniprot ID: Q504Y0
  ENSP ID: ENSP00000366591
MCFRTKLSVSWVPLFLLLSRVFSTETDKPSAQDSRSRGSSGQPADLLQVLSAGDHPPHNHSRSLIKTLLEKTGCPRRRNGMQGDCNLCFEPDALLLIAGGNFEDQLREEVVQRVSLLLLYYIIHQEEICSSKLNMSNKEYKFYLHSLLSLRQDEDSSFLSQNETEDILAFTRQYFDTSQSQCMETKTLQKKSGIVSSEGANESTLPQLAAMIITLSLQGVCLGQGNLPSPDYFTEYIFSSLNRTNTLRLSELDQLLNTLWTRSTCIKNEKIHQFQRKQNNIITHDQDYSNFSSSMEKESEDGPVSWDQTCFSARQLVEIFLQKGLSLISKEDFKQMSPGIIQQLLSCSCHLPKDQQAKLPPTTLEKYGYSTVAVTLLTLGSMLGTALVLFHSCEENYRLILQLFVGLAVGTLSGDALLHLIPQVLGLHKQEAPEFGHFHESKGHIWKLMGLIGGIHGFFLIEKCFILLVSPNDKKSPEDSQAAEMPIGSMTASNRKCKAISLLAIMILVGDSLHNFADGLAIGAAFSSSSESGVTTTIAILCHEIPHEMGDFAVLLSSGLSMKTAILMNFISSLTAFMGLYIGLSVSADPCVQDWIFTVTAGMFLYLSLVEMLPEMTHVQTQRPWMMFLLQNFGLILGWLSLLLLAIYEQNIKI

SEQ ID NO: 81606 - protein, 557 aa, Homo sapiens
  Payload ID: 16261
  Gene Symbol: SLC39A12
  Gene Name: solute carrier family 39 (zinc transporter), member 12
  Uniprot ID: Q504Y0
  ENSP ID: ENSP00000440445
MSNKEYKFYLHSLLSLRQDEDSSFLSQNETEDILAFTRQYFDTSQSQCMETKTLQKKSGIVSSEGANESTLPQLAAMIITLSLQGVCLGQGNLPSPDYFTEYIFSSLNRTNTLRLSELDQLLNTLWTRSTCIKNEKIHQFQRKQNNIITHDQDYSNFSSSMEKESEDGPVSWDQTCFSARQLVEIFLQKGLSLISKEDFKQMSPGIIQQLLSCSCHLPKDQQAKLPPTTLEKYGYSTVAVTLLTLGSMLGTALVLFHSCEENYRLILQLFVGLAVGTLSGDALLHLIPQVLGLHKQEAPEFGHFHESKGHIWKLMGLIGGIHGFFLIEKCFILLVSPNDKQGLSLVNGHVGHSHHLALNSELSDQAGRGKSASTIQLKSPEDSQAAEMPIGSMTASNRKCKAISLLAIMILVGDSLHNFADGLAIGAAFSSSSESGVTTTIAILCHEIPHEMGDFAVLLSSGLSMKTAILMNFISSLTAFMGLYIGLSVSADPCVQDWIFTVTAGMFLYLSLVEMLPEMTHVQTQRPWMMFLLQNFGLILGWLSLLLLAIYEQNIKI

SEQ ID NO: 81607 - protein, 364 aa, Homo sapiens
  Payload ID: 16262
  Gene Symbol: SLC39A13
  Gene Name: solute carrier family 39 (zinc transporter), member 13
  Uniprot ID: Q96H72
  ENSP ID: ENSP00000346956
MPGCPCPGCGMAGPRLLFLTALALELLERAGGSQPALRSRGTATACRLDNKESESWGALLSGERLDTWICSLLGSLMVGLSGVFPLLVIPLEMGTMLRSEAGAWRLKQLLSFALGGLLGNVFLHLLPEAWAYTCSASPGGEGQSLQQQQQLGLWVIAGILTFLALEKMFLDSKEEGTSQAPNKDPTAAAAALNGGHCLAQPAAEPGLGAVVRSIKVSGYLNLLANTIDNFTHGLAVAASFLVSKKIGLLTTMAILLHEIPHEVGDFAILLRAGFDRWSAAKLQLSTALGGLLGAGFAICTQSPKGVEETAAWVLPFTSGGFLYIALVNVLPDLLEEEDPWRSLQQLLLLCAGIVVMVLFSLFVD

SEQ ID NO: 81608 - protein, 371 aa, Homo sapiens
  Payload ID: 16262
  Gene Symbol: SLC39A13
  Gene Name: solute carrier family 39 (zinc transporter), member 13
  Uniprot ID: Q96H72
  ENSP ID: ENSP00000354689
MPGCPCPGCGMAGPRLLFLTALALELLERAGGSQPALRSRGTATACRLDNKESESWGALLSGERLDTWICSLLGSLMVGLSGVFPLLVIPLEMGTMLRSEAGAWRLKQLLSFALGGLLGNVFLHLLPEAWAYTCSASPGGEGQSLQQQQQLGLWVIAGILTFLALEKMFLDSKEEGTSQAPNKDPTAAAAALNGGHCLAQPAAEPGLGAVVRSIKVSGYLNLLANTIDNFTHGLAVAASFLVSKKIGLLTTMAILLHEIPHEVGDFAILLRAGFDRWSAAKLQLSTALGGLLGAGFAICTQSPKGVVGCSPAAEETAAWVLPFTSGGFLYIALVNVLPDLLEEEDPWRSLQQLLLLCAGIVVMVLFSLFVD

SEQ ID NO: 81609 - protein, 218 aa, Homo sapiens
  Payload ID: 16262
  Gene Symbol: SLC39A13
  Gene Name: solute carrier family 39 (zinc transporter), member 13
  ENSP ID: ENSP00000432302
MPGCPCPGCGMAGPRLLFLTALALELLERAGGSQPALRSRGTATACRLDNKESESWGALLSGERLDTWICSLLGSLMVGLSGVFPLLVIPLEMGTMLRSEAGAWRLKQLLSFALGGLLGNVFLHLLPEAWAYTCSASPGGEGQSLQQQQQLGLWVIAGILTFLALEKMFLDSKEEGTSQVSGYLNLLANTIDNFTHGLAVAASFLVSKKVRGLGPVGL

SEQ ID NO: 81610 - protein, 248 aa, Homo sapiens
  Payload ID: 16262
  Gene Symbol: SLC39A13
  Gene Name: solute carrier family 39 (zinc transporter), member 13
  ENSP ID: ENSP00000432499
MPGCPCPGCGMAGPRLLFLTALALELLERAGGSQPALRSRGTATACRLDNKESESWGALLSGERLDTWICSLLGSLMVGLSGVFPLLVIPLEMGTMLRSEAGAWRLKQLLSFALGGLLGNVFLHLLPEAWAYTCSASPGGEGQSLQQQQQLGLWVIAGILTFLALEKMFLDSKEEGTSQAPNKDPTAAAAALNGGHCLAQPAAEPGLGAVVRSIKVSGYLNLLANTIDNFTHGLAVAASFLVSKKVRG

SEQ ID NO: 81611 - protein, 325 aa, Homo sapiens
  Payload ID: 16262
  Gene Symbol: SLC39A13
  Gene Name: solute carrier family 39 (zinc transporter), member 13
  ENSP ID: ENSP00000434290
MPGCPCPGCGMAGPRLLFLTALALELLERAGGSQPALRSRGTATACRLDNKESESWGALLSGERLDTWICSLLGSLMVGLSGVFPLLVIPLEMGTMLRSEAGAWRLKQLLSFALGGLLGNVFLHLLPEAWAYTCSASPGGEGQSLQQQQQLGLWVIAGILTFLALEKMFLDSKEEGTSQAPNKDPTAAAAALNGGHCLAQPAAEPGLGAVVRSIKVSGYLNLLANTIDNFTHGLAVAASFLVSKKIGLLTTMAILLHEIPHEVGDFAILLRAGFDRWSAAKLQLSTALGGLLGAGFAICTQSPKGRRRQPGSCPSPLAAFSTSPW

SEQ ID NO: 81612 - protein, 258 aa, Homo sapiens
  Payload ID: 16262
  Gene Symbol: SLC39A13
  Gene Name: solute carrier family 39 (zinc transporter), member 13
  ENSP ID: ENSP00000434684
MPGCPCPGCGMAGPRLLFLTALALELLERAGGSQPALRSRGTATACRLDNKESESWGALLSGERLDTWICSLLGSLMVGLSGVFPLLVIPLEMGTMLRSEAGAWRLKQLLSFALGGLLGNVFLHLLPEAWAYTCSASPGGEGQSLQQQQQLGLWVIAGILTFLALEKMFLDSKEEGTSQVSGYLNLLANTIDNFTHGLAVAASFLVSKKIGLLTTMAILLHEIPHEVGDFAILLRAGFDRWSAAKLQLSTALGGLLGA

SEQ ID NO: 81613 - protein, 138 aa, Homo sapiens
  Payload ID: 16262
  Gene Symbol: SLC39A13
  Gene Name: solute carrier family 39 (zinc transporter), member 13
  ENSP ID: ENSP00000435076
MPGCPCPGCGMAGPRLLFLTALALELLERAGGSQPALRSRGTATACRLDNKESESWGALLSGERLDTWICSLLGSLMVGLSGVFPLLVIPLEMGTMLRSEAGAWRLKQLLSFALGGLLGNVFLHLLPEAWAYTCSASP

SEQ ID NO: 81614 - protein, 140 aa, Homo sapiens
  Payload ID: 16262
  Gene Symbol: SLC39A13
  Gene Name: solute carrier family 39 (zinc transporter), member 13
  ENSP ID: ENSP00000435845
MPGCPCPGCGMAGPRLLFLTALALELLERAGGSQPALRSRGTATACRLDNKESESWGALLSGERLDTWICSLLGSLMVGLSGVFPLLVIPLEMGTMLRSEAGAWRLKQLLSFALGGLLGNVFLHLLPEAWAYTCSASPGK

SEQ ID NO: 81615 - protein, 321 aa, Homo sapiens
  Payload ID: 16262
  Gene Symbol: SLC39A13
  Gene Name: solute carrier family 39 (zinc transporter), member 13
  ENSP ID: ENSP00000437186
MPGCPCPGCGMAGPRLLFLTALALELLERAGGSQPALRSRGTATACRLDNKESESWGALLSGERLDTWICSLLGSLMVGLSGVFPLLVIPLEMGTMLRSEAGAWRLKQLLSFALGGLLGNVFLHLLPEAWAYTCSASPGGEGQSLQQQQQLGLWVIAGILTFLALEKMFLDSKEEGTSQAPNKDPTAAAAALNGGHCLAQPAAEPGLGAVVRSIKVSGYLNLLANTIDNFTHGLAVAASFLVSKKVRGLGPVGLWRFQWQPCGFHLCLESLLLAPPLPAPSSKALIPHPPCCCPGRHCSLILSPWSVPVPSTPCWVPLSSC

SEQ ID NO: 81616 - protein, 481 aa, Homo sapiens
  Payload ID: 16263
  Gene Symbol: SLC39A14
  Gene Name: solute carrier family 39 (zinc transporter), member 14
  Uniprot ID: Q15043
  ENSP ID: ENSP00000240095
MKLLLLHPAFQSCLLLTLLGLWRTTPEAHASSLGAPAISAASFLQDLIHRYGEGDSLTLQQLKALLNHLDVGVGRGNVTQHVQGHRNLSTCFSSGDLFTAHNFSEQSRIGSSELQEFCPTILQQLDSRACTSENQENEENEQTEEGRPSAVEVWGYGLLCVTVISLCSLLGASVVPFMKKTFYKRLLLYFIALAIGTLYSNALFQLIPEAFGFNPLEDYYVSKSAVVFGGFYLFFFTEKILKILLKQKNEHHHGHSHYASESLPSKKDQEEGVMEKLQNGDLDHMIPQHCSSELDGKAPMVDEKVIVGSLSVQDLQASQSACYWLKGVRYSDIGTLAWMITLSDGLHNFIDGLAIGASFTVSVFQGISTSVAILCEEFPHELGDFVILLNAGMSIQQALFFNFLSACCCYLGLAFGILAGSHFSANWIFALAGGMFLYISLADMMEFCSVAQAGVQWCHLSSLQPLPLGLKRLSCLSLPSN

SEQ ID NO: 81617 - protein, 492 aa, Homo sapiens
  Payload ID: 16263
  Gene Symbol: SLC39A14
  Gene Name: solute carrier family 39 (zinc transporter), member 14
  Uniprot ID: Q15043
  ENSP ID: ENSP00000289952
MKLLLLHPAFQSCLLLTLLGLWRTTPEAHASSLGAPAISAASFLQDLIHRYGEGDSLTLQQLKALLNHLDVGVGRGNVTQHVQGHRNLSTCFSSGDLFTAHNFSEQSRIGSSELQEFCPTILQQLDSRACTSENQENEENEQTEEGRPSAVEVWGYGLLCVTVISLCSLLGASVVPFMKKTFYKRLLLYFIALAIGTLYSNALFQLIPEAFGFNPLEDYYVSKSAVVFGGFYLFFFTEKILKILLKQKNEHHHGHSHYASESLPSKKDQEEGVMEKLQNGDLDHMIPQHCSSELDGKAPMVDEKVIVGSLSVQDLQASQSACYWLKGVRYSDIGTLAWMITLSDGLHNFIDGLAIGASFTVSVFQGISTSVAILCEEFPHELGDFVILLNAGMSIQQALFFNFLSACCCYLGLAFGILAGSHFSANWIFALAGGMFLYISLADMFPEMNEVCQEDERKGSILIPFIIQNLGLLTGFTIMVVLTMYSGQIQIG

SEQ ID NO: 81618 - protein, 492 aa, Homo sapiens
  Payload ID: 16263
  Gene Symbol: SLC39A14
  Gene Name: solute carrier family 39 (zinc transporter), member 14
  Uniprot ID: Q15043
  ENSP ID: ENSP00000352779
MKLLLLHPAFQSCLLLTLLGLWRTTPEAHASSLGAPAISAASFLQDLIHRYGEGDSLTLQQLKALLNHLDVGVGRGNVTQHVQGHRNLSTCFSSGDLFTAHNFSEQSRIGSSELQEFCPTILQQLDSRACTSENQENEENEQTEEGRPSAVEVWGFGFLSVSLINLASLLGVLVLPCTEKAFFSRVLTYFIALSIGTLLSNALFQLIPEAFGFNPLEDYYVSKSAVVFGGFYLFFFTEKILKILLKQKNEHHHGHSHYASESLPSKKDQEEGVMEKLQNGDLDHMIPQHCSSELDGKAPMVDEKVIVGSLSVQDLQASQSACYWLKGVRYSDIGTLAWMITLSDGLHNFIDGLAIGASFTVSVFQGISTSVAILCEEFPHELGDFVILLNAGMSIQQALFFNFLSACCCYLGLAFGILAGSHFSANWIFALAGGMFLYISLADMFPEMNEVCQEDERKGSILIPFIIQNLGLLTGFTIMVVLTMYSGQIQIG

SEQ ID NO: 81619 - protein, 492 aa, Homo sapiens; identical to SEQ ID NO: 81617
  Payload ID: 16263
  Gene Symbol: SLC39A14
  Gene Name: solute carrier family 39 (zinc transporter), member 14
  Uniprot ID: Q15043
  ENSP ID: ENSP00000370635

SEQ ID NO: 81620 - protein, 201 aa, Homo sapiens
  Payload ID: 16263
  Gene Symbol: SLC39A14
  Gene Name: solute carrier family 39 (zinc transporter), member 14
  ENSP ID: ENSP00000427981
MKKTFYKRLLLYFIALAIGTLYSNALFQLIPEAFGFNPLEDYYVSKSAVVFGGFYLFFFTEKILKILLKQKNEHHHGHSHYASESLPSKKDQEEGVMEKLQNGDLDHMIPQHCSSELDGKAPMVDEKVIVGSLSVQDLQASQSACYWLKGVRYSDIGTLAWMITLSDGLHNFIDGLAIGASFTVSVFQGISTSVAILCEEF

SEQ ID NO: 81621 - protein, 90 aa, Homo sapiens
  Payload ID: 16263
  Gene Symbol: SLC39A14
  Gene Name: solute carrier family 39 (zinc transporter), member 14
  ENSP ID: ENSP00000428789
MKLLLLHPAFQSCLLLTLLGLWRTTPEAHASSLGAPAISAASFLQDLIHRYGEGDSLTLQQLKALLNHLDVGVGRGNVTQHVQGHRNLST

SEQ ID NO: 81622 - protein, 53 aa, Homo sapiens
  Payload ID: 16263
  Gene Symbol: SLC39A14
  Gene Name: solute carrier family 39 (zinc transporter), member 14
  ENSP ID: ENSP00000428905
MKLLLLHPAFQSCLLLTLLGLWRTTPEAHASSLGAPAISAASFLQDLIHRYGE

SEQ ID NO: 81623 - protein, 155 aa, Homo sapiens
  Payload ID: 16263
  Gene Symbol: SLC39A14
  Gene Name: solute carrier family 39 (zinc transporter), member 14
  ENSP ID: ENSP00000429328
MKLLLLHPAFQSCLLLTLLGLWRTTPEAHASSLGAPAISAASFLQDLIHRYGEGDSLTLQQLKALLNHLDVGVGRGNVTQHVQGHRNLSTCFSSGDLFTAHNFSEQSRIGSSELQEFCPTILQQLDSRACTSENQENEENEQTEEGRPSAVEVWG

SEQ ID NO: 81624 - protein, 89 aa, Homo sapiens
  Payload ID: 16263
  Gene Symbol: SLC39A14
  Gene Name: solute carrier family 39 (zinc transporter), member 14
  ENSP ID: ENSP00000430315
MKLLLLHPAFQSCLLLTLLGLWRTTPEAHASSLGAPAISAASFLQDLIHRYGEGDSLTLQQLKALLNHLDVGVGRGNVTQHVQGHRNLS

SEQ ID NO: 81625 - protein, 127 aa, Homo sapiens
  Payload ID: 16263
  Gene Symbol: SLC39A14
  Gene Name: solute carrier family 39 (zinc transporter), member 14
  ENSP ID: ENSP00000430564
MKLLLLHPAFQSCLLLTLLGLWRTTPEAHASSLGAPAISAASFLQDLIHRYGEGDSLTLQQLKALLNHLDVGVGRGNVTQHVQGHRNLSTCFSSGDLFTAHNFSEQSRIGSSELQEFCPTILQQLDS

SEQ ID NO: 81626 - protein, 122 aa, Homo sapiens
  Payload ID: 16263
  Gene Symbol: SLC39A14
  Gene Name: solute carrier family 39 (zinc transporter), member 14
  ENSP ID: ENSP00000430629
MKLLLLHPAFQSCLLLTLLGLWRTTPEAHASSLGAPAISAASFLQDLIHRYGEGDSLTLQQLKALLNHLDVGVGRGNVTQHVQGHRNLSTCFSSGDLFTAHNFSEQSRIGSSELQEFCPTIL

SEQ ID NO: 81627 - protein, 309 aa, Homo sapiens
  Payload ID: 16264
  Gene Symbol: SLC39A2
  Gene Name: solute carrier family 39 (zinc transporter), member 2
  Uniprot ID: Q9NP94
  ENSP ID: ENSP00000298681
MEQLLGIKLGCLFALLALTLGCGLTPICFKWFQIDAARGHHRLVLRLLGCISAGVFLGAGFMHMTAEALEEIESQIQKFMVQNRSASERNSSGDADSAHMEYPYGELIISLGFFFVFFLESLALQCCPGAAGGSTVQDEEWGGAHIFELHSHGHLPSPSKGPLRALVLLLSLSFHSVFEGLAVGLQPTVAATVQLCLAVLAHKGLVVFGVGMRLVHLGTSSRWAVFSILLLALMSPLGLAVGLAVTGGDSEGGRGLAQAVLEGVAAGTFLYVTFLEILPRELASPEAPLAKWSCVAAGFAFMAFIALWA

SEQ ID NO: 81628 - protein, 85 aa, Homo sapiens
  Payload ID: 16264
  Gene Symbol: SLC39A2
  Gene Name: solute carrier family 39 (zinc transporter), member 2
  Uniprot ID: Q9NP94
  ENSP ID: ENSP00000452568
MEQLLGIKLGCLFALLALTLGCGLTPICFKWFQIDAARGHHRLVLRLLGCISAGVFLGAGFMHMTAEALEEIESQIQKFMVQISK

SEQ ID NO: 81629 - protein, 314 aa, Homo sapiens
  Payload ID: 16265
  Gene Symbol: SLC39A3
  Gene Name: solute carrier family 39 (zinc transporter), member 3
  Uniprot ID: Q9BRY0
  ENSP ID: ENSP00000269740
MVKLLVAKILCMVGVFFFMLLGSLLPVKIIETDFEKAHRSKKILSLCNTFGGGVFLATCFNALLPAVREKLQKVLSLGHISTDYPLAETILLLGFFMTVFLEQLILTFRKEKPSFIDLETFNAGSDVGSDSEYESPFMGGARGHALYVEPHGHGPSLSVQGLSRASPVRLLSLAFALSAHSVFEGLALGLQEEGEKVVSLFVGVAVHETLVAVALGISMARSAMPLRDAAKLAVTVSAMIPLGIGLGLGIESAQGVPGSVASVLLQGLAGGTFLFITFLEILAKELEEKSDRLLKVLFLVLGYTVLAGMVFLKW

SEQ ID NO: 81630 - protein, 105 aa, Homo sapiens
  Payload ID: 16265
  Gene Symbol: SLC39A3
  Gene Name: solute carrier family 39 (zinc transporter), member 3
  Uniprot ID: Q9BRY0
  ENSP ID: ENSP00000393715
MVKLLVAKILCMVGVFFFMLLGSLLPVKIIETDFEKAHRSKKILSLCNTFGGGVFLATCFNALLPAVREKVRAPWALAAALGTLWPRDSDAFSTLMPSSVKALML

SEQ ID NO: 81631 - protein, 323 aa, Homo sapiens
  Payload ID: 16265
  Gene Symbol: SLC39A3
  Gene Name: solute carrier family 39 (zinc transporter), member 3
  ENSP ID: ENSP00000445345
MVKLLVAKILCMVGVFFFMLLGSLLPVKIIETDFEKAHRSKKILSLCNTFGGGVFLATCFNALLPAVREKLQKVLSLGHISTDYPLAETILLLGFFMTVFLEQLILTFRKEKPSFIDLETFNAGSDVGSDSEYESPFMGGARGHALYVEPHGHGPSLSVQGLSRASPVRLLSLAFALSAHSVFEGLALGLQEEGEKVVSLFVGVAVHETLVAVALGISMARSAMPLRDAAKLAVTVSAMIPLGIGLGLGIESAQGVPGSVASVLLQGLAGGTFLFITFLEILAKELEEKSDRLLKVLFLVLGYTVLAGMVFLKWISPPEPRVS

SEQ ID NO: 81632 - protein, 136 aa, Homo sapiens
  Payload ID: 16265
  Gene Symbol: SLC39A3
  Gene Name: solute carrier family 39 (zinc transporter), member 3
  ENSP ID: ENSP00000465383
MVKLLVAKILCMVGVFFFMLLGSLLPVKIIETDFEKAHRSKKILSLCNTFGGGVFLATCFNALLPAVREKLQKVLSLGHISTDYPLAETILLLGFFMTVFLEQLILTFRKEKPSFIDLETFNAGSDVGSDSEYESP

SEQ ID NO: 81633 - protein, 107 aa, Homo sapiens
  Payload ID: 16265
  Gene Symbol: SLC39A3
  Gene Name: solute carrier family 39 (zinc transporter), member 3
  ENSP ID: ENSP00000466969
MVKLLVAKILCMVGVFFFMLLGSLLPVKIIETDFEKAHRSKKILSLCNTFGGGVFLATCFNALLPAVREKLQKVLSLGHISTDYPLAETILLLGFFMTVFLEQLILT

SEQ ID NO: 81634 - protein, 622 aa, Homo sapiens
  Payload ID: 16266
  Gene Symbol: SLC39A4
  Gene Name: solute carrier family 39 (zinc transporter), member 4
  ENSP ID: ENSP00000276833
MVDVVGLERETGPRGSPWPGLPLPSLVGPAPLLTCLCPQCLSVEDALGLGEPEGSGLPPGPVLEARYVARLSAAAVLYLSNPEGTCEDARAGLWASHADHLLALLESPKALTPGLSWLLQRMQARAAGQTPKMACVDIPQLLEEAVGAGAPGSAGGVLAALLDHVRSGSCFHALPSPQYFVDFVFQQHSSEVPMTLAELSALMQRLGVGREAHSDHSHRHRGASSRDPVPLISSSNSSSVWDTVCLSARDVMAAYGLSEQAGVTPEAWAQLSPALLQQQLSGACTSQSRPPVQDQLSQSERYLYGSLATLLICLCAVFGLLLLTCTGCRGVTHYILQTFLSLAVGAVTGDAVLHLTPKVLGLHTHSEEGLSPQPTWRLLAMLAGLYAFFLFENLFNLLLPRDPEDLEDGPCGHSSHSHGGHSHGVSLQLAPSELRQPKPPHEGSRADLVAEESPELLNPEPRRLSPELRLLPYMITLGDAVHNFADGLAVGAAFASSWKTGLATSLAVFCHELPHELGDFAALLHAGLSVRQALLLNLASALTAFAGLYVALAVGVSEESEAWILAVATGLFLYVALCDMLPAMLKVRDPRPWLLFLLHNVGLLGGWTVLLLLSLYEDDITF

SEQ ID NO: 81635 - protein, 647 aa, Homo sapiens
  Payload ID: 16266
  Gene Symbol: SLC39A4
  Gene Name: solute carrier family 39 (zinc transporter), member 4
  Uniprot ID: Q6P5W5
  ENSP ID: ENSP00000301305
MASLVSLELGLLLAVLVVTATASPPAGLLSLLTSGQGALDQEALGGLLNTLADRVHCANGPCGKCLSVEDALGLGEPEGSGLPPGPVLEARYVARLSAAAVLYLSNPEGTCEDARAGLWASHADHLLALLESPKALTPGLSWLLQRMQARAAGQTPKMACVDIPQLLEEAVGAGAPGSAGGVLAALLDHVRSGSCFHALPSPQYFVDFVFQQHSSEVPMTLAELSALMQRLGVGREAHSDHSHRHRGASSRDPVPLISSSNSSSVWDTVCLSARDVMAAYGLSEQAGVTPEAWAQLSPALLQQQLSGACTSQSRPPVQDQLSQSERYLYGSLATLLICLCAVFGLLLLTCTGCRGVTHYILQTFLSLAVGAVTGDAVLHLTPKVLGLHTHSEEGLSPQPTWRLLAMLAGLYAFFLFENLFNLLLPRDPEDLEDGPCGHSSHSHGGHSHGVSLQLAPSELRQPKPPHEGSRADLVAEESPELLNPEPRRLSPELRLLPYMITLGDAVHNFADGLAVGAAFASSWKTGLATSLAVFCHELPHELGDFAALLHAGLSVRQALLLNLASALTAFAGLYVALAVGVSEESEAWILAVATGLFLYVALCDMLPAMLKVRDPRPWLLFLLHNVGLLGGWTVLLLLSLYEDDITF

SEQ ID NO: 81636 - protein, 184 aa, Homo sapiens
  Payload ID: 16266
  Gene Symbol: SLC39A4
  Gene Name: solute carrier family 39 (zinc transporter), member 4
  ENSP ID: ENSP00000434512
MASLVSLELGLLLAVLVVTATASPPAGLLSLLTSGQGALDQEALGGLLNTLADRVHCANGPCGKACVDIPQLLEEAVGAGAPGSAGGVLAALLDHVRSGSCFHALPSPQYFVDFVFQQHSSEVPMTLAELSALMQRLGVGREAHSDHSHRHRGASSRDPVPLISSSNSSSVWDTVCLSARDVMA

SEQ ID NO: 81637 - protein, 540 aa, Homo sapiens
  Payload ID: 16267
  Gene Symbol: SLC39A5
  Gene Name: solute carrier family 39 (zinc transporter), member 5
  Uniprot ID: Q6ZMH5
  ENSP ID: ENSP00000266980
MMGSPVSHLLAGFCVWVVLGWVGGSVPNLGPAEQEQNHYLAQLFGLYGENGTLTAGGLARLLHSLGLGRVQGLRLGQHGPLTGRAASPAADNSTHRPQNPELSVDVWAGMPLGPSGWGDLEESKAPHLPRGPAPSGLDLLHRLLLLDHSLADHLNEDCLNGSQLLVNFGLSPAAPLTPRQFALLCPALLYQIDSRVCIGAPAPAPPGDLLSALLQSALAVLLLSLPSPLSLLLLRLLGPRLLRPLLGFLGALAVGTLCGDALLHLLPHAQEGRHAGPGGLPEKDLGPGLSVLGGLFLLFVLENMLGLLRHRGLRPRCCRRKRRNLETRNLDPENGSGMALQPLQAAPEPGAQGQREKNSQHPPALAPPGHQGHSHGHQGGTDITWMVLLGDGLHNLTDGLAIGAAFSDGFSSGLSTTLAVFCHELPHELGDFAMLLQSGLSFRRLLLLSLVSGALGLGGAVLGVGLSLGPVPLTPWVFGVTAGVFLYVALVDMLPALLRPPEPLPTPHVLLQGLGLLLGGGLMLAITLLEERLLPVTTEG

SEQ ID NO: 81638 - protein, 239 aa, Homo sapiens
  Payload ID: 16267
  Gene Symbol: SLC39A5
  Gene Name: solute carrier family 39 (zinc transporter), member 5
  ENSP ID: ENSP00000391711
MMGSPEQNHYLAQLFGLYGENGTLTAGGLARLLHSLGLGRVQGLRLGQHGPLTGRAASPAADNSTHRPQNPELSVDVWAGMPLGPSGWGDLEESKAPHLPRGPAPSGLDLLHRLLLLDHSLADHLNEDCLNGSQLLVNFGLSPAAPLTPRQFALLCPALLYQIDSRVCIGAPAPAPPGDLLSALLQSALAVLLLSLPSPLSLLLLRLLGPRLLRPLLGFLGALAVGTLCGDALLHLLPH

SEQ ID NO: 81639 - protein, 156 aa, Homo sapiens
  Payload ID: 16267
  Gene Symbol: SLC39A5
  Gene Name: solute carrier family 39 (zinc transporter), member 5
  ENSP ID: ENSP00000402891
MMGSPVSHLLAGFCVWVVLGWVGGSVPNLGPAEQEQNHYLAQLFGLYGENGTLTAGGLARLLHSLGLGRVQGLRLGQHGPLTGRAASPAADNSTHRPQNPELSVDVWAGMPLGPSGWGDLEESKAPHLPRGPAPSGLDLLHRLLLLDHSLADHLNE

SEQ ID NO: 81640 - protein, 123 aa, Homo sapiens
  Payload ID: 16267
  Gene Symbol: SLC39A5
  Gene Name: solute carrier family 39 (zinc transporter), member 5
  ENSP ID: ENSP00000404155
MMGSPVSHLLAGFCVWVVLGWVGGSVPNLGPAEQEQNHYLAQLFGLYGENGTLTAGGLARLLHSLGLGRVQGLRLGQHGPLTGRAASPAADNSTHRPQNPELSVDVWAGMPLGPSGWGDLEES

SEQ ID NO: 81641 - protein, 540 aa, Homo sapiens; identical to SEQ ID NO: 81637
  Payload ID: 16267
  Gene Symbol: SLC39A5
  Gene Name: solute carrier family 39 (zinc transporter), member 5
  Uniprot ID: Q6ZMH5
  ENSP ID: ENSP00000405360

SEQ ID NO: 81642 - protein, 126 aa, Homo sapiens
  Payload ID: 16267
  Gene Symbol: SLC39A5
  Gene Name: solute carrier family 39 (zinc transporter), member 5
  ENSP ID: ENSP00000407399
MMGSPVSHLLAGFCVWVVLGWVGGSVPNLGPAEQEQNHYLAQLFGLYGENGTLTAGGLARLLHSLGLGRVQGLRLGQHGPLTGRAASPAADNSTHRPQNPELSVDVWAGMPLGPSGWGDLEESKAP

SEQ ID NO: 81643 - protein, 128 aa, Homo sapiens
  Payload ID: 16267
  Gene Symbol: SLC39A5
  Gene Name: solute carrier family 39 (zinc transporter), member 5
  ENSP ID: ENSP00000414868
MMGSPVSHLLAGFCVWVVLGWVGGSVPNLGPAEQEQNHYLAQLFGLYGENGTLTAGGLARLLHSLGLGRVQGLRLGQHGPLTGRAASPAADNSTHRPQNPELSVDVWAGMPLGPSGWGDLEESKAPHL

SEQ ID NO: 81644 - protein, 755 aa, Homo sapiens
  Payload ID: 16268
  Gene Symbol: SLC39A6
  Gene Name: solute carrier family 39 (zinc transporter), member 6
  Uniprot ID: Q13433
  ENSP ID: ENSP00000269187
MARKLSVILILTFALSVTNPLHELKAAAFPQTTEKISPNWESGINVDLAISTRQYHLQQLFYRYGENNSLSVEGFRKLLQNIGIDKIKRIHIHHDHDHHSDHEHHSDHERHSDHEHHSEHEHHSDHDHHSHHNHAASGKNKRKALCPDHDSDSSGKDPRNSQGKGAHRPEHASGRRNVKDSVSASEVTSTVYNTVSEGTHFLETIETPRPGKLFPKDVSSSTPPSVTSKSRVSRLAGRKTNESVSEPRKGFMYSRNTNENPQECFNASKLLTSHGMGIQVPLNATEFNYLCPAIINQIDARSCLIHTSEKKAEIPPKTYSLQIAWVGGFIAISIISFLSLLGVILVPLMNRVFFKFLLSFLVALAVGTLSGDAFLHLLPHSHASHHHSHSHEEPAMEMKRGPLFSHLSSQNIEESAYFDSTWKGLTALGGLYFMFLVEHVLTLIKQFKDKKKKNQKKPENDDDVEIKKQLSKYESQLSTNEEKVDTDDRTEGYLRADSQEPSHFDSQQPAVLEEEEVMIAHAHPQEVYNEYVPRGCKNKCHSHFHDTLGQSDDLIHHHHDYHHILHHHHHQNHHPHSHSQRYSREELKDAGVATLAWMVIMGDGLHNFSDGLAIGAAFTEGLSSGLSTSVAVFCHELPHELGDFAVLLKAGMTVKQAVLYNALSAMLAYLGMATGIFIGHYAENVSMWIFALTAGLFMYVALVDMVPEMLHNDASDHGCSRWGYFFLQNAGMLLGFGIMLLISIFEHKIVFRINF

SEQ ID NO: 81645 - protein, 433 aa, Homo sapiens
  Payload ID: 16268
  Gene Symbol: SLC39A6
  Gene Name: solute carrier family 39 (zinc transporter), member 6
  Uniprot ID: Q13433
  ENSP ID: ENSP00000401139
MGIQVPLNATEFNYLCPAIINQIDARSCLIHTSEKKAEIPPKTYSLQIAWVGGFIAISIISFLSLLGVILVPLMNRVFFKFLLSFLVALAVGTLSGDAFLHLLPHSHASHHHSHSHEEPAMEMKRGPLFSHLSSQNIEESAYFDSTWKGLTALGGLYFMFLVEHVLTLIKQFKDKKKKNQKKPENDDDVEIKKQLSKYESQLSTNEEKVDTDDRTEGYLRADSQEPSHFDSQQPAVLEEEEVMIAHAHPQEVYNEYVPRGCKNKCHSHFHDTLGQSDDLIHHHHDYHHILHHHHHQNHHPHSHSQRYSREELKDAGVATLAWMVIMGDGLHNFSDGLAIGAAFTEGLSSGLSTSVAVFCHELPHELGDFAVLLKAGMTVKQAVLYNALSAMLAYLGMATGIFIGHYAENVSMWIFALTAGLFMYVALVDMVSF

SEQ ID NO: 81646 - protein, 755 aa, Homo sapiens; identical to SEQ ID NO: 81644
  Payload ID: 16268
  Gene Symbol: SLC39A6
  Gene Name: solute carrier family 39 (zinc transporter), member 6
  Uniprot ID: Q13433
  ENSP ID: ENSP00000465915

SEQ ID NO: 81647 - protein, 273 aa, Homo sapiens
  Payload ID: 16268
  Gene Symbol: SLC39A6
  Gene Name: solute carrier family 39 (zinc transporter), member 6
  ENSP ID: ENSP00000467724
MFLVEHVLTLIKQFKDKKKKNQKKPENDDDVEIKKQLSKYESQLSTNEEKVDTDDRTEGYLRADSQEPSHFDSQQPAVLEEEEVMIAHAHPQEVYNEYVPRGCKNKCHSHFHDTLGQSDDLIHHHHDYHHILHHHHHQNHHPHSHSQRYSREELKDAGVATLAWMVIMGDGLHNFSDGLAIGAAFTEGLSSGLSTSVAVFCHELPHELGDFAVLLKAGMTVKQAVLYNALSAMLAYLGMATGIFIGHYAENVSMWIFALTAGLFMYVALVDMV

SEQ ID NO: 81648 - protein, 469 aa, Homo sapiens
  Payload ID: 16269
  Gene Symbol: SLC39A7
  Gene Name: solute carrier family 39 (zinc transporter), member 7
  Uniprot ID: Q92504
  ENSP ID: ENSP00000363807
MARGLGAPHWVAVGLLTWATLGLLVAGLGGHDDLHDDLQEDFHGHSHRHSHEDFHHGHSHAHGHGHTHESIWHGHTHDHDHGHSHEDLHHGHSHGYSHESLYHRGHGHDHEHSHGGYGESGAPGIKQDLDAVTLWAYALGATVLISAAPFFVLFLIPVESNSPRHRSLLQILLSFASGGLLGDAFLHLIPHALEPHSHHTLEQPGHGHSHSGQGPILSVGLWVLSGIVAFLVVEKFVRHVKGGHGHSHGHGHAHSHTRGSHGHGRQERSTKEKQSSEEEEKETRGVQKRRGGSTVPKDGPVRPQNAEEEKRGLDLRVSGYLNLAADLAHNFTDGLAIGASFRGGRGLGILTTMTVLLHEVPHEVGDFAILVQSGCSKKQAMRLQLLTAVGALAGTACALLTEGGAVGSEIAGGAGPGWVLPFTAGGFIYVATVSVLPELLREASPLQSLLEVLGLLGGVIMMVLIAHLE

SEQ ID NO: 81649 - protein, 469 aa, Homo sapiens; identical to SEQ ID NO: 81648
  Payload ID: 16269
  Gene Symbol: SLC39A7
  Gene Name: solute carrier family 39 (zinc transporter), member 7
  Uniprot ID: Q92504
  ENSP ID: ENSP00000363809

SEQ ID NO: 81650 - protein, 469 aa, Homo sapiens; identical to SEQ ID NO: 81648
  Payload ID: 16269
  Gene Symbol: SLC39A7
  Gene Name: solute carrier family 39 (zinc transporter), member 7
  Uniprot ID: Q92504
  ENSP ID: ENSP00000372700

SEQ ID NO: 81651 - protein, 469 aa, Homo sapiens; identical to SEQ ID NO: 81648
  Payload ID: 16269
  Gene Symbol: SLC39A7
  Gene Name: solute carrier family 39 (zinc transporter), member 7
  Uniprot ID: Q92504
  ENSP ID: ENSP00000372701

SEQ ID NO: 81652 - protein, 469 aa, Homo sapiens; identical to SEQ ID NO: 81648
  Payload ID: 16269
  Gene Symbol: SLC39A7
  Gene Name: solute carrier family 39 (zinc transporter), member 7
  Uniprot ID: Q92504
  ENSP ID: ENSP00000389623

SEQ ID NO: 81653 - protein, 220 aa, Homo sapiens
  Payload ID: 16269
  Gene Symbol: SLC39A7
  Gene Name: solute carrier family 39 (zinc transporter), member 7
  ENSP ID: ENSP00000390246
MDSSLPECRHIGKGIRAKVERNFLFSRDLKAGLPRPSKPGKERIPEPALGATVLISAAPFFVLFLIPVESNSPRHRSLLQILLSFASGGLLGDAFLHLIPHALEPHSHHTLEQPGHGHSHSGQGPILSVGLWVLSGIVAFLVVEKFVRHVKGGHGHSHGHGHAHSHTRGSHGHGRQERSTKEKQSSEEEEKETRGVQKRRGGSTVPKDGPVRPQNAEEEK

SEQ ID NO: 81654 - protein, 469 aa, Homo sapiens; identical to SEQ ID NO: 81648
  Payload ID: 16269
  Gene Symbol: SLC39A7
  Gene Name: solute carrier family 39 (zinc transporter), member 7
  Uniprot ID: Q92504
  ENSP ID: ENSP00000391735

SEQ ID NO: 81655 - protein, 220 aa, Homo sapiens; identical to SEQ ID NO: 81653
  Payload ID: 16269
  Gene Symbol: SLC39A7
  Gene Name: solute carrier family 39 (zinc transporter), member 7
  ENSP ID: ENSP00000400978

SEQ ID NO: 81656 - protein, 469 aa, Homo sapiens; identical to SEQ ID NO: 81648
  Payload ID: 16269
  Gene Symbol: SLC39A7
  Gene Name: solute carrier family 39 (zinc transporter), member 7
  Uniprot ID: Q92504
  ENSP ID: ENSP00000403583

SEQ ID NO: 81657 - protein, 220 aa, Homo sapiens; identical to SEQ ID NO: 81653
  Payload ID: 16269
  Gene Symbol: SLC39A7
  Gene Name: solute carrier family 39 (zinc transporter), member 7
  ENSP ID: ENSP00000403686

SEQ ID NO: 81658 - protein, 220 aa, Homo sapiens; identical to SEQ ID NO: 81653
  Payload ID: 16269
  Gene Symbol: SLC39A7
  Gene Name: solute carrier family 39 (zinc transporter), member 7
  ENSP ID: ENSP00000404101

SEQ ID NO: 81659 - protein, 469 aa, Homo sapiens; identical to SEQ ID NO: 81648
  Payload ID: 16269
  Gene Symbol: SLC39A7
  Gene Name: solute carrier family 39 (zinc transporter), member 7
  Uniprot ID: Q92504
  ENSP ID: ENSP00000407093

SEQ ID NO: 81660 - protein, 469 aa, Homo sapiens; identical to SEQ ID NO: 81648
  Payload ID: 16269
  Gene Symbol: SLC39A7
  Gene Name: solute carrier family 39 (zinc transporter), member 7
  Uniprot ID: Q92504
  ENSP ID: ENSP00000410656

SEQ ID NO: 81661 - protein, 220 aa, Homo sapiens; identical to SEQ ID NO: 81653
  Payload ID: 16269
  Gene Symbol: SLC39A7
  Gene Name: solute carrier family 39 (zinc transporter), member 7
  ENSP ID: ENSP00000411819

SEQ ID NO: 81662 - protein, 469 aa, Homo sapiens; identical to SEQ ID NO: 81648
  Payload ID: 16269
  Gene Symbol: SLC39A7
  Gene Name: solute carrier family 39 (zinc transporter), member 7
  Uniprot ID: Q92504
  ENSP ID: ENSP00000413027

SEQ ID NO: 81663 - protein, 469 aa, Homo sapiens; identical to SEQ ID NO: 81648
  Payload ID: 16269
  Gene Symbol: SLC39A7
  Gene Name: solute carrier family 39 (zinc transporter), member 7
  Uniprot ID: Q92504
  ENSP ID: ENSP00000414145

SEQ ID NO: 81664 - protein, 469 aa, Homo sapiens; identical to SEQ ID NO: 81648
  Payload ID: 16269
  Gene Symbol: SLC39A7
  Gene Name: solute carrier family 39 (zinc transporter), member 7
  Uniprot ID: Q92504
  ENSP ID: ENSP00000416439

SEQ ID NO: 81665 - protein, 220 aa, Homo sapiens; identical to SEQ ID NO: 81653
  Payload ID: 16269
  Gene Symbol: SLC39A7
  Gene Name: solute carrier family 39 (zinc transporter), member 7
  ENSP ID: ENSP00000416566

SEQ ID NO: 81666 - protein, 429 aa, Homo sapiens
  Payload ID: 16269
  Gene Symbol: SLC39A7
  Gene Name: solute carrier family 39 (zinc transporter), member 7
  ENSP ID: ENSP00000477803
MARGLGAPHWVAVGLLTWATLGLLVAGLGGHDDLHDDLQEDFHGHSHRHSHEDFHHGHSHAHGHGHTHESIWHGHTHDHDHGHSHEDLHHGHSHGYSHESLYHRGHGHDHEHSHGGYGESGAPGIKQDLDAVTLWAYALGATVLISAAPFFVLFLIPVESNSPRHRSLLQILLSFASGGLLGDAFLHLIPHALEPHSHHTLEQPGHGHSHSGQGPILSVGLWVLSGIVAFLVVEKFVRHVKGGHGHSHGHGHAHSHTRGSHGHGRQERSTKEKQSSEEEEKETRGVQKRRGGSTVPKDGPVRPQNAEEEKRGLDLRVSGYLNLAADLAHNFTDGLAIGASFRGGRGLGILTTMTVLLHEVPHEVGDFAILVQSGCSKKQAMRLQLLTAVGALAGTAVPFSLKEEQWAVKLQVVQVLAGSCHLLQVALST

SEQ ID NO: 81667 - protein, 429 aa, Homo sapiens; identical to SEQ ID NO: 81666
  Payload ID: 16269
  Gene Symbol: SLC39A7
  Gene Name: solute carrier family 39 (zinc transporter), member 7
  ENSP ID: ENSP00000478192

SEQ ID NO: 81668 - protein, 429 aa, Homo sapiens; identical to SEQ ID NO: 81666
  Payload ID: 16269
  Gene Symbol: SLC39A7
  Gene Name: solute carrier family 39 (zinc transporter), member 7
  ENSP ID: ENSP00000479476

SEQ ID NO: 81669 - protein, 429 aa, Homo sapiens; identical to SEQ ID NO: 81666
  Payload ID: 16269
  Gene Symbol: SLC39A7
  Gene Name: solute carrier family 39 (zinc transporter), member 7
  ENSP ID: ENSP00000480222

SEQ ID NO: 81670 - protein, 429 aa, Homo sapiens; identical to SEQ ID NO: 81666
  Payload ID: 16269
  Gene Symbol: SLC39A7
  Gene Name: solute carrier family 39 (zinc transporter), member 7
  ENSP ID: ENSP00000481865

SEQ ID NO: 81671 - protein, 429 aa, Homo sapiens; identical to SEQ ID NO: 81666
  Payload ID: 16269
  Gene Symbol: SLC39A7
  Gene Name: solute carrier family 39 (zinc transporter), member 7
  ENSP ID: ENSP00000484100

SEQ ID NO: 81672 - protein, 460 aa, Homo sapiens
  Payload ID: 16270
  Gene Symbol: SLC39A8
  Gene Name: solute carrier family 39 (zinc transporter), member 8
  Uniprot ID: Q9C0K1
  ENSP ID: ENSP00000349174
MAPGRAVAGLLLLAAAGLGGVAEGPGLAFSEDVLSVFGANLSLSAAQLQHLLEQMGAASRVGVPEPGQLHFNQCLTAEEIFSLHGFSNATQITSSKFSVICPAVLQQLNFHPCEDRPKHKTRPSHSEVWGYGFLSVTIINLASLLGLILTPLIKKSYFPKILTFFVGLAIGTLFSNAIFQLIPEAFGFDPKVDSYVEKAVAVFGGFYLLFFFERMLKMLLKTYGQNGHTHFGNDNFGPQEKTHQPKALPAINGVTCYANPAVTEANGHIHFDNVSVVSLQDGKKEPSSCTCLKGPKLSEIGTIAWMITLCDALHNFIDGLAIGASCTLSLLQGLSTSIAILCEEFPHELGDFVILLNAGMSTRQALLFNFLSACSCYVGLAFGILVGNNFAPNIIFALAGGMFLYISLADMFPEMNDMLREKVTGRKTDFTFFMIQNAGMLTGFTAILLITLYAGEIELE

SEQ ID NO: 81673 - protein, 460 aa, Homo sapiens; identical to SEQ ID NO: 81672
  Payload ID: 16270
  Gene Symbol: SLC39A8
  Gene Name: solute carrier family 39 (zinc transporter), member 8
  Uniprot ID: Q9C0K1
  ENSP ID: ENSP00000378310

SEQ ID NO: 81674 - protein, 444 aa, Homo sapiens
  Payload ID: 16270
  Gene Symbol: SLC39A8
  Gene Name: solute carrier family 39 (zinc transporter), member 8
  Uniprot ID: Q9C0K1
  ENSP ID: ENSP00000394548
MAPGRAVAGLLLLAAAGLGGVAEGPGLAFSEDVLSVFGANLSLSAAQLQHLLEQMGAASRVGVPEPGQLHFNQCLTAEEIFSLHGFSNATQITSSKFSVICPAVLQQLNFHPCEDRPKHKTRPSHSEVWGYGFLSVTIINLASLLGLILTPLIKKSYFPKILTFFVGLAIGTLFSNAIFQLIPEAFGFDPKVDSYVEKAVAVFGGFYLLFFFERMLKMLLKTYGQNGHTHFGNDNFGPQEKTHQPKALPAINGVTCYANPAVTEANGHIHFDNVSVVSLQDGKKEPSSCTCLKGPKLSEIGTIAWMITLCDALHNFIDGLAIGASCTLSLLQGLSTSIAILCEEFPHELGDFVILLNAGMSTRQALLFNFLSACSCYVGLAFGILVGNNFAPNIIFALAGGMFLYISLADMFPEMNDMLREKIIKWATDDIKSQLHLLWIYTAR

SEQ ID NO: 81675 - protein, 335 aa, Homo sapiens
  Payload ID: 16271
  Gene Symbol: SLC39A11
  Gene Name: solute carrier family 39, member 11
  Uniprot ID: Q8N1S5
  ENSP ID: ENSP00000255559
MLQGHSSVFQALLGTFFTWGMTAAGAALVFVFSSGQRRILDGSLGFAAGVMLAASYWSLLAPAVEMATSSGGFGAFAFFPVAVGFTLGAAFVYLADLLMPHLGAAEDPQTTLALNFGSTLMKKKSDPEGPALLFPESELSIRIDKSENGEAYQRKKAAATGLPEGPAVPVPSRGNLAQPGGSSWRRIALLILAITIHNVPEGLAVGVGFGAIEKTASATFESARNLAIGIGIQNFPEGLAVSLPLRGAGFSTWRAFWYGQLSGMVEPLAGVFGAFAVVLAEPILPYALAFAAGAMVYVVMDDIIPEAQISGNGKLASWASILGFVVMMSLDVGLG

SEQ ID NO: 81676 - protein, 342 aa, Homo sapiens
  Payload ID: 16271
  Gene Symbol: SLC39A11
  Gene Name: solute carrier family 39, member 11
  Uniprot ID: Q8N1S5
  ENSP ID: ENSP00000445829
MLQGHSSVFQALLGTFFTWGMTAAGAALVFVFSSGQRRILDGSLGFAAGVMLAASYWSLLAPAVEMATSSGGFGAFAFFPVAVGFTLGAAFVYLADLLMPHLGAAEDPQTTLALNFGSTLMKKKSDPEGPALLFPESELSIRIGRAGLLSDKSENGEAYQRKKAAATGLPEGPAVPVPSRGNLAQPGGSSWRRIALLILAITIHNVPEGLAVGVGFGAIEKTASATFESARNLAIGIGIQNFPEGLAVSLPLRGAGFSTWRAFWYGQLSGMVEPLAGVFGAFAVVLAEPILPYALAFAAGAMVYVVMDDIIPEAQISGNGKLASWASILGFVVMMSLDVGLG

SEQ ID NO: 81677 - protein, 25 aa, Homo sapiens
  Payload ID: 16271
  Gene Symbol: SLC39A11
  Gene Name: solute carrier family 39, member 11
  ENSP ID: ENSP00000462010
MLQGHSSVFQALLGTFFTWGMTAAG

SEQ ID NO: 81678 - protein, 200 aa, Homo sapiens
  Payload ID: 16271
  Gene Symbol: SLC39A11
  Gene Name: solute carrier family 39, member 11
  ENSP ID: ENSP00000462200
MLQGHSSVFQALLGTFFTWGMTAAGAALVFVFSSGQRRILDGSLGFAAGVMLAASYWSLLAPAVEMATSSGGFGAFAFFPVAVGFTLGAAFVYLADLLMPHLGAAEDPQTTLALNFGSTLMKKKSDPEGPALLFPESELSIRIDKSENGEAYQRKKAAATGLPEGPAVPVPSRGNLAQPGGSSWRRIALLILAITIHNVP

SEQ ID NO: 81679 - protein, 124 aa, Homo sapiens
  Payload ID: 16271
  Gene Symbol: SLC39A11
  Gene Name: solute carrier family 39, member 11
  ENSP ID: ENSP00000462332
  MOD_RES (1)..(1): Any amino acid
XKSENGEAYQRKKAAATGLPEGPAVPVPSRGNLAQPGGSSWRRIALLILAITIHNVPAAACTSGDLLARRWTCLDPQCTPMAWSPTGEWTQGRGLCRPCQWSGDSTTLDGEFQRAGYPECGHIP

SEQ ID NO: 81680 - protein, 40 aa, Homo sapiens
  Payload ID: 16271
  Gene Symbol: SLC39A11
  Gene Name: solute carrier family 39, member 11
  ENSP ID: ENSP00000462816
MLQGHSSVFQALLGTFFTWGMTAAGAALVFVFSSGQRRIL

SEQ ID NO: 81681 - protein, 62 aa, Homo sapiens
  Payload ID: 16271
  Gene Symbol: SLC39A11
  Gene Name: solute carrier family 39, member 11
  ENSP ID: ENSP00000463083
AQPGGSSWRRIALLILAITIHNVPEGLAVGVGFGAIEKTASATFESARVLNLVSCPGLNLPS

SEQ ID NO: 81682 - protein, 156 aa, Homo sapiens
  Payload ID: 16271
  Gene Symbol: SLC39A11
  Gene Name: solute carrier family 39, member 11
  ENSP ID: ENSP00000463462
MLQGHSSVFQALLGTFFTWGMTAAGAALVFVFSSGQRRILDGSLGFAAGVMLAASYWSLLAPAVEMATSSGGFGAFAFFPVAVGFTLGAAFVYLADLLMPHLGAAEDPQTTLALNFGSTLMKKKSDPEGPALLFPESELSIRIGRAGLLSDKSENG

SEQ ID NO: 81683 - protein, 185 aa, Homo sapiens
  Payload ID: 16271
  Gene Symbol: SLC39A11
  Gene Name: solute carrier family 39, member 11
  ENSP ID: ENSP00000463467
MTVRPPQPCGTGAAEDPQTTLALNFGSTLMKKKSDPEGPALLFPESELSIRIGRAGLLSDKSENGEAYQRKKAAATGLPEGPAVPVPSRGNLAQPGGSSWRRIALLILAITIHNVPEGLAVGVGFGAIEKTASATFESARNLAIGIGIQNFPEGLAVSLPLRGAGFSTWRAFWYGQLSGMVEPLA

SEQ ID NO: 81684 - protein, 68 aa, Homo sapiens
  Payload ID: 16271
  Gene Symbol: SLC39A11
  Gene Name: solute carrier family 39, member 11
  ENSP ID: ENSP00000463822
  MOD_RES (1)..(1): Any amino acid
XRKKAAATGLPEGPAVPVPSRGNLAQPGGSSWRRIALLILAITIHNVPGRVCFTFCHDCKFPEASPAV

SEQ ID NO: 81685 - protein, 81 aa, Homo sapiens
  Payload ID: 16271
  Gene Symbol: SLC39A11
  Gene Name: solute carrier family 39, member 11
  ENSP ID: ENSP00000464302
MTVRPPQPCGTGAAEDPQTTLALNFGSTLMKKKSDPEGPALLFPESELSIRIGRAGLLSGKLFAADTELSQAIWTWGLVVG

SEQ ID NO: 81686 - protein, 227 aa, Homo sapiens
  Payload ID: 16271
  Gene Symbol: SLC39A11
  Gene Name: solute carrier family 39, member 11
  ENSP ID: ENSP00000464525
MLQGHSSVFQALLGTFFTWGMTAAGAALVFVFSSGQRRILDGSLGFAAGVMLAASYWSLLAPAVEMATSSGGFGAFAFFPVAVGFTLGAAFVYLADLLMPHLGAAEDPQTTLALNFGSTLMKKKSDPEGPALLFPESELSIRIDKSENGEAYQRKKAAATGLPEGPAVPVPSRGNLAQPGGSSWRRIALLILAITIHNVPVETRVLLCWPGWPRTAGLKRTSCFSLP

SEQ ID NO: 81687 - protein, 24 aa, Homo sapiens
  Payload ID: 16271
  Gene Symbol: SLC39A11
  Gene Name: solute carrier family 39, member 11
  ENSP ID: ENSP00000487926
AQPGGSSWRRIALLILAITIHNVP

SEQ ID NO: 81688 - protein, 57 aa, Homo sapiens
  Payload ID: 16271
  Gene Symbol: SLC39A11
  Gene Name: solute carrier family 39, member 11
  ENSP ID: ENSP00000488068
  MOD_RES (1)..(1): Any amino acid
XKSENGEAYQRKKAAATGLPEGPAVPVPSRGNLAQPGGSSWRRIALLILAITIHNVP

SEQ ID NO: 81689 - protein, 57 aa, Homo sapiens; identical to SEQ ID NO: 81688
  Payload ID: 16271
  Gene Symbol: SLC39A11
  Gene Name: solute carrier family 39, member 11
  ENSP ID: ENSP00000488364
  MOD_RES (1)..(1): Any amino acid

SEQ ID NO: 81690 - protein, 57 aa, Homo sapiens; identical to SEQ ID NO: 81688
  Payload ID: 16271
  Gene Symbol: SLC39A11
  Gene Name: solute carrier family 39, member 11
  ENSP ID: ENSP00000488585
  MOD_RES (1)..(1): Any amino acid

SEQ ID NO: 81691 - protein, 84 aa, Homo sapiens
  Payload ID: 16271
  Gene Symbol: SLC39A11
  Gene Name: solute carrier family 39, member 11
  ENSP ID: ENSP00000488593
  MOD_RES (1)..(1): Any amino acid
XKSENGEAYQRKKAAATGLPEGPAVPVPSRGNLAQPGGSSWRRIALLILAITIHNVPVETRVLLCWPGWPRTAGLKRTSCFSLP

SEQ ID NO: 81692 - protein, 48 aa, Homo sapiens
  Payload ID: 16271
  Gene Symbol: SLC39A11
  Gene Name: solute carrier family 39, member 11
  ENSP ID: ENSP00000488612
  MOD_RES (1)..(1): Any amino acid
XRKKAAATGLPEGPAVPVPSRGNLAQPGGSSWRRIALLILAITIHNVP

SEQ ID NO: 81693 - protein, 57 aa, Homo sapiens; identical to SEQ ID NO: 81688
  Payload ID: 16271
  Gene Symbol: SLC39A11
  Gene Name: solute carrier family 39, member 11
  ENSP ID: ENSP00000488656
  MOD_RES (1)..(1): Any amino acid

SEQ ID NO: 81694 - protein, 6 aa, Homo sapiens
  Payload ID: 16271
  Gene Symbol: SLC39A11
  Gene Name: solute carrier family 39, member 11
  ENSP ID: ENSP00000488841
  MOD_RES (1)..(1): Any amino acid
XKSENG

SEQ ID NO: 81695 - protein, 57 aa, Homo sapiens; identical to SEQ ID NO: 81688
  Payload ID: 16271
  Gene Symbol: SLC39A11
  Gene Name: solute carrier family 39, member 11
  ENSP ID: ENSP00000488858
  MOD_RES (1)..(1): Any amino acid

SEQ ID NO: 81696 - protein, 307 aa, Homo sapiens
  Payload ID: 16272
  Gene Symbol: SLC39A9
  Gene Name: solute carrier family 39, member 9
  Uniprot ID: Q9NUM3
  ENSP ID: ENSP00000336887
MDDFISISLLSLAMLVGCYVAGIIPLAVNFSEERLKLVTVLGAGLLCGTALAVIVPEGVHALYEDILEGKHHQASETHNVIASDKAAEKSVVHEHEHSHDHTQLHAYIGVSLVLGFVFMLLVDQIGNSHVHSTDDPEAARSSNSKITTTLGLVVHAAADGVALGAAASTSQTSVQLIVFVAIMLHKAPAAFGLVSFLMHAGLERNRIRKHLLVFALAAPVMSMVTYLGLSKSSKEALSEVNATGVAMLFSAGTFLYVATVHVLPEVGGIGHSHKPDATGGRGLSRLEVAALVLGCLIPLILSVGHQH

SEQ ID NO: 81697 - protein, 307 aa, Homo sapiens; identical to SEQ ID NO: 81696
  Payload ID: 16272
  Gene Symbol: SLC39A9
  Gene Name: solute carrier family 39, member 9
  Uniprot ID: Q9NUM3
  ENSP ID: ENSP00000450639

SEQ ID NO: 81698 - protein, 284 aa, Homo sapiens
  Payload ID: 16272
  Gene Symbol: SLC39A9
  Gene Name: solute carrier family 39, member 9
  Uniprot ID: Q9NUM3
  ENSP ID: ENSP00000451833
MDDFISISLLSLAMLVGCYVAGIIPLAVNFSEERLKLVTVLGAGLLCGTALAVIVPEGVHALYEDILEGKHHQASETHNVIASDKAAEKSVVHEHEHSHDHTQLHAYIGVSLVLGFVFMLLVDQIGNSHVHSTDADGVALGAAASTSQTSVQLIVFVAIMLHKAPAAFGLVSFLMHAGLERNRIRKHLLVFALAAPVMSMVTYLGLSKSSKEALSEVNATGVAMLFSAGTFLYVATVHVLPEVGGIGHSHKPDATGGRGLSRLEVAALVLGCLIPLILSVGHQH

SEQ ID NO: 81699 - protein, 232 aa, Homo sapiens
  Payload ID: 16272
  Gene Symbol: SLC39A9
  Gene Name: solute carrier family 39, member 9
  Uniprot ID: Q9NUM3
  ENSP ID: ENSP00000452385
MDDFISISLLSLAMLVGCYVAGIIPLAVNFSEERLKLVTVLGAGLLCGTALAVIVPEGVHALYEDILEGKHHQASETHNVIASDKAAEKSVVHEHEHSHDHTQLHAYIGVSLVLGFVFMLLVDQIGNSHVHSTDDPEAARSSNSKITTTLGLVVHAAADGVALGAAASTSQTSVQLIVFVAIMLHKAPAAFGLVSFLMHAGLERNRIRKHLLVFALAAPVMSMVTYLGLSKD

SEQ ID NO: 81700 - protein, 241 aa, Homo sapiens
  Payload ID: 16272
  Gene Symbol: SLC39A9
  Gene Name: solute carrier family 39, member 9
  ENSP ID: ENSP00000468864
MDDFISISLLSLAMLVGCYVAGIIPLAVNFSEERLKLVTVLGAGLLCGTALAVIVPEGVHALYEDILEDPEAARSSNSKITTTLGLVVHAAADGVALGAAASTSQTSVQLIVFVAIMLHKAPAAFGLVSFLMHAGLERNRIRKHLLVFALAAPVMSMVTYLGLSKSSKEALSEVNATGVAMLFSAGTFLYVATVHVLPEVGGIGHSHKPDATGGRGLSRLEVAALVLGCLIPLILSVGHQH

SEQ ID NO: 81701 - protein, 92 aa, Homo sapiens
  Payload ID: 16272
  Gene Symbol: SLC39A9
  Gene Name: solute carrier family 39, member 9
  ENSP ID: ENSP00000486416
MDDFISISLLSLAMLVGCYVAGIIPLAVNFSEERLKLVTVLGAGLLCGTALAVIVPEGVHALYEDILEGVENNRQSEGLHAKGRRHLGIFSS

SEQ ID NO: 81702 - protein, 911 aa, Homo sapiens
  Payload ID: 16273
  Gene Symbol: SLC4A1
  Gene Name: solute carrier family 4 (anion exchanger), member 1 (Diego blood group)
  Uniprot ID: P02730
  ENSP ID: ENSP00000262418
MEELQDDYEDMMEENLEQEEYEDPDIPESQMEEPAAHDTEATATDYHTTSHPGTHKVYVELQELVMDEKNQELRWMEAARWVQLEENLGENGAWGRPHLSHLTFWSLLELRRVFTKGTVLLDLQETSLAGVANQLLDRFIFEDQIRPQDREELLRALLLKHSHAGELEALGGVKPAVLTRSGDPSQPLLPQHSSLETQLFCEQGDGGTEGHSPSGILEKIPPDSEATLVLVGRADFLEQPVLGFVRLQEAAELEAVELPVPIRFLFVLLGPEAPHIDYTQLGRAAATLMSERVFRIDAYMAQSRGELLHSLEGFLDCSLVLPPTDAPSEQALLSLVPVQRELLRRRYQSSPAKPDSSFYKGLDLNGGPDDPLQQTGQLFGGLVRDIRRRYPYYLSDITDAFSPQVLAAVIFIYFAALSPAITFGGLLGEKTRNQMGVSELLISTAVQGILFALLGAQPLLVVGFSGPLLVFEEAFFSFCETNGLEYIVGRVWIGFWLILLVVLVVAFEGSFLVRFISRYTQEIFSFLISLIFIYETFSKLIKIFQDHPLQKTYNYNVLMVPKPQGPLPNTALLSLVLMAGTFFFAMMLRKFKNSSYFPGKLRRVIGDFGVPISILIMVLVDFFIQDTYTQKLSVPDGFKVSNSSARGWVIHPLGLRSEFPIWMMFASALPALLVFILIFLESQITTLIVSKPERKMVKGSGFHLDLLLVVGMGGVAALFGMPWLSATTVRSVTHANALTVMGKASTPGAAAQIQEVKEQRISGLLVAVLVGLSILMEPILSRIPLAVLFGIFLYMGVTSLSGIQLFDRILLLFKPPKYHPDVPYVKRVKTWRMHLFTGIQIICLAVLWVVKSTPASLALPFVLILTVPLRRVLLPLIFRNVELQCLDADDAKATFDEEEGRDEYDEVAMPV

SEQ ID NO: 81703 - protein, 545 aa, Homo sapiens
  Payload ID: 16273
  Gene Symbol: SLC4A1
  Gene Name: solute carrier family 4 (anion exchanger), member 1 (Diego blood group)
  ENSP ID: ENSP00000382190
MEELQDDYEDMMEENLEQEEYEDPDIPESQMEEPAAHDTEATATDYHTTSHPGTHKVYVELQELVMDEKNQELRWMEAARWVQLEENLGENGAWGRPHLSHLTFWSLLELRRVFTKGTVLLDLQETSLAGVANQLLDRFIFEDQIRPQDREELLRALLLKHSHAGELEALGGVKPAVLTRSGDPSQPLLPQHSSLETQLFCEQGDGGTEGHSPSGILEKIPPDSEATLVLVGRADFLEQPVLGFVRLQEAAELEAVELPDTYTQKLSVPDGFKVSNSSARGWVIHPLGLRSEFPIWMMFASALPALLVFILIFLESQITTLIVSKPERKMVKGSGFHLDLLLVVGMGGVAALFGMPWLSATTVRSVTHANALTVMGKASTPGAAAQIQEVKEQRISGLLVAVLVGLSILMEPILSRIPLAVLFGIFLYMGVTSLSGIQLFDRILLLFKPPKYHPDVPYVKRVKTWRMHLFTGIQIICLAVLWVVKSTPASLALPFVLILTVPLRRVLLPLIFRNVELQCLDADDAKATFDEEEGRDEYDEVAMPV

SEQ ID NO: 81704 - protein, 36 aa, Homo sapiens
  Payload ID: 16273
  Gene Symbol: SLC4A1
  Gene Name: solute carrier family 4 (anion exchanger), member 1 (Diego blood group)
  ENSP ID: ENSP00000486787
MEETESGSGRKERRWLGAVAHVCNPSTLGGQVGRII

SEQ ID NO: 81705 - protein, 796 aa, Homo sapiens
  Payload ID: 16274
  Gene Symbol: SLC4A1AP
  Gene Name: solute carrier family 4 (anion exchanger), member 1, adaptor protein
  Uniprot ID: Q9BWU0
  ENSP ID: ENSP00000323837
MLAPLRNAPGREGATSPSPPTDATGSLGEWDVDRNVKTEGWVSKERISKLHRLRMADILSQSETLASQDLSGDFKKPALPVSPAARSKAPASSSSNPEEVQKEGPTALQDSNSGEPDIPPPQPDCGDFRSLQEEQSRPPTAVSSPGGPARAPPYQEPPWGGPATAPYSLETLKGGTILGTRSLKGTSYCLFGRLSGCDVCLEHPSVSRYHAVLQHRASGPDGECDSNGPGFYLYDLGSTHGTFLNKTRIPPRTYCRVHVGHVVRFGGSTRLFILQGPEEDREAESELTVTQLKELRKQQQILLEKKMLGEDSDEEEEMDTSERKINAGSQDDEMGCTWGMGEDAVEDDAEENPIVLEFQQEREAFYIKDPKKALQGFFDREGEELEYEFDEQGHSTWLCRVRLPVDDSTGKQLVAEAIHSGKKKEAMIQCSLEACRILDTLGLLRQEAVSRKRKAKNWEDEDFYDSDDDTFLDRTGLIEKKRLNRMKKAGKIDEKPETFESLVAKLNDAERELSEISERLKASSQVLSESPSQDSLDAFMSEMKSGSTLDGVSRKKLHLRTFELRKEQQRLKGLIKIVKPAEIPELKKTETQTTGAENKAKKLTLPLFGAMKGGSKFKLKTGTVGKLPPKRPELPPTLMRMKDEPEVEEEEEEEEEEEKEKEEHEKKKLEDGSLSRPQPEIEPEAAVQEMRPPTDLTHFKETQTHENMSQLSEEEQNKDYQDCSKTTSLCAGPSASKNEYEKSRGELKKKKTPGPGKLPPTLSSKYPEDDPDYCVWVPPEGQSGDGRTHLNDKYGY

SEQ ID NO: 81706 - protein, 157 aa, Homo sapiens
  Payload ID: 16274
  Gene Symbol: SLC4A1AP
  Gene Name: solute carrier family 4 (anion exchanger), member 1, adaptor protein
  ENSP ID: ENSP00000404129
THGTFLNKTRIPPRTYCRVHVGHVVRFGGSTRLFILQGPEEDREAESELTVTQLKELRKQQQILLEKKMLGEDSDEEEEMDTSERKINAGSQDDEMGCTWGMGEDAVEDDAEENPIVLEFQQEREAFYIKDPKKALQGFFDREDGVLPCCTDWFRAP

SEQ ID NO: 81707 - protein, 796 aa, Homo sapiens; identical to SEQ ID NO: 81705
  Payload ID: 16274
  Gene Symbol: SLC4A1AP
  Gene Name: solute carrier family 4 (anion exchanger), member 1, adaptor protein
  Uniprot ID: Q9BWU0
  ENSP ID: ENSP00000479964

SEQ ID NO: 81708 - protein, 273 aa, Homo sapiens
  Payload ID: 16274
  Gene Symbol: SLC4A1AP
  Gene Name: solute carrier family 4 (anion exchanger), member 1, adaptor protein
  ENSP ID: ENSP00000480182
MADILSQSETLASQDLSGDFKKPALPVSPAARSKAPASSSSNPEEGPEEDREAESELTVTQLKELRKQQQILLEKKMLGEDSDEEEEMDTSERKINAGSQDDEMGCTWGMGEDAVEDDAEENPIVLEFQQEREAFYIKDPKKALQGFFDREGEELEYEFDEQGHSTWLCRVRLPVDDSTGKQLVAEAIHSGKKKEAMIQCSLEACRILDTLGLLRQEAVSRKRKAKNWEDEDFYDSDDDTFLDRTGLIEKKRLNRMKKAGKIDEKPETFESLV

SEQ ID NO: 81709 - protein, 742 aa, Homo sapiens
  Payload ID: 16274
  Gene Symbol: SLC4A1AP
  Gene Name: solute carrier family 4 (anion exchanger), member 1, adaptor protein
  ENSP ID: ENSP00000483501
MADILSQSETLASQDLSGDFKKPALPVSPAARSKAPASSSSNPEEVQKEGPTALQDSNSGEPDIPPPQPDCGDFRSLQEEQSRPPTAVSSPGGPARAPPYQEPPWGGPATAPYSLETLKGGTILGTRSLKGTSYCLFGRLSGCDVCLEHPSVSRYHAVLQHRASGPDGECDSNGPGFYLYDLGSTHGTFLNKTRIPPRTYCRVHVGHVVRFGGSTRLFILQGPEEDREAESELTVTQLKELRKQQQILLEKKMLGEDSDEEEEMDTSERKINAGSQDDEMGCTWGMGEDAVEDDAEENPIVLEFQQEREAFYIKDPKKALQGFFDREGEELEYEFDEQGHSTWLCRVRLPVDDSTGKQLVAEAIHSGKKKEAMIQCSLEACRILDTLGLLRQEAVSRKRKAKNWEDEDFYDSDDDTFLDRTGLIEKKRLNRMKKAGKIDEKPETFESLVAKLNDAERELSEISERLKASSQVLSESPSQDSLDAFMSEMKSGSTLDGVSRKKLHLRTFELRKEQQRLKGLIKIVKPAEIPELKKTETQTTGAENKAKKLTLPLFGAMKGGSKFKLKTGTVGKLPPKRPELPPTLMRMKDEPEVEEEEEEEEEEEKEKEEHEKKKLEDGSLSRPQPEIEPEAAVQEMRPPTDLTHFKETQTHENMSQLSEEEQNKDYQDCSKTTSLCAGPSASKNEYEKSRGELKKKKTPGPGKLPPTLSSKYPEDDPDYCVWVPPEGQSGDGRTHLNDKYGY

SEQ ID NO: 81710 - protein, 1159 aa, Homo sapiens
  Payload ID: 16275
  Gene Symbol: SLC4A2
  Gene Name: solute carrier family 4 (anion exchanger), member 2
  ENSP ID: ENSP00000311402
MSSAPRRPAKGADSFCTPGPGRKPRRRPGASPTGETPTIEEGEEDEDEASEAEGARALTQPSPVSTPSSVQFFLQEDDSADRKAERTSPSSPAPLPHQEATPRASKGAQAGTQVEEAEAEAVAVASGTAGGDDGGASGRPLPKAQPGHRSYNLQERRRIGSMTGAEQALLPRVPTDEIEAQTLATADLDLMKSHRFEDVPGVRRHLVRKNAKGSTQSGREGREPGPTPRARPRAPHKPHEVFVELNELLLDKNQEPQWRETARWIKFEEDVEEETERWGKPHVASLSFRSLLELRRTLAHGAVLLDLDQQTLPGVAHQVVEQMVISDQIKAEDRANVLRALLLKHSHPSDEKDFSFPRNISAGSLGSLLGHHHGQGAESDPHVTEPLMGGVPETRLEVERERELPPPAPPAGITRSKSKHELKLLEKIPENAEATVVLVGCVEFLSRPTMAFVRLREAVELDAVLEVPVPVRFLFLLLGPSSANMDYHEIGRSISTLMSDKQFHEAAYLADEREDLLTAINAFLDCSVVLPPSEVQGEELLRSVAHFQRQMLKKREEQGRLLPTGAGLEPKSAQDKALLQMVEAAGAAEDDPLRRTGRPFGGLIRDVRRRYPHYLSDFRDALDPQCLAAVIFIYFAALSPAITFGGLLGEKTQDLIGVSELIMSTALQGVVFCLLGAQPLLVIGFSGPLLVFEEAFFSFCSSNHLEYLVGRVWIGFWLVFLALLMVALEGSFLVRFVSRFTQEIFAFLISLIFIYETFYKLVKIFQEHPLHGCSASNSSEVDGGENMTWAGARPTLGPGNRSLAGQSGQGKPRGQPNTALLSLVLMAGTFFIAFFLRKFKNSRFFPGRIRRVIGDFGVPIAILIMVLVDYSIEDTYTQKLSVPSGFSVTAPEKRGWVINPLGEKSPFPVWMMVASLLPAILVFILIFMETQITTLIISKKERMLQKGSGFHLDLLLIVAMGGICALFGLPWLAAATVRSVTHANALTVMSKAVAPGDKPKIQEVKEQRVTGLLVALLVGLSIVIGDLLRQIPLAVLFGIFLYMGVTSLNGIQFYERLHLLLMPPKHHPDVTYVKKVRTLRMHLFTALQLLCLALLWAVMSTAASLAFPFILILTVPLRMVVLTRIFTDREMKCLDANEAEPVFDEREGVDEYNEMPMPV

SEQ ID NO: 81711 - protein, 1232 aa, Homo sapiens
  Payload ID: 16275
  Gene Symbol: SLC4A2
  Gene Name: solute carrier family 4 (anion exchanger), member 2
  Uniprot ID: P04920
  ENSP ID: ENSP00000376571
MDFLLRPQPEPESLGPGTPGFPEQEEDELHRTLGVERFEEILQEAGSRGGEEPGRSYGEEDFEYHRQSSHHIHHPLSTHLPPDARRRKTPQGPGRKPRRRPGASPTGETPTIEEGEEDEDEASEAEGARALTQPSPVSTPSSVQFFLQEDDSADRKAERTSPSSPAPLPHQEATPRASKGAQAGTQVEEAEAEAVAVASGTAGGDDGGASGRPLPKAQPGHRSYNLQERRRIGSMTGAEQALLPRVPTDEIEAQTLATADLDLMKSHRFEDVPGVRRHLVRKNAKGSTQSGREGREPGPTPRARPRAPHKPHEVFVELNELLLDKNQEPQWRETARWIKFEEDVEEETERWGKPHVASLSFRSLLELRRTLAHGAVLLDLDQQTLPGVAHQVVEQMVISDQIKAEDRANVLRALLLKHSHPSDEKDFSFPRNISAGSLGSLLGHHHGQGAESDPHVTEPLMGGVPETRLEVERERELPPPAPPAGITRSKSKHELKLLEKIPENAEATVVLVGCVEFLSRPTMAFVRLREAVELDAVLEVPVPVRFLFLLLGPSSANMDYHEIGRSISTLMSDKQFHEAAYLADEREDLLTAINAFLDCSVVLPPSEVQGEELLRSVAHFQRQMLKKREEQGRLLPTGAGLEPKSAQDKALLQMVEAAGAAEDDPLRRTGRPFGGLIRDVRRRYPHYLSDFRDALDPQCLAAVIFIYFAALSPAITFGGLLGEKTQDLIGVSELIMSTALQGVVFCLLGAQPLLVIGFSGPLLVFEEAFFSFCSSNHLEYLVGRVWIGFWLVFLALLMVALEGSFLVRFVSRFTQEIFAFLISLIFIYETFYKLVKIFQEHPLHGCSASNSSEVDGGENMTWAGARPTLGPGNRSLAGQSGQGKPRGQPNTALLSLVLMAGTFFIAFFLRKFKNSRFFPGRIRRVIGDFGVPIAILIMVLVDYSIEDTYTQKLSVPSGFSVTAPEKRGWVINPLGEKSPFPVWMMVASLLPAILVFILIFMETQITTLIISKKERMLQKGSGFHLDLLLIVAMGGICALFGLPWLAAATVRSVTHANALTVMSKAVAPGDKPKIQEVKEQRVTGLLVALLVGLSIVIGDLLRQIPLAVLFGIFLYMGVTSLNGIQFYERLHLLLMPPKHHPDVTYVKKVRTLRMHLFTALQLLCLALLWAVMSTAASLAFPFILILTVPLRMVVLTRIFTDREMKCLDANEAEPVFDEREGVDEYNEMPMPV

SEQ ID NO: 81712 - protein, 1241 aa, Homo sapiens
  Payload ID: 16275
  Gene Symbol: SLC4A2
  Gene Name: solute carrier family 4 (anion exchanger), member 2
  Uniprot ID: P04920
  ENSP ID: ENSP00000405600
MSSAPRRPAKGADSFCTPEPESLGPGTPGFPEQEEDELHRTLGVERFEEILQEAGSRGGEEPGRSYGEEDFEYHRQSSHHIHHPLSTHLPPDARRRKTPQGPGRKPRRRPGASPTGETPTIEEGEEDEDEASEAEGARALTQPSPVSTPSSVQFFLQEDDSADRKAERTSPSSPAPLPHQEATPRASKGAQAGTQVEEAEAEAVAVASGTAGGDDGGASGRPLPKAQPGHRSYNLQERRRIGSMTGAEQALLPRVPTDEIEAQTLATADLDLMKSHRFEDVPGVRRHLVRKNAKGSTQSGREGREPGPTPRARPRAPHKPHEVFVELNELLLDKNQEPQWRETARWIKFEEDVEEETERWGKPHVASLSFRSLLELRRTLAHGAVLLDLDQQTLPGVAHQVVEQMVISDQIKAEDRANVLRALLLKHSHPSDEKDFSFPRNISAGSLGSLLGHHHGQGAESDPHVTEPLMGGVPETRLEVERERELPPPAPPAGITRSKSKHELKLLEKIPENAEATVVLVGCVEFLSRPTMAFVRLREAVELDAVLEVPVPVRFLFLLLGPSSANMDYHEIGRSISTLMSDKQFHEAAYLADEREDLLTAINAFLDCSVVLPPSEVQGEELLRSVAHFQRQMLKKREEQGRLLPTGAGLEPKSAQDKALLQMVEAAGAAEDDPLRRTGRPFGGLIRDVRRRYPHYLSDFRDALDPQCLAAVIFIYFAALSPAITFGGLLGEKTQDLIGVSELIMSTALQGVVFCLLGAQPLLVIGFSGPLLVFEEAFFSFCSSNHLEYLVGRVWIGFWLVFLALLMVALEGSFLVRFVSRFTQEIFAFLISLIFIYETFYKLVKIFQEHPLHGCSASNSSEVDGGENMTWAGARPTLGPGNRSLAGQSGQGKPRGQPNTALLSLVLMAGTFFIAFFLRKFKNSRFFPGRIRRVIGDFGVPIAILIMVLVDYSIEDTYTQKLSVPSGFSVTAPEKRGWVINPLGEKSPFPVWMMVASLLPAILVFILIFMETQITTLIISKKERMLQKGSGFHLDLLLIVAMGGICALFGLPWLAAATVRSVTHANALTVMSKAVAPGDKPKIQEVKEQRVTGLLVALLVGLSIVIGDLLRQIPLAVLFGIFLYMGVTSLNGIQFYERLHLLLMPPKHHPDVTYVKKVRTLRMHLFTALQLLCLALLWAVMSTAASLAFPFILILTVPLRMVVLTRIFTDREMKCLDANEAEPVFDEREGVDEYNEMPMPV

SEQ ID NO: 81713 - protein, 70 aa, Homo sapiens
  Payload ID: 16275
  Gene Symbol: SLC4A2
  Gene Name: solute carrier family 4 (anion exchanger), member 2
  ENSP ID: ENSP00000417221
MSSAPRRPAKGADSFCTPEPESLGPGTPGFPEQEEDELHRTLGVERFEEILQEAGSRGGEEPGRSYGEED

SEQ ID NO: 81714 - protein, 145 aa, Homo sapiens
  Payload ID: 16275
  Gene Symbol: SLC4A2
  Gene Name: solute carrier family 4 (anion exchanger), member 2
  ENSP ID: ENSP00000417808
MSSAPRRPAKGADSFCTPEPESLGPGTPGFPEQEEDELHRTLGVERFEEILQEAGSRGGEEPGRSYGEEDFEYHRQSSHHIHHPLSTHLPPDARRRKTPQGPGRKPRRRPGASPTGETPTIEEGEEDEDEASEAEGARALTQPSP

SEQ ID NO: 81715 - protein, 169 aa, Homo sapiens
  Payload ID: 16275
  Gene Symbol: SLC4A2
  Gene Name: solute carrier family 4 (anion exchanger), member 2
  ENSP ID: ENSP00000418114
MSSAPRRPAKGADSFCTPEPESLGPGTPGFPEQEEDELHRTLGVERFEEILQEAGSRGGEEPGRSYGEEDFEYHRQSSHHIHHPLSTHLPPDARRRKTPQGPGRKPRRRPGASPTGETPTIEEGEEDEDEASEAEGARALTQPSPVSTPSSVQFFLQEDDSADRKAERT

SEQ ID NO: 81716 - protein, 150 aa, Homo sapiens
  Payload ID: 16275
  Gene Symbol: SLC4A2
  Gene Name: solute carrier family 4 (anion exchanger), member 2
  ENSP ID: ENSP00000418584
MSSAPRRPAKGADSFCTPEPESLGPGTPGFPEQEEDELHRTLGVERFEEILQEAGSRGGEEPGRSYGEEDFEYHRQSSHHIHHPLSTHLPPDARRRKTPQGPGRKPRRRPGASPTGETPTIEEGEEDEDEASEAEGARALTQPSPVSTPS

SEQ ID NO: 81717 - protein, 1227 aa, Homo sapiens
  Payload ID: 16275
  Gene Symbol: SLC4A2
  Gene Name: solute carrier family 4 (anion exchanger), member 2
  Uniprot ID: P04920
  ENSP ID: ENSP00000419164
MTQPEPESLGPGTPGFPEQEEDELHRTLGVERFEEILQEAGSRGGEEPGRSYGEEDFEYHRQSSHHIHHPLSTHLPPDARRRKTPQGPGRKPRRRPGASPTGETPTIEEGEEDEDEASEAEGARALTQPSPVSTPSSVQFFLQEDDSADRKAERTSPSSPAPLPHQEATPRASKGAQAGTQVEEAEAEAVAVASGTAGGDDGGASGRPLPKAQPGHRSYNLQERRRIGSMTGAEQALLPRVPTDEIEAQTLATADLDLMKSHRFEDVPGVRRHLVRKNAKGSTQSGREGREPGPTPRARPRAPHKPHEVFVELNELLLDKNQEPQWRETARWIKFEEDVEEETERWGKPHVASLSFRSLLELRRTLAHGAVLLDLDQQTLPGVAHQVVEQMVISDQIKAEDRANVLRALLLKHSHPSDEKDFSFPRNISAGSLGSLLGHHHGQGAESDPHVTEPLMGGVPETRLEVERERELPPPAPPAGITRSKSKHELKLLEKIPENAEATVVLVGCVEFLSRPTMAFVRLREAVELDAVLEVPVPVRFLFLLLGPSSANMDYHEIGRSISTLMSDKQFHEAAYLADEREDLLTAINAFLDCSVVLPPSEVQGEELLRSVAHFQRQMLKKREEQGRLLPTGAGLEPKSAQDKALLQMVEAAGAAEDDPLRRTGRPFGGLIRDVRRRYPHYLSDFRDALDPQCLAAVIFIYFAALSPAITFGGLLGEKTQDLIGVSELIMSTALQGVVFCLLGAQPLLVIGFSGPLLVFEEAFFSFCSSNHLEYLVGRVWIGFWLVFLALLMVALEGSFLVRFVSRFTQEIFAFLISLIFIYETFYKLVKIFQEHPLHGCSASNSSEVDGGENMTWAGARPTLGPGNRSLAGQSGQGKPRGQPNTALLSLVLMAGTFFIAFFLRKFKNSRFFPGRIRRVIGDFGVPIAILIMVLVDYSIEDTYTQKLSVPSGFSVTAPEKRGWVINPLGEKSPFPVWMMVASLLPAILVFILIFMETQITTLIISKKERMLQKGSGFHLDLLLIVAMGGICALFGLPWLAAATVRSVTHANALTVMSKAVAPGDKPKIQEVKEQRVTGLLVALLVGLSIVIGDLLRQIPLAVLFGIFLYMGVTSLNGIQFYERLHLLLMPPKHHPDVTYVKKVRTLRMHLFTALQLLCLALLWAVMSTAASLAFPFILILTVPLRMVVLTRIFTDREMKCLDANEAEPVFDEREGVDEYNEMPMPV

SEQ ID NO: 81718 - protein, 127 aa, Homo sapiens
  Payload ID: 16275
  Gene Symbol: SLC4A2
  Gene Name: solute carrier family 4 (anion exchanger), member 2
  ENSP ID: ENSP00000419379
MSSAPRRPAKGADSFCTPEPESLGPGTPGFPEQEEDELHRTLGVERFEEILQEAGSRGGEEPGRSYGEEDFEYHRQSSHHIHHPLSTHLPPDARRRKTPQGPGRKPRRRPGASPTGETPTIEEGEED

SEQ ID NO: 81719 - protein, 1241 aa, Homo sapiens; identical to SEQ ID NO: 81712
  Payload ID: 16275
  Gene Symbol: SLC4A2
  Gene Name: solute carrier family 4 (anion exchanger), member 2
  Uniprot ID: P04920
  ENSP ID: ENSP00000419412

SEQ ID NO: 81720 - protein, 1259 aa, Homo sapiens
  Payload ID: 16276
  Gene Symbol: SLC4A3
  Gene Name: solute carrier family 4 (anion exchanger), member 3
  Uniprot ID: P48751
  ENSP ID: ENSP00000273063
MANGVIPPPGGASPLPQVRVPLEEPPLSPDVEEEDDDLGKTLAVSRFGDLISKPPAWDPEKPSRSYSERDFEFHRHTSHHTHHPLSARLPPPHKLRRLPPTSARHTRRKRKKEKTSAPPSEGTPPIQEEGGAGVDEEEEEEEEEEGESEAEPVEPPHSGTPQKAKFSIGSDEDDSPGLPGRAAVTKPLPSVGPHTDKSPQHSSRPCSELRDGDGTTDLALSSPRLLCCLPSSPSPRARASRLAGEKSRPWSPSASYDLRERLCPGSALGNPGGPEQQVPTDEAEAQMLGSADLDDMKSHRLEDNPGVRRHLVKKPSRTQGGRGSPSGLAPILRRKKKKKKLDRRPHEVFVELNELMLDRSQEPHWRETARWIKFEEDVEEETERWGKPHVASLSFRSLLELRRTIAHGAALLDLEQTTLPGIAHLVVETMIVSDQIRPEDRASVLRTLLLKHSHPNDDKDSGFFPRNPSSSSMNSVLGNHHPTPSHGPDGAVPTMADDLGEPAPLWPHDPDAKEKPLHMPGGDGHRGKSLKLLEKIPEDAEATVVLVGCVPFLEQPAAAFVRLNEAVLLESVLEVPVPVRFLFVMLGPSHTSTDYHELGRSIATLMSDKLFHEAAYQADDRQDLLSAISEFLDGSIVIPPSEVEGRDLLRSVAAFQRELLRKRREREQTKVEMTTRGGYTAPGKELSLELGGSEATPEDDPLLRTGSVFGGLVRDVRRRYPHYPSDLRDALHSQCVAAVLFIYFAALSPAITFGGLLGEKTEGLMGVSELIVSTAVLGVLFSLLGAQPLLVVGFSGPLLVFEEAFFKFCRAQDLEYLTGRVWVGLWLVVFVLALVAAEGSFLVRYISPFTQEIFAFLISLIFIYETFYKLYKVFTEHPLLPFYPPEGALEGSLDAGLEPNGSALPPTEGPPSPRNQPNTALLSLILMLGTFFIAFFLRKFRNSRFLGGKARRIIGDFGIPISILVMVLVDYSITDTYTQKLTVPTGLSVTSPDKRSWFIPPLGSARPFPPWMMVAAAVPALLVLILIFMETQITALIVSQKARRLLKGSGFHLDLLLIGSLGGLCGLFGLPWLTAATVRSVTHVNALTVMRTAIAPGDKPQIQEVREQRVTGVLIASLVGLSIVMGAVLRRIPLAVLFGIFLYMGVTSLSGIQLSQRLLLILMPAKHHPEQPYVTKVKTWRMHLFTCIQLGCIALLWVVKSTAASLAFPFLLLLTVPLRHCLLPRLFQDRELQALDSEDAEPNFDEDGQDEYNELHMPV

SEQ ID NO: 81721 - protein, 1232 aa, Homo sapiens
  Payload ID: 16276
  Gene Symbol: SLC4A3
  Gene Name: solute carrier family 4 (anion exchanger), member 3
  Uniprot ID: P48751
  ENSP ID: ENSP00000314006
MANGVIPPPGGASPLPQVRVPLEEPPLSPDVEEEDDDLGKTLAVSRFGDLISKPPAWDPEKPSRSYSERDFEFHRHTSHHTHHPLSARLPPPHKLRRLPPTSARHTRRKRKKEKTSAPPSEGTPPIQEEGGAGVDEEEEEEEEEEGESEAEPVEPPHSGTPQKAKFSIGSDEDDSPGLPGRAAVTKPLPSVGPHTDKSPQHSSSSPSPRARASRLAGEKSRPWSPSASYDLRERLCPGSALGNPGGPEQQVPTDEAEAQMLGSADLDDMKSHRLEDNPGVRRHLVKKPSRTQGGRGSPSGLAPILRRKKKKKKLDRRPHEVFVELNELMLDRSQEPHWRETARWIKFEEDVEEETERWGKPHVASLSFRSLLELRRTIAHGAALLDLEQTTLPGIAHLVVETMIVSDQIRPEDRASVLRTLLLKHSHPNDDKDSGFFPRNPSSSSMNSVLGNHHPTPSHGPDGAVPTMADDLGEPAPLWPHDPDAKEKPLHMPGGDGHRGKSLKLLEKIPEDAEATVVLVGCVPFLEQPAAAFVRLNEAVLLESVLEVPVPVRFLFVMLGPSHTSTDYHELGRSIATLMSDKLFHEAAYQADDRQDLLSAISEFLDGSIVIPPSEVEGRDLLRSVAAFQRELLRKRREREQTKVEMTTRGGYTAPGKELSLELGGSEATPEDDPLLRTGSVFGGLVRDVRRRYPHYPSDLRDALHSQCVAAVLFIYFAALSPAITFGGLLGEKTEGLMGVSELIVSTAVLGVLFSLLGAQPLLVVGFSGPLLVFEEAFFKFCRAQDLEYLTGRVWVGLWLVVFVLALVAAEGSFLVRYISPFTQEIFAFLISLIFIYETFYKLYKVFTEHPLLPFYPPEGALEGSLDAGLEPNGSALPPTEGPPSPRNQPNTALLSLILMLGTFFIAFFLRKFRNSRFLGGKARRIIGDFGIPISILVMVLVDYSITDTYTQKLTVPTGLSVTSPDKRSWFIPPLGSARPFPPWMMVAAAVPALLVLILIFMETQITALIVSQKARRLLKGSGFHLDLLLIGSLGGLCGLFGLPWLTAATVRSVTHVNALTVMRTAIAPGDKPQIQEVREQRVTGVLIASLVGLSIVMGAVLRRIPLAVLFGIFLYMGVTSLSGIQLSQRLLLILMPAKHHPEQPYVTKVKTWRMHLFTCIQLGCIALLWVVKSTAASLAFPFLLLLTVPLRHCLLPRLFQDRELQALDSEDAEPNFDEDGQDEYNELHMPV

SEQ ID NO: 81722 - protein, 1232 aa, Homo sapiens; identical to SEQ ID NO: 81721
  Payload ID: 16276
  Gene Symbol: SLC4A3
  Gene Name: solute carrier family 4 (anion exchanger), member 3
  Uniprot ID: P48751
  ENSP ID: ENSP00000350756

SEQ ID NO: 81723 - protein, 1232 aa, Homo sapiens; identical to SEQ ID NO: 81721
  Payload ID: 16276
  Gene Symbol: SLC4A3
  Gene Name: solute carrier family 4 (anion exchanger), member 3
  Uniprot ID: P48751
  ENSP ID: ENSP00000362865

SEQ ID NO: 81724 - protein, 518 aa, Homo sapiens
  Payload ID: 16276
  Gene Symbol: SLC4A3
  Gene Name: solute carrier family 4 (anion exchanger), member 3
  ENSP ID: ENSP00000396863
MANGVIPPPGGASPLPQVRVPLEEPPLSPDVEEEDDDLGKTLAVSRFGDLISKPPAWDPEKPSRSYSERDFEFHRHTSHHTHHPLSARLPPPHKLRRLPPTSARHTRRKRKKEKTSAPPSEGTPPIQEEGGAGVDEEEEEEEEEEGESEAEPVEPPHSGTPQKAKFSIGSDEDDSPGLPGRAAVTKPLPSVGPHTDKSPQHSSSSPSPRARASRLAGEKSRPWSPSASYDLRERLCPGSALGNPGGPEQQVPTDEAEAQMLGSADLDDMKSHRLEDNPGVRRHLVKKPSRTQGGRGSPSGLAPILRRKKKKKKLDRRPHEVFVELNELMLDRSQEPHWRETARWIKFEEDVEEETERWGKPHVASLSFRSLLELRRTIAHGAALLDLEQTTLPGIAHLVVETMIVSDQIRPEDRASVLRTLLLKHSHPNDDKDSGFFPRNPSSSSMNSVLGNHHPTPSHGPDGAVPTMADDLGEPAPLWPHDPDAKEPYSSSASSEAPPHAWGRWSPGEKPEAAGEDP

SEQ ID NO: 81725 - protein, 74 aa, Homo sapiens
  Payload ID: 16276
  Gene Symbol: SLC4A3
  Gene Name: solute carrier family 4 (anion exchanger), member 3
  ENSP ID: ENSP00000398628
  MOD_RES (1)..(1): Any amino acid
XGNHHPTPSHGPDGAVPTMADDLGEPAPLWPHDPDAKEKPLHMPGGDGHRGKSLKLLEKIPEDAEATVVLVAVS

SEQ ID NO: 81726 - protein, 207 aa, Homo sapiens
  Payload ID: 16276
  Gene Symbol: SLC4A3
  Gene Name: solute carrier family 4 (anion exchanger), member 3
  ENSP ID: ENSP00000403160
  MOD_RES (1)..(1): Any amino acid
XAPILRRKKKKKKLDRRPHEVFVELNELMLDRSQEPHWRETARWIKFEEDVEEETERWGKPHVASLSFRSLLELRRTIAHGAALLDLEQTTLPGIAHLVVETMIVSDQIRPEDRASVLRTLLLKHSHPNDDKDSGFFPRNPSSSSMNSVLGNHHPTPSHGPDGAVPTMADDLGEPAPLWPHDPDAKEFCVLRSPSTCLGEMVTGGKA

SEQ ID NO: 81727 - protein, 227 aa, Homo sapiens
  Payload ID: 16276
  Gene Symbol: SLC4A3
  Gene Name: solute carrier family 4 (anion exchanger), member 3
  ENSP ID: ENSP00000414722
MTSPLEKDPEPNGALSPGPGDTNSWGFGRDPAPSPRDSLAPEDLEMFVLDFEDGDLWESIRGQLGPMAGPPTCHRLEDNPGVRRHLVKKPSRTQGGRGSPSGLAPILRRKKKKKKLDRRPHEVFVELNELMLDRSQEPHWRETARWIKFEEDVEEETERWGKPHVASLSFRSLLELRRTIAHGAALLDLEQTTLPGIAHLVVETMIVSDQIRPEDRASVLRTLLLKH

SEQ ID NO: 81728 - protein, 1079 aa, Homo sapiens
  Payload ID: 16277
  Gene Symbol: SLC4A4
  Gene Name: solute carrier family 4 (sodium bicarbonate cotransporter), member 4
  Uniprot ID: Q9Y6R1
  ENSP ID: ENSP00000264485
MEDEAVLDRGASFLKHVCDEEEVEGHHTIYIGVHVPKSYRRRRRHKRKTGHKEKKEKERISENYSDKSDIENADESSSSILKPLISPAAERIRFILGEEDDSPAPPQLFTELDELLAVDGQEMEWKETARWIKFEEKVEQGGERWSKPHVATLSLHSLFELRTCMEKGSIMLDREASSLPQLVEMIVDHQIETGLLKPELKDKVTYTLLRKHRHQTKKSNLRSLADIGKTVSSASRMFTNPDNGSPAMTHRNLTSSSLNDISDKPEKDQLKNKFMKKLPRDAEASNVLVGEVDFLDTPFIAFVRLQQAVMLGALTEVPVPTRFLFILLGPKGKAKSYHEIGRAIATLMSDEVFHDIAYKAKDRHDLIAGIDEFLDEVIVLPPGEWDPAIRIEPPKSLPSSDKRKNMYSGGENVQMNGDTPHDGGHGGGGHGDCEELQRTGRFCGGLIKDIKRKAPFFASDFYDALNIQALSAILFIYLATVTNAITFGGLLGDATDNMQGVLESFLGTAVSGAIFCLFAGQPLTILSSTGPVLVFERLLFNFSKDNNFDYLEFRLWIGLWSAFLCLILVATDASFLVQYFTRFTEEGFSSLISFIFIYDAFKKMIKLADYYPINSNFKVGYNTLFSCTCVPPDPANISISNDTTLAPEYLPTMSSTDMYHNTTFDWAFLSKKECSKYGGNLVGNNCNFVPDITLMSFILFLGTYTSSMALKKFKTSPYFPTTARKLISDFAIILSILIFCVIDALVGVDTPKLIVPSEFKPTSPNRGWFVPPFGENPWWVCLAAAIPALLVTILIFMDQQITAVIVNRKEHKLKKGAGYHLDLFWVAILMVICSLMALPWYVAATVISIAHIDSLKMETETSAPGEQPKFLGVREQRVTGTLVFILTGLSVFMAPILKFIPMPVLYGVFLYMGVASLNGVQFMDRLKLLLMPLKHQPDFIYLRHVPLRRVHLFTFLQVLCLALLWILKSTVAAIIFPVMILALVAVRKGMDYLFSQHDLSFLDDVIPEKDKKKKEDEKKKKKKKGSLDSDNDDSDCPYSEKVPSIKIPMDIMEQQPFLSDSKPSDRERSPTFLERHTSC

SEQ ID NO: 81729 - protein, 995 aa, Homo sapiens
  Payload ID: 16277
  Gene Symbol: SLC4A4
  Gene Name: solute carrier family 4 (sodium bicarbonate cotransporter), member 4
  Uniprot ID: Q9Y6R1
  ENSP ID: ENSP00000307349
MEDEAVLDRGASFLKHVCDEEEVEGHHTIYIGVHVPKSYRRRRRHKRKTGHKEKKEKERISENYSDKSDIENADESSSSILKPLISPAAERIRFILGEEDDSPAPPQLFTELDELLAVDGQEMEWKETARWIKFEEKVEQGGERWSKPHVATLSLHSLFELRTCMEKGSIMLDREASSLPQLVEMIVDHQIETGLLKPELKDKVTYTLLRKHRHQTKKSNLRSLADIGKTVSSASRMFTNPDNGSPAMTHRNLTSSSLNDISDKPEKDQLKNKFMKKLPRDAEASNVLVGEVDFLDTPFIAFVRLQQAVMLGALTEVPVPTRFLFILLGPKGKAKSYHEIGRAIATLMSDEVFHDIAYKAKDRHDLIAGIDEFLDEVIVLPPGEWDPAIRIEPPKSLPSSDKRKNMYSGGENVQMNGDTPHDGGHGGGGHGDCEELQRTGRFCGGLIKDIKRKAPFFASDFYDALNIQALSAILFIYLATVTNAITFGGLLGDATDNMQGVLESFLGTAVSGAIFCLFAGQPLTILSSTGPVLVFERLLFNFSKDNNFDYLEFRLWIGLWSAFLCLILVATDASFLVQYFTRFTEEGFSSLISFIFIYDAFKKMIKLADYYPINSNFKVGYNTLFSCTCVPPDPANISISNDTTLAPEYLPTMSSTDMYHNTTFDWAFLSKKECSKYGGNLVGNNCNFVPDITLMSFILFLGTYTSSMALKKFKTSPYFPTTARKLISDFAIILSILIFCVIDALVGVDTPKLIVPSEFKPTSPNRGWFVPPFGENPWWVCLAAAIPALLVTILIFMDQQITAVIVNRKEHKLKFIPMPVLYGVFLYMGVASLNGVQFMDRLKLLLMPLKHQPDFIYLRHVPLRRVHLFTFLQVLCLALLWILKSTVAAIIFPVMILALVAVRKGMDYLFSQHDLSFLDDVIPEKDKKKKEDEKKKKKKKGSLDSDNDDSDCPYSEKVPSIKIPMDIMEQQPFLSDSKPSDRERSPTFLERHTSC

SEQ ID NO: 81730 - protein, 1035 aa, Homo sapiens
  Payload ID: 16277
  Gene Symbol: SLC4A4
  Gene Name: solute carrier family 4 (sodium bicarbonate cotransporter), member 4
  Uniprot ID: Q9Y6R1
  ENSP ID: ENSP00000344272
MSTENVEGKPSNLGERGRARSSTFLRVVQPMFNHSIFTSAVSPAAERIRFILGEEDDSPAPPQLFTELDELLAVDGQEMEWKETARWIKFEEKVEQGGERWSKPHVATLSLHSLFELRTCMEKGSIMLDREASSLPQLVEMIVDHQIETGLLKPELKDKVTYTLLRKHRHQTKKSNLRSLADIGKTVSSASRMFTNPDNGSPAMTHRNLTSSSLNDISDKPEKDQLKNKFMKKLPRDAEASNVLVGEVDFLDTPFIAFVRLQQAVMLGALTEVPVPTRFLFILLGPKGKAKSYHEIGRAIATLMSDEVFHDIAYKAKDRHDLIAGIDEFLDEVIVLPPGEWDPAIRIEPPKSLPSSDKRKNMYSGGENVQMNGDTPHDGGHGGGGHGDCEELQRTGRFCGGLIKDIKRKAPFFASDFYDALNIQALSAILFIYLATVTNAITFGGLLGDATDNMQGVLESFLGTAVSGAIFCLFAGQPLTILSSTGPVLVFERLLFNFSKDNNFDYLEFRLWIGLWSAFLCLILVATDASFLVQYFTRFTEEGFSSLISFIFIYDAFKKMIKLADYYPINSNFKVGYNTLFSCTCVPPDPANISISNDTTLAPEYLPTMSSTDMYHNTTFDWAFLSKKECSKYGGNLVGNNCNFVPDITLMSFILFLGTYTSSMALKKFKTSPYFPTTARKLISDFAIILSILIFCVIDALVGVDTPKLIVPSEFKPTSPNRGWFVPPFGENPWWVCLAAAIPALLVTILIFMDQQITAVIVNRKEHKLKKGAGYHLDLFWVAILMVICSLMALPWYVAATVISIAHIDSLKMETETSAPGEQPKFLGVREQRVTGTLVFILTGLSVFMAPILKFIPMPVLYGVFLYMGVASLNGVQFMDRLKLLLMPLKHQPDFIYLRHVPLRRVHLFTFLQVLCLALLWILKSTVAAIIFPVMILALVAVRKGMDYLFSQHDLSFLDDVIPEKDKKKKEDEKKKKKKKGSLDSDNDDSDCPYSEKVPSIKIPMDIMEQQPFLSDSKPSDRERSPTFLERHTSC

SEQ ID NO: 81731 - protein, 1094 aa, Homo sapiens
  Payload ID: 16277
  Gene Symbol: SLC4A4
  Gene Name: solute carrier family 4 (sodium bicarbonate cotransporter), member 4
  Uniprot ID: Q9Y6R1
  ENSP ID: ENSP00000393557
MEDEAVLDRGASFLKHVCDEEEVEGHHTIYIGVHVPKSYRRRRRHKRKTGHKEKKEKERISENYSDKSDIENADESSSSILKPLISPAAERIRFILGEEDDSPAPPQLFTELDELLAVDGQEMEWKETARWIKFEEKVEQGGERWSKPHVATLSLHSLFELRTCMEKGSIMLDREASSLPQLVEMIVDHQIETGLLKPELKDKVTYTLLRKHRHQTKKSNLRSLADIGKTVSSASRMFTNPDNGSPAMTHRNLTSSSLNDISDKPEKDQLKNKFMKKLPRDAEASNVLVGEVDFLDTPFIAFVRLQQAVMLGALTEVPVPTRFLFILLGPKGKAKSYHEIGRAIATLMSDEVFHDIAYKAKDRHDLIAGIDEFLDEVIVLPPGEWDPAIRIEPPKSLPSSDKRKNMYSGGENVQMNGDTPHDGGHGGGGHGDCEELQRTGRFCGGLIKDIKRKAPFFASDFYDALNIQALSAILFIYLATVTNAITFGGLLGDATDNMQGVLESFLGTAVSGAIFCLFAGQPLTILSSTGPVLVFERLLFNFSKDNNFDYLEFRLWIGLWSAFLCLILVATDASFLVQYFTRFTEEGFSSLISFIFIYDAFKKMIKLADYYPINSNFKVGYNTLFSCTCVPPDPANISISNDTTLAPEYLPTMSSTDMYHNTTFDWAFLSKKECSKYGGNLVGNNCNFVPDITLMSFILFLGTYTSSMALKKFKTSPYFPTTARKLISDFAIILSILIFCVIDALVGVDTPKLIVPSEFKPTSPNRGWFVPPFGENPWWVCLAAAIPALLVTILIFMDQQITAVIVNRKEHKLKKGAGYHLDLFWVAILMVICSLMALPWYVAATVISIAHIDSLKMETETSAPGEQPKFLGVREQRVTGTLVFILTGLSVFMAPILKFIPMPVLYGVFLYMGVASLNGVQFMDRLKLLLMPLKHQPDFIYLRHVPLRRVHLFTFLQVLCLALLWILKSTVAAIIFPVMILALVAVRKGMDYLFSQHDLSFLDDVIPEKDKKKKEDEKKKKKKKGSLDSDNDDEKDHQHSLNATHHADKIPFLQSLGMPSPPRTPVKVVPQIRIELEPEDNDYFWRSKGTETTL

SEQ ID NO: 81732 - protein, 646 aa, Homo sapiens
  Payload ID: 16277
  Gene Symbol: SLC4A4
  Gene Name: solute carrier family 4 (sodium bicarbonate cotransporter), member 4
  Uniprot ID: Q9Y6R1
  ENSP ID: ENSP00000422400
MSTENVEGKPSNLGERGRARSSTFLRVVQPMFNHSIFTSAVSPAAERIRFILGEEDDSPAPPQLFTELDELLAVDGQEMEWKETARWIKFEEKVEQGGERWSKPHVATLSLHSLFELRTCMEKGSIMLDREASSLPQLVEMIVDHQIETGLLKPELKDKVTYTLLRKHRHQTKKSNLRSLADIGKTVSSASRMFTNPDNGSPAMTHRNLTSSSLNDISDKPEKDQLKNKFMKKLPRDAEASNVLVGEVDFLDTPFIAFVRLQQAVMLGALTEVPVPTRFLFILLGPKGKAKSYHEIGRAIATLMSDEVFHDIAYKAKDRHDLIAGIDEFLDEVIVLPPGEWDPAIRIEPPKSLPSSDKRKNMYSGGENVQMNGDTPHDGGHGGGGHGDCEELQRTGRFCGGLIKDIKRKAPFFASDFYDALNIQALSAILFIYLATVTNAITFGGLLGDATDNMQGVLESFLGTAVSGAIFCLFAGQPLTILSSTGPVLVFERLLFNFSKDNNFDYLEFRLWIGLWSAFLCLILVATDASFLVQYFTRFTEEGFSSLISFIFIYDAFKKMIKLADYYPINSNFKVGYNTLFSCTCVPPDPGEGITLCVYARFVFGGRCRLHACKFSTCCHGPQELVLFFSLKNSATEFDVSLPEVF

SEQ ID NO: 81733 - protein, 1137 aa, Homo sapiens
  Payload ID: 16278
  Gene Symbol: SLC4A5
  Gene Name: solute carrier family 4 (sodium bicarbonate cotransporter), member 5
  Uniprot ID: Q9BY07
  ENSP ID: ENSP00000251768
MKVKEEKAGVGKLDHTNHRRRFPDQKECPPIHIGLPVPTYPQRKTDQKGHLSGLQKVHWGLRPDQPQQELTGPGSGASSQDSSMDLISRTRSPAAEQLQDILGEEDEAPNPTLFTEMDTLQHDGDQMEWKESARWIKFEEKVEEGGERWSKPHVSTLSLHSLFELRTCLQTGTVLLDLDSGSLPQIIDDVIEKQIEDGLLRPELRERVSYVLLRRHRHQTKKPIHRSLADIGKSVSTTNRSPARSPGAGPSLHHSTEDLRMRQSANYGRLCHAQSRSMNDISLTPNTDQRKNKFMKKIPKDSEASNVLVGEVDFLDQPFIAFVRLIQSAMLGGVTEVPVPTRFLFILLGPSGRAKSYNEIGRAIATLMVDDLFSDVAYKARNREDLIAGIDEFLDEVIVLPPGEWDPNIRIEPPKKVPSADKRKSVFSLAELGQMNGSVGGGGGAPGGGNGGGGGGGSGGGAGSGGAGGTSSGDDGEMPAMHEIGEELIWTGRFFGGLCLDIKRKLPWFPSDFYDGFHIQSISAILFIYLGCITNAITFGGLLGDATDNYQGVMESFLGTAMAGSLFCLFSGQPLIILSSTGPILIFEKLLFDFSKGNGLDYMEFRLWIGLHSAVQCLILVATDASFIIKYITRFTEEGFSTLISFIFIYDAIKKMIGAFKYYPINMDFKPNFITTYKCECVAPDTVNTTVFNASAPLAPDTNASLYNLLNLTALDWSLLSKKECLSYGGRLLGNSCKFIPDLALMSFILFFGTYSMTLTLKKFKFSRYFPTKVRALVADFSIVFSILMFCGIDACFGLETPKLHVPSVIKPTRPDRGWFVAPFGKNPWWVYPASILPALLVTILIFMDQQITAVIVNRKENKLKKAAGYHLDLFWVGILMALCSFMGLPWYVAATVISIAHIDSLKMETETSAPGEQPQFLGVREQRVTGIIVFILTGISVFLAPILKCIPLPVLYGVFLYMGVASLNGIQMGTGGSEFKIQKKLTPFWERCKLFLMPAKHQPDHAFLRHVPLRRIHLFTLVQILCLAVLWILKSTVAAIIFPVMILGLIIVRRLLDFIFSQHDLAWIDNILPEKEKKETDKKRKRKKGAHEDCDEEPQFPPPSVIKIPMESVQSDPQNGIHCIARKRSSSWSYSL

SEQ ID NO: 81734 - protein, 1019 aa, Homo sapiens
  Payload ID: 16278
  Gene Symbol: SLC4A5
  Gene Name: solute carrier family 4 (sodium bicarbonate cotransporter), member 5
  Uniprot ID: Q9BY07
  ENSP ID: ENSP00000351513
MKVKEEKAGVGKLDHTNHRRRFPDQKGSPAAEQLQDILGEEDEAPNPTLFTEMDTLQHDGDQMEWKESARWIKFEEKVEEGGERWSKPHVSTLSLHSLFELRTCLQTGTVLLDLDSGSLPQIIDDVIEKQIEDGLLRPELRERVSYVLLRRHRHQTKKPIHRSLADIGKSVSTTNRSPARSPGAGPSLHHSTEDLRMRQSANYGRLCHAQSRSMNDISLTPNTDQRKNKFMKKIPKDSEASNVLVGEVDFLDQPFIAFVRLIQSAMLGGVTEVPVPTRFLFILLGPSGRAKSYNEIGRAIATLMVDDLFSDVAYKARNREDLIAGIDEFLDEVIVLPPGEWDPNIRIEPPKKVPSADKRKSVFSLAELGQMNGSVGGGGGAPGGGNGGGGGGGSGGGAGSGGAGGTSSGDDGEMPAMHEIGEELIWTGRFFGGLCLDIKRKLPWFPSDFYDGFHIQSISAILFIYLGCITNAITFGGLLGDATDNYQGVMESFLGTAMAGSLFCLFSGQPLIILSSTGPILIFEKLLFDFSKGNGLDYMEFRLWIGLHSAVQCLILVATDASFIIKYITRFTEEGFSTLISFIFIYDAIKKMIGAFKYYPINMDFKPNFITTYKCECVAPDTVNTTVFNASAPLAPDTNASLYNLLNLTALDWSLLSKKECLSYGGRLLGNSCKFIPDLALMSFILFFGTYSMTLTLKKFKFSRYFPTKPTRPDRGWFVAPFGKNPWWVYPASILPALLVTILIFMDQQITAVIVNRKENKLKKAAGYHLDLFWVGILMALCSFMGLPWYVAATVISIAHIDSLKMETETSAPGEQPQFLGVREQRVTGIIVFILTGISVFLAPILKCIPLPVLYGVFLYMGVASLNGIQFWERCKLFLMPAKHQPDHAFLRHVPLRRIHLFTLVQILCLAVLWILKSTVAAIIFPVMILGLIIVRRLLDFIFSQHDLAWIDNILPEKEKKETDKKRKRKKGAHEDCDEEPQFPPPSVIKIPMESVQSDPQNGIHCIARKRSSSWSYSL

SEQ ID NO: 81735 - protein, 1040 aa, Homo sapiens
  Payload ID: 16278
  Gene Symbol: SLC4A5
  Gene Name: solute carrier family 4 (sodium bicarbonate cotransporter), member 5
  Uniprot ID: Q9BY07
  ENSP ID: ENSP00000366859
MKVKEEKAGVGKLDHTNHRRRFPDQKECPPIHIGLPVPTYPQRKTDQKGHLSGLQKVHWGLRPDQPQQELTGPGSGASSQDSSMDLISRTRSPAAEQLQDILGEEDEAPNPTLFTEMDTLQHDGDQMEWKESARWIKFEEKVEEGGERWSKPHVSTLSLHSLFELRTCLQTGTVLLDLDSGSLPQIIDDVIEKQIEDGLLRPELRERVSYVLLRRHRHQTKKPIHRSLADIGKSVSTTNRSPARSPGAGPSLHHSTEDLRMRQSANYGRLCHAQSRSMNDISLTPNTDQRKNKFMKKIPKDSEASNVLVGEVDFLDQPFIAFVRLIQSAMLGGVTEVPVPTRFLFILLGPSGRAKSYNEIGRAIATLMVDDLFSDVAYKARNREDLIAGIDEFLDEVIVLPPGEWDPNIRIEPPKKVPSADKRKSVFSLAELGQMNGSVGGGGGAPGGGNGGGGGGGSGGGAGSGGAGGTSSGDDGEMPAMHEIGEELIWTGRFFGGLCLDIKRKLPWFPSDFYDGFHIQSISAILFIYLGCITNAITFGGLLGDATDNYQGVMESFLGTAMAGSLFCLFSGQPLIILSSTGPILIFEKLLFDFSKGNGLDYMEFRLWIGLHSAVQCLILVATDASFIIKYITRFTEEGFSTLISFIFIYDAIKKMIGAFKYYPINMDFKPNFITTYKCECVAPDTVNTTVFNASAPLAPDTNASLYNLLNLTALDWSLLSKKECLSYGGRLLGNSCKFIPDLALMSFILFFGTYSMTLTLKKFKFSRYFPTKVRALVADFSIVFSILMFCGIDACFGLETPKLHVPSVIKPTRPDRGWFVAPFGKNPWWVYPASILPALLVTILIFMDQQITAVIVNRKENKLKKAAGYHLDLFWVGILMALCSFMGLPWYVAATVISIAHIDSLKMETETSAPGEQPQFLGVREQRVTGIIVFILTGISVFLAPILKILGLIIVRRLLDFIFSQHDLAWIDNILPEKEKKETDKKRKRKKGAHEDCDEEPQFPPPSVIKIPMESVQSDPQNGIHCIARKRSSSWSYSL

SEQ ID NO: 81736 - protein, 1137 aa, Homo sapiens; identical to SEQ ID NO: 81733
  Payload ID: 16278
  Gene Symbol: SLC4A5
  Gene Name: solute carrier family 4 (sodium bicarbonate cotransporter), member 5
  Uniprot ID: Q9BY07
  ENSP ID: ENSP00000366861

SEQ ID NO: 81737 - protein, 1121 aa, Homo sapiens
  Payload ID: 16278
  Gene Symbol: SLC4A5
  Gene Name: solute carrier family 4 (sodium bicarbonate cotransporter), member 5
  Uniprot ID: Q9BY07
  ENSP ID: ENSP00000377587
MKVKEEKAGVGKLDHTNHRRRFPDQKECPPIHIGLPVPTYPQRKTDQKGHLSGLQKVHWGLRPDQPQQELTGPGSGASSQDSSMDLISRTRSPAAEQLQDILGEEDEAPNPTLFTEMDTLQHDGDQMEWKESARWIKFEEKVEEGGERWSKPHVSTLSLHSLFELRTCLQTGTVLLDLDSGSLPQIIDDVIEKQIEDGLLRPELRERVSYVLLRRHRHQTKKPIHRSLADIGKSVSTTNRSPARSPGAGPSLHHSTEDLRMRQSANYGRLCHAQSRSMNDISLTPNTDQRKNKFMKKIPKDSEASNVLVGEVDFLDQPFIAFVRLIQSAMLGGVTEVPVPTRFLFILLGPSGRAKSYNEIGRAIATLMVDDLFSDVAYKARNREDLIAGIDEFLDEVIVLPPGEWDPNIRIEPPKKVPSADKRKSVFSLAELGQMNGSVGGGGGAPGGGNGGGGGGGSGGGAGSGGAGGTSSGDDGEMPAMHEIGEELIWTGRFFGGLCLDIKRKLPWFPSDFYDGFHIQSISAILFIYLGCITNAITFGGLLGDATDNYQGVMESFLGTAMAGSLFCLFSGQPLIILSSTGPILIFEKLLFDFSKGNGLDYMEFRLWIGLHSAVQCLILVATDASFIIKYITRFTEEGFSTLISFIFIYDAIKKMIGAFKYYPINMDFKPNFITTYKCECVAPDTVNTTVFNASAPLAPDTNASLYNLLNLTALDWSLLSKKECLSYGGRLLGNSCKFIPDLALMSFILFFGTYSMTLTLKKFKFSRYFPTKVRALVADFSIVFSILMFCGIDACFGLETPKLHVPSVIKPTRPDRGWFVAPFGKNPWWVYPASILPALLVTILIFMDQQITAVIVNRKENKLKKAAGYHLDLFWVGILMALCSFMGLPWYVAATVISIAHIDSLKMETETSAPGEQPQFLGVREQRVTGIIVFILTGISVFLAPILKCIPLPVLYGVFLYMGVASLNGIQFWERCKLFLMPAKHQPDHAFLRHVPLRRIHLFTLVQILCLAVLWILKSTVAAIIFPVMILGLIIVRRLLDFIFSQHDLAWIDNILPEKEKKETDKKRKRKKGAHEDCDEEPQFPPPSVIKIPMESVQSDPQNGIHCIARKRSSSWSYSL

SEQ ID NO: 81738 - protein, 1121 aa, Homo sapiens; identical to SEQ ID NO: 81737
  Payload ID: 16278
  Gene Symbol: SLC4A5
  Gene Name: solute carrier family 4 (sodium bicarbonate cotransporter), member 5
  Uniprot ID: Q9BY07
  ENSP ID: ENSP00000395804

SEQ ID NO: 81739 - protein, 129 aa, Homo sapiens
  Payload ID: 16278
  Gene Symbol: SLC4A5
  Gene Name: solute carrier family 4 (sodium bicarbonate cotransporter), member 5
  ENSP ID: ENSP00000399319
MKVKEEKAGVGKLDHTNHRRRFPDQKECPPIHIGLPVPTYPQRKTDQKGHLSGLQKVHWGLRPDQPQQELTGPGSGASSQDSSMDLISRTRSPAAEQLQDILGEEDEAPNPTLFTEMDTLQHDGDQMEW

SEQ ID NO: 81740 - protein, 963 aa, Homo sapiens
  Payload ID: 16278
  Gene Symbol: SLC4A5
  Gene Name: solute carrier family 4 (sodium bicarbonate cotransporter), member 5
  ENSP ID: ENSP00000405678
MKVKEEKAGVGKLDHTNHRRRFPDQKECPPIHIGLPVPTYPQRKTDQKGHLSGLQKVHWGLRPDQPQQELTGPGSGASSQDSSMDLISRTRSPAAEQLQDILGEEDEAPNPTLFTEMDTLQHDGDQMEWKESARWIKFEEKVEEGGERWSKPHVSTLSLHSLFELRTCLQTGTVLLDLDSGSLPQIIDDVIEKQIEDGLLRPELRERVSYVLLRRHRHQTKKPIHRSLADIGKSVSTTNRSPARSPGAGPSLHHSTEDLRMRQSANYGRLCHAQSRSMNDISLTPNTDQRKNKFMKKIPKDSEASNVLVGEVDFLDQPFIAFVRLIQSAMLGGVTEVPVPTRFLFILLGPSGRAKSYNEIGRAIATLMVDDLFSDVAYKARNREDLIAGIDEFLDEVIVLPPGEWDPNIRIEPPKKVPSADKRKSVFSLAELGQMNGSVGGGGGAPGGGNGGGGGGGSGGGAGSGGAGGTSSGDDGEMPAMHEIGEELIWTGRFFGGLCLDIKRKLPWFPSDFYDGFHIQSISAILFIYLGCITNAITFGGLLGDATDNYQGVMESFLGTAMAGSLFCLFSGQPLIILSSTGPILIFEKLLFDFSKGNGLDYMEFRLWIGLHSAVQCLILVATDASFIIKYITRFTEEGFSTLISFIFIYDAIKKMIGAFKYYPINMDFKPNFITTYKCECVAPDTVNTTVFNASAPLAPDTNASLYNLLNLTALDWSLLSKKECLSYGGRLLGNSCKFIPDLALMSFILFFGTYSMTLTLKKFKFSRYFPTKPTRPDRGWFVAPFGKNPWWVYPASILPALLVTILIFMDQQITAVIVNRKENKLKGTESNRHHRLHPDGNLCLPGSHPKVYPPAGAVRSLPLHGRGLPEWHPVLGTLQALPDASQAPAGPCLPAARAAAPDPPLHPGADPLPGGALDPQIHGGCHHLPGHVSLHHRSWASSSFEGFWISSFPSTTWPGLTT

SEQ ID NO: 81741 - protein, 144 aa, Homo sapiens
  Payload ID: 16278
  Gene Symbol: SLC4A5
  Gene Name: solute carrier family 4 (sodium bicarbonate cotransporter), member 5
  ENSP ID: ENSP00000407550
MKVKEEKAGVGKLDHTNHRRRFPDQKECPPIHIGLPVPTYPQRKTDQKGHLSGLQKVHWGLRPDQPQQELTGPGSGASSQDSSMDLISRTRSPAAEQLQDILGEEDEAPNPTLFTEMDTLQHDGDQMEWKESARWIKFEEKVEE

SEQ ID NO: 81742 - protein, 122 aa, Homo sapiens
  Payload ID: 16278
  Gene Symbol: SLC4A5
  Gene Name: solute carrier family 4 (sodium bicarbonate cotransporter), member 5
  ENSP ID: ENSP00000414162
MDTLQHDGDQMEWKESARWIKFEEKVEEGGERWSKPHVSTLSLHSLFELRTCLQTGTVLLDLDSGSLPQIIDDVIEKQIEDGLLRPELRERVSYVLLRRHRHQTKKPIHRSLADIGKSVSTT

SEQ ID NO: 81743 - protein, 1214 aa, Homo sapiens
  Payload ID: 16279
  Gene Symbol: SLC4A7
  Gene Name: solute carrier family 4, sodium bicarbonate cotransporter, member 7
  Uniprot ID: Q9Y6M7
  ENSP ID: ENSP00000295736
MERFRLEKKLPGPDEEAVVDLGKTSSTVNTKFEKEELESHRAVYIGVHVPFSKESRRRHRHRGHKHHHRRRKDKESDKEDGRESPSYDTPSQRVQFILGTEDDDEEHIPHDLFTEMDELCYRDGEEYEWKETARWLKFEEDVEDGGDRWSKPYVATLSLHSLFELRSCILNGTVMLDMRASTLDEIADMVLDNMIASGQLDESIRENVREALLKRHHHQNEKRFTSRIPLVRSFADIGKKHSDPHLLERNGEGLSASRHSLRTGLSASNLSLRGESPLSLLLGHLLPSSRAGTPAGSRCTTPVPTPQNSPPSSPSISRLTSRSSQESQRQAPELLVSPASDDIPTVVIHPPEEDLEAALKGEEQKNEENVDLTPGILASPQSAPGNLDNSKSGEIKGNGSGGSRENSTVDFSKVDMNFMRKIPTGAEASNVLVGEVDFLERPIIAFVRLAPAVLLTGLTEVPVPTRFLFLLLGPAGKAPQYHEIGRSIATLMTDEIFHDVAYKAKDRNDLLSGIDEFLDQVTVLPPGEWDPSIRIEPPKSVPSQEKRKIPVFHNGSTPTLGETPKEAAHHAGPELQRTGRLFGGLILDIKRKAPFFLSDFKDALSLQCLASILFLYCACMSPVITFGGLLGEATEGRISAIESLFGASLTGIAYSLFAGQPLTILGSTGPVLVFEKILYKFCRDYQLSYLSLRTSIGLWTSFLCIVLVATDASSLVCYITRFTEEAFAALICIIFIYEALEKLFDLGETYAFNMHNNLDKLTSYSCVCTEPPNPSNETLAQWKKDNITAHNISWRNLTVSECKKLRGVFLGSACGHHGPYIPDVLFWCVILFFTTFFLSSFLKQFKTKRYFPTKVRSTISDFAVFLTIVIMVTIDYLVGVPSPKLHVPEKFEPTHPERGWIISPLGDNPWWTLLIAAIPALLCTILIFMDQQITAVIINRKEHKLKKGAGYHLDLLMVGVMLGVCSVMGLPWFVAATVLSISHVNSLKVESECSAPGEQPKFLGIREQRVTGLMIFILMGLSVFMTSVLKFIPMPVLYGVFLYMGVSSLKGIQLFDRIKLFGMPAKHQPDLIYLRYVPLWKVHIFTVIQLTCLVLLWVIKVSAAAVVFPMMVLALVFVRKLMDLCFTKRELSWLDDLMPESKKKKEDDKKKKEKEEAERMLQDDDDTVHLPFEGGSLLQIPVKALKYSPDKPVSVKISFEDEPRKKYVDAETSL

SEQ ID NO: 81744 - protein, 1051 aa, Homo sapiens
  Payload ID: 16279
  Gene Symbol: SLC4A7
  Gene Name: solute carrier family 4, sodium bicarbonate cotransporter, member 7
  ENSP ID: ENSP00000388703
MERFRLEKKLPGPDEEAVVDLGKTSSTVNTKFEKEELESHRAVYIGVHVPFSKESRRRHRHRGHKHHHRRRKDKESDKEDGRESPSYDTPSQRVQFILGTEDDDEEHIPHDLFTEMDELCYRDGEEYEWKETARWLKFEEDVEDGGDRWSKPYVATLSLHSLFELRSCILNGTVMLDMRASTLDEIADMVLDNMIASGQLDESIRENVREALLKRHHHQNEKRFTSRIPLVRSFADIGKKHSDPHLLERNGILASPQSAPGNLDNSKSGEIKGNGSGGSRENSTVDFSKESASWHCSCGTLGVGLKRPAVDMNFMRKIPTGAEASNVLVGEVDFLERPIIAFVRLAPAVLLTGLTEVPVPTRFLFLLLGPAGKAPQYHEIGRSIATLMTDEIFHDVAYKAKDRNDLLSGIDEFLDQVTVLPPGEWDPSIRIEPPKSVPSQEKRKIPVFHNGSTPTLGETPKEAAHHAGPELQRTGRLFGGLILDIKRKAPFFLSDFKDALSLQCLASILFLYCACMSPVITFGGLLGEATEGRISAIESLFGASLTGIAYSLFAGQPLTILGSTGPVLVFEKILYKFCRDYQLSYLSLRTSIGLWTSFLCIVLVATDASSLVCYITRFTEEAFAALICIIFIYEALEKLFDLGETYAFNMHNNLDKLTSYSCVCTEPPNPSNETLAQWKKDNITAHNISWRNLTVSECKKLRGVFLGSACGHHGPYIPDVLFWCVILFFTTFFLSSFLKQFKTKRYFPTKVRSTISDFAVFLTIVIMVTIDYLVGVPSPKLHVPEKFEPTHPERGWIISPLGDNPWWTLLIAAIPALLCTILIFMDQQITAVIINRKEHKLKKGAGYHLDLLMVGVMLGVCSVMGLPWFVAATVLSISHVNSLKVESECSAPGEQPKFLGIREQRVTGLMIFILMGLSVFMTSVLKFIPMPVLYGVFLYMGVSSLKGIQLFDRIKLFGMPAKHQPDLIYLRYVPLWKVHIFTVIQLTCLVLLWVIKVSAAAVVFPMMVLALVFVRKLMDLCFTKRELSWLDDLMPESKKKKEDDKKKKEKE

SEQ ID NO: 81745 - protein, 1259 aa, Homo sapiens
  Payload ID: 16279
  Gene Symbol: SLC4A7
  Gene Name: solute carrier family 4, sodium bicarbonate cotransporter, member 7
  Uniprot ID: Q9Y6M7
  ENSP ID: ENSP00000390394
MEADGAGEQMRPLLTRVTSRGPDEEAVVDLGKTSSTVNTKFEKEELESHRAVYIGVHVPFSKESRRRHRHRGHKHHHRRRKDKESDKEDGRESPSYDTPSQRVQFILGTEDDDEEHIPHDLFTEMDELCYRDGEEYEWKETARWLKFEEDVEDGGDRWSKPYVATLSLHSLFELRSCILNGTVMLDMRASTLDEIADMVLDNMIASGQLDESIRENVREALLKRHHHQNEKRFTSRIPLVRSFADIGKKHSDPHLLERNGEGLSASRHSLRTGLSASNLSLRGESPLSLLLGHLLPSSRAGTPAGSRCTTPVPTPQNSPPSSPSISRLTSRSSQESQRQAPELLVSPASDDIPTVVIHPPEEDLEAALKGEEQKNEENVDLTPGILASPQSAPGNLDNSKSGEIKGNGSGGSRENSTVDFSKVDMNFMRKIPTGAEASNVLVGEVDFLERPIIAFVRLAPAVLLTGLTEVPVPTRFLFLLLGPAGKAPQYHEIGRSIATLMTDEIFHDVAYKAKDRNDLLSGIDEFLDQVTVLPPGEWDPSIRIEPPKSVPSQEKRKIPVFHNGSTPTLGETPKEAAHHAGPELQRTGRLFGGLILDIKRKAPFFLSDFKDALSLQCLASILFLYCACMSPVITFGGLLGEATEGRISAIESLFGASLTGIAYSLFAGQPLTILGSTGPVLVFEKILYKFCRDYQLSYLSLRTSIGLWTSFLCIVLVATDASSLVCYITRFTEEAFAALICIIFIYEALEKLFDLGETYAFNMHNNLDKLTSYSCVCTEPPNPSNETLAQWKKDNITAHNISWRNLTVSECKKLRGVFLGSACGHHGPYIPDVLFWCVILFFTTFFLSSFLKQFKTKRYFPTKVRSTISDFAVFLTIVIMVTIDYLVGVPSPKLHVPEKFEPTHPERGWIISPLGDNPWWTLLIAAIPALLCTILIFMDQQITAVIINRKEHKLKKGAGYHLDLLMVGVMLGVCSVMGLPWFVAATVLSISHVNSLKVESECSAPGEQPKFLGIREQRVTGLMIFILMGLSVFMTSVLKFIPMPVLYGVFLYMGVSSLKGIQLFDRIKLFGMPAKHQPDLIYLRYVPLWKVHIFTVIQLTCLVLLWVIKVSAAAVVFPMMVLALVFVRKLMDLCFTKRELSWLDDLMPESKKKKEDDKKKKEKEEAERMLQDDDDTVHLPFEGGSLLQIPVKALKYSVDPSIVNISDEMAKTAQWKALSMNTENAKVTRSNMSPDKPVSVKISFEDEPRKKYVDAETSL

SEQ ID NO: 81746 - protein, 1095 aa, Homo sapiens
  Payload ID: 16279
  Gene Symbol: SLC4A7
  Gene Name: solute carrier family 4, sodium bicarbonate cotransporter, member 7
  Uniprot ID: Q9Y6M7
  ENSP ID: ENSP00000394252
MEADGAGEQMRPLLTRGPDEEAVVDLGKTSSTVNTKFEKEELESHRAVYIGVHVPFSKESRRRHRHRGHKHHHRRRKDKESDKEDGRESPSYDTPSQRVQFILGTEDDDEEHIPHDLFTEMDELCYRDGEEYEWKETARWLKFEEDVEDGGDRWSKPYVATLSLHSLFELRSCILNGTVMLDMRASTLDEIADMVLDNMIASGQLDESIRENVREALLKRHHHQNEKRFTSRIPLVRSFADIGKKHSDPHLLERNGILASPQSAPGNLDNSKSGEIKGNGSGGSRENSTVDFSKVDMNFMRKIPTGAEASNVLVGEVDFLERPIIAFVRLAPAVLLTGLTEVPVPTRFLFLLLGPAGKAPQYHEIGRSIATLMTDEIFHDVAYKAKDRNDLLSGIDEFLDQVTVLPPGEWDPSIRIEPPKSVPSQEKRKIPVFHNGSTPTLGETPKEAAHHAGPELQRTGRLFGGLILDIKRKAPFFLSDFKDALSLQCLASILFLYCACMSPVITFGGLLGEATEGRISAIESLFGASLTGIAYSLFAGQPLTILGSTGPVLVFEKILYKFCRDYQLSYLSLRTSIGLWTSFLCIVLVATDASSLVCYITRFTEEAFAALICIIFIYEALEKLFDLGETYAFNMHNNLDKLTSYSCVCTEPPNPSNETLAQWKKDNITAHNISWRNLTVSECKKLRGVFLGSACGHHGPYIPDVLFWCVILFFTTFFLSSFLKQFKTKRYFPTKVRSTISDFAVFLTIVIMVTIDYLVGVPSPKLHVPEKFEPTHPERGWIISPLGDNPWWTLLIAAIPALLCTILIFMDQQITAVIINRKEHKLKKGAGYHLDLLMVGVMLGVCSVMGLPWFVAATVLSISHVNSLKVESECSAPGEQPKFLGIREQRVTGLMIFILMGLSVFMTSVLKFIPMPVLYGVFLYMGVSSLKGIQLFDRIKLFGMPAKHQPDLIYLRYVPLWKVHIFTVIQLTCLVLLWVIKVSAAAVVFPMMVLALVFVRKLMDLCFTKRELSWLDDLMPESKKKKEDDKKKKEKEEAERMLQDDDDTVHLPFEGGSLLQIPVKALKYSPDKPVSVKISFEDEPRKKYVDAETSL

SEQ ID NO: 81747 - protein, 1201 aa, Homo sapiens [sequence omitted]

SEQ ID NO: 81748 - protein, 1206 aa, Homo sapiens
  Payload ID: 16279
  Gene Symbol: SLC4A7
  Gene Name: solute carrier family 4, sodium bicarbonate cotransporter, member 7
  Uniprot ID: Q9Y6M7
  ENSP ID: ENSP00000406605
MEADGAGEQMRPLLTRGPDEEAVVDLGKTSSTVNTKFEKEELESHRAVYIGVHVPFSKESRRRHRHRGHKHHHRRRKDKESDKEDGRESPSYDTPSQRVQFILGTEDDDEEHIPHDLFTEMDELCYRDGEEYEWKETARWLKFEEDVEDGGDRWSKPYVATLSLHSLFELRSCILNGTVMLDMRASTLDEIADMVLDNMIASGQLDESIRENVREALLKRHHHQNEKRFTSRIPLVRSFADIGEGLSASRHSLRTGLSASNLSLRGESPLSLLLGHLLPSSRAGTPAGSRCTTPVPTPQNSPPSSPSISRLTSRSSQESQRQAPELLVSPASDDIPTVVIHPPEEDLEAALKGEEQKNEENVDLTPGILASPQSAPGNLDNSKSGEIKGNGSGGSRENSTVDFSKVDMNFMRKIPTGAEASNVLVGEVDFLERPIIAFVRLAPAVLLTGLTEVPVPTRFLFLLLGPAGKAPQYHEIGRSIATLMTDEIFHDVAYKAKDRNDLLSGIDEFLDQVTVLPPGEWDPSIRIEPPKSVPSQEKRKIPVFHNGSTPTLGETPKEAAHHAGPELQRTGRLFGGLILDIKRKAPFFLSDFKDALSLQCLASILFLYCACMSPVITFGGLLGEATEGRISAIESLFGASLTGIAYSLFAGQPLTILGSTGPVLVFEKILYKFCRDYQLSYLSLRTSIGLWTSFLCIVLVATDASSLVCYITRFTEEAFAALICIIFIYEALEKLFDLGETYAFNMHNNLDKLTSYSCVCTEPPNPSNETLAQWKKDNITAHNISWRNLTVSECKKLRGVFLGSACGHHGPYIPDVLFWCVILFFTTFFLSSFLKQFKTKRYFPTKVRSTISDFAVFLTIVIMVTIDYLVGVPSPKLHVPEKFEPTHPERGWIISPLGDNPWWTLLIAAIPALLCTILIFMDQQITAVIINRKEHKLKKGAGYHLDLLMVGVMLGVCSVMGLPWFVAATVLSISHVNSLKVESECSAPGEQPKFLGIREQRVTGLMIFILMGLSVFMTSVLKFIPMPVLYGVFLYMGVSSLKGIQLFDRIKLFGMPAKHQPDLIYLRYVPLWKVHIFTVIQLTCLVLLWVIKVSAAAVVFPMMVLALVFVRKLMDLCFTKRELSWLDDLMPESKKKKEDDKKKKEKEEAERMLQDDDDTVHLPFEGGSLLQIPVKALKYSPDKPVSVKISFEDEPRKKYVDAETSL

SEQ ID NO: 81749 - protein, 1210 aa, Homo sapiens
  Payload ID: 16279
  Gene Symbol: SLC4A7
  Gene Name: solute carrier family 4, sodium bicarbonate cotransporter, member 7
  ENSP ID: ENSP00000406804
MEADGAGEQMRPLLTRVTSRGPDEEAVVDLGKTSSTVNTKFEKEELESHRAVYIGVHVPFSKESRRRHRHRGHKHHHRRRKDKESDKEDGRESPSYDTPSQRVQFILGTEDDDEEHIPHDLFTEMDELCYRDGEEYEWKETARWLKFEEDVEDGGDRWSKPYVATLSLHSLFELRSCILNGTVMLDMRASTLDEIADMVLDNMIASGQLDESIRENVREALLKRHHHQNEKRFTSRIPLVRSFADIGEGLSASRHSLRTGLSASNLSLRGESPLSLLLGHLLPSSRAGTPAGSRCTTPVPTPQNSPPSSPSISRLTSRSSQESQRQAPELLVSPASDDIPTVVIHPPEEDLEAALKGEEQKNEENVDLTPGILASPQSAPGNLDNSKSGEIKGNGSGGSRENSTVDFSKVDMNFMRKIPTGAEASNVLVGEVDFLERPIIAFVRLAPAVLLTGLTEVPVPTRFLFLLLGPAGKAPQYHEIGRSIATLMTDEIFHDVAYKAKDRNDLLSGIDEFLDQVTVLPPGEWDPSIRIEPPKSVPSQEKRKIPVFHNGSTPTLGETPKEAAHHAGPELQRTGRLFGGLILDIKRKAPFFLSDFKDALSLQCLASILFLYCACMSPVITFGGLLGEATEGRISAIESLFGASLTGIAYSLFAGQPLTILGSTGPVLVFEKILYKFCRDYQLSYLSLRTSIGLWTSFLCIVLVATDASSLVCYITRFTEEAFAALICIIFIYEALEKLFDLGETYAFNMHNNLDKLTSYSCVCTEPPNPSNETLAQWKKDNITAHNISWRNLTVSECKKLRGVFLGSACGHHGPYIPDVLFWCVILFFTTFFLSSFLKQFKTKRYFPTKVRSTISDFAVFLTIVIMVTIDYLVGVPSPKLHVPEKFEPTHPERGWIISPLGDNPWWTLLIAAIPALLCTILIFMDQQITAVIINRKEHKLKKGAGYHLDLLMVGVMLGVCSVMGLPWFVAATVLSISHVNSLKVESECSAPGEQPKFLGIREQRVTGLMIFILMGLSVFMTSVLKFIPMPVLYGVFLYMGVSSLKGIQLFDRIKLFGMPAKHQPDLIYLRYVPLWKVHIFTVIQLTCLVLLWVIKVSAAAVVFPMMVLALVFVRKLMDLCFTKRELSWLDDLMPESKKKKEDDKKKKEKEEAERMLQDDDDTVHLPFEGGSLLQIPVKALKYSPDKPVSVKISFEDEPRKKYVDAETSL

SEQ ID NO: 81750 - protein, 574 aa, Homo sapiens
  Payload ID: 16279
  Gene Symbol: SLC4A7
  Gene Name: solute carrier family 4, sodium bicarbonate cotransporter, member 7
  Uniprot ID: Q9Y6M7
  ENSP ID: ENSP00000407304
MEADGAGEQMRPLLTRGPDEEAVVDLGKTSSTVNTKFEKEELESHRAVYIGVHVPFSKESRRRHRHRGHKHHHRRRKDKESDKEDGRESPSYDTPSQRVQFILGTEDDDEEHIPHDLFTEMDELCYRDGEEYEWKETARWLKFEEDVEDGGDRWSKPYVATLSLHSLFELRSCILNGTVMLDMRASTLDEIADMVLDNMIASGQLDESIRENVREALLKRHHHQNEKRFTSRIPLVRSFADIGEGLSASRHSLRTGLSASNLSLRGESPLSLLLGHLLPSSRAGTPAGSRCTTPVPTPQNSPPSSPSISRLTSRSSQESQRQAPELLVSPASDDIPTVVIHPPEEDLEAALKGEEQKNEENVDLTPGILASPQSAPGNLDNSKSGEIKGNGSGGSRENSTVDFSKVDMNFMRKIPTGAEASNVLVGEVDFLERPIIAFVRLAPAVLLTGLTEVPVPTRFLFLLLGPAGKAPQYHEIGRSIATLMTDEIFHDVAYKAKDRNDLLSGIDEFLDQVTVLPPGEWDPSIRIEPPKSVPSQEKRKIPVFHNGSTPTLGETPKEAAHHAGPELQRTGRVQ

SEQ ID NO: 81751 - protein, 1131 aa, Homo sapiens
  Payload ID: 16279
  Gene Symbol: SLC4A7
  Gene Name: solute carrier family 4, sodium bicarbonate cotransporter, member 7
  Uniprot ID: Q9Y6M7
  ENSP ID: ENSP00000407382
MEADGAGEQMRPLLTRGPDEEAVVDLGKTSSTVNTKFEKEELESHRAVYIGVHVPFSKESRRRHRHRGHKHHHRRRKDKESDKEDGRESPSYDTPSQRVQFILGTEDDDEEHIPHDLFTEMDELCYRDGEEYEWKETARWLKFEEDVEDGGDRWSKPYVATLSLHSLFELRSCILNGTVMLDMRASTLDEIADMVLDNMIASGQLDESIRENVREALLKRHHHQNEKRFTSRIPLVRSFADIGKKHSDPHLLERNGILASPQSAPGNLDNSKSGEIKGNGSGGSRENSTVDFSKVDMNFMRKIPTGAEASNVLVGEVDFLERPIIAFVRLAPAVLLTGLTEVPVPTRFLFLLLGPAGKAPQYHEIGRSIATLMTDEIFHDVAYKAKDRNDLLSGIDEFLDQVTVLPPGEWDPSIRIEPPKSVPSQEKRKIPVFHNGSTPTLGETPKEAAHHAGPELQRTGRLFGGLILDIKRKAPFFLSDFKDALSLQCLASILFLYCACMSPVITFGGLLGEATEGRISAIESLFGASLTGIAYSLFAGQPLTILGSTGPVLVFEKILYKFCRDYQLSYLSLRTSIGLWTSFLCIVLVATDASSLVCYITRFTEEAFAALICIIFIYEALEKLFDLGETYAFNMHNNLDKLTSYSCVCTEPPNPSNETLAQWKKDNITAHNISWRNLTVSECKKLRGVFLGSACGHHGPYIPDVLFWCVILFFTTFFLSSFLKQFKTKRYFPTKVRSTISDFAVFLTIVIMVTIDYLVGVPSPKLHVPEKFEPTHPERGWIISPLGDNPWWTLLIAAIPALLCTILIFMDQQITAVIINRKEHKLKKGAGYHLDLLMVGVMLGVCSVMGLPWFVAATVLSISHVNSLKVESECSAPGEQPKFLGIREQRVTGLMIFILMGLSVFMTSVLKFIPMPVLYGVFLYMGVSSLKGIQLFDRIKLFGMPAKHQPDLIYLRYVPLWKVHIFTVIQLTCLVLLWVIKVSAAAVVFPMMVLALVFVRKLMDLCFTKRELSWLDDLMPESKKKKEDDKKKKEKEEAERMLQDDDDTVHLPFEGGSLLQIPVKALKYSVDPSIVNISDEMAKTAQWKALSMNTENAKVTRSNMSPDKPVSVKISFEDEPRKKYVDAETSL

SEQ ID NO: 81752 - protein, 463 aa, Homo sapiens
  Payload ID: 16279
  Gene Symbol: SLC4A7
  Gene Name: solute carrier family 4, sodium bicarbonate cotransporter, member 7
  Uniprot ID: Q9Y6M7
  ENSP ID: ENSP00000408323
MEADGAGEQMRPLLTRGPDEEAVVDLGKTSSTVNTKFEKEELESHRAVYIGVHVPFSKESRRRHRHRGHKHHHRRRKDKESDKEDGRESPSYDTPSQRVQFILGTEDDDEEHIPHDLFTEMDELCYRDGEEYEWKETARWLKFEEDVEDGGDRWSKPYVATLSLHSLFELRSCILNGTVMLDMRASTLDEIADMVLDNMIASGQLDESIRENVREALLKRHHHQNEKRFTSRIPLVRSFADIGKKHSDPHLLERNGILASPQSAPGNLDNSKSGEIKGNGSGGSRENSTVDFSKVDMNFMRKIPTGAEASNVLVGEVDFLERPIIAFVRLAPAVLLTGLTEVPVPTRFLFLLLGPAGKAPQYHEIGRSIATLMTDEIFHDVAYKAKDRNDLLSGIDEFLDQVTVLPPGEWDPSIRIEPPKSVPSQEKRKIPVFHNGSTPTLGETPKEAAHHAGPELQRTGRVQ

SEQ ID NO: 81753 - protein, 463 aa, Homo sapiens; identical to SEQ ID NO: 81752
  Payload ID: 16279
  Gene Symbol: SLC4A7
  Gene Name: solute carrier family 4, sodium bicarbonate cotransporter, member 7
  Uniprot ID: Q9Y6M7
  ENSP ID: ENSP00000409418

SEQ ID NO: 81754 - protein, 801 aa, Homo sapiens
  Payload ID: 16279
  Gene Symbol: SLC4A7
  Gene Name: solute carrier family 4, sodium bicarbonate cotransporter, member 7
  ENSP ID: ENSP00000411031
VMEVVEAEKIVLLTSARFLFLLLGPAGKAPQYHEIGRSIATLMTDEIFHDVAYKAKDRNDLLSGIDEFLDQVTVLPPGEWDPSIRIEPPKSVPSQEKRKIPVFHNGSTPTLGETPKEAAHHAGPELQRTGRLFGGLILDIKRKAPFFLSDFKDALSLQCLASILFLYCACMSPVITFGGLLGEATEGRISAIESLFGASLTGIAYSLFAGQPLTILGSTGPVLVFEKILYKFCRDYQLSYLSLRTSIGLWTSFLCIVLVATDASSLVCYITRFTEEAFAALICIIFIYEALEKLFDLGETYAFNMHNNLDKLTSYSCVCTEPPNPSNETLAQWKKDNITAHNISWRNLTVSECKKLRGVFLGSACGHHGPYIPDVLFWCVILFFTTFFLSSFLKQFKTKRYFPTKVRSTISDFAVFLTIVIMVTIDYLVGVPSPKLHVPEKFEPTHPERGWIISPLGDNPWWTLLIAAIPALLCTILIFMDQQITAVIINRKEHKLKKGAGYHLDLLMVGVMLGVCSVMGLPWFVAATVLSISHVNSLKVESECSAPGEQPKFLGIREQRVTGLMIFILMGLSVFMTSVLKFIPMPVLYGVFLYMGVSSLKGIQLFDRIKLFGMPAKHQPDLIYLRYVPLWKVHIFTVIQLTCLVLLWVIKVSAAAVVFPMMVLALVFVRKLMDLCFTKRELSWLDDLMPESKKKKEDDKKKKEKEEAERMLQDDDDTVHLPFEGGSLLQIPVKALKYSVDPSIVNISDEMAKTAQWKALSMNTENAKVTRSNMSPDKPVSVKISFEDEPRKKYVDAETSL

SEQ ID NO: 81755 - protein, 1246 aa, Homo sapiens
  Payload ID: 16279
  Gene Symbol: SLC4A7
  Gene Name: solute carrier family 4, sodium bicarbonate cotransporter, member 7
  Uniprot ID: Q9Y6M7
  ENSP ID: ENSP00000414797
MEADGAGEQMRPLLTRVTSRGPDEEAVVDLGKTSSTVNTKFEKEELESHRAVYIGVHVPFSKESRRRHRHRGHKHHHRRRKDKESDKEDGRESPSYDTPSQRVQFILGTEDDDEEHIPHDLFTEMDELCYRDGEEYEWKETARWLKFEEDVEDGGDRWSKPYVATLSLHSLFELRSCILNGTVMLDMRASTLDEIADMVLDNMIASGQLDESIRENVREALLKRHHHQNEKRFTSRIPLVRSFADIGEGLSASRHSLRTGLSASNLSLRGESPLSLLLGHLLPSSRAGTPAGSRCTTPVPTPQNSPPSSPSISRLTSRSSQESQRQAPELLVSPASDDIPTVVIHPPEEDLEAALKGEEQKNEENVDLTPGILASPQSAPGNLDNSKSGEIKGNGSGGSRENSTVDFSKVDMNFMRKIPTGAEASNVLVGEVDFLERPIIAFVRLAPAVLLTGLTEVPVPTRFLFLLLGPAGKAPQYHEIGRSIATLMTDEIFHDVAYKAKDRNDLLSGIDEFLDQVTVLPPGEWDPSIRIEPPKSVPSQEKRKIPVFHNGSTPTLGETPKEAAHHAGPELQRTGRLFGGLILDIKRKAPFFLSDFKDALSLQCLASILFLYCACMSPVITFGGLLGEATEGRISAIESLFGASLTGIAYSLFAGQPLTILGSTGPVLVFEKILYKFCRDYQLSYLSLRTSIGLWTSFLCIVLVATDASSLVCYITRFTEEAFAALICIIFIYEALEKLFDLGETYAFNMHNNLDKLTSYSCVCTEPPNPSNETLAQWKKDNITAHNISWRNLTVSECKKLRGVFLGSACGHHGPYIPDVLFWCVILFFTTFFLSSFLKQFKTKRYFPTKVRSTISDFAVFLTIVIMVTIDYLVGVPSPKLHVPEKFEPTHPERGWIISPLGDNPWWTLLIAAIPALLCTILIFMDQQITAVIINRKEHKLKKGAGYHLDLLMVGVMLGVCSVMGLPWFVAATVLSISHVNSLKVESECSAPGEQPKFLGIREQRVTGLMIFILMGLSVFMTSVLKFIPMPVLYGVFLYMGVSSLKGIQLFDRIKLFGMPAKHQPDLIYLRYVPLWKVHIFTVIQLTCLVLLWVIKVSAAAVVFPMMVLALVFVRKLMDLCFTKRELSWLDDLMPESKKKKEDDKKKKEKEEAERMLQDDDDTVHLPFEGGSLLQIPVKALKYSVDPSIVNISDEMAKTAQWKALSMNTENAKVTRSNMSPDKPVSVKISFEDEPRKKYVDAETSL

SEQ ID NO: 81756 - protein, 1090 aa, Homo sapiens
  Payload ID: 16279
  Gene Symbol: SLC4A7
  Gene Name: solute carrier family 4, sodium bicarbonate cotransporter, member 7
  Uniprot ID: Q9Y6M7
  ENSP ID: ENSP00000416368
MERFRLEKKLPGPDEEAVVDLGKTSSTVNTKFEKEELESHRAVYIGVHVPFSKESRRRHRHRGHKHHHRRRKDKESDKEDGRESPSYDTPSQRVQFILGTEDDDEEHIPHDLFTEMDELCYRDGEEYEWKETARWLKFEEDVEDGGDRWSKPYVATLSLHSLFELRSCILNGTVMLDMRASTLDEIADMVLDNMIASGQLDESIRENVREALLKRHHHQNEKRFTSRIPLVRSFADIGKKHSDPHLLERNGILASPQSAPGNLDNSKSGEIKGNGSGGSRENSTVDFSKVDMNFMRKIPTGAEASNVLVGEVDFLERPIIAFVRLAPAVLLTGLTEVPVPTRFLFLLLGPAGKAPQYHEIGRSIATLMTDEIFHDVAYKAKDRNDLLSGIDEFLDQVTVLPPGEWDPSIRIEPPKSVPSQEKRKIPVFHNGSTPTLGETPKEAAHHAGPELQRTGRLFGGLILDIKRKAPFFLSDFKDALSLQCLASILFLYCACMSPVITFGGLLGEATEGRISAIESLFGASLTGIAYSLFAGQPLTILGSTGPVLVFEKILYKFCRDYQLSYLSLRTSIGLWTSFLCIVLVATDASSLVCYITRFTEEAFAALICIIFIYEALEKLFDLGETYAFNMHNNLDKLTSYSCVCTEPPNPSNETLAQWKKDNITAHNISWRNLTVSECKKLRGVFLGSACGHHGPYIPDVLFWCVILFFTTFFLSSFLKQFKTKRYFPTKVRSTISDFAVFLTIVIMVTIDYLVGVPSPKLHVPEKFEPTHPERGWIISPLGDNPWWTLLIAAIPALLCTILIFMDQQITAVIINRKEHKLKKGAGYHLDLLMVGVMLGVCSVMGLPWFVAATVLSISHVNSLKVESECSAPGEQPKFLGIREQRVTGLMIFILMGLSVFMTSVLKFIPMPVLYGVFLYMGVSSLKGIQLFDRIKLFGMPAKHQPDLIYLRYVPLWKVHIFTVIQLTCLVLLWVIKVSAAAVVFPMMVLALVFVRKLMDLCFTKRELSWLDDLMPESKKKKEDDKKKKEKEEAERMLQDDDDTVHLPFEGGSLLQIPVKALKYSPDKPVSVKISFEDEPRKKYVDAETSL

SEQ ID NO: 81757 - protein, 1040 aa, Homo sapiens
  Payload ID: 16280
  Gene Symbol: SLC4A8
  Gene Name: solute carrier family 4, sodium bicarbonate cotransporter, member 8
  Uniprot ID: Q2Y0W8
  ENSP ID: ENSP00000351483
MPLGRQSHRHHRTHGQKHRRRGRGKGASQGEEGLEALAHDTPSQRVQFILGTEEDEEHVPHELFTELDEICMKEGEDAEWKETARWLKFEEDVEDGGERWSKPYVATLSLHSLFELRSCLINGTVLLDMHANSIEEISDLILDQQELSSDLNDSMRVKVREALLKKHHHQNEKKRNNLIPIVRSFAEVGKKQSDPHLMDKHGQTVSPQSVPTTNLEVKNGVNCEHSPVDLSKVDLHFMKKIPTGAEASNVLVGEVDILDRPIVAFVRLSPAVLLSGLTEVPIPTRFLFILLGPVGKGQQYHEIGRSMATIMTDEIFHDVAYKAKERDDLLAGIDEFLDQVTVLPPGEWDPSIRIEPPKNVPSQEKRKMPGVPNGNVCHIEQEPHGGHSGPELQRTGRLFGGLVLDIKRKAPWYWSDYRDALSLQCLASFLFLYCACMSPVITFGGLLGEATEGRISAIESLFGASMTGIAYSLFAGQALTILGSTGPVLVFEKILFKFCKDYALSYLSLRACIGLWTAFLCIVLVATDASSLVCYITRFTEEAFASLICIIFIYEAIEKLIHLAETYPIHMHSQLDHLSLYYCRCTLPENPNNHTLQYWKDHNIVTAEVHWANLTVSECQEMHGEFMGSACGHHGPYTPDVLFWSCILFFTTFILSSTLKTFKTSRYFPTRVRSMVSDFAVFLTIFTMVIIDFLIGVPSPKLQVPSVFKPTRDDRGWIINPIGPNPWWTVIAAIIPALLCTILIFMDQQITAVIINRKEHKLKKGCGYHLDLLMVAIMLGVCSIMGLPWFVAATVLSITHVNSLKLESECSAPGEQPKFLGIREQRVTGLMIFVLMGCSVFMTAILKFIPMPVLYGVFLYMGVSSLQGIQFFDRLKLFGMPAKHQPDFIYLRHVPLRKVHLFTLIQLTCLVLLWVIKASPAAIVFPMMVLALVFVRKVMDLCFSKRELSWLDDLMPESKKKKLDDAKKKAKEEEEAEKMLEIGGDKFPLESRKLLSSPGKNISCRCDPSEINISDEMPKTTVWKALSMNSGNAKEKSLFN

SEQ ID NO: 81758 - protein, 1093 aa, Homo sapiens
  Payload ID: 16280
  Gene Symbol: SLC4A8
  Gene Name: solute carrier family 4, sodium bicarbonate cotransporter, member 8
  Uniprot ID: Q2Y0W8
  ENSP ID: ENSP00000405812
MPAAGSNEPDGVLSYQRPDEEAVVDQGGTSTILNIHYEKEELEGHRTLYVGVRMPLGRQSHRHHRTHGQKHRRRGRGKGASQGEEGLEALAHDTPSQRVQFILGTEEDEEHVPHELFTELDEICMKEGEDAEWKETARWLKFEEDVEDGGERWSKPYVATLSLHSLFELRSCLINGTVLLDMHANSIEEISDLILDQQELSSDLNDSMRVKVREALLKKHHHQNEKKRNNLIPIVRSFAEVGKKQSDPHLMDKHGQTVSPQSVPTTNLEVKNGVNCEHSPVDLSKVDLHFMKKIPTGAEASNVLVGEVDILDRPIVAFVRLSPAVLLSGLTEVPIPTRFLFILLGPVGKGQQYHEIGRSMATIMTDEIFHDVAYKAKERDDLLAGIDEFLDQVTVLPPGEWDPSIRIEPPKNVPSQEKRKMPGVPNGNVCHIEQEPHGGHSGPELQRTGRLFGGLVLDIKRKAPWYWSDYRDALSLQCLASFLFLYCACMSPVITFGGLLGEATEGRISAIESLFGASMTGIAYSLFAGQALTILGSTGPVLVFEKILFKFCKDYALSYLSLRACIGLWTAFLCIVLVATDASSLVCYITRFTEEAFASLICIIFIYEAIEKLIHLAETYPIHMHSQLDHLSLYYCRCTLPENPNNHTLQYWKDHNIVTAEVHWANLTVSECQEMHGEFMGSACGHHGPYTPDVLFWSCILFFTTFILSSTLKTFKTSRYFPTRVRSMVSDFAVFLTIFTMVIIDFLIGVPSPKLQVPSVFKPTRDDRGWIINPIGPNPWWTVIAAIIPALLCTILIFMDQQITAVIINRKEHKLKKGCGYHLDLLMVAIMLGVCSIMGLPWFVAATVLSITHVNSLKLESECSAPGEQPKFLGIREQRVTGLMIFVLMGCSVFMTAILKFIPMPVLYGVFLYMGVSSLQGIQFFDRLKLFGMPAKHQPDFIYLRHVPLRKVHLFTLIQLTCLVLLWVIKASPAAIVFPMMVLALVFVRKVMDLCFSKRELSWLDDLMPESKKKKLDDAKKKAKEEEEAEKMLEIGGDKFPLESRKLLSSPGKNISCRCDPSEINISDEMPKTTVWKALSMNSGNAKEKSLFN

SEQ ID NO: 81759 - protein, 638 aa, Homo sapiens
  Payload ID: 16280
  Gene Symbol: SLC4A8
  Gene Name: solute carrier family 4, sodium bicarbonate cotransporter, member 8
  Uniprot ID: Q2Y0W8
  ENSP ID: ENSP00000441520
MPLGRQSHRHHRTHGQKHRRRGRGKGASQGEEGLEALAHDTPSQRVQFILGTEEDEEHVPHELFTELDEICMKEGEDAEWKETARWLKFEEDVEDGGERWSKPYVATLSLHSLFELRSCLINGTVLLDMHANSIEEISDLILDQQELSSDLNDSMRVKVREALLKKHHHQNEKKRNNLIPIVRSFAEVGKKQSDPHLMDKHGQTVSPQSVPTTNLEVKNGVNCEHSPVDLSKVDLHFMKKIPTGAEASNVLVGEVDILDRPIVAFVRLSPAVLLSGLTEVPIPTRFLFILLGPVGKGQQYHEIGRSMATIMTDEIFHDVAYKAKERDDLLAGIDEFLDQVTVLPPGEWDPSIRIEPPKNVPSQEKRKMPGVPNGNVCHIEQEPHGGHSGPELQRTGRLFGGLVLDIKRKAPWYWSDYRDALSLQCLASFLFLYCACMSPVITFGGLLGEATEGRISAIESLFGASMTGIAYSLFAGQALTILGSTGPVLVFEKILFKFCKDYALSYLSLRACIGLWTAFLCIVLVATDASSLVCYITRFTEEAFASLICIIFIYEAIEKLIHLAETYPIHMHSQLDHLSLYYCRCTLPENPNNHTLQYWKDHNIVTAEVHWANLTVSVSLGAARCPSIVTTGLGGTSK

SEQ ID NO: 81760 - protein, 747 aa, Homo sapiens
  Payload ID: 16280
  Gene Symbol: SLC4A8
  Gene Name: solute carrier family 4, sodium bicarbonate cotransporter, member 8
  Uniprot ID: Q2Y0W8
  ENSP ID: ENSP00000442561
MPLGRQSHRHHRTHGQKHRRRGRGKGASQGEEGLEALAHDTPSQRVQFILGTEEDEEHVPHELFTELDEICMKEGEDAEWKETARWLKFEEDVEDGGERWSKPYVATLSLHSLFELRSCLINGTVLLDMHANSIEEISDLILDQQELSSDLNDSMRVKVREALLKKHHHQNEKKRNNLIPIVRSFAEVGKKQSDPHLMDKHGQTVSPQSVPTTNLEVKNGVNCEHSPVDLSKVDLHFMKKIPTGAEASNVLVGEVDILDRPIVAFVRLSPAVLLSGLTEVPIPTRFLFILLGPVGKGQQYHEIGRSMATIMTDEIFHDVAYKAKERDDLLAGIDEFLDQVTVLPPGEWDPSIRIEPPKNVPSQEKRKMPGVPNGNVCHIEQEPHGGHSGPELQRTGRLFGGLVLDIKRKAPWYWSDYRDALSLQCLASFLFLYCACMSPVITFGGLLGEATEGRISAIESLFGASMTGIAYSLFAGQALTILGSTGPVLVFEKILFKFCKDYALSYLSLRACIGLWTAFLCIVLVATDASSLVCYITRFTEEAFASLICIIFIYEAIEKLIHLAETYPIHMHSQLDHLSLYYCRCTLPENPNNHTLQYWKDHNIVTAEVHWANLTVSECQEMHGEFMGSACGHHGPYTPDVLFWSCILFFTTFILSSTLKTFKTSRYFPTRMESCSVAWLECGGVILAHCNLRLLPSSWDYRHAPPQPANFCIFSRDGVSPCWPGWSQSLDLVICLPRPPKMLGLQA

SEQ ID NO: 81761 - protein, 945 aa, Homo sapiens
  Payload ID: 16281
  Gene Symbol: SLC4A9
  Gene Name: solute carrier family 4, sodium bicarbonate cotransporter, member 9
  Uniprot ID: Q96Q91
  ENSP ID: ENSP00000410056
MEMKLPGQEGFEASSAPRNIPSGELDSNPDPGTGPSPDGPSDTESKELGVPKDPLLFIQLNELLGWPQALEWRETGRWVLFEEKLEVAAGRWSAPHVPTLALPSLQKLRSLLAEGLVLLDCPAQSLLELVEQVTRVESLSPELRGQLQALLLQRPQHYNQTTGTRPCWGSTHPRKASDNEEAPLREQCQNPLRQKLPPGAEAGTVLAGELGFLAQPLGAFVRLRNPVVLGSLTEVSLPSRFFCLLLGPCMLGKGYHEMGRAAAVLLSDPQFQWSVRRASNLHDLLAALDAFLEEVTVLPPGRWDPTARIPPPKCLPSQHKRLPSQQREIRGPAVPRLTSAEDRHRHGPHAHSPELQRTGRKVPWYPSDFLDALHLQCFSAVLYIYLATVTNAITFGGLLGDATDGAQGVLESFLGTAVAGAAFCLMAGQPLTILSSTGPVLVFERLLFSFSRDYSLDYLPFRLWVGIWVATFCLVLVATEASVLVRYFTRFTEEGFCALISLIFIYDAVGKMLNLTHTYPIQKPGSSAYGCLCQYPGPGGNESQWIRTRPKDRDDIDLGLINASLLPPPECTRQGGHPRGPGCHTVPDIAFFSLLLFLTSFFFAMALKCVKTSRFFPSVVRKGLSDFSSVLAILLGCGLDAFLGLATPKLMVPREFKPTLPGRGWLVSPFGANPWWWSVAAALPALLLSILIFMDQQITAVILNRMEYRLQKGAGFHLDLFCVAVLMLLTSALGLPWYVSATVISLAHMDSLRRESRACAPGERPNFLGIREQRLTGLVVFILTGASIFLAPVLKFIPMPVLYGIFLYMGVAALSSIQFTNRVKLLLMPAKHQPDLLLLRHVPLTRVHLFTAIQLACLGLLWIIKSTPAAIIFPLMLLGLVGVRKALERVFSPQELLWLDELMPEEERSIPEKGLEPEHSFSGSDSEDSELMYQPKAPEINISVN

SEQ ID NO: 81762 - protein, 896 aa, Homo sapiens
  Payload ID: 16281
  Gene Symbol: SLC4A9
  Gene Name: solute carrier family 4, sodium bicarbonate cotransporter, member 9
  Uniprot ID: Q96Q91
  ENSP ID: ENSP00000422855
MEMKLPGQEGFEASSAPRNIPSGELDSNPDPGTGPSPDGPSDTESKELGVPKDPLLFIQLNELLGWPQALEWRETGRWVLFEEKLEVAAGRWSAPHVPTLALPSLQKLRSLLAEGLVLLDCPAQSLLELVEQVTRVESLSPELRGQLQALLLQRPQHYNQTTGTRPCWGSTHPRKASDNEEAPLREQCQNPLRQKLPPGAEAGTVLAGELGFLAQPLGAFVRLRNPVVLGSLTEVSLPSRFFCLLLGPCMLGKGYHEMGRAAAVLLSDPQFQWSVRRASNLHDLLAALDAFLEEVTVLPPGRWDPTARIPPPKCLPSQHKRLPSQQREIRGPAVPRLTSAEDRHRHGPHAHSPELQRTGRLFGGLIQDVRRKVPWYPSDFLDALHLQCFSAVLYIYLATVTNAITFGGLLGDATDGAQGVLESFLGTAVAGAAFCLMAGQPLTILSSTGPVLVFERLLFSFSRDYSLDYLPFRLWVGIWVATFCLVLVATEASVLVRYFTRFTEEGFCALISLIFIYDAVGKMLNLTHTYPIQKPGSSAYGCLCQYPGPGGNESQWIRTRPKDRDDIVSMVRKGLSDFSSVLAILLGCGLDAFLGLATPKLMVPREFKPTLPGRGWLVSPFGANPWWWSVAAALPALLLSILIFMDQQITAVILNRMEYRLQKGAGFHLDLFCVAVLMLLTSALGLPWYVSATVISLAHMDSLRRESRACAPGERPNFLGIREQRLTGLVVFILTGASIFLAPVLKFIPMPVLYGIFLYMGVAALSSIQFTNRVKLLLMPAKHQPDLLLLRHVPLTRVHLFTAIQLACLGLLWIIKSTPAAIIFPLMLLGLVGVRKALERVFSPQELLWLDELMPEEERSIPEKGLEPEHSFSGSDSEDSELMYQPKAPEINISVN

SEQ ID NO: 81763 - protein, 959 aa, Homo sapiens
  Payload ID: 16281
  Gene Symbol: SLC4A9
  Gene Name: solute carrier family 4, sodium bicarbonate cotransporter, member 9
  Uniprot ID: Q96Q91
  ENSP ID: ENSP00000424424
MEMKLPGQEGFEASSAPRNIPSGELDSNPDPGTGPSPDGPSDTESKELGVPKDPLLFIQLNELLGWPQALEWRETGRWVLFEEKLEVAAGRWSAPHVPTLALPSLQKLRSLLAEGLVLLDCPAQSLLELVEQVTRVESLSPELRGQLQALLLQRPQHYNQTTGTRPCWGSTHPRKASDNEEAPLREQCQNPLRQKLPPGAEAGTVLAGELGFLAQPLGAFVRLRNPVVLGSLTEVSLPSRFFCLLLGPCMLGKGYHEMGRAAAVLLSDPQFQWSVRRASNLHDLLAALDAFLEEVTVLPPGRWDPTARIPPPKCLPSQHKRLPSQQREIRGPAVPRLTSAEDRHRHGPHAHSPELQRTGRLFGGLIQDVRRKVPWYPSDFLDALHLQCFSAVLYIYLATVTNAITFGGLLGDATDGAQGVLESFLGTAVAGAAFCLMAGQPLTILSSTGPVLVFERLLFSFSRDYSLDYLPFRLWVGIWVATFCLVLVATEASVLVRYFTRFTEEGFCALISLIFIYDAVGKMLNLTHTYPIQKPGSSAYGCLCQYPGPGGNESQWIRTRPKDRDDIVSMDLGLINASLLPPPECTRQGGHPRGPGCHTVPDIAFFSLLLFLTSFFFAMALKCVKTSRFFPSVVRKGLSDFSSVLAILLGCGLDAFLGLATPKLMVPREFKPTLPGRGWLVSPFGANPWWWSVAAALPALLLSILIFMDQQITAVILNRMEYRLQKGAGFHLDLFCVAVLMLLTSALGLPWYVSATVISLAHMDSLRRESRACAPGERPNFLGIREQRLTGLVVFILTGASIFLAPVLKFIPMPVLYGIFLYMGVAALSSIQFTNRVKLLLMPAKHQPDLLLLRHVPLTRVHLFTAIQLACLGLLWIIKSTPAAIIFPLMLLGLVGVRKALERVFSPQELLWLDELMPEEERSIPEKGLEPEHSFSGSDSEDSELMYQPKAPEINISVN

SEQ ID NO: 81764 - protein, 983 aa, Homo sapiens
  Payload ID: 16281
  Gene Symbol: SLC4A9
  Gene Name: solute carrier family 4, sodium bicarbonate cotransporter, member 9
  Uniprot ID: Q96Q91
  ENSP ID: ENSP00000427661
MEMKLPGQEGFEASSAPRNIPSGELDSNPDPGTGPSPDGPSDTESKELGVPKDPLLFIQLNELLGWPQALEWRETGSSSASLLLDMGEMPSITLSTHLHHRWVLFEEKLEVAAGRWSAPHVPTLALPSLQKLRSLLAEGLVLLDCPAQSLLELVEQVTRVESLSPELRGQLQALLLQRPQHYNQTTGTRPCWGSTHPRKASDNEEAPLREQCQNPLRQKLPPGAEAGTVLAGELGFLAQPLGAFVRLRNPVVLGSLTEVSLPSRFFCLLLGPCMLGKGYHEMGRAAAVLLSDPQFQWSVRRASNLHDLLAALDAFLEEVTVLPPGRWDPTARIPPPKCLPSQHKRLPSQQREIRGPAVPRLTSAEDRHRHGPHAHSPELQRTGRLFGGLIQDVRRKVPWYPSDFLDALHLQCFSAVLYIYLATVTNAITFGGLLGDATDGAQGVLESFLGTAVAGAAFCLMAGQPLTILSSTGPVLVFERLLFSFSRDYSLDYLPFRLWVGIWVATFCLVLVATEASVLVRYFTRFTEEGFCALISLIFIYDAVGKMLNLTHTYPIQKPGSSAYGCLCQYPGPGGNESQWIRTRPKDRDDIVSMDLGLINASLLPPPECTRQGGHPRGPGCHTVPDIAFFSLLLFLTSFFFAMALKCVKTSRFFPSVVRKGLSDFSSVLAILLGCGLDAFLGLATPKLMVPREFKPTLPGRGWLVSPFGANPWWWSVAAALPALLLSILIFMDQQITAVILNRMEYRLQKGAGFHLDLFCVAVLMLLTSALGLPWYVSATVISLAHMDSLRRESRACAPGERPNFLGIREQRLTGLVVFILTGASIFLAPVLKFIPMPVLYGIFLYMGVAALSSIQFTNRVKLLLMPAKHQPDLLLLRHVPLTRVHLFTAIQLACLGLLWIIKSTPAAIIFPLMLLGLVGVRKALERVFSPQELLWLDELMPEEERSIPEKGLEPEHSFSGSDSEDSELMYQPKAPEINISVN

SEQ ID NO: 81765 - protein, 1106 aa, Homo sapiens
  Payload ID: 16282
  Gene Symbol: SLC4A10
  Gene Name: solute carrier family 4, sodium bicarbonate transporter, member 10
  ENSP ID: ENSP00000272716
MEIKDQGAQMEPLLPTRNDEEAVVDRGGTRSILKTHFEKEDLEGHRTLFIGVHVPLGGRKSHRRHRHRGHKHRKRDRERDSGLEDGRESPSFDTPSQRVQFILGTEDDDEEHIPHDLFTELDEICWREGEDAEWRETARWLKFEEDVEDGGERWSKPYVATLSLHSLFELRSCILNGTVLLDMHANTLEEIADMVLDQQVSSGQLNEDVRHRVHEALMKQHHHQNQKKLTNRIPIVRSFADIGKKQSEPNSMDKNAGQVVSPQSAPACVENKNDVSRENSTVDFSKVDLHFMKKIPPGAEASNILVGELEFLDRTVVAFVRLSPAVLLQGLAEVPIPTRFLFILLGPLGKGQQYHEIGRSIATLMTDEVFHDVAYKAKDRNDLVSGIDEFLDQVTVLPPGEWDPSIRIEPPKNVPSQEKRKIPAVPNGTAAHGEAEPHGGHSGPELQRTGRIFGGLILDIKRKAPYFWSDFRDAFSLQCLASFLFLYCACMSPVITFGGLLGEATEGRISAIESLFGASMTGIAYSLFGGQPLTILGSTGPVLVFEKILFKFCKEYGLSYLSLRASIGLWTATLCIILVATDASSLVCYITRFTEEAFASLICIIFIYEALEKLFELSEAYPINMHNDLELLTQYSCNCVEPHNPSNGTLKEWRESNISASDIIWENLTVSECKSLHGEYVGRACGHDHPYVPDVLFWSVILFFSTVTLSATLKQFKTSRYFPTKVRSIVSDFAVFLTILCMVLIDYAIGIPSPKLQVPSVFKPTRDDRGWFVTPLGPNPWWTVIAAIIPALLCTILIFMDQQITAVIINRKEHKLKKGCGYHLDLLMVAVMLGVCSIMGLPWFVAATVLSITHVNSLKLESECSAPGEQPKFLGIREQRVTGLMIFILMGSSVFMTSILKFIPMPVLYGVFLYMGASSLKGIQFFDRIKLFWMPAKHQPDFIYLRHVPLRKVHLFTIIQMSCLGLLWIIKVSRAAIVFPMMVLALVFVRKLMDLLFTKRELSWLDDLMPESKKKKLEDAEKEEEQSMLAMEDEGTVQLPLEGHYRDDPSVINISDEMSKTALWRNLLITADNSKDKESSFPSKSIESRKEKKADSGKGVDRETCL

SEQ ID NO: 81766 - protein, 1099 aa, Homo sapiens
  Payload ID: 16282
  Gene Symbol: SLC4A10
  Gene Name: solute carrier family 4, sodium bicarbonate transporter, member 10
  Uniprot ID: Q6U841
  ENSP ID: ENSP00000364664
MQSLGVSGNRKVMQSGTCEPFQSLSHQRNDEEAVVDRGGTRSILKTHFEKEDLEGHRTLFIGVHVPLGGRKSHRRHRHRGHKHRKRDRERDSGLEDGRESPSFDTPSQRVQFILGTEDDDEEHIPHDLFTELDEICWREGEDAEWRETARWLKFEEDVEDGGERWSKPYVATLSLHSLFELRSCILNGTVLLDMHANTLEEIADMVLDQQVSSGQLNEDVRHRVHEALMKQHHHQNQKKLTNRIPIVRSFADIGKKQSEPNSMDKNAGQVVSPQSAPACVENKNDVSRENSTVDFSKVDLHFMKKIPPGAEASNILVGELEFLDRTVVAFVRLSPAVLLQGLAEVPIPTRFLFILLGPLGKGQQYHEIGRSIATLMTDEVFHDVAYKAKDRNDLVSGIDEFLDQVTVLPPGEWDPSIRIEPPKNVPSQEKRKIPAVPNGTAAHGEAEPHGGHSGPELQRTGRIFGGLILDIKRKAPYFWSDFRDAFSLQCLASFLFLYCACMSPVITFGGLLGEATEGRISAIESLFGASMTGIAYSLFGGQPLTILGSTGPVLVFEKILFKFCKEYGLSYLSLRASIGLWTATLCIILVATDASSLVCYITRFTEEAFASLICIIFIYEALEKLFELSEAYPINMHNDLELLTQYSCNCVEPHNPSNGTLKEWRESNISASDIIWENLTVSECKSLHGEYVGRACGHDHPYVPDVLFWSVILFFSTVTLSATLKQFKTSRYFPTKVRSIVSDFAVFLTILCMVLIDYAIGIPSPKLQVPSVFKPTRDDRGWFVTPLGPNPWWTVIAAIIPALLCTILIFMDQQITAVIINRKEHKLKKGCGYHLDLLMVAVMLGVCSIMGLPWFVAATVLSITHVNSLKLESECSAPGEQPKFLGIREQRVTGLMIFILMGSSVFMTSILKFIPMPVLYGVFLYMGASSLKGIQFFDRIKLFWMPAKHQPDFIYLRHVPLRKVHLFTIIQMSCLGLLWIIKVSRAAIVFPMMVLALVFVRKLMDLLFTKRELSWLDDLMPESKKKKLEDAEKEEEQSMLAMEDEGTVQLPLEGHYRDDPSVINISDEMSKTALWRNLLITADNSKDKESSFPSKSSPS

SEQ ID NO: 81767 - protein, 469 aa, Homo sapiens
  Payload ID: 16282
  Gene Symbol: SLC4A10
  Gene Name: solute carrier family 4, sodium bicarbonate transporter, member 10
  ENSP ID: ENSP00000389180
MEIKDQGAQMEPLLPTRNDEEAVVDRGGTRSILKTHFEKEDLEGHRTLFIGVHVPLGGRKSHRRHRHRGHKHRKRDRERDSGLEDGRESPSFDTPSQRVQFILGTEDDDEEHIPHDLFTELDEICWREGEDAEWRETARWLKFEEDVEDGGERWSKPYVATLSLHSLFELRSCILNGTVLLDMHANTLEEIADMVLDQQVSSGQLNEDVRHRVHEALMKQHHHQNQKKLTNRIPIVRSFADIGKKQSEPNSMDKNAGQVVSPQSAPACVENKNDVSRENSTVDFSKVDLHFMKKIPPGAEASNILVGELEFLDRTVVAFVRLSPAVLLQGLAEVPIPTRFLFILLGPLGKGQQYHEIGRSIATLMTDEVFHDVAYKAKDRNDLVSGIDEFLDQVTVLPPGEWDPSIRIEPPKNVPSQEKRKIPAVPNGTAAHGEAEPHGGHSGPELQRTGRSPISGIFASPEFFHRFCC

SEQ ID NO: 81768 - protein, 1118 aa, Homo sapiens
  Payload ID: 16282
  Gene Symbol: SLC4A10
  Gene Name: solute carrier family 4, sodium bicarbonate transporter, member 10
  Uniprot ID: Q6U841
  ENSP ID: ENSP00000393066
MEIKDQGAQMEPLLPTRNDEEAVVDRGGTRSILKTHFEKEDLEGHRTLFIGVHVPLGGRKSHRRHRHRGHKHRKRDRERDSGLEDGRESPSFDTPSQRVQFILGTEDDDEEHIPHDLFTELDEICWREGEDAEWRETARWLKFEEDVEDGGERWSKPYVATLSLHSLFELRSCILNGTVLLDMHANTLEEIADMVLDQQVSSGQLNEDVRHRVHEALMKQHHHQNQKKLTNRIPIVRSFADIGKKQSEPNSMDKNAGQVVSPQSAPACVENKNDVSRENSTVDFSKGLGGQQKGHTSPCGMKQRHEKGPPHQQEREVDLHFMKKIPPGAEASNILVGELEFLDRTVVAFVRLSPAVLLQGLAEVPIPTRFLFILLGPLGKGQQYHEIGRSIATLMTDEVFHDVAYKAKDRNDLVSGIDEFLDQVTVLPPGEWDPSIRIEPPKNVPSQEKRKIPAVPNGTAAHGEAEPHGGHSGPELQRTGRIFGGLILDIKRKAPYFWSDFRDAFSLQCLASFLFLYCACMSPVITFGGLLGEATEGRISAIESLFGASMTGIAYSLFGGQPLTILGSTGPVLVFEKILFKFCKEYGLSYLSLRASIGLWTATLCIILVATDASSLVCYITRFTEEAFASLICIIFIYEALEKLFELSEAYPINMHNDLELLTQYSCNCVEPHNPSNGTLKEWRESNISASDIIWENLTVSECKSLHGEYVGRACGHDHPYVPDVLFWSVILFFSTVTLSATLKQFKTSRYFPTKVRSIVSDFAVFLTILCMVLIDYAIGIPSPKLQVPSVFKPTRDDRGWFVTPLGPNPWWTVIAAIIPALLCTILIFMDQQITAVIINRKEHKLKKGCGYHLDLLMVAVMLGVCSIMGLPWFVAATVLSITHVNSLKLESECSAPGEQPKFLGIREQRVTGLMIFILMGSSVFMTSILKFIPMPVLYGVFLYMGASSLKGIQFFDRIKLFWMPAKHQPDFIYLRHVPLRKVHLFTIIQMSCLGLLWIIKVSRAAIVFPMMVLALVFVRKLMDLLFTKRELSWLDDLMPESKKKKLEDAEKEEEQSMLAMEDEGTVQLPLEGHYRDDPSVINISDEMSKTALWRNLLITADNSKDKESSFPSKSSPS

SEQ ID NO: 81769 - protein, 1088 aa, Homo sapiens
  Payload ID: 16282
  Gene Symbol: SLC4A10
  Gene Name: solute carrier family 4, sodium bicarbonate transporter, member 10
  Uniprot ID: Q6U841
  ENSP ID: ENSP00000395797
MEIKDQGAQMEPLLPTRNDEEAVVDRGGTRSILKTHFEKEDLEGHRTLFIGVHVPLGGRKSHRRHRHRGHKHRKRDRERDSGLEDGRESPSFDTPSQRVQFILGTEDDDEEHIPHDLFTELDEICWREGEDAEWRETARWLKFEEDVEDGGERWSKPYVATLSLHSLFELRSCILNGTVLLDMHANTLEEIADMVLDQQVSSGQLNEDVRHRVHEALMKQHHHQNQKKLTNRIPIVRSFADIGKKQSEPNSMDKNAGQVVSPQSAPACVENKNDVSRENSTVDFSKVDLHFMKKIPPGAEASNILVGELEFLDRTVVAFVRLSPAVLLQGLAEVPIPTRFLFILLGPLGKGQQYHEIGRSIATLMTDEVFHDVAYKAKDRNDLVSGIDEFLDQVTVLPPGEWDPSIRIEPPKNVPSQEKRKIPAVPNGTAAHGEAEPHGGHSGPELQRTGRIFGGLILDIKRKAPYFWSDFRDAFSLQCLASFLFLYCACMSPVITFGGLLGEATEGRISAIESLFGASMTGIAYSLFGGQPLTILGSTGPVLVFEKILFKFCKEYGLSYLSLRASIGLWTATLCIILVATDASSLVCYITRFTEEAFASLICIIFIYEALEKLFELSEAYPINMHNDLELLTQYSCNCVEPHNPSNGTLKEWRESNISASDIIWENLTVSECKSLHGEYVGRACGHDHPYVPDVLFWSVILFFSTVTLSATLKQFKTSRYFPTKVRSIVSDFAVFLTILCMVLIDYAIGIPSPKLQVPSVFKPTRDDRGWFVTPLGPNPWWTVIAAIIPALLCTILIFMDQQITAVIINRKEHKLKKGCGYHLDLLMVAVMLGVCSIMGLPWFVAATVLSITHVNSLKLESECSAPGEQPKFLGIREQRVTGLMIFILMGSSVFMTSILKFIPMPVLYGVFLYMGASSLKGIQFFDRIKLFWMPAKHQPDFIYLRHVPLRKVHLFTIIQMSCLGLLWIIKVSRAAIVFPMMVLALVFVRKLMDLLFTKRELSWLDDLMPESKKKKLEDAEKEEEQSMLAMEDEGTVQLPLEGHYRDDPSVINISDEMSKTALWRNLLITADNSKDKESSFPSKSSPS

SEQ ID NO: 81770 - protein, 1054 aa, Homo sapiens
  Payload ID: 16282
  Gene Symbol: SLC4A10
  Gene Name: solute carrier family 4, sodium bicarbonate transporter, member 10
  ENSP ID: ENSP00000404486
MEIKDQGAQMEPLLPTRNDEEAVVDRGGTRSILKTHFEKEDLEGHRTLFIGVHVPLGGRKSHRRHRHRGHKHRKRDRERDSGLEDGRESPSFDTPSQRVQFILGTEDDDEEHIPHDLFTELDEICWREGEDAEWRETARWLKFEEDVEDGGERWSKPYVATLSLHSLFELRSCILNGTVLLDMHANTLEEIADMVLDQQVSSGQLNEDVRHRVHEALMKQHHHQNQKKLTNRIPIVRSFADIGKKQSEPNSMDKNAGQVVSPQSAPACVENKNDVSRENSTVDFSKGLGGQQKGHTSPCGMKQRHEKGPPHQQEREVDLHFMKKIPPGAEASNILVGELEFLDRTVVAFVRLSPAVLLQGLAEVPIPTRFLFILLGPLGKGQQYHEIGRSIATLMTDEVFHDVAYKAKDRNDLVSGIDEFLDQVTVLPPGEWDPSIRIEPPKNVPSQEKRKIPAVPNGTAAHGEAEPHGGHSGPELQRTGRIFGGLILDIKRKAPYFWSDFRDAFSLQCLASFLFLYCACMSPVITFGGLLGEATEGRISAIESLFGASMTGIAYSLFGGQPLTILGSTGPVLVFEKILFKFCKEYGLSYLSLRASIGLWTATLCIILVATDASSLVCYITRFTEEAFASLICIIFIYEALEKLFELSEAYPINMHNDLELLTQYSCNCVEPHNPSNGTLKEWRESNISASDIIWENLTVSECKSLHGEYVGRACGHDHPYVPDVLFWSVILFFSTVTLSATLKQFKTSRYFPTKVRSIVSDFAVFLTILCMVLIDYAIGIPSPKLQVPSVFKPTRDDRGWFVTPLGPNPWWTVIAAIIPALLCTILIFMDQQITAVIINRKEHKLKKGCGYHLDLLMVAVMLGVCSIMGLPWFVAATVLSITHVNSLKLESECSAPGEQPKFLGIREQRVTGLMIFILMGSSVFMTSILKFIPMPVLYGVFLYMGASSLKGIQFFDRIKLFWMPAKHQPDFIYLRHVPLRKVHLFTIIQMSCLGLLWIIKVSRAAIVFPMMVLALVFVRKLMDLLFTKRELSWLDDLMPESKKKKLEDAEKEH

SEQ ID NO: 81771 - protein, 891 aa, Homo sapiens
  Payload ID: 16283
  Gene Symbol: SLC4A11
  Gene Name: solute carrier family 4, sodium borate transporter, member 11
  Uniprot ID: Q8NBS3
  ENSP ID: ENSP00000369396
MSQVGGRGDRCTQEVQGLVHGAGDLSASLAENSPTMSQNGYFEDSSYYKCDTDDTFEAREEILGDEAFDTANSSIVSGESIRFFVNVNLEMQATNTENEATSGGCVLLHTSRKYLKLKNFKEEIRAHRDLDGFLAQASIVLNETATSLDNVLRTMLRRFARDPDNNEPNCNLDLLMAMLFTDAGAPMRGKVHLLSDTIQGVTATVTGVRYQQSWLCIICTMKALQKRHVCISRLVRPQNWGENSCEVRFVILVLAPPKMKSTKTAMEVARTFATMFSDIAFRQKLLETRTEEEFKEALVHQRQLLTMVSHGPVAPRTKERSTVSLPAHRHPEPPKCKDFVPFGKGIREDIARRFPLYPLDFTDGIIGKNKAVGKYITTTLFLYFACLLPTIAFGSLNDENTDGAIDVQKTIAGQSIGGLLYALFSGQPLVILLTTAPLALYIQVIRVICDDYDLDFNSFYAWTGLWNSFFLALYAFFNLSLVMSLFKRSTEEIIALFISITFVLDAVKGTVKIFWKYYYGHYLDDYHTKRTSSLVSLSGLGASLNASLHTALNASFLASPTELPSATHSGQATAVLSLLIMLGTLWLGYTLYQFKKSPYLHPCVREILSDCALPIAVLAFSLISSHGFREIEMSKFRYNPSESPFAMAQIQSLSLRAVSGAMGLGFLLSMLFFIEQNLVAALVNAPENRLVKGTAYHWDLLLLAIINTGLSLFGLPWIHAAYPHSPLHVRALALVEERVENGHIYDTIVNVKETRLTSLGASVLVGLSLLLLPVPLQWIPKPVLYGLFLYIALTSLDGNQLVQRVALLLKEQTAYPPTHYIRRVPQRKIHYFTGLQVLQLLLLCAFGMSSLPYMKMIFPLIMIAMIPIRYILLPRIIEAKYLDVMDAEHRP

SEQ ID NO: 81772 - protein, 918 aa, Homo sapiens
  Payload ID: 16283
  Gene Symbol: SLC4A11
  Gene Name: solute carrier family 4, sodium borate transporter, member 11
  Uniprot ID: Q8NBS3
  ENSP ID: ENSP00000369399
MGVYGPQDRSESEKRDVQRDPPPWHPRREGERPARARSLPLAAAGQGFLRKTWISEHENSPTMSQNGYFEDSSYYKCDTDDTFEAREEILGDEAFDTANSSIVSGESIRFFVNVNLEMQATNTENEATSGGCVLLHTSRKYLKLKNFKEEIRAHRDLDGFLAQASIVLNETATSLDNVLRTMLRRFARDPDNNEPNCNLDLLMAMLFTDAGAPMRGKVHLLSDTIQGVTATVTGVRYQQSWLCIICTMKALQKRHVCISRLVRPQNWGENSCEVRFVILVLAPPKMKSTKTAMEVARTFATMFSDIAFRQKLLETRTEEEFKEALVHQRQLLTMVSHGPVAPRTKERSTVSLPAHRHPEPPKCKDFVPFGKGIREDIARRFPLYPLDFTDGIIGKNKAVGKYITTTLFLYFACLLPTIAFGSLNDENTDGAIDVQKTIAGQSIGGLLYALFSGQPLVILLTTAPLALYIQVIRVICDDYDLDFNSFYAWTGLWNSFFLALYAFFNLSLVMSLFKRSTEEIIALFISITFVLDAVKGTVKIFWKYYYGHYLDDYHTKRTSSLVSLSGLGASLNASLHTALNASFLASPTELPSATHSGQATAVLSLLIMLGTLWLGYTLYQFKKSPYLHPCVREILSDCALPIAVLAFSLISSHGFREIEMSKFRYNPSESPFAMAQIQSLSLRAVSGAMGLGFLLSMLFFIEQNLVAALVNAPENRLVKGTAYHWDLLLLAIINTGLSLFGLPWIHAAYPHSPLHVRALALVEERVENGHIYDTIVNVKETRLTSLGASVLVGLSLLLLPVPLQWIPKPVLYGLFLYIALTSLDGNQLVQRVALLLKEQTAYPPTHYIRRVPQRKIHYFTGLQVLQLLLLCAFGMSSLPYMKMIFPLIMIAMIPIRYILLPRIIEAKYLDVMDAEHRP

SEQ ID NO: 81773 - protein, 104 aa, Homo sapiens
  Payload ID: 16283
  Gene Symbol: SLC4A11
  Gene Name: solute carrier family 4, sodium borate transporter, member 11
  ENSP ID: ENSP00000404271
MSQNGYFEDSSYYKCDTDDTFEAREEILGDEAFDTANSSIVSGESIRFFVNVNLEMQATNTENEATSGGCVLLHTSRKYLKLKNFKEEIRAHRDLDGFLAQASI

SEQ ID NO: 81774 - protein, 875 aa, Homo sapiens
  Payload ID: 16283
  Gene Symbol: SLC4A11
  Gene Name: solute carrier family 4, sodium borate transporter, member 11
  Uniprot ID: Q8NBS3
  ENSP ID: ENSP00000441370
MAAATRRVFHLQPCENSPTMSQNGYFEDSSYYKCDTDDTFEAREEILGDEAFDTANSSIVSGESIRFFVNVNLEMQATNTENEATSGGCVLLHTSRKYLKLKNFKEEIRAHRDLDGFLAQASIVLNETATSLDNVLRTMLRRFARDPDNNEPNCNLDLLMAMLFTDAGAPMRGKVHLLSDTIQGVTATVTGVRYQQSWLCIICTMKALQKRHVCISRLVRPQNWGENSCEVRFVILVLAPPKMKSTKTAMEVARTFATMFSDIAFRQKLLETRTEEEFKEALVHQRQLLTMVSHGPVAPRTKERSTVSLPAHRHPEPPKCKDFVPFGKGIREDIARRFPLYPLDFTDGIIGKNKAVGKYITTTLFLYFACLLPTIAFGSLNDENTDGAIDVQKTIAGQSIGGLLYALFSGQPLVILLTTAPLALYIQVIRVICDDYDLDFNSFYAWTGLWNSFFLALYAFFNLSLVMSLFKRSTEEIIALFISITFVLDAVKGTVKIFWKYYYGHYLDDYHTKRTSSLVSLSGLGASLNASLHTALNASFLASPTELPSATHSGQATAVLSLLIMLGTLWLGYTLYQFKKSPYLHPCVREILSDCALPIAVLAFSLISSHGFREIEMSKFRYNPSESPFAMAQIQSLSLRAVSGAMGLGFLLSMLFFIEQNLVAALVNAPENRLVKGTAYHWDLLLLAIINTGLSLFGLPWIHAAYPHSPLHVRALALVEERVENGHIYDTIVNVKETRLTSLGASVLVGLSLLLLPVPLQWIPKPVLYGLFLYIALTSLDGNQLVQRVALLLKEQTAYPPTHYIRRVPQRKIHYFTGLQVLQLLLLCAFGMSSLPYMKMIFPLIMIAMIPIRYILLPRIIEAKYLDVMDAEHRP

SEQ ID NO: 81775 - protein, 574 aa, Homo sapiens
  Payload ID: 16283
  Gene Symbol: SLC4A11
  Gene Name: solute carrier family 4, sodium borate transporter, member 11
  ENSP ID: ENSP00000476859
MSQNGYFEDSSYYKCDTDDTFEAREEILGDEAFDTANSSIVSGESIRFFVNVNLEMQATNTENEATSGGCVLLHTSRKYLKLKNFKEEIRAHRDLDGFLAQASIVLNETATSLDNVLRTMLRRFARDPDNNEPNCNLDLLMAMLFTDAGAPMRGKVHLLSDTIQGVTATVTGVRYQQSWLCIICTMKALQKRHVCISRLVRPQNWGENSCEVRFVILVLAPPKMKSTKTAMEVARTFATMFSDIAFRQKLLETRTEEEFKEALVHQRQLLTMVSHGPVAPRTKERSTVSLPAHRHPEPPKCKDFVPFGKGIREDIARRFPLYPLDFTDGIIGKNKAVGKYITTTLFLYFACLLPTIAFGSLNDENTDGAIDVQKTIAGQSIGGLLYALFSGQPLVILLTTAPLALYIQVIRVICDDYDLDFNSFYAWTGLWNSFFLALYAFFNLSLVMSLFKRSTEEIIALFISITFVLDAVKGTVKTCQASAPASTPASTLPSTPASSPAPRSCPRPHTQARRPPCSASSSCWARSGWATPSTNSRRAPTCTPACERSCPTAPCPSRCSPSPSSAPMASGKSR

SEQ ID NO: 81776 - protein, 571 aa, Homo sapiens
  Payload ID: 16284
  Gene Symbol: SLC40A1
  Gene Name: solute carrier family 40 (iron-regulated transporter), member 1
  Uniprot ID: Q9NP59
  ENSP ID: ENSP00000261024
MTRAGDHNRQRGCCGSLADYLTSAKFLLYLGHSLSTWGDRMWHFAVSVFLVELYGNSLLLTAVYGLVVAGSVLVLGAIIGDWVDKNARLKVAQTSLVVQNVSVILCGIILMMVFLHKHELLTMYHGWVLTSCYILIITIANIANLASTATAITIQRDWIVVVAGEDRSKLANMNATIRRIDQLTNILAPMAVGQIMTFGSPVIGCGFISGWNLVSMCVEYVLLWKVYQKTPALAVKAGLKEEETELKQLNLHKDTEPKPLEGTHLMGVKDSNIHELEHEQEPTCASQMAEPFRTFRDGWVSYYNQPVFLAGMGLAFLYMTVLGFDCITTGYAYTQGLSGSILSILMGASAITGIMGTVAFTWLRRKCGLVRTGLISGLAQLSCLILCVISVFMPGSPLDLSVSPFEDIRSRFIQGESITPTKIPEITTEIYMSNGSNSANIVPETSPESVPIISVSLLFAGVIAARIGLWSFDLTVTQLLQENVIESERGIINGVQNSMNYLLDLLHFIMVILAPNPEAFGLLVLISVSFVAMGHIMYFRFAQNTLGNKLFACGPDAKEVRKENQANTSVV

SEQ ID NO: 81777 - protein, 200 aa, Homo sapiens
  Payload ID: 16284
  Gene Symbol: SLC40A1
  Gene Name: solute carrier family 40 (iron-regulated transporter), member 1
  ENSP ID: ENSP00000390005
MTRAGDHNRQRGCCGSLADYLTSAKFLLYLGHSLSTWGDRMWHFAVSVFLVELYGNSLLLTAVYGLVVAGSVLVLGAIIGDWVDKNARLKVAQTSLVVQNVSVILCGIILMMVFLHKHELLTMYHGWVLTSCYILIITIANIANLASTATAITIQRDWIVVVAGEDRSKLANMNATIRRIDQLTNILAPMAVGQIMTFGS

SEQ ID NO: 81778 - protein, 25 aa, Homo sapiens
  Payload ID: 16284
  Gene Symbol: SLC40A1
  Gene Name: solute carrier family 40 (iron-regulated transporter), member 1
  ENSP ID: ENSP00000392730
MTRAGDHNRQRGCCGSLADYLTSAK

SEQ ID NO: 81779 - protein, 25 aa, Homo sapiens
  Payload ID: 16284
  Gene Symbol: SLC40A1
  Gene Name: solute carrier family 40 (iron-regulated transporter), member 1
  ENSP ID: ENSP00000396134
MTRAGDHNRQRGCCGSLADYLTSAK

SEQ ID NO: 81780 - protein, 55 aa, Homo sapiens
  Payload ID: 16284
  Gene Symbol: SLC40A1
  Gene Name: solute carrier family 40 (iron-regulated transporter), member 1
  ENSP ID: ENSP00000413549
MTRAGDHNRQRGCCGSLADYLTSAKFLLYLGHSLSTWGDRMWHFAVSVFLVELYG

SEQ ID NO: 81781 - protein, 513 aa, Homo sapiens
  Payload ID: 16285
  Gene Symbol: SLC41A1
  Gene Name: solute carrier family 41 (magnesium transporter), member 1
  Uniprot ID: Q8IVJ1
  ENSP ID: ENSP00000356105
MSSKPEPKDVHQLNGTGPSASPCSSDGPGREPLAGTSEFLGPDGAGVEVVIESRANAKGVREEDALLENGSQSNESDDVSTDRGPAPPSPLKETSFSIGLQVLFPFLLAGFGTVAAGMVLDIVQHWEVFQKVTEVFILVPALLGLKGNLEMTLASRLSTAANIGHMDTPKELWRMITGNMALIQVQATVVGFLASIAAVVFGWIPDGHFSIPHAFLLCASSVATAFIASLVLGMIMIGVIIGSRKIGINPDNVATPIAASLGDLITLALLSGISWGLYLELNHWRYIYPLVCAFFVALLPVWVVLARRSPATREVLYSGWEPVIIAMAISSVGGLILDKTVSDPNFAGMAVFTPVINGVGGNLVAVQASRISTFLHMNGMPGENSEQAPRRCPSPCTTFFSPDVNSRSARVLFLLVVPGHLVFLYTISCMQGGHTTLTLIFIIFYMTAALLQVLILLYIADWMVHWMWGRGLDPDNFSIPYLTALGDLLGTGLLALSFHVLWLIGDRDTDVGD

SEQ ID NO: 81782 - protein, 573 aa, Homo sapiens
  Payload ID: 16286
  Gene Symbol: SLC41A2
  Gene Name: solute carrier family 41 (magnesium transporter), member 2
  Uniprot ID: Q96JW4
  ENSP ID: ENSP00000258538
MTNSKGRSITDKTSGGPSSGGGFVDWTLRLNTIQSDKFLNLLLSMVPVIYQKNQEDRHKKANGIWQDGLSTAVQTFSNRSEQHMEYHSFSEQSFHANNGHASSSCSQKYDDYANYNYCDGRETSETTAMLQDEDISSDGDEDAIVEVTPKLPKESSGIMALQILVPFLLAGFGTVSAGMVLDIVQHWEVFRKVTEVFILVPALLGLKGNLEMTLASRLSTAVNIGKMDSPIEKWNLIIGNLALKQVQATVVGFLAAVAAIILGWIPEGKYYLDHSILLCSSSVATAFIASLLQGIIMVGVIVGSKKTGINPDNVATPIAASFGDLITLAILAWISQGLYSCLETYYYISPLVGVFFLALTPIWIIIAAKHPATRTVLHSGWEPVITAMVISSIGGLILDTTVSDPNLVGIVVYTPVINGIGGNLVAIQASRISTYLHLHSIPGELPDEPKGCYYPFRTFFGPGVNNKSAQVLLLLVIPGHLIFLYTIHLMKSGHTSLTIIFIVVYLFGAVLQVFTLLWIADWMVHHFWRKGKDPDSFSIPYLTALGDLLGTALLALSFHFLWLIGDRDGDVGD

SEQ ID NO: 81783 - protein, 149 aa, Homo sapiens
  Payload ID: 16286
  Gene Symbol: SLC41A2
  Gene Name: solute carrier family 41 (magnesium transporter), member 2
  ENSP ID: ENSP00000391377
  MOD_RES (1)..(1): Any amino acid
XDDYANYNYCDGRETSETTAMLQDEDISSDGDEDAIVEVTPKLPKESSGIMALQILVPFLLAGFGTVSAGMVLDIVQVNIGKMDSPIEKWNLIIGNLALKQVQATVVGFLAAVAAIILGWIPEGKYYLDHSILLCSSSVATAFIASLLQ

SEQ ID NO: 81784 - protein, 76 aa, Homo sapiens
  Payload ID: 16286
  Gene Symbol: SLC41A2
  Gene Name: solute carrier family 41 (magnesium transporter), member 2
  ENSP ID: ENSP00000395550
MTNSKGRSITDKTSGGPSSGGGFVDWTLRLNTIQSDKFLNLLLSMVPVIYQKNQEDRHKKANGIWQDGLSTAVQTF

SEQ ID NO: 81785 - protein, 46 aa, Homo sapiens
  Payload ID: 16286
  Gene Symbol: SLC41A2
  Gene Name: solute carrier family 41 (magnesium transporter), member 2
  ENSP ID: ENSP00000396297
MTNSKGRSITDKTSGGPSSGGGFVDWTLRLNTIQSDKFLNLLLSMV

SEQ ID NO: 81786 - protein, 143 aa, Homo sapiens
  Payload ID: 16286
  Gene Symbol: SLC41A2
  Gene Name: solute carrier family 41 (magnesium transporter), member 2
  ENSP ID: ENSP00000396429
MTNSKGRSITDKTSGGPSSGGGFVDWTLRLNTIQSDKFLNLLLSMVPVIYQKNQEDRHKKANGIWQDGLSTAVQTFSNRSEQHMEYHSFSEQSFHANNGHASSSCSQKYDDYANYNYCDGRETSETTAMLQDEDISSDGDEDA

SEQ ID NO: 81787 - protein, 72 aa, Homo sapiens
  Payload ID: 16286
  Gene Symbol: SLC41A2
  Gene Name: solute carrier family 41 (magnesium transporter), member 2
  ENSP ID: ENSP00000397315
MTNSKGRSITDKTSGGPSSGGGFVDWTLRLNTIQSDKFLNLLLSMVPVIYQKNQEDRHKKANGIWQDGLSTA

SEQ ID NO: 81788 - protein, 122 aa, Homo sapiens
  Payload ID: 16286
  Gene Symbol: SLC41A2
  Gene Name: solute carrier family 41 (magnesium transporter), member 2
  ENSP ID: ENSP00000407898
MTNSKGRSITDKTSGGPSSGGGFVDWTLRLNTIQSDKFLNLLLSMVPVIYQKNQEDRHKKANGIWQDGLSTAVQTFSNRSEQHMEYHSFSEQSFHANNGHASSSCSQKYDDYANYNYCDGRE

SEQ ID NO: 81789 - protein, 12 aa, Homo sapiens
  Payload ID: 16286
  Gene Symbol: SLC41A2
  Gene Name: solute carrier family 41 (magnesium transporter), member 2
  ENSP ID: ENSP00000410625
MTNSKGRSITDK

SEQ ID NO: 81790 - protein, 94 aa, Homo sapiens
  Payload ID: 16286
  Gene Symbol: SLC41A2
  Gene Name: solute carrier family 41 (magnesium transporter), member 2
  ENSP ID: ENSP00000414526
MTNSKGRSITDKTSGGPSSGGGFVDWTLRLNTIQSDKFLNLLLSMVPVIYQKNQEDRHKKANGIWQDGLSTAVQTFSNRSEQHMEYHSFSEQSF

SEQ ID NO: 81791 - protein, 471 aa, Homo sapiens
  Payload ID: 16287
  Gene Symbol: SLC41A3
  Gene Name: solute carrier family 41, member 3
  Uniprot ID: Q96GZ6
  ENSP ID: ENSP00000264471
MDGTETRQRRLDSCGKPGELGLPHPLSTGGLPVASEDGALRAPESQSVTPKPLETEPSRETTWSIGLQVTVPFMFAGLGLSWAGMLLDYFQANTGQIDDPQEQHRVISSNLALIQVQATVVGLLAAVAALLLGVVSREEVDVAKVELLCASSVLTAFLAAFALGVLMVCIVIGARKLGVNPDNIATPIAASLGDLITLSILALVSSFFYRHKDSRYLTPLVCLSFAALTPVWVLIAKQSPPIVKILKFGWFPIILAMVISSFGGLILSKTVSKQQYKGMAIFTPVICGVGGNLVAIQTSRISTYLHMWSAPGVLPLQMKKFWPNPCSTFCTSEINSMSARVLLLLVVPGHLIFFYIIYLVEGQSVINSQTFVVLYLLAGLIQVTILLYLAEVMVRLTWHQALDPDNHCIPYLTGLGDLLGSSSVGHTAAVPRRCTASPGWGLIQPFICTQHLIVSLLSFYFPFCLLAKTSI

SEQ ID NO: 81792 - protein, 507 aa, Homo sapiens
  Payload ID: 16287
  Gene Symbol: SLC41A3
  Gene Name: solute carrier family 41, member 3
  Uniprot ID: Q96GZ6
  ENSP ID: ENSP00000326070
MDGTETRQRRLDSCGKPGELGLPHPLSTGGLPVASEDGALRAPESQSVTPKPLETEPSRETTWSIGLQVTVPFMFAGLGLSWAGMLLDYFQHWPVFVEVKDLLTLVPPLVGLKGNLEMTLASRLSTAANTGQIDDPQEQHRVISSNLALIQVQATVVGLLAAVAALLLGVVSREEVDVAKVELLCASSVLTAFLAAFALGVLMVCIVIGARKLGVNPDNIATPIAASLGDLITLSILALVSSFFYRHKDSRYLTPLVCLSFAALTPVWVLIAKQSPPIVKILKFGWFPIILAMVISSFGGLILSKTVSKQQYKGMAIFTPVICGVGGNLVAIQTSRISTYLHMWSAPGVLPLQMKKFWPNPCSTFCTSEINSMSARVLLLLVVPGHLIFFYIIYLVEGQSVINSQTFVVLYLLAGLIQVTILLYLAEVMVRLTWHQALDPDNHCIPYLTGLGDLLGSSSVGHTAAVPRRCTASPGWGLIQPFICTQHLIVSLLSFYFPFCLLAKTSI

SEQ ID NO: 81793 - protein, 487 aa, Homo sapiens
  Payload ID: 16287
  Gene Symbol: SLC41A3
  Gene Name: solute carrier family 41, member 3
  Uniprot ID: Q96GZ6
  ENSP ID: ENSP00000353533
MDGTETRQRRLDSCGKPGELGLPHPLSTGGLPVASEDGALRAPESQSVTPKPLETEPSRETTWSIGLQVTVPFMFAGLGLSWAGMLLDYFQHWPVFVEVKDLLTLVPPLVGLKGNLEMTLASRLSTAANTGQIDDPQEQHRVISSNLALIQVQATVVGLLAAVAALLLGVVSREEVDVAKVELLCASSVLTAFLAAFALGVLMVCIVIGARKLGVNPDNIATPIAASLGDLITLSILALVSSFFYRHKDSRYLTPLVCLSFAALTPVWVLIAKQSPPIVKILKFGWFPIILAMVISSFGGLILSKTVSKQQYKGMAIFTPVICGVGGNLVAIQTSRISTYLHMWSAPGVLPLQMKKFWPNPCSTFCTSEINSMSARVLLLLVVPGHLIFFYIIYLVEGQSVINSQTFVVLYLLAGLIQVTILLYLAEVMVRLTWHQALDPDNHCIPYLTGLGDLLGTGLLALCFFTDWLLKSKAELGGISELASGPP

SEQ ID NO: 81794 - protein, 461 aa, Homo sapiens
  Payload ID: 16287
  Gene Symbol: SLC41A3
  Gene Name: solute carrier family 41, member 3
  Uniprot ID: Q96GZ6
  ENSP ID: ENSP00000373092
MVVTQLNLEFCFQGKKLRGFSCELTRSPHGVLPESFFTIMCQVVVPILLSGLCMMTAGLVMNTIQHWPVFVEVKDLLTLVPPLVGLKGNLEMTLASRLSTAANTGQIDDPQEQHRVISSNLALIQVQATVVGLLAAVAALLLGVVSREEVDVAKVELLCASSVLTAFLAAFALGVLMVCIVIGARKLGVNPDNIATPIAASLGDLITLSILALVSSFFYRHKDSRYLTPLVCLSFAALTPVWVLIAKQSPPIVKILKFGWFPIILAMVISSFGGLILSKTVSKQQYKGMAIFTPVICGVGGNLVAIQTSRISTYLHMWSAPGVLPLQMKKFWPNPCSTFCTSEINSMSARVLLLLVVPGHLIFFYIIYLVEGQSVINSQTFVVLYLLAGLIQVTILLYLAEVMVRLTWHQALDPDNHCIPYLTGLGDLLGTGLLALCFFTDWLLKSKAELGGISELASGPP

SEQ ID NO: 81795 - protein, 201 aa, Homo sapiens
  Payload ID: 16287
  Gene Symbol: SLC41A3
  Gene Name: solute carrier family 41, member 3
  ENSP ID: ENSP00000421008
MDGTETRQRRLDSCGKPGELGLPHPLSTGGLPVASEDGALRAPESQSVTPKPLETEPSRETTWSIGLQVTVPFMFAGLGLSWAGMLLDYFQHWPVFVEVKDLLTLVPPLVGLKGNLEMTLASRLSTAANTGQIDDPQEQHRVISSNLALIQVQATVVGLLAAVAALLLGVVSREEVDVAKVELLCASSVLTAFLAAFALGE

SEQ ID NO: 81796 - protein, 152 aa, Homo sapiens
  Payload ID: 16287
  Gene Symbol: SLC41A3
  Gene Name: solute carrier family 41, member 3
  ENSP ID: ENSP00000421940
MDGTETRQRRLDSCGKPGELGLPHPLSTGGLPVASEDGALRAPESQSVTPKPLETEPSRETTWSIGLQVTVPFMFAGLGLSWAGMLLDYFQHWPVFVEVKDLLTLVPPLVGLKGNLEMTLASRLSTAANTGQIDDPQEQHRVISSNLALIQV

SEQ ID NO: 81797 - protein, 85 aa, Homo sapiens
  Payload ID: 16287
  Gene Symbol: SLC41A3
  Gene Name: solute carrier family 41, member 3
  ENSP ID: ENSP00000422150
MDGTETRQRRLDSCGKPGELGLPHPLSTGGLPVASEDGALRAPESQSVTPKPLETEPSRETTWSIGLQVTVPFMFAGLGLSWAGM

SEQ ID NO: 81798 - protein, 137 aa, Homo sapiens
  Payload ID: 16287
  Gene Symbol: SLC41A3
  Gene Name: solute carrier family 41, member 3
  ENSP ID: ENSP00000422458
MDGTETRQRRLDSCGKPGELGLPHPLSTGGLPVASEDGALRAPESQSVTPKPLETEPSRETTWSIGLQVTVPFMFAGLGLSWAGMLLDYFQANTGQIDDPQEQHRVISSNLALIQVQATVVGLLAAVAALLLGVVSR

SEQ ID NO: 81799 - protein, 152 aa, Homo sapiens; identical to SEQ ID NO: 81796
  Payload ID: 16287
  Gene Symbol: SLC41A3
  Gene Name: solute carrier family 41, member 3
  ENSP ID: ENSP00000422531

SEQ ID NO: 81800 - protein, 294 aa, Homo sapiens
  Payload ID: 16287
  Gene Symbol: SLC41A3
  Gene Name: solute carrier family 41, member 3
  ENSP ID: ENSP00000422828
MDGTETRQRRLDSCGKPGELGLPHPLSTGGLPVASEDGALRAPESQSVTPKPLETEPSRETTWSIGLQVTVPFMFAGLGLSWAGMLLDYFQHWPVFVEVKDLLTLVPPLVGLKGNLEMTLASRLSTAVSGHLDIRGGHNVRQANTGQIDDPQEQHRVISSNLALIQVQATVVGLLAAVAALLLGVVSREEVDVAKVELLCASSVLTAFLAAFALGVLMVCIVIGARKLGVNPDNIATPIAASLGDLITLSILALVSSFFYRHKDSRYLTPLVCLSFAALTPVWVLIAKQSPPIV

SEQ ID NO: 81801 - protein, 152 aa, Homo sapiens; identical to SEQ ID NO: 81796
  Payload ID: 16287
  Gene Symbol: SLC41A3
  Gene Name: solute carrier family 41, member 3
  ENSP ID: ENSP00000423154

SEQ ID NO: 81802 - protein, 174 aa, Homo sapiens
  Payload ID: 16287
  Gene Symbol: SLC41A3
  Gene Name: solute carrier family 41, member 3
  ENSP ID: ENSP00000423524
MDGTETRQRRLDSCGKPGELGLPHPLSTGGLPVASEDGALRAPESQSVTPKPLETEPSRETTWSIGLQVTVPFMFAGLGLSWAGMLLDYFQHWPVFVEVKDLLTLVPPLVGLKGNLEMTLASRLSTAVSGHLDIRGGHNVRQVQATVVGLLAAVAALLLGVVSREEVDVAKVEL

SEQ ID NO: 81803 - protein, 138 aa, Homo sapiens
  Payload ID: 16287
  Gene Symbol: SLC41A3
  Gene Name: solute carrier family 41, member 3
  ENSP ID: ENSP00000424882
MDGTETRQRRLDSCGKPGELGLPHPLSTGGLPVASEDGALRAPESQSVTPKPLETEPSRETTWSIGLQVTVPFMFAGLGLSWAGMLLDYFQHWPVFVEVKDLLTLVPPLVGLKGNLEMTLASRLSTAANTGQIDDPQE

SEQ ID NO: 81804 - protein, 65 aa, Homo sapiens
  Payload ID: 16287
  Gene Symbol: SLC41A3
  Gene Name: solute carrier family 41, member 3
  ENSP ID: ENSP00000425311
MTLASRLSTAANTGQIDDPQEQHRVISSNLALIQVQATVVGLLAAVAALLLGVVSREEVDVAKGC

SEQ ID NO: 81805 - protein, 288 aa, Homo sapiens
  Payload ID: 16287
  Gene Symbol: SLC41A3
  Gene Name: solute carrier family 41, member 3
  ENSP ID: ENSP00000425373
MDGTETRQRRLDSCGKPGELGLPHPLSTGGLPVASEDGALRAPESQSVTPKPLETEPSRETTWSIGLQVTVPFMFAGLGLSWAGMLLDYFQGKKLRGFSCELTRSPHGVLPESFFTIMCQVVVPILLSGLCMMTAGLVMNTIQHWPVFVEVKDLLTLVPPLVGLKGNLEMTLASRLSTAANTGQIDDPQEQHRVISSNLALIQVQATVVGLLAAVAALLLGVVSREEVDVAKVELLCASSVLTAFLAAFALGVLMVCIVIGARKLGVNPDNIATPIAASLGDLITLSI

SEQ ID NO: 81806 - protein, 92 aa, Homo sapiens
  Payload ID: 16287
  Gene Symbol: SLC41A3
  Gene Name: solute carrier family 41, member 3
  ENSP ID: ENSP00000427254
MDGTETRQRRLDSCGKPGELGLPHPLSTGGLPVASEDGALRAPESQSVTPKPLETEPSRETTWSIGLQVTVPFMFAGLGLSWAGMLLDYFQF

SEQ ID NO: 81807 - protein, 370 aa, Homo sapiens
  Payload ID: 16287
  Gene Symbol: SLC41A3
  Gene Name: solute carrier family 41, member 3
  Uniprot ID: Q96GZ6
  ENSP ID: ENSP00000427409
MTLASRLSTAANTGQIDDPQEQHRVISSNLALIQVQATVVGLLAAVAALLLGVVSREEVDVAKVELLCASSVLTAFLAAFALGVLMVCIVIGARKLGVNPDNIATPIAASLGDLITLSILALVSSFFYRHKDSRYLTPLVCLSFAALTPVWVLIAKQSPPIVKILKFGWFPIILAMVISSFGGLILSKTVSKQQYKGMAIFTPVICGVGGNLVAIQTSRISTYLHMWSAPGVLPLQMKKFWPNPCSTFCTSEINSMSARVLLLLVVPGHLIFFYIIYLVEGQSVINSQTFVVLYLLAGLIQVTILLYLAEVMVRLTWHQALDPDNHCIPYLTGLGDLLGTGLLALCFFTDWLLKSKAELGGISELASGPP

SEQ ID NO: 81808 - protein, 500 aa, Homo sapiens
  Payload ID: 16287
  Gene Symbol: SLC41A3
  Gene Name: solute carrier family 41, member 3
  Uniprot ID: Q96GZ6
  ENSP ID: ENSP00000480188
MDGTETRQRRLDSCGKPGELGLPHPLSTGGLPVASEDGALRAPESQSVTPKPLETEPSRETTWSIGLQVTVPFMFAGLGLSWAGMLLDYFQHWPVFVEVKDLLTLVPPLVGLKGNLEMTLASRLSTAANTGQIDDPQEQHRVISSNLALIQVQATVVGLLAAVAALLLGVVSREEVDVAKVELLCASSVLTAFLAAFALGVLMVCIVIGARKLGVNPDNIATPIAASLGDLITLSILALVSSFFYRHKDSRYLTPLVCLSFAALTPVWVLIAKQSPPIVKILKFGWFPIILAMVISSFGGLILSKTVSKQQYKGMAIFTPVICGVGGNLVAIQTSRISTYLHMWSAPGVLPLQMKKFWPNPCSTFCTSEINSMSARVLLLLVVPGHLIFFYIIYLVEGQSVINSQTFVVLYLLAGLIQVTILLYLAEVMVRLTWHQALDPDNHCIPYLTGLGDLLGSSSVGHTAAVPRRCTASPGWGLIQPFICTQHLIVSLLSFYFPFC

SEQ ID NO: 81809 - protein, 559 aa, Homo sapiens
  Payload ID: 16288
  Gene Symbol: SLC43A1
  Gene Name: solute carrier family 43 (amino acid system L transporter), member 1
  Uniprot ID: O75387
  ENSP ID: ENSP00000278426
MAPTLQQAYRRRWWMACTAVLENLFFSAVLLGWGSLLIILKNEGFYSSTCPAESSTNTTQDEQRRWPGCDQQDEMLNLGFTIGSFVLSATTLPLGILMDRFGPRPVRLVGSACFTASCTLMALASRDVEALSPLIFLALSLNGFGGICLTFTSLTLPNMFGNLRSTLMALMIGSYASSAITFPGIKLIYDAGVAFVVIMFTWSGLACLIFLNCTLNWPIEAFPAPEEVNYTKKIKLSGLALDHKVTGDLFYTHVTTMGQRLSQKAPSLEDGSDAFMSPQDVRGTSENLPERSVPLRKSLCSPTFLWSLLTMGMTQLRIIFYMAAVNKMLEYLVTGGQEHETNEQQQKVAETVGFYSSVFGAMQLLCLLTCPLIGYIMDWRIKDCVDAPTQGTVLGDARDGVATKSIRPRYCKIQKLTNAISAFTLTNLLLVGFGITCLINNLHLQFVTFVLHTIVRGFFHSACGSLYAAVFPSNHFGTLTGLQSLISAVFALLQQPLFMAMVGPLKGEPFWVNLGLLLFSLLGFLLPSYLFYYRARLQQEYAANGMGPLKVLSGSEVTA

SEQ ID NO: 81810 - protein, 58 aa, Homo sapiens
  Payload ID: 16288
  Gene Symbol: SLC43A1
  Gene Name: solute carrier family 43 (amino acid system L transporter), member 1
  ENSP ID: ENSP00000432241
MAPTLQQAYRRRWWMACTAVLENLFFSAVLLGWGSLLIILKNEGFYSSTCPAVPGVMC

SEQ ID NO: 81811 - protein, 58 aa, Homo sapiens; identical to SEQ ID NO: 81810
  Payload ID: 16288
  Gene Symbol: SLC43A1
  Gene Name: solute carrier family 43 (amino acid system L transporter), member 1
  ENSP ID: ENSP00000432361

SEQ ID NO: 81812 - protein, 171 aa, Homo sapiens
  Payload ID: 16288
  Gene Symbol: SLC43A1
  Gene Name: solute carrier family 43 (amino acid system L transporter), member 1
  ENSP ID: ENSP00000434312
MAPTLQQAYRRRWWMACTAVLENLFFSAVLLGWGSLLIILKNEGFYSSTCPAESSTNTTQDEQRRWPGCDQQDEMLNLGFTIGSFVLSATTLPLGILMDRFGPRPVRLVGSACFTASCTLMALASRDVEALSPLIFLALSLNGFGGICLTFTSLTEEDQAEWAGPGPQGDR

SEQ ID NO: 81813 - protein, 110 aa, Homo sapiens
  Payload ID: 16288
  Gene Symbol: SLC43A1
  Gene Name: solute carrier family 43 (amino acid system L transporter), member 1
  ENSP ID: ENSP00000435486
MAPTLQQAYRRRWWMACTAVLENLFFSAVLLGWGSLLIILKNEGFYSSTCPAESSTNTTQDEQRRWPGCDQQDEMLNLGFTIGSFVLSATTLPLGILMDRFGPRPVRLVG

SEQ ID NO: 81814 - protein, 259 aa, Homo sapiens
  Payload ID: 16288
  Gene Symbol: SLC43A1
  Gene Name: solute carrier family 43 (amino acid system L transporter), member 1
  ENSP ID: ENSP00000435647
MAPTLQQAYRRRWWMACTAVLENLFFSAVLLGWGSLLIILKNEGFYSSTCPAESSTNTTQDEQRRWPGCDQQDEMLNLGFTIGSFVLSATTLPLGILMDRFGPRPVRLVGSACFTASCTLMALASRDVEALSPLIFLALSLNGFGGICLTFTSLTLIYDAGVAFVVIMFTWSGLACLIFLNCTLNWPIEAFPAPEEVNYTKKIKLSGLALDHKVTGDLFYTHVTTMGQRLSQKAPSLEDGSDAFMSPQDVRGTSENLPE

SEQ ID NO: 81815 - protein, 559 aa, Homo sapiens; identical to SEQ ID NO: 81809
  Payload ID: 16288
  Gene Symbol: SLC43A1
  Gene Name: solute carrier family 43 (amino acid system L transporter), member 1
  Uniprot ID: O75387
  ENSP ID: ENSP00000435673

SEQ ID NO: 81816 - protein, 186 aa, Homo sapiens
  Payload ID: 16288
  Gene Symbol: SLC43A1
  Gene Name: solute carrier family 43 (amino acid system L transporter), member 1
  ENSP ID: ENSP00000435803
  MOD_RES (1)..(1): Any amino acid
XTNTTQDEQRRWPGCDQQDEMLNLGFTIGSFVLSATTLPLGILMDRFGPRPVRLVGSACFTASCTLMALASRDVEALSPLIFLALSLNGFGGICLTFTSLTGRGCYQIHQTTLLQDPKAHQCHQCLHPDQPAACGFWHHLSHQQLTPPVCDLCPAHHCSRFLPLSLWESLCCSVPIQPLWDADRPA

SEQ ID NO: 81817 - protein, 569 aa, Homo sapiens
  Payload ID: 16289
  Gene Symbol: SLC43A2
  Gene Name: solute carrier family 43 (amino acid system L transporter), member 2
  Uniprot ID: Q8N370
  ENSP ID: ENSP00000301335
MAPTLATAHRRRWWMACTAVLENLLFSAVLLGWGSLLIMLKSEGFYSYLCTEPENVTNGTVGGTAEPGHEEVSWMNGWLSCQAQDEMLNLAFTVGSFLLSAITLPLGIVMDKYGPRKLRLLGSACFAVSCLLIAYGASKPNALSVLIFIALALNGFGGMCMTFTSLTLPNMFGDLRSTFIALMIGSYASSAVTFPGIKLIYDAGVSFIVVLVVWAGCSGLVFLNCFFNWPLEPFPGPEDMDYSVKIKFSWLGFDHKITGKQFYKQVTTVGRRLSVGSSMRSAKEQVALQEGHKLCLSTVDLEVKCQPDAAVAPSFMHSVFSPILLLSLVTMCVTQLRLIFYMGAMNNILKFLVSGDQKTVGLYTSIFGVLQLLCLLTAPVIGYIMDWRLKECEDASEEPEEKDANQGEKKKKKRDRQIQKITNAMRAFAFTNLLLVGFGVTCLIPNLPLQILSFILHTIVRGFIHSAVGGLYAAVYPSTQFGSLTGLQSLISALFALLQQPLFLAMMGPLQGDPLWVNVGLLLLSLLGFCLPLYLICYRRQLERQLQQRQEDDKLFLKINGSSNQEAFV

SEQ ID NO: 81818 - protein, 432 aa, Homo sapiens
  Payload ID: 16289
  Gene Symbol: SLC43A2
  Gene Name: solute carrier family 43 (amino acid system L transporter), member 2
  Uniprot ID: Q8N370
  ENSP ID: ENSP00000371582
MTYGSPQANASPSDAVALDHGEVSRRQQQELPNMFGDLRSTFIALMIGSYASSAVTFPGIKLIYDAGVSFIVVLVVWAGCSGLVFLNCFFNWPLEPFPGPEDMDYSVKIKFSWLGFDHKITGKQFYKQVTTVGRRLSVGSSMRSAKEQVALQEGHKLCLSTVDLEVKCQPDAAVAPSFMHSVFSPILLLSLVTMCVTQLRLIFYMGAMNNILKFLVSGDQKTVGLYTSIFGVLQLLCLLTAPVIGYIMDWRLKECEDASEEPEEKDANQGEKKKKKRDRQIQKITNAMRAFAFTNLLLVGFGVTCLIPNLPLQILSFILHTIVRGFIHSAVGGLYAAVYPSTQFGSLTGLQSLISALFALLQQPLFLAMMGPLQGDPLWVNVGLLLLSLLGFCLPLYLICYRRQLERQLQQRQEDDKLFLKINGSSNQEAFV

SEQ ID NO: 81819 - protein, 432 aa, Homo sapiens; identical to SEQ ID NO: 81818
  Payload ID: 16289
  Gene Symbol: SLC43A2
  Gene Name: solute carrier family 43 (amino acid system L transporter), member 2
  Uniprot ID: Q8N370
  ENSP ID: ENSP00000408284

SEQ ID NO: 81820 - protein, 56 aa, Homo sapiens
  Payload ID: 16289
  Gene Symbol: SLC43A2
  Gene Name: solute carrier family 43 (amino acid system L transporter), member 2
  ENSP ID: ENSP00000460388
MTYGSPQANASPSDAVALDHGEVSRRQQQESCGSCQRTLPSLAMPRSSLTRRFSLL

SEQ ID NO: 81821 - protein, 62 aa, Homo sapiens
  Payload ID: 16289
  Gene Symbol: SLC43A2
  Gene Name: solute carrier family 43 (amino acid system L transporter), member 2
  ENSP ID: ENSP00000461298
MAPTLATAHRRRWWMACTAVLENLLFSAVLLGWGSLLIMLKSEGFYSYLCTEPAPASRFPAC

SEQ ID NO: 81822 - protein, 573 aa, Homo sapiens
  Payload ID: 16289
  Gene Symbol: SLC43A2
  Gene Name: solute carrier family 43 (amino acid system L transporter), member 2
  Uniprot ID: Q8N370
  ENSP ID: ENSP00000461382
MAPTLATAHRRRWWMACTAVLENLLFSAVLLGWGSLLIMLKSEGFYSYLCTEPENVTNGTVGGTAEPGHEEVSWMNGWLSCQAQDEMLNLAFTVGSFLLSAITLPLGIVMDKYGPRKLRLLGSACFAVSCLLIAYGASKPNALSVLIFIALALNGFGGMCMTFTSLTLPNMFGDLRSTFIALMIGSYASSAVTFPGIKLIYDAGVSFIVVLVVWAGCSGLVFLNCFFNWPLEPFPGPEDMDYSVKIKFSWLGFDHKITGKQFYKQVTTVGRRLSVGSSMRSAKEQVALQEGHKLCLSTVDLEVKCQPDAAVAPSFMHSVFSPILLLSLVTMCVTQLRLIFYMGAMNNILKFLVSGDQKTVMATVGLYTSIFGVLQLLCLLTAPVIGYIMDWRLKECEDASEEPEEKDANQGEKKKKKRDRQIQKITNAMRAFAFTNLLLVGFGVTCLIPNLPLQILSFILHTIVRGFIHSAVGGLYAAVYPSTQFGSLTGLQSLISALFALLQQPLFLAMMGPLQGDPLWVNVGLLLLSLLGFCLPLYLICYRRQLERQLQQRQEDDKLFLKINGSSNQEAFV

SEQ ID NO: 81823 - protein, 109 aa, Homo sapiens
  Payload ID: 16289
  Gene Symbol: SLC43A2
  Gene Name: solute carrier family 43 (amino acid system L transporter), member 2
  ENSP ID: ENSP00000461553
MAPTLATAHRRRWWMACTAVLENLLFSAVLLGWGSLLIMLKSEGFYSYLCTEPENVTNGTVGGTAEPGHEECHHPAPGYRHGQVWPEEAQAAGQRLLRGFLLADCVRSK

SEQ ID NO: 81824 - protein, 573 aa, Homo sapiens; identical to SEQ ID NO: 81822
  Payload ID: 16289
  Gene Symbol: SLC43A2
  Gene Name: solute carrier family 43 (amino acid system L transporter), member 2
  Uniprot ID: Q8N370
  ENSP ID: ENSP00000483848

SEQ ID NO: 81825 - protein, 573 aa, Homo sapiens; identical to SEQ ID NO: 81822
  Payload ID: 16289
  Gene Symbol: SLC43A2
  Gene Name: solute carrier family 43 (amino acid system L transporter), member 2
  Uniprot ID: Q8N370
  ENSP ID: ENSP00000484291

SEQ ID NO: 81826 - protein, 109 aa, Homo sapiens; identical to SEQ ID NO: 81823
  Payload ID: 16289
  Gene Symbol: SLC43A2
  Gene Name: solute carrier family 43 (amino acid system L transporter), member 2
  ENSP ID: ENSP00000487841

SEQ ID NO: 81827 - protein, 56 aa, Homo sapiens; identical to SEQ ID NO: 81820
  Payload ID: 16289
  Gene Symbol: SLC43A2
  Gene Name: solute carrier family 43 (amino acid system L transporter), member 2
  ENSP ID: ENSP00000487944

SEQ ID NO: 81828 - protein, 569 aa, Homo sapiens; identical to SEQ ID NO: 81817
  Payload ID: 16289
  Gene Symbol: SLC43A2
  Gene Name: solute carrier family 43 (amino acid system L transporter), member 2
  Uniprot ID: Q8N370
  ENSP ID: ENSP00000488355

SEQ ID NO: 81829 - protein, 62 aa, Homo sapiens; identical to SEQ ID NO: 81821
  Payload ID: 16289
  Gene Symbol: SLC43A2
  Gene Name: solute carrier family 43 (amino acid system L transporter), member 2
  ENSP ID: ENSP00000488706

SEQ ID NO: 81830 - protein, 491 aa, Homo sapiens
  Payload ID: 16290
  Gene Symbol: SLC43A3
  Gene Name: solute carrier family 43, member 3
  Uniprot ID: Q8NBI5
  ENSP ID: ENSP00000337561
MAGQGLPLHVATLLTGLLECLGFAGVLFGWPSLVFVFKNEDYFKDLCGPDAGPIGNATGQADCKAQDERFSLIFTLGSFMNNFMTFPTGYIFDRFKTTVARLIAIFFYTTATLIIAFTSAGSAVLLFLAMPMLTIGGILFLITNLQIGNLFGQHRSTIITLYNGAFDSSSAVFLIIKLLYEKGISLRASFIFISVCSTWHVARTFLLMPRGHIPYPLPPNYSYGLCPGNGTTKEEKETAEHENRELQSKEFLSAKEETPGAGQKQELRSFWSYAFSRRFAWHLVWLSVIQLWHYLFIGTLNSLLTNMAGGDMARVSTYTNAFAFTQFGVLCAPWNGLLMDRLKQKYQKEARKTGSSTLAVALCSTVPSLALTSLLCLGFALCASVPILPLQYLTFILQVISRSFLYGSNAAFLTLAFPSEHFGKLFGLVMALSAVVSLLQFPIFTLIKGSLQNDPFYVNVMFMLAILLTFFHPFLVYRECRTWKESPSAIA

SEQ ID NO: 81831 - protein, 491 aa, Homo sapiens; identical to SEQ ID NO: 81830
  Payload ID: 16290
  Gene Symbol: SLC43A3
  Gene Name: solute carrier family 43, member 3
  Uniprot ID: Q8NBI5
  ENSP ID: ENSP00000378555

SEQ ID NO: 81832 - protein, 491 aa, Homo sapiens; identical to SEQ ID NO: 81830
  Payload ID: 16290
  Gene Symbol: SLC43A3
  Gene Name: solute carrier family 43, member 3
  Uniprot ID: Q8NBI5
  ENSP ID: ENSP00000378556

SEQ ID NO: 81833 - protein, 82 aa, Homo sapiens
  Payload ID: 16290
  Gene Symbol: SLC43A3
  Gene Name: solute carrier family 43, member 3
  ENSP ID: ENSP00000431367
MAGQGLPLHVATLLTGLLECLGFAGVLFGWPSLVFVFKNEDYFKDLCGPDAGPIGNATGQAGRLGCMGDLFSTPDCKAQDER

SEQ ID NO: 81834 - protein, 109 aa, Homo sapiens
  Payload ID: 16290
  Gene Symbol: SLC43A3
  Gene Name: solute carrier family 43, member 3
  ENSP ID: ENSP00000431762
MAGQGLPLHVATLLTGLLECLGFAGVLFGWPSLVFVFKNEDYFKDLCGPDAGPIGNATGQADCKAQDERFSLIFTLGSFMNNFMTFPTGYIFDRFKTTVARLIAIFFYT

SEQ ID NO: 81835 - protein, 44 aa, Homo sapiens
  Payload ID: 16290
  Gene Symbol: SLC43A3
  Gene Name: solute carrier family 43, member 3
  ENSP ID: ENSP00000431765
MAGQGLPLHVATLLTGLLECLGFAGVLFGWPSLVFVFKNEDYFK

SEQ ID NO: 81836 - protein, 137 aa, Homo sapiens
  Payload ID: 16290
  Gene Symbol: SLC43A3
  Gene Name: solute carrier family 43, member 3
  ENSP ID: ENSP00000433078
  MOD_RES (1)..(1): Any amino acid
XTTKEEKETAEHENRELQSKEFLSAKEETPGAGQKQELRSFWSYAFSRRFAWHLVWLSVIQLWHYLFIGTLNSLLTNMAGGDMARVSTYTNAFAFTQFGVLCAPWNGLLMDRLKQKYQKEARKTVSLQSTLASSLGW

SEQ ID NO: 81837 - protein, 22 aa, Homo sapiens
  Payload ID: 16290
  Gene Symbol: SLC43A3
  Gene Name: solute carrier family 43, member 3
  ENSP ID: ENSP00000433393
MAGQGLPLHVATLLTGLLECLG

SEQ ID NO: 81838 - protein, 119 aa, Homo sapiens
  Payload ID: 16290
  Gene Symbol: SLC43A3
  Gene Name: solute carrier family 43, member 3
  ENSP ID: ENSP00000433974
MAGQGLPLHVATLLTGLLECLGFAGVLFGWPSLVFVFKNEDYFKDLCGPDAGPIGNATGQADCKAQDERFSLIFTLGSFMNNFMTFPTGYIFDRFKTTVARLIAIFFYTTATLIIAFTS

SEQ ID NO: 81839 - protein, 126 aa, Homo sapiens
  Payload ID: 16290
  Gene Symbol: SLC43A3
  Gene Name: solute carrier family 43, member 3
  ENSP ID: ENSP00000434293
MGDLFSTPDCKAQDERFSLIFTLGSFMNNFMTFPTGYIFDRFKTTVARLIAIFFYTTATLIIAFTSAGSAVLLFLAMPMLTIGGILFLITNLQIGNLFGQHRSTIITLYNGAFDSSSAVFLIIKLL

SEQ ID NO: 81840 - protein, 1 aa, Homo sapiens
  Payload ID: 16290
  Gene Symbol: SLC43A3
  Gene Name: solute carrier family 43, member 3
  ENSP ID: ENSP00000434371
M

SEQ ID NO: 81841 - protein, 504 aa, Homo sapiens
  Payload ID: 16290
  Gene Symbol: SLC43A3
  Gene Name: solute carrier family 43, member 3
  Uniprot ID: Q8NBI5
  ENSP ID: ENSP00000434515
MAGQGLPLHVATLLTGLLECLGFAGVLFGWPSLVFVFKNEDYFKDLCGPDAGPIGNATGQAGRLGCMGDLFSTPDCKAQDERFSLIFTLGSFMNNFMTFPTGYIFDRFKTTVARLIAIFFYTTATLIIAFTSAGSAVLLFLAMPMLTIGGILFLITNLQIGNLFGQHRSTIITLYNGAFDSSSAVFLIIKLLYEKGISLRASFIFISVCSTWHVARTFLLMPRGHIPYPLPPNYSYGLCPGNGTTKEEKETAEHENRELQSKEFLSAKEETPGAGQKQELRSFWSYAFSRRFAWHLVWLSVIQLWHYLFIGTLNSLLTNMAGGDMARVSTYTNAFAFTQFGVLCAPWNGLLMDRLKQKYQKEARKTGSSTLAVALCSTVPSLALTSLLCLGFALCASVPILPLQYLTFILQVISRSFLYGSNAAFLTLAFPSEHFGKLFGLVMALSAVVSLLQFPIFTLIKGSLQNDPFYVNVMFMLAILLTFFHPFLVYRECRTWKESPSAIA

SEQ ID NO: 81842 - protein, 101 aa, Homo sapiens
  Payload ID: 16290
  Gene Symbol: SLC43A3
  Gene Name: solute carrier family 43, member 3
  ENSP ID: ENSP00000434569
MAGQGLPLHVATLLTGLLECLGFAGVLFGWPSLVFVFKNEDYFKDLCGPDAGPIGNATGQADCKAQDERFSLIFTLGSFMNNFMTFPTGYIFDRFKTTVAR

SEQ ID NO: 81843 - protein, 63 aa, Homo sapiens
  Payload ID: 16290
  Gene Symbol: SLC43A3
  Gene Name: solute carrier family 43, member 3
  ENSP ID: ENSP00000434710
MAGQGLPLHVATLLTGLLECLGFAGVLFGWPSLVFVFKNEDYFKDLCGPDAGPIGNATGQAGR

SEQ ID NO: 81844 - protein, 148 aa, Homo sapiens
  Payload ID: 16290
  Gene Symbol: SLC43A3
  Gene Name: solute carrier family 43, member 3
  ENSP ID: ENSP00000434913
MAGQGLPLHVATLLTGLLECLGFAGVLFGWPSLVFVFKNEDYFKDLCGPDAGPIGNATGQADCKAQDERFSLIFTLGSFMNNFMTFPTGYIFDRFKTTVARLIAIFFYTTATLIIAFTSAGSAVLLFLAMPMLTIGGILFLITNLQIG

SEQ ID NO: 81845 - protein, 97 aa, Homo sapiens
  Payload ID: 16290
  Gene Symbol: SLC43A3
  Gene Name: solute carrier family 43, member 3
  ENSP ID: ENSP00000435109
MAGQGLPLHVATLLTGLLECLGFAGVLFGWPSLVFVFKNEDYFKDLCGPDAGPIGNATGQADCKAQDERFSLIFTLGSFMNNFMTFPTGYIFDRFKT

SEQ ID NO: 81846 - protein, 107 aa, Homo sapiens
  Payload ID: 16290
  Gene Symbol: SLC43A3
  Gene Name: solute carrier family 43, member 3
  ENSP ID: ENSP00000435156
MAGQGLPLHVATLLTGLLECLGFAGVLFGWPSLVFVFKNEDYFKDLCGPDAGPIGNATGQADCKAQDERFSLIFTLGSFMNNFMTFPTGYIFDRFKTTVARLIAIFF

SEQ ID NO: 81847 - protein, 133 aa, Homo sapiens
  Payload ID: 16290
  Gene Symbol: SLC43A3
  Gene Name: solute carrier family 43, member 3
  ENSP ID: ENSP00000435273
MAGQGLPLHVATLLTGLLECLGFAGVLFGWPSLVFVFKNEDYFKDLCGPDAGPIGNATGQAGRLGCMGDLFSTPDCKAQDERFSLIFTLGSFMNNFMTFPTGYIFDRFKTTVARLIAIFFYTTATLIIAFTSA

SEQ ID NO: 81848 - protein, 78 aa, Homo sapiens
  Payload ID: 16290
  Gene Symbol: SLC43A3
  Gene Name: solute carrier family 43, member 3
  ENSP ID: ENSP00000435490
MAGQGLPLHVATLLTGLLECLGFAGVLFGWPSLVFVFKNEDYFKDLCGPDAGPIGNATGQADCKAQDERFSLIFTLGS

SEQ ID NO: 81849 - protein, 331 aa, Homo sapiens
  Payload ID: 16290
  Gene Symbol: SLC43A3
  Gene Name: solute carrier family 43, member 3
  ENSP ID: ENSP00000435893
MAGQGLPLHVATLLTGLLECLGFAGVLFGWPSLVFVFKNEDYFKDLCGPDAGPIGNATGQADCKAQDERFSLIFTLGSFMNNFMTFPTGYIFDRFKTTVARLIAIFFYTTATLIIAFTSAGSAVLLFLAMPMLTIGGILFLITNLQIGNLFGQHRSTIITLYNGAFDSSSAVFLIIKLLYEKGISLRASFIFISVCSTWHVARTFLLMPRGHIPYPLPPNYSYGLCPGNGTTKEEKETAEHENRELQSKEFLSAKEETPGAGQKQELRSFWSYAFSRRFAWHLVWLSVIQLWHYLFIGTLNSLLTNMAGGDMARVSTYTNAFAFTQFGVLC

SEQ ID NO: 81850 - protein, 169 aa, Homo sapiens
  Payload ID: 16290
  Gene Symbol: SLC43A3
  Gene Name: solute carrier family 43, member 3
  ENSP ID: ENSP00000436055
MAGQGLPLHVATLLTGLLECLGFAGVLFGWPSLVFVFKNEDYFKDLCGPDAGPIGNATGQADCKAQDERFSLIFTLGSFMNNFMTFPTGYIFDRFKTTVARLIAIFFYTTATLIIAFTSAGSAVLLFLAMPMLTIGGILFLITNLQIGNLFGQHRSTIITLYNGAFDSS

SEQ ID NO: 81851 - protein, 491 aa, Homo sapiens; identical to SEQ ID NO: 81830
  Payload ID: 16290
  Gene Symbol: SLC43A3
  Gene Name: solute carrier family 43, member 3
  Uniprot ID: Q8NBI5
  ENSP ID: ENSP00000436254

SEQ ID NO: 81852 - protein, 657 aa, Homo sapiens
  Payload ID: 16291
  Gene Symbol: SLC44A1
  Gene Name: solute carrier family 44 (choline transporter), member 1
  Uniprot ID: Q8WWI5
  ENSP ID: ENSP00000363852
MGCCSSASSAAQSSKREWKPLEDRSCTDIPWLLLFILFCIGMGFICGFSIATGAAARLVSGYDSYGNICGQKNTKLEAIPNSGMDHTQRKYVFFLDPCNLDLINRKIKSVALCVAACPRQELKTLSDVQKFAEINGSALCSYNLKPSEYTTSPKSSVLCPKLPVPASAPIPFFHRCAPVNISCYAKFAEALITFVSDNSVLHRLISGVMTSKEIILGLCLLSLVLSMILMVIIRYISRVLVWILTILVILGSLGGTGVLWWLYAKQRRSPKETVTPEQLQIAEDNLRALLIYAISATVFTVILFLIMLVMRKRVALTIALFHVAGKVFIHLPLLVFQPFWTFFALVLFWVYWIMTLLFLGTTGSPVQNEQGFVEFKISGPLQYMWWYHVVGLIWISEFILACQQMTVAGAVVTYYFTRDKRNLPFTPILASVNRLIRYHLGTVAKGSFIITLVKIPRMILMYIHSQLKGKENACARCVLKSCICCLWCLEKCLNYLNQNAYTATAINSTNFCTSAKDAFVILVENALRVATINTVGDFMLFLGKVLIVCSTGLAGIMLLNYQQDYTVWVLPLIIVCLFAFLVAHCFLSIYEMVVDVLFLCFAIDTKYNDGSPGREFYMDKVLMEFVENSRKAMKEAGKGGVADSRELKPMASGASSA

SEQ ID NO: 81853 - protein, 652 aa, Homo sapiens
  Payload ID: 16291
  Gene Symbol: SLC44A1
  Gene Name: solute carrier family 44 (choline transporter), member 1
  Uniprot ID: Q8WWI5
  ENSP ID: ENSP00000363855
MGCCSSASSAAQSSKREWKPLEDRSCTDIPWLLLFILFCIGMGFICGFSIATGAAARLVSGYDSYGNICGQKNTKLEAIPNSGMDHTQRKYVFFLDPCNLDLINRKIKSVALCVAACPRQELKTLSDVQKFAEINGSALCSYNLKPSEYTTSPKSSVLCPKLPVPASAPIPFFHRCAPVNISCYAKFAEALITFVSDNSVLHRLISGVMTSKEIILGLCLLSLVLSMILMVIIRYISRVLVWILTILVILGSLGGTGVLWWLYAKQRRSPKETVTPEQLQIAEDNLRALLIYAISATVFTVILFLIMLVMRKRVALTIALFHVAGKVFIHLPLLVFQPFWTFFALVLFWVYWIMTLLFLGTTGSPVQNEQGFVEFKISGPLQYMWWYHVVGLIWISEFILACQQMTVAGAVVTYYFTRDKRNLPFTPILASVNRLIRYHLGTVAKGSFIITLVKIPRMILMYIHSQLKGKENACARCVLKSCICCLWCLEKCLNYLNQNAYTATAINSTNFCTSAKDAFVILVENALRVATINTVGDFMLFLGKVLIVCSTGLAGIMLLNYQQDYTVWVLPLIIVCLFAFLVAHCFLSIYEMVVDVLFLCFAIDTKYNDGSPGREFYMDKVLMEFVENSRKAMKEAGKGGVADSRELKPMIK

SEQ ID NO: 81854 - protein, 654 aa, Homo sapiens
  Payload ID: 16291
  Gene Symbol: SLC44A1
  Gene Name: solute carrier family 44 (choline transporter), member 1
  Uniprot ID: Q8WWI5
  ENSP ID: ENSP00000363856
MGCCSSASSAAQSSKREWKPLEDRSCTDIPWLLLFILFCIGMGFICGFSIATGAAARLVSGYDSYGNICGQKNTKLEAIPNSGMDHTQRKYVFFLDPCNLDLINRKIKSVALCVAACPRQELKTLSDVQKFAEINGSALCSYNLKPSEYTTSPKSSVLCPKLPVPASAPIPFFHRCAPVNISCYAKFAEALITFVSDNSVLHRLISGVMTSKEIILGLCLLSLVLSMILMVIIRYISRVLVWILTILVILGSLGGTGVLWWLYAKQRRSPKETVTPEQLQIAEDNLRALLIYAISATVFTVILFLIMLVMRKRVALTIALFHVAGKVFIHLPLLVFQPFWTFFALVLFWVYWIMTLLFLGTTGSPVQNEQGFVEFKISGPLQYMWWYHVVGLIWISEFILACQQMTVAGAVVTYYFTRDKRNLPFTPILASVNRLIRYHLGTVAKGSFIITLVKIPRMILMYIHSQLKGKENACARCVLKSCICCLWCLEKCLNYLNQNAYTATAINSTNFCTSAKDAFVILVENALRVATINTVGDFMLFLGKVLIVCSTGLAGIMLLNYQQDYTVWVLPLIIVCLFAFLVAHCFLSIYEMVVDVLFLCFAIDTKYNDGSPGREFYMDKVLMEFVENSRKAMKEAGKGGVADSRELKPMLKKR

SEQ ID NO: 81855 - protein, 657 aa, Homo sapiens; identical to SEQ ID NO: 81852
  Payload ID: 16291
  Gene Symbol: SLC44A1
  Gene Name: solute carrier family 44 (choline transporter), member 1
  Uniprot ID: Q8WWI5
  ENSP ID: ENSP00000433072

SEQ ID NO: 81856 - protein, 706 aa, Homo sapiens
  Payload ID: 16292
  Gene Symbol: SLC44A2
  Gene Name: solute carrier family 44 (choline transporter), member 2
  Uniprot ID: Q8IWA5
  ENSP ID: ENSP00000336888
MGDERPHYYGKHGTPQKYDPTFKGPIYNRGCTDIICCVFLLLAIVGYVAVGIIAWTHGDPRKVIYPTDSRGEFCGQKGTKNENKPYLFYFNIVKCASPLVLLEFQCPTPQICVEKCPDRYLTYLNARSSRDFEYYKQFCVPGFKNNKGVAEVLQDGDCPAVLIPSKPLARRCFPAIHAYKGVLMVGNETTYEDGHGSRKNITDLVEGAKKANGVLEARQLAMRIFEDYTVSWYWIIIGLVIAMAMSLLFIILLRFLAGIMVWVMIIMVILVLGYGIFHCYMEYSRLRGEAGSDVSLVDLGFQTDFRVYLHLRQTWLAFMIILSILEVIIILLLIFLRKRILIAIALIKEASRAVGYVMCSLLYPLVTFFLLCLCIAYWASTAVFLSTSNEAVYKIFDDSPCPFTAKTCNPETFPSSNESRQCPNARCQFAFYGGESGYHRALLGLQIFNAFMFFWLANFVLALGQVTLAGAFASYYWALRKPDDLPAFPLFSAFGRALRYHTGSLAFGALILAIVQIIRVILEYLDQRLKAAENKFAKCLMTCLKCCFWCLEKFIKFLNRNAYIMIAIYGTNFCTSARNAFFLLMRNIIRVAVLDKVTDFLFLLGKLLIVGSVGILAFFFFTHRIRIVQDTAPPLNYYWVPILTVIVGSYLIAHGFFSVYGMCVDTLFLCFLEDLERNDGSAERPYFMSSTLKKLLNKTNKKAAES

SEQ ID NO: 81857 - protein, 704 aa, Homo sapiens
  Payload ID: 16292
  Gene Symbol: SLC44A2
  Gene Name: solute carrier family 44 (choline transporter), member 2
  Uniprot ID: Q8IWA5
  ENSP ID: ENSP00000385135
MEDERKNGAYGTPQKYDPTFKGPIYNRGCTDIICCVFLLLAIVGYVAVGIIAWTHGDPRKVIYPTDSRGEFCGQKGTKNENKPYLFYFNIVKCASPLVLLEFQCPTPQICVEKCPDRYLTYLNARSSRDFEYYKQFCVPGFKNNKGVAEVLQDGDCPAVLIPSKPLARRCFPAIHAYKGVLMVGNETTYEDGHGSRKNITDLVEGAKKANGVLEARQLAMRIFEDYTVSWYWIIIGLVIAMAMSLLFIILLRFLAGIMVWVMIIMVILVLGYGIFHCYMEYSRLRGEAGSDVSLVDLGFQTDFRVYLHLRQTWLAFMIILSILEVIIILLLIFLRKRILIAIALIKEASRAVGYVMCSLLYPLVTFFLLCLCIAYWASTAVFLSTSNEAVYKIFDDSPCPFTAKTCNPETFPSSNESRQCPNARCQFAFYGGESGYHRALLGLQIFNAFMFFWLANFVLALGQVTLAGAFASYYWALRKPDDLPAFPLFSAFGRALRYHTGSLAFGALILAIVQIIRVILEYLDQRLKAAENKFAKCLMTCLKCCFWCLEKFIKFLNRNAYIMIAIYGTNFCTSARNAFFLLMRNIIRVAVLDKVTDFLFLLGKLLIVGSVGILAFFFFTHRIRIVQDTAPPLNYYWVPILTVIVGSYLIAHGFFSVYGMCVDTLFLCFLEDLERNDGSAERPYFMSSTLKKLLNKTNKKAAES

SEQ ID NO: 81858 - protein, 10 aa, Homo sapiens
  Payload ID: 16292
  Gene Symbol: SLC44A2
  Gene Name: solute carrier family 44 (choline transporter), member 2
  ENSP ID: ENSP00000465547
MVGNETTYED

SEQ ID NO: 81859 - protein, 124 aa, Homo sapiens
  Payload ID: 16292
  Gene Symbol: SLC44A2
  Gene Name: solute carrier family 44 (choline transporter), member 2
  ENSP ID: ENSP00000466575
  MOD_RES (1)..(1): Any amino acid
XAENKFAKCLMTCLKCCFWCLEKFIKFLNRNAYIMIAIYGTNFCTSARNAFFLLMRNIIRDPGFLLLHPPYQDRAGYSTTPQLLLGSYTDGDRWLLLDCTRFLQRLWHVCGHAVPLLLGGPGEE

SEQ ID NO: 81860 - protein, 42 aa, Homo sapiens
  Payload ID: 16292
  Gene Symbol: SLC44A2
  Gene Name: solute carrier family 44 (choline transporter), member 2
  ENSP ID: ENSP00000466612
MGDERPHYYGKHGTPQKYDPTFKGPIYNSLDSWRPSKGDLPH

SEQ ID NO: 81861 - protein, 711 aa, Homo sapiens
  Payload ID: 16292
  Gene Symbol: SLC44A2
  Gene Name: solute carrier family 44 (choline transporter), member 2
  Uniprot ID: Q8IWA5
  ENSP ID: ENSP00000466664
MGDERPHYYGKHGTPQKYDPTFKGPIYNRGCTDIICCVFLLLAIVGYVAVGIIAWTHGDPRKVIYPTDSRGEFCGQKGTKNENKPYLFYFNIVKCASPLVLLEFQCPTPQICVEKCPDRYLTYLNARSSRDFEYYKQFCVPGFKNNKGVAEVLQDGDCPAVLIPSKPLARRCFPAIHAYKGVLMVGNETTYEDGHGSRKNITDLVEGAKKANGVLEARQLAMRIFEDYTVSWYWIIIGLVIAMAMSLLFIILLRFLAGIMVWVMIIMVILVLGYGIFHCYMEYSRLRGEAGSDVSLVDLGFQTDFRVYLHLRQTWLAFMIILSILEVIIILLLIFLRKRILIAIALIKEASRAVGYVMCSLLYPLVTFFLLCLCIAYWASTAVFLSTSNEAVYKIFDDSPCPFTAKTCNPETFPSSNESRQCPNARCQFAFYGGESGYHRALLGLQIFNAFMFFWLANFVLALGQVTLAGAFASYYWALRKPDDLPAFPLFSAFGRALRYHTGSLAFGALILAIVQIIRVILEYLDQRLKAAENKFAKCLMTCLKCCFWCLEKFIKFLNRNAYIMIAIYGTNFCTSARNAFFLLMRNIIRVAVLDKVTDFLFLLGKLLIVGSVGILAFFFFTHRIRIVQDTAPPLNYYWVPILTVIVGSYLIAHGFFSVYGMCVDTLFLCFCEDLERNDGSQERPYFMSPELRDILLKGSAEEGKRAEAEE

SEQ ID NO: 81862 - protein, 146 aa, Homo sapiens
  Payload ID: 16292
  Gene Symbol: SLC44A2
  Gene Name: solute carrier family 44 (choline transporter), member 2
  ENSP ID: ENSP00000467552
MGDERPHYYGKHGTPQKYDPTFKGPIYNRNKPYLFYFNIVKCASPLVLLEFQCPTPQICVEKCPDRYLTYLNARSSRDFEYYKQFCVPGFKNNKGVAEVLQDGDCPAVLIPSKPLARRCFPAIHAYKGVLMVGNETTYEDGHGSRK

SEQ ID NO: 81863 - protein, 95 aa, Homo sapiens
  Payload ID: 16292
  Gene Symbol: SLC44A2
  Gene Name: solute carrier family 44 (choline transporter), member 2
  ENSP ID: ENSP00000468070
MGDERPHYYGKHGTPQKYDPTFKGPIYNRGCTDIICCVFLLLAIVGYVAVGIIAWTHGDPRKVIYPTDSRGEFCGQKGTKNENISLLHGVLPTAW

SEQ ID NO: 81864 - protein, 170 aa, Homo sapiens
  Payload ID: 16292
  Gene Symbol: SLC44A2
  Gene Name: solute carrier family 44 (choline transporter), member 2
  ENSP ID: ENSP00000468691
MEDERKNGAYGTPQKYDPTFKGPIYNRNKPYLFYFNIVKCASPLVLLEFQCPTPQICVEKCPDRYLTYLNARSSRDFEYYKQFCVPGFKNNKGVAEVLQDGDCPAVLIPSKPLARRCFPAIHAYKGVLMVGNETTYEDGHGSRKNITDLVEGAKKANGVLEARQLAMRIF

SEQ ID NO: 81865 - protein, 148 aa, Homo sapiens
  Payload ID: 16292
  Gene Symbol: SLC44A2
  Gene Name: solute carrier family 44 (choline transporter), member 2
  ENSP ID: ENSP00000468812
  MOD_RES (1)..(1): Any amino acid
XMIAIYGTNFCTSARNAFFLLMRNIIRVAVLDKVTDFLFLLGKLLIVGSVGILAFFFFTHRIRIVQDTAPPLNYYWVPILTVIVGSYLIAHGFFSVYGMCVDTLFLCFCEDLERNDGSQERPYFMSPELRDILLKGSAEEGKRAEAEE

SEQ ID NO: 81866 - protein, 653 aa, Homo sapiens
  Payload ID: 16293
  Gene Symbol: SLC44A3
  Gene Name: solute carrier family 44, member 3
  Uniprot ID: Q8N4M1
  ENSP ID: ENSP00000271227
MHCLGAEYLVSAEGAPRQREWRPQIYRKCTDTAWLFLFFLFWTGLVFIMGYSVVAGAAGRLLFGYDSFGNMCGKKNSPVEGAPLSGQDMTLKKHVFFMNSCNLEVKGTQLNRMALCVSNCPEEQLDSLEEVQFFANTSGSFLCVYSLNSFNYTHSPKADSLCPRLPVPPSKSFPLFNRCVPQTPECYSLFASVLINDVDTLHRILSGIMSGRDTILGLCILALALSLAMMFTFRFITTLLVHIFISLVILGLLFVCGVLWWLYYDYTNDLSIELDTERENMKCVLGFAIVSTGITAVLLVLIFVLRKRIKLTVELFQITNKAISSAPFLLFQPLWTFAILIFFWVLWVAVLLSLGTAGAAQVMEGGQVEYKPLSGIRYMWSYHLIGLIWTSEFILACQQMTIAGAVVTCYFNRSKNDPPDHPILSSLSILFFYHQGTVVKGSFLISVVRIPRIIVMYMQNALKEQQHGALSRYLFRCCYCCFWCLDKYLLHLNQNAYTTTAINGTDFCTSAKDAFKILSKNSSHFTSINCFGDFIIFLGKVLVVCFTVFGGLMAFNYNRAFQVWAVPLLLVAFFAYLVAHSFLSVFETVLDALFLCFAVDLETNDGSSEKPYFMDQEFLSFVKRSNKLNNARAQQDKHSLRNEEGTELQAIVR

SEQ ID NO: 81867 - protein, 617 aa, Homo sapiens
  Payload ID: 16293
  Gene Symbol: SLC44A3
  Gene Name: solute carrier family 44, member 3
  Uniprot ID: Q8N4M1
  ENSP ID: ENSP00000389143
MHCLGAEYLVFIMGYSVVAGAAGRLLFGYDSFGNMCGKKNSPVEGAPLSGQDMTLKKHVFFMNSCNLEVKGTQLNRMALCVSNCPEEQLDSLEEVQFFANTSGSFLCVYSLNSFNYTHSPKADSLCPRLPVPPSKSFPLFNRCVPQTPECYSLFASVLINDVDTLHRILSGIMSGRDTILGLCILALALSLAMMFTFRFITTLLVHIFISLVILGLLFVCGVLWWLYYDYTNDLSIELDTERENMKCVLGFAIVSTGITAVLLVLIFVLRKRIKLTVELFQITNKAISSAPFLLFQPLWTFAILIFFWVLWVAVLLSLGTAGAAQVMEGGQVEYKPLSGIRYMWSYHLIGLIWTSEFILACQQMTIAGAVVTCYFNRSKNDPPDHPILSSLSILFFYHQGTVVKGSFLISVVRIPRIIVMYMQNALKEQQHGALSRYLFRCCYCCFWCLDKYLLHLNQNAYTTTAINGTDFCTSAKDAFKILSKNSSHFTSINCFGDFIIFLGKVLVVCFTVFGGLMAFNYNRAFQVWAVPLLLVAFFAYLVAHSFLSVFETVLDALFLCFAVDLETNDGSSEKPYFMDQEFLSFVKRSNKLNNARAQQDKHSLRNEEGTELQAIVR

SEQ ID NO: 81868 - protein, 163 aa, Homo sapiens
  Payload ID: 16293
  Gene Symbol: SLC44A3
  Gene Name: solute carrier family 44, member 3
  ENSP ID: ENSP00000410832
MGYSVVAGAAGRLLFGYDSFGNMCGKKNSPVEGAPLSGQDMTLKKHVFFMNSCNLEVKGTQLNRMALCVSNCPEEQLDSLEEVQFFANTSGSFLCVYSLNSFNYTHSPKADSLCPRLPVPPSKSFPLFNRCVPQTPECYSLFASVLINDVDTLHRILSGIMSG

SEQ ID NO: 81869 - protein, 620 aa, Homo sapiens
  Payload ID: 16293
  Gene Symbol: SLC44A3
  Gene Name: solute carrier family 44, member 3
  Uniprot ID: Q8N4M1
  ENSP ID: ENSP00000431836
MHCLGAEYLVSAEGAPRQREWRPQIYRKCTDTAWLFLFFLFWTGLVFIMGYSVVAGAAGRLLFGYDSFGNMCGKKNSPVEGAPLSGQDMTLKKHVFFMNSCNLEVKGSFLCVYSLNSFNYTHSPKADSLCPRLPVPPSKSFPLFNRCVPQTPECYSLFASVLINDVDTLHRILSGIMSGRDTILGLCILALALSLAMMFTFRFITTLLVHIFISLVILGLLFVCGVLWWLYYDYTNDLSIELDTERENMKCVLGFAIVSTGITAVLLVLIFVLRKRIKLTVELFQITNKAISSAPFLLFQPLWTFAILIFFWVLWVAVLLSLGTAGAAQVMEGGQVEYKPLSGIRYMWSYHLIGLIWTSEFILACQQMTIAGAVVTCYFNRSKNDPPDHPILSSLSILFFYHQGTVVKGSFLISVVRIPRIIVMYMQNALKEQHGALSRYLFRCCYCCFWCLDKYLLHLNQNAYTTTAINGTDFCTSAKDAFKILSKNSSHFTSINCFGDFIIFLGKVLVVCFTVFGGLMAFNYNRAFQVWAVPLLLVAFFAYLVAHSFLSVFETVLDALFLCFAVDLETNDGSSEKPYFMDQEFLSFVKRSNKLNNARAQQDKHSLRNEEGTELQAIVR

SEQ ID NO: 81870 - protein, 605 aa, Homo sapiens
  Payload ID: 16293
  Gene Symbol: SLC44A3
  Gene Name: solute carrier family 44, member 3
  Uniprot ID: Q8N4M1
  ENSP ID: ENSP00000432789
MGYSVVAGAAGRLLFGYDSFGNMCGKKNSPVEGAPLSGQDMTLKKHVFFMNSCNLEVKGTQLNRMALCVSNCPEEQLDSLEEVQFFANTSGSFLCVYSLNSFNYTHSPKADSLCPRLPVPPSKSFPLFNRCVPQTPECYSLFASVLINDVDTLHRILSGIMSGRDTILGLCILALALSLAMMFTFRFITTLLVHIFISLVILGLLFVCGVLWWLYYDYTNDLSIELDTERENMKCVLGFAIVSTGITAVLLVLIFVLRKRIKLTVELFQITNKAISSAPFLLFQPLWTFAILIFFWVLWVAVLLSLGTAGAAQVMEGGQVEYKPLSGIRYMWSYHLIGLIWTSEFILACQQMTIAGAVVTCYFNRSKNDPPDHPILSSLSILFFYHQGTVVKGSFLISVVRIPRIIVMYMQNALKEQQHGALSRYLFRCCYCCFWCLDKYLLHLNQNAYTTTAINGTDFCTSAKDAFKILSKNSSHFTSINCFGDFIIFLGKVLVVCFTVFGGLMAFNYNRAFQVWAVPLLLVAFFAYLVAHSFLSVFETVLDALFLCFAVDLETNDGSSEKPYFMDQEFLSFVKRSNKLNNARAQQDKHSLRNEEGTELQAIVR

SEQ ID NO: 81871 - protein, 109 aa, Homo sapiens
  Payload ID: 16293
  Gene Symbol: SLC44A3
  Gene Name: solute carrier family 44, member 3
  ENSP ID: ENSP00000432880
QHGALSRYLFRCCYCCFWCLDKYLLHLNQNAYTTTAINGTDFCTSAKDAFKILSKNSSHFTSINCFGDFIIFLGKSFVKRSNKLNNARAQQDKHSLRNEEGTELQAIVR

SEQ ID NO: 81872 - protein, 585 aa, Homo sapiens
  Payload ID: 16293
  Gene Symbol: SLC44A3
  Gene Name: solute carrier family 44, member 3
  Uniprot ID: Q8N4M1
  ENSP ID: ENSP00000433641
MHCLGAEYLVFIMGYSVVAGAAGRLLFGYDSFGNMCGKKNSPVEGAPLSGQDMTLKKHVFFMNSCNLEVKGSFLCVYSLNSFNYTHSPKADSLCPRLPVPPSKSFPLFNRCVPQTPECYSLFASVLINDVDTLHRILSGIMSGRDTILGLCILALALSLAMMFTFRFITTLLVHIFISLVILGLLFVCGVLWWLYYDYTNDLSIELDTERENMKCVLGFAIVSTGITAVLLVLIFVLRKRIKLTVELFQITNKAISSAPFLLFQPLWTFAILIFFWVLWVAVLLSLGTAGAAQVMEGGQVEYKPLSGIRYMWSYHLIGLIWTSEFILACQQMTIAGAVVTCYFNRSKNDPPDHPILSSLSILFFYHQGTVVKGSFLISVVRIPRIIVMYMQNALKEQQHGALSRYLFRCCYCCFWCLDKYLLHLNQNAYTTTAINGTDFCTSAKDAFKILSKNSSHFTSINCFGDFIIFLGKVLVVCFTVFGGLMAFNYNRAFQVWAVPLLLVAFFAYLVAHSFLSVFETVLDALFLCFAVDLETNDGSSEKPYFMDQEFLSFVKRSNKLNNARAQQDKHSLRNEEGTELQAIVR

SEQ ID NO: 81873 - protein, 83 aa, Homo sapiens
  Payload ID: 16293
  Gene Symbol: SLC44A3
  Gene Name: solute carrier family 44, member 3
  ENSP ID: ENSP00000434457
  MOD_RES (1)..(1): Any amino acid
XFIMGYSVVAGAAGRLLFGYDSFGNMCGKKNSPVEGAPLSGQDMTLKKATYKEDRRRKGDLDAHVLPFHIVFIMQCQQTVIPG

SEQ ID NO: 81874 - protein, 573 aa, Homo sapiens
  Payload ID: 16293
  Gene Symbol: SLC44A3
  Gene Name: solute carrier family 44, member 3
  ENSP ID: ENSP00000436661
MGYSVVAGAAGRLLFGYDSFGNMCGKKNSPVEGAPLSGQDMTLKKHVFFMNSCNLEVKGSFLCVYSLNSFNYTHSPKADSLCPRLPVPPSKSFPLFNRCVPQTPECYSLFASVLINDVDTLHRILSGIMSGRDTILGLCILALALSLAMMFTFRFITTLLVHIFISLVILGLLFVCGVLWWLYYDYTNDLSIELDTERENMKCVLGFAIVSTGITAVLLVLIFVLRKRIKLTVELFQITNKAISSAPFLLFQPLWTFAILIFFWVLWVAVLLSLGTAGAAQVMEGGQVEYKPLSGIRYMWSYHLIGLIWTSEFILACQQMTIAGAVVTCYFNRSKNDPPDHPILSSLSILFFYHQGTVVKGSFLISVVRIPRIIVMYMQNALKEQQHGALSRYLFRCCYCCFWCLDKYLLHLNQNAYTTTAINGTDFCTSAKDAFKILSKNSSHFTSINCFGDFIIFLGKVLVVCFTVFGGLMAFNYNRAFQVWAVPLLLVAFFAYLVAHSFLSVFETVLDALFLCFAVDLETNDGSSEKPYFMDQEFLSFVKRSNKLNNARAQQDKHSLRNEEGTELQAIVR

SEQ ID NO: 81875 - protein, 710 aa, Homo sapiens
  Payload ID: 16294
  Gene Symbol: SLC44A4
  Gene Name: solute carrier family 44, member 4
  Uniprot ID: Q53GD3
  ENSP ID: ENSP00000229729
MGGKQRDEDDEAYGKPVKYDPSFRGPIKNRSCTDVICCVLFLLFILGYIVVGIVAWLYGDPRQVLYPRNSTGAYCGMGENKDKPYLLYFNIFSCILSSNIISVAENGLQCPTPQVCVSSCPEDPWTVGKNEFSQTVGEVFYTKNRNFCLPGVPWNMTVITSLQQELCPSFLLPSAPALGRCFPWTNVTPPALPGITNDTTIQQGISGLIDSLNARDISVKIFEDFAQSWYWILVALGVALVLSLLFILLLRLVAGPLVLVLILGVLGVLAYGIYYCWEEYRVLRDKGASISQLGFTTNLSAYQSVQETWLAALIVLAVLEAILLLMLIFLRQRIRIAIALLKEASKAVGQMMSTMFYPLVTFVLLLICIAYWAMTALYLATSGQPQYVLWASNISSPGCEKVPINTSCNPTAHLVNSSCPGLMCVFQGYSSKGLIQRSVFNLQIYGVLGLFWTLNWVLALGQCVLAGAFASFYWAFHKPQDIPTFPLISAFIRTLRYHTGSLAFGALILTLVQIARVILEYIDHKLRGVQNPVARCIMCCFKCCLWCLEKFIKFLNRNAYIMIAIYGKNFCVSAKNAFMLLMRNIVRVVVLDKVTDLLLFFGKLLVVGGVGVLSFFFFSGRIPGLGKDFKSPHLNYYWLPIMTSILGAYVIASGFFSVFGMCVDTLFLCFLEDLERNNGSLDRPYYMSKSLLKILGKKNEAPPDNKKRKK

SEQ ID NO: 81876 - protein, 668 aa, Homo sapiens
  Payload ID: 16294
  Gene Symbol: SLC44A4
  Gene Name: solute carrier family 44, member 4
  Uniprot ID: Q53GD3
  ENSP ID: ENSP00000364712
MGGKQRDEDDEAYGKPVKYDPSFRGPIKNRSCTDVICCVLFLLFILGYIVVGIVAWLYGDPRQVLYPRNSTGAYCGMGENKDKPYLLYFNIFSCILSSNIISVAENGLQCPTPQTVITSLQQELCPSFLLPSAPALGRCFPWTNVTPPALPGITNDTTIQQGISGLIDSLNARDISVKIFEDFAQSWYWILVALGVALVLSLLFILLLRLVAGPLVLVLILGVLGVLAYGIYYCWEEYRVLRDKGASISQLGFTTNLSAYQSVQETWLAALIVLAVLEAILLLMLIFLRQRIRIAIALLKEASKAVGQMMSTMFYPLVTFVLLLICIAYWAMTALYLATSGQPQYVLWASNISSPGCEKVPINTSCNPTAHLVNSSCPGLMCVFQGYSSKGLIQRSVFNLQIYGVLGLFWTLNWVLALGQCVLAGAFASFYWAFHKPQDIPTFPLISAFIRTLRYHTGSLAFGALILTLVQIARVILEYIDHKLRGVQNPVARCIMCCFKCCLWCLEKFIKFLNRNAYIMIAIYGKNFCVSAKNAFMLLMRNIVRVVVLDKVTDLLLFFGKLLVVGGVGVLSFFFFSGRIPGLGKDFKSPHLNYYWLPIMTSILGAYVIASGFFSVFGMCVDTLFLCFLEDLERNNGSLDRPYYMSKSLLKILGKKNEAPPDNKKRKK

SEQ ID NO: 81877 - protein, 710 aa, Homo sapiens; identical to SEQ ID NO: 81875
  Payload ID: 16294
  Gene Symbol: SLC44A4
  Gene Name: solute carrier family 44, member 4
  Uniprot ID: Q53GD3
  ENSP ID: ENSP00000372870

SEQ ID NO: 81878 - protein, 710 aa, Homo sapiens [sequence omitted]

SEQ ID NO: 81879 - protein, 411 aa, Homo sapiens
  Payload ID: 16294
  Gene Symbol: SLC44A4
  Gene Name: solute carrier family 44, member 4
  ENSP ID: ENSP00000392054
  MOD_RES (1)..(1): Any amino acid
XRDEDDEAYGKPVKYDPSFRGPIKNRSCTDVICCVLFLLFILGYIVVGIVAWLYGDPRQVLYPRNSTGAYCGMGENKDKPYLLYFNIFSCILSSNIISVAENGLQCPTPQVCVSSCPEDPWTVGKNEFSQTVGEVFYTKNRNFCLPGVPWNMTVITSLQQELCPSFLLPSAPALGRCFPWTNVTPPALPGITNDTTIQQGISGLIDSLNARDISVKIFEDFAQSWYWILVAVGQMMSTMFYPLVTFVLLLICIAYWAMTALYLATSGQPQYVLWASNISSPGCEKVPINTSCNPTAHLVNSSCPGLMCVFQGYSSKGLIQRSVFNLQIYGVLGLFWTLNWVLALGQCVLAGAFASFYWAFHKPQDIPTFPLISAFIRTLRYHTGSLAFGALILTLVQIARVILEYIDHKLR

SEQ ID NO: 81880 - protein, 710 aa, Homo sapiens; identical to SEQ ID NO: 81875
  Payload ID: 16294
  Gene Symbol: SLC44A4
  Gene Name: solute carrier family 44, member 4
  Uniprot ID: Q53GD3
  ENSP ID: ENSP00000393939

SEQ ID NO: 81881 - protein, 411 aa, Homo sapiens; identical to SEQ ID NO: 81879
  Payload ID: 16294
  Gene Symbol: SLC44A4
  Gene Name: solute carrier family 44, member 4
  ENSP ID: ENSP00000398764
  MOD_RES (1)..(1): Any amino acid

SEQ ID NO: 81882 - protein, 710 aa, Homo sapiens [sequence omitted]

SEQ ID NO: 81883 - protein, 411 aa, Homo sapiens; identical to SEQ ID NO: 81879
  Payload ID: 16294
  Gene Symbol: SLC44A4
  Gene Name: solute carrier family 44, member 4
  ENSP ID: ENSP00000398901
  MOD_RES (1)..(1): Any amino acid

SEQ ID NO: 81884 - protein, 710 aa, Homo sapiens; identical to SEQ ID NO: 81875
  Payload ID: 16294
  Gene Symbol: SLC44A4
  Gene Name: solute carrier family 44, member 4
  Uniprot ID: Q53GD3
  ENSP ID: ENSP00000399161

SEQ ID NO: 81885 - protein, 411 aa, Homo sapiens
  Payload ID: 16294
  Gene Symbol: SLC44A4
  Gene Name: solute carrier family 44, member 4
  ENSP ID: ENSP00000400263
  MOD_RES (1)..(1): Any amino acid
XRDEDDEAYGKPVKYDPSFRGPIKNRSCTDVICCVLFLLFILGYIVVGIVAWLYGDPRQVLYPRNSTGAYCGMGENKDKPYLLYFNIFSCILSSNIISVAENGLQCPTPQVCVSSCPEDPWTVGKNEFSQTVGEVFYTKNRNFCLPGVPWNMTVITSLQQELCPSFLLPSAPALGRCFPWTNITPPALPGITNDTTIQQGISGLIDSLNARDISVKIFEDFAQSWYWILVAVGQMMSTMFYPLVTFVLLLICIAYWAMTALYLATSGQPQYVLWASNISSPGCEKVPINTSCNPTAHLVNSSCPGLMCVFQGYSSKGLIQRSVFNLQIYGVLGLFWTLNWVLALGQCVLAGAFASFYWAFHKPQDIPTFPLISAFIRTLRYHTGSLAFGALILTLVQIARVILEYIDHKLR

SEQ ID NO: 81886 - protein, 411 aa, Homo sapiens; identical to SEQ ID NO: 81879
  Payload ID: 16294
  Gene Symbol: SLC44A4
  Gene Name: solute carrier family 44, member 4
  ENSP ID: ENSP00000404572
  MOD_RES (1)..(1): Any amino acid

SEQ ID NO: 81887 - protein, 710 aa, Homo sapiens [sequence omitted]

SEQ ID NO: 81888 - protein, 411 aa, Homo sapiens; identical to SEQ ID NO: 81885
  Payload ID: 16294
  Gene Symbol: SLC44A4
  Gene Name: solute carrier family 44, member 4
  ENSP ID: ENSP00000414296
  MOD_RES (1)..(1): Any amino acid

SEQ ID NO: 81889 - protein, 411 aa, Homo sapiens; identical to SEQ ID NO: 81885
  Payload ID: 16294
  Gene Symbol: SLC44A4
  Gene Name: solute carrier family 44, member 4
  ENSP ID: ENSP00000415708
  MOD_RES (1)..(1): Any amino acid

SEQ ID NO: 81890 - protein, 634 aa, Homo sapiens
  Payload ID: 16294
  Gene Symbol: SLC44A4
  Gene Name: solute carrier family 44, member 4
  Uniprot ID: Q53GD3
  ENSP ID: ENSP00000444109
MGENKDKPYLLYFNIFSCILSSNIISVAENGLQCPTPQVCVSSCPEDPWTVGKNEFSQTVGEVFYTKNRNFCLPGVPWNMTVITSLQQELCPSFLLPSAPALGRCFPWTNVTPPALPGITNDTTIQQGISGLIDSLNARDISVKIFEDFAQSWYWILVALGVALVLSLLFILLLRLVAGPLVLVLILGVLGVLAYGIYYCWEEYRVLRDKGASISQLGFTTNLSAYQSVQETWLAALIVLAVLEAILLLMLIFLRQRIRIAIALLKEASKAVGQMMSTMFYPLVTFVLLLICIAYWAMTALYLATSGQPQYVLWASNISSPGCEKVPINTSCNPTAHLVNSSCPGLMCVFQGYSSKGLIQRSVFNLQIYGVLGLFWTLNWVLALGQCVLAGAFASFYWAFHKPQDIPTFPLISAFIRTLRYHTGSLAFGALILTLVQIARVILEYIDHKLRGVQNPVARCIMCCFKCCLWCLEKFIKFLNRNAYIMIAIYGKNFCVSAKNAFMLLMRNIVRVVVLDKVTDLLLFFGKLLVVGGVGVLSFFFFSGRIPGLGKDFKSPHLNYYWLPIMTSILGAYVIASGFFSVFGMCVDTLFLCFLEDLERNNGSLDRPYYMSKSLLKILGKKNEAPPDNKKRKK

SEQ ID NO: 81891 - protein, 634 aa, Homo sapiens
  Payload ID: 16294
  Gene Symbol: SLC44A4
  Gene Name: solute carrier family 44, member 4
  ENSP ID: ENSP00000446935
MGENKDKPYLLYFNIFSCILSSNIISVAENGLQCPTPQVCVSSCPEDPWTVGKNEFSQTVGEVFYTKNRNFCLPGVPWNMTVITSLQQELCPSFLLPSAPALGRCFPWTNITPPALPGITNDTTIQQGISGLIDSLNARDISVKIFEDFAQSWYWILVALGVALVLSLLFILLLRLVAGPLVLVLILGVLGVLAYGIYYCWEEYRVLRDKGASISQLGFTTNLSAYQSVQETWLAALIVLAVLEAILLLVLIFLRQRIRIAIALLKEASKAVGQMMSTMFYPLVTFVLLLICIAYWAMTALYLATSGQPQYVLWASNISSPGCEKVPINTSCNPTAHLVNSSCPGLMCVFQGYSSKGLIQRSVFNLQIYGVLGLFWTLNWVLALGQCVLAGAFASFYWAFHKPQDIPTFPLISAFIRTLRYHTGSLAFGALILTLVQIARVILEYIDHKLRGVQNPVARCIMCCFKCCLWCLEKFIKFLNRNAYIMIAIYGKNFCVSAKNAFMLLMRNIVRVVVLDKVTDLLLFFGKLLVVGGVGVLSFFFFSGRIPGLGKDFKSPHLNYYWLPIMTSILGAYVIASGFFSVFGMCVDTLFLCFLEDLERNNGSLDRPYYMSKSLLKILGKKNEAPPDNKKRKK

SEQ ID NO: 81892 - protein, 634 aa, Homo sapiens; identical to SEQ ID NO: 81890
  Payload ID: 16294
  Gene Symbol: SLC44A4
  Gene Name: solute carrier family 44, member 4
  Uniprot ID: Q53GD3
  ENSP ID: ENSP00000447560

SEQ ID NO: 81893 - protein, 668 aa, Homo sapiens [sequence omitted]

SEQ ID NO: 81894 - protein, 668 aa, Homo sapiens; identical to SEQ ID NO: 81876
  Payload ID: 16294
  Gene Symbol: SLC44A4
  Gene Name: solute carrier family 44, member 4
  Uniprot ID: Q53GD3
  ENSP ID: ENSP00000448088

SEQ ID NO: 81895 - protein, 634 aa, Homo sapiens; identical to SEQ ID NO: 81891
  Payload ID: 16294
  Gene Symbol: SLC44A4
  Gene Name: solute carrier family 44, member 4
  ENSP ID: ENSP00000448213

SEQ ID NO: 81896 - protein, 668 aa, Homo sapiens [sequence omitted]

SEQ ID NO: 81897 - protein, 634 aa, Homo sapiens; identical to SEQ ID NO: 81890
  Payload ID: 16294
  Gene Symbol: SLC44A4
  Gene Name: solute carrier family 44, member 4
  Uniprot ID: Q53GD3
  ENSP ID: ENSP00000449039

SEQ ID NO: 81898 - protein, 634 aa, Homo sapiens; identical to SEQ ID NO: 81890
  Payload ID: 16294
  Gene Symbol: SLC44A4
  Gene Name: solute carrier family 44, member 4
  Uniprot ID: Q53GD3
  ENSP ID: ENSP00000449180

SEQ ID NO: 81899 - protein, 668 aa, Homo sapiens [sequence omitted]

SEQ ID NO: 81900 - protein, 668 aa, Homo sapiens; identical to SEQ ID NO: 81876
  Payload ID: 16294
  Gene Symbol: SLC44A4
  Gene Name: solute carrier family 44, member 4
  Uniprot ID: Q53GD3
  ENSP ID: ENSP00000449518

SEQ ID NO: 81901 - protein, 668 aa, Homo sapiens; identical to SEQ ID NO: 81876
  Payload ID: 16294
  Gene Symbol: SLC44A4
  Gene Name: solute carrier family 44, member 4
  Uniprot ID: Q53GD3
  ENSP ID: ENSP00000449642

SEQ ID NO: 81902 - protein, 634 aa, Homo sapiens; identical to SEQ ID NO: 81891
  Payload ID: 16294
  Gene Symbol: SLC44A4
  Gene Name: solute carrier family 44, member 4
  ENSP ID: ENSP00000450005

SEQ ID NO: 81903 - protein, 719 aa, Homo sapiens
  Payload ID: 16295
  Gene Symbol: SLC44A5
  Gene Name: solute carrier family 44, member 5
  ENSP ID: ENSP00000359892
MNDTEKPADTPSEEEDFGDPRTYDPDFKGPVANRSCTDVLCCMIFLLCIIGYIVLGLVAWVHGDPRRAAYPTDSQGHFCGQKGTPNENKTILFYFNLLRCTSPSVLLNLQCPTTQICVSKCPEKFLTYVEMQLLYTKDKSYWEDYRQFCKTTAKPVKSLTQLLLDDDCPTAIFPSKPFLQRCFPDFSTKNGTLTIGSKMMFQDGNGGTRSVVELGIAANGINKLLDAKSLGLKVFEDYARTWYWILIGLTIAMVLSWIFLILLRFIAGCLFWVFMIGVIGIIGYGIWHCYQQYTNLQERPSSVLTIYDIGIQTNISMYFELQQTWFTFMIILCIIEVIVILMLIFLRNRIRVAIILLKEGSKAIGYVPSTLVYPALTFILLSICICYWVVTAVFLATSGVPVYKVIAPGGHCIHENQTCDPEIFNTTEIAKACPGALCNFAFYGGKSLYHQYIPTFHVYNLFVFLWLINFVIALGQCALAGAFATYYWAMKKPDDIPRYPLFTAFGRAIRYHTGSLAFGSLIIALIQMFKIVLEYLDHRLKRTQNTLSKFLQCCLRCCFWCLENAIKFLNRNAYIMIAIYGRNFCRSAKDAFNLLMRNVLKVAVTDEVTYFVLFLGKLLVAGSIGVLAFLFFTQRLPVIAQGPASLNYYWVPLLTVIFGSYLIAHGFFSVYAMCVETIFICFCEDLERNDGSTEKPYFVTPNLHGILIKKQLVPQKQKE

SEQ ID NO: 81904 - protein, 717 aa, Homo sapiens
  Payload ID: 16295
  Gene Symbol: SLC44A5
  Gene Name: solute carrier family 44, member 5
  Uniprot ID: Q8NCS7
  ENSP ID: ENSP00000359896
MNDTEKPADTPSEEEDFGDPRTYDPDFKGPVANRSCTDVLCCMIFLLCIIGYIVLGLVAWVHGDPRRAAYPTDSQGHFCGQKGTPNENKTILFYFNLLRCTSPSVLLNLQCPTTQICVSKCPEKFLTYVEMQLLYTKDKSYWEDYRQFCKTTAKPVKSLTQLLLDDDCPTAIFPSKPFLQRCFPDFSTKNGTLTIGSKMMFQDGNGGTRSVVELGIAANGINKLLDAKSLGLKVFEDYARTWYWILIGLTIAMVLSWIFLILLRFIAGCLFWVFMIGVIGIIGYGIWHCYQQYTNLQERPSSVLTIYDIGIQTNISMYFELQQTWFTFMIILCIIEVIVILMLIFLRNRIRVAIILLKEGSKAIGYVPSTLVYPALTFILLSICICYWVVTAVFLATSGVPVYKVIAPGGHCIHENQTCDPEIFNTTEIAKACPGALCNFAFYGGKSLYHQYIPTFHVYNLFVFLWLINFVIALGQCALAGAFATYYWAMKKPDDIPRYPLFTAFGRAIRYHTGSLAFGSLIIALIQMFKIVLEYLDHRLKRTQNTLSKFLQCCLRCCFWCLENAIKFLNRNAYIMIAIYGRNFCRSAKDAFNLLMRNVLKVAVTDEVTYFVLFLGKLLVAGSIGVLAFLFFTQRLPVIAQGPASLNYYWVPLLTVIFGSYLIAHGFFSVYAMCVETIFICFLEDLERNDGSTARPYYVSQPLLKIFQEENPQTRKQ

SEQ ID NO: 81905 - protein, 748 aa, Homo sapiens
  Payload ID: 16296
  Gene Symbol: SLC45A1
  Gene Name: solute carrier family 45, member 1
  Uniprot ID: Q9Y2W3
  ENSP ID: ENSP00000289877
MIPAASSTPPGDALFPSVAPQDFWRSQVTGYSGSVTRHLSHRANNFKRHPKRRKCIRPSPPPPPNTPCPLELVDFGDLHPQRSFRELLFNGCILFGIEFSYAMETAYVTPVLLQMGLPDQLYSLVWFISPILGFLLQPLLGAWSDRCTSRFGRRRPFILVLAIGALLGLSLLLNGRDIGIALADVTGNHKWGLLLTVCGVVLMDFSADSADNPSHAYMMDVCSPADQDRGLNIHALLAGLGGGFGYVVGGIHWDKTGFGRALGGQLRVIYLFTAVTLSVTTVLTLVSIPERPLRPPSEKRAAMKSPSLPLPPSPPVLPEEGPGDSLPSHTATNFSSPISPPSPLTPKYGSFISRDSSLTGISEFASSFGTANIDSVLIDCFTGGHDSYLAIPGSVPRPPISVSFPRAPDGFYRQDRGLLEGREGALTSGCDGDILRVGSLDTSKPRSSGILKRPQTLAIPDAAGGGGPETSRRRNVTFSQQVANILLNGVKYESELTGSSERAEQPLSVGRLCSTICNMPKALRTLCVNHFLGWLSFEGMLLFYTDFMGEVVFQGDPKAPHTSEAYQKYNSGVTMGCWGMCIYAFSAAFYSAILEKLEEFLSVRTLYFIAYLAFGLGTGLATLSRNLYVVLSLCITYGILFSTLCTLPYSLLCDYYQSKKFAGSSADGTRRGMGVDISLLSCQYFLAQILVSLVLGPLTSAVGSANGVMYFSSLVSFLGCLYSSLFVIYEIPPSDAADEEHRPLLLNV

SEQ ID NO: 81906 - protein, 782 aa, Homo sapiens
  Payload ID: 16296
  Gene Symbol: SLC45A1
  Gene Name: solute carrier family 45, member 1
  ENSP ID: ENSP00000418096
MLQQPGPRPGRQQPSGDRDACRLHPQGRPPALPTMIPAASSTPPGDALFPSVAPQDFWRSQVTGYSGSVTRHLSHRANNFKRHPKRRKCIRPSPPPPPNTPCPLELVDFGDLHPQRSFRELLFNGCILFGIEFSYAMETAYVTPVLLQMGLPDQLYSLVWFISPILGFLLQPLLGAWSDRCTSRFGRRRPFILVLAIGALLGLSLLLNGRDIGIALADVTGNHKWGLLLTVCGVVLMDFSADSADNPSHAYMMDVCSPADQDRGLNIHALLAGLGGGFGYVVGGIHWDKTGFGRALGGQLRVIYLFTAVTLSVTTVLTLVSIPERPLRPPSEKRAAMKSPSLPLPPSPPVLPEEGPGDSLPSHTATNFSSPISPPSPLTPKYGSFISRDSSLTGISEFASSFGTANIDSVLIDCFTGGHDSYLAIPGSVPRPPISVSFPRAPDGFYRQDRGLLEGREGALTSGCDGDILRVGSLDTSKPRSSGILKRPQTLAIPDAAGGGGPETSRRRNVTFSQQVANILLNGVKYESELTGSSERAEQPLSVGRLCSTICNMPKALRTLCVNHFLGWLSFEGMLLFYTDFMGEVVFQGDPKAPHTSEAYQKYNSGVTMGCWGMCIYAFSAAFYSAILEKLEEFLSVRTLYFIAYLAFGLGTGLATLSRNLYVVLSLCITYGILFSTLCTLPYSLLCDYYQSKKFAGSSADGTRRGMGVDISLLSCQYFLAQILVSLVLGPLTSAVGSANGVMYFSSLVSFLGCLYSSLFVIYEIPPSDAADEEHRPLLLNV

SEQ ID NO: 81907 - protein, 530 aa, Homo sapiens
  Payload ID: 16297
  Gene Symbol: SLC45A2
  Gene Name: solute carrier family 45, member 2
  Uniprot ID: Q9UMX9
  ENSP ID: ENSP00000296589
MGSNSGQAGRHIYKSLADDGPFDSVEPPKRPTSRLIMHSMAMFGREFCYAVEAAYVTPVLLSVGLPSSLYSIVWFLSPILGFLLQPVVGSASDHCRSRWGRRRPYILTLGVMMLVGMALYLNGATVVAALIANPRRKLVWAISVTMIGVVLFDFAADFIDGPIKAYLFDVCSHQDKEKGLHYHALFTGFGGALGYLLGAIDWAHLELGRLLGTEFQVMFFFSALVLTLCFTVHLCSISEAPLTEVAKGIPPQQTPQDPPLSSDGMYEYGSIEKVKNGYVNPELAMQGAKNKNHAEQTRRAMTLKSLLRALVNMPPHYRYLCISHLIGWTAFLSNMLFFTDFMGQIVYRGDPYSAHNSTEFLIYERGVEVGCWGLCINSVFSSLYSYFQKVLVSYIGLKGLYFTGYLLFGLGTGFIGLFPNVYSTLVLCSLFGVMSSTLYTVPFNLITEYHREEEKERQQAPGGDPDNSVRGKGMDCATLTCMVQLAQILVGGGLGFLVNTAGTVVVVVITASAVALIGCCFVALFVRYVD

SEQ ID NO: 81908 - protein, 460 aa, Homo sapiens
  Payload ID: 16297
  Gene Symbol: SLC45A2
  Gene Name: solute carrier family 45, member 2
  Uniprot ID: Q9UMX9
  ENSP ID: ENSP00000371534
MGSNSGQAGRHIYKSLADDGPFDSVEPPKRPTSRLIMHSMAMFGREFCYAVEAAYVTPVLLSVGLPSSLYSIVWFLSPILGFLLQPVVGSASDHCRSRWGRRRPYILTLGVMMLVGMALYLNGATVVAALIANPRRKLVWAISVTMIGVVLFDFAADFIDGPIKAYLFDVCSHQDKEKGLHYHALFTGFGGALGYLLGAIDWAHLELGRLLGTEFQVMFFFSALVLTLCFTVHLCSISEAPLTEVAKGIPPQQTPQDPPLSSDGMYEYGSIEKVKNGYVNPELAMQGAKNKNHAEQTRRAMTLKSLLRALVNMPPHYRYLCISHLIGWTAFLSNMLFFTDFMGQIVYRGDPYSAHNSTEFLIYERGVEVGCWGLCINSVFSSLYSYFQKVLVSYIGLKGLYFTGYLLFGLGTGFIGLFPNVYSTLVLCSLFGVMSSTLYTVPFNLITEYHREEEKEVCCH

SEQ ID NO: 81909 - protein, 243 aa, Homo sapiens
  Payload ID: 16297
  Gene Symbol: SLC45A2
  Gene Name: solute carrier family 45, member 2
  ENSP ID: ENSP00000421100
MGSNSGQAGRHIYKSLADDGPFDSVEPPKRPTSRLIMHSMAMFGREFCYAVEAAYVTPVLLSVGLPSSLYSIVWFLSPILGFLLQPVVGSASDHCRSRWGRRRPYILTLGVMMLVGMALYLNGATVVAALIANPRRKLVWAISVTMIGVVLFDFAADFIDGPIKAYLFDVCSHQDKEKGLHYHALFTDSQGNDIKVTAESTGEHASSLPLPLHQPPHWMDSLPVQHAVLHRFHGPDCVPRGSL

SEQ ID NO: 81910 - protein, 246 aa, Homo sapiens
  Payload ID: 16297
  Gene Symbol: SLC45A2
  Gene Name: solute carrier family 45, member 2
  ENSP ID: ENSP00000424010
MALYLNGATVVAGFGGALGYLLGAIDWAHLELGRLLGTEFQVMFFFSALVLTLCFTVHLCSISEAPLTEVAKGIPPQQTPQDPPLSSDGMYEYGSIEKVKNGYVNPELAMQGAKNKNHAEQTRRAMTLKSLLRALVNMPPHYRYLCISHLIGWTAFLSNMLFFTDFMGQIVYRGDPYSAHNSTEFLIYERGVEVGCWGLCINSVFSSLYSYFQKVLVSYIGLKGLYFTGYLLFGLGTGFIGLFPNV

SEQ ID NO: 81911 - protein, 164 aa, Homo sapiens
  Payload ID: 16297
  Gene Symbol: SLC45A2
  Gene Name: solute carrier family 45, member 2
  ENSP ID: ENSP00000485879
TRRAMTLKSLLRALVNMPPHYRYLCISHLIGWTAFLSNMLFFTDFMGQIVYRGDPYSAHNSTEFLIYERGVEVGCWGLCINSVFSSLYSYFQKVLVSYIGLKGLYFTGYLLFGLGTGFIGLFPNVYSTLVLCSLFGVMSSTLYTVPFNLITEYHREEEKEVCCH

SEQ ID NO: 81912 - protein, 56 aa, Homo sapiens
  Payload ID: 16297
  Gene Symbol: SLC45A2
  Gene Name: solute carrier family 45, member 2
  ENSP ID: ENSP00000486006
  MOD_RES (1)..(1): Any amino acid
XSQGNDIKVTAESTGEHASSLPLPLHQPPHWMDSLPVQHAVLHRFHGPDCVPRGSL

SEQ ID NO: 81913 - protein, 125 aa, Homo sapiens
  Payload ID: 16297
  Gene Symbol: SLC45A2
  Gene Name: solute carrier family 45, member 2
  ENSP ID: ENSP00000487529
TRRAMTLKSLLRALVNMPPHYRYLCISHLIGWTAFLSNMLFFTDFMGQIVYRGDPYSAHNSTEFLIYERGVEVGCWGLCINSVFSSLYSYFQKVLVSYIGLKGLYFTGYLLFGLGTGFIGLFPNV

SEQ ID NO: 81914 - protein, 234 aa, Homo sapiens
  Payload ID: 16297
  Gene Symbol: SLC45A2
  Gene Name: solute carrier family 45, member 2
  ENSP ID: ENSP00000487556
TRRAMTLKSLLRALVNMPPHYRYLCISHLIGWTAFLSNMLFFTDFMGQIVYRGDPYSAHNSTEFLIYERGVEVGCWGLCINSVFSSLYSYFQKVLVSYIGLKGLYFTGYLLFGLGTGFIGLFPNVYSTLVLCSLFGVMSSTLYTVPFNLITEYHREEEKERQQAPGGDPDNSVRGKGMDCATLTCMVQLAQILVGGGLGFLVNTAGTVVVVVITASAVALIGCCFVALFVRYVD

SEQ ID NO: 81915 - protein, 553 aa, Homo sapiens
  Payload ID: 16298
  Gene Symbol: SLC45A3
  Gene Name: solute carrier family 45, member 3
  Uniprot ID: Q96JT2
  ENSP ID: ENSP00000356113
MVQRLWVSRLLRHRKAQLLLVNLLTFGLEVCLAAGITYVPPLLLEVGVEEKFMTMVLGIGPVLGLVCVPLLGSASDHWRGRYGRRRPFIWALSLGILLSLFLIPRAGWLAGLLCPDPRPLELALLILGVGLLDFCGQVCFTPLEALLSDLFRDPDHCRQAYSVYAFMISLGGCLGYLLPAIDWDTSALAPYLGTQEECLFGLLTLIFLTCVAATLLVAEEAALGPTEPAEGLSAPSLSPHCCPCRARLAFRNLGALLPRLHQLCCRMPRTLRRLFVAELCSWMALMTFTLFYTDFVGEGLYQGVPRAEPGTEARRHYDEGVRMGSLGLFLQCAISLVFSLVMDRLVQRFGTRAVYLASVAAFPVAAGATCLSHSVAVVTASAALTGFTFSALQILPYTLASLYHREKQVFLPKYRGDTGGASSEDSLMTSFLPGPKPGAPFPNGHVGAGGSGLLPPPPALCGASACDVSVRVVVGEPTEARVVPGRGICLDLAILDSAFLLSQVAPSLFMGSIVQLSQSVTAYMVSAAGLGLVAIYFATQVVFDKSDLAKYSA

SEQ ID NO: 81916 - protein, 798 aa, Homo sapiens
  Payload ID: 16299
  Gene Symbol: SLC45A4
  Gene Name: solute carrier family 45, member 4
  Uniprot ID: Q5BKX6
  ENSP ID: ENSP00000024061
MGKASPASGLSRPKTLVSPLRSNQWSLQKGLPEQYYSLTWFLSPILGLIFTPLIGSASDRCTLSWGRRRPFILALCVGVLFGVALFLNGSAIGLALGDVPNRQPIGIVLTVLGVVVLDFSADATEGPIRAYLLDVVDSEEQDMALNIHAFSAGLGGAIGYVLGGLDWTQTFLGSWFRTQNQVLFFFAAIIFTVSVALHLFSIDEEQYSPQQERSAEEPGALDGGEPHGVPAFPDEVQSEHELALDYPDVDIMRSKSDSALHVPDTALDLEPELLFLHDIEPSIFHDASYPATPRSTSQELAKTKLPRLATFLKEAAKEDETLLDNHLNEAKVPNGSGSPTKDALGGYTRVDTKPSATSSSMRRRRHAFRRQASSTFSYYGKLGSHCYRYRRANAVVLIKPSRSMSDLYDMQKRQRQHRHRNQSGATTSSGDTESEEGEGETTVRLLWLSMLKMPRELMRLCLCHLLTWFSVIAEAVFYTDFMGQVIFEGDPKAPSNSTAWQAYNAGVKMGCWGLVIYAATGAICSALLQKYLDNYDLSVRVIYVLGTLGFSVGTAVMAMFPNVYVAMVTISTMGIVSMSISYCPYALLGQYHDIKQYIHHSPGNSKRGFGIDCAILSCQVYISQILVASALGGVVDAVGTVRVIPMVASVGSFLGFLTATFLVIYPNVSEEAKEEQKGLSSPLAGEGRAGGNSEKPTVLKLTRKEGLQGPVETERLQVLTSVRSRHIGWCRSCWRVFFFMIILEKKFSFPQCGSLRRMTYLLFLSELDTLCPGQPCPWAATAHQSWEEAGPGGLGRRQ

SEQ ID NO: 81917 - protein, 808 aa, Homo sapiens
  Payload ID: 16299
  Gene Symbol: SLC45A4
  Gene Name: solute carrier family 45, member 4
  ENSP ID: ENSP00000428137
MKMAPQNADPESMQVQELSVPLPDPQKAGGAEAENCETISEGSIDRIPMRLWVMHGAVMFGREFCYAMETALVTPILLQIGLPEQYYSLTWFLSPILGLIFTPLIGSASDRCTLSWGRRRPFILALCVGVLFGVALFLNGSAIGLALGDVPNRQPIGIVLTVLGVVVLDFSADATEGPIRAYLLDVVDSEEQDMALNIHAFSAGLGGAIGYVLGGLDWTQTFLGSWFRTQNQVLFFFAAIIFTVSVALHLFSIDEEQYSPQQERSAEEPGALDGGEPHGVPAFPDEVQSEHELALDYPDVDIMRSKSDSALHVPDTALDLEPELLFLHDIEPSIFHDASYPATPRSTSQELAKTKLPRLATFLKEAAKEDETLLDNHLNEAKVPNGSGSPTKDALGGYTRVDTKPSATSSSMRRRRHAFRRQASSTFSYYGKLGSHCYRYRRANAVVLIKPSRSMSDLYDMQKRQRQHRHRNQSGATTSSGDTESEEGEGETTVRLLWLSMLKMPRELMRLCLCHLLTWFSVIAEAVFYTDFMGQVIFEGDPKAPSNSTAWQAYNAGVKMGCWGLVIYAATGAICSALLQKYLDNYDLSVRVIYVLGTLGFSVGTAVMAMFPNVYVAMVTISTMGIVSMSISYCPYALLGQYHDIKQYIHHSPGNSKRGFGIDCAILSCQVYISQILVASALGGVVDAVGTVRVIPMVASVGSFLGFLTATFLVIYPNVSEEAKEEQKGLSSPLAGEGRAGGNSEKPTVLKLTRKEGLQGPVETESVTPAGIDVCQISSHWLVPQLLESIFLYDYFRKKIFFSTMWFS

SEQ ID NO: 81918 - protein, 95 aa, Homo sapiens
  Payload ID: 16299
  Gene Symbol: SLC45A4
  Gene Name: solute carrier family 45, member 4
  ENSP ID: ENSP00000429033
MALNIHAFSAGLGGAIGYVLGGLDWTQTFLGSWFRTQNQVLFFFAAIIFTVSVALHLFSIDEEQYSPQQERSAEEPGALDGGEPHGVPAFPDEVQ

SEQ ID NO: 81919 - protein, 717 aa, Homo sapiens
  Payload ID: 16299
  Gene Symbol: SLC45A4
  Gene Name: solute carrier family 45, member 4
  Uniprot ID: Q5BKX6
  ENSP ID: ENSP00000429059
MGKASPASGLSRPKTLVSPLRSNQWSLQKGLPEQYYSLTWFLSPILGLIFTPLIGSASDRCTLSWGRRRPFILALCVGVLFGVALFLNGSAIGLALGDVPNRQPIGIVLTVLGVVVLDFSADATEGPIRAYLLDVVDSEEQDMALNIHAFSAGLGGAIGYVLGGLDWTQTFLGSWFRTQNQVLFFFAAIIFTVSVALHLFSIDEEQYSPQQERSAEEPGALDGGEPHGVPAFPDEVQSEHELALDYPDVDIMRSKSDSALHVPDTALDLEPELLFLHDIEPSIFHDASYPATPRSTSQELAKTKLPRLATFLKEAAKEDETLLDNHLNEAKVPNGSGSPTKDALGGYTRVDTKPSATSSSMRRRRHAFRRQASSTFSYYGKLGSHCYRYRRANAVVLIKPSRSMSDLYDMQKRQRQHRHRNQSGATTSSGDTESEEGEGETTVRLLWLSMLKMPRELMRLCLCHLLTWFSVIAEAVFYTDFMGQVIFEGDPKAPSNSTAWQAYNAGVKMGCWGLVIYAATGAICSALLQKYLDNYDLSVRVIYVLGTLGFSVGTAVMAMFPNVYVAMVTISTMGIVSMSISYCPYALLGQYHDIKQYIHHSPGNSKRGFGIDCAILSCQVYISQILVASALGGVVDAVGTVRVIPMVASVGSFLGFLTATFLVIYPNVSEEAKEEQKGLSSPLAGEGRAGGNSEKPTVLKLTRKEGLQGPVETESVV

SEQ ID NO: 81920 - protein, 102 aa, Homo sapiens
  Payload ID: 16299
  Gene Symbol: SLC45A4
  Gene Name: solute carrier family 45, member 4
  ENSP ID: ENSP00000429974
MRPLTCNSFTESLPEQYYSLTWFLSPILGLIFTPLIGSASDRCTLSWGRRRPFILALCVGVLFGVALFLNGSAIGLALGDVPNRQPIGIVLTVLGVVVLDFS

SEQ ID NO: 81921 - protein, 32 aa, Homo sapiens
  Payload ID: 16300
  Gene Symbol: SLC46A1
  Gene Name: solute carrier family 46 (folate transporter), member 1
  ENSP ID: ENSP00000462942
MQEVETLTSHWTLYMNVGGFLVGLFSSTLLGA

SEQ ID NO: 81922 - protein, 124 aa, Homo sapiens
  Payload ID: 16300
  Gene Symbol: SLC46A1
  Gene Name: solute carrier family 46 (folate transporter), member 1
  ENSP ID: ENSP00000463339
  MOD_RES (1)..(1): Any amino acid
XLSTPLCWDSKLIGYGSAAQHLPYLTSLLALKLLQYCLADAWVAEIGLAFNILGMVVFAFATITPLMFTGCWKRLILTSSSSSFPRAPDLPGPEDRGQEEQSEHQATGGLQLEAQPTAGQATLV

SEQ ID NO: 81923 - protein, 250 aa, Homo sapiens
  Payload ID: 16300
  Gene Symbol: SLC46A1
  Gene Name: solute carrier family 46 (folate transporter), member 1
  ENSP ID: ENSP00000464190
MQEVETLTSHWTLYMNVGGFLVGLFSSTLLGAWSDSVGRRPLLVLASLGLLLQALVSVFVVQLQLHVGYFVLGRILCALLGDFGGLLAASFASVADVSSSRSRTFRMALLEASIGVAGMLASLLGGHWLRAQGYANPFWLALALLIAMTLYAAFCFGETLKEPKSTRLFTFRHHRSIVQLYVAPAPEKSRKHLALYSLAIFVVITVHFGAQDILTLYELSTPLCWDSKLIGYGSAAQHLPYLTSLLALKL

SEQ ID NO: 81924 - protein, 128 aa, Homo sapiens
  Payload ID: 16300
  Gene Symbol: SLC46A1
  Gene Name: solute carrier family 46 (folate transporter), member 1
  ENSP ID: ENSP00000467416
MNVGGFLVGLFSSTLLGAWSDSVGRRPLLVLASLGLLLQALVSVFVVQLQLHVGYFVLGRILCALLGDFGGLLAASFASVADVSSSRSRTFRMALLEASIGVAGMLASLLGGHWLRAQGYANPFWLAL

SEQ ID NO: 81925 - protein, 459 aa, Homo sapiens
  Payload ID: 16300
  Gene Symbol: SLC46A1
  Gene Name: solute carrier family 46 (folate transporter), member 1
  Uniprot ID: Q96NT5
  ENSP ID: ENSP00000480703
MEGSASPPEKPRARPAAAVLCRGPVEPLVFLANFALVLQGPLTTQYLWHRFSADLGYNGTRQRGGCSNRSADPTMQEVETLTSHWTLYMNVGGFLVGLFSSTLLGAWSDSVGRRPLLVLASLGLLLQALVSVFVVQLQLHVGYFVLGRILCALLGDFGGLLAASFASVADVSSSRSRTFRMALLEASIGVAGMLASLLGGHWLRAQGYANPFWLALALLIAMTLYAAFCFGETLKEPKSTRLFTFRHHRSIVQLYVAPAPEKSRKHLALYSLAIFVVITVHFGAQDILTLYELSTPLCWDSKLIGYGSAAQHLPYLTSLLALKLLQYCLADAWVAEIGLAFNILGMVVFAFATITPLMFTGYGLLFLSLVITPVIRAKLSKLVRETEQGALFSAVACVNSLAMLTASGIFNSLYPATLNFMKGFPFLLGAGLLLIPAVLIGMLEKADPHLEFQQFPQSP

SEQ ID NO: 81926 - protein, 431 aa, Homo sapiens
  Payload ID: 16300
  Gene Symbol: SLC46A1
  Gene Name: solute carrier family 46 (folate transporter), member 1
  Uniprot ID: Q96NT5
  ENSP ID: ENSP00000483652
MEGSASPPEKPRARPAAAVLCRGPVEPLVFLANFALVLQGPLTTQYLWHRFSADLGYNGTRQRGGCSNRSADPTMQEVETLTSHWTLYMNVGGFLVGLFSSTLLGAWSDSVGRRPLLVLASLGLLLQALVSVFVVQLQLHVGYFVLGRILCALLGDFGGLLAASFASVADVSSSRSRTFRMALLEASIGVAGMLASLLGGHWLRAQGYANPFWLALALLIAMTLYAAFCFGETLKEPKSTRLFTFRHHRSIVQLYVAPAPEKSRKHLALYSLAIFVVITVHFGAQDILTLYELSTPLCWDSKLIGYGSAAQHLPYLTSLLALKLLQYCLADAWVAEIGLAFNILGMVVFAFATITPLMFTGALFSAVACVNSLAMLTASGIFNSLYPATLNFMKGFPFLLGAGLLLIPAVLIGMLEKADPHLEFQQFPQSP

SEQ ID NO: 81927 - protein, 475 aa, Homo sapiens
  Payload ID: 16301
  Gene Symbol: SLC46A2
  Gene Name: solute carrier family 46, member 2
  Uniprot ID: Q9BY10
  ENSP ID: ENSP00000363345
MSPEVTCPRRGHLPRFHPRTWVEPVVASSQVAASLYDAGLLLVVKASYGTGGSSNHSASPSPRGALEDQQQRAISNFYIIYNLVVGLSPLLSAYGLGWLSDRYHRKISICMSLLGFLLSRLGLLLKVLLDWPVEVLYGAAALNGLFGGFSAFWSGVMALGSLGSSEGRRSVRLILIDLMLGLAGFCGSMASGHLFKQMAGHSGQGLILTACSVSCASFALLYSLLVLKVPESVAKPSQELPAVDTVSGTVGTYRTLDPDQLDQQYAVGHPPSPGKAKPHKTTIALLFVGAIIYDLAVVGTVDVIPLFVLREPLGWNQVQVGYGMAAGYTIFITSFLGVLVFSRCFRDTTMIMIGMVSFGSGALLLAFVKETYMFYIARAVMLFALIPVTTIRSAMSKLIKGSSYGKVFVILQLSLALTGVVTSTLYNKIYQLTMDMFVGSCFALSSFLSFLAIIPISIVAYKQVPLSPYGDIIEK

SEQ ID NO: 81928 - protein, 341 aa, Homo sapiens
  Payload ID: 16301
  Gene Symbol: SLC46A2
  Gene Name: solute carrier family 46, member 2
  ENSP ID: ENSP00000474847
MSPEVTCPRRGHLPRFHPRTWVEPVVASSQVAASLYDAGLLLVVKASYGTGGSSNHSASPSPRGALEDQQQRAISNFYIIYNLVVGLSPLLSAYGLGWLSDRYHRKISICMSLLGFLLSRLGLLLKVLLDWPVEVLYGAAALNGLFGGFSAFWSGVMALGSLGSSEGRRSVRLILIDLMLGLAGFCGSMASGHLFKQMAGHSGQGLILTACSVSCASFALLYSLLVLKVPESVAKPSQELPAVDTVSGTVGTYRTLDPDQLDQQYAVGHPPSPGKAKPHKTTIALLFVGAIIYDLAVVGTVDVIPLFVLREPLGWNQVQLEPSCCLLSSPSQPSDQLCPNS

SEQ ID NO: 81929 - protein, 461 aa, Homo sapiens
  Payload ID: 16302
  Gene Symbol: SLC46A3
  Gene Name: solute carrier family 46, member 3
  Uniprot ID: Q7Z3Q1
  ENSP ID: ENSP00000266943
MKILFVEPAIFLSAFAMTLTGPLTTQYVYRRIWEETGNYTFSSDSNISECEKNKSSPIFAFQEEVQKKVSRFNLQMDISGLIPGLVSTFILLSISDHYGRKFPMILSSVGALATSVWLCLLCYFAFPFQLLIASTFIGAFCGNYTTFWGACFAYIVDQCKEHKQKTIRIAIIDFLLGLVTGLTGLSSGYFIRELGFEWSFLIIAVSLAVNLIYILFFLGDPVKECSSQNVTMSCSEGFKNLFYRTYMLFKNASGKRRFLLCLLLFTVITYFFVVIGIAPIFILYELDSPLCWNEVFIGYGSALGSASFLTSFLGIWLFSYCMEDIHMAFIGIFTTMTGMAMTAFASTTLMMFLARVPFLFTIVPFSVLRSMLSKVVRSTEQGTLFACIAFLETLGGVTAVSTFNGIYSATVAWYPGFTFLLSAGLLLLPAISLCVVKCTSWNEGSYELLIQEESSEDASDR

SEQ ID NO: 81930 - protein, 463 aa, Homo sapiens
  Payload ID: 16302
  Gene Symbol: SLC46A3
  Gene Name: solute carrier family 46, member 3
  Uniprot ID: Q7Z3Q1
  ENSP ID: ENSP00000370192
MKILFVEPAIFLSAFAMTLTGPLTTQYVYRRIWEETGNYTFSSDSNISECEKNKSSPIFAFQEEVQKKVSRFNLQMDISGLIPGLVSTFILLSISDHYGRKFPMILSSVGALATSVWLCLLCYFAFPFQLLIASTFIGAFCGNYTTFWGACFAYIVDQCKEHKQKTIRIAIIDFLLGLVTGLTGLSSGYFIRELGFEWSFLIIAVSLAVNLIYILFFLGDPVKECSSQNVTMSCSEGFKNLFYRTYMLFKNASGKRRFLLCLLLFTVITYFFVVIGIAPIFILYELDSPLCWNEVFIGYGSALGSASFLTSFLGIWLFSYCMEDIHMAFIGIFTTMTGMAMTAFASTTLMMFLARVPFLFTIVPFSVLRSMLSKVVRSTEQGTLFACIAFLETLGGVTAVSTFNGIYSATVAWYPGFTFLLSAGLLLLPAISLCVVKCTSWNEGSYELLIQEESSEDASDRAC

SEQ ID NO: 81931 - protein, 570 aa, Homo sapiens
  Payload ID: 16303
  Gene Symbol: SLC47A1
  Gene Name: solute carrier family 47 (multidrug and toxin extrusion), member 1
  Uniprot ID: Q96FL8
  ENSP ID: ENSP00000270570
MEAPEEPAPVRGGPEATLEVRGSRCLRLSAFREELRALLVLAGPAFLVQLMVFLISFISSVFCGHLGKLELDAVTLAIAVINVTGVSVGFGLSSACDTLISQTYGSQNLKHVGVILQRSALVLLLCCFPCWALFLNTQHILLLFRQDPDVSRLTQTYVTIFIPALPATFLYMLQVKYLLNQGIVLPQIVTGVAANLVNALANYLFLHQLHLGVIGSALANLISQYTLALLLFLYILGKKLHQATWGGWSLECLQDWASFLRLAIPSMLMLCMEWWAYEVGSFLSGILGMVELGAQSIVYELAIIVYMVPAGFSVAASVRVGNALGAGDMEQARKSSTVSLLITVLFAVAFSVLLLSCKDHVGYIFTTDRDIINLVAQVVPIYAVSHLFEALACTSGGVLRGSGNQKVGAIVNTIGYYVVGLPIGIALMFATTLGVMGLWSGIIICTVFQAVCFLGFIIQLNWKKACQQAQVHANLKVNNVPRSGNSALPQDPLHPGCPENLEGILTNDVGKTGEPQSDQQMRQEEPLPEHPQDGAKLSRKQLVLRRGLLLLGVFLILLVGILVRFYVRIQ

SEQ ID NO: 81932 - protein, 586 aa, Homo sapiens
  Payload ID: 16303
  Gene Symbol: SLC47A1
  Gene Name: solute carrier family 47 (multidrug and toxin extrusion), member 1
  Uniprot ID: Q96FL8
  ENSP ID: ENSP00000378951
MEAPEEPAPVRGGPEATLEVRGSRCLRLSAFREELRALLVLAGPAFLVQLMVFLISFISSVFCGHLGKLELDAVTLAIAVINVTGVSVGFGLSSACDTLISQTYGSQNLKHVGVILQRSALVLLLCCFPCWALFLNTQHILLLFRQDPDVSRLTQTYVTIFIPALPATFLYMLQVKYLLNQGIVLPQIVTGVAANLVNALANYLFLHQLHLGVIGSALANLISQYTLALLLFLYILGKKLHQATWGGWSLECLQDWASFLRLAIPSMLMLCMEWWAYEVGSFLSGILGMVELGAQSIVYELAIIVYMVPAGFSVAASVRVGNALGAGDMEQARKSSTVSLLITVLFAVAFSVLLLSCKDHVGYIFTTDRDIINLVAQVVPIYAVSHLFEALACTSGGVLRGSGNQKVGAIVNTIGYYVVGLPIGIALMFATTLGVMGLWSGIIICTVFQAVCFLGFIIQLNWKKACQQAQVHANLKVNNVPRSGNSALPQDPLHPGCPENLEGILTNDVGKTGEPQSDQQMRQEEPLPEHPQDGAKLSRKQLVLRRGLLLLGVFLILLAGVRWCDHSSLQPRTLGLQAILLCQPPE

SEQ ID NO: 81933 - protein, 443 aa, Homo sapiens
  Payload ID: 16303
  Gene Symbol: SLC47A1
  Gene Name: solute carrier family 47 (multidrug and toxin extrusion), member 1
  ENSP ID: ENSP00000407155
MEAPEEPAPVRGGPEATLEVRGSRCLRLSAFREELRALLVLAGPAFLVQLMVFLISFISSVFCGHLGKLELDAVTLAIATYGSQNLKHVGVILQRSALVLLLCCFPCWALFLNTQHILLLFRQDPDVSRLTQTYVTIFIPALPATFLYMLQVKYLLNQGIVLPQIVTGVAANLVNALANYLFLHQLHLGVIGSALANLISQYTLALLLFLYILGKKLHQATWGGWSLECLQDWASFLRLAIPSMLMLCMEWWAYEVGSFLSGILGMVELGAQSIVYELAIIVYMVPAGFSVAASVRVGNALGAGDMEQARKSSTVSLLITVLFAVAFSVLLLSCKDHVGYIFTTDRDIINLVAQVVPIYAVSHLFEALACTSGGVLRGSGNQKVGAIVNTIGYYVVGLPIGIALMFATTLGVMGSGTRQFESKQRASEWEFCSPSGSASPRVP

SEQ ID NO: 81934 - protein, 268 aa, Homo sapiens
  Payload ID: 16303
  Gene Symbol: SLC47A1
  Gene Name: solute carrier family 47 (multidrug and toxin extrusion), member 1
  ENSP ID: ENSP00000460164
MEAPEEPAPVRGGPEATLEVRGSRCLRLSAFREELRALLVLAGPAFLVQLMVFLISFISSVFCGHLGKLELDAVTLAIAVINVTGVSVGFGLSSACDTLISQTYGSQNLKHVGVILQRSALVLLLCCFPCWALFLNTQHILLLFRQDPDVSRLTQTYVTIFIPALPAQVHANLKVNNVPRSGNSALPQDPLHPGCPENLEGILTNDVGKTGEPQSDQQMRQEEPLPEHPQDGAKLSRKQLVLRRGLLLLGVFLILLVGILVRFYVRIQ

SEQ ID NO: 81935 - protein, 99 aa, Homo sapiens
  Payload ID: 16303
  Gene Symbol: SLC47A1
  Gene Name: solute carrier family 47 (multidrug and toxin extrusion), member 1
  ENSP ID: ENSP00000462225
  MOD_RES (1)..(1): Any amino acid
XLKVNNVPRSGNSALPQDPLHPGCPENLEGILTNDVGKTGEPQSDQQMRQEEPLPEHPQDGAKLSRKQLVLRRGLLLLGVFLILLLVKLRAVSWDQLCP

SEQ ID NO: 81936 - protein, 316 aa, Homo sapiens
  Payload ID: 16303
  Gene Symbol: SLC47A1
  Gene Name: solute carrier family 47 (multidrug and toxin extrusion), member 1
  ENSP ID: ENSP00000462630
MCPGLPRPMSRSSFQLFLQPFFICYKLNICSTRLSSSPMARSPGNVCVPPTGWSLECLQDWASFLRLAIPSMLMLCMEWWAYEVGSFLSGILGMVELGAQSIVYELAIIVYMVPAGFSVAASVRVGNALGAGDMEQARKSSTVSLLITVLFAVAFSVLLLSCKDHVGYIFTTDRDIINLVAQVVPIYAVSHLFEALACTSGGVLRGSGNQKVGAIVNTIGYYVVGLPIGIALMFATTLGVMGCPENLEGILTNDVGKTGEPQSDQQMRQEEPLPEHPQDGAKLSRKQLVLRRGLLLLGVFLILLVGILVRFYVRIQ

SEQ ID NO: 81937 - protein, 602 aa, Homo sapiens
  Payload ID: 16304
  Gene Symbol: SLC47A2
  Gene Name: solute carrier family 47 (multidrug and toxin extrusion), member 2
  Uniprot ID: Q86VL8
  ENSP ID: ENSP00000326671
MDSLQDTVALDHGGCCPALSRLVPRGFGTEMWTLFALSGPLFLFQVLTFMIYIVSTVFCGHLGKVELASVTLAVAFVNVCGVSVGVGLSSACDTLMSQSFGSPNKKHVGVILQRGALVLLLCCLPCWALFLNTQHILLLFRQDPDVSRLTQDYVMIFIPGLPVIFLYNLLAKYLQNQGWLKGQEEESPFQTPGLSILHPSHSHLSRASFHLFQKITWPQVLSGVVGNCVNGVANYALVSVLNLGVRGSAYANIISQFAQTVFLLLYIVLKKLHLETWAGWSSQCLQDWGPFFSLAVPSMLMICVEWWAYEIGSFLMGLLSVVDLSAQAVIYEVATVTYMIPLGLSIGVCVRVGMALGAADTVQAKRSAVSGVLSIVGISLVLGTLISILKNQLGHIFTNDEDVIALVSQVLPVYSVFHVFEAICCVYGGVLRGTGKQAFGAAVNAITYYIIGLPLGILLTFVVRMRIMGLWLGMLACVFLATAAFVAYTARLDWKLAAEEAKKHSGRQQQQRAESTATRPGPEKAVLSSVATGSSPGITLTTYSRSECHVDFFRTPEEAHALSAPTSRLSVKQLVIRRGAALGAASATLMVGLTVRILATRH

SEQ ID NO: 81938 - protein, 580 aa, Homo sapiens
  Payload ID: 16304
  Gene Symbol: SLC47A2
  Gene Name: solute carrier family 47 (multidrug and toxin extrusion), member 2
  Uniprot ID: Q86VL8
  ENSP ID: ENSP00000338084
MDSLQDTVALDHGGCCPALSRLVPRGFGTEMWTLFALSGPLFLFQVLTFMIYIVSTVFCGHLGKVELASVTLAVAFVNVCGVSVGVGLSSACDTLMSQSFGSPNKKHVGVILQRGALVLLLCCLPCWALFLNTQHILLLFRQDPDVSRLTQDYVMIFIPGLPVIFLYNLLAKYLQNQKITWPQVLSGVVGNCVNGVANYALVSVLNLGVRGSAYANIISQFAQTVFLLLYIVLKKLHLETWAGWSSQCLQDWGPFFSLAVPSMLMICVEWWAYEIGSFLMGLLSVVDLSAQAVIYEVATVTYMRHSHRLAYAAHVTRIPLGLSIGVCVRVGMALGAADTVQAKRSAVSGVLSIVGISLVLGTLISILKNQLGHIFTNDEDVIALVSQVLPVYSVFHVFEAICCVYGGVLRGTGKQAFGAAVNAITYYIIGLPLGILLTFVVRMRIMGLWLGMLACVFLATAAFVAYTARLDWKLAAEEAKKHSGRQQQQRAESTATRPGPEKAVLSSVATGSSPGITLTTYSRSECHVDFFRTPEEAHALSAPTSRLSVKQLVIRRGAALGAASATLMVGLTVRILATRH

SEQ ID NO: 81939 - protein, 363 aa, Homo sapiens
  Payload ID: 16304
  Gene Symbol: SLC47A2
  Gene Name: solute carrier family 47 (multidrug and toxin extrusion), member 2
  ENSP ID: ENSP00000391848
MDSLQDTVALDHGGCCPALSRLVPRGFGTEMWTLFALSGPLFLFQVLTFMIYIVSTVFCGHLGKVELASVTLAVAFVNVCGVSVGVGLSSACDTLMSQSFGSPNKKHVGVILQRGALVLLLCCLPCWALFLNTQHILLLFRQDPDVSRLTQDYVMIFIPGLPVIFLYNLLAKYLQNQKITWPQVLSGVVGNCVNGVANYALVSVLNLGVRGSAYANIISQFAQTVFLLLYIVLKKLHLETWAGWSSQCLQDWGPFFSLAVPSMLMICVEWWAYEIGSFLMGLLSVVDLSAQAVIYEVATVTYMIPLGLSIGVCVRVGMALGAADTVQAKRSAVSGVLSIVGISLVLGTLISILKNQLGHIFTN

SEQ ID NO: 81940 - protein, 219 aa, Homo sapiens
  Payload ID: 16304
  Gene Symbol: SLC47A2
  Gene Name: solute carrier family 47 (multidrug and toxin extrusion), member 2
  Uniprot ID: Q86VL8
  ENSP ID: ENSP00000458694
MDSLQDTVALDHGGCCPALSRLVPRGFGTEMWTLFALSGPLFLFQVLTFMIYIVSTVFCGHLGKVELASVTLAVAFVNVCGVSVGVGLSSACDTLMSQSFGSPNKKHVGVILQRGALVLLLCCLPCWALFLNTQHILLLFRQDPDVSRLTQDYVMIFIPGLPVIFLYNLLAKYLQNQAGERLCVPASSNSSTGMAEGAGGGVPIPNPGFVHPPSISLTP

SEQ ID NO: 81941 - protein, 89 aa, Homo sapiens
  Payload ID: 16305
  Gene Symbol: SLC48A1
  Gene Name: solute carrier family 48 (heme transporter), member 1
  Uniprot ID: Q6P1K1
  ENSP ID: ENSP00000410134
MYMQDYWRTWLKGLRGFFFVGVLFSAVSIAAFCTFLVLAITRHQSLTDPTSYYLSSVWSFISFKWAFLLSLYAHRYRADFADISILSDF

SEQ ID NO: 81942 - protein, 146 aa, Homo sapiens
  Payload ID: 16305
  Gene Symbol: SLC48A1
  Gene Name: solute carrier family 48 (heme transporter), member 1
  Uniprot ID: Q6P1K1
  ENSP ID: ENSP00000415998
MAPSRLQLGLRAAYSGISSVAGFSIFLVWTVVYRQPGTAAMGGLAGVLALWVLVTHVMYMQDYWRTWLKGLRGFFFVGVLFSAVSIAAFCTFLVLAITRHQSLTDPTSYYLSSVWSFISFKWAFLLSLYAHRYRADFADISILSDF

SEQ ID NO: 81943 - protein, 16 aa, Homo sapiens
  Payload ID: 16305
  Gene Symbol: SLC48A1
  Gene Name: solute carrier family 48 (heme transporter), member 1
  ENSP ID: ENSP00000446686
MYMQDYWRTWLKGLRG

SEQ ID NO: 81944 - protein, 89 aa, Homo sapiens; identical to SEQ ID NO: 81941
  Payload ID: 16305
  Gene Symbol: SLC48A1
  Gene Name: solute carrier family 48 (heme transporter), member 1
  Uniprot ID: Q6P1K1
  ENSP ID: ENSP00000446739

SEQ ID NO: 81945 - protein, 52 aa, Homo sapiens
  Payload ID: 16305
  Gene Symbol: SLC48A1
  Gene Name: solute carrier family 48 (heme transporter), member 1
  ENSP ID: ENSP00000449036
MAPSRLQLGLRAAYSGISSVAGFSIFLVWTVVYRQPGTAAMGGLGCWHCGSW

SEQ ID NO: 81946 - protein, 36 aa, Homo sapiens
  Payload ID: 16305
  Gene Symbol: SLC48A1
  Gene Name: solute carrier family 48 (heme transporter), member 1
  ENSP ID: ENSP00000450234
MYMQDYWRTWLKGLRGFFFVGVLFSAVSIAAFCTFL

SEQ ID NO: 81947 - protein, 659 aa, Homo sapiens
  Payload ID: 16306
  Gene Symbol: SLC5A4
  Gene Name: solute carrier family 5 (glucose activated ion channel), member 4
  Uniprot ID: Q9NY91
  ENSP ID: ENSP00000266086
MASTVSPSTIAETPEPPPLSDHIRNAADISVIVIYFLVVMAVGLWAMLKTNRGTIGGFFLAGRDMAWWPMGASLFASNIGSNHYVGLAGTGAASGVATVTFEWTSSVMLLILGWIFVPIYIKSGVMTMPEYLKKRFGGERLQVYLSILSLFICVVLLISADIFAGAIFIKLALGLDLYLAIFILLAMTAVYTTTGGLASVIYTDTLQTIIMLIGSFILMGFAFNEVGGYESFTEKYVNATPSVVEGDNLTISASCYTPRADSFHIFRDAVTGDIPWPGIIFGMPITALWYWCTNQVIVQRCLCGKDMSHVKAACIMCAYLKLLPMFLMVMPGMISRILYTDMVACVVPSECVKHCGVDVGCTNYAYPTMVLELMPQGLRGLMLSVMLASLMSSLTSIFNSASTLFTIDLYTKMRKQASEKELLIAGRIFVLLLTVVSIVWVPLVQVSQNGQLIHYTESISSYLGPPIAAVFVLAIFCKRVNEQGAFWGLMVGLAMGLIRMITEFAYGTGSCLAPSNCPKIICGVHYLYFSIVLFFGSMLVTLGISLLTKPIPDVHLYRLCWVLRNSTEERIDIDAEEKSQEETDDGVEEDYPEKSRGCLKKAYDLFCGLQKGPKLTKEEEEALSKKLTDTSERPSWRTIVNINAILLLAVVVFIHGYYA

SEQ ID NO: 81948 - protein, 580 aa, Homo sapiens
  Payload ID: 16307
  Gene Symbol: SLC5A7
  Gene Name: solute carrier family 5 (sodium/choline cotransporter), member 7
  Uniprot ID: Q9GZV3
  ENSP ID: ENSP00000264047
MAFHVEGLIAIIVFYLLILLVGIWAAWRTKNSGSAEERSEAIIVGGRDIGLLVGGFTMTATWVGGGYINGTAEAVYVPGYGLAWAQAPIGYSLSLILGGLFFAKPMRSKGYVTMLDPFQQIYGKRMGGLLFIPALMGEMFWAAAIFSALGATISVIIDVDMHISVIISALIATLYTLVGGLYSVAYTDVVQLFCIFVGLWISVPFALSHPAVADIGFTAVHAKYQKPWLGTVDSSEVYSWLDSFLLLMLGGIPWQAYFQRVLSSSSATYAQVLSFLAAFGCLVMAIPAILIGAIGASTDWNQTAYGLPDPKTTEEADMILPIVLQYLCPVYISFFGLGAVSAAVMSSADSSILSASSMFARNIYQLSFRQNASDKEIVWVMRITVFVFGASATAMALLTKTVYGLWYLSSDLVYIVIFPQLLCVLFVKGTNTYGAVAGYVSGLFLRITGGEPYLYLQPLIFYPGYYPDDNGIYNQKFPFKTLAMVTSFLTNICISYLAKYLFESGTLPPKLDVFDAVVARHSEENMDKTILVKNENIKLDELALVKPRQSMTLSSTFTNKEAFLDVDSSPEGSGTEDNLQ

SEQ ID NO: 81949 - protein, 580 aa, Homo sapiens; identical to SEQ ID NO: 81948
  Payload ID: 16307
  Gene Symbol: SLC5A7
  Gene Name: solute carrier family 5 (sodium/choline cotransporter), member 7
  Uniprot ID: Q9GZV3
  ENSP ID: ENSP00000387346

SEQ ID NO: 81950 - protein, 664 aa, Homo sapiens
  Payload ID: 16308
  Gene Symbol: SLC5A1
  Gene Name: solute carrier family 5 (sodium/glucose cotransporter), member 1
  Uniprot ID: P13866
  ENSP ID: ENSP00000266088
MDSSTWSPKTTAVTRPVETHELIRNAADISIIVIYFVVVMAVGLWAMFSTNRGTVGGFFLAGRSMVWWPIGASLFASNIGSGHFVGLAGTGAASGIAIGGFEWNALVLVVVLGWLFVPIYIKAGVVTMPEYLRKRFGGQRIQVYLSLLSLLLYIFTKISADIFSGAIFINLALGLNLYLAIFLLLAITALYTITGGLAAVIYTDTLQTVIMLVGSLILTGFAFHEVGGYDAFMEKYMKAIPTIVSDGNTTFQEKCYTPRADSFHIFRDPLTGDLPWPGFIFGMSILTLWYWCTDQVIVQRCLSAKNMSHVKGGCILCGYLKLMPMFIMVMPGMISRILYTEKIACVVPSECEKYCGTKVGCTNIAYPTLVVELMPNGLRGLMLSVMLASLMSSLTSIFNSASTLFTMDIYAKVRKRASEKELMIAGRLFILVLIGISIAWVPIVQSAQSGQLFDYIQSITSYLGPPIAAVFLLAIFWKRVNEPGAFWGLILGLLIGISRMITEFAYGTGSCMEPSNCPTIICGVHYLYFAIILFAISFITIVVISLLTKPIPDVHLYRLCWSLRNSKEERIDLDAEEENIQEGPKETIEIETQVPEKKKGIFRRAYDLFCGLEQHGAPKMTEEEEKAMKMKMTDTSEKPLWRTVLNVNGIILVTVAVFCHAYFA

SEQ ID NO: 81951 - protein, 537 aa, Homo sapiens
  Payload ID: 16308
  Gene Symbol: SLC5A1
  Gene Name: solute carrier family 5 (sodium/glucose cotransporter), member 1
  Uniprot ID: P13866
  ENSP ID: ENSP00000444898
MPEYLRKRFGGQRIQVYLSLLSLLLYIFTKISADIFSGAIFINLALGLNLYLAIFLLLAITALYTITGGLAAVIYTDTLQTVIMLVGSLILTGFAFHEVGGYDAFMEKYMKAIPTIVSDGNTTFQEKCYTPRADSFHIFRDPLTGDLPWPGFIFGMSILTLWYWCTDQVIVQRCLSAKNMSHVKGGCILCGYLKLMPMFIMVMPGMISRILYTEKIACVVPSECEKYCGTKVGCTNIAYPTLVVELMPNGLRGLMLSVMLASLMSSLTSIFNSASTLFTMDIYAKVRKRASEKELMIAGRLFILVLIGISIAWVPIVQSAQSGQLFDYIQSITSYLGPPIAAVFLLAIFWKRVNEPGAFWGLILGLLIGISRMITEFAYGTGSCMEPSNCPTIICGVHYLYFAIILFAISFITIVVISLLTKPIPDVHLYRLCWSLRNSKEERIDLDAEEENIQEGPKETIEIETQVPEKKKGIFRRAYDLFCGLEQHGAPKMTEEEEKAMKMKMTDTSEKPLWRTVLNVNGIILVTVAVFCHAYFA

SEQ ID NO: 81952 - protein, 672 aa, Homo sapiens
  Payload ID: 16309
  Gene Symbol: SLC5A2
  Gene Name: solute carrier family 5 (sodium/glucose cotransporter), member 2
  Uniprot ID: P31639
  ENSP ID: ENSP00000327943
MEEHTEAGSAPEMGAQKALIDNPADILVIAAYFLLVIGVGLWSMCRTNRGTVGGYFLAGRSMVWWPVGASLFASNIGSGHFVGLAGTGAASGLAVAGFEWNALFVVLLLGWLFAPVYLTAGVITMPQYLRKRFGGRRIRLYLSVLSLFLYIFTKISVDMFSGAVFIQQALGWNIYASVIALLGITMIYTVTGGLAALMYTDTVQTFVILGGACILMGYAFHEVGGYSGLFDKYLGAATSLTVSEDPAVGNISSFCYRPRPDSYHLLRHPVTGDLPWPALLLGLTIVSGWYWCSDQVIVQRCLAGKSLTHIKAGCILCGYLKLTPMFLMVMPGMISRILYPDEVACVVPEVCRRVCGTEVGCSNIAYPRLVVKLMPNGLRGLMLAVMLAALMSSLASIFNSSSTLFTMDIYTRLRPRAGDRELLLVGRLWVVFIVVVSVAWLPVVQAAQGGQLFDYIQAVSSYLAPPVSAVFVLALFVPRVNEQGAFWGLIGGLLMGLARLIPEFSFGSGSCVQPSACPAFLCGVHYLYFAIVLFFCSGLLTLTVSLCTAPIPRKHLHRLVFSLRHSKEEREDLDADEQQGSSLPVQNGCPESAMEMNEPQAPAPSLFRQCLLWFCGMSRGGVGSPPPLTQEEAAAAARRLEDISEDPSWARVVNLNALLMMAVAVFLWGFYA

SEQ ID NO: 81953 - protein, 458 aa, Homo sapiens
  Payload ID: 16309
  Gene Symbol: SLC5A2
  Gene Name: solute carrier family 5 (sodium/glucose cotransporter), member 2
  Uniprot ID: P31639
  ENSP ID: ENSP00000410601
MEEHTEAGSAPEMGAQKALIDNPADILVIAAYFLLVIGVGLWSMCRTNRGTVGGYFLAGRSMVWWPVGASLFASNIGSGHFVGLAGTGAASGLAVAGFEWNALFVVLLLGWLFAPVYLTAGVITMPQYLRKRFGGRRIRLYLSVLSLFLYIFTKISVDMFSGAVFIQQALGWNIYASVIALLGITMIYTVTGGLAALMYTDTVQTFVILGGACILMGYAFHEVGGYSGLFDKYLGAATSLTVSEDPAVGNISSFCYRPRPDSYHLLRHPVTGDLPWPALLLGLTIVSGWYWCSDQVIVQRCLAGKSLTHIKAGCILCGYLKLTPMFLMVMPGMISRILYPDEVACVVPEVCRRVCGTEVGCSNIAYPRLVVKLMPNGRLLGTHRGPADGPGTPDSRVLLRLGQLCAALGVPSFPLRRALPLLRHCAVLLLWPPHPHGLPVHRAHPQKAPPPPGLQSPA

SEQ ID NO: 81954 - protein, 148 aa, Homo sapiens
  Payload ID: 16309
  Gene Symbol: SLC5A2
  Gene Name: solute carrier family 5 (sodium/glucose cotransporter), member 2
  ENSP ID: ENSP00000455143
MCRTNRGTVGGYFLAGRSMVWWPVGASLFASNIGSGHFVGLAGTGAASGLAVAGFEWNALFVVLLLGWLFAPVYLTAGVITMPQYLRKRFGGRRIRLYLSVLSLFLYIFTKISVDMFSGAVFIQQALGWNIYASVIALLGITMIYTVT

SEQ ID NO: 81955 - protein, 675 aa, Homo sapiens
  Payload ID: 16310
  Gene Symbol: SLC5A11
  Gene Name: solute carrier family 5 (sodium/inositol cotransporter), member 11
  Uniprot ID: Q8WWX8
  ENSP ID: ENSP00000289932
MESGTSSPQPPQLDPLDAFPQKGLEPGDIAVLVLYFLFVLAVGLWSTVKTKRDTVKGYFLAGGDMVWWPVGASLFASNVGSGHFIGLAGSGAATGISVSAYELNGLFSVLMLAWIFLPIYIAGQVTTMPEYLRKRFGGIRIPIILAVLYLFIYIFTKISVDMYAGAIFIQQSLHLDLYLAIVGLLAITAVYTVAGGLAAVIYTDALQTLIMLIGALTLMGYSFAAVGGMEGLKEKYFLALASNRSENSSCGLPREDAFHIFRDPLTSDLPWPGVLFGMSIPSLWYWCTDQVIVQRTLAAKNLSHAKGGALMAAYLKVLPLFIMVFPGMVSRILFPDQVACADPEICQKICSNPSGCSDIAYPKLVLELLPTGLRGLMMAVMVAALMSSLTSIFNSASTIFTMDLWNHLRPRASEKELMIVGRVFVLLLVLVSILWIPVVQASQGGQLFIYIQSISSYLQPPVAVVFIMGCFWKRTNEKGAFWGLISGLLLGLVRLVLDFIYVQPRCDQPDERPVLVKSIHYLYFSMILSTVTLITVSTVSWFTEPPSKEMVSHLTWFTRHDPVVQKEQAPPAAPLSLTLSQNGMPEASSSSSVQFEMVQENTSKTHSCDMTPKQSKVVKAILWLCGIQEKGKEELPARAEAIIVSLEENPLVKTLLDVNLIFCVSCAIFIWGYFA

SEQ ID NO: 81956 - protein, 519 aa, Homo sapiens
  Payload ID: 16310
  Gene Symbol: SLC5A11
  Gene Name: solute carrier family 5 (sodium/inositol cotransporter), member 11
  Uniprot ID: Q8WWX8
  ENSP ID: ENSP00000389606
MVWWPVGASLFASNVGSGHFIGLAGSGAATGISVSAYELNGLFSVLMLAWIFLPIYIAGQVTTMPEYLRKRFGGIRIPIILAVLYLFIYIFTKISVDMYAGAIFIQQSLHLDLYLAIVGLLAITAVYTVAGGLAAVIYTDALQTLIMLIGALTLMGYSDCPADSGCQEPVPCQRRCSDGCIPEGAAPLHNGVPWDGQPHPLPRSSGLCRSRDLPEDLQQPLRLFGHRVSQTRAGTPAHSASTIFTMDLWNHLRPRASEKELMIVGRVFVLLLVLVSILWIPVVQASQGGQLFIYIQSISSYLQPPVAVVFIMGCFWKRTNEKGAFWGLISGLLLGLVRLVLDFIYVQPRCDQPDERPVLVKSIHYLYFSMILSTVTLITVSTVSWFTEPPSKEMVSHLTWFTRHDPVVQKEQAPPAAPLSLTLSQNGMPEASSSSSVQFEMVQENTSKTHSCDMTPKQSKVVKAILWLCGIQEKGKEELPARAEAIIVSLEENPLVKTLLDVNLIFCVSCAIFIWGYFA

SEQ ID NO: 81957 - protein, 640 aa, Homo sapiens
  Payload ID: 16310
  Gene Symbol: SLC5A11
  Gene Name: solute carrier family 5 (sodium/inositol cotransporter), member 11
  Uniprot ID: Q8WWX8
  ENSP ID: ENSP00000416782
MESGTSSPQPPQLDPLDAFPQKGLEPGDIAVLVLYFLFVLAVGLWSTVKTKRDTVKGYFLAGGDMVWWPVGASLFASNVGSGHFIGLAGSGAATGISVSAYELNGLFSVLMLAWIFLPIYIAGQVDMYAGAIFIQQSLHLDLYLAIVGLLAITAVYTVAGGLAAVIYTDALQTLIMLIGALTLMGYSFAAVGGMEGLKEKYFLALASNRSENSSCGLPREDAFHIFRDPLTSDLPWPGVLFGMSIPSLWYWCTDQVIVQRTLAAKNLSHAKGGALMAAYLKVLPLFIMVFPGMVSRILFPDQVACADPEICQKICSNPSGCSDIAYPKLVLELLPTGLRGLMMAVMVAALMSSLTSIFNSASTIFTMDLWNHLRPRASEKELMIVGRVFVLLLVLVSILWIPVVQASQGGQLFIYIQSISSYLQPPVAVVFIMGCFWKRTNEKGAFWGLISGLLLGLVRLVLDFIYVQPRCDQPDERPVLVKSIHYLYFSMILSTVTLITVSTVSWFTEPPSKEMVSHLTWFTRHDPVVQKEQAPPAAPLSLTLSQNGMPEASSSSSVQFEMVQENTSKTHSCDMTPKQSKVVKAILWLCGIQEKGKEELPARAEAIIVSLEENPLVKTLLDVNLIFCVSCAIFIWGYFA

SEQ ID NO: 81958 - protein, 605 aa, Homo sapiens
  Payload ID: 16310
  Gene Symbol: SLC5A11
  Gene Name: solute carrier family 5 (sodium/inositol cotransporter), member 11
  Uniprot ID: Q8WWX8
  ENSP ID: ENSP00000441384
MESGTSSPQPPQLDPLDAFPQKGLEPGDIAVLVLYFLFVLAVGLWSTVKTKRDTVKGYFLAGGDMVWWPGLFSVLMLAWIFLPIYIAGQVDMYAGAIFIQQSLHLDLYLAIVGLLAITAVYTVAGGLAAVIYTDALQTLIMLIGALTLMGYSFAAVGGMEGLKEKYFLALASNRSENSSCGLPREDAFHIFRDPLTSDLPWPGVLFGMSIPSLWYWCTDQVIVQRTLAAKNLSHAKGGALMAAYLKVLPLFIMVFPGMVSRILFPDQVACADPEICQKICSNPSGCSDIAYPKLVLELLPTGLRGLMMAVMVAALMSSLTSIFNSASTIFTMDLWNHLRPRASEKELMIVGRVFVLLLVLVSILWIPVVQASQGGQLFIYIQSISSYLQPPVAVVFIMGCFWKRTNEKGAFWGLISGLLLGLVRLVLDFIYVQPRCDQPDERPVLVKSIHYLYFSMILSTVTLITVSTVSWFTEPPSKEMVSHLTWFTRHDPVVQKEQAPPAAPLSLTLSQNGMPEASSSSSVQFEMVQENTSKTHSCDMTPKQSKVVKAILWLCGIQEKGKEELPARAEAIIVSLEENPLVKTLLDVNLIFCVSCAIFIWGYFA

SEQ ID NO: 81959 - protein, 640 aa, Homo sapiens; identical to SEQ ID NO: 81957
  Payload ID: 16310
  Gene Symbol: SLC5A11
  Gene Name: solute carrier family 5 (sodium/inositol cotransporter), member 11
  Uniprot ID: Q8WWX8
  ENSP ID: ENSP00000454401

SEQ ID NO: 81960 - protein, 91 aa, Homo sapiens
  Payload ID: 16310
  Gene Symbol: SLC5A11
  Gene Name: solute carrier family 5 (sodium/inositol cotransporter), member 11
  ENSP ID: ENSP00000454732
MESGTSSPQPPQLDPLDAFPQKGLEPGDIAVLVLYFLFVLAVGLWSTVKTKRDTVKGYFLAGGDMVWWPVGASLFASNVGSGHFIGLAGSG

SEQ ID NO: 81961 - protein, 605 aa, Homo sapiens; identical to SEQ ID NO: 81958
  Payload ID: 16310
  Gene Symbol: SLC5A11
  Gene Name: solute carrier family 5 (sodium/inositol cotransporter), member 11
  Uniprot ID: Q8WWX8
  ENSP ID: ENSP00000456234

SEQ ID NO: 81962 - protein, 519 aa, Homo sapiens; identical to SEQ ID NO: 81956
  Payload ID: 16310
  Gene Symbol: SLC5A11
  Gene Name: solute carrier family 5 (sodium/inositol cotransporter), member 11
  Uniprot ID: Q8WWX8
  ENSP ID: ENSP00000456376

SEQ ID NO: 81963 - protein, 611 aa, Homo sapiens
  Payload ID: 16310
  Gene Symbol: SLC5A11
  Gene Name: solute carrier family 5 (sodium/inositol cotransporter), member 11
  Uniprot ID: Q8WWX8
  ENSP ID: ENSP00000457179
MVWWPVGASLFASNVGSGHFIGLAGSGAATGISVSAYELNGLFSVLMLAWIFLPIYIAGQVTTMPEYLRKRFGGIRIPIILAVLYLFIYIFTKISVDMYAGAIFIQQSLHLDLYLAIVGLLAITAVYTVAGGLAAVIYTDALQTLIMLIGALTLMGYSFAAVGGMEGLKEKYFLALASNRSENSSCGLPREDAFHIFRDPLTSDLPWPGVLFGMSIPSLWYWCTDQVIVQRTLAAKNLSHAKGGALMAAYLKVLPLFIMVFPGMVSRILFPDQVACADPEICQKICSNPSGCSDIAYPKLVLELLPTGLRGLMMAVMVAALMSSLTSIFNSASTIFTMDLWNHLRPRASEKELMIVGRVFVLLLVLVSILWIPVVQASQGGQLFIYIQSISSYLQPPVAVVFIMGCFWKRTNEKGAFWGLISGLLLGLVRLVLDFIYVQPRCDQPDERPVLVKSIHYLYFSMILSTVTLITVSTVSWFTEPPSKEMVSHLTWFTRHDPVVQKEQAPPAAPLSLTLSQNGMPEASSSSSVQFEMVQENTSKTHSCDMTPKQSKVVKAILWLCGIQEKGKEELPARAEAIIVSLEENPLVKTLLDVNLIFCVSCAIFIWGYFA

SEQ ID NO: 81964 - protein, 62 aa, Homo sapiens
  Payload ID: 16310
  Gene Symbol: SLC5A11
  Gene Name: solute carrier family 5 (sodium/inositol cotransporter), member 11
  ENSP ID: ENSP00000458806
MESGTSSPQPPQLDPLDAFPQKGLEPGDIAVLVLYFLFVLAVGLWVGSPSVAQGTRTQWWQS

SEQ ID NO: 81965 - protein, 643 aa, Homo sapiens
  Payload ID: 16311
  Gene Symbol: SLC5A5
  Gene Name: solute carrier family 5 (sodium/iodide cotransporter), member 5
  Uniprot ID: Q92911
  ENSP ID: ENSP00000222248
MEAVETGERPTFGAWDYGVFALMLLVSTGIGLWVGLARGGQRSAEDFFTGGRRLAALPVGLSLSASFMSAVQVLGVPSEAYRYGLKFLWMCLGQLLNSVLTALLFMPVFYRLGLTSTYEYLEMRFSRAVRLCGTLQYIVATMLYTGIVIYAPALILNQVTGLDIWASLLSTGIICTFYTAVGGMKAVVWTDVFQVVVMLSGFWVVLARGVMLVGGPRQVLTLAQNHSRINLMDFNPDPRSRYTFWTFVVGGTLVWLSMYGVNQAQVQRYVACRTEKQAKLALLINQVGLFLIVSSAACCGIVMFVFYTDCDPLLLGRISAPDQYMPLLVLDIFEDLPGVPGLFLACAYSGTLSTASTSINAMAAVTVEDLIKPRLRSLAPRKLVIISKGLSLIYGSACLTVAALSSLLGGGVLQGSFTVMGVISGPLLGAFILGMFLPACNTPGVLAGLGAGLALSLWVALGATLYPPSEQTMRVLPSSAARCVALSVNASGLLDPALLPANDSSRAPSSGMDASRPALADSFYAISYLYYGALGTLTTVLCGALISCLTGPTKRSTLAPGLLWWDLARQTASVAPKEEVAILDDNLVKGPEELPTGNKKPPGFLPTNEDRLFFLGQKELEGAGSWTPCVGHDGGRDQQETNL

SEQ ID NO: 81966 - protein, 396 aa, Homo sapiens
  Payload ID: 16312
  Gene Symbol: SLC5A12
  Gene Name: solute carrier family 5 (sodium/monocarboxylate cotransporter), member 12
  Uniprot ID: Q1EHB4
  ENSP ID: ENSP00000280467
MEVKNFAVWDYVVFAALFFISSGIGVFFAIKERKKATSREFLVGGRQMSFGPVGLSLTASFMSAVTVLGTPSEVYRFGASFLVFFIAYLFVILLTSELFLPVFYRSGITSTYEYLQLRFNKPVRYAATVIYIVQTILYTGVVVYAPALALNQVTGFDLWGSVFATGIVCTFYCTLGGLKAVVWTDAFQMVVMIVGFLTVLIQGSTHAGGFHNVLEQSTNGSRLHIFDFDVDPLRRHTFWTITVGGTFTWLGIYGVNQSTIQRCISCKTEKHAKLALYFNLLGLWIILVCAVFSGLIMYSHFKDCDPWTSGIISAPDQLMPYFVMEIFATMPGLPGLFVACAFSGTLSTVASSINALATVTFEDFVKSCFPHLSDKLSTWISKGLCRYSWWTFYSIS

SEQ ID NO: 81967 - protein, 618 aa, Homo sapiens
  Payload ID: 16312
  Gene Symbol: SLC5A12
  Gene Name: solute carrier family 5 (sodium/monocarboxylate cotransporter), member 12
  Uniprot ID: Q1EHB4
  ENSP ID: ENSP00000379326
MEVKNFAVWDYVVFAALFFISSGIGVFFAIKERKKATSREFLVGGRQMSFGPVGLSLTASFMSAVTVLGTPSEVYRFGASFLVFFIAYLFVILLTSELFLPVFYRSGITSTYEYLQLRFNKPVRYAATVIYIVQTILYTGVVVYAPALALNQVTGFDLWGSVFATGIVCTFYCTLGGLKAVVWTDAFQMVVMIVGFLTVLIQGSTHAGGFHNVLEQSTNGSRLHIFDFDVDPLRRHTFWTITVGGTFTWLGIYGVNQSTIQRCISCKTEKHAKLALYFNLLGLWIILVCAVFSGLIMYSHFKDCDPWTSGIISAPDQLMPYFVMEIFATMPGLPGLFVACAFSGTLSTVASSINALATVTFEDFVKSCFPHLSDKLSTWISKGLCLLFGVMCTSMAVAASVMGGVVQASLSIHGMCGGPMLGLFSLGIVFPFVNWKGALGGLLTGITLSFWVAIGAFIYPAPASKTWPLPLSTDQCIKSNVTATGPPVLSSRPGIADTWYSISYLYYSAVGCLGCIVAGVIISLITGRQRGEDIQPLLIRPVCNLFCFWSKKYKTLCWCGVQHDSGTEQENLENGSARKQGAESVLQNGLRRESLVHVPGYDPKDKSYNNMAFETTHF

SEQ ID NO: 81968 - protein, 150 aa, Homo sapiens
  Payload ID: 16312
  Gene Symbol: SLC5A12
  Gene Name: solute carrier family 5 (sodium/monocarboxylate cotransporter), member 12
  ENSP ID: ENSP00000435053
MVVMIVGFLTVLIQGSTHAGGFHNVLEQSTNGSRLHIFDFDVDPLRRHTFWTITVGGTFTWLGIYGVNQSTIQRCISCKTEKHAKLALYFNLLGLWIILVCAVFSGLIMYSHFKDCDPWTSGIISAPDQLMPYFVMEIFATMPGLPGLFV

SEQ ID NO: 81969 - protein, 277 aa, Homo sapiens
  Payload ID: 16312
  Gene Symbol: SLC5A12
  Gene Name: solute carrier family 5 (sodium/monocarboxylate cotransporter), member 12
  ENSP ID: ENSP00000436011
MVVMIVGFLTVLIQGSTHAGGFHNVLEQSTNGSRLHIFDFDVDPLRRHTFWTITVGGTFTWLGIYGVNQSTIQRCISCKTEKHAKLALYFNLLGLWIILVCAVFSGLIMYSHFKDCDPWTSGIISAPDQLMPYFVMEIFATMPGLPGLFVACAFSGTLSTVASSINALATVTFEDFVKSCFPHLSDKLSTWISKGLCRSLIWRDVYLYGCGCICHGRCCAGFPQHSRHVWRTNAGLILPGNRVPFCELEGCTRRSSYWNHLVILGGHWGLHLPCTSL

SEQ ID NO: 81970 - protein, 610 aa, Homo sapiens
  Payload ID: 16313
  Gene Symbol: SLC5A8
  Gene Name: solute carrier family 5 (sodium/monocarboxylate cotransporter), member 8
  Uniprot ID: Q8N695
  ENSP ID: ENSP00000445340
MDTPRGIGTFVVWDYVVFAGMLVISAAIGIYYAFAGGGQQTSKDFLMGGRRMTAVPVALSLTASFMSAVTVLGTPSEVYRFGAIFSIFAFTYFFVVVISAEVFLPVFYKLGITSTYEYLELRFNKCVRLCGTVLFIVQTILYTGIVIYAPALALNQVTGFDLWGAVVATGVVCTFYCTLGGLKAVIWTDVFQVGIMVAGFASVIIQAVVMQGGISTILNDAYDGGRLNFWNFNPNPLQRHTFWTIIIGGTFTWTSIYGVNQSQVQRYISCKSRFQAKLSLYINLVGLWAILTCSVFCGLALYSRYHDCDPWTAKKVSAPDQLMPYLVLDILQDYPGLPGLFVACAYSGTLSTVSSSINALAAVTVEDLIKPYFRSLSERSLSWISQGMSVVYGALCIGMAALASLMGALLQAALSVFGMVGGPLMGLFALGILVPFANSIGALVGLMAGFAISLWVGIGAQIYPPLPERTLPLHLDIQGCNSTYNETNLMTTTEMPFTTSVFQIYNVQRTPLMDNWYSLSYLYFSTVGTLVTLLVGILVSLSTGGRKQNLDPRYILTKEDFLSNFDIFKKKKHVLSYKSHPVEDGGTDNPAFNHIELNSDQSGKSNGTRL

SEQ ID NO: 81971 - protein, 610 aa, Homo sapiens; identical to SEQ ID NO: 81970
  Payload ID: 16313
  Gene Symbol: SLC5A8
  Gene Name: solute carrier family 5 (sodium/monocarboxylate cotransporter), member 8
  Uniprot ID: Q8N695
  ENSP ID: ENSP00000461697

SEQ ID NO: 81972 - protein, 635 aa, Homo sapiens
  Payload ID: 16314
  Gene Symbol: SLC5A6
  Gene Name: solute carrier family 5 (sodium/multivitamin and iodide cotransporter), member 6
  Uniprot ID: Q9Y289
  ENSP ID: ENSP00000310208
MSVGVSTSAPLSPTSGTSVGMSTFSIMDYVVFVLLLVLSLAIGLYHACRGWGRHTVGELLMADRKMGCLPVALSLLATFQSAVAILGVPSEIYRFGTQYWFLGCCYFLGLLIPAHIFIPVFYRLHLTSAYEYLELRFNKTVRVCGTVTFIFQMVIYMGVVLYAPSLALNAVTGFDLWLSVLALGIVCTVYTALGGLKAVIWTDVFQTLVMFLGQLAVIIVGSAKVGGLGRVWAVASQHGRISGFELDPDPFVRHTFWTLAFGGVFMMLSLYGVNQAQVQRYLSSRTEKAAVLSCYAVFPFQQVSLCVGCLIGLVMFAYYQEYPMSIQQAQAAPDQFVLYFVMDLLKGLPGLPGLFIACLFSGSLSTISSAFNSLATVTMEDLIRPWFPEFSEARAIMLSRGLAFGYGLLCLGMAYISSQMGPVLQAAISIFGMVGGPLLGLFCLGMFFPCANPPGAVVGLLAGLVMAFWIGIGSIVTSMGSSMPPSPSNGSSFSLPTNLTVATVTTLMPLTTFSKPTGLQRFYSLSYLWYSAHNSTTVIVVGLIVSLLTGRMRGRSLNPATIYPVLPKLLSLLPLSCQKRLHCRSYGQDHLDTGLFPEKPRNGVLGDSRDKEAMALDGTAYQGSSSTCILQETSL

SEQ ID NO: 81973 - protein, 147 aa, Homo sapiens
  Payload ID: 16314
  Gene Symbol: SLC5A6
  Gene Name: solute carrier family 5 (sodium/multivitamin and iodide cotransporter), member 6
  ENSP ID: ENSP00000384265
MSVGVSTSAPLSPTSGTSVGMSTFSIMDYVVFVLLLVLSLAIGLYHACRGWGRHTVGELLMADRKMGCLPVALSLLATFQSAVAILGVPSEIYRFGTQYWFLGCCYFLGLLIPAHIFIPVFYRLHLTSAYEYLELRFNKTVRVCGTV

SEQ ID NO: 81974 - protein, 635 aa, Homo sapiens; identical to SEQ ID NO: 81972
  Payload ID: 16314
  Gene Symbol: SLC5A6
  Gene Name: solute carrier family 5 (sodium/multivitamin and iodide cotransporter), member 6
  Uniprot ID: Q9Y289
  ENSP ID: ENSP00000384853

SEQ ID NO: 81975 - protein, 38 aa, Homo sapiens
  Payload ID: 16314
  Gene Symbol: SLC5A6
  Gene Name: solute carrier family 5 (sodium/multivitamin and iodide cotransporter), member 6
  ENSP ID: ENSP00000399299
MSVGVSTSAPLSPTSGTSVGMSTFSIMDYVVFVLLLVL

SEQ ID NO: 81976 - protein, 115 aa, Homo sapiens
  Payload ID: 16314
  Gene Symbol: SLC5A6
  Gene Name: solute carrier family 5 (sodium/multivitamin and iodide cotransporter), member 6
  ENSP ID: ENSP00000401347
MSVGVSTSAPLSPTSGTSVGMSTFSIMDYVVFVLLLVLSLAIGLYHACRGWGRHTVGELLMADRKMGCLPVALSLLATFQSAVAILGVPSEIYRFGTQYWFLGCCYFLGLLIPAH

SEQ ID NO: 81977 - protein, 58 aa, Homo sapiens
  Payload ID: 16314
  Gene Symbol: SLC5A6
  Gene Name: solute carrier family 5 (sodium/multivitamin and iodide cotransporter), member 6
  ENSP ID: ENSP00000402903
MSVGVSTSAPLSPTSGTSVGMSTFSIMDYVVFVLLLVLSLAIGLYHACRGWGRHTVGE

SEQ ID NO: 81978 - protein, 193 aa, Homo sapiens
  Payload ID: 16314
  Gene Symbol: SLC5A6
  Gene Name: solute carrier family 5 (sodium/multivitamin and iodide cotransporter), member 6
  ENSP ID: ENSP00000403851
MSVGVSTSAPLSPTSGTSVGMSTFSIMDYVVFVLLLVLSLAIGLYHACRGWGRHTVGELLMADRKMGCLPVALSLLATFQSAVAILGVPSEIYRFGTQYWFLGCCYFLGLLIPAHIFIPVFYRLHLTSAYEYLELRFNKTVRVCGTVTFIFQMVIYMGVVLYAPSLALNAVTGFDLWLSVLALGIVCTVYTAL

SEQ ID NO: 81979 - protein, 78 aa, Homo sapiens
  Payload ID: 16314
  Gene Symbol: SLC5A6
  Gene Name: solute carrier family 5 (sodium/multivitamin and iodide cotransporter), member 6
  ENSP ID: ENSP00000404032
MSVGVSTSAPLSPTSGTSVGMSTFSIMDYVVFVLLLVLSLAIGLYHACRGWGRHTVGELLMADRKMGCLPVALSLLAT

SEQ ID NO: 81980 - protein, 153 aa, Homo sapiens
  Payload ID: 16314
  Gene Symbol: SLC5A6
  Gene Name: solute carrier family 5 (sodium/multivitamin and iodide cotransporter), member 6
  ENSP ID: ENSP00000411361
MSVGVSTSAPLSPTSGTSVGMSTFSIMDYVVFVLLLVLSLAIGLYHACRGWGRHTVGELLMADRKMGCLPVALSLLATFQSAVAILGVPSEIYRFGTQYWFLGCCYFLGLLIPAHIFIPVFYRLHLTSAYEYLELRFNKTVRVCGTVTFIFQM

SEQ ID NO: 81981 - protein, 133 aa, Homo sapiens
  Payload ID: 16314
  Gene Symbol: SLC5A6
  Gene Name: solute carrier family 5 (sodium/multivitamin and iodide cotransporter), member 6
  ENSP ID: ENSP00000411536
MSVGVSTSAPLSPTSGTSVGMSTFSIMDYVVFVLLLVLSLAIGLYHACRGWGRHTVGELLMADRKMGCLPVALSLLATFQSAVAILGVPSEIYRFGTQYWFLGCCYFLGLLIPAHIFIPVFYRLHLTSAYEYL

SEQ ID NO: 81982 - protein, 27 aa, Homo sapiens
  Payload ID: 16314
  Gene Symbol: SLC5A6
  Gene Name: solute carrier family 5 (sodium/multivitamin and iodide cotransporter), member 6
  ENSP ID: ENSP00000412115
MSVGVSTSAPLSPTSGTSVGMSTFSIM

SEQ ID NO: 81983 - protein, 718 aa, Homo sapiens
  Payload ID: 16315
  Gene Symbol: SLC5A3
  Gene Name: solute carrier family 5 (sodium/myo-inositol cotransporter), member 3
  Uniprot ID: P53794
  ENSP ID: ENSP00000370543
MRAVLDTADIAIVALYFILVMCIGFFAMWKSNRSTVSGYFLAGRSMTWVAIGASLFVSNIGSEHFIGLAGSGAASGFAVGAWEFNALLLLQLLGWVFIPIYIRSGVYTMPEYLSKRFGGHRIQVYFAALSLILYIFTKLSVDLYSGALFIQESLGWNLYVSVILLIGMTALLTVTGGLVAVIYTDTLQALLMIIGALTLMIISIMEIGGFEEVKRRYMLASPDVTSILLTYNLSNTNSCNVSPKKEALKMLRNPTDEDVPWPGFILGQTPASVWYWCADQVIVQRVLAAKNIAHAKGSTLMAGFLKLLPMFIIVVPGMISRILFTDDIACINPEHCMLVCGSRAGCSNIAYPRLVMKLVPVGLRGLMMAVMIAALMSDLDSIFNSASTIFTLDVYKLIRKSASSRELMIVGRIFVAFMVVISIAWVPIIVEMQGGQMYLYIQEVADYLTPPVAALFLLAIFWKRCNEQGAFYGGMAGFVLGAVRLILAFAYRAPECDQPDNRPGFIKDIHYMYVATGLFWVTGLITVIVSLLTPPPTKEQIRTTTFWSKKNLVVKENCSPKEEPYKMQEKSILRCSENNETINHIIPNGKSEDSIKGLQPEDVNLLVTCREEGNPVASLGHSEAETPVDAYSNGQAALMGEKERKKETDDGGRYWKFIDWFCGFKSKSLSKRSLRDLMEEEAVCLQMLEETRQVKVILNIGLFAVCSLGIFMFVYFSL

SEQ ID NO: 81984 - protein, 566 aa, Homo sapiens
  Payload ID: 16316
  Gene Symbol: SLC5A10
  Gene Name: solute carrier family 5 (sodium/sugar cotransporter), member 10
  Uniprot ID: A0PJK1
  ENSP ID: ENSP00000324346
MTWWPIGASLFASSEGSGLFIGLAGSGAAGGLAVAGFEWNATYVLLALAWVFVPIYISSEIVTLPEYIQKRYGGQRIRMYLSVLSLLLSVFTKISLDLYAGALFVHICLGWNFYLSTILTLGITALYTIAAFDQIGGYGQLEAAYAQAIPSRTIANTTCHLPRTDAMHMFRDPHTGDLPWTGMTFGLTIMATWYWCTDQVIVQRSLSARDLNHAKAGSILASYLKMLPMGLIIMPGMISRALFPGAHVYEERHQVSVSRTDDVGCVVPSECLRACGAEVGCSNIAYPKLVMELMPIGLRGLMIAVMLAALMSSLTSIFNSSSTLFTMDIWRRLRPRSGERELLLVGRTGIPSTPPAPQSRLSFLLPETPPLERYLLGLVVMDLWLVIVALIGVSVAWIPVLQDSNSGQLFIYMQSVTSSLAPPVTAVFVLGVFWRRANEQGAFWGLIAGLVVGATRLVLEFLNPAPPCGEPDTRPAVLGSIHYLHFAVALFALSGAVVVAGSLLTPPPQSVQIENLTWWTLAQDVPLGTKAGDGQTPQKHAFWARVCGFNAILLMCVNIFFYAYFA

SEQ ID NO: 81985 - protein, 569 aa, Homo sapiens
  Payload ID: 16316
  Gene Symbol: SLC5A10
  Gene Name: solute carrier family 5 (sodium/sugar cotransporter), member 10
  Uniprot ID: A0PJK1
  ENSP ID: ENSP00000379005
MAANSTSDLHTPGTQLSVADIIVITVYFALNVAVGIWSSCRASRNTVNGYFLAGRDMTWWPIGASLFASSEGSGLFIGLAGSGAAGGLAVAGFEWNATYVLLALAWVFVPIYISSEIVTLPEYIQKRYGGQRIRMYLSVLSLLLSVFTKISLDLYAGALFVHICLGWNFYLSTILTLGITALYTIAAFDQIGGYGQLEAAYAQAIPSRTIANTTCHLPRTDAMHMFRDPHTGDLPWTGMTFGLTIMATWYWCTDQVIVQRSLSARDLNHAKAGSILASYLKMLPMGLIIMPGMISRALFPDDVGCVVPSECLRACGAEVGCSNIAYPKLVMELMPIGLRGLMIAVMLAALMSSLTSIFNSSSTLFTMDIWRRLRPRSGERELLLVGRLVIVALIGVSVAWIPVLQDSNSGQLFIYMQSVTSSLAPPVTAVFVLGVFWRRANEQGAFWGLIAGLVVGATRLVLEFLNPAPPCGEPDTRPAVLGSIHYLHFAVALFALSGAVVVAGSLLTPPPQSVQIENLTWWTLAQDVPLGTKAGDGQTPQKHAFWARVCGFNAILLMCVNIFFYAYFA

SEQ ID NO: 81986 - protein, 596 aa, Homo sapiens
  Payload ID: 16316
  Gene Symbol: SLC5A10
  Gene Name: solute carrier family 5 (sodium/sugar cotransporter), member 10
  Uniprot ID: A0PJK1
  ENSP ID: ENSP00000379007
MAANSTSDLHTPGTQLSVADIIVITVYFALNVAVGIWSSCRASRNTVNGYFLAGRDMTWWPIGASLFASSEGSGLFIGLAGSGAAGGLAVAGFEWNATYVLLALAWVFVPIYISSEIVTLPEYIQKRYGGQRIRMYLSVLSLLLSVFTKISLDLYAGALFVHICLGWNFYLSTILTLGITALYTIAGGLAAVIYTDALQTLIMVVGAVILTIKAFDQIGGYGQLEAAYAQAIPSRTIANTTCHLPRTDAMHMFRDPHTGDLPWTGMTFGLTIMATWYWCTDQVIVQRSLSARDLNHAKAGSILASYLKMLPMGLIIMPGMISRALFPDDVGCVVPSECLRACGAEVGCSNIAYPKLVMELMPIGLRGLMIAVMLAALMSSLTSIFNSSSTLFTMDIWRRLRPRSGERELLLVGRLVIVALIGVSVAWIPVLQDSNSGQLFIYMQSVTSSLAPPVTAVFVLGVFWRRANEQGAFWGLIAGLVVGATRLVLEFLNPAPPCGEPDTRPAVLGSIHYLHFAVALFALSGAVVVAGSLLTPPPQSVQIENLTWWTLAQDVPLGTKAGDGQTPQKHAFWARVCGFNAILLMCVNIFFYAYFA

SEQ ID NO: 81987 - protein, 612 aa, Homo sapiens
  Payload ID: 16316
  Gene Symbol: SLC5A10
  Gene Name: solute carrier family 5 (sodium/sugar cotransporter), member 10
  Uniprot ID: A0PJK1
  ENSP ID: ENSP00000379008
MAANSTSDLHTPGTQLSVADIIVITVYFALNVAVGIWSSCRASRNTVNGYFLAGRDMTWWPIGASLFASSEGSGLFIGLAGSGAAGGLAVAGFEWNATYVLLALAWVFVPIYISSEIVTLPEYIQKRYGGQRIRMYLSVLSLLLSVFTKISLDLYAGALFVHICLGWNFYLSTILTLGITALYTIAGGLAAVIYTDALQTLIMVVGAVILTIKAFDQIGGYGQLEAAYAQAIPSRTIANTTCHLPRTDAMHMFRDPHTGDLPWTGMTFGLTIMATWYWCTDQVIVQRSLSARDLNHAKAGSILASYLKMLPMGLIIMPGMISRALFPGAHVYEERHQVSVSRTDDVGCVVPSECLRACGAEVGCSNIAYPKLVMELMPIGLRGLMIAVMLAALMSSLTSIFNSSSTLFTMDIWRRLRPRSGERELLLVGRLVIVALIGVSVAWIPVLQDSNSGQLFIYMQSVTSSLAPPVTAVFVLGVFWRRANEQGAFWGLIAGLVVGATRLVLEFLNPAPPCGEPDTRPAVLGSIHYLHFAVALFALSGAVVVAGSLLTPPPQSVQIENLTWWTLAQDVPLGTKAGDGQTPQKHAFWARVCGFNAILLMCVNIFFYAYFA

SEQ ID NO: 81988 - protein, 560 aa, Homo sapiens
  Payload ID: 16316
  Gene Symbol: SLC5A10
  Gene Name: solute carrier family 5 (sodium/sugar cotransporter), member 10
  Uniprot ID: A0PJK1
  ENSP ID: ENSP00000401875
MAANSTSDLHTPGTQLSVADIIVITVYFALNVAVGIWSSCRASRNTVNGYFLAGRDMTWWPIGASLFASSEGSGLFIGLAGSGAAGGLAVAGFEWNATYVLLALAWVFVPIYISSEIVTLPEYIQKRYGGQRIRMYLSVLSLLLSVFTKISLDLYAGALFVHICLGWNFYLSTILTLGITALYTIAGGLAAVIYTDALQTLIMVVGAVILTIKAFDQIGGYGQLEAAYAQAIPSRTIANTTCHLPRTDAMHMFRDPHTGDLPWTGMTFGLTIMATWYWCTDQVIVQRSLSARDLNHAKAGSILASYLKMLPMGLIIMPGMISRALFPGLRGLMIAVMLAALMSSLTSIFNSSSTLFTMDIWRRLRPRSGERELLLVGRLVIVALIGVSVAWIPVLQDSNSGQLFIYMQSVTSSLAPPVTAVFVLGVFWRRANEQGAFWGLIAGLVVGATRLVLEFLNPAPPCGEPDTRPAVLGSIHYLHFAVALFALSGAVVVAGSLLTPPPQSVQIENLTWWTLAQDVPLGTKAGDGQTPQKHAFWARVCGFNAILLMCVNIFFYAYFA

SEQ ID NO: 81989 - protein, 706 aa, Homo sapiens
  Payload ID: 16317
  Gene Symbol: SLC5A9
  Gene Name: solute carrier family 5 (sodium/sugar cotransporter), member 9
  Uniprot ID: Q2M3M2
  ENSP ID: ENSP00000236495
MSKELAAMGPGASGDGVRTETAPHIALDSRVGLHAYDISVVVIYFVFVIAVGIWSSIRASRGTIGGYFLAGRSMSWWPIGASLMSSNVGSGLFIGLAGTGAAGGLAVGGFEWNMRKSRSGGDRGIHPRSHGRTGVRSQATWLLLALGWVFVPVYIAAGVVTMPQYLKKRFGGQRIQVYMSVLSLILYIFTKISTDIFSGALFIQMALGWNLYLSTGILLVVTAVYTIAGGLMAVIYTDALQTVIMVGGALVLMFLGFQDVGWYPGLEQRYRQAIPNVTVPNTTCHLPRPDAFHILRDPVSGDIPWPGLIFGLTVLATWCWCTDQVIVQRSLSAKSLSHAKGGSVLGGYLKILPMFFIVMPGMISRALFPDEVGCVDPDVCQRICGARVGCSNIAYPKLVMALMPVGLRGLMIAVIMAALMSSLTSIFNSSSTLFTIDVWQRFRRKSTEQELMVVGRVFVVFLVVISILWIPIIQSSNSGQLFDYIQAVTSYLAPPITALFLLAIFCKRVTEPGAFWGLVFGLGVGLLRMILEFSYPAPACGEVDRRPAVLKDFHYLYFAILLCGLTAIVIVIVSLCTTPIPEEQLTRLTWWTRNCPLSELEKEAHESTPEISERPAGECPAGGGAAENSSLGQEQPEAPSRSWGKLLWSWFCGLSGTPEQALSPAEKAALEQKLTSIEEEPLWRHVCNINAVLLLAINIFLWGYFA

SEQ ID NO: 81990 - protein, 173 aa, Homo sapiens
  Payload ID: 16317
  Gene Symbol: SLC5A9
  Gene Name: solute carrier family 5 (sodium/sugar cotransporter), member 9
  ENSP ID: ENSP00000399991
  MOD_RES (1)..(1): Any amino acid
XSKELAAMGPGASGDGVRTETAPHIALDSRVGLHAYDISVVVIYFVFVIAVGIWSSIRASRGTIGGYFLAGRSMSWWPIGASLMSSNVGSGLFIGLAGTGAAGGLAVGGFEWNATWLLLALGWVFVPVYIAAGVVTMPQYLKKRFGGQRIQVYMSVLSLILYIFTKISGSCWW

SEQ ID NO: 81991 - protein, 681 aa, Homo sapiens
  Payload ID: 16317
  Gene Symbol: SLC5A9
  Gene Name: solute carrier family 5 (sodium/sugar cotransporter), member 9
  Uniprot ID: Q2M3M2
  ENSP ID: ENSP00000401730
MSKELAAMGPGASGDGVRTETAPHIALDSRVGLHAYDISVVVIYFVFVIAVGIWSSIRASRGTIGGYFLAGRSMSWWPIGASLMSSNVGSGLFIGLAGTGAAGGLAVGGFEWNATWLLLALGWVFVPVYIAAGVVTMPQYLKKRFGGQRIQVYMSVLSLILYIFTKISTDIFSGALFIQMALGWNLYLSTGILLVVTAVYTIAGGLMAVIYTDALQTVIMVGGALVLMFLGFQDVGWYPGLEQRYRQAIPNVTVPNTTCHLPRPDAFHILRDPVSGDIPWPGLIFGLTVLATWCWCTDQVIVQRSLSAKSLSHAKGGSVLGGYLKILPMFFIVMPGMISRALFPDEVGCVDPDVCQRICGARVGCSNIAYPKLVMALMPVGLRGLMIAVIMAALMSSLTSIFNSSSTLFTIDVWQRFRRKSTEQELMVVGRVFVVFLVVISILWIPIIQSSNSGQLFDYIQAVTSYLAPPITALFLLAIFCKRVTEPGAFWGLVFGLGVGLLRMILEFSYPAPACGEVDRRPAVLKDFHYLYFAILLCGLTAIVIVIVSLCTTPIPEEQLTRLTWWTRNCPLSELEKEAHESTPEISERPAGECPAGGGAAENSSLGQEQPEAPSRSWGKLLWSWFCGLSGTPEQALSPAEKAALEQKLTSIEEEPLWRHVCNINAVLLLAINIFLWGYFA

SEQ ID NO: 81992 - protein, 283 aa, Homo sapiens
  Payload ID: 16317
  Gene Symbol: SLC5A9
  Gene Name: solute carrier family 5 (sodium/sugar cotransporter), member 9
  ENSP ID: ENSP00000404982
MSKELAAMGPGASGDGVRTETAPHIALDSRVGLHAYDISVVVIYFVFVIAVGIWSSIRASRGTIGGYFLAGRSMSWWPIGASLMSSNVGSGLFIGLAGTGAAGGLAVGGFEWNATWLLLALGWVFVPVYIAAGVVTMPQYLKKRFGGQRIQVYMSVLSLILYIFTKISTDIFSGALFIQMALGWNLYLSTGILLVVTAVYTIAGGLMAVIYTDALQTVIMVGGALVLMFLGHCAAVSLGQESVSCQGRLRAGGLPEDPPHVLHRHAWHDQPGPVPRRGGLRGP

SEQ ID NO: 81993 - protein, 76 aa, Homo sapiens
  Payload ID: 16317
  Gene Symbol: SLC5A9
  Gene Name: solute carrier family 5 (sodium/sugar cotransporter), member 9
  ENSP ID: ENSP00000431196
  MOD_RES (1)..(1): Any amino acid
XYPAPACGEVDRRPAVLKDFHYLYFAILLCGLTAIVIVIVSLCTTPIPEEQVPIIFGFTFTTSSRLDPFQFTPREL

SEQ ID NO: 81994 - protein, 702 aa, Homo sapiens
  Payload ID: 16317
  Gene Symbol: SLC5A9
  Gene Name: solute carrier family 5 (sodium/sugar cotransporter), member 9
  Uniprot ID: Q2M3M2
  ENSP ID: ENSP00000431900
MSKELAAMGPGASGDGVRTETAPHIALDSRVGLHAYDISVVVIYFVFVIAVGIWSSIRASRGTIGGYFLAGRSMSWWPIGASLMSSNVGSGLFIGLAGTGAAGGLAVGGFEWNMRKSRSGGDRGIHPRSHGRTGATWLLLALGWVFVPVYIAAGVVTMPQYLKKRFGGQRIQVYMSVLSLILYIFTKISTDIFSGALFIQMALGWNLYLSTGILLVVTAVYTIAGGLMAVIYTDALQTVIMVGGALVLMFLGFQDVGWYPGLEQRYRQAIPNVTVPNTTCHLPRPDAFHILRDPVSGDIPWPGLIFGLTVLATWCWCTDQVIVQRSLSAKSLSHAKGGSVLGGYLKILPMFFIVMPGMISRALFPDEVGCVDPDVCQRICGARVGCSNIAYPKLVMALMPVGLRGLMIAVIMAALMSSLTSIFNSSSTLFTIDVWQRFRRKSTEQELMVVGRVFVVFLVVISILWIPIIQSSNSGQLFDYIQAVTSYLAPPITALFLLAIFCKRVTEPGAFWGLVFGLGVGLLRMILEFSYPAPACGEVDRRPAVLKDFHYLYFAILLCGLTAIVIVIVSLCTTPIPEEQLTRLTWWTRNCPLSELEKEAHESTPEISERPAGECPAGGGAAENSSLGQEQPEAPSRSWGKLLWSWFCGLSGTPEQALSPAEKAALEQKLTSIEEEPLWRHVCNINAVLLLAINIFLWGYFA

SEQ ID NO: 81995 - protein, 167 aa, Homo sapiens
  Payload ID: 16318
  Gene Symbol: SLC50A1
  Gene Name: solute carrier family 50 (sugar efflux transporter), member 1
  Uniprot ID: Q9BRV3
  ENSP ID: ENSP00000306146
MEAGGFLDSLIYGACVVFTLGMFSAGLSDLRHMRMTRSVDNVQFLPFLTTEVNNLGWLSYGALKGDGILIVVNTVGAALQTLYILAYLHYCPRKAKVIQTKSTQCLSYPLTIATLLTSASWCLYGFRLRDPYIMVSNFPGIVTSFIRFWLFWKYPQEQDRNYWLLQT

SEQ ID NO: 81996 - protein, 166 aa, Homo sapiens
  Payload ID: 16318
  Gene Symbol: SLC50A1
  Gene Name: solute carrier family 50 (sugar efflux transporter), member 1
  Uniprot ID: Q9BRV3
  ENSP ID: ENSP00000357386
MRGLHPWHVLRRPLGPQAHANDPECGQRPVPALSHHGSQRVVLLQTATLLGVLLLGYGYFWLLVPNPEARLQQLGLFCSVFTISMYLSPLADLAKVIQTKSTQCLSYPLTIATLLTSASWCLYGFRLRDPYIMVSNFPGIVTSFIRFWLFWKYPQEQDRNYWLLQT

SEQ ID NO: 81997 - protein, 221 aa, Homo sapiens
  Payload ID: 16318
  Gene Symbol: SLC50A1
  Gene Name: solute carrier family 50 (sugar efflux transporter), member 1
  Uniprot ID: Q9BRV3
  ENSP ID: ENSP00000357389
MEAGGFLDSLIYGACVVFTLGMFSAGLSDLRHMRMTRSVDNVQFLPFLTTEVNNLGWLSYGALKGDGILIVVNTVGAALQTLYILAYLHYCPRKRVVLLQTATLLGVLLLGYGYFWLLVPNPEARLQQLGLFCSVFTISMYLSPLADLAKVIQTKSTQCLSYPLTIATLLTSASWCLYGFRLRDPYIMVSNFPGIVTSFIRFWLFWKYPQEQDRNYWLLQT

SEQ ID NO: 81998 - protein, 156 aa, Homo sapiens
  Payload ID: 16318
  Gene Symbol: SLC50A1
  Gene Name: solute carrier family 50 (sugar efflux transporter), member 1
  ENSP ID: ENSP00000420189
MEELGPQAHANDPECGQRPVPALSHHGSQRVVLLQTATLLGVLLLGYGYFWLLVPNPEARLQQLGLFCSVFTISMYLSPLADLAKVIQTKSTQCLSYPLTIATLLTSASWCLYGFRLRDPYIMVSNFPGIVTSFIRFWLFWKYPQEQDRNYWLLQT

SEQ ID NO: 81999 - protein, 175 aa, Homo sapiens
  Payload ID: 16318
  Gene Symbol: SLC50A1
  Gene Name: solute carrier family 50 (sugar efflux transporter), member 1
  ENSP ID: ENSP00000481368
MRGLHPCNLGWLSYGALKGDGILIVVNTVGAALQTLYILAYLHYCPRKRVVLLQTATLLGVLLLGYGYFWLLVPNPEARLQQLGLFCSVFTISMYLSPLADLAKVIQTKSTQCLSYPLTIATLLTSASWCLYGFRLRDPYIMVSNFPGIVTSFIRFWLFWKYPQEQDRNYWLLQT

SEQ ID NO: 82000 - protein, 340 aa, Homo sapiens
  Payload ID: 16319
  Gene Symbol: SLC51A
  Gene Name: solute carrier family 51, alpha subunit
  Uniprot ID: Q86UW1
  ENSP ID: ENSP00000296327
MEPGRTQIKLDPRYTADLLEVLKTNYGIPSACFSQPPTAAQLLRALGPVELALTSILTLLALGSIAIFLEDAVYLYKNTLCPIKRRTLLWKSSAPTVVSVLCCFGLWIPRSLVLVEMTITSFYAVCFYLLMLVMVEGFGGKEAVLRTLRDTPMMVHTGPCCCCCPCCPRLLLTRKKLQLLMLGPFQYAFLKITLTLVGLFLVPDGIYDPADISEGSTALWINTFLGVSTLLALWTLGIISRQARLHLGEQNMGAKFALFQVLLILTALQPSIFSVLANGGQIACSPPYSSKTRSQVMNCHLLILETFLMTVLTRMYYRRKDHKVGYETFSSPDLDLNLKA

SEQ ID NO: 82001 - protein, 58 aa, Homo sapiens
  Payload ID: 16319
  Gene Symbol: SLC51A
  Gene Name: solute carrier family 51, alpha subunit
  ENSP ID: ENSP00000391172
MEPGRTQIKLDPRYTADLLEVLKTNYGIPSACFSQPPTAAQLLRDRVWLCGPGWSAVV

SEQ ID NO: 82002 - protein, 66 aa, Homo sapiens
  Payload ID: 16319
  Gene Symbol: SLC51A
  Gene Name: solute carrier family 51, alpha subunit
  ENSP ID: ENSP00000405414
MLLILMLSLSFNEQASHPAPGPHLPAPPALPHPGACGIAGENAAMEPGRTQIKLDPRYTADLLEVL

SEQ ID NO: 82003 - protein, 23 aa, Homo sapiens
  Payload ID: 16319
  Gene Symbol: SLC51A
  Gene Name: solute carrier family 51, alpha subunit
  ENSP ID: ENSP00000409560
QARLHLGEQNMGAKFALFQQQHG

SEQ ID NO: 82004 - protein, 212 aa, Homo sapiens
  Payload ID: 16319
  Gene Symbol: SLC51A
  Gene Name: solute carrier family 51, alpha subunit
  ENSP ID: ENSP00000413951
  MOD_RES (1)..(1): Any amino acid
XACFSQPPTAAQLLRALGPVELALTSILTLLALGSIAIFLEDAVYLYKNTLCPIKRRTLLWKSSAPTLATFKERCLECVGFASCVLAAKGFRSLRVSLPPSPAPAPSEQVVSVLCCFGLWIPRSLVLVEMTITSFYAVCFYLLMLVMVEGFGGKEAVLRTLRDTPMMVHTGPCCCCCPCCPRLLLTRKKLQLLMLGPFQYAFLKITLTLVGL

SEQ ID NO: 82005 - protein, 128 aa, Homo sapiens
  Payload ID: 16320
  Gene Symbol: SLC51B
  Gene Name: solute carrier family 51, beta subunit
  Uniprot ID: Q86UW2
  ENSP ID: ENSP00000335292
MEHSEGAPGDPAGTVVPQELLEEMLWFFRVEDASPWNHSILALAAVVVIISMVLLGRSIQASRKEKMQPPEKETPEVLHLDEAKDHNSLNNLRETLLSEKPNLAQVELELKERDVLSVFLPDVPETES

SEQ ID NO: 82006 - protein, 448 aa, Homo sapiens
  Payload ID: 16321
  Gene Symbol: SLC52A1
  Gene Name: solute carrier family 52 (riboflavin transporter), member 1
  Uniprot ID: Q9NWF4
  ENSP ID: ENSP00000254853
MAAPTLGRLVLTHLLVALFGMGSWAAVNGIWVELPVVVKDLPEGWSLPSYLSVVVALGNLGLLVVTLWRQLAPGKGEQVPIQVVQVLSVVGTALLAPLWHHVAPVAGQLHSVAFLTLALVLAMACCTSNVTFLPFLSHLPPPFLRSFFLGQGLSALLPCVLALVQGVGRLECPPAPTNGTSGPPLDFPERFPASTFFWALTALLVTSAAAFRGLLLLLPSLPSVTTGGSGPELQLGSPGAEEEEKEEEEALPLQEPPSQAAGTIPGPDPEAHQLFSAHGAFLLGLMAFTSAVTNGVLPSVQSFSCLPYGRLAYHLAVVLGSAANPLACFLAMGVLCRSLAGLVGLSLLGMLFGAYLMALAILSPCPPLVGTTAGVVLVVLSWVLCLCVFSYVKVAASSLLHGGGRPALLAAGVAIQVGSLLGAGAMFPPTSIYHVFQSRKDCVDPCGP

SEQ ID NO: 82007 - protein, 448 aa, Homo sapiens; identical to SEQ ID NO: 82006
  Payload ID: 16321
  Gene Symbol: SLC52A1
  Gene Name: solute carrier family 52 (riboflavin transporter), member 1
  Uniprot ID: Q9NWF4
  ENSP ID: ENSP00000399979

SEQ ID NO: 82008 - protein, 350 aa, Homo sapiens
  Payload ID: 16321
  Gene Symbol: SLC52A1
  Gene Name: solute carrier family 52 (riboflavin transporter), member 1
  ENSP ID: ENSP00000443026
MAAPTLGRLVLTHLLVALFGMGSWAAVNGIWVELPVVVKDLPEGWSLPSYLSVVVALGNLGLLVVTLWRQLAPGKGEQVPIQVVQVLSVVGTALLAPLWHHVAPVAGQLHSVAFLTLALVLAMACCTSNVTFLPFLSHLPPPFLRSFFLGQGLSALLPCVLALVQGVGRLECPPAPTNGTSGPPLDFPERFPASTFFWALTALLVTSAAAFRGLLLLLPSLPSVTTGGSGPELQLGSPGAEEEEKEEEEALPLQEPPSQAAGTIPGPDPEAHQLFSAHGAFLLGLMAFTSAVTNGVLPSVQSFSCLPYGRLAYHLAVVLGSAANPLACFLAMGVLCRCCRGCCVCVCSHM

SEQ ID NO: 82009 - protein, 445 aa, Homo sapiens
  Payload ID: 16322
  Gene Symbol: SLC52A2
  Gene Name: solute carrier family 52 (riboflavin transporter), member 2
  Uniprot ID: Q9HAB3
  ENSP ID: ENSP00000333638
MAAPTPARPVLTHLLVALFGMGSWAAVNGIWVELPVVVKELPEGWSLPSYVSVLVALGNLGLLVVTLWRRLAPGKDEQVPIRVVQVLGMVGTALLASLWHHVAPVAGQLHSVAFLALAFVLALACCASNVTFLPFLSHLPPRFLRSFFLGQGLSALLPCVLALVQGVGRLECPPAPINGTPGPPLDFLERFPASTFFWALTALLVASAAAFQGLLLLLPPPPSVPTGELGSGLQVGAPGAEEEVEESSPLQEPPSQAAGTTPGPDPKAYQLLSARSACLLGLLAATNALTNGVLPAVQSFSCLPYGRLAYHLAVVLGSAANPLACFLAMGVLCRSLAGLGGLSLLGVFCGGYLMALAVLSPCPPLVGTSAGVVLVVLSWVLCLGVFSYVKVAASSLLHGGGRPALLAAGVAIQVGSLLGAVAMFPPTSIYHVFHSRKDCADPCDS

SEQ ID NO: 82010 - protein, 445 aa, Homo sapiens; identical to SEQ ID NO: 82009
  Payload ID: 16322
  Gene Symbol: SLC52A2
  Gene Name: solute carrier family 52 (riboflavin transporter), member 2
  Uniprot ID: Q9HAB3
  ENSP ID: ENSP00000385961

SEQ ID NO: 82011 - protein, 172 aa, Homo sapiens
  Payload ID: 16322
  Gene Symbol: SLC52A2
  Gene Name: solute carrier family 52 (riboflavin transporter), member 2
  ENSP ID: ENSP00000431965
MAAPTPARPVLTHLLVALFGMGSWAAVNGIWVELPVVVKELPEGWSLPSYVSVLVALGNLGLLVVTLWRRLAPGKDEQVPIRVVQVLGMVGTALLASLWHHVAPVAGQLHSVAFLALAFVLALACCASNVTFLPFLSHLPPRFLRSFFLGQGLSALLPCVLALVQGVGRLEC

SEQ ID NO: 82012 - protein, 170 aa, Homo sapiens
  Payload ID: 16322
  Gene Symbol: SLC52A2
  Gene Name: solute carrier family 52 (riboflavin transporter), member 2
  ENSP ID: ENSP00000433583
MAAPTPARPVLTHLLVALFGMGSWAAVNGIWVELPVVVKELPEAAAFQGLLLLLPPPPSVPTGELGSGLQVGAPGAEEEVEESSPLQEPPSQAAGTTPGPDPKAYQLLSARSACLLGLLAATNALTNGVLPAVQSFSCLPYGRLAYHLAVVLGSAANPLACFLAMGVLCR

SEQ ID NO: 82013 - protein, 111 aa, Homo sapiens
  Payload ID: 16322
  Gene Symbol: SLC52A2
  Gene Name: solute carrier family 52 (riboflavin transporter), member 2
  ENSP ID: ENSP00000433796
MAAPTPARPVLTHLLVALFGMGSWAAVNGIWVELPVVVKELPEGAVVGAVSWRVLLREGGSQLPAAWRGPAGIAGSRRGHPGGLSARRCCYVPPDQHLSRVPQQKGLCRPL

SEQ ID NO: 82014 - protein, 69 aa, Homo sapiens
  Payload ID: 16322
  Gene Symbol: SLC52A2
  Gene Name: solute carrier family 52 (riboflavin transporter), member 2
  ENSP ID: ENSP00000434239
MAAPTPARPVLTHLLVALFGMGSWAAVNGIWVELPVVVKELPEGWSLPSYVSVLVALGNLGLLVVTLWR

SEQ ID NO: 82015 - protein, 445 aa, Homo sapiens; identical to SEQ ID NO: 82009
  Payload ID: 16322
  Gene Symbol: SLC52A2
  Gene Name: solute carrier family 52 (riboflavin transporter), member 2
  Uniprot ID: Q9HAB3
  ENSP ID: ENSP00000434728

SEQ ID NO: 82016 - protein, 445 aa, Homo sapiens; identical to SEQ ID NO: 82009
  Payload ID: 16322
  Gene Symbol: SLC52A2
  Gene Name: solute carrier family 52 (riboflavin transporter), member 2
  Uniprot ID: Q9HAB3
  ENSP ID: ENSP00000435820

SEQ ID NO: 82017 - protein, 445 aa, Homo sapiens; identical to SEQ ID NO: 82009
  Payload ID: 16322
  Gene Symbol: SLC52A2
  Gene Name: solute carrier family 52 (riboflavin transporter), member 2
  Uniprot ID: Q9HAB3
  ENSP ID: ENSP00000436768

SEQ ID NO: 82018 - protein, 87 aa, Homo sapiens
  Payload ID: 16322
  Gene Symbol: SLC52A2
  Gene Name: solute carrier family 52 (riboflavin transporter), member 2
  ENSP ID: ENSP00000436917
MAAPTPARPVLTHLLVALFGMGSWAAVNGIWVELPVVVKELPEGWSLPSYVSVLVALGNLGLLVVTLWRRLAPGKDEQVPIRVVQGS

SEQ ID NO: 82019 - protein, 469 aa, Homo sapiens
  Payload ID: 16323
  Gene Symbol: SLC52A3
  Gene Name: solute carrier family 52 (riboflavin transporter), member 3
  Uniprot ID: Q9NQ40
  ENSP ID: ENSP00000217254
MAFLMHLLVCVFGMGSWVTINGLWVELPLLVMELPEGWYLPSYLTVVIQLANIGPLLVTLLHHFRPSCLSEVPIIFTLLGVGTVTCIIFAFLWNMTSWVLDGHHSIAFLVLTFFLALVDCTSSVTFLPFMSRLPTYYLTTFFVGEGLSGLLPALVALAQGSGLTTCVNVTEISDSVPSPVPTRETDIAQGVPRALVSALPGMEAPLSHLESRYLPAHFSPLVFFLLLSIMMACCLVAFFVLQRQPRCWEASVEDLLNDQVTLHSIRPREENDLGPAGTVDSSQGQGYLEEKAAPCCPAHLAFIYTLVAFVNALTNGMLPSVQTYSCLSYGPVAYHLAATLSIVANPLASLVSMFLPNRSLLFLGVLSVLGTCFGGYNMAMAVMSPCPLLQGHWGGEVLIVASWVLFSGCLSYVKVMLGVVLRDLSRSALLWCGAAVQLGSLLGALLMFPLVNVLRLFSSADFCNLHCPA

SEQ ID NO: 82020 - protein, 415 aa, Homo sapiens
  Payload ID: 16323
  Gene Symbol: SLC52A3
  Gene Name: solute carrier family 52 (riboflavin transporter), member 3
  Uniprot ID: Q9NQ40
  ENSP ID: ENSP00000371370
MAFLMHLLVCVFGMGSWVTINGLWVELPLLVMELPEGWYLPSYLTVVIQLANIGPLLVTLLHHFRPSCLSEVPIIFTLLGVGTVTCIIFAFLWNMTSWVLDGHHSIAFLVLTFFLALVDCTSSVTFLPFMSRLPTYYLTTFFVGEGLSGLLPALVALAQGSGLTTCVNVTEISDSVPSPVPTRETDIAQGVPRALVSALPGMEAPLSHLESRYLPAHFSPLVFFLLLSIMMACCLVAFFVLQRQPRCWEASVEDLLNDQVTLHSIRPREENDLGPAGTVDSSQGQGYLEEKAAPCCPAHLAFIYTLVAFVNALTNGMLPSVQTYSCLSYGPVAYHLAATLSIVANPLASLVSMFLPNRSLLFLGVLSVLGTCFGGYNMAMAVMSPCPLLQGHWGGEVLIVSIRPVGLLPLRTPHP

SEQ ID NO: 82021 - protein, 469 aa, Homo sapiens; identical to SEQ ID NO: 82019
  Payload ID: 16323
  Gene Symbol: SLC52A3
  Gene Name: solute carrier family 52 (riboflavin transporter), member 3
  Uniprot ID: Q9NQ40
  ENSP ID: ENSP00000488723

SEQ ID NO: 82022 - protein, 642 aa, Homo sapiens
  Payload ID: 16324
  Gene Symbol: SLC6A14
  Gene Name: solute carrier family 6 (amino acid transporter), member 14
  Uniprot ID: Q9UN76
  ENSP ID: ENSP00000470801
MDKLKCPSFFKCREKEKVSASSENFHVGENDENQDRGNWSKKSDYLLSMIGYAVGLGNVWRFPYLTYSNGGGAFLIPYAIMLALAGLPLFFLECSLGQFASLGPVSVWRILPLFQGVGITMVLISIFVTIYYNVIIAYSLYYMFASFQSELPWKNCSSWSDKNCSRSPIVTHCNVSTVNKGIQEIIQMNKSWVDINNFTCINGSEIYQPGQLPSEQYWNKVALQRSSGMNETGVIVWYLALCLLLAWLIVGAALFKGIKSSGKVVYFTALFPYVVLLILLVRGATLEGASKGISYYIGAQSNFTKLKEAEVWKDAATQIFYSLSVAWGGLVALSSYNKFKNNCFSDAIVVCLTNCLTSVFAGFAIFSILGHMAHISGKEVSQVVKSGFDLAFIAYPEALAQLPGGPFWSILFFFMLLTLGLDSQFASIETITTTIQDLFPKVMKKMRVPITLGCCLVLFLLGLVCVTQAGIYWVHLIDHFCAGWGILIAAILELVGIIWIYGGNRFIEDTEMMIGAKRWIFWLWWRACWFVITPILLIAIFIWSLVQFHRPNYGAIPYPDWGVALGWCMIVFCIIWIPIMAIIKIIQAKGNIFQRLISCCRPASNWGPYLEQHRGERYKDMVDPKKEADHEIPTVSGSRKPE

SEQ ID NO: 82023 - protein, 599 aa, Homo sapiens [sequence omitted]

SEQ ID NO: 82024 - protein, 38 aa, Homo sapiens
  Payload ID: 16325
  Gene Symbol: SLC6A1
  Gene Name: solute carrier family 6 (neurotransmitter transporter), member 1
  ENSP ID: ENSP00000411689
MATNGSKVADGQISTEVSEAPVANDKPKTLVVKVQKKA

SEQ ID NO: 82025 - protein, 632 aa, Homo sapiens
  Payload ID: 16326
  Gene Symbol: SLC6A11
  Gene Name: solute carrier family 6 (neurotransmitter transporter), member 11
  Uniprot ID: P48066
  ENSP ID: ENSP00000254488
MTAEKALPLGNGKAAEEARESEAPGGGCSSGGAAPARHPRVKRDKAVHERGHWNNKVEFVLSVAGEIIGLGNVWRFPYLCYKNGGGAFLIPYVVFFICCGIPVFFLETALGQFTSEGGITCWRKVCPLFEGIGYATQVIEAHLNVYYIIILAWAIFYLSNCFTTELPWATCGHEWNTENCVEFQKLNVSNYSHVSLQNATSPVMEFWEHRVLAISDGIEHIGNLRWELALCLLAAWTICYFCIWKGTKSTGKVVYVTATFPYIMLLILLIRGVTLPGASEGIKFYLYPDLSRLSDPQVWVDAGTQIFFSYAICLGCLTALGSYNNYNNNCYRDCIMLCCLNSGTSFVAGFAIFSVLGFMAYEQGVPIAEVAESGPGLAFIAYPKAVTMMPLSPLWATLFFMMLIFLGLDSQFVCVESLVTAVVDMYPKVFRRGYRRELLILALSVISYFLGLVMLTEGGMYIFQLFDSYAASGMCLLFVAIFECICIGWVYGSNRFYDNIEDMIGYRPPSLIKWCWMIMTPGICAGIFIFFLIKYKPLKYNNIYTYPAWGYGIGWLMALSSMLCIPLWICITVWKTEGTLPEKLQKLTTPSTDLKMRGKLGVSPRMVTVNDCDAKLKSDGTIAAITEKETHF

SEQ ID NO: 82026 - protein, 208 aa, Homo sapiens
  Payload ID: 16326
  Gene Symbol: SLC6A11
  Gene Name: solute carrier family 6 (neurotransmitter transporter), member 11
  Uniprot ID: P48066
  ENSP ID: ENSP00000404120
MTAEKALPLGNGKAAEEARESEAPGGGCSSGGAAPARHPRVKRDKAVHERGHWNNKVEFVLSVAGEIIGLGNVWRFPYLCYKNGGGAFLIPYVVFFICCGIPVFFLETALGQFTSEGGITCWRKVCPLFEGIGYATQVIEAHLNVYYIIILAWAIFYLSNCFTTELPWATCGHEWNTENCVEFQKLNVSNYSHVSLQNATSPVMEFWE

SEQ ID NO: 82027 - protein, 614 aa, Homo sapiens
  Payload ID: 16327
  Gene Symbol: SLC6A12
  Gene Name: solute carrier family 6 (neurotransmitter transporter), member 12
  Uniprot ID: P48065
  ENSP ID: ENSP00000352702
MDGKVAVQECGPPAVSWVPEEGEKLDQEDEDQVKDRGQWTNKMEFVLSVAGEIIGLGNVWRFPYLCYKNGGGAFFIPYFIFFFVCGIPVFFLEVALGQYTSQGSVTAWRKICPLFQGIGLASVVIESYLNVYYIIILAWALFYLFSSFTSELPWTTCNNFWNTEHCTDFLNHSGAGTVTPFENFTSPVMEFWERRVLGITSGIHDLGSLRWELALCLLLAWVICYFCIWKGVKSTGKVVYFTATFPYLMLVILLIRGVTLPGAYQGIIYYLKPDLFRLKDPQVWMDAGTQIFFSFAICQGCLTALGSYNKYHNNCYKDCIALCFLNSATSFVAGFVVFSILGFMSQEQGVPISEVAESGPGLAFIAFPKAVTMMPLSQLWSCLFFIMLIFLGLDSQFVCVECLVTASIDMFPRQLRKSGRRELLILTIAVMCYLIGLFLVTEGGMYIFQLFDYYASSGICLLFLSLFEVVCISWVYGADRFYDNIEDMIGYRPWPLVKISWLFLTPGLCLATFLFSLSKYTPLKYNNVYVYPPWGYSIGWFLALSSMVCVPLFVVITLLKTRGPFRKRLRQLITPDSSLPQPKQHPCLDGSAGRNFGPSPTREGLIAGEKETHL

SEQ ID NO: 82028 - protein, 614 aa, Homo sapiens; identical to SEQ ID NO: 82027
  Payload ID: 16327
  Gene Symbol: SLC6A12
  Gene Name: solute carrier family 6 (neurotransmitter transporter), member 12
  Uniprot ID: P48065
  ENSP ID: ENSP00000380464

SEQ ID NO: 82029 - protein, 614 aa, Homo sapiens; identical to SEQ ID NO: 82027
  Payload ID: 16327
  Gene Symbol: SLC6A12
  Gene Name: solute carrier family 6 (neurotransmitter transporter), member 12
  Uniprot ID: P48065
  ENSP ID: ENSP00000399136

SEQ ID NO: 82030 - protein, 146 aa, Homo sapiens
  Payload ID: 16327
  Gene Symbol: SLC6A12
  Gene Name: solute carrier family 6 (neurotransmitter transporter), member 12
  ENSP ID: ENSP00000439351
MDGKVAVQECGPPAVSWVPEEGEKLDQEDEDQVKDRGQWTNKMEFVLSVAGEIIGLGNVWRFPYLCYKNGGGAFFIPYFIFFFVCGIPVFFLEVALGQYTSQGSVTAWRKICPLFQGIGLASVVIESYLNVYYIIILAWALFYLFS

SEQ ID NO: 82031 - protein, 614 aa, Homo sapiens; identical to SEQ ID NO: 82027
  Payload ID: 16327
  Gene Symbol: SLC6A12
  Gene Name: solute carrier family 6 (neurotransmitter transporter), member 12
  Uniprot ID: P48065
  ENSP ID: ENSP00000444268

SEQ ID NO: 82032 - protein, 81 aa, Homo sapiens
  Payload ID: 16327
  Gene Symbol: SLC6A12
  Gene Name: solute carrier family 6 (neurotransmitter transporter), member 12
  ENSP ID: ENSP00000446082
MDGKVAVQECGPPAVSWVPEEGEKLDQEDEDQEPSSSPTSSSSLSAASRCSSWRWRWANTPAKGVSQPGGRSAPSSRALVW

SEQ ID NO: 82033 - protein, 602 aa, Homo sapiens
  Payload ID: 16328
  Gene Symbol: SLC6A13
  Gene Name: solute carrier family 6 (neurotransmitter transporter), member 13
  Uniprot ID: Q9NSD5
  ENSP ID: ENSP00000339260
MDSRVSGTTSNGETKPVYPVMEKKEEDGTLERGHWNNKMEFVLSVAGEIIGLGNVWRFPYLCYKNGGGAFFIPYLVFLFTCGIPVFLLETALGQYTSQGGVTAWRKICPIFEGIGYASQMIVILLNVYYIIVLAWALFYLFSSFTIDLPWGGCYHEWNTEHCMEFQKTNGSLNGTSENATSPVIEFWERRVLKISDGIQHLGALRWELALCLLLAWVICYFCIWKGVKSTGKVVYFTATFPYLMLVVLLIRGVTLPGAAQGIQFYLYPNLTRLWDPQVWMDAGTQIFFSFAICLGCLTALGSYNKYHNNCYRDCIALCFLNSGTSFVAGFAIFSILGFMSQEQGVPISEVAESGPGLAFIAYPRAVVMLPFSPLWACCFFFMVVLLGLDSQFVCVESLVTALVDMYPHVFRKKNRREVLILGVSVVSFLVGLIMLTEGGMYVFQLFDYYAASGMCLLFVAIFESLCVAWVYGAKRFYDNIEDMIGYRPWPLIKYCWLFLTPAVCTATFLFSLIKYTPLTYNKKYTYPWWGDALGWLLALSSMVCIPAWSLYRLGTLKGPFRERIRQLMCPAEDLPQRNPAGPSAPATPRTSLLRLTELESHC

SEQ ID NO: 82034 - protein, 97 aa, Homo sapiens
  Payload ID: 16328
  Gene Symbol: SLC6A13
  Gene Name: solute carrier family 6 (neurotransmitter transporter), member 13
  Uniprot ID: Q9NSD5
  ENSP ID: ENSP00000389316
MDSRVSGTTSNGETKPVYPVMEKKEEDGTLERGHWNNKMEFVLSVAGEIIGLGNVWRFPYLCYKNGGGEMRALVPPHPLLEGGYFHLLHLRPLWGVP

SEQ ID NO: 82035 - protein, 510 aa, Homo sapiens
  Payload ID: 16328
  Gene Symbol: SLC6A13
  Gene Name: solute carrier family 6 (neurotransmitter transporter), member 13
  Uniprot ID: Q9NSD5
  ENSP ID: ENSP00000407104
MDSRVSGTTSNGETKPVYPVMEKKEEDGTLERGHWNNKMEFVLSVAGEIIGLGNVWRFPYLCYKNGGEHCMEFQKTNGSLNGTSENATSPVIEFWERRVLKISDGIQHLGALRWELALCLLLAWVICYFCIWKGVKSTGKVVYFTATFPYLMLVVLLIRGVTLPGAAQGIQFYLYPNLTRLWDPQVWMDAGTQIFFSFAICLGCLTALGSYNKYHNNCYRDCIALCFLNSGTSFVAGFAIFSILGFMSQEQGVPISEVAESGPGLAFIAYPRAVVMLPFSPLWACCFFFMVVLLGLDSQFVCVESLVTALVDMYPHVFRKKNRREVLILGVSVVSFLVGLIMLTEGGMYVFQLFDYYAASGMCLLFVAIFESLCVAWVYGAKRFYDNIEDMIGYRPWPLIKYCWLFLTPAVCTATFLFSLIKYTPLTYNKKYTYPWWGDALGWLLALSSMVCIPAWSLYRLGTLKGPFRERIRQLMCPAEDLPQRNPAGPSAPATPRTSLLRLTELESHC

SEQ ID NO: 82036 - protein, 123 aa, Homo sapiens
  Payload ID: 16328
  Gene Symbol: SLC6A13
  Gene Name: solute carrier family 6 (neurotransmitter transporter), member 13
  ENSP ID: ENSP00000437386
MDSRVSGTTSNGETKPVYPVMEKKEEDGTLERGHWNNKMEFVLSVAGEIIGLGNVWRFPYLCYKNGGGAFFIPYLVFLFTCGIPVFLLETALGQYTSQGGVTAWRKICPIFEVSPQALAMPPR

SEQ ID NO: 82037 - protein, 69 aa, Homo sapiens
  Payload ID: 16328
  Gene Symbol: SLC6A13
  Gene Name: solute carrier family 6 (neurotransmitter transporter), member 13
  ENSP ID: ENSP00000443466
MIVILLNVYYIIVLAWALFYLFSSFTIDLPWGGCYHEWNTGGDFAQDAYIEMLACLEAADLKSTFPVAI

SEQ ID NO: 82038 - protein, 150 aa, Homo sapiens
  Payload ID: 16328
  Gene Symbol: SLC6A13
  Gene Name: solute carrier family 6 (neurotransmitter transporter), member 13
  ENSP ID: ENSP00000444606
MDSRVSGTTSNGETKPVYPVMEKKEEDGTLERGHWNNKMEFVLSVAGEIIGLGNVWRFPYLCYKNGGEHCMEFQKTNGSLNGTSENATSPVIEFWERRVLKISDGIQHLGALRWELALCLLLAWVICYFCIWKGVKSTGKVVYFTATFPY

SEQ ID NO: 82039 - protein, 628 aa, Homo sapiens
  Payload ID: 16329
  Gene Symbol: SLC6A2
  Gene Name: solute carrier family 6 (neurotransmitter transporter), member 2
  Uniprot ID: P23975
  ENSP ID: ENSP00000219833
MLLARMNPQVQPENNGADTGPEQPLRARKTAELLVVKERNGVQCLLAPRDGDAQPRETWGKKIDFLLSVVGFAVDLANVWRFPYLCYKNGGGAFLIPYTLFLIIAGMPLFYMELALGQYNREGAATVWKICPFFKGVGYAVILIALYVGFYYNVIIAWSLYYLFSSFTLNLPWTDCGHTWNSPNCTDPKLLNGSVLGNHTKYSKYKFTPAAEFYERGVLHLHESSGIHDIGLPQWQLLLCLMVVVIVLYFSLWKGVKTSGKVVWITATLPYFVLFVLLVHGVTLPGASNGINAYLHIDFYRLKEATVWIDAATQIFFSLGAGFGVLIAFASYNKFDNNCYRDALLTSSINCITSFVSGFAIFSILGYMAHEHKVNIEDVATEGAGLVFILYPEAISTLSGSTFWAVVFFVMLLALGLDSSMGGMEAVITGLADDFQVLKRHRKLFTFGVTFSTFLLALFCITKGGIYVLTLLDTFAAGTSILFAVLMEAIGVSWFYGVDRFSNDIQQMMGFRPGLYWRLCWKFVSPAFLLFVVVVSIINFKPLTYDDYIFPPWANWVGWGIALSSMVLVPIYVIYKFLSTQGSLWERLAYGITPENEHHLVAQRDIRQFQMKTRQGRRRATNSCQISC

SEQ ID NO: 82040 - protein, 617 aa, Homo sapiens [sequence omitted]

SEQ ID NO: 82041 - protein, 561 aa, Homo sapiens
  Payload ID: 16329
  Gene Symbol: SLC6A2
  Gene Name: solute carrier family 6 (neurotransmitter transporter), member 2
  ENSP ID: ENSP00000394956
MLLARMNPQVQPENNGADTGPEQPLRARKTAELLVVKERNGVQCLLAPRDGDAQPRETWGKKIDFLLSVVGFAVDLANVWRFPYLCYKNGGGAFLIPYTLFLIIAGMPLFYMELALGQYNREGAATVWKICPFFKGVGYAVILIALYVGFYYNVIIAWSLYYLFSSFTLNLPWTDCGHTWNSPNCTDPKLLNGSVLGNHTKYSKYKFTPAAEFYERGVLHLHESSGIHDIGLPQWQLLLCLMVVVIVLYFSLWKGVKTSGKVVWITATLPYFVLFVLLVHGVTLPGASNGINAYLHIDFYRLKEATVWIDAATQIFFSLGAGFGVLIAFASYNKFDNNCYRDALLTSSINCITSFVSGFAIFSILGYMAHEHKVNIEDVATEGAGLVFILYPEAISTLSGSTFWAVVFFVMLLALGLDSSMGGMEAVITGLADDFQVLKRHRKLFTFGVTFSTFLLALFCITKGGIYVLTLLDTFAAGTSILFAVLMEAIGVSWFYGVDRFSNDIQQMMGFRPGLYWRLCWKFVSPAFLLRLAYGITPENEHHLVAQRDIRQFQLQHWLAI

SEQ ID NO: 82042 - protein, 604 aa, Homo sapiens
  Payload ID: 16329
  Gene Symbol: SLC6A2
  Gene Name: solute carrier family 6 (neurotransmitter transporter), member 2
  ENSP ID: ENSP00000454439
MLLARMNPQVQPENNGADTGPEQPLRARKTAELLVVKERNGVQCLLAPRDGDAQPRETWGKKIDFLLSVVGFAVDLANVWRFPYLCYKNGGGAFLIPYTLFLIIAGMPLFYMELALGQYNREGAATVWKICPFFKGVGYAVILIALYVGFYYNVIIAWSLYYLFSSFTLNLPWTDCGHTWNSPNCTDPKLLNGSVLGNHTKYSKYKFTPAAEFYERGVLHLHESSGIHDIGLPQWQLLLCLMVVVIVLYFSLWKGVKTSGKVVWITATLPYFVLFVLLVHGVTLPGASNGINAYLHIDFYRLKEATVWIDAATQIFFSLGAGFGVLIAFASYNKFDNNCYRDALLTSSINCITSFVSGFAIFSILGYMAHEHKVNIEDVATEGAGLVFILYPEAISTLSGSTFWAVVFFVMLLALGLDSSMGGMEAVITGLADDFQVLKRHRKLFTFGVTFSTFLLALFCITKGGIYVLTLLDTFAAGTSILFAVLMEAIGVSWFYGVDRFSNDIQQMMGFRPGLYWRLCWKFVSPAFLLFVVVVSIINFKPLTYDDYIFPPWANWVGWGIALSSMVLVPIYVIYKFLSTQGSLWEMKTRQGRRRATNSCQISC

SEQ ID NO: 82043 - protein, 200 aa, Homo sapiens
  Payload ID: 16329
  Gene Symbol: SLC6A2
  Gene Name: solute carrier family 6 (neurotransmitter transporter), member 2
  ENSP ID: ENSP00000454603
MLLARMNPQVQPENNGADTGPEQPLRARKTAELLVVKERNGVQCLLAPRDGDAQPRETWGKKIDFLLSVVGFAVDLANVWRFPYLCYKNGGGAFLIPYTLFLIIAGMPLFYMELALGQYNREGAATVWKICPFFKGVGYAVILIALYVGFYYNVIIAWSLYYLFSSFTLNLPWTDCGHTWNSPNCTDPKLLNGSVLGNHT

SEQ ID NO: 82044 - protein, 572 aa, Homo sapiens
  Payload ID: 16329
  Gene Symbol: SLC6A2
  Gene Name: solute carrier family 6 (neurotransmitter transporter), member 2
  ENSP ID: ENSP00000456210
MLLARMNPQVQPENNGADTGPEQPLRARKTAELLVVKERNGVQCLLAPRDGDAQPRETWGKKIDFLLSVVGFAVDLANVWRFPYLCYKNGGGAFLIPYTLFLIIAGMPLFYMELALGQYNREGAATVWKICPFFKGVGYAVILIALYVGFYYNVIIAWSLYYLFSSFTLNLPWTDCGHTWNSPNCTDPKLLNGSVLGNHTKYSKYKFTPAAEFYERGVLHLHESSGIHDIGLPQWQLLLCLMVVVIVLYFSLWKGVKTSGKVWIDAATQIFFSLGAGFGVLIAFASYNKFDNNCYRDALLTSSINCITSFVSGFAIFSILGYMAHEHKVNIEDVATEGAGLVFILYPEAISTLSGSTFWAVVFFVMLLALGLDSSMGGMEAVITGLADDFQVLKRHRKLFTFGVTFSTFLLALFCITKGGIYVLTLLDTFAAGTSILFAVLMEAIGVSWFYGVDRFSNDIQQMMGFRPGLYWRLCWKFVSPAFLLFVVVVSIINFKPLTYDDYIFPPWANWVGWGIALSSMVLVPIYVIYKFLSTQGSLWERLAYGITPENEHHLVAQRDIRQFQLQHWLAI

SEQ ID NO: 82045 - protein, 295 aa, Homo sapiens
  Payload ID: 16329
  Gene Symbol: SLC6A2
  Gene Name: solute carrier family 6 (neurotransmitter transporter), member 2
  ENSP ID: ENSP00000456377
MLLARMNPQVQPENNGADTGPEQPLRARKTAELLVVKERNGVQCLLAPRDGDAQPRETWGKKIDFLLSVVGFAVDLANVWRFPYLCYKNGGGAFLIPYTLFLIIAGMPLFYMELALGQYNREGAATVWKICPFFKGVGYAVILIALYVGFYYNVIIAWSLYYLFSSFTLNLPWTDCGHTWNSPNCTDPKLLNGSVLGNHTKYSKYKFTPAAEFYERGVLHLHESSGIHDIGLPQWQLLLCLMVVVIVLYFSLWKGVKTSGKVWIDAATQIFFSLGAGFGVLIAFASYNKFDNNCY

SEQ ID NO: 82046 - protein, 512 aa, Homo sapiens
  Payload ID: 16329
  Gene Symbol: SLC6A2
  Gene Name: solute carrier family 6 (neurotransmitter transporter), member 2
  Uniprot ID: P23975
  ENSP ID: ENSP00000457375
MGVQWWSHTQGEVAVGLGLGDSYLTPCPCPGVGYAVILIALYVGFYYNVIIAWSLYYLFSSFTLNLPWTDCGHTWNSPNCTDPKLLNGSVLGNHTKYSKYKFTPAAEFYERGVLHLHESSGIHDIGLPQWQLLLCLMVVVIVLYFSLWKGVKTSGKVVWITATLPYFVLFVLLVHGVTLPGASNGINAYLHIDFYRLKEATVWIDAATQIFFSLGAGFGVLIAFASYNKFDNNCYRDALLTSSINCITSFVSGFAIFSILGYMAHEHKVNIEDVATEGAGLVFILYPEAISTLSGSTFWAVVFFVMLLALGLDSSMGGMEAVITGLADDFQVLKRHRKLFTFGVTFSTFLLALFCITKGGIYVLTLLDTFAAGTSILFAVLMEAIGVSWFYGVDRFSNDIQQMMGFRPGLYWRLCWKFVSPAFLLFVVVVSIINFKPLTYDDYIFPPWANWVGWGIALSSMVLVPIYVIYKFLSTQGSLWERLAYGITPENEHHLVAQRDIRQFQLQHWLAI

SEQ ID NO: 82047 - protein, 617 aa, Homo sapiens [sequence omitted]

SEQ ID NO: 82048 - protein, 58 aa, Homo sapiens
  Payload ID: 16329
  Gene Symbol: SLC6A2
  Gene Name: solute carrier family 6 (neurotransmitter transporter), member 2
  ENSP ID: ENSP00000460214
  MOD_RES (1)..(1): Any amino acid
XVPQHAGLSLGETGLWHHARERAPPGGSEGHQTVPDENETREKESYQLLPDILLNRNP

SEQ ID NO: 82049 - protein, 620 aa, Homo sapiens
  Payload ID: 16330
  Gene Symbol: SLC6A3
  Gene Name: solute carrier family 6 (neurotransmitter transporter), member 3
  Uniprot ID: Q01959
  ENSP ID: ENSP00000270349
MSKSKCSVGLMSSVVAPAKEPNAVGPKEVELILVKEQNGVQLTSSTLTNPRQSPVEAQDRETWGKKIDFLLSVIGFAVDLANVWRFPYLCYKNGGGAFLVPYLLFMVIAGMPLFYMELALGQFNREGAAGVWKICPILKGVGFTVILISLYVGFFYNVIIAWALHYLFSSFTTELPWIHCNNSWNSPNCSDAHPGDSSGDSSGLNDTFGTTPAAEYFERGVLHLHQSHGIDDLGPPRWQLTACLVLVIVLLYFSLWKGVKTSGKVVWITATMPYVVLTALLLRGVTLPGAIDGIRAYLSVDFYRLCEASVWIDAATQVCFSLGVGFGVLIAFSSYNKFTNNCYRDAIVTTSINSLTSFSSGFVVFSFLGYMAQKHSVPIGDVAKDGPGLIFIIYPEAIATLPLSSAWAVVFFIMLLTLGIDSAMGGMESVITGLIDEFQLLHRHRELFTLFIVLATFLLSLFCVTNGGIYVFTLLDHFAAGTSILFGVLIEAIGVAWFYGVGQFSDDIQQMTGQRPSLYWRLCWKLVSPCFLLFVVVVSIVTFRPPHYGAYIFPDWANALGWVIATSSMAMVPIYAAYKFCSLPGSFREKLAYAIAPEKDRELVDRGEVRQFTLRHWLKV

SEQ ID NO: 82050 - protein, 620 aa, Homo sapiens; identical to SEQ ID NO: 82049
  Payload ID: 16330
  Gene Symbol: SLC6A3
  Gene Name: solute carrier family 6 (neurotransmitter transporter), member 3
  Uniprot ID: Q01959
  ENSP ID: ENSP00000479597

SEQ ID NO: 82051 - protein, 630 aa, Homo sapiens
  Payload ID: 16331
  Gene Symbol: SLC6A4
  Gene Name: solute carrier family 6 (neurotransmitter transporter), member 4
  Uniprot ID: P31645
  ENSP ID: ENSP00000261707
METTPLNSQKQLSACEDGEDCQENGVLQKVVPTPGDKVESGQISNGYSAVPSPGAGDDTRHSIPATTTTLVAELHQGERETWGKKVDFLLSVIGYAVDLGNVWRFPYICYQNGGGAFLLPYTIMAIFGGIPLFYMELALGQYHRNGCISIWRKICPIFKGIGYAICIIAFYIASYYNTIMAWALYYLISSFTDQLPWTSCKNSWNTGNCTNYFSEDNITWTLHSTSPAEEFYTRHVLQIHRSKGLQDLGGISWQLALCIMLIFTVIYFSIWKGVKTSGKVVWVTATFPYIILSVLLVRGATLPGAWRGVLFYLKPNWQKLLETGVWIDAAAQIFFSLGPGFGVLLAFASYNKFNNNCYQDALVTSVVNCMTSFVSGFVIFTVLGYMAEMRNEDVSEVAKDAGPSLLFITYAEAIANMPASTFFAIIFFLMLITLGLDSTFAGLEGVITAVLDEFPHVWAKRRERFVLAVVITCFFGSLVTLTFGGAYVVKLLEEYATGPAVLTVALIEAVAVSWFYGITQFCRDVKEMLGFSPGWFWRICWVAISPLFLLFIICSFLMSPPQLRLFQYNYPYWSIILGYCIGTSSFICIPTYIAYRLIITPGTFKERIIKSITPETPTEIPCGDIRLNAV

SEQ ID NO: 82052 - protein, 618 aa, Homo sapiens
  Payload ID: 16331
  Gene Symbol: SLC6A4
  Gene Name: solute carrier family 6 (neurotransmitter transporter), member 4
  ENSP ID: ENSP00000378298
METTPLNSQKQLSACEDGEDCQENGVLQKVVPTPGDKVESGQISNGYSAVPSPGAGDDTRHSIPATTTTLVAELHQGERETWGKKVDFLLSVIGYAVDLGNVWRFPYICYQNGGGAFLLPYTIMAIFGGIPLFYMELALGQYHRNGCISIWRKICPIFKGIGYAICIIAFYIASYYNTIMAWALYYLISSFTDQLPWTSCKNSWNTGNCTNYFSEDNITWTLHSTSPAEEFYTRHVLQIHRSKGLQDLGGISWQLALCIMLIFTVIYFSIWKGVKTSGKVVWVTATFPYIILSVLLVRGATLPGAWRGVLFYLKPNWQKLLETGVWIDAAAQIFFSLGPGFGVLLAFASYNKFNNNCYQDALVTSVVNCMTSFVSGFVIFTVLGYMAEMRNEDVSEVAKDAGPSLLFITYAEAIANMPASTFFAIIFFLMLITLGLDSTFAGLEGVITAVLDEFPHVWAKRRERFVLAVVITCFFGSLVTLTFGGAYVVKLLEEYATGPAVLTVALIEAVAVSWFYGITQFCRDVKEMLGFSPGWFWRICWVAISPLFLLFIICSFLMSPPQLRLFQYNYPYWSIILGYCIGTSSFICIPTYIAYRLIITPGTFKERIIKSITPETPT

SEQ ID NO: 82053 - protein, 630 aa, Homo sapiens; identical to SEQ ID NO: 82051
  Payload ID: 16331
  Gene Symbol: SLC6A4
  Gene Name: solute carrier family 6 (neurotransmitter transporter), member 4
  Uniprot ID: P31645
  ENSP ID: ENSP00000385822

SEQ ID NO: 82054 - protein, 72 aa, Homo sapiens
  Payload ID: 16331
  Gene Symbol: SLC6A4
  Gene Name: solute carrier family 6 (neurotransmitter transporter), member 4
  ENSP ID: ENSP00000463172
  MOD_RES (1)..(1): Any amino acid
XTFFAIIFFLMLITLGLDSTFAGLEGVITAVLDEFPHVWAKRRERFVLAVVITCFFGSLVTLTFASLSSAGT

SEQ ID NO: 82055 - protein, 187 aa, Homo sapiens
  Payload ID: 16332
  Gene Symbol: SLC6A5
  Gene Name: solute carrier family 6 (neurotransmitter transporter), member 5
  ENSP ID: ENSP00000298923
MDCSAPKEMNKLPANSPEAAAAQGHPDGPCAPRTSPEQELPAAAAPPPPRVPRSASTGAQTFQSADARACEAERPGVGSCKLSSPRAQAASAALRDLREAQGAQASPPPGSSGPGNALHCKIPFLRGPEGDANVSVGKGTLERNNTPVVGWVNMSQSTVVLATDGITSVLPGSVATVATQVLSSSLT

SEQ ID NO: 82056 - protein, 797 aa, Homo sapiens
  Payload ID: 16332
  Gene Symbol: SLC6A5
  Gene Name: solute carrier family 6 (neurotransmitter transporter), member 5
  Uniprot ID: Q9Y345
  ENSP ID: ENSP00000434364
MDCSAPKEMNKLPANSPEAAAAQGHPDGPCAPRTSPEQELPAAAAPPPPRVPRSASTGAQTFQSADARACEAERPGVGSCKLSSPRAQAASAALRDLREAQGAQASPPPGSSGPGNALHCKIPFLRGPEGDANVSVGKGTLERNNTPVVGWVNMSQSTVVLATDGITSVLPGSVATVATQEDEQGDENKARGNWSSKLDFILSMVGYAVGLGNVWRFPYLAFQNGGGAFLIPYLMMLALAGLPIFFLEVSLGQFASQGPVSVWKAIPALQGCGIAMLIISVLIAIYYNVIICYTLFYLFASFVSVLPWGSCNNPWNTPECKDKTKLLLDSCVISDHPKIQIKNSTFCMTAYPNVTMVNFTSQANKTFVSGSEEYFKYFVLKISAGIEYPGEIRWPLALCLFLAWVIVYASLAKGIKTSGKVVYFTATFPYVVLVILLIRGVTLPGAGAGIWYFITPKWEKLTDATVWKDAATQIFFSLSAAWGGLITLSSYNKFHNNCYRDTLIVTCTNSATSIFAGFVIFSVIGFMANERKVNIENVADQGPGIAFVVYPEALTRLPLSPFWAIIFFLMLLTLGLDTMFATIETIVTSISDEFPKYLRTHKPVFTLGCCICFFIMGFPMITQGGIYMFQLVDTYAASYALVIIAIFELVGISYVYGLQRFCEDIEMMIGFQPNIFWKVCWAFVTPTILTFILCFSFYQWEPMTYGSYRYPNWSMVLGWLMLACSVIWIPIMFVIKMHLAPGRFIERLKLVCSPQPDWGPFLAQHRGERYKNMIDPLGTSSLGLKLPVKDLELGTQC

SEQ ID NO: 82057 - protein, 95 aa, Homo sapiens
  Payload ID: 16333
  Gene Symbol: SLC6A6
  Gene Name: solute carrier family 6 (neurotransmitter transporter), member 6
  ENSP ID: ENSP00000399522
  MOD_RES (1)..(1): Any amino acid
XTMMPLPTFWSILFFIMLLLLGLDSQGCFIFSLVKYVPLTYNKTYVYPNWAIGLGWSLALSSMLCVPLVIVIRLCQTEGPFLVRVKYLLTPREPN

SEQ ID NO: 82058 - protein, 109 aa, Homo sapiens
  Payload ID: 16333
  Gene Symbol: SLC6A6
  Gene Name: solute carrier family 6 (neurotransmitter transporter), member 6
  ENSP ID: ENSP00000402059
MATKEKLQCLKDFHKDILKPSPGKSPGTRPEDEAEGKPPQREKWSSKIDFVLSVAGGFVGLGNVWRFPYLCYKNGGGAFLIPYFIFLFGSGLPVFFLEIIIGQYTSEGG

SEQ ID NO: 82059 - protein, 620 aa, Homo sapiens
  Payload ID: 16333
  Gene Symbol: SLC6A6
  Gene Name: solute carrier family 6 (neurotransmitter transporter), member 6
  Uniprot ID: P31641
  ENSP ID: ENSP00000480890
MATKEKLQCLKDFHKDILKPSPGKSPGTRPEDEAEGKPPQREKWSSKIDFVLSVAGGFVGLGNVWRFPYLCYKNGGGAFLIPYFIFLFGSGLPVFFLEIIIGQYTSEGGITCWEKICPLFSGIGYASVVIVSLLNVYYIVILAWATYYLFQSFQKELPWAHCNHSWNTPHCMEDTMRKNKSVWITISSTNFTSPVIEFWERNVLSLSPGIDHPGSLKWDLALCLLLVWLVCFFCIWKGVRSTGKVVYFTATFPFAMLLVLLVRGLTLPGAGAGIKFYLYPDITRLEDPQVWIDAGTQIFFSYAICLGAMTSLGSYNKYKYNSYRDCMLLGCLNSGTSFVSGFAIFSILGFMAQEQGVDIADVAESGPGLAFIAYPKAVTMMPLPTFWSILFFIMLLLLGLDSQFVEVEGQITSLVDLYPSFLRKGYRREIFIAFVCSISYLLGLTMVTEGGMYVFQLFDYYAASGVCLLWVAFFECFVIAWIYGGDNLYDGIEDMIGYRPGPWMKYSWAVITPVLCVGCFIFSLVKYVPLTYNKTYVYPNWAIGLGWSLALSSMLCVPLVIVIRLCQTEGPFLVRVKYLLTPREPNRWAVEREGATPYNSRTVMNGALVKPTHIIVETMM

SEQ ID NO: 82060 - protein, 721 aa, Homo sapiens
  Payload ID: 16333
  Gene Symbol: SLC6A6
  Gene Name: solute carrier family 6 (neurotransmitter transporter), member 6
  ENSP ID: ENSP00000481625
MGDAESCLLRQQTREVRKKPLINYRFLRAAANAEPRGPQAQRTSCAKRECGAFTQRVRERAGRQPPAGGTRHSRAERGRRRSHPRSRTRTTALLRSSQTKEMATKEKLQCLKDFHKDILKPSPGKSPGTRPEDEAEGKPPQREKWSSKIDFVLSVAGGFVGLGNVWRFPYLCYKNGGGAFLIPYFIFLFGSGLPVFFLEIIIGQYTSEGGITCWEKICPLFSGIGYASVVIVSLLNVYYIVILAWATYYLFQSFQKELPWAHCNHSWNTPHCMEDTMRKNKSVWITISSTNFTSPVIEFWERNVLSLSPGIDHPGSLKWDLALCLLLVWLVCFFCIWKGVRSTGKVVYFTATFPFAMLLVLLVRGLTLPGAGAGIKFYLYPDITRLEDPQVWIDAGTQIFFSYAICLGAMTSLGSYNKYKYNSYRDCMLLGCLNSGTSFVSGFAIFSILGFMAQEQGVDIADVAESGPGLAFIAYPKAVTMMPLPTFWSILFFIMLLLLGLDSQFVEVEGQITSLVDLYPSFLRKGYRREIFIAFVCSISYLLGLTMVTEGGMYVFQLFDYYAASGVCLLWVAFFECFVIAWIYGGDNLYDGIEDMIGYRPGPWMKYSWAVITPVLCVGCFIFSLVKYVPLTYNKTYVYPNWAIGLGWSLALSSMLCVPLVIVIRLCQTEGPFLVRVKYLLTPREPNRWAVEREGATPYNSRTVMNGALVKPTHIIVETMM

SEQ ID NO: 82061 - protein, 460 aa, Homo sapiens
  Payload ID: 16333
  Gene Symbol: SLC6A6
  Gene Name: solute carrier family 6 (neurotransmitter transporter), member 6
  ENSP ID: ENSP00000481946
MGDAESCLLRQQTREVRKKPLINYRFLRAAANAEPRGPQAQRTSCAKRECGAFTQRVRERAGRQPPAGGTRHSRAERGRRRSHPRSRTRTTALLRSSQTKEMATKEKLQCLKDFHKDILKPSPGKSPGTRPEDEAEGKPPQREKWSSKIDFVLSVAGGFVGLGNVWRFPYLCYKNGGGAFLIPYFIFLFGSGLPVFFLEIIIGQYTSEGGITCWEKICPLFSGIGYASVVIVSLLNVYYIVILAWATYYLFQSFQKELPWAHCNHSWNTPHCMEDTMRKNKSVWITISSTNFTSPVIEFWERNVLSLSPGIDHPGSLKWDLALCLLLVWLVCFFCIWKGVRSTGKVVYFTATFPFAMLLVLLVRGLTLPGAGAGIKFYLYPDITRLEDPQVWIDAGTQIFFSYAICLGAMTSLGSYNKYKYNSYRSWPGLHCLPKSCDNDAAAHILVHSFFYYASLAWTG

SEQ ID NO: 82062 - protein, 122 aa, Homo sapiens
  Payload ID: 16333
  Gene Symbol: SLC6A6
  Gene Name: solute carrier family 6 (neurotransmitter transporter), member 6
  ENSP ID: ENSP00000482220
  MOD_RES (1)..(1): Any amino acid
XQTREVRKKPLINYRFLRAAANAEPRGPQAQRTSCAKRECGAFTQRVRERAGRQPPAGGTRHSRAERGRRRSHPRSRTRTTALLRSSQTKQGDGHQGEAAVSERFPQGHPEALTREEPRHAA

SEQ ID NO: 82063 - protein, 132 aa, Homo sapiens
  Payload ID: 16333
  Gene Symbol: SLC6A6
  Gene Name: solute carrier family 6 (neurotransmitter transporter), member 6
  ENSP ID: ENSP00000482391
MGDAESCLLRQQTREVRKKPLINYRFLRAAANAEPRGPQAQRTSCAKRECGAFTQRVRERAGRQPPAGGTRHSRAERGRRRSHPRSRTRTTALLRSSQTKQGDGHQGEAAVSERFPQGHPEALTREEPRHAA

SEQ ID NO: 82064 - protein, 200 aa, Homo sapiens
  Payload ID: 16333
  Gene Symbol: SLC6A6
  Gene Name: solute carrier family 6 (neurotransmitter transporter), member 6
  Uniprot ID: P31641
  ENSP ID: ENSP00000482560
MATKEKLQCLKDFHKDILKPSPGKSPGTRPEDEAEGKPPQREKWSSKIDFVLSVAGGFVGLGNVWRFPYLCYKNGGGAFLIPYFIFLFGSGLPVFFLEIIIGQYTSEGGITCWEKICPLFSGIGYASVVIVSLLNVYYIVILAWATYYLFQSFQKELPWAHCNHSWNTPHCMEDTMRKNKSVWITISSTNFTSPVIEFWE

SEQ ID NO: 82065 - protein, 636 aa, Homo sapiens
  Payload ID: 16334
  Gene Symbol: SLC6A7
  Gene Name: solute carrier family 6 (neurotransmitter transporter), member 7
  Uniprot ID: Q99884
  ENSP ID: ENSP00000230671
MKKLQGAHLRKPVTPDLLMTPSDQGDVDLDVDFAAHRGNWTGKLDFLLSCIGYCVGLGNVWRFPYRAYTNGGGAFLVPYFLMLAICGIPLFFLELSLGQFSSLGPLAVWKISPLFKGAGAAMLLIVGLVAIYYNMIIAYVLFYLFASLTSDLPWEHCGNWWNTELCLEHRVSKDGNGALPLNLTCTVSPSEEYWSRYVLHIQGSQGIGSPGEIRWNLCLCLLLAWVIVFLCILKGVKSSGKVVYFTATFPYLILLMLLVRGVTLPGAWKGIQFYLTPQFHHLLSSKVWIEAALQIFYSLGVGFGGLLTFASYNTFHQNIYRDTFIVTLGNAITSILAGFAIFSVLGYMSQELGVPVDQVAKAGPGLAFVVYPQAMTMLPLSPFWSFLFFFMLLTLGLDSQFAFLETIVTAVTDEFPYYLRPKKAVFSGLICVAMYLMGLILTTDGGMYWLVLLDDYSASFGLMVVVITTCLAVTRVYGIQRFCRDIHMMLGFKPGLYFRACWLFLSPATLLALMVYSIVKYQPSEYGSYRFPPWAELLGILMGLLSCLMIPAGMLVAVLREEGSLWERLQQASRPAMDWGPSLEENRTGMYVATLAGSQSPKPLMVHMRKYGGITSFENTAIEVDREIAEEEESMM

SEQ ID NO: 82066 - protein, 666 aa, Homo sapiens
  Payload ID: 16334
  Gene Symbol: SLC6A7
  Gene Name: solute carrier family 6 (neurotransmitter transporter), member 7
  ENSP ID: ENSP00000428200
MKKLQGAHLRKPVTPDLLMTPSDQGDVDLDVDFAAHRGNWTGKLDFLLSCIGYCVGLGNVWRFPYRAYTNGGGAFLVPYFLMLAICGIPLFFLELSLGQFSSLGPLAVWKISPLFKGAGAAMLLIVGLVAIYYNMIIAYVLFYLFASLTSDLPWEHCGNWWNTELCLEHRVSKDGNGALPLNLTCTVSPSEEYWSRYVLHIQGSQGIGSPGEIRWNLCLCLLLAWVIVFLCILKGVKSSGKVVYFTATFPYLILLMLLVRGVTLPGAWKGIQFYLTPQFHHLLSSKVWIEAALQIFYSLGVGFGGLLTFASYNTFHQNIYRDTFIVTLGNAITSILAGFAIFSVLGYMSQELGVPVDQVAKAGPGLAFVVYPQAMTMLPLSPFWSFLFFFMLLTLGLDSQFAFLETIVTAVTDEFPYYLRPKKAVFSGLICVAMYLMGLILTTDGGMYWLVLLDDYSASFGLMVVVITTCLAVTRVYGIQRFCRDIHMMLGFKPGLYFRACWLFLSPATLLALMVYSIVKYQPSEYGSYRFPPWAELLGILMGLLSCLMIPAGMLVAVLREEGSLWERLQQASRPAMDWGPSLEENRTGMYVATLAGSQSPKPLMVHMRKGTSARGLLYARMTVSATYIRSTDKMLSCLQGAHSSAETCLGDFKPEICGEEVTVVG

SEQ ID NO: 82067 - protein, 635 aa, Homo sapiens
  Payload ID: 16335
  Gene Symbol: SLC6A8
  Gene Name: solute carrier family 6 (neurotransmitter transporter), member 8
  Uniprot ID: P48029
  ENSP ID: ENSP00000253122
MAKKSAENGIYSVSGDEKKGPLIAPGPDGAPAKGDGPVGLGTPGGRLAVPPRETWTRQMDFIMSCVGFAVGLGNVWRFPYLCYKNGGGVFLIPYVLIALVGGIPIFFLEISLGQFMKAGSINVWNICPLFKGLGYASMVIVFYCNTYYIMVLAWGFYYLVKSFTTTLPWATCGHTWNTPDCVEIFRHEDCANASLANLTCDQLADRRSPVIEFWENKVLRLSGGLEVPGALNWEVTLCLLACWVLVYFCVWKGVKSTGKIVYFTATFPYVVLVVLLVRGVLLPGALDGIIYYLKPDWSKLGSPQVWIDAGTQIFFSYAIGLGALTALGSYNRFNNNCYKDAIILALINSGTSFFAGFVVFSILGFMAAEQGVHISKVAESGPGLAFIAYPRAVTLMPVAPLWAALFFFMLLLLGLDSQFVGVEGFITGLLDLLPASYYFRFQREISVALCCALCFVIDLSMVTDGGMYVFQLFDYYSASGTTLLWQAFWECVVVAWVYGADRFMDDIACMIGYRPCPWMKWCWSFFTPLVCMGIFIFNVVYYEPLVYNNTYVYPWWGEAMGWAFALSSMLCVPLHLLGCLLRAKGTMAERWQHLTQPIWGLHHLEYRAQDADVRGLTTLTPVSESSKVVVVESVM

SEQ ID NO: 82068 - protein, 88 aa, Homo sapiens
  Payload ID: 16335
  Gene Symbol: SLC6A8
  Gene Name: solute carrier family 6 (neurotransmitter transporter), member 8
  ENSP ID: ENSP00000394742
GRHHPGSHQQWDQLLCWLRGLLHPGLHGCRAGRAHLQGGRVRAGPGLHRLPAGCHADASGPTLGCPVLLHAVAAWSRQPGVEGFITGL

SEQ ID NO: 82069 - protein, 156 aa, Homo sapiens
  Payload ID: 16335
  Gene Symbol: SLC6A8
  Gene Name: solute carrier family 6 (neurotransmitter transporter), member 8
  ENSP ID: ENSP00000400463
LLHSPTWSWSCCWCVECCCLAPWMASFTISSLTGQSWGPLSPGQLQPLQQQLLQWDQLLCWLRGLLHPGLHGCRAGRAHLQGGRVREISVALCCALCFVIDLSMVTDGGMYVFQLFDYYSASGTTLLWQAFWECVVVAWVYGADRFMDDIACMIGY

SEQ ID NO: 82070 - protein, 520 aa, Homo sapiens
  Payload ID: 16335
  Gene Symbol: SLC6A8
  Gene Name: solute carrier family 6 (neurotransmitter transporter), member 8
  Uniprot ID: P48029
  ENSP ID: ENSP00000403041
MKAGSINVWNICPLFKGLGYASMVIVFYCNTYYIMVLAWGFYYLVKSFTTTLPWATCGHTWNTPDCVEIFRHEDCANASLANLTCDQLADRRSPVIEFWENKVLRLSGGLEVPGALNWEVTLCLLACWVLVYFCVWKGVKSTGKIVYFTATFPYVVLVVLLVRGVLLPGALDGIIYYLKPDWSKLGSPQVWIDAGTQIFFSYAIGLGALTALGSYNRFNNNCYKDAIILALINSGTSFFAGFVVFSILGFMAAEQGVHISKVAESGPGLAFIAYPRAVTLMPVAPLWAALFFFMLLLLGLDSQFVGVEGFITGLLDLLPASYYFRFQREISVALCCALCFVIDLSMVTDGGMYVFQLFDYYSASGTTLLWQAFWECVVVAWVYGADRFMDDIACMIGYRPCPWMKWCWSFFTPLVCMGIFIFNVVYYEPLVYNNTYVYPWWGEAMGWAFALSSMLCVPLHLLGCLLRAKGTMAERWQHLTQPIWGLHHLEYRAQDADVRGLTTLTPVSESSKVVVVESVM

SEQ ID NO: 82071 - protein, 174 aa, Homo sapiens
  Payload ID: 16335
  Gene Symbol: SLC6A8
  Gene Name: solute carrier family 6 (neurotransmitter transporter), member 8
  ENSP ID: ENSP00000403682
  MOD_RES (1)..(1): Any amino acid
XIDAGTQIFFSYAIGLGALTALGSYNRFNNNCYNGTSFFAGFVVFSILGFMAAEQGVHISKVAESGPGLAFIAYPRAVTLMPVAPLWAALFFFMLLLLGLDSQFVGVEGFITGLLDLLPASYYFRFQREISVALCCALCFVIDLSMVTDGGMYVFQLFDYYSASGTTLLWQAFW

SEQ ID NO: 82072 - protein, 112 aa, Homo sapiens
  Payload ID: 16335
  Gene Symbol: SLC6A8
  Gene Name: solute carrier family 6 (neurotransmitter transporter), member 8
  ENSP ID: ENSP00000404046
  MOD_RES (1)..(1): Any amino acid
XFRHEDCANASLANLTCDQLADRRSPVIEFWENKVLRLSGGLEVPGALNWEVTLCLLACWVLVYFCVWKGVKSTGKVPLEACSGEGGSALGAGCLCQAHLWQREVTRQSLAL

SEQ ID NO: 82073 - protein, 652 aa, Homo sapiens
  Payload ID: 16336
  Gene Symbol: SLC6A9
  Gene Name: solute carrier family 6 (neurotransmitter transporter, glycine), member 9
  Uniprot ID: P48067
  ENSP ID: ENSP00000350362
MSGGDTRAAIARPRMAAAHGPVAPSSPEQNGAVPSEATKRDQNLKRGNWGNQIEFVLTSVGYAVGLGNVWRFPYLCYRNGGGAFMFPYFIMLIFCGIPLFFMELSFGQFASQGCLGVWRISPMFKGVGYGMMVVSTYIGIYYNVVICIAFYYFFSSMTHVLPWAYCNNPWNTHDCAGVLDASNLTNGSRPAALPSNLSHLLNHSLQRTSPSEEYWRLYVLKLSDDIGNFGEVRLPLLGCLGVSWLVVFLCLIRGVKSSGKVVYFTATFPYVVLTILFVRGVTLEGAFDGIMYYLTPQWDKILEAKVWGDAASQIFYSLGCAWGGLITMASYNKFHNNCYRDSVIISITNCATSVYAGFVIFSILGFMANHLGVDVSRVADHGPGLAFVAYPEALTLLPISPLWSLLFFFMLILLGLGTQFCLLETLVTAIVDEVGNEWILQKKTYVTLGVAVAGFLLGIPLTSQAGIYWLLLMDNYAASFSLVVISCIMCVAIMYIYGHRNYFQDIQMMLGFPPPLFFQICWRFVSPAIIFFILVFTVIQYQPITYNHYQYPGWAVAIGFLMALSSVLCIPLYAMFRLCRTDGDTLLQRLKNATKPSRDWGPALLEHRTGRYAPTIAPSPEDGFEVQPLHPDKAQIPIVGSNGSSRLQDSRI

SEQ ID NO: 82074 - protein, 706 aa, Homo sapiens
  Payload ID: 16336
  Gene Symbol: SLC6A9
  Gene Name: solute carrier family 6 (neurotransmitter transporter, glycine), member 9
  Uniprot ID: P48067
  ENSP ID: ENSP00000353791
MSGGDTRAAIARPRMAAAHGPVAPSSPEQVTLLPVQRSFFLPPFSGATPSTSLAESVLKVWHGAYNSGLLPQLMAQHSLAMAQNGAVPSEATKRDQNLKRGNWGNQIEFVLTSVGYAVGLGNVWRFPYLCYRNGGGAFMFPYFIMLIFCGIPLFFMELSFGQFASQGCLGVWRISPMFKGVGYGMMVVSTYIGIYYNVVICIAFYYFFSSMTHVLPWAYCNNPWNTHDCAGVLDASNLTNGSRPAALPSNLSHLLNHSLQRTSPSEEYWRLYVLKLSDDIGNFGEVRLPLLGCLGVSWLVVFLCLIRGVKSSGKVVYFTATFPYVVLTILFVRGVTLEGAFDGIMYYLTPQWDKILEAKVWGDAASQIFYSLGCAWGGLITMASYNKFHNNCYRDSVIISITNCATSVYAGFVIFSILGFMANHLGVDVSRVADHGPGLAFVAYPEALTLLPISPLWSLLFFFMLILLGLGTQFCLLETLVTAIVDEVGNEWILQKKTYVTLGVAVAGFLLGIPLTSQAGIYWLLLMDNYAASFSLVVISCIMCVAIMYIYGHRNYFQDIQMMLGFPPPLFFQICWRFVSPAIIFFILVFTVIQYQPITYNHYQYPGWAVAIGFLMALSSVLCIPLYAMFRLCRTDGDTLLQRLKNATKPSRDWGPALLEHRTGRYAPTIAPSPEDGFEVQPLHPDKAQIPIVGSNGSSRLQDSRI

SEQ ID NO: 82075 - protein, 579 aa, Homo sapiens
  Payload ID: 16336
  Gene Symbol: SLC6A9
  Gene Name: solute carrier family 6 (neurotransmitter transporter, glycine), member 9
  ENSP ID: ENSP00000361380
MVGKGAKGMLNGAVPSEATKRDQNLKRGNWGNQIEFVLTSVGYAVGLGNVWRFPYLCYRNGGGAFMFPYFIMLIFCGIPLFFMELSFGQFASQGCLGVWRISPMFKGVGYGMMVVSTYIGIYYNVVICIAFYYFFSSMTHVLPWAYCNNPWNTHDCAGVLDASNLTNGSRPAALPSNLSHLLNHSLQRTSPSEEYWRLYVLKLSDDIGNFGEVRLPLLGCLGVSWLVVFLCLIRGVKSSGKVVYFTATFPYVVLTILFVRGVTLEGAFDGIMYYLTPQWDKILEAKVWGDAASQIFYSLGCAWGGLITMASYNKFHNNCYRDSVIISITNCATSVYAGFVIFSILGFMANHLGVDVSRVADHGPGLAFVAYPEALTLLPISPLWSLLFFFMLILLGLGTQFCLLETLVTAIVDEVGNEWILQKKTYVTLGVAVAGFLLGIPLTSQAGIYWLLLMDNYAASFSLVVISCIMCVAIMYIYGEHSSLRPPATRPLARPLCPAGLLTPHLSRAPELLPGHPDDAGIPTTPLLSDLLALRLSRHHLPPGSGPPPPPPESSSLRVAPGAERAPPPAPTARGSAGA

SEQ ID NO: 82076 - protein, 574 aa, Homo sapiens
  Payload ID: 16336
  Gene Symbol: SLC6A9
  Gene Name: solute carrier family 6 (neurotransmitter transporter, glycine), member 9
  ENSP ID: ENSP00000361381
MFPYFIMLIFCGIPLFFMELSFGQFASQGCLGVWRISPMFKGVGYGMMVVSTYIGIYYNVVICIAFYYFFSSMTHVLPWAYCNNPWNTHDCAGVLDASNLTNGSRPAALPSNLSHLLNHSLQRTSPSEEYWRLYVLKLSDDIGNFGEVRLPLLGCLGVSWLVVFLCLIRGVKSSGKVVYFTATFPYVVLTILFVRGVTLEGAFDGIMYYLTPQWDKILEAKVWGDAASQIFYSLGCAWGGLITMASYNKFHNNCYRDSVIISITNCATSVYAGFVIFSILGFMANHLGVDVSRVADHGPGLAFVAYPEALTLLPISPLWSLLFFFMLILLGLGTQFCLLETLVTAIVDEVGNEWILQKKTYVTLGVAVAGFLLGIPLTSQAGIYWLLLMDNYAASFSLVVISCIMCVAIMYIYGHRNYFQDIQMMLGFPPPLFFQICWRFVSPAIIFLQAQVHRRLPQNPLHFASLPERNVLLHQLPQRGGVPEHDPPTPPSPARTYGPQVRVREVPRARRQRSPNPAPLWAPPSPKPHPCSAAGPLGWDCPFRNCQSLALSSARLLADSDAGGPETRQWEPGP

SEQ ID NO: 82077 - protein, 633 aa, Homo sapiens
  Payload ID: 16336
  Gene Symbol: SLC6A9
  Gene Name: solute carrier family 6 (neurotransmitter transporter, glycine), member 9
  Uniprot ID: P48067
  ENSP ID: ENSP00000361384
MVGKGAKGMLNGAVPSEATKRDQNLKRGNWGNQIEFVLTSVGYAVGLGNVWRFPYLCYRNGGGAFMFPYFIMLIFCGIPLFFMELSFGQFASQGCLGVWRISPMFKGVGYGMMVVSTYIGIYYNVVICIAFYYFFSSMTHVLPWAYCNNPWNTHDCAGVLDASNLTNGSRPAALPSNLSHLLNHSLQRTSPSEEYWRLYVLKLSDDIGNFGEVRLPLLGCLGVSWLVVFLCLIRGVKSSGKVVYFTATFPYVVLTILFVRGVTLEGAFDGIMYYLTPQWDKILEAKVWGDAASQIFYSLGCAWGGLITMASYNKFHNNCYRDSVIISITNCATSVYAGFVIFSILGFMANHLGVDVSRVADHGPGLAFVAYPEALTLLPISPLWSLLFFFMLILLGLGTQFCLLETLVTAIVDEVGNEWILQKKTYVTLGVAVAGFLLGIPLTSQAGIYWLLLMDNYAASFSLVVISCIMCVAIMYIYGHRNYFQDIQMMLGFPPPLFFQICWRFVSPAIIFFILVFTVIQYQPITYNHYQYPGWAVAIGFLMALSSVLCIPLYAMFRLCRTDGDTLLQRLKNATKPSRDWGPALLEHRTGRYAPTIAPSPEDGFEVQPLHPDKAQIPIVGSNGSSRLQDSRI

SEQ ID NO: 82078 - protein, 116 aa, Homo sapiens
  Payload ID: 16336
  Gene Symbol: SLC6A9
  Gene Name: solute carrier family 6 (neurotransmitter transporter, glycine), member 9
  ENSP ID: ENSP00000433241
MVGKGAKGMLVTLLPVQRSFFLPPFSGATPSTSLAESVLKVWHGAYNSGLLPQLMAQHSLAMAQNGAVPSEATKRDQNLKRGNWGNQIEFVLTSVGYAVGLGNVWRFPYLCYRNGG

SEQ ID NO: 82079 - protein, 522 aa, Homo sapiens
  Payload ID: 16336
  Gene Symbol: SLC6A9
  Gene Name: solute carrier family 6 (neurotransmitter transporter, glycine), member 9
  ENSP ID: ENSP00000434460
MMVVSTYIGIYYNVVICIAFYYFFSSMTHVLPWAYCNNPWNTHDCAGVLDASNLTNGSRPAALPSNLSHLLNHSLQRTSPSEEYWRLYVLKLSDDIGNFGEVRLPLLGCLGVSWLVVFLCLIRGVKSSGKVVYFTATFPYVVLTILFVRGVTLEGAFDGIMYYLTPQWDKILEAKVWGDAASQIFYSLGCAWGGLITMASYNKFHNNCYRDSVIISITNCATSVYAGFVIFSILGFMANHLGVDVSRVADHGPGLAFVAYPEALTLLPISPLWSLLFFFMLILLGLGTQFCLLETLVTAIVDEVGNEWILQKKTYVTLGVAVAGFLLGIPLTSQAGIYWLLLMDNYAASFSLVVISCIMCVAIMYIYGHRNYFQDIQMMLGFPPPLFFQICWRFVSPAIIFFILVFTVIQYQPITYNHYQYPGWAVAIGFLMALSSVLCIPLYAMFRLCRTDGDTLLQRLKNATKPSRDWGPALLEHRTGRYAPTIAPSPEDGFEVQPLHPDKAQIPIVGSNGSSRLQDSRI

SEQ ID NO: 82080 - protein, 134 aa, Homo sapiens
  Payload ID: 16336
  Gene Symbol: SLC6A9
  Gene Name: solute carrier family 6 (neurotransmitter transporter, glycine), member 9
  ENSP ID: ENSP00000435652
MSGGDTRAAIARPRMAAAHGPVAPSSPEQNGAVPSEATKRDQNLKRGNWGNQIEFVLTSVGYAVGLGNVWRFPYLCYRNGGGAFMFPYFIMLIFCGIPLFFMELSFGQFASQGCLGVWRISPMFKGVGYGMMVV

SEQ ID NO: 82081 - protein, 730 aa, Homo sapiens
  Payload ID: 16337
  Gene Symbol: SLC6A15
  Gene Name: solute carrier family 6 (neutral amino acid transporter), member 15
  Uniprot ID: Q9H2J7
  ENSP ID: ENSP00000266682
MPKNSKVVKRELDDDVTESVKDLLSNEDAADDAFKTSELIVDGQEEKDTDVEEGSEVEDERPAWNSKLQYILAQVGFSVGLGNVWRFPYLCQKNGGGAYLLPYLILLMVIGIPLFFLELSVGQRIRRGSIGVWNYISPKLGGIGFASCVVCYFVALYYNVIIGWSLFYFSQSFQQPLPWDQCPLVKNASHTFVEPECEQSSATTYYWYREALNISSSISESGGLNWKMTICLLAAWVMVCLAMIKGIQSSGKIIYFSSLFPYVVLICFLIRAFLLNGSIDGIRHMFTPKLEIMLEPKVWREAATQVFFALGLGFGGVIAFSSYNKRDNNCHFDAVLVSFINFFTSVLATLVVFAVLGFKANVINEKCITQNSETIMKFLKMGNISQDIIPHHINLSTVTAEDYHLVYDIIQKVKEEEFPALHLNSCKIEEELNKAVQGTGLAFIAFTEAMTHFPASPFWSVMFFLMLVNLGLGSMFGTIEGIVTPIVDTFKVRKEILTVICCLLAFCIGLIFVQRSGNYFVTMFDDYSATLPLLIVVILENIAVCFVYGIDKFMEDLKDMLGFAPSRYYYYMWKYISPLMLLSLLIASVVNMGLSPPGYNAWIEDKASEEFLSYPTWGLVVCVSLVVFAILPVPVVFIVRRFNLIDDSSGNLASVTYKRGRVLKEPVNLEGDDTSLIHGKIPSEMPSPNFGKNIYRKQSGSPTLDTAPNGRYGIGYLMADIMPDMPESDL

SEQ ID NO: 82082 - protein, 316 aa, Homo sapiens
  Payload ID: 16337
  Gene Symbol: SLC6A15
  Gene Name: solute carrier family 6 (neutral amino acid transporter), member 15
  ENSP ID: ENSP00000311645
MLEPKVWREAATQVFFALGLGFGGVIAFSSYNKRDNNCHFDAVLVSFINFFTSVLATLVVFAVLGFKANVINEKCITQNSETIMKFLKMGNISQDIIPHHINLSTVTAEDYHLVYDIIQKVKEEEFPALHLNSCKIEEELNKAVQGTGLAFIAFTEAMTHFPASPFWSVMFFLMLVNLGLGSMFGTIEGIVTPIVDTFKVRKEILTVICCLLAFCIGLIFVQRSGNYFVTMFDDYSATLPLLIVVILENIAVCFVYGIDKFMEDLKDMLGFAPSRYYYYMWKYISPLMLLSLLIASVVNMGLSPPGYNAWIEDKHL

SEQ ID NO: 82083 - protein, 289 aa, Homo sapiens
  Payload ID: 16337
  Gene Symbol: SLC6A15
  Gene Name: solute carrier family 6 (neutral amino acid transporter), member 15
  Uniprot ID: Q9H2J7
  ENSP ID: ENSP00000390706
MPKNSKVVKRELDDDVTESVKDLLSNEDAADDAFKTSELIVDGQEEKDTDVEEGSEVEDERPAWNSKLQYILAQVGFSVGLGNVWRFPYLCQKNGGGAYLLPYLILLMVIGIPLFFLELSVGQRIRRGSIGVWNYISPKLGGIGFASCVVCYFVALYYNVIIGWSLFYFSQSFQQPLPWDQCPLVKNASHTFVEPECEQSSATTYYWYREALNISSSISESGGLNWKMTICLLAAWVMVCLAMIKGIQSSGKVSMLEPFLILLITISGFIPLSNSVTDFCGQITHNTSF

SEQ ID NO: 82084 - protein, 96 aa, Homo sapiens
  Payload ID: 16337
  Gene Symbol: SLC6A15
  Gene Name: solute carrier family 6 (neutral amino acid transporter), member 15
  ENSP ID: ENSP00000448308
MPKNSKVVKRELDDDVTESVKDLLSNEDAADDAFKTSELIVDGQEEKDTDVEEGSEVEDERPAWNSKLQYILAQVGFSVGLGNVWRFPYLCQKNGG

SEQ ID NO: 82085 - protein, 71 aa, Homo sapiens
  Payload ID: 16337
  Gene Symbol: SLC6A15
  Gene Name: solute carrier family 6 (neutral amino acid transporter), member 15
  ENSP ID: ENSP00000449263
MFTPKLEIMLEPKVWREAATQVFFALGLGFGGVIAFSSYNKRDNNCHFDAVLVSFINFFTSVLATLVVFAV

SEQ ID NO: 82086 - protein, 623 aa, Homo sapiens
  Payload ID: 16337
  Gene Symbol: SLC6A15
  Gene Name: solute carrier family 6 (neutral amino acid transporter), member 15
  Uniprot ID: Q9H2J7
  ENSP ID: ENSP00000450145
MVIGIPLFFLELSVGQRIRRGSIGVWNYISPKLGGIGFASCVVCYFVALYYNVIIGWSLFYFSQSFQQPLPWDQCPLVKNASHTFVEPECEQSSATTYYWYREALNISSSISESGGLNWKMTICLLAAWVMVCLAMIKGIQSSGKIIYFSSLFPYVVLICFLIRAFLLNGSIDGIRHMFTPKLEIMLEPKVWREAATQVFFALGLGFGGVIAFSSYNKRDNNCHFDAVLVSFINFFTSVLATLVVFAVLGFKANVINEKCITQNSETIMKFLKMGNISQDIIPHHINLSTVTAEDYHLVYDIIQKVKEEEFPALHLNSCKIEEELNKAVQGTGLAFIAFTEAMTHFPASPFWSVMFFLMLVNLGLGSMFGTIEGIVTPIVDTFKVRKEILTVICCLLAFCIGLIFVQRSGNYFVTMFDDYSATLPLLIVVILENIAVCFVYGIDKFMEDLKDMLGFAPSRYYYYMWKYISPLMLLSLLIASVVNMGLSPPGYNAWIEDKASEEFLSYPTWGLVVCVSLVVFAILPVPVVFIVRRFNLIDDSSGNLASVTYKRGRVLKEPVNLEGDDTSLIHGKIPSEMPSPNFGKNIYRKQSGSPTLDTAPNGRYGIGYLMADIMPDMPESDL

SEQ ID NO: 82087 - protein, 19 aa, Homo sapiens
  Payload ID: 16337
  Gene Symbol: SLC6A15
  Gene Name: solute carrier family 6 (neutral amino acid transporter), member 15
  ENSP ID: ENSP00000475035
MPKNSKVVKRELDDDVTES

SEQ ID NO: 82088 - protein, 727 aa, Homo sapiens
  Payload ID: 16338
  Gene Symbol: SLC6A17
  Gene Name: solute carrier family 6 (neutral amino acid transporter), member 17
  Uniprot ID: Q9H1V8
  ENSP ID: ENSP00000330199
MPKNSKVTQREHSSEHVTESVADLLALEEPVDYKQSVLNVAGEAGGKQKAVEEELDAEDRPAWNSKLQYILAQIGFSVGLGNIWRFPYLCQKNGGGAYLVPYLVLLIIIGIPLFFLELAVGQRIRRGSIGVWHYICPRLGGIGFSSCIVCLFVGLYYNVIIGWSIFYFFKSFQYPLPWSECPVVRNGSVAVVEAECEKSSATTYFWYREALDISDSISESGGLNWKMTLCLLVAWSIVGMAVVKGIQSSGKVMYFSSLFPYVVLACFLVRGLLLRGAVDGILHMFTPKLDKMLDPQVWREAATQVFFALGLGFGGVIAFSSYNKQDNNCHFDAALVSFINFFTSVLATLVVFAVLGFKANIMNEKCVVENAEKILGYLNTNVLSRDLIPPHVNFSHLTTKDYMEMYNVIMTVKEDQFSALGLDPCLLEDELDKSVQGTGLAFIAFTEAMTHFPASPFWSVMFFLMLINLGLGSMIGTMAGITTPIIDTFKVPKEMFTVGCCVFAFLVGLLFVQRSGNYFVTMFDDYSATLPLTLIVILENIAVAWIYGTKKFMQELTEMLGFRPYRFYFYMWKFVSPLCMAVLTTASIIQLGVTPPGYSAWIKEEAAERYLYFPNWAMALLITLIVVATLPIPVVFVLRHFHLLSDGSNTLSVSYKKGRMMKDISNLEENDETRFILSKVPSEAPSPMPTHRSYLGPGSTSPLETSGNPNGRYGSGYLLASTPESEL

SEQ ID NO: 82089 - protein, 628 aa, Homo sapiens
  Payload ID: 16339
  Gene Symbol: SLC6A18
  Gene Name: solute carrier family 6 (neutral amino acid transporter), member 18
  Uniprot ID: Q96N87
  ENSP ID: ENSP00000323549
MAHAPEPDPAACDLGDERPKWDNKAQYLLSCTGFAVGLGNIWRFPYLCQTYGGGAFLIPYVIALVFEGIPIFHVELAIGQRLRKGSVGVWTAISPYLSGVGLGCVTLSFLISLYYNTIVAWVLWYLLNSFQHPLPWSSCPPDLNRTGFVEECQGSSAVSYFWYRQTLNITADINDSGSIQWWLLICLAASWAVVYMCVIRGIETTGKVIYFTALFPYLVLTIFLIRGLTLPGATKGLIYLFTPNMHILQNPRVWLDAATQIFFSLSLAFGGHIAFASYNSPRNDCQKDAVVIALVNRMTSLYASIAVFSVLGFKATNDYEHCLDRNILSLINDFDFPEQSISRDDYPAVLMHLNATWPKRVAQLPLKACLLEDFLDKSASGPGLAFVVFTETDLHMPGAPVWAMLFFGMLFTLGLSTMFGTVEAVITPLLDVGVLPRWVPKEALTGLVCLVCFLSATCFTLQSGNYWLEIFDNFAASPNLLMLAFLEVVGVVYVYGMKRFCDDIAWMTGRRPSPYWRLTWRVVSPLLLTIFVAYIILLFWKPLRYKAWNPKYELFPSRQEKLYPGWARAACVLLSLLPVLWVPVAALAQLLTRRRRTWRDRDARPDTDMRPDTDTRPDTDMRPDTDMR

SEQ ID NO: 82090 - protein, 634 aa, Homo sapiens
  Payload ID: 16340
  Gene Symbol: SLC6A19
  Gene Name: solute carrier family 6 (neutral amino acid transporter), member 19
  Uniprot ID: Q695T7
  ENSP ID: ENSP00000305302
MVRLVLPNPGLDARIPSLAELETIEQEEASSRPKWDNKAQYMLTCLGFCVGLGNVWRFPYLCQSHGGGAFMIPFLILLVLEGIPLLYLEFAIGQRLRRGSLGVWSSIHPALKGLGLASMLTSFMVGLYYNTIISWIMWYLFNSFQEPLPWSDCPLNENQTGYVDECARSSPVDYFWYRETLNISTSISDSGSIQWWMLLCLACAWSVLYMCTIRGIETTGKAVYITSTLPYVVLTIFLIRGLTLKGATNGIVFLFTPNVTELAQPDTWLDAGAQVFFSFSLAFGGLISFSSYNSVHNNCEKDSVIVSIINGFTSVYVAIVVYSVIGFRATQRYDDCFSTNILTLINGFDLPEGNVTQENFVDMQQRCNASDPAAYAQLVFQTCDINAFLSEAVEGTGLAFIVFTEAITKMPLSPLWSVLFFIMLFCLGLSSMFGNMEGVVVPLQDLRVIPPKWPKEVLTGLICLGTFLIGFIFTLNSGQYWLSLLDSYAGSIPLLIIAFCEMFSVVYVYGVDRFNKDIEFMIGHKPNIFWQVTWRVVSPLLMLIIFLFFFVVEVSQELTYSIWDPGYEEFPKSQKISYPNWVYVVVVIVAGVPSLTIPGYAIYKLIRNHCQKPGDHQGLVSTLSTASMNGDLKY

SEQ ID NO: 82091 - protein, 354 aa, Homo sapiens
  Payload ID: 16340
  Gene Symbol: SLC6A19
  Gene Name: solute carrier family 6 (neutral amino acid transporter), member 19
  ENSP ID: ENSP00000425701
MVRLVLPNPGLDARIPSLAELETIEQEEASSRPKWDNKAQYMLTCLGFCVGLGNVWRFPYLCQSHGGGAFMIPFLILLVLEGIPLLYLEFAIGQRLRRGSLGVWSSIHPALKGLGASALERLPAQREPDRVCGRVRQELPCGLLLVPRDAQHLHVHQRLGLHPVVDAAVPGLRMERPVHVHHPRHRDHREGRVHHLHAALCRPDHLPHPRPDAEGRHQWHRLPLHAQRHGAGPAGHLAGRGRTGLLLLLPGLRGPHLLLQLQLCAQQLREGLGDCVHHQRLHIGVCGHRGLLRHWVPRHTALRRLLQHVSGCPTILVPWAAPPGSLPASLAPGGRQPQSDPQEHPDPHQRVRPA

SEQ ID NO: 82092 - protein, 555 aa, Homo sapiens
  Payload ID: 16341
  Gene Symbol: SLC6A20
  Gene Name: solute carrier family 6 (proline IMINO transporter), member 20
  Uniprot ID: Q9NP91
  ENSP ID: ENSP00000296133
MEKARPLWANSLQFVFACISYAVGLGNVWRFPYLCQMYGGGSFLVPYIIMLIVEGMPLLYLELAVGQRMRQGSIGAWRTISPYLSGVGVASVVVSFFLSMYYNVINAWAFWYLFHSFQDPLPWSVCPLNGNHTGYDEECEKASSTQYFWYRKTLNISPSLQENGGVQWEPALCLLLAWLVVYLCILRGTESTGKIEQLANPKAWINAATQIFFSLGLGFGSLIAFASYNEPSNNCQKHAIIVSLINSFTSIFASIVTFSIYGFKATFNYENCLKKVSLLLTNTFDLEDGFLTASNLEQVKGYLASAYPSKYSEMFPQIKNCSLESELDTAVQGTGLAFIVYTEAIKNMEVSQLWSVLYFFMLLMLGIGSMLGNTAAILTPLTDSKIISSHLPKEAISGLVCLVNCAIGMVFTMEAGNYWFDIFNDYAATLSLLLIVLVETIAVCYVYGLRRFESDLKAMTGRAVSWYWKVMWAGVSPLLIVSLFVFYLSDYILTGTLKYQAWDASQGQLVTKDYPAYALAVIGLLVASSTMCIPLAALGTFVQRRLKRGDADPVA

SEQ ID NO: 82093 - protein, 592 aa, Homo sapiens
  Payload ID: 16341
  Gene Symbol: SLC6A20
  Gene Name: solute carrier family 6 (proline IMINO transporter), member 20
  Uniprot ID: Q9NP91
  ENSP ID: ENSP00000346298
MEKARPLWANSLQFVFACISYAVGLGNVWRFPYLCQMYGGGSFLVPYIIMLIVEGMPLLYLELAVGQRMRQGSIGAWRTISPYLSGVGVASVVVSFFLSMYYNVINAWAFWYLFHSFQDPLPWSVCPLNGNHTGYDEECEKASSTQYFWYRKTLNISPSLQENGGVQWEPALCLLLAWLVVYLCILRGTESTGKVVYFTASLPYCVLIIYLIRGLTLHGATNGLMYMFTPKIEQLANPKAWINAATQIFFSLGLGFGSLIAFASYNEPSNNCQKHAIIVSLINSFTSIFASIVTFSIYGFKATFNYENCLKKVSLLLTNTFDLEDGFLTASNLEQVKGYLASAYPSKYSEMFPQIKNCSLESELDTAVQGTGLAFIVYTEAIKNMEVSQLWSVLYFFMLLMLGIGSMLGNTAAILTPLTDSKIISSHLPKEAISGLVCLVNCAIGMVFTMEAGNYWFDIFNDYAATLSLLLIVLVETIAVCYVYGLRRFESDLKAMTGRAVSWYWKVMWAGVSPLLIVSLFVFYLSDYILTGTLKYQAWDASQGQLVTKDYPAYALAVIGLLVASSTMCIPLAALGTFVQRRLKRGDADPVA

SEQ ID NO: 82094 - protein, 264 aa, Homo sapiens
  Payload ID: 16341
  Gene Symbol: SLC6A20
  Gene Name: solute carrier family 6 (proline IMINO transporter), member 20
  ENSP ID: ENSP00000395506
MEKARPLWANSLQFVFACISYAVGLGNVWRFPYLCQMYGGGVASVVVSFFLSMYYNVINAWAFWYLFHSFQDPLPWSVCPLNGNHTGYDEECEKASSTQYFWYRKTLNISPSLQENGGVQWEPALCLLLAWLVVYLCILRGTESTGKVVYFTASLPYCVLIIYLIRGLTLHGATNGLMYMFTPKIEQLANPKAWINAATQIFFSLGLGFGSLIAFASYNEPSNNCQKHAIIVSLINSFTSIFASIVTFSIYGFKATFNYENCLK

SEQ ID NO: 82095 - protein, 547 aa, Homo sapiens
  Payload ID: 16341
  Gene Symbol: SLC6A20
  Gene Name: solute carrier family 6 (proline IMINO transporter), member 20
  ENSP ID: ENSP00000404310
MEKARPLWANSLQFVFACISYAVGLGNVWRFPYLCQMYGGGSFLVPYIIMLIVEGMPLLYLELAVGQRMRQGSIGAWRTISPYLSGVGVASVVVSFFLSMYYNVINAWAFWYLFHSFQDPLPWSVCPLNGNHTGYDEECEKASSTQYFWYRKTLNISPSLQENGGVQWEPALCLLLAWLVVYLCILRGTESTGKVVYFTASLPYCVLIIYLIRGLTLHGATNGLMYMFTPKIEQLANPKAWINAATQIFFSLGLGFGSLIAFASYNEPSNNCQKHAIIVSLINSFTSIFASIVTFSIYGFKATFNYENCLKKVSLLLTNTFDLEDGFLTASNLEQVKGYLASAYPSKYSEMFPQIKNCSLESELDTAVQGTGLAFIVYTEAIKNMEVSQLWSVLYFFMLLMLGIGSMLGNTAAILTPLTDSKIISSHLPKEAISGLVCLVNCAIGMVFTMEAGNYWFDIFNDYAATLSLLLIVLVETIAVCYVYGLRRFESDLKAMTGRAVSWYWKVMWAGVSPLLIVSLFVFYLSDYILTGTLKYQAWDASQDDKL

SEQ ID NO: 82096 - protein, 736 aa, Homo sapiens
  Payload ID: 16342
  Gene Symbol: SLC6A16
  Gene Name: solute carrier family 6, member 16
  Uniprot ID: Q9GZN6
  ENSP ID: ENSP00000338627
MKTEAQPSTSLLANTSWTGTVISDSVPGSQTWEDKGSLTRSATSWTSEAQVSAARVAEAQARTSQPKQISVLEALTASALNQKPTHEKVQMTEKKESEVLLARPFWSSKTEYILAQVGFSMKPSCLWRFAYLWLNSGGCSFAAIYIFMLFLVGVPLLFLEMAAGQSMRQGGMGVWKIIAPWIGGVGYSSFMVCFILGLYFNVVNSWIIFYMSQSFQFPVPWEKCPLTMNSSGFDPECERTTPSIYFWYQQALKASDRIEDGGSPVYSLVLPFFLCWCLVGAFMINGLKSTGKVIYVLVLLPCFIIVGFFIRTLLLEGAKFGLQQLVVAKISDVYNMSVWSLAGGQVLSNTGIGLGSVASLASYMPQSNNCLSDAFLVSVINLLTLLVFTSFNFCVLGFWATVITHRCCERNAEILLKLINLGKLPPDAKPPVNLLYNPTSIYNAWLSGLPQHIKSMVLREVTECNIETQFLKASEGPKFAFLSFVEAMSFLPPSVFWSFIFFLMLLAMGLSSAIGIMQGIITPLQDTFSFFRKHTKLLIVGVFLLMFVCGLFFTRPSGSYFIRLLSDYWIVFPIIVVVVFETMAVSWAYGARRFLADLTILLGHPISPIFGWLWPHLCPVVLLIIFVTMMVHLCMKPITYMSWDSSTSKEVLRPYPPWALLLMITLFAIVILPIPAYFVYCRIHRIPFRPKSGDGPMTASTSLPLSHQLTPSKEVQKEEILQVDETKYPSTCNVTS

SEQ ID NO: 82097 - protein, 659 aa, Homo sapiens
  Payload ID: 16342
  Gene Symbol: SLC6A16
  Gene Name: solute carrier family 6, member 16
  Uniprot ID: Q9GZN6
  ENSP ID: ENSP00000404022
MKTEAQPSTSLLANTSWTGTVISDSVPGSQTWEDKGSLTRSATSWTSEAQVSAARVAEAQARTSQPKQISVLEALTASALNQKPTHEKVQMTEKKESEVLLARPFWSSKTEYILAQVGFSMKPSCLWRFAYLWLNSGGCSFAAIYIFMLFLVGVPLLFLEMAAGQSMRQGGMGVWKIIAPWIGGVGYSSFMVCFILGLYFNVVNSWIIFYMSQSFQFPVPWEKCPLTMNSSGFDPECERTTPSIYFWYQQALKASDRIEDGGSPVYSLVLPFFLCWCLVGAFMINGLKSTGKVIYVLVLLPCFIIVGFFIRTLLLEGAKFGLQQLVVAKISDVYNMSVWSLAGGQVLSNTGIGLGSVASLASYMPQSNNCLSDAFLVSVINLLTLLVFTSFNFCVLGFWATVITHRCCERNAEILLKLINLGKLPPDAKPPVNLLYNPTSIYNAWLSGLPQHIKSMVLREVTECNIETQFLKASEGPKFAFLSFVEAMSFLPPSVFWSFIFFLMLLAMGLSSAIGIMQGIITPLQDTFSFFRKHTKLLIVGVFLLMFVCGLFFTRPSGSYFIRLLSDYWIVFPIIVVVVFETMAVSWAYGARRFLADLTILLGHPISPIFGWLWPHLCPVVLLIIFVTMMVHLCMKPITYMSWDSSTVSLPQDPEPLWE

SEQ ID NO: 82098 - protein, 163 aa, Homo sapiens
  Payload ID: 16342
  Gene Symbol: SLC6A16
  Gene Name: solute carrier family 6, member 16
  ENSP ID: ENSP00000469885
MVLREVTECNIETQFLKASEGPKFAFLSFVEAMSFLPPSVFWSFIFFLMLLAMGLSSAIGIMQGIITPLQDTFSFFRKHTKLLIVGVFLLMFVCGLFFTRPSGSYFIRLLSDYWIVFPIIVVVVFETMAVSWAYGARRFLADLTILLGHPISPIFGWLWPHLC

SEQ ID NO: 82099 - protein, 33 aa, Homo sapiens
  Payload ID: 16342
  Gene Symbol: SLC6A16
  Gene Name: solute carrier family 6, member 16
  ENSP ID: ENSP00000470623
LLVFTSFNFCVLGFWATVITHRCCESRDRVSPC

SEQ ID NO: 82100 - protein, 136 aa, Homo sapiens
  Payload ID: 16342
  Gene Symbol: SLC6A16
  Gene Name: solute carrier family 6, member 16
  ENSP ID: ENSP00000472191
  MOD_RES (1)..(1): Any amino acid
XGVWKIIAPWIGGVGYSSFMVCFILGLYFNVVNSWIIFYMSQSFQFPVPWEKCPLTMNSSGFDPECERTTPSIYFWYQQALKASDRIEDGGSPVYSLVLPFFLCWCLVGAFMINGLKSTGKQRQGFTVLARTVSIF

SEQ ID NO: 82101 - protein, 147 aa, Homo sapiens
  Payload ID: 16342
  Gene Symbol: SLC6A16
  Gene Name: solute carrier family 6, member 16
  ENSP ID: ENSP00000472752
  MOD_RES (1)..(1): Any amino acid
XYFNVVNSWIIFYMSQSFQFPVPWEKCPLTMNSSGFDPECERTTPSIYFWYQQALKASDRIEDGGSPVYSLVLPFFLCWCLVGAFMINGLKSTGKVIYVLVLLPCFIIVGFFIRTLLLEGAKFGLQQLVVAKQRQGFTVLARTVSIF

SEQ ID NO: 82102 - protein, 487 aa, Homo sapiens
  Payload ID: 16343
  Gene Symbol: SLC7A9
  Gene Name: solute carrier family 7 (amino acid transporter light chain, bo,+ system), member 9
  Uniprot ID: P82251
  ENSP ID: ENSP00000023064
MGDTGLRKRREDEKSIQSQEPKTTSLQKELGLISGISIIVGTIIGSGIFVSPKSVLSNTEAVGPCLIIWAACGVLATLGALCFAELGTMITKSGGEYPYLMEAYGPIPAYLFSWASLIVIKPTSFAIICLSFSEYVCAPFYVGCKPPQIVVKCLAAAAILFISTVNSLSVRLGSYVQNIFTAAKLVIVAIIIISGLVLLAQGNTKNFDNSFEGAQLSVGAISLAFYNGLWAYDGWNQLNYITEELRNPYRNLPLAIIIGIPLVTACYILMNVSYFTVMTATELLQSQAVAVTFGDRVLYPASWIVPLFVAFSTIGAANGTCFTAGRLIYVAGREGHMLKVLSYISVRRLTPAPAIIFYGIIATIYIIPGDINSLVNYFSFAAWLFYGLTILGLIVMRFTRKELERPIKVPVVIPVLMTLISVFLVLAPIISKPTWEYLYCVLFILSGLLFYFLFVHYKFGWAQKISKPITMHLQMLMEVVPPEEDPE

SEQ ID NO: 82103 - protein, 487 aa, Homo sapiens; identical to SEQ ID NO: 82102
  Payload ID: 16343
  Gene Symbol: SLC7A9
  Gene Name: solute carrier family 7 (amino acid transporter light chain, bo,+ system), member 9
  Uniprot ID: P82251
  ENSP ID: ENSP00000464822

SEQ ID NO: 82104 - protein, 39 aa, Homo sapiens
  Payload ID: 16343
  Gene Symbol: SLC7A9
  Gene Name: solute carrier family 7 (amino acid transporter light chain, bo,+ system), member 9
  ENSP ID: ENSP00000465563
MGDTGLRKRREDEKSIQSQEPKTTSLQKEVPCALRSLAQ

SEQ ID NO: 82105 - protein, 39 aa, Homo sapiens; identical to SEQ ID NO: 82104
  Payload ID: 16343
  Gene Symbol: SLC7A9
  Gene Name: solute carrier family 7 (amino acid transporter light chain, bo,+ system), member 9
  ENSP ID: ENSP00000468076

SEQ ID NO: 82106 - protein, 487 aa, Homo sapiens; identical to SEQ ID NO: 82102
  Payload ID: 16343
  Gene Symbol: SLC7A9
  Gene Name: solute carrier family 7 (amino acid transporter light chain, bo,+ system), member 9
  Uniprot ID: P82251
  ENSP ID: ENSP00000468439

SEQ ID NO: 82107 - protein, 507 aa, Homo sapiens
  Payload ID: 16344
  Gene Symbol: SLC7A5
  Gene Name: solute carrier family 7 (amino acid transporter light chain, L system), member 5
  Uniprot ID: Q01650
  ENSP ID: ENSP00000261622
MAGAGPKRRALAAPAAEEKEEAREKMLAAKSADGSAPAGEGEGVTLQRNITLLNGVAIIVGTIIGSGIFVTPTGVLKEAGSPGLALVVWAACGVFSIVGALCYAELGTTISKSGGDYAYMLEVYGSLPAFLKLWIELLIIRPSSQYIVALVFATYLLKPLFPTCPVPEEAAKLVACLCVLLLTAVNCYSVKAATRVQDAFAAAKLLALALIILLGFVQIGKGDVSNLDPNFSFEGTKLDVGNIVLALYSGLFAYGGWNYLNFVTEEMINPYRNLPLAIIISLPIVTLVYVLTNLAYFTTLSTEQMLSSEAVAVDFGNYHLGVMSWIIPVFVGLSCFGSVNGSLFTSSRLFFVGSREGHLPSILSMIHPQLLTPVPSLVFTCVMTLLYAFSKDIFSVINFFSFFNWLCVALAIIGMIWLRHRKPELERPIKVNLALPVFFILACLFLIAVSFWKTPVECGIGFTIILSGLPVYFFGVWWKNKPKWLLQGIFSTTVLCQKLMQVVPQET

SEQ ID NO: 82108 - protein, 241 aa, Homo sapiens
  Payload ID: 16344
  Gene Symbol: SLC7A5
  Gene Name: solute carrier family 7 (amino acid transporter light chain, L system), member 5
  ENSP ID: ENSP00000454323
MINPYRNLPLAIIISLPIVTLVYVLTNLAYFTTLSTEQMLSSEAVAVDFGNYHLGVMSWIIPVFVGLSCFGSVNGSLFTSSRLFFVGSREGHLPSILSMIHPQLLTPVPSLVFTCVMTLLYAFSKDIFSVINFFSFFNWLCVALAIIGMIWLRHRKPELERPIKVNLALPVFFILACLFLIAVSFWKTPVECGIGFTIILSGLPVYFFGVWWKNKPKWLLQGIFSTTVLCQKLMQVVPQET

SEQ ID NO: 82109 - protein, 535 aa, Homo sapiens
  Payload ID: 16345
  Gene Symbol: SLC7A8
  Gene Name: solute carrier family 7 (amino acid transporter light chain, L system), member 8
  Uniprot ID: Q9UHI5
  ENSP ID: ENSP00000320378
MEEGARHRNNTEKKHPGGGESDASPEAGSGGGGVALKKEIGLVSACGIIVGNIIGSGIFVSPKGVLENAGSVGLALIVWIVTGFITVVGALCYAELGVTIPKSGGDYSYVKDIFGGLAGFLRLWIAVLVIYPTNQAVIALTFSNYVLQPLFPTCFPPESGLRLLAAICLLLLTWVNCSSVRWATRVQDIFTAGKLLALALIIIMGIVQICKGEYFWLEPKNAFENFQEPDIGLVALAFLQGSFAYGGWNFLNYVTEELVDPYKNLPRAIFISIPLVTFVYVFANVAYVTAMSPQELLASNAVAVTFGEKLLGVMAWIMPISVALSTFGGVNGSLFTSSRLFFAGAREGHLPSVLAMIHVKRCTPIPALLFTCISTLLMLVTSDMYTLINYVGFINYLFYGVTVAGQIVLRWKKPDIPRPIKINLLFPIIYLLFWAFLLVFSLWSEPVVCGIGLAIMLTGVPVYFLGVYWQHKPKCFSDFIELLTLVSQKMCVVVYPEVERGSGTEEANEDMEEQQQPMYQPTPTKDKDVAGQPQP

SEQ ID NO: 82110 - protein, 230 aa, Homo sapiens
  Payload ID: 16345
  Gene Symbol: SLC7A8
  Gene Name: solute carrier family 7 (amino acid transporter light chain, L system), member 8
  ENSP ID: ENSP00000343949
  MOD_RES (1)..(1): Any amino acid
XCLQEHSQPSQLLCTLLLCWCVLGRERPFRKAQSTSSPLEGVPRFLKRLLLTWVNCSSVRWATRVQDIFTAGKLLALALIIIMGIVQICKGEYFWLEPKNAFENFQEPDIGLVALAFLQGSFAYGGWNFLNYVTEELVDPYKLFFAGAREGHLPSVLAMIHVKRCTPIPALLFTCISTLLMLVTSDMYTLINYVGFINYLFYGVTVAGQIVLRWKKPDIPRPIKPLPYQG

SEQ ID NO: 82111 - protein, 332 aa, Homo sapiens
  Payload ID: 16345
  Gene Symbol: SLC7A8
  Gene Name: solute carrier family 7 (amino acid transporter light chain, L system), member 8
  Uniprot ID: Q9UHI5
  ENSP ID: ENSP00000391577
MGIVQICKGEYFWLEPKNAFENFQEPDIGLVALAFLQGSFAYGGWNFLNYVTEELVDPYKNLPRAIFISIPLVTFVYVFANVAYVTAMSPQELLASNAVAVTFGEKLLGVMAWIMPISVALSTFGGVNGSLFTSSRLFFAGAREGHLPSVLAMIHVKRCTPIPALLFTCISTLLMLVTSDMYTLINYVGFINYLFYGVTVAGQIVLRWKKPDIPRPIKINLLFPIIYLLFWAFLLVFSLWSEPVVCGIGLAIMLTGVPVYFLGVYWQHKPKCFSDFIELLTLVSQKMCVVVYPEVERGSGTEEANEDMEEQQQPMYQPTPTKDKDVAGQPQP

SEQ ID NO: 82112 - protein, 311 aa, Homo sapiens
  Payload ID: 16345
  Gene Symbol: SLC7A8
  Gene Name: solute carrier family 7 (amino acid transporter light chain, L system), member 8
  Uniprot ID: Q9UHI5
  ENSP ID: ENSP00000416398
MGQLFQCAVGHPGSRHLHSWEAPGLGPDYHHGDCTDMQRNLPRAIFISIPLVTFVYVFANVAYVTAMSPQELLASNAVAVTFGEKLLGVMAWIMPISVALSTFGGVNGSLFTSSRLFFAGAREGHLPSVLAMIHVKRCTPIPALLFTCISTLLMLVTSDMYTLINYVGFINYLFYGVTVAGQIVLRWKKPDIPRPIKINLLFPIIYLLFWAFLLVFSLWSEPVVCGIGLAIMLTGVPVYFLGVYWQHKPKCFSDFIELLTLVSQKMCVVVYPEVERGSGTEEANEDMEEQQQPMYQPTPTKDKDVAGQPQP

SEQ ID NO: 82113 - protein, 430 aa, Homo sapiens
  Payload ID: 16345
  Gene Symbol: SLC7A8
  Gene Name: solute carrier family 7 (amino acid transporter light chain, L system), member 8
  Uniprot ID: Q9UHI5
  ENSP ID: ENSP00000434345
MGQYGQELSWKCLVKAVCLQEHSQPSQLLCTLLLCWCVLGRERPFRKAQSTSSPLEGVPRFLKRLLLTWVNCSSVRWATRVQDIFTAGKLLALALIIIMGIVQICKGEYFWLEPKNAFENFQEPDIGLVALAFLQGSFAYGGWNFLNYVTEELVDPYKNLPRAIFISIPLVTFVYVFANVAYVTAMSPQELLASNAVAVTFGEKLLGVMAWIMPISVALSTFGGVNGSLFTSSRLFFAGAREGHLPSVLAMIHVKRCTPIPALLFTCISTLLMLVTSDMYTLINYVGFINYLFYGVTVAGQIVLRWKKPDIPRPIKINLLFPIIYLLFWAFLLVFSLWSEPVVCGIGLAIMLTGVPVYFLGVYWQHKPKCFSDFIELLTLVSQKMCVVVYPEVERGSGTEEANEDMEEQQQPMYQPTPTKDKDVAGQPQP

SEQ ID NO: 82114 - protein, 94 aa, Homo sapiens
  Payload ID: 16345
  Gene Symbol: SLC7A8
  Gene Name: solute carrier family 7 (amino acid transporter light chain, L system), member 8
  ENSP ID: ENSP00000434352
MEEGARHRNNTEKKHPGGGESDASPEAGSGGGGVALKKEIGLVSACGIIVGNIIGSGIFVSPKGVLENAGSVGLALIVWIVTGFITVVGALCYA

SEQ ID NO: 82115 - protein, 289 aa, Homo sapiens
  Payload ID: 16345
  Gene Symbol: SLC7A8
  Gene Name: solute carrier family 7 (amino acid transporter light chain, L system), member 8
  ENSP ID: ENSP00000435114
MEEGARHRNNTEKKHPGGGESDASPEAGSGGGGVALKKEIGLVSACGIIVGNIIGSGIFVSPKGVLENAGSVGLALIVWIVTGFITVVGALCYAELGVTIPKSGGDYSYVKDIFGGLAGFLRLWIAVLVIYPTNQAVIALTFSNYVLQPLFPTCFPPESGLRLLAAICLLLLTWVNCSSVRWATRVQDIFTAGKLLALALIIIMGIVQICKGEYFWLEPKNAFENFQEPDIGLVALAFLQGSFAYGGWNFLNYVTEELVDPYKAANPGEPEDVCGRVPRGGAGLRDRGG

SEQ ID NO: 82116 - protein, 49 aa, Homo sapiens
  Payload ID: 16345
  Gene Symbol: SLC7A8
  Gene Name: solute carrier family 7 (amino acid transporter light chain, L system), member 8
  ENSP ID: ENSP00000435865
MGIVQICKGTFPEPSSSPSHWSHLCMSLPMSLMSLQCPPRSCWHPTPSL

SEQ ID NO: 82117 - protein, 78 aa, Homo sapiens
  Payload ID: 16345
  Gene Symbol: SLC7A8
  Gene Name: solute carrier family 7 (amino acid transporter light chain, L system), member 8
  ENSP ID: ENSP00000436665
MEEGARHRNNTEKKHPGGGESDASPEAGSGGGGVALKKEIGLVSACGIIVGNIIGSGIFVSPKGVLENAGSVGLALIV

SEQ ID NO: 82118 - protein, 303 aa, Homo sapiens
  Payload ID: 16345
  Gene Symbol: SLC7A8
  Gene Name: solute carrier family 7 (amino acid transporter light chain, L system), member 8
  ENSP ID: ENSP00000477662
MGIVQICKGEYFWLEPKNAFENFQEPDIGLVALAFLQGSFAYGGWNFLNYVTEELVDPYKNLPRAIFISIPLVTFVYVFANVAYVTAMSPQELLASNAVAVTFGEKLLGVMAWIMPISVALSTFGGVNGSLFTSSRLFFAGAREGHLPSVLAMIHVKRCTPIPALLFTCISTLLMLVTSDMYTLINYVGFINYLFYGVTVAGQIVLRWKKPDIPRPIKINLLFPIIYLLFWAFLLVFSLWSEPVVCGIGLAIMLTGVPVYFLGVYWQHKPKCFSDFIELLTLVSQKMCVVVYPEVEGLRDRGG

SEQ ID NO: 82119 - protein, 210 aa, Homo sapiens
  Payload ID: 16345
  Gene Symbol: SLC7A8
  Gene Name: solute carrier family 7 (amino acid transporter light chain, L system), member 8
  ENSP ID: ENSP00000479318
MGIVQICKGEYFWLEPKNAFENFQEPDIGLVALAFLQGSFAYGGWNFLNYVTEELVDPYKNLPRAIFISIPLVTFVYVFANVAYVTAMSPQELLASNAVAVTFGEKLLGVMAWIMPISVALSTFGGVNGSLHLLSAVLRWSPRGPPSQCVGHDPREALHPNPSPALHMHLHPADAGHQRHVHTHQLCGLHQLPLLWGHGCWTDSPSLEEA

SEQ ID NO: 82120 - protein, 210 aa, Homo sapiens
  Payload ID: 16345
  Gene Symbol: SLC7A8
  Gene Name: solute carrier family 7 (amino acid transporter light chain, L system), member 8
  ENSP ID: ENSP00000480181
MGIVQICKGEYFWLEPKNAFENFQEPDIGLVALAFLQGSFAYGGWNFLNYVTEELVDPYKNLPRAIFISIPLVTFVYVFANVAYVTAMSPQELLASNAVAVTFGEKLLGVMAWIMPISVALSTFGGVNGSLFLLSAVLRWSPRGPPSQCVGHDPREALHPNPSPALHMHLHPADAGHQRHVHTHQLCGLHQLPLLWGHGCWTDSPSLEEA

SEQ ID NO: 82121 - protein, 515 aa, Homo sapiens
  Payload ID: 16346
  Gene Symbol: SLC7A6
  Gene Name: solute carrier family 7 (amino acid transporter light chain, y+L system), member 6
  Uniprot ID: Q92536
  ENSP ID: ENSP00000219343
MEAREPGRPTPTYHLVPNTSQSQVEEDVSSPPQRSSETMQLKKEISLLNGVSLVVGNMIGSGIFVSPKGVLVHTASYGMSLIVWAIGGLFSVVGALCYAELGTTITKSGASYAYILEAFGGFIAFIRLWVSLLVVEPTGQAIIAITFANYIIQPSFPSCDPPYLACRLLAAACICLLTFVNCAYVKWGTRVQDTFTYAKVVALIAIIVMGLVKLCQGHSEHFQDAFEGSSWDMGNLSLALYSALFSYSGWDTLNFVTEEIKNPERNLPLAIGISMPIVTLIYILTNVAYYTVLNISDVLSSDAVAVTFADQTFGMFSWTIPIAVALSCFGGLNASIFASSRLFFVGSREGHLPDLLSMIHIERFTPIPALLFNCTMALIYLIVEDVFQLINYFSFSYWFFVGLSVVGQLYLRWKEPKRPRPLKLSVFFPIVFCICSVFLVIVPLFTDTINSLIGIGIALSGVPFYFMGVYLPESRRPLFIRNVLAAITRGTQQLCFCVLTELDVAEEKKDERKTD

SEQ ID NO: 82122 - protein, 229 aa, Homo sapiens
  Payload ID: 16346
  Gene Symbol: SLC7A6
  Gene Name: solute carrier family 7 (amino acid transporter light chain, y+L system), member 6
  ENSP ID: ENSP00000368448
MEAREPGRPTPTYHLVPNTSQSQVEEDVSSPPQRSSETMQLKKEISLLNGVSLVVGNMIGSGIFVSPKGVLVHTASYGMSLIVWAIGGLFSVVGALCYAELGTTITKSGASYAYILEAFGGFIAFIRLWVSLLVVEPTGQAIIAITFANYIIQPSFPSCDPPYLACRLLAAACICLLTFVNCAYVKWGTRVQDTFTYAKVVALIAIIVMGLVKLCQEICPWPLGFLCQL

SEQ ID NO: 82123 - protein, 214 aa, Homo sapiens
  Payload ID: 16346
  Gene Symbol: SLC7A6
  Gene Name: solute carrier family 7 (amino acid transporter light chain, y+L system), member 6
  ENSP ID: ENSP00000454824
MEAREPGRPTPTYHLVPNTSQSQVEEDVSSPPQRSSETMQLKKEISLLNGVSLVVGNMIGSGIFVSPKGVLVHTASYGMSLIVWAIGGLFSVVGALCYAELGTTITKSGASYAYILEAFGGFIAFIRLWVSLLVVEPTGQAIIAITFANYIIQPSFPSCDPPYLACRLLAAACICNLPSAFKFTSLTDEFLLAMKRSCVSCGLEPWESGWERVC

SEQ ID NO: 82124 - protein, 515 aa, Homo sapiens; identical to SEQ ID NO: 82121
  Payload ID: 16346
  Gene Symbol: SLC7A6
  Gene Name: solute carrier family 7 (amino acid transporter light chain, y+L system), member 6
  Uniprot ID: Q92536
  ENSP ID: ENSP00000455064

SEQ ID NO: 82125 - protein, 28 aa, Homo sapiens
  Payload ID: 16346
  Gene Symbol: SLC7A6
  Gene Name: solute carrier family 7 (amino acid transporter light chain, y+L system), member 6
  ENSP ID: ENSP00000455357
MEAREPGRPTPTYHLVPNTSQSQVEEDV

SEQ ID NO: 82126 - protein, 91 aa, Homo sapiens
  Payload ID: 16346
  Gene Symbol: SLC7A6
  Gene Name: solute carrier family 7 (amino acid transporter light chain, y+L system), member 6
  ENSP ID: ENSP00000455487
MEAREPGRPTPTYHLVPNTSQSQVEEDVSSPPQRSSETMQLKKEISLLNGVSLVVGNMIGSGIFVSPKGVLVHTASYGMSLIVWAIGGLFS

SEQ ID NO: 82127 - protein, 127 aa, Homo sapiens
  Payload ID: 16346
  Gene Symbol: SLC7A6
  Gene Name: solute carrier family 7 (amino acid transporter light chain, y+L system), member 6
  ENSP ID: ENSP00000456474
  MOD_RES (1)..(1): Any amino acid
XNGVSLVVGNMIGSGIFVSPKGVLVHTASYGMSLIVWAIGGLFSVVGALCYAELGTTITKSGASYAYILEAFGGFIAFIRLWVSLLVVEPTGQAIIAITFANYIIQPSFPSCDPPYLACRLLAAACI

SEQ ID NO: 82128 - protein, 74 aa, Homo sapiens
  Payload ID: 16346
  Gene Symbol: SLC7A6
  Gene Name: solute carrier family 7 (amino acid transporter light chain, y+L system), member 6
  ENSP ID: ENSP00000456629
MEAREPGRPTPTYHLVPNTSQSQVEEDVSSPPQRSSETMQLKKEISLLNGVSLVVGNMIGSGIFVSPKGVLVHT

SEQ ID NO: 82129 - protein, 24 aa, Homo sapiens
  Payload ID: 16346
  Gene Symbol: SLC7A6
  Gene Name: solute carrier family 7 (amino acid transporter light chain, y+L system), member 6
  ENSP ID: ENSP00000456896
MEAREPGRPTPTYHLVPNTSQSQV

SEQ ID NO: 82130 - protein, 123 aa, Homo sapiens
  Payload ID: 16346
  Gene Symbol: SLC7A6
  Gene Name: solute carrier family 7 (amino acid transporter light chain, y+L system), member 6
  ENSP ID: ENSP00000457550
MEAREPGRPTPTYHLVPNTSQSQVEEDVSSPPQRSSETMQLKKEISLLNGVSLVVGNMIGSGIFVSPKGVLVHTASYGMSLIVWAIGGLFSVVGALCYAELGTTITKSGASYAYILEAFGGFI

SEQ ID NO: 82131 - protein, 98 aa, Homo sapiens
  Payload ID: 16346
  Gene Symbol: SLC7A6
  Gene Name: solute carrier family 7 (amino acid transporter light chain, y+L system), member 6
  ENSP ID: ENSP00000457758
MEAREPGRPTPTYHLVPNTSQSQVEEDVSSPPQRSSETMQLKKEISLLNGLLSPPVRPSSPSPLPTTSSSRPSPAVIPHTWPAVSWLLLAYVTCHLHS

SEQ ID NO: 82132 - protein, 50 aa, Homo sapiens
  Payload ID: 16346
  Gene Symbol: SLC7A6
  Gene Name: solute carrier family 7 (amino acid transporter light chain, y+L system), member 6
  ENSP ID: ENSP00000463394
VNCAYVKWGTRVQDTFTYAKVVALIAIIVMGLVKLCQEICPWPLGFLCQL

SEQ ID NO: 82133 - protein, 229 aa, Homo sapiens; identical to SEQ ID NO: 82122
  Payload ID: 16346
  Gene Symbol: SLC7A6
  Gene Name: solute carrier family 7 (amino acid transporter light chain, y+L system), member 6
  ENSP ID: ENSP00000484012

SEQ ID NO: 82134 - protein, 511 aa, Homo sapiens
  Payload ID: 16347
  Gene Symbol: SLC7A7
  Gene Name: solute carrier family 7 (amino acid transporter light chain, y+L system), member 7
  Uniprot ID: Q9UM01
  ENSP ID: ENSP00000285850
MVDSTEYEVASQPEVETSPLGDGASPGPEQVKLKKEISLLNGVCLIVGNMIGSGIFVSPKGVLIYSASFGLSLVIWAVGGLFSVFGALCYAELGTTIKKSGASYAYILEAFGGFLAFIRLWTSLLIIEPTSQAIIAITFANYMVQPLFPSCFAPYAASRLLAAACICLLTFINCAYVKWGTLVQDIFTYAKVLALIAVIVAGIVRLGQGASTHFENSFEGSSFAVGDIALALYSALFSYSGWDTLNYVTEEIKNPERNLPLSIGISMPIVTIIYILTNVAYYTVLDMRDILASDAVAVTFADQIFGIFNWIIPLSVALSCFGGLNASIVAASRLFFVGSREGHLPDAICMIHVERFTPVPSLLFNGIMALIYLCVEDIFQLINYYSFSYWFFVGLSIVGQLYLRWKEPDRPRPLKLSVFFPIVFCLCTIFLVAVPLYSDTINSLIGIAIALSGLPFYFLIIRVPEHKRPLYLRRIVGSATRYLQVLCMSVAAEMDLEDGGEMPKQRDPKSN

SEQ ID NO: 82135 - protein, 511 aa, Homo sapiens; identical to SEQ ID NO: 82134
  Payload ID: 16347
  Gene Symbol: SLC7A7
  Gene Name: solute carrier family 7 (amino acid transporter light chain, y+L system), member 7
  Uniprot ID: Q9UM01
  ENSP ID: ENSP00000380662

SEQ ID NO: 82136 - protein, 511 aa, Homo sapiens; identical to SEQ ID NO: 82134
  Payload ID: 16347
  Gene Symbol: SLC7A7
  Gene Name: solute carrier family 7 (amino acid transporter light chain, y+L system), member 7
  Uniprot ID: Q9UM01
  ENSP ID: ENSP00000380663

SEQ ID NO: 82137 - protein, 511 aa, Homo sapiens; identical to SEQ ID NO: 82134
  Payload ID: 16347
  Gene Symbol: SLC7A7
  Gene Name: solute carrier family 7 (amino acid transporter light chain, y+L system), member 7
  Uniprot ID: Q9UM01
  ENSP ID: ENSP00000380666

SEQ ID NO: 82138 - protein, 141 aa, Homo sapiens
  Payload ID: 16347
  Gene Symbol: SLC7A7
  Gene Name: solute carrier family 7 (amino acid transporter light chain, y+L system), member 7
  ENSP ID: ENSP00000421554
MVDSTEYEVASQPEVETSPLGDGASPGPEQVKLKKEISLLNGVCLIVGNMIGSGIFVSPKGVLIYSASFGLSLVIWAVGGLFSVFGALCYAELGTTIKKSGASYAYILEAFGGFLAFIRLWTSLLIIEPTSQAIIAITFAN

SEQ ID NO: 82139 - protein, 116 aa, Homo sapiens
  Payload ID: 16347
  Gene Symbol: SLC7A7
  Gene Name: solute carrier family 7 (amino acid transporter light chain, y+L system), member 7
  ENSP ID: ENSP00000450495
MVDSTEYEVASQPEVETSPLGDGASPGPEQVKLKKEISLLNGVCLIVGNMIGSGIFVSPKGVLIYSASFGLSLVIWAVGGLFSVFGALCYAELGTTIKKSGASYAYILEAFGGFLA

SEQ ID NO: 82140 - protein, 164 aa, Homo sapiens
  Payload ID: 16347
  Gene Symbol: SLC7A7
  Gene Name: solute carrier family 7 (amino acid transporter light chain, y+L system), member 7
  ENSP ID: ENSP00000450671
MVDSTEYEVASQPEVETSPLGDGASPGPEQVKLKKEISLLNGVCLIVGNMIGSGIFVSPKGVLIYSASFGLSLVIWAVGGLFSVFGALCYAELGTTIKKSGASYAYILEAFGGFLAFIRLWTSLLIIEPTSQAIIAITFANYMVQPLFPSCFAPYAASRLLAAA

SEQ ID NO: 82141 - protein, 310 aa, Homo sapiens
  Payload ID: 16347
  Gene Symbol: SLC7A7
  Gene Name: solute carrier family 7 (amino acid transporter light chain, y+L system), member 7
  ENSP ID: ENSP00000450715
MVDSTEYEVASQPEVETSPLGDGASPGPEQVKLKKEISLLNGVCLIVGNMIGSGIFVSPKGVLIYSASFGLSLVIWAVGGLFSVFGALCYAELGTTIKKSGASYAYILEAFGGFLAFIRLWTSLLIIEPTSQAIIAITFANYMVQPLFPSCFAPYAASRLLAAACICLLTFINCAYVKWGTLVQDIFTYAKVLALIAVIVAGIVRLGQGASTHFENSFEGSSFAVGDIALALYSALFSYSGWDTLNYVTEEIKNPERNLPLSIGISMPIVTIIYILTNVAYYTVLDMRDILASDAVAVAFLCGLKRRPSP

SEQ ID NO: 82142 - protein, 106 aa, Homo sapiens
  Payload ID: 16347
  Gene Symbol: SLC7A7
  Gene Name: solute carrier family 7 (amino acid transporter light chain, y+L system), member 7
  ENSP ID: ENSP00000450729
MVDSTEYEVASQPEVETSPLGDGASPGPEQVKLKKEISLLNGVCLIVGNMIGSGIFVSPKGVLIYSASFGLSLVIWAVGGLFSVFGALCYAELGTTIKKSGASYAY

SEQ ID NO: 82143 - protein, 168 aa, Homo sapiens
  Payload ID: 16347
  Gene Symbol: SLC7A7
  Gene Name: solute carrier family 7 (amino acid transporter light chain, y+L system), member 7
  ENSP ID: ENSP00000451026
  MOD_RES (1)..(1): Any amino acid
XMRDILASDAVAVTFADQIFGIFNWIIPLSVALSCFGGLNASIVAASRLFFVGSREGHLPDAICMIHVERFTPVPSLLFNLSVFFPIVFCLCTIFLVAVPLYSDTINSLIGIAIALSGLPFYFLIIRVPEHKRPLYLRRIVGSATRYLQVLCMSVAAEMDLEDGGEMP

SEQ ID NO: 82144 - protein, 44 aa, Homo sapiens
  Payload ID: 16347
  Gene Symbol: SLC7A7
  Gene Name: solute carrier family 7 (amino acid transporter light chain, y+L system), member 7
  ENSP ID: ENSP00000451063
MVDSTEYEVASQPEVETSPLGDGASPGPEQVKLKKEISLLNGVC

SEQ ID NO: 82145 - protein, 511 aa, Homo sapiens; identical to SEQ ID NO: 82134
  Payload ID: 16347
  Gene Symbol: SLC7A7
  Gene Name: solute carrier family 7 (amino acid transporter light chain, y+L system), member 7
  Uniprot ID: Q9UM01
  ENSP ID: ENSP00000451881

SEQ ID NO: 82146 - protein, 122 aa, Homo sapiens
  Payload ID: 16347
  Gene Symbol: SLC7A7
  Gene Name: solute carrier family 7 (amino acid transporter light chain, y+L system), member 7
  ENSP ID: ENSP00000451983
MVDSTEYEVASQPEVETSPLGDGASPGPEQVKLKKEISLLNGVCLIVGNMIGSGIFVSPKGVLIYSASFGLSLVIWAVGGLFSVFGALCYAELGTTIKKSGASYAYILEAFGGFLAFIRLWT

SEQ ID NO: 82147 - protein, 245 aa, Homo sapiens
  Payload ID: 16347
  Gene Symbol: SLC7A7
  Gene Name: solute carrier family 7 (amino acid transporter light chain, y+L system), member 7
  ENSP ID: ENSP00000452083
MPIVTIIYILTNVAYYTVLDMRDILASDAVAVTFADQIFGIFNWIIPLSVALSCFGGLNASIVAASRLFFVGSREGHLPDAICMIHVERFTPVPSLLFNGIMALIYLCVEDIFQLINYYSFSYWFFVGLSIVGQLYLRWKEPDRPRPLKLSVFFPIVFCLCTIFLVAVPLYSDTINSLIGIAIALSGLPFYFLIIRVPEHKRPLYLRRIVGSATRYLQVLCMSVAAEMDLEDGGEMPKQRDPKSN

SEQ ID NO: 82148 - protein, 30 aa, Homo sapiens
  Payload ID: 16347
  Gene Symbol: SLC7A7
  Gene Name: solute carrier family 7 (amino acid transporter light chain, y+L system), member 7
  ENSP ID: ENSP00000452256
MVDSTEYEVASQPEVETSPLGDGASPGPEQ

SEQ ID NO: 82149 - protein, 114 aa, Homo sapiens
  Payload ID: 16347
  Gene Symbol: SLC7A7
  Gene Name: solute carrier family 7 (amino acid transporter light chain, y+L system), member 7
  ENSP ID: ENSP00000452551
MVDSTEYEVASQPEVETSPLGDGASPGPEQVKLKKEISLLNGVCLIVGNMIGSGIFVSPKGVLIYSASFGLSLVIWAVGGLFSVFGALCYAELGTTIKKSGASYAYILEAFGGF

SEQ ID NO: 82150 - protein, 501 aa, Homo sapiens
  Payload ID: 16348
  Gene Symbol: SLC7A11
  Gene Name: solute carrier family 7 (anionic amino acid transporter light chain, xc- system), member 11
  Uniprot ID: Q9UPY5
  ENSP ID: ENSP00000280612
MVRKPVVSTISKGGYLQGNVNGRLPSLGNKEPPGQEKVQLKRKVTLLRGVSIIIGTIIGAGIFISPKGVLQNTGSVGMSLTIWTVCGVLSLFGALSYAELGTTIKKSGGHYTYILEVFGPLPAFVRVWVELLIIRPAATAVISLAFGRYILEPFFIQCEIPELAIKLITAVGITVVMVLNSMSVSWSARIQIFLTFCKLTAILIIIVPGVMQLIKGQTQNFKDAFSGRDSSITRLPLAFYYGMYAYAGWFYLNFVTEEVENPEKTIPLAICISMAIVTIGYVLTNVAYFTTINAEELLLSNAVAVTFSERLLGNFSLAVPIFVALSCFGSMNGGVFAVSRLFYVASREGHLPEILSMIHVRKHTPLPAVIVLHPLTMIMLFSGDLDSLLNFLSFARWLFIGLAVAGLIYLRYKCPDMHRPFKVPLFIPALFSFTCLFMVALSLYSDPFSTGIGFVITLTGVPAYYLFIIWDKKPRWFRIMSEKITRTLQIILEVVPEEDKL

SEQ ID NO: 82151 - protein, 75 aa, Homo sapiens
  Payload ID: 16348
  Gene Symbol: SLC7A11
  Gene Name: solute carrier family 7 (anionic amino acid transporter light chain, xc- system), member 11
  ENSP ID: ENSP00000424046
AILIIIVPGVMQLIKGQTQNFKDAFSGRDSSITRLPLAFYYGMYAYAGWFYLNFVTEEVENPEKPFLSGYWEISH

SEQ ID NO: 82152 - protein, 470 aa, Homo sapiens
  Payload ID: 16349
  Gene Symbol: SLC7A13
  Gene Name: solute carrier family 7 (anionic amino acid transporter), member 13
  Uniprot ID: Q8TCU3
  ENSP ID: ENSP00000297524
MDRGEKIQLKRVFGYWWGTSFLLINIIGAGIFVSPKGVLAYSCMNVGVSLCVWAGCAILAMTSTLCSAEISISFPCSGAQYYFLKRYFGSTVAFLNLWTSLFLGSGVVAGQALLLAEYSIQPFFPSCSVPKLPKKCLALAMLWIVGILTSRGVKEVTWLQIASSVLKVSILSFISLTGVVFLIRGKKENVERFQNAFDAELPDISHLIQAIFQGYFAYSGGACFTLIAGELKKPRTTIPKCIFTALPLVTVVYLLVNISYLTVLTPREILSSDAVAITWADRAFPSLAWIMPFAISTSLFSNLLISIFKSSRPIYLASQEGQLPLLFNTLNSHSSPFTAVLLLVTLGSLAIILTSLIDLINYIFFTGSLWSILLMIGILRRRYQEPNLSIPYKVFLSFPLATIVIDVGLVVIPLVKSPNVHYVYVLLLVLSGLLFYIPLIHFKIRLAWFEKMTCYLQLLFNICLPDVSEE

SEQ ID NO: 82153 - protein, 433 aa, Homo sapiens
  Payload ID: 16349
  Gene Symbol: SLC7A13
  Gene Name: solute carrier family 7 (anionic amino acid transporter), member 13
  Uniprot ID: Q8TCU3
  ENSP ID: ENSP00000410982
MDRGEKIQLKRVFGYWWGTSFLLINIIGAGIFVSPKGVLAYSCMNVGVSLCVWAGCAILAMTSTLCSAEISISFPCSGAQYYFLKRYFGSTVAFLNLWTSLFLGSGVVAGQALLLAEYSIQPFFPSCSVPKLPKKCLALAMLWIVGILTSRGVKEVTWLQIASSVLKVSILSFISLTGVVFLIRGKKENVERFQNAFDAELPDISHLIQAIFQGYFAYSGELKKPRTTIPKCIFTALPLVTVVYLLVNISYLTVLTPREILSSDAVAITWADRAFPSLAWIMPFAISTSLFSNLLISIFKSSRPIYLASQEGQLPLLFNTLNSHSSPFTAVLLLVTLGSLAIILTSLIDLINYIFFTGSLWSILLMIGILRRRYQEPNLSIPYKSLILVVQAGEAGVQWHDLGLLQPLLPGFKRFSCLSLPSSWDYRCFCHFH

SEQ ID NO: 82154 - protein, 629 aa, Homo sapiens
  Payload ID: 16350
  Gene Symbol: SLC7A1
  Gene Name: solute carrier family 7 (cationic amino acid transporter, y+ system), member 1
  Uniprot ID: P30825
  ENSP ID: ENSP00000370128
MGCKVLLNIGQQMLRRKVVDCSREETRLSRCLNTFDLVALGVGSTLGAGVYVLAGAVARENAGPAIVISFLIAALASVLAGLCYGEFGARVPKTGSAYLYSYVTVGELWAFITGWNLILSYIIGTSSVARAWSATFDELIGRPIGEFSRTHMTLNAPGVLAENPDIFAVIIILILTGLLTLGVKESAMVNKIFTCINVLVLGFIMVSGFVKGSVKNWQLTEEDFGNTSGRLCLNNDTKEGKPGVGGFMPFGFSGVLSGAATCFYAFVGFDCIATTGEEVKNPQKAIPVGIVASLLICFIAYFGVSAALTLMMPYFCLDNNSPLPDAFKHVGWEGAKYAVAVGSLCALSASLLGSMFPMPRVIYAMAEDGLLFKFLANVNDRTKTPIIATLASGAVAAVMAFLFDLKDLVDLMSIGTLLAYSLVAACVLVLRYQPEQPNLVYQMASTSDELDPADQNELASTNDSQLGFLPEAEMFSLKTILSPKNMEPSKISGLIVNISTSLIAVLIITFCIVTVLGREALTKGALWAVFLLAGSALLCAVVTGVIWRQPESKTKLSFKVPFLPVLPILSIFVNVYLMMQLDQGTWVRFAVWMLIGFIIYFGYGLWHSEEASLDADQARTPDGNLDQCK

SEQ ID NO: 82155 - protein, 121 aa, Homo sapiens
  Payload ID: 16350
  Gene Symbol: SLC7A1
  Gene Name: solute carrier family 7 (cationic amino acid transporter, y+ system), member 1
  ENSP ID: ENSP00000390092
MGCKVLLNIGQQMLRRKVVDCSREETRLSRCLNTFDLVALGVGSTLGAGVYVLAGAVARENAGPAIVISFLIAALASVLAGLCYGEFGARVPKTGSAYLYSYVTVGELWAFITGWNLILSY

SEQ ID NO: 82156 - protein, 698 aa, Homo sapiens
  Payload ID: 16351
  Gene Symbol: SLC7A2
  Gene Name: solute carrier family 7 (cationic amino acid transporter, y+ system), member 2
  Uniprot ID: P52569
  ENSP ID: ENSP00000004531
MKIETSGYNSDKLICRGFIGTPAPPVCDSKFLLSPSSDVRMIPCRAALTFARCLIRRKIVTLDSLEDTKLCRCLSTMDLIALGVGSTLGAGVYVLAGEVAKADSGPSIVVSFLIAALASVMAGLCYAEFGARVPKTGSAYLYTYVTVGELWAFITGWNLILSYVIGTSSVARAWSGTFDELLSKQIGQFLRTYFRMNYTGLAEYPDFFAVCLILLLAGLLSFGVKESAWVNKVFTAVNILVLLFVMVAGFVKGNVANWKISEEFLKNISASAREPPSENGTSIYGAGGFMPYGFTGTLAGAATCFYAFVGFDCIATTGEEVRNPQKAIPIGIVTSLLVCFMAYFGVSAALTLMMPYYLLDEKSPLPVAFEYVGWGPAKYVVAAGSLCALSTSLLGSIFPMPRVIYAMAEDGLLFKCLAQINSKTKTPIIATLSSGAVAALMAFLFDLKALVDMMSIGTLMAYSLVAACVLILRYQPGLSYDQPKCSPEKDGLGSSPRVTSKSESQVTMLQRQGFSMRTLFCPSLLPTQQSASLVSFLVGFLAFLVLGLSVLTTYGVHAITRLEAWSLALLALFLVLFVAIVLTIWRQPQNQQKVAFMVPFLPFLPAFSILVNIYLMVQLSADTWVRFSIWMAIGFLIYFSYGIRHSLEGHLRDENNEEDAYPDNVHAAAEEKSAIQANDHHPRNLSSPFIFHEKTSEF

SEQ ID NO: 82157 - protein, 697 aa, Homo sapiens
  Payload ID: 16351
  Gene Symbol: SLC7A2
  Gene Name: solute carrier family 7 (cationic amino acid transporter, y+ system), member 2
  Uniprot ID: P52569
  ENSP ID: ENSP00000381164
MKIETSGYNSDKLICRGFIGTPAPPVCDSKFLLSPSSDVRMIPCRAALTFARCLIRRKIVTLDSLEDTKLCRCLSTMDLIALGVGSTLGAGVYVLAGEVAKADSGPSIVVSFLIAALASVMAGLCYAEFGARVPKTGSAYLYTYVTVGELWAFITGWNLILSYVIGTSSVARAWSGTFDELLSKQIGQFLRTYFRMNYTGLAEYPDFFAVCLILLLAGLLSFGVKESAWVNKVFTAVNILVLLFVMVAGFVKGNVANWKISEEFLKNISASAREPPSENGTSIYGAGGFMPYGFTGTLAGAATCFYAFVGFDCIATTGEEVRNPQKAIPIGIVTSLLVCFMAYFGVSAALTLMMPYYLLDEKSPLPVAFEYVGWGPAKYVVAAGSLCALSTSLLGSMFPLPRILFAMARDGLLFRFLARVSKRQSPVAATLTAGVISALMAFLFDLKALVDMMSIGTLMAYSLVAACVLILRYQPGLSYDQPKCSPEKDGLGSSPRVTSKSESQVTMLQRQGFSMRTLFCPSLLPTQQSASLVSFLVGFLAFLVLGLSVLTTYGVHAITRLEAWSLALLALFLVLFVAIVLTIWRQPQNQQKVAFMVPFLPFLPAFSILVNIYLMVQLSADTWVRFSIWMAIGFLIYFSYGIRHSLEGHLRDENNEEDAYPDNVHAAAEEKSAIQANDHHPRNLSSPFIFHEKTSEF

SEQ ID NO: 82158 - protein, 658 aa, Homo sapiens
  Payload ID: 16351
  Gene Symbol: SLC7A2
  Gene Name: solute carrier family 7 (cationic amino acid transporter, y+ system), member 2
  Uniprot ID: P52569
  ENSP ID: ENSP00000419140
MIPCRAALTFARCLIRRKIVTLDSLEDTKLCRCLSTMDLIALGVGSTLGAGVYVLAGEVAKADSGPSIVVSFLIAALASVMAGLCYAEFGARVPKTGSAYLYTYVTVGELWAFITGWNLILSYVIGTSSVARAWSGTFDELLSKQIGQFLRTYFRMNYTGLAEYPDFFAVCLILLLAGLLSFGVKESAWVNKVFTAVNILVLLFVMVAGFVKGNVANWKISEEFLKNISASAREPPSENGTSIYGAGGFMPYGFTGTLAGAATCFYAFVGFDCIATTGEEVRNPQKAIPIGIVTSLLVCFMAYFGVSAALTLMMPYYLLDEKSPLPVAFEYVGWGPAKYVVAAGSLCALSTSLLGSIFPMPRVIYAMAEDGLLFKCLAQINSKTKTPIIATLSSGAVAALMAFLFDLKALVDMMSIGTLMAYSLVAACVLILRYQPGLSYDQPKCSPEKDGLGSSPRVTSKSESQVTMLQRQGFSMRTLFCPSLLPTQQSASLVSFLVGFLAFLVLGLSVLTTYGVHAITRLEAWSLALLALFLVLFVAIVLTIWRQPQNQQKVAFMVPFLPFLPAFSILVNIYLMVQLSADTWVRFSIWMAIGFLIYFSYGIRHSLEGHLRDENNEEDAYPDNVHAAAEEKSAIQANDHHPRNLSSPFIFHEKTSEF

SEQ ID NO: 82159 - protein, 697 aa, Homo sapiens; identical to SEQ ID NO: 82157
  Payload ID: 16351
  Gene Symbol: SLC7A2
  Gene Name: solute carrier family 7 (cationic amino acid transporter, y+ system), member 2
  Uniprot ID: P52569
  ENSP ID: ENSP00000419873

SEQ ID NO: 82160 - protein, 658 aa, Homo sapiens; identical to SEQ ID NO: 82158
  Payload ID: 16351
  Gene Symbol: SLC7A2
  Gene Name: solute carrier family 7 (cationic amino acid transporter, y+ system), member 2
  Uniprot ID: P52569
  ENSP ID: ENSP00000430464

SEQ ID NO: 82161 - protein, 619 aa, Homo sapiens
  Payload ID: 16352
  Gene Symbol: SLC7A3
  Gene Name: solute carrier family 7 (cationic amino acid transporter, y+ system), member 3
  Uniprot ID: Q8WY07
  ENSP ID: ENSP00000298085
MPWQAFRRFGQKLVRRRTLESGMAETRLARCLSTLDLVALGVGSTLGAGVYVLAGEVAKDKAGPSIVICFLVAALSSVLAGLCYAEFGARVPRSGSAYLYSYVTVGELWAFTTGWNLILSYVIGTASVARAWSSAFDNLIGNHISKTLQGSIALHVPHVLAEYPDFFALGLVLLLTGLLALGASESALVTKVFTGVNLLVLGFVMISGFVKGDVHNWKLTEEDYELAMAELNDTYSLGPLGSGGFVPFGFEGILRGAATCFYAFVGFDCIATTGEEAQNPQRSIPMGIVISLSVCFLAYFAVSSALTLMMPYYQLQPESPLPEAFLYIGWAPARYVVAVGSLCALSTSLLGSMFPMPRVIYAMAEDGLLFRVLARIHTGTRTPIIATVVSGIIAAFMAFLFKLTDLVDLMSIGTLLAYSLVSICVLILRYQPDQETKTGEEVELQEEAITTESEKLTLWGLFFPLNSIPTPLSGQIVYVCSSLLAVLLTALCLVLAQWSVPLLSGDLLWTAVVVLLLLLIIGIIVVIWRQPQSSTPLHFKVPALPLLPLMSIFVNIYLMMQMTAGTWARFGVWMLIGFAIYFGYGIQHSLEEIKSNQPSRKSRAKTVDLDPGTLYVHSV

SEQ ID NO: 82162 - protein, 619 aa, Homo sapiens; identical to SEQ ID NO: 82161
  Payload ID: 16352
  Gene Symbol: SLC7A3
  Gene Name: solute carrier family 7 (cationic amino acid transporter, y+ system), member 3
  Uniprot ID: Q8WY07
  ENSP ID: ENSP00000363417

SEQ ID NO: 82163 - protein, 523 aa, Homo sapiens
  Payload ID: 16353
  Gene Symbol: SLC7A10
  Gene Name: solute carrier family 7 (neutral amino acid transporter light chain, asc system), member 10
  Uniprot ID: Q9NS82
  ENSP ID: ENSP00000253188
MAGHTQQPSGRGNPRPAPSPSPVPGTVPGASERVALKKEIGLLSACTIIIGNIIGSGIFISPKGVLEHSGSVGLALFVWVLGGGVTALGSLCYAELGVAIPKSGGDYAYVTEIFGGLAGFLLLWSAVLIMYPTSLAVISMTFSNYVLQPVFPNCIPPTTASRVLSMACLMLLTWVNSSSVRWATRIQDMFTGGKLLALSLIIGVGLLQIFQGHFEELRPSNAFAFWMTPSVGHLALAFLQGSFAFSGWNFLNYVTEEMVDARKNLPRAIFISIPLVTFVYTFTNIAYFTAMSPQELLSSNAVAVTFGEKLLGYFSWVMPVSVALSTFGGINGYLFTYSRLCFSGAREGHLPSLLAMIHVRHCTPIPALLVCCGATAVIMLVGDTYTLINYVSFINYLCYGVTILGLLLLRWRRPALHRPIKVNLLIPVAYLVFWAFLLVFSFISEPMVCGVGVIIILTGVPIFFLGVFWRSKPKCVHRLTESMTHWGQELCFVVYPQDAPEEEENGPCPPSLLPATDKPSKPQ

SEQ ID NO: 82164 - protein, 389 aa, Homo sapiens
  Payload ID: 16353
  Gene Symbol: SLC7A10
  Gene Name: solute carrier family 7 (neutral amino acid transporter light chain, asc system), member 10
  ENSP ID: ENSP00000465421
MAGHTQQPSGRGNPRPAPSPSPVPGTVPGASERVALKKEIGLLSACTIIIGNIIGSGIFISPKGVLEHSGSVGLALFVWVLGGGVTALGSLCYAELGVAIPKSGGDYAYVTEIFGGLAGFLLLWSAVLIMYPTSLAVISMTFSNYVLQPVFPNCIPPTTASRVLSMACLMLLTWVNSSSVRWATRIQDMFTGGKLLALSLIIGVGLLQIFQGHFEELRPSNAFAFWMTPSVGHLALAFLQGSFAFSGWNFLNYVTEEMVDARKNLPRAIFISIPLVTFVYTFTNIAYFTAMSPQELLSSNAVAVTFGEKLLGYFSWVMPVSVALSTFGGINGYLFTYSSAGPQPSSCSWATRTRSSTMCPSSTTSATASPSWACCCCAGGGLHSTGPSR

SEQ ID NO: 82165 - protein, 71 aa, Homo sapiens
  Payload ID: 16353
  Gene Symbol: SLC7A10
  Gene Name: solute carrier family 7 (neutral amino acid transporter light chain, asc system), member 10
  ENSP ID: ENSP00000466410
MAGHTQQPSGRGNPRPAPSPSPVPGTVPGASERVALKKEIGLLSACTIIIAFCCSGAPSSSCTPPALLSSP

SEQ ID NO: 82166 - protein, 71 aa, Homo sapiens; identical to SEQ ID NO: 82165
  Payload ID: 16353
  Gene Symbol: SLC7A10
  Gene Name: solute carrier family 7 (neutral amino acid transporter light chain, asc system), member 10
  ENSP ID: ENSP00000466876

SEQ ID NO: 82167 - protein, 771 aa, Homo sapiens
  Payload ID: 16354
  Gene Symbol: SLC7A14
  Gene Name: solute carrier family 7, member 14
  Uniprot ID: Q8TBB6
  ENSP ID: ENSP00000231706
MSGFFTSLDPRRVQWGAAWYAMHSRILRTKPVESMLEGTGTTTAHGTKLAQVLTTVDLISLGVGSCVGTGMYVVSGLVAKEMAGPGVIVSFIIAAVASILSGVCYAEFGVRVPKTTGSAYTYSYVTVGEFVAFFIGWNLILEYLIGTAAGASALSSMFDSLANHTISRWMADSVGTLNGLGKGEESYPDLLALLIAVIVTIIVALGVKNSIGFNNVLNVLNLAVWVFIMIAGLFFINGKYWAEGQFLPHGWSGVLQGAATCFYAFIGFDIIATTGEEAKNPNTSIPYAITASLVICLTAYVSVSVILTLMVPYYTIDTESPLMEMFVAHGFYAAKFVVAIGSVAGLTVSLLGSLFPMPRVIYAMAGDGLLFRFLAHVSSYTETPVVACIVSGFLAALLALLVSLRDLIEMMSIGTLLAYTLVSVCVLLLRYQPESDIDGFVKFLSEEHTKKKEGILADCEKEACSPVSEGDEFSGPATNTCGAKNLPSLGDNEMLIGKSDKSTYNVNHPNYGTVDMTTGIEADESENIYLIKLKKLIGPHYYTMRIRLGLPGKMDRPTAATGHTVTICVLLLFILMFIFCSFIIFGSDYISEQSWWAILLVVLMVLLISTLVFVILQQPENPKKLPYMAPCLPFVPAFAMLVNIYLMLKLSTITWIRFAVWCFVGLLIYFGYGIWNSTLEISAREEALHQSTYQRYDVDDPFSVEEGFSYATEGESQEDWGGPTEDKGFYYQQMSDAKANGRTSSKAKSKSKHKQNSEALIANDELDYSPE

SEQ ID NO: 82168 - protein, 635 aa, Homo sapiens
  Payload ID: 16355
  Gene Symbol: SLC7A4
  Gene Name: solute carrier family 7, member 4
  Uniprot ID: O43246
  ENSP ID: ENSP00000372390
MARGLPTIASLARLCQKLNRLKPLEDSTMETSLRRCLSTLDLTLLGVGGMVGSGLYVLTGAVAKEVAGPAVLLSFGVAAVASLLAALCYAEFGARVPRTGSAYLFTYVSMGELWAFLIGWNVLLEYIIGGAAVARAWSGYLDSMFSHSIRNFTETHVGSWQVPLLGHYPDFLAAGIILLASAFVSCGARVSSWLNHTFSAISLLVILFIVILGFILAQPHNWSADEGGFAPFGFSGVMAGTASCFYAFVGFDVIAASSEEAQNPRRSVPLAIAISLAIAAGAYILVSTVLTLMVPWHSLDPDSALADAFYQRGYRWAGFIVAAGSICAMNTVLLSLLFSLPRIVYAMAADGLFFQVFAHVHPRTQVPVAGTLAFGLLTAFLALLLDLESLVQFLSLGTLLAYTFVATSIIVLRFQKSSPPSSPGPASPGPLTKQQSSFSDHLQLVGTVHASVPEPGELKPALRPYLGFLDGYSPGAVVTWALGVMLASAITIGCVLVFGNSTLHLPHWGYILLLLLTSVMFLLSLLVLGAHQQQYREDLFQIPMVPLIPALSIVLNICLMLKLSYLTWVRFSIWLLMGLAVYFGYGIRHSKENQRELPGLNSTHYVVFPRGSLEETVQAMQPPSQAPAQDPGHME

SEQ ID NO: 82169 - protein, 635 aa, Homo sapiens; identical to SEQ ID NO: 82168
  Payload ID: 16355
  Gene Symbol: SLC7A4
  Gene Name: solute carrier family 7, member 4
  Uniprot ID: O43246
  ENSP ID: ENSP00000384278

SEQ ID NO: 82170 - protein, 81 aa, Homo sapiens
  Payload ID: 16355
  Gene Symbol: SLC7A4
  Gene Name: solute carrier family 7, member 4
  ENSP ID: ENSP00000408727
MARGLPTIASLARLCQKLNRLKPLEDSTMETSLRRCLSTLDLTLLGVGGMVGSGLYVLTGAVAKEVAGPAVLLSFGVAAVA

SEQ ID NO: 82171 - protein, 309 aa, Homo sapiens
  Payload ID: 16356
  Gene Symbol: SLC7A6OS
  Gene Name: solute carrier family 7, member 6 opposite strand
  Uniprot ID: Q96CW6
  ENSP ID: ENSP00000263997
MEAARTAVLRVKRKRSAEPAEALVLACKRLRSDAVESAAQKTSEGLERAAENNVFHLVATVCSQEEPVQPLLREVLRPSRDSQQRVRRNLRASAREVRQEGRYRVLSSRRSLGTTSSGQESEYTPGNPEAAGNSGFQLLDLVHEEGEPEAASAGSCKTSDPDVILCNSVELIRERLTVSEDGPGVRRQEEQKHDDYVYDIYYLETATPGWIENILSVQPYSQEWELVNDDQEPEDIYDDEDDENSENNWRNEYPEEESSDGDEDSRGSADYNSLSEEERGSSRQRMWSKYPLDVQKEFGYDSPHDLDSD

SEQ ID NO: 82172 - protein, 119 aa, Homo sapiens
  Payload ID: 16356
  Gene Symbol: SLC7A6OS
  Gene Name: solute carrier family 7, member 6 opposite strand
  ENSP ID: ENSP00000461470
SDPDVILCNSVELIRERLTVSEDGPGVRRQEEQKHDDYVYDIYYLETATPGWIENILSVQPYSQEWELVNDDQEPEDIYDDEDDENSENNWRNEYPEEESSDGDEDSRGGWQPQTGRDW

SEQ ID NO: 82173 - protein, 39 aa, Homo sapiens
  Payload ID: 16356
  Gene Symbol: SLC7A6OS
  Gene Name: solute carrier family 7, member 6 opposite strand
  ENSP ID: ENSP00000462436
  MOD_RES (1)..(1): Any amino acid
XKHDDYVYDIYYLETATPGWIENILSVQPYSQEWELMCR

SEQ ID NO: 82174 - protein, 238 aa, Homo sapiens
  Payload ID: 16356
  Gene Symbol: SLC7A6OS
  Gene Name: solute carrier family 7, member 6 opposite strand
  ENSP ID: ENSP00000481459
MEAARTAVLRVKRKRSAEPAEALVLACKRLRSDAVESAAQKTSEGLERAAENNVFHLVATVCSQEEPVQPLLREVLRPSRDSQQRVRRNLRASAREVRQEGRYRVLSSRRSLGTTSSGQESEYTPGNPEAAGNSGFQLLDLVHEEGEPEAASAGSCKTSDPDVILCNSVELIRERLTVSEDGPGVRRQEEQKHDDYVYDIYYLETATPGWIENILSVQPYSQEWELVNDDQEPGHLRR

SEQ ID NO: 82175 - protein, 209 aa, Homo sapiens
  Payload ID: 16356
  Gene Symbol: SLC7A6OS
  Gene Name: solute carrier family 7, member 6 opposite strand
  ENSP ID: ENSP00000483575
  MOD_RES (1)..(1): Any amino acid
XESAAQKTSEGLERAAENNVFHLVATVCSQEEPVQPLLREVLRPSRDSQQRVRRNLRASAREVRQEGRYRVLSSRRSLGTTSSGQESEYTPGNPEAAGNSGFQLLDLVHEEGEPEAASAGSCKTSDPDVILCNSVELIRERLTVSEDGPGVRRQEEQKHDDYVYDIYYLETATPGWIENILSVQPYSQEWELVRGPMSRRGMRHPKLLI

SEQ ID NO: 82176 - protein, 973 aa, Homo sapiens
  Payload ID: 16357
  Gene Symbol: SLC8A1
  Gene Name: solute carrier family 8 (sodium/calcium exchanger), member 1
  Uniprot ID: P32418
  ENSP ID: ENSP00000332931
MYNMRRLSLSPTFSMGFHLLVTVSLLFSHVDHVIAETEMEGEGNETGECTGSYYCKKGVILPIWEPQDPSFGDKIARATVYFVAMVYMFLGVSIIADRFMSSIEVITSQEKEITIKKPNGETTKTTVRIWNETVSNLTLMALGSSAPEILLSVIEVCGHNFTAGDLGPSTIVGSAAFNMFIIIALCVYVVPDGETRKIKHLRVFFVTAAWSIFAYTWLYIILSVISPGVVEVWEGLLTFFFFPICVVFAWVADRRLLFYKYVYKRYRAGKQRGMIIEHEGDRPSSKTEIEMDGKVVNSHVENFLDGALVLEVDERDQDDEEARREMARILKELKQKHPDKEIEQLIELANYQVLSQQQKSRAFYRIQATRLMTGAGNILKRHAADQARKAVSMHEVNTEVTENDPVSKIFFEQGTYQCLENCGTVALTIIRRGGDLTNTVFVDFRTEDGTANAGSDYEFTEGTVVFKPGDTQKEIRVGIIDDDIFEEDENFLVHLSNVKVSSEASEDGILEANHVSTLACLGSPSTATVTIFDDDHAGIFTFEEPVTHVSESIGIMEVKVLRTSGARGNVIVPYKTIEGTARGGGEDFEDTCGELEFQNDEIVKTISVKVIDDEEYEKNKTFFLEIGEPRLVEMSEKKALLLNELGGFTITGKYLFGQPVFRKVHAREHPILSTVITIADEYDDKQPLTSKEEEERRIAEMGRPILGEHTKLEVIIEESYEFKSTVDKLIKKTNLALVVGTNSWREQFIEAITVSAGEDDDDDECGEEKLPSCFDYVMHFLTVFWKVLFAFVPPTEYWNGWACFIVSILMIGLLTAFIGDLASHFGCTIGLKDSVTAVVFVALGTSVPDTFASKVAATQDQYADASIGNVTGSNAVNVFLGIGVAWSIAAIYHAANGEQFKVSPGTLAFSVTLFTIFAFINVGVLLYRRRPEIGGELGGPRTAKLLTSCLFVLLWLLYIFFSSLEAYCHIKGF

SEQ ID NO: 82177 - protein, 937 aa, Homo sapiens
  Payload ID: 16357
  Gene Symbol: SLC8A1
  Gene Name: solute carrier family 8 (sodium/calcium exchanger), member 1
  Uniprot ID: P32418
  ENSP ID: ENSP00000383886
MYNMRRLSLSPTFSMGFHLLVTVSLLFSHVDHVIAETEMEGEGNETGECTGSYYCKKGVILPIWEPQDPSFGDKIARATVYFVAMVYMFLGVSIIADRFMSSIEVITSQEKEITIKKPNGETTKTTVRIWNETVSNLTLMALGSSAPEILLSVIEVCGHNFTAGDLGPSTIVGSAAFNMFIIIALCVYVVPDGETRKIKHLRVFFVTAAWSIFAYTWLYIILSVISPGVVEVWEGLLTFFFFPICVVFAWVADRRLLFYKYVYKRYRAGKQRGMIIEHEGDRPSSKTEIEMDGKVVNSHVENFLDGALVLEVDERDQDDEEARREMARILKELKQKHPDKEIEQLIELANYQVLSQQQKSRAFYRIQATRLMTGAGNILKRHAADQARKAVSMHEVNTEVTENDPVSKIFFEQGTYQCLENCGTVALTIIRRGGDLTNTVFVDFRTEDGTANAGSDYEFTEGTVVFKPGDTQKEIRVGIIDDDIFEEDENFLVHLSNVKVSSEASEDGILEANHVSTLACLGSPSTATVTIFDDDHAGIFTFEEPVTHVSESIGIMEVKVLRTSGARGNVIVPYKTIEGTARGGGEDFEDTCGELEFQNDEIVKIITIRIFDREEYEKECSFSLVLEEPKWIRRGMKGGFTITDEYDDKQPLTSKEEEERRIAEMGRPILGEHTKLEVIIEESYEFKSTVDKLIKKTNLALVVGTNSWREQFIEAITVSAGEDDDDDECGEEKLPSCFDYVMHFLTVFWKVLFAFVPPTEYWNGWACFIVSILMIGLLTAFIGDLASHFGCTIGLKDSVTAVVFVALGTSVPDTFASKVAATQDQYADASIGNVTGSNAVNVFLGIGVAWSIAAIYHAANGEQFKVSPGTLAFSVTLFTIFAFINVGVLLYRRRPEIGGELGGPRTAKLLTSCLFVLLWLLYIFFSSLEAYCHIKGF

SEQ ID NO: 82178 - protein, 973 aa, Homo sapiens; identical to SEQ ID NO: 82176
  Payload ID: 16357
  Gene Symbol: SLC8A1
  Gene Name: solute carrier family 8 (sodium/calcium exchanger), member 1
  Uniprot ID: P32418
  ENSP ID: ENSP00000384763

SEQ ID NO: 82179 - protein, 965 aa, Homo sapiens
  Payload ID: 16357
  Gene Symbol: SLC8A1
  Gene Name: solute carrier family 8 (sodium/calcium exchanger), member 1
  Uniprot ID: P32418
  ENSP ID: ENSP00000384908
MYNMRRLSLSPTFSMGFHLLVTVSLLFSHVDHVIAETEMEGEGNETGECTGSYYCKKGVILPIWEPQDPSFGDKIARATVYFVAMVYMFLGVSIIADRFMSSIEVITSQEKEITIKKPNGETTKTTVRIWNETVSNLTLMALGSSAPEILLSVIEVCGHNFTAGDLGPSTIVGSAAFNMFIIIALCVYVVPDGETRKIKHLRVFFVTAAWSIFAYTWLYIILSVISPGVVEVWEGLLTFFFFPICVVFAWVADRRLLFYKYVYKRYRAGKQRGMIIEHEGDRPSSKTEIEMDGKVVNSHVENFLDGALVLEVDERDQDDEEARREMARILKELKQKHPDKEIEQLIELANYQVLSQQQKSRAFYRIQATRLMTGAGNILKRHAADQARKAVSMHEVNTEVTENDPVSKIFFEQGTYQCLENCGTVALTIIRRGGDLTNTVFVDFRTEDGTANAGSDYEFTEGTVVFKPGDTQKEIRVGIIDDDIFEEDENFLVHLSNVKVSSEASEDGILEANHVSTLACLGSPSTATVTIFDDDHAGIFTFEEPVTHVSESIGIMEVKVLRTSGARGNVIVPYKTIEGTARGGGEDFEDTCGELEFQNDEIVKIITIRIFDREEYEKECSFSLVLEEPKWIRRGMKGGFTITGKYLFGQPVFRKVHAREHPILSTVITIADEYDDKQPLTSKEEEERRIAEMGRPILGEHTKLEVIIEESYEFKSTVDKLIKKTNLALVVGTNSWREQFIEAITVSAGEDDDDDECGEEKLPSCFDYVMHFLTVFWKVLFAFVPPTEYWNGWACFIVSILMIGLLTAFIGDLASHFGCTIGLKDSVTAVVFVALGTSVPDTFASKVAATQDQYADASIGNVTGSNAVNVFLGIGVAWSIAAIYHAANGEQFKVSPGTLAFSVTLFTIFAFINVGVLLYRRRPEIGGELGGPRTAKLLTSCLFVLLWLLYIFFSSLEAYCHIKGF

SEQ ID NO: 82180 - protein, 937 aa, Homo sapiens; identical to SEQ ID NO: 82177
  Payload ID: 16357
  Gene Symbol: SLC8A1
  Gene Name: solute carrier family 8 (sodium/calcium exchanger), member 1
  Uniprot ID: P32418
  ENSP ID: ENSP00000385188

SEQ ID NO: 82181 - protein, 937 aa, Homo sapiens; identical to SEQ ID NO: 82177
  Payload ID: 16357
  Gene Symbol: SLC8A1
  Gene Name: solute carrier family 8 (sodium/calcium exchanger), member 1
  Uniprot ID: P32418
  ENSP ID: ENSP00000385535

SEQ ID NO: 82182 - protein, 968 aa, Homo sapiens
  Payload ID: 16357
  Gene Symbol: SLC8A1
  Gene Name: solute carrier family 8 (sodium/calcium exchanger), member 1
  Uniprot ID: P32418
  ENSP ID: ENSP00000385678
MYNMRRLSLSPTFSMGFHLLVTVSLLFSHVDHVIAETEMEGEGNETGECTGSYYCKKGVILPIWEPQDPSFGDKIARATVYFVAMVYMFLGVSIIADRFMSSIEVITSQEKEITIKKPNGETTKTTVRIWNETVSNLTLMALGSSAPEILLSVIEVCGHNFTAGDLGPSTIVGSAAFNMFIIIALCVYVVPDGETRKIKHLRVFFVTAAWSIFAYTWLYIILSVISPGVVEVWEGLLTFFFFPICVVFAWVADRRLLFYKYVYKRYRAGKQRGMIIEHEGDRPSSKTEIEMDGKVVNSHVENFLDGALVLEVDERDQDDEEARREMARILKELKQKHPDKEIEQLIELANYQVLSQQQKSRAFYRIQATRLMTGAGNILKRHAADQARKAVSMHEVNTEVTENDPVSKIFFEQGTYQCLENCGTVALTIIRRGGDLTNTVFVDFRTEDGTANAGSDYEFTEGTVVFKPGDTQKEIRVGIIDDDIFEEDENFLVHLSNVKVSSEASEDGILEANHVSTLACLGSPSTATVTIFDDDHAGIFTFEEPVTHVSESIGIMEVKVLRTSGARGNVIVPYKTIEGTARGGGEDFEDTCGELEFQNDEIVKTISVKVIDDEEYEKNKTFFLEIGEPRLVEMSEKKALLLNELGGFTITGQPVFRKVHAREHPILSTVITIADEYDDKQPLTSKEEEERRIAEMGRPILGEHTKLEVIIEESYEFKSTVDKLIKKTNLALVVGTNSWREQFIEAITVSAGEDDDDDECGEEKLPSCFDYVMHFLTVFWKVLFAFVPPTEYWNGWACFIVSILMIGLLTAFIGDLASHFGCTIGLKDSVTAVVFVALGTSVPDTFASKVAATQDQYADASIGNVTGSNAVNVFLGIGVAWSIAAIYHAANGEQFKVSPGTLAFSVTLFTIFAFINVGVLLYRRRPEIGGELGGPRTAKLLTSCLFVLLWLLYIFFSSLEAYCHIKGF

SEQ ID NO: 82183 - protein, 937 aa, Homo sapiens; identical to SEQ ID NO: 82177
  Payload ID: 16357
  Gene Symbol: SLC8A1
  Gene Name: solute carrier family 8 (sodium/calcium exchanger), member 1
  Uniprot ID: P32418
  ENSP ID: ENSP00000385811

SEQ ID NO: 82184 - protein, 664 aa, Homo sapiens
  Payload ID: 16357
  Gene Symbol: SLC8A1
  Gene Name: solute carrier family 8 (sodium/calcium exchanger), member 1
  ENSP ID: ENSP00000386116
MRRLSLSPTFSMGFHLLVTVSLLFSHVDHVIAETEMEGEGNETGECTGSYYCKKGVILPIWEPQDPSFGDKIARATVYFVAMVYMFLGVSIIADRFMSSIEVITSQEKEITIKKPNGETTKTTVRIWNETVSNLTLMALGSSAPEILLSVIEVCGHNFTAGDLGPSTIVGSAAFNMFIIIALCVYVVPDGETRKIKHLRVFFVTAAWSIFAYTWLYIILSVISPGVVEVWEGLLTFFFFPICVVFAWVADRRLLFYKYVYKRYRAGKQRGMIIEHEGDRPSSKTEIEMDGKVVNSHVENFLDGALVLEVDERDQDDEEARREMARILKELKQKHPDKEIEQLIELANYQVLSQQQKSRAFYRIQATRLMTGAGNILKRHAADQARKAVSMHEVNTEVTENDPVSKIFFEQGTYQCLENCGTVALTIIRRGGDLTNTVFVDFRTEDGTANAGSDYEFTEGTVVFKPGDTQKEIRVGIIDDDIFEEDENFLVHLSNVKVSSEASEDGILEANHVSTLACLGSPSTATVTIFDDDHAGIFTFEEPVTHVSESIGIMEVKVLRTSGARGNVIVPYKTIEGTARGGGEDFEDTCGELEFQNDEIVKTISVKVIDDEEYEKNKTFFLEIGEPRLVEMSEKKGRSLPLEYLTVRNMRKSAVSPLCLRNQNG

SEQ ID NO: 82185 - protein, 87 aa, Homo sapiens
  Payload ID: 16357
  Gene Symbol: SLC8A1
  Gene Name: solute carrier family 8 (sodium/calcium exchanger), member 1
  ENSP ID: ENSP00000389330
MYNMRRLSLSPTFSMGFHLLVTVSLLFSHVDHVIAETEMEGEGNETGECTGSYYCKKGVILPIWEPQDPSFGDKIARATVYFVAMVY

SEQ ID NO: 82186 - protein, 87 aa, Homo sapiens; identical to SEQ ID NO: 82185
  Payload ID: 16357
  Gene Symbol: SLC8A1
  Gene Name: solute carrier family 8 (sodium/calcium exchanger), member 1
  ENSP ID: ENSP00000398575

SEQ ID NO: 82187 - protein, 73 aa, Homo sapiens
  Payload ID: 16357
  Gene Symbol: SLC8A1
  Gene Name: solute carrier family 8 (sodium/calcium exchanger), member 1
  ENSP ID: ENSP00000412560
MYNMRRLSLSPTFSMGFHLLVTVSLLFSHVDHVIAETEMEGEGNETGECTGSYYCKKGVILPIWEPQDPSFGD

SEQ ID NO: 82188 - protein, 921 aa, Homo sapiens
  Payload ID: 16358
  Gene Symbol: SLC8A2
  Gene Name: solute carrier family 8 (sodium/calcium exchanger), member 2
  Uniprot ID: Q9UPR5
  ENSP ID: ENSP00000236877
MAPLALVGVTLLLAAPPCSGAATPTPSLPPPPANDSDTSTGGCQGSYRCQPGVLLPVWEPDDPSLGDKAARAVVYFVAMVYMFLGVSIIADRFMAAIEVITSKEKEITITKANGETSVGTVRIWNETVSNLTLMALGSSAPEILLSVIEVCGHNFQAGELGPGTIVGSAAFNMFVVIAVCIYVIPAGESRKIKHLRVFFVTASWSIFAYVWLYLILAVFSPGVVQVWEALLTLVFFPVCVVFAWMADKRLLFYKYVYKRYRTDPRSGIIIGAEGDPPKSIELDGTFVGAEAPGELGGLGPGPAEARELDASRREVIQILKDLKQKHPDKDLEQLVGIANYYALLHQQKSRAFYRIQATRLMTGAGNVLRRHAADASRRAAPAEGAGEDEDDGASRIFFEPSLYHCLENCGSVLLSVTCQGGEGNSTFYVDYRTEDGSAKAGSDYEYSEGTLVFKPGETQKELRIGIIDDDIFEEDEHFFVRLLNLRVGDAQGMFEPDGGGRPKGRLVAPLLATVTILDDDHAGIFSFQDRLLHVSECMGTVDVRVVRSSGARGTVRLPYRTVDGTARGGGVHYEDACGELEFGDDETMKTLQVKIVDDEEYEKKDNFFIELGQPQWLKRGISALLLNQGDGDRKLTAEEEEARRIAEMGKPVLGENCRLEVIIEESYDFKNTVDKLIKKTNLALVIGTHSWREQFLEAITVSAGDEEEEEDGSREERLPSCFDYVMHFLTVFWKVLFACVPPTEYCHGWACFGVSILVIGLLTALIGDLASHFGCTVGLKDSVNAVVFVALGTSIPDTFASKVAALQDQCADASIGNVTGSNAVNVFLGLGVAWSVAAVYWAVQGRPFEVRTGTLAFSVTLFTVFAFVGIAVLLYRRRPHIGGELGGPRGPKLATTALFLGLWLLYILFASLEAYCHIRGF

SEQ ID NO: 82189 - protein, 677 aa, Homo sapiens
  Payload ID: 16358
  Gene Symbol: SLC8A2
  Gene Name: solute carrier family 8 (sodium/calcium exchanger), member 2
  ENSP ID: ENSP00000437536
MADKRLLFYKYVYKRYRTDPRSGIIIGAEGDPPKSIELDGTFVGAEAPGELGGLGPGPAEARELDASRREVIQILKDLKQKHPDKDLEQLVGIANYYALLHQQKSRAFYRIQATRLMTGAGNVLRRHAADASRRAAPAEGAGEDEDDGASRIFFEPSLYHCLENCGSVLLSVTCQGGEGNSTFYVDYRTEDGSAKAGSDYEYSEGTLVFKPGETQKELRIGIIDDDIFEEDEHFFVRLLNLRVGDAQGMFEPDGGGRPKGRLVAPLLATVTILDDDHAGIFSFQDRLLHVSECMGTVDVRVVRSSGARGTVRLPYRTVDGTARGGGVHYEDACGELEFGDDETMKTLQVKIVDDEEYEKKDNFFIELGQPQWLKRGISALLLNQGDGDRKLTAEEEEARRIAEMGKPVLGENCRLEVIIEESYDFKNTVDKLIKKTNLALVIGTHSWREQFLEAITVSAGDEEEEEDGSREERLPSCFDYVMHFLTVFWKVLFACVPPTEYCHGWACFGVSILVIGLLTALIGDLASHFGCTVGLKDSVNAVVFVALGTSIPDTFASKVAALQDQCADASIGNVTGSNAVNVFLGLGVAWSVAAVYWAVQGRPFEVRTGTLAFSVTLFTVFAFVGIAVLLYRRRPHIGGELGGPRGPKLATTALFLGLWLLYILFASLEAYCHIRGF

SEQ ID NO: 82190 - protein, 145 aa, Homo sapiens
  Payload ID: 16358
  Gene Symbol: SLC8A2
  Gene Name: solute carrier family 8 (sodium/calcium exchanger), member 2
  ENSP ID: ENSP00000472208
MVYMFLGVSIIADRFMAAIEVITSKEKEITITKANGETSVGTVRIWNETVSNLTLMALGSSAPEILLSVIEVCGHNFQAGELGPGTIVGSAAFNMFVVIAVCIYVIPAGESRKIKHLRVFFVTASWSIFAYVWLYLILAVFSPGV

SEQ ID NO: 82191 - protein, 159 aa, Homo sapiens
  Payload ID: 16358
  Gene Symbol: SLC8A2
  Gene Name: solute carrier family 8 (sodium/calcium exchanger), member 2
  ENSP ID: ENSP00000472233
MAAIEVITSKEKEITITKANGETSVGTVRIWNETVSNLTLMALGSSAPEILLSVIEVCGHNFQAGELGPGTIVGSAAFNMFVVIAVCIYVIPAGESRKIKHLRVFFVTASWSIFAYVWLYLILAVFSPGVVQVWEALLTLVFFPVCVVFAWMADKRLLF

SEQ ID NO: 82192 - protein, 298 aa, Homo sapiens
  Payload ID: 16359
  Gene Symbol: SLC8A3
  Gene Name: solute carrier family 8 (sodium/calcium exchanger), member 3
  Uniprot ID: P57103
  ENSP ID: ENSP00000216568
MERGISDVTDRKLTMEEEEAKRIAEMGKPVLGEHPKLEVIIEESYEFKTTVDKLIKKTNLALVVGTHSWRDQFMEAITVSAAGDEDEDESGEERLPSCFDYVMHFLTVFWKVLFACVPPTEYCHGWACFAVSILIIGMLTAIIGDLASHFGCTIGLKDSVTAVVFVAFGTSVPDTFASKAAALQDVYADASIGNVTGSNAVNVFLGIGLAWSVAAIYWALQGQEFHVSAGTLAFSVTLFTIFAFVCISVLLYRRRPHLGGELGGPRGCKLATTWLFVSLWLLYILFATLEAYCYIKGF

SEQ ID NO: 82193 - protein, 921 aa, Homo sapiens
  Payload ID: 16359
  Gene Symbol: SLC8A3
  Gene Name: solute carrier family 8 (sodium/calcium exchanger), member 3
  Uniprot ID: P57103
  ENSP ID: ENSP00000349392
MAWLRLQPLTSAFLHFGLVTFVLFLNGLRAEAGGSGDVPSTGQNNESCSGSSDCKEGVILPIWYPENPSLGDKIARVIVYFVALIYMFLGVSIIADRFMASIEVITSQEREVTIKKPNGETSTTTIRVWNETVSNLTLMALGSSAPEILLSLIEVCGHGFIAGDLGPSTIVGSAAFNMFIIIGICVYVIPDGETRKIKHLRVFFITAAWSIFAYIWLYMILAVFSPGVVQVWEGLLTLFFFPVCVLLAWVADKRLLFYKYMHKKYRTDKHRGIIIETEGDHPKGIEMDGKMMNSHFLDGNLVPLEGKEVDESRREMIRILKDLKQKHPEKDLDQLVEMANYYALSHQQKSRAFYRIQATRMMTGAGNILKKHAAEQAKKASSMSEVHTDEPEDFISKVFFDPCSYQCLENCGAVLLTVVRKGGDMSKTMYVDYKTEDGSANAGADYEFTEGTVVLKPGETQKEFSVGIIDDDIFEEDEHFFVRLSNVRIEEEQPEEGMPPAIFNSLPLPRAVLASPCVATVTILDDDHAGIFTFECDTIHVSESIGVMEVKVLRTSGARGTVIVPFRTVEGTAKGGGEDFEDTYGELEFKNDETVKTIRVKIVDEEEYERQENFFIALGEPKWMERGISDVTDRKLTMEEEEAKRIAEMGKPVLGEHPKLEVIIEESYEFKTTVDKLIKKTNLALVVGTHSWRDQFMEAITVSAAGDEDEDESGEERLPSCFDYVMHFLTVFWKVLFACVPPTEYCHGWACFAVSILIIGMLTAIIGDLASHFGCTIGLKDSVTAVVFVAFGTSVPDTFASKAAALQDVYADASIGNVTGSNAVNVFLGIGLAWSVAAIYWALQGQEFHVSAGTLAFSVTLFTIFAFVCISVLLYRRRPHLGGELGGPRGCKLATTWLFVSLWLLYILFATLEAYCYIKGF

SEQ ID NO: 82194 - protein, 925 aa, Homo sapiens
  Payload ID: 16359
  Gene Symbol: SLC8A3
  Gene Name: solute carrier family 8 (sodium/calcium exchanger), member 3
  Uniprot ID: P57103
  ENSP ID: ENSP00000350560
MAWLRLQPLTSAFLHFGLVTFVLFLNGLRAEAGGSGDVPSTGQNNESCSGSSDCKEGVILPIWYPENPSLGDKIARVIVYFVALIYMFLGVSIIADRFMASIEVITSQEREVTIKKPNGETSTTTIRVWNETVSNLTLMALGSSAPEILLSLIEVCGHGFIAGDLGPSTIVGSAAFNMFIIIGICVYVIPDGETRKIKHLRVFFITAAWSIFAYIWLYMILAVFSPGVVQVWEGLLTLFFFPVCVLLAWVADKRLLFYKYMHKKYRTDKHRGIIIETEGDHPKGIEMDGKMMNSHFLDGNLVPLEGKEVDESRREMIRILKDLKQKHPEKDLDQLVEMANYYALSHQQKSRAFYRIQATRMMTGAGNILKKHAAEQAKKASSMSEVHTDEPEDFISKVFFDPCSYQCLENCGAVLLTVVRKGGDMSKTMYVDYKTEDGSANAGADYEFTEGTVVLKPGETQKEFSVGIIDDDIFEEDEHFFVRLSNVRIEEEQPEEGMPPAIFNSLPLPRAVLASPCVATVTILDDDHAGIFTFECDTIHVSESIGVMEVKVLRTSGARGTVIVPFRTVEGTAKGGGEDFEDTYGELEFKNDETVKTIHIKVIDDEAYEKNKNYFIEMMGPRMVDMSFQKALLLSPDRKLTMEEEEAKRIAEMGKPVLGEHPKLEVIIEESYEFKTTVDKLIKKTNLALVVGTHSWRDQFMEAITVSAAGDEDEDESGEERLPSCFDYVMHFLTVFWKVLFACVPPTEYCHGWACFAVSILIIGMLTAIIGDLASHFGCTIGLKDSVTAVVFVAFGTSVPDTFASKAAALQDVYADASIGNVTGSNAVNVFLGIGLAWSVAAIYWALQGQEFHVSAGTLAFSVTLFTIFAFVCISVLLYRRRPHLGGELGGPRGCKLATTWLFVSLWLLYILFATLEAYCYIKGF

SEQ ID NO: 82195 - protein, 927 aa, Homo sapiens
  Payload ID: 16359
  Gene Symbol: SLC8A3
  Gene Name: solute carrier family 8 (sodium/calcium exchanger), member 3
  Uniprot ID: P57103
  ENSP ID: ENSP00000370669
MAWLRLQPLTSAFLHFGLVTFVLFLNGLRAEAGGSGDVPSTGQNNESCSGSSDCKEGVILPIWYPENPSLGDKIARVIVYFVALIYMFLGVSIIADRFMASIEVITSQEREVTIKKPNGETSTTTIRVWNETVSNLTLMALGSSAPEILLSLIEVCGHGFIAGDLGPSTIVGSAAFNMFIIIGICVYVIPDGETRKIKHLRVFFITAAWSIFAYIWLYMILAVFSPGVVQVWEGLLTLFFFPVCVLLAWVADKRLLFYKYMHKKYRTDKHRGIIIETEGDHPKGIEMDGKMMNSHFLDGNLVPLEGKEVDESRREMIRILKDLKQKHPEKDLDQLVEMANYYALSHQQKSRAFYRIQATRMMTGAGNILKKHAAEQAKKASSMSEVHTDEPEDFISKVFFDPCSYQCLENCGAVLLTVVRKGGDMSKTMYVDYKTEDGSANAGADYEFTEGTVVLKPGETQKEFSVGIIDDDIFEEDEHFFVRLSNVRIEEEQPEEGMPPAIFNSLPLPRAVLASPCVATVTILDDDHAGIFTFECDTIHVSESIGVMEVKVLRTSGARGTVIVPFRTVEGTAKGGGEDFEDTYGELEFKNDETVKTIRVKIVDEEEYERQENFFIALGEPKWMERGISALLLSPDVTDRKLTMEEEEAKRIAEMGKPVLGEHPKLEVIIEESYEFKTTVDKLIKKTNLALVVGTHSWRDQFMEAITVSAAGDEDEDESGEERLPSCFDYVMHFLTVFWKVLFACVPPTEYCHGWACFAVSILIIGMLTAIIGDLASHFGCTIGLKDSVTAVVFVAFGTSVPDTFASKAAALQDVYADASIGNVTGSNAVNVFLGIGLAWSVAAIYWALQGQEFHVSAGTLAFSVTLFTIFAFVCISVLLYRRRPHLGGELGGPRGCKLATTWLFVSLWLLYILFATLEAYCYIKGF

SEQ ID NO: 82196 - protein, 284 aa, Homo sapiens
  Payload ID: 16359
  Gene Symbol: SLC8A3
  Gene Name: solute carrier family 8 (sodium/calcium exchanger), member 3
  Uniprot ID: P57103
  ENSP ID: ENSP00000377863
MEEEEAKRIAEMGKPVLGEHPKLEVIIEESYEFKTTVDKLIKKTNLALVVGTHSWRDQFMEAITVSAAGDEDEDESGEERLPSCFDYVMHFLTVFWKVLFACVPPTEYCHGWACFAVSILIIGMLTAIIGDLASHFGCTIGLKDSVTAVVFVAFGTSVPDTFASKAAALQDVYADASIGNVTGSNAVNVFLGIGLAWSVAAIYWALQGQEFHVSAGTLAFSVTLFTIFAFVCISVLLYRRRPHLGGELGGPRGCKLATTWLFVSLWLLYILFATLEAYCYIKGF

SEQ ID NO: 82197 - protein, 925 aa, Homo sapiens; identical to SEQ ID NO: 82194
  Payload ID: 16359
  Gene Symbol: SLC8A3
  Gene Name: solute carrier family 8 (sodium/calcium exchanger), member 3
  Uniprot ID: P57103
  ENSP ID: ENSP00000433531

SEQ ID NO: 82198 - protein, 620 aa, Homo sapiens
  Payload ID: 16359
  Gene Symbol: SLC8A3
  Gene Name: solute carrier family 8 (sodium/calcium exchanger), member 3
  Uniprot ID: P57103
  ENSP ID: ENSP00000436332
MAWLRLQPLTSAFLHFGLVTFVLFLNGLRAEAGGSGDVPSTGQNNESCSGSSDCKEGVILPIWYPENPSLGDKIARVIVYFVALIYMFLGVSIIADRFMASIEVITSQEREVTIKKPNGETSTTTIRVWNETVSNLTLMALGSSAPEILLSLIEVCGHGFIAGDLGPSTIVGSAAFNMFIIIGICVYVIPDGETRKIKHLRVFFITAAWSIFAYIWLYMILAVFSPGVVQVWEGLLTLFFFPVCVLLAWVADKRLLFYKYMHKKYRTDKHRGIIIETEGDHPKGIEMDGKMMNSHFLDGNLVPLEGKEVDESRREMIRILKDLKQKHPEKDLDQLVEMANYYALSHQQKSRAFYRIQATRMMTGAGNILKKHAAEQAKKASSMSEVHTDEPEDFISKVFFDPCSYQCLENCGAVLLTVVRKGGDMSKTMYVDYKTEDGSANAGADYEFTEGTVVLKPGETQKEFSVGIIDDDIFEEDEHFFVRLSNVRIEEEQPEEGMPPAIFNSLPLPRAVLASPCVATVTILDDDHAGIFTFECDTIHVSESIGVMEVKVLRTSGARGTVIVPFRTVEGTAKGGGEDFEDTYGELEFKNDETVCDRQEADYGRRGGQEDSRDGKASIG

SEQ ID NO: 82199 - protein, 924 aa, Homo sapiens
  Payload ID: 16359
  Gene Symbol: SLC8A3
  Gene Name: solute carrier family 8 (sodium/calcium exchanger), member 3
  Uniprot ID: P57103
  ENSP ID: ENSP00000436688
MAWLRLQPLTSAFLHFGLVTFVLFLNGLRAEAGGSGDVPSTGQNNESCSGSSDCKEGVILPIWYPENPSLGDKIARVIVYFVALIYMFLGVSIIADRFMASIEVITSQEREVTIKKPNGETSTTTIRVWNETVSNLTLMALGSSAPEILLSLIEVCGHGFIAGDLGPSTIVGSAAFNMFIIIGICVYVIPDGETRKIKHLRVFFITAAWSIFAYIWLYMILAVFSPGVVQVWEGLLTLFFFPVCVLLAWVADKRLLFYKYMHKKYRTDKHRGIIIETEGDHPKGIEMDGKMMNSHFLDGNLVPLEGKEVDESRREMIRILKDLKQKHPEKDLDQLVEMANYYALSHQQKSRAFYRIQATRMMTGAGNILKKHAAEQAKKASSMSEVHTDEPEDFISKVFFDPCSYQCLENCGAVLLTVVRKGGDMSKTMYVDYKTEDGSANAGADYEFTEGTVVLKPGETQKEFSVGIIDDDIFEEDEHFFVRLSNVRIEEEQPEEGMPPAIFNSLPLPRAVLASPCVATVTILDDDHAGIFTFECDTIHVSESIGVMEVKVLRTSGARGTVIVPFRTVEGTAKGGGEDFEDTYGELEFKNDETVKTIRVKIVDEEEYERQENFFIALGEPKWMERGISALLLSPDRKLTMEEEEAKRIAEMGKPVLGEHPKLEVIIEESYEFKTTVDKLIKKTNLALVVGTHSWRDQFMEAITVSAAGDEDEDESGEERLPSCFDYVMHFLTVFWKVLFACVPPTEYCHGWACFAVSILIIGMLTAIIGDLASHFGCTIGLKDSVTAVVFVAFGTSVPDTFASKAAALQDVYADASIGNVTGSNAVNVFLGIGLAWSVAAIYWALQGQEFHVSAGTLAFSVTLFTIFAFVCISVLLYRRRPHLGGELGGPRGCKLATTWLFVSLWLLYILFATLEAYCYIKGF

SEQ ID NO: 82200 - protein, 210 aa, Homo sapiens
  Payload ID: 16359
  Gene Symbol: SLC8A3
  Gene Name: solute carrier family 8 (sodium/calcium exchanger), member 3
  ENSP ID: ENSP00000437103
MEEEEAKRIAEMGKPVLGEHPKLEVIIEESYEFKTTVDKLIKKTNLALVVGTHSWRDQFMEAITVSAAGDEDEDESGEERLPSCFDYVMHFLTVFWKVLFACVPPTEYCHGWACFAVSILIIGMLTAIIGDLASHFGCTIGLKDSVTAVVFVAFGTSVPGESERCLNLQRGFYLVQMTPGLHLIIFHTISDLNLTEPLPLKCTKVNQRDE

SEQ ID NO: 82201 - protein, 584 aa, Homo sapiens
  Payload ID: 16360
  Gene Symbol: SLC8B1
  Gene Name: solute carrier family 8 (sodium/lithium/calcium exchanger), member B1
  Uniprot ID: Q6J4K2
  ENSP ID: ENSP00000202831
MAGRRLNLRWALSVLCVLLMAETVSGTRGSSTGAHISPQFPASGVNQTPVVDCRKVCGLNVSDRCDFIRTNPDCHSDGGYLDYLEGIFCHFPPSLLPLAVTLYVSWLLYLFLILGVTAAKFFCPNLSAISTTLKLSHNVAGVTFLAFGNGAPDIFSALVAFSDPHTAGLALGALFGAGVLVTTVVAGGITILHPFMAASRPFFRDIVFYMVAVFLTFLMLFRGRVTLAWALGYLGLYVFYVVTVILCTWIYQRQRRGSLFCPMPVTPEILSDSEEDRVSSNTNSYDYGDEYRPLFFYQETTAQILVRALNPLDYMKWRRKSAYWKALKVFKLPVEFLLLLTVPVVDPDKDDQNWKRPLNCLHLVISPLVVVLTLQSGTYGVYEIGGLVPVWVVVVIAGTALASVTFFATSDSQPPRLHWLFAFLGFLTSALWINAAATEVVNILRSLGVVFRLSNTVLGLTLLAWGNSIGDAFSDFTLARQGYPRMAFSACFGGIIFNILVGVGLGCLLQISRSHTEVKLEPDGLLVWVLAGALGLSLVFSLVSVPLQCFQLSRVYGFCLLLFYLNFLVVALLTEFGVIHLKSM

SEQ ID NO: 82202 - protein, 584 aa, Homo sapiens; identical to SEQ ID NO: 82201
  Payload ID: 16360
  Gene Symbol: SLC8B1
  Gene Name: solute carrier family 8 (sodium/lithium/calcium exchanger), member B1
  Uniprot ID: Q6J4K2
  ENSP ID: ENSP00000447091

SEQ ID NO: 82203 - protein, 53 aa, Homo sapiens
  Payload ID: 16360
  Gene Symbol: SLC8B1
  Gene Name: solute carrier family 8 (sodium/lithium/calcium exchanger), member B1
  ENSP ID: ENSP00000447502
MAGRRLNLRWALSVLCVLLMAETVSGTRGSSTGAHISPQFPASVPQGVWPECL

SEQ ID NO: 82204 - protein, 99 aa, Homo sapiens
  Payload ID: 16360
  Gene Symbol: SLC8B1
  Gene Name: solute carrier family 8 (sodium/lithium/calcium exchanger), member B1
  ENSP ID: ENSP00000447585
MAFSACFGGIIFNILVGVGLGCLLQISRSHTEVKLEPDGLLVWVLAGALGLSLVFSLVSVPLQCFQLSRVYGFCLLLFYLNFLVVALLTEFGVIHLKSM

SEQ ID NO: 82205 - protein, 103 aa, Homo sapiens
  Payload ID: 16360
  Gene Symbol: SLC8B1
  Gene Name: solute carrier family 8 (sodium/lithium/calcium exchanger), member B1
  ENSP ID: ENSP00000447972
MAGRRLNLRWALSVLCVLLMAETVSGTRGSSTGAHISPQFPASGVNQTPVVDCRKVCGLNVSDRCDFIRTNPDCHSDGGYLDYLEGIFCHFPPSLLPLAVTLY

SEQ ID NO: 82206 - protein, 231 aa, Homo sapiens
  Payload ID: 16360
  Gene Symbol: SLC8B1
  Gene Name: solute carrier family 8 (sodium/lithium/calcium exchanger), member B1
  ENSP ID: ENSP00000448703
MAGRRLNLRWALSVLCVLLMAETVSGTRGSSTGAHISPQFPASGVNQTPVVDCRKVCGLNVSDRCDFIRTNPDCHSDGGYLDYLEGIFCHFPPSLLPLAVTLYVSWLLYLFLILGVTAAKFFCPNLSAISTTLKLSHNVAGVTFLAFGNGAPDIFSALVAFSDPHTAGLALGALFGAGVLVTTVVAGGITILHPFMAASRPFFRDIVFYMVAVFLTFLMLFRGRVTLAWAL

SEQ ID NO: 82207 - protein, 53 aa, Homo sapiens; identical to SEQ ID NO: 82203
  Payload ID: 16360
  Gene Symbol: SLC8B1
  Gene Name: solute carrier family 8 (sodium/lithium/calcium exchanger), member B1
  ENSP ID: ENSP00000448749

SEQ ID NO: 82208 - protein, 404 aa, Homo sapiens
  Payload ID: 16360
  Gene Symbol: SLC8B1
  Gene Name: solute carrier family 8 (sodium/lithium/calcium exchanger), member B1
  ENSP ID: ENSP00000448758
  MOD_RES (1)..(1): Any amino acid
XTLKLSHNVAGVTFLAFGNGAPDIFSALVAFSDPHTAGLALGALFGAGVLVTTVVAGGITILHPFMAASRPFFRDIVFYMVAVFLTFLMLFRGRVTLAWALGYLGLYVFYVVTVILCTWIYQRQRRGSLFCPMPVTPEILSDSEEDRVSSNTNSYDYGDEYRPLFFYQETTAQILVRALNPLDYMKWRRKSAYWKALKVFKLPVEFLLLLTVPVVDPDKDDQNWKRPLNCLHLVISPLVVVLTLQSGTYGVYEIGGLVPVWVVVVIAGTALASVTFFATSDSQPPRLHWLFAFLGFLTSALWINAAATEVVNILRSLGVVFRLSNTVLGLTLLAWGNSIGDAFSDFTLARQGYPRMAFSACFGGIIFNILVGVGLGCLLQISRSHTEVKTRRMQVAGKTKRHGA

SEQ ID NO: 82209 - protein, 131 aa, Homo sapiens
  Payload ID: 16360
  Gene Symbol: SLC8B1
  Gene Name: solute carrier family 8 (sodium/lithium/calcium exchanger), member B1
  ENSP ID: ENSP00000449448
MAGRRLNLRWALSVLCVLLMAETVSGTRGSSTGAHISPQFPASGVNQTPVVDCRKVCGLNVSDRCDFIRTNPDCHSDGGYLDYLEGIFCHFPPSLLPLAVTLYVSWLLYLFLILGVTAAKFFCPNLSAIST

SEQ ID NO: 82210 - protein, 143 aa, Homo sapiens
  Payload ID: 16360
  Gene Symbol: SLC8B1
  Gene Name: solute carrier family 8 (sodium/lithium/calcium exchanger), member B1
  ENSP ID: ENSP00000449519
MTVGENEGVDDQGGWGKRLTTAGPSCSCADAFSDFTLARQGYPRMAFSACFGGIIFNILVGVGLGCLLQISRSHTEVKLEPDGLLVWVLAGALGLSLVFSLVSVPLQCFQLSRVYGFCLLLFYLNFLVVALLTEFGVIHLKSM

SEQ ID NO: 82211 - protein, 528 aa, Homo sapiens
  Payload ID: 16360
  Gene Symbol: SLC8B1
  Gene Name: solute carrier family 8 (sodium/lithium/calcium exchanger), member B1
  Uniprot ID: Q6J4K2
  ENSP ID: ENSP00000450081
MAGRRLNLRWALSVLCVLLMAETVSGTRGSSTGAHISPQFPASGVNQTPVVDCRKVCGLNVSDRCDFIRTNPDCHSDGGYLDYLEGIFCHFPPSLLPLAVTLYVSWLLYLFLILGVTAAKFFCPNLSAISTTLKLSHNVAGVTFLAFGNGAPDIFSALVAFSDPHTAGLALGALFGYLGLYVFYVVTVILCTWIYQRQRRGSLFCPMPVTPEILSDSEEDRVSSNTNSYDYGDEYRPLFFYQETTAQILVRALNPLDYMKWRRKSAYWKALKVFKLPVEFLLLLTVPVVDPDKDDQNWKRPLNCLHLVISPLVVVLTLQSGTYGVYEIGGLVPVWVVVVIAGTALASVTFFATSDSQPPRLHWLFAFLGFLTSALWINAAATEVVNILRSLGVVFRLSNTVLGLTLLAWGNSIGDAFSDFTLARQGYPRMAFSACFGGIIFNILVGVGLGCLLQISRSHTEVKLEPDGLLVWVLAGALGLSLVFSLVSVPLQCFQLSRVYGFCLLLFYLNFLVVALLTEFGVIHLKSM

SEQ ID NO: 82212 - protein, 1124 aa, Homo sapiens
  Payload ID: 16361
  Gene Symbol: SLC9C2
  Gene Name: solute carrier family 9, member C2 (putative)
  Uniprot ID: Q5TAH2
  ENSP ID: ENSP00000356687
MSSYFWAQNESNRPDLLCGQPADYLVEEKHFTTLVCFIVVLGGLLKMCLKNCEVIVLTILSLSGFVIGHMAYNSVEVHQIVYPLLRTSSFSLYSYFSPLIIFMVALDVEFYTLKKMFWQVLLTGLISFSTASIIIGYVVIKFNKDSWDLQSCLLFSITLGIIDPLRSVNSLKTIGISKIYIDLIRGESLIICSIASIFFGNFRGNRIHFSIFRDLHVGIELSYDILGSIIFGYWCAKIIQCILADVFSNMLTNIILCFSMVYMTFYIVEFLGMSGTLALAAVGLNLDSLTFKPKIELVITKFLRIFSSVYEHLIYAFFGIVIGCGELSHYEFHTIPFIFILFTTVNLVRLLTILLVSPILMHSNYEYNWRWGVVITWSGIKGVFNLLWAPDVYNLAERKVEVPQMFILYVQVISLLTMGINSYVMTQSARKLDLCVLSLPRQMILQNATQHIQEIVQNTITLFKTEKILTNVNWTLVEDKTRIEYIPFSHVSHNDMKTESTTDEALMEEARLHVAAIQMSSFEKQRNNGILEIEAARILIGAAKCYYSIQGKFMSIYDVSTYMRTRSWLIKFKNVLTFLEYCIEKIHFIPPESNTFLTFIFHIVFSEEFEYTGQIINLIYIYPMIIHLWPMARGLNVSALISINYYFMFLYVLESTLKIIILKRKYFQQCWNTLEFFILVIGIIDIFCVYFVKLRPDNLALIQLTVIMGYLRIIRFLPLFKIIVPILIRIADVQIKKRLSLMYSITKGYIKSQEDAKLLIKQIAVCESIYQKLCEILETNKQDAVKELVLMEHEGRDVVIALKTKQAIRNVIAKALKNLTFLCSRGIIDKHEVIEINKVLLKKLKALNNFPKAIPPPTPDIYLHNIIWLEGKDVLIDFFKERAKLACFDSGDTICKGGEMPQGIYLIISGMAILHSLSPTFGIESNQRCDRGSRDMFTEFCTTGDIIGELSCLLKREIEYTVICETSLQACFISLEDLYEGFDAFWPSLEYKIWLKLALSTAYQYFESSLIDEDLRFQNCVMFNQAYVETLSSYSDMIIDNMTMKFVIIVYGSVIDTKTEEPYFAPCIIPTTCEQVQGTSDLSKLLIIQASELTQRNSNTNVMASVNTVFEQPGKNINGRQKMS

SEQ ID NO: 82213 - protein, 815 aa, Homo sapiens
  Payload ID: 16362
  Gene Symbol: SLC9A1
  Gene Name: solute carrier family 9, subfamily A (NHE1, cation proton antiporter 1), member 1
  Uniprot ID: P19634
  ENSP ID: ENSP00000263980
MVLRSGICGLSPHRIFPSLLVVVALVGLLPVLRSHGLQLSPTASTIRSSEPPRERSIGDVTTAPPEVTPESRPVNHSVTDHGMKPRKAFPVLGIDYTHVRTPFEISLWILLACLMKIGFHVIPTISSIVPESCLLIVVGLLVGGLIKGVGETPPFLQSDVFFLFLLPPIILDAGYFLPLRQFTENLGTILIFAVVGTLWNAFFLGGLMYAVCLVGGEQINNIGLLDNLLFGSIISAVDPVAVLAVFEEIHINELLHILVFGESLLNDAVTVVLYHLFEEFANYEHVGIVDIFLGFLSFFVVALGGVLVGVVYGVIAAFTSRFTSHIRVIEPLFVFLYSYMAYLSAELFHLSGIMALIASGVVMRPYVEANISHKSHTTIKYFLKMWSSVSETLIFIFLGVSTVAGSHHWNWTFVISTLLFCLIARVLGVLGLTWFINKFRIVKLTPKDQFIIAYGGLRGAIAFSLGYLLDKKHFPMCDLFLTAIITVIFFTVFVQGMTIRPLVDLLAVKKKQETKRSINEEIHTQFLDHLLTGIEDICGHYGHHHWKDKLNRFNKKYVKKCLIAGERSKEPQLIAFYHKMEMKQAIELVESGGMGKIPSAVSTVSMQNIHPKSLPSERILPALSKDKEEEIRKILRNNLQKTRQRLRSYNRHTLVADPYEEAWNQMLLRRQKARQLEQKINNYLTVPAHKLDSPTMSRARIGSDPLAYEPKEDLPVITIDPASPQSPESVDLVNEELKGKVLGLSRDPAKVAEEDEDDDGGIMMRSKETSSPGTDDVFTPAPSDSPSSQRIQRCLSDPGPHPEPGEGEPFFPKGQ

SEQ ID NO: 82214 - protein, 135 aa, Homo sapiens
  Payload ID: 16362
  Gene Symbol: SLC9A1
  Gene Name: solute carrier family 9, subfamily A (NHE1, cation proton antiporter 1), member 1
  ENSP ID: ENSP00000363197
MVLRSGICGLSPHRIFPSLLVVVALVGLLPVLRSHGLQLSPTASTIRSSEPPRERSIGDVTTAPPEVTPESRPVNHSVTDHGMKPRKAFPVLGIDYTHVRTPFEISLWILLACLMKIGFHVIPTISSIVPESCLL

SEQ ID NO: 82215 - protein, 555 aa, Homo sapiens
  Payload ID: 16362
  Gene Symbol: SLC9A1
  Gene Name: solute carrier family 9, subfamily A (NHE1, cation proton antiporter 1), member 1
  Uniprot ID: P19634
  ENSP ID: ENSP00000363199
MVLRSGICGLSPHRIFPSLLVVVALVGLLPVLRSHGLQLSPTASTIRSSEPPRERSIGDVTTAPPEVTPESRPVNHSVTDHGMKPRKAFPVLGIDYTHVRTPFEISLWILLACLMKIGFHVIPTISSIVPESCLLIVVGLLVGGLIKGVGETPPFLQSDVFFLFLLPPIILDAGYFLPLRQFTENLGTILIFAVVGTLWNAFFLGGLMYAVCLVGGEQINNIGLLDNLLFGSIISAVDPVAVLAVFEEIHINELLHILVFGESLLNDAVTVVLYHLFEEFANYEHVGIVDIFLGFLSFFVVALGGVLVGVVYGVIAAFTSRFTSHIRVIEPLFVFLYSYMAYLSAELFHLSGIMALIASGVVMRPYVEANISHKSHTTIKYFLKMWSSVSETLIFIFLGVSTVAGSHHWNWTFVISTLLFCLIARVLGVLGLTWFINKFRIVKLTPKDQFIIAYGGLRGAIAFSLGYLLDKKHFPMCDLFLTAIITVIFFTVFVQVLGQGRAGPCLGDPHRLFPWKERKACDLKCDSSPSSTTNLLCDLGRATPPFWASVSSIVK

SEQ ID NO: 82216 - protein, 812 aa, Homo sapiens
  Payload ID: 16363
  Gene Symbol: SLC9A2
  Gene Name: solute carrier family 9, subfamily A (NHE2, cation proton antiporter 2), member 2
  Uniprot ID: Q9UBY0
  ENSP ID: ENSP00000233969
MEPLGNWRSLRAPLPPMLLLLLLQVAGPVGALAETLLNAPRAMGTSSSPPSPASVVAPGTTLFEESRLPVFTLDYPHVQIPFEITLWILLASLAKIGFHLYHKLPTIVPESCLLIMVGLLLGGIIFGVDEKSPPAMKTDVFFLYLLPPIVLDAGYFMPTRPFFENIGTIFWYAVVGTLWNSIGIGVSLFGICQIEAFGLSDITLLQNLLFGSLISAVDPVAVLAVFENIHVNEQLYILVFGESLLNDAVTVVLYNLFKSFCQMKTIETIDVFAGIANFFVVGIGGVLIGIFLGFIAAFTTRFTHNIRVIEPLFVFLYSYLSYITAEMFHLSGIMAITACAMTMNKYVEENVSQKSYTTIKYFMKMLSSVSETLIFIFMGVSTVGKNHEWNWAFVCFTLAFCLMWRALGVFVLTQVINRFRTIPLTFKDQFIIAYGGLRGAICFALVFLLPAAVFPRKKLFITAAIVVIFFTVFILGITIRPLVEFLDVKRSNKKQQAVSEEIYCRLFDHVKTGIEDVCGHWGHNFWRDKFKKFDDKYLRKLLIRENQPKSSIVSLYKKLEIKHAIEMAETGMISTVPTFASLNDCREEKIRKVTSSETDEIRELLSRNLYQIRQRTLSYNRHSLTADTSERQAKEILIRRRHSLRESIRKDSSLNREHRASTSTSRYLSLPKNTKLPEKLQKRRTISIADGNSSDSDADAGTTVLNLQPRARRFLPEQFSKKSPQSYKMEWKNEVDVDSGRDMPSTPPTPHSREKGTQTSGLLQQPLLSKDQSGSEREDSLTEGIPPKPPPRLVWRASEPGSRKARFGSEKP

SEQ ID NO: 82217 - protein, 834 aa, Homo sapiens
  Payload ID: 16364
  Gene Symbol: SLC9A3
  Gene Name: solute carrier family 9, subfamily A (NHE3, cation proton antiporter 3), member 3
  Uniprot ID: P48764
  ENSP ID: ENSP00000264938
MWGLGARGPDRGLLLALALGGLARAGGVEVEPGGAHGESGGFQVVTFEWAHVQDPYVIALWILVASLAKIGFHLSHKVTSVVPESALLIVLGLVLGGIVWAADHIASFTLTPTVFFFYLLPPIVLDAGYFMPNRLFFGNLGTILLYAVVGTVWNAATTGLSLYGVFLSGLMGDLQIGLLDFLLFGSLMAAVDPVAVLAVFEEVHVNEVLFIIVFGESLLNDAVTVVLYNVFESFVALGGDNVTGVDCVKGIVSFFVVSLGGTLVGVVFAFLLSLVTRFTKHVRIIEPGFVFIISYLSYLTSEMLSLSAILAITFCGICCQKYVKANISEQSATTVRYTMKMLASSAETIIFMFLGISAVNPFIWTWNTAFVLLTLVFISVYRAIGVVLQTWLLNRYRMVQLEPIDQVVLSYGGLRGAVAFALVVLLDGDKVKEKNLFVSTTIIVVFFTVIFQGLTIKPLVQWLKVKRSEHREPRLNEKLHGRAFDHILSAIEDISGQIGHNYLRDKWSHFDRKFLSRVLMRRSAQKSRDRILNVFHELNLKDAISYVAEGERRGSLAFIRSPSTDNVVNVDFTPRSSTVEASVSYLLRENVSAVCLDMQSLEQRRRSIRDAEDMVTHHTLQQYLYKPRQEYKHLYSRHELTPTEDEKQDREIFHRTMRKRLESFKSTKLGLNQNKKAAKLYKRERAQKRRNSSIPNGKLPMESPAQNFTIKEKDLELSDTEEPPNYDEEMSGGIEFLASVTKDTASDSPAGIDNPVFSPDEALDRSLLARLPPWLSPGETVVPSQRARTQIPYSPGTFCRLMPFRLSSKSVDSFLQADGPEERPPAALPESTHM

SEQ ID NO: 82218 - protein, 825 aa, Homo sapiens
  Payload ID: 16364
  Gene Symbol: SLC9A3
  Gene Name: solute carrier family 9, subfamily A (NHE3, cation proton antiporter 3), member 3
  Uniprot ID: P48764
  ENSP ID: ENSP00000422983
MWGLGARGPDRGLLLALALGGLARAGGVEVEPGGAHGESGGFQVVTFEWAHVQDPYVIALWILVASLAKIGFHLSHKVTSVVPESALLIVLGLVLGGIVWAADHIASFTLTPTVFFFYLLPPIVLDAGYFMPNRLFFGNLGTILLYAVVGTVWNAATTGLSLYGVFLSGLMGDLQIGLLDFLLFGSLMAAVDPVAVLAVFEEVHVNEVLFIIVFGESLLNDAVTVVLYNVFESFVALGGDNVTGVDCVKGIVSFFVVSLGGTLVGVVFAFLLSLVTRFTKHVRIIEPGFVFIISYLSYLTSEMLSLSAILAITFCGICCQKYVKANISEQSATTVRYTMKMLASSAETIIFMFLGISAVNPFIWTWNTAFVLLTLVFISVYRAIGVVLQTWLLNRYRMVQLEPIDQVVLSYGGLRGAVAFALVVLLDGDKVKEKNLFVSTTIIVVFFTVIFQWLKVKRSEHREPRLNEKLHGRAFDHILSAIEDISGQIGHNYLRDKWSHFDRKFLSRVLMRRSAQKSRDRILNVFHELNLKDAISYVAEGERRGSLAFIRSPSTDNVVNVDFTPRSSTVEASVSYLLRENVSAVCLDMQSLEQRRRSIRDAEDMVTHHTLQQYLYKPRQEYKHLYSRHELTPTEDEKQDREIFHRTMRKRLESFKSTKLGLNQNKKAAKLYKRERAQKRRNSSIPNGKLPMESPAQNFTIKEKDLELSDTEEPPNYDEEMSGGIEFLASVTKDTASDSPAGIDNPVFSPDEALDRSLLARLPPWLSPGETVVPSQRARTQIPYSPGTFCRLMPFRLSSKSVDSFLQADGPEERPPAALPESTHM

SEQ ID NO: 82219 - protein, 70 aa, Homo sapiens
  Payload ID: 16364
  Gene Symbol: SLC9A3
  Gene Name: solute carrier family 9, subfamily A (NHE3, cation proton antiporter 3), member 3
  ENSP ID: ENSP00000486297
MWGLGARGPDRGLLLALALGGLARAGGVEVEPGGAHGESGGFQVVTFEWAHVQDPYVIALWILVASLAKI

SEQ ID NO: 82220 - protein, 70 aa, Homo sapiens; identical to SEQ ID NO: 82219
  Payload ID: 16364
  Gene Symbol: SLC9A3
  Gene Name: solute carrier family 9, subfamily A (NHE3, cation proton antiporter 3), member 3
  ENSP ID: ENSP00000486364

SEQ ID NO: 82221 - protein, 358 aa, Homo sapiens
  Payload ID: 16365
  Gene Symbol: SLC9A3R1
  Gene Name: solute carrier family 9, subfamily A (NHE3, cation proton antiporter 3), member 3 regulator 1
  Uniprot ID: O14745
  ENSP ID: ENSP00000262613
MSADAAAGAPLPRLCCLEKGPNGYGFHLHGEKGKLGQYIRLVEPGSPAEKAGLLAGDRLVEVNGENVEKETHQQVVSRIRAALNAVRLLVVDPETDEQLQKLGVQVREELLRAQEAPGQAEPPAAAEVQGAGNENEPREADKSHPEQRELRPRLCTMKKGPSGYGFNLHSDKSKPGQFIRSVDPDSPAEASGLRAQDRIVEVNGVCMEGKQHGDVVSAIRAGGDETKLLVVDRETDEFFKKCRVIPSQEHLNGPLPVPFTNGEIQKENSREALAEAALESPRPALVRSASSDTSEELNSQDSPPKQDSTAPSSTSSSDPILDFNISLAMAKERAHQKRSSKRAPQMDWSKKNELFSNL

SEQ ID NO: 82222 - protein, 35 aa, Homo sapiens
  Payload ID: 16365
  Gene Symbol: SLC9A3R1
  Gene Name: solute carrier family 9, subfamily A (NHE3, cation proton antiporter 3), member 3 regulator 1
  ENSP ID: ENSP00000464117
  MOD_RES (1)..(1): Any amino acid
XGDETKLLVVDRETDEFFKKCRVIPSQEHLNGEQS

SEQ ID NO: 82223 - protein, 215 aa, Homo sapiens
  Payload ID: 16365
  Gene Symbol: SLC9A3R1
  Gene Name: solute carrier family 9, subfamily A (NHE3, cation proton antiporter 3), member 3 regulator 1
  ENSP ID: ENSP00000464321
MSADAAAGAPLPRLCCLEKGPNGYGFHLHGEKGKLGQYIRLVEPGSPAEKAGLLAGDRLVEVNGENVEKETHQQVVSRIRAALNAVRLLVVDPETDEQLQKLGVQVREELLRAQEAPGQAEPPAAAEVQGAGNENEPREADKSHPEQENSREALAEAALESPRPALVRSASSDTSEELNSQDSPPKQDSTAPSSTSSSDPILDFNISLAMAKERA

SEQ ID NO: 82224 - protein, 202 aa, Homo sapiens
  Payload ID: 16365
  Gene Symbol: SLC9A3R1
  Gene Name: solute carrier family 9, subfamily A (NHE3, cation proton antiporter 3), member 3 regulator 1
  Uniprot ID: O14745
  ENSP ID: ENSP00000464982
MKKGPSGYGFNLHSDKSKPGQFIRSVDPDSPAEASGLRAQDRIVEVNGVCMEGKQHGDVVSAIRAGGDETKLLVVDRETDEFFKKCRVIPSQEHLNGPLPVPFTNGEIQKENSREALAEAALESPRPALVRSASSDTSEELNSQDSPPKQDSTAPSSTSSSDPILDFNISLAMAKERAHQKRSSKRAPQMDWSKKNELFSNL

SEQ ID NO: 82225 - protein, 326 aa, Homo sapiens
  Payload ID: 16366
  Gene Symbol: SLC9A3R2
  Gene Name: solute carrier family 9, subfamily A (NHE3, cation proton antiporter 3), member 3 regulator 2
  Uniprot ID: Q15599
  ENSP ID: ENSP00000402857
MAAPEPLRPRLCRLVRGEQGYGFHLHGEKGRRGQFIRRVEPGSPAEAAALRAGDRLVEVNGVNVEGETHHQVVQRIKAVEGQTRLLVVDQETDEELRRRQLTCTEEMAQRGLPPAHDPWEPKPDWAHTGSHSSEAGKKDVSGPLRELRPRLCHLRKGPQGYGFNLHSDKSRPGQYIRSVDPGSPAARSGLRAQDRLIEVNGQNVEGLRHAEVVASIKAREDEARLLVVDPETDEHFKRLRVTPTEEHVEGPLPSPVTNGTSPAQLNGGSACSSRSDLPGSDKDTEESGLHLSPTAAEAKEKARAMRVNKRAPQMDWNRKREIFSNF

SEQ ID NO: 82226 - protein, 337 aa, Homo sapiens
  Payload ID: 16366
  Gene Symbol: SLC9A3R2
  Gene Name: solute carrier family 9, subfamily A (NHE3, cation proton antiporter 3), member 3 regulator 2
  Uniprot ID: Q15599
  ENSP ID: ENSP00000408005
MAAPEPLRPRLCRLVRGEQGYGFHLHGEKGRRGQFIRRVEPGSPAEAAALRAGDRLVEVNGVNVEGETHHQVVQRIKAVEGQTRLLVVDQETDEELRRRQLTCTEEMAQRGLPPAHDPWEPKPDWAHTGSHSSEAGKKDVSGPLRELRPRLCHLRKGPQGYGFNLHSDKSRPGQYIRSVDPGSPAARSGLRAQDRLIEVNGQNVEGLRHAEVVASIKAREDEARLLVVDPETDEHFKRLRVTPTEEHVEGPLPSPVTNGTSPAQLNGGSACSSRSDLPGSDKDTEDGSAWKQDPFQESGLHLSPTAAEAKEKARAMRVNKRAPQMDWNRKREIFSNF

SEQ ID NO: 82227 - protein, 151 aa, Homo sapiens
  Payload ID: 16366
  Gene Symbol: SLC9A3R2
  Gene Name: solute carrier family 9, subfamily A (NHE3, cation proton antiporter 3), member 3 regulator 2
  ENSP ID: ENSP00000454361
MGTQGAMAQEAAQRRALCLGGGRGAQPRAPERREGEEDCAKPASTAHMGNCLGWLCLTPGNQVVQRIKAVEGQTRLLVVDQETDEELRRRQLTCTEEMAQRGLPPAHDPWEPKPDWAHTGSHSSEAGKKDVSGPLRELRPRLCHLRKGPQG

SEQ ID NO: 82228 - protein, 223 aa, Homo sapiens
  Payload ID: 16366
  Gene Symbol: SLC9A3R2
  Gene Name: solute carrier family 9, subfamily A (NHE3, cation proton antiporter 3), member 3 regulator 2
  ENSP ID: ENSP00000454690
MARSGSATPPARAPGAPPRSPPQRLDVSGPLRELRPRLCHLRKGPQGYGFNLHSDKSRPGQYIRSVDPGSPAARSGLRAQDRLIEVNGQNVEGLRHAEVVASIKAREDEARLLVVDPETDEHFKRLRVTPTEEHVEGPLPSPVTNGTSPAQLNGGSACSSRSDLPGSDKDTEDGSAWKQDPFQESGLHLSPTAAEAKEKARAMRVNKRAPQMDWNRKREIFSN

SEQ ID NO: 82229 - protein, 231 aa, Homo sapiens
  Payload ID: 16366
  Gene Symbol: SLC9A3R2
  Gene Name: solute carrier family 9, subfamily A (NHE3, cation proton antiporter 3), member 3 regulator 2
  ENSP ID: ENSP00000455909
MAQRGLPPAHDPWEPKPDWAHTGSHSSEAGKKDVSGPLRELRPRLCHLRKGPQGYGFNLHSDKSRPGQYIRSVDPGSPAARSGLRAQDRLIEVNGQNVEGLRHAEVVASIKAREDEARLLVVDPETDEHFKRLRVTPTEEHVEGPLPSPVTNGTSPAQLNGGSACSSRSDLPGSDKDTEDGSAWKQDPFQESGLHLSPTAAEAKEKARAMRVNKRAPQMDWNRKREIFSNF

SEQ ID NO: 82230 - protein, 226 aa, Homo sapiens
  Payload ID: 16366
  Gene Symbol: SLC9A3R2
  Gene Name: solute carrier family 9, subfamily A (NHE3, cation proton antiporter 3), member 3 regulator 2
  Uniprot ID: Q15599
  ENSP ID: ENSP00000456895
MARSGSATPPARAPGAPPRSPPQRLVQDVSGPLRELRPRLCHLRKGPQGYGFNLHSDKSRPGQYIRSVDPGSPAARSGLRAQDRLIEVNGQNVEGLRHAEVVASIKAREDEARLLVVDPETDEHFKRLRVTPTEEHVEGPLPSPVTNGTSPAQLNGGSACSSRSDLPGSDKDTEDGSAWKQDPFQESGLHLSPTAAEAKEKARAMRVNKRAPQMDWNRKREIFSNF

SEQ ID NO: 82231 - protein, 166 aa, Homo sapiens
  Payload ID: 16366
  Gene Symbol: SLC9A3R2
  Gene Name: solute carrier family 9, subfamily A (NHE3, cation proton antiporter 3), member 3 regulator 2
  ENSP ID: ENSP00000457755
  MOD_RES (1)..(1): Any amino acid
XSHSSEAGKKDVSGPLRELRPRLCHLRKGPQGYGFNLHSDKSRPGQYIRSVDPGSPAARSGLRAQDRLIEVNGQNVEGLRHAEVVASIKAREDEARLLVVDPETDEHFKRLRVTPTEEHVEGPLPSPVTNGTSPAQLNGGSACSSRSDLPGSDKDTEEGPPSGVWD

SEQ ID NO: 82232 - protein, 798 aa, Homo sapiens
  Payload ID: 16367
  Gene Symbol: SLC9A4
  Gene Name: solute carrier family 9, subfamily A (NHE4, cation proton antiporter 4), member 4
  Uniprot ID: Q6AI14
  ENSP ID: ENSP00000295269
MALQMFVTYSPWNCLLLLVALECSEASSDLNESANSTAQYASNAWFAAASSEPEEGISVFELDYDYVQIPYEVTLWILLASLAKIGFHLYHRLPGLMPESCLLILVGALVGGIIFGTDHKSPPVMDSSIYFLYLLPPIVLEGGYFMPTRPFFENIGSILWWAVLGALINALGIGLSLYLICQVKAFGLGDVNLLQNLLFGSLISAVDPVAVLAVFEEARVNEQLYMMIFGEALLNDGITVVLYNMLIAFTKMHKFEDIETVDILAGCARFIVVGLGGVLFGIVFGFISAFITRFTQNISAIEPLIVFMFSYLSYLAAETLYLSGILAITACAVTMKKYVEENVSQTSYTTIKYFMKMLSSVSETLIFIFMGVSTVGKNHEWNWAFICFTLAFCQIWRAISVFALFYISNQFRTFPFSIKDQCIIFYSGVRGAGSFSLAFLLPLSLFPRKKMFVTATLVVIYFTVFIQGITVGPLVRYLDVKKTNKKESINEELHIRLMDHLKAGIEDVCGHWSHYQVRDKFKKFDHRYLRKILIRKNLPKSSIVSLYKKLEMKQAIEMVETGILSSTAFSIPHQAQRIQGIKRLSPEDVESIRDILTSNMYQVRQRTLSYNKYNLKPQTSEKQAKEILIRRQNTLRESMRKGHSLPWGKPAGTKNIRYLSYPYGNPQSAGRDTRAAGFSDDDSSDPGSPSITFSACSRIGSLQKQEAQEIIPMKSLHRGRKAFSFGYQRNTSQEEYLGGVRRVALRPKPLFHAVDEEGESGGESEGKASLVEVRSRWTADHGHGRDHHRSHSPLLQKK

SEQ ID NO: 82233 - protein, 896 aa, Homo sapiens
  Payload ID: 16368
  Gene Symbol: SLC9A5
  Gene Name: solute carrier family 9, subfamily A (NHE5, cation proton antiporter 5), member 5
  Uniprot ID: Q14940
  ENSP ID: ENSP00000299798
MLRAALSLLALPLAGAAEEPTQKPESPGEPPPGLELFRWQWHEVEAPYLVALWILVASLAKIVFHLSRKVTSLVPESCLLILLGLVLGGIVLAVAKKAEYQLEPGTFFLFLLPPIVLDSGYFMPSRLFFDNLGAILTYAVVGTLWNAFTTGAALWGLQQAGLVAPRVQAGLLDFLLFGSLISAVDPVAVLAVFEEVHVNETLFIIVFGESLLNDAVTVVLYKVCNSFVEMGSANVQATDYLKGVASLFVVSLGGAAVGLVFAFLLALTTRFTKRVRIIEPLLVFLLAYAAYLTAEMASLSAILAVTMCGLGCKKYVEANISHKSRTTVKYTMKTLASCAETVIFMLLGISAVDSSKWAWDSGLVLGTLIFILFFRALGVVLQTWVLNQFRLVPLDKIDQVVMSYGGLRGAVAFALVILLDRTKVPAKDYFVATTIVVVFFTVIVQGLTIKPLVKWLKVKRSEHHKPTLNQELHEHTFDHILAAVEDVVGHHGYHYWRDRWEQFDKKYLSQLLMRRSAYRIRDQIWDVYYRLNIRDAISFVDQGGHVLSSTGLTLPSMPSRNSVAETSVTNLLRESGSGACLDLQVIDTVRSGRDREDAVMHHLLCGGLYKPRRRYKASCSRHFISEDAQERQDKEVFQQNMKRRLESFKSTKHNICFTKSKPRPRKTGRRKKDGVANAEATNGKHRGLGFQDTAAVILTVESEEEEEESDSSETEKEDDEGIIFVARATSEVLQEGKVSGSLEVCPSPRIIPPSPTCAEKELPWKSGQGDLAVYVSSETTKIVPVDMQTGWNQSISSLESLASPPCNQAPILTCLPPHPRGTEEPQVPLHLPSDPRSSFAFPPSLAKAGRSRSESSADLPQQQELQPLMGHKDHTHLSPGTATSHWCIQFNRGSRL

SEQ ID NO: 82234 - protein, 175 aa, Homo sapiens
  Payload ID: 16368
  Gene Symbol: SLC9A5
  Gene Name: solute carrier family 9, subfamily A (NHE5, cation proton antiporter 5), member 5
  ENSP ID: ENSP00000455058
MLRAALSLLALPLAGAAEEPTQKPESPGEPPPGLELFRWQWHEVEAPYLVALWILVASLAKIVFHLSRKVTSLVPESCLLILLGLVLGGIVLAVAKKAEYQLEPGTFFLFLLPPIVLDSGYFMPSRLFFDNLGAILTYAVVGTLWNAFTTGWLTGLPAVWEPHLGGGPRGRASCL

SEQ ID NO: 82235 - protein, 273 aa, Homo sapiens
  Payload ID: 16368
  Gene Symbol: SLC9A5
  Gene Name: solute carrier family 9, subfamily A (NHE5, cation proton antiporter 5), member 5
  ENSP ID: ENSP00000462404
  MOD_RES (1)..(1): Any amino acid
XALWGLQQAGLVAPRVQAGLLDFLLFGSLISAVDPVAVLAVFEEVHVNETLFIIVFGESLLNDAVTVYKASCSRHFISEDAQERQDKEVFQQNMKRRLESFKSTKHNICFTKSKPRPRKTGRRKKDGVANAEATNGKHRGLGFQDTAAVILTVESEEEEEESDSSETEKEDDEGIIFVARATSEVLQEGKVSGSLEVCPSPRIIPPSPTCAEKELPWKSGQGDLAVYVSSETTKIVPVDMQTGWNQSISSLESLASPPCNQAPILTCLPPHPR

SEQ ID NO: 82236 - protein, 171 aa, Homo sapiens
  Payload ID: 16368
  Gene Symbol: SLC9A5
  Gene Name: solute carrier family 9, subfamily A (NHE5, cation proton antiporter 5), member 5
  ENSP ID: ENSP00000462446
MRRGRCLPVFHLSRKVTSLVPESCLLILLGLVLGGIVLAVAKKAEYQLEPGTFFLFLLPPIVLDSGYFMPSRLFFDNLGAILTYAVVGTLWNAFTTGAALWGLQQAGLVGLTLPSMPSRNSVAETSVTNLLRESGSGACLDLQVIDTVRSGRDREDAVMHHLLCGGLYKPR

SEQ ID NO: 82237 - protein, 178 aa, Homo sapiens
  Payload ID: 16368
  Gene Symbol: SLC9A5
  Gene Name: solute carrier family 9, subfamily A (NHE5, cation proton antiporter 5), member 5
  ENSP ID: ENSP00000464393
FFDNLGAILTYAVVGTLWNAFTTGAALWGLQQAGLVGLTLPSMPSRNSVAETSVTNLLRESGSGACLDLQVIDTVRSGRDREDAVMHHLLCGGLYKPRRRYKASCSRHFISEDAQERQDKEVFQQNMKRRLESFKSTKHNICFTKSKPRPRKTGRRKDGVANAEATNGKHRGLGFQDT

SEQ ID NO: 82238 - protein, 701 aa, Homo sapiens
  Payload ID: 16369
  Gene Symbol: SLC9A6
  Gene Name: solute carrier family 9, subfamily A (NHE6, cation proton antiporter 6), member 6
  Uniprot ID: Q92581
  ENSP ID: ENSP00000359729
MARRGWRRAPLRRGVGSSPRARRLMRPLWLLLAVGVFDWAGASDGGGGEARAMDEEIVSEKQAEESHRQDSANLLIFILLLTLTILTIWLFKHRRARFLHETGLAMIYGLLVGLVLRYGIHVPSDVNNVTLSCEVQSSPTTLLVNVSGKFYEYMLKGEISSHELNNVQDNEMLRKVTFDPEVFFNILLPPIIFYAGYSLKRRHFFRNLGSILAYAFLGTAISCFVIGSIMYGCVTLMKVTGQLAGDFYFTDCLLFGAIVSATDPVTVLAIFHELQVDVELYALLFGESVLNDAVAIVLSSSIVAYQPAGDNSHTFDVTAMFKSIGIFLGIFSGSFAMGAATGVVTALVTKFTKLREFQLLETGLFFLMSWSTFLLAEAWGFTGVVAVLFCGITQAHYTYNNLSTESQHRTKQLFELLNFLAENFIFSYMGLTLFTFQNHVFNPTFVVGAFVAIFLGRAANIYPLSLLLNLGRRSKIGSNFQHMMMFAGLRGAMAFALAIRDTATYARQMMFSTTLLIVFFTVWVFGGGTTAMLSCLHIRVGVDSDQEHLGVPENERRTTKAESAWLFRMWYNFDHNYLKPLLTHSGPPLTTTLPACCGPIARCLTSPQAYENQEQLKDDDSDLILNDGDISLTYGDSTVNTEPATSSAPRRFMGNSSEDALDRELAFGDHELVIRGTRLVLPMDDSEPPLNLLDNTRHGPA

SEQ ID NO: 82239 - protein, 669 aa, Homo sapiens
  Payload ID: 16369
  Gene Symbol: SLC9A6
  Gene Name: solute carrier family 9, subfamily A (NHE6, cation proton antiporter 6), member 6
  Uniprot ID: Q92581
  ENSP ID: ENSP00000359732
MARRGWRRAPLRRGVGSSPRARRLMRPLWLLLAVGVFDWAGASDGGGGEARAMDEEIVSEKQAEESHRQDSANLLIFILLLTLTILTIWLFKHRRARFLHETGLAMIYGLLVGLVLRYGIHVPSDVNNVTLSCEVQSSPTTLLVTFDPEVFFNILLPPIIFYAGYSLKRRHFFRNLGSILAYAFLGTAISCFVIGSIMYGCVTLMKVTGQLAGDFYFTDCLLFGAIVSATDPVTVLAIFHELQVDVELYALLFGESVLNDAVAIVLSSSIVAYQPAGDNSHTFDVTAMFKSIGIFLGIFSGSFAMGAATGVVTALVTKFTKLREFQLLETGLFFLMSWSTFLLAEAWGFTGVVAVLFCGITQAHYTYNNLSTESQHRTKQLFELLNFLAENFIFSYMGLTLFTFQNHVFNPTFVVGAFVAIFLGRAANIYPLSLLLNLGRRSKIGSNFQHMMMFAGLRGAMAFALAIRDTATYARQMMFSTTLLIVFFTVWVFGGGTTAMLSCLHIRVGVDSDQEHLGVPENERRTTKAESAWLFRMWYNFDHNYLKPLLTHSGPPLTTTLPACCGPIARCLTSPQAYENQEQLKDDDSDLILNDGDISLTYGDSTVNTEPATSSAPRRFMGNSSEDALDRELAFGDHELVIRGTRLVLPMDDSEPPLNLLDNTRHGPA

SEQ ID NO: 82240 - protein, 649 aa, Homo sapiens
  Payload ID: 16369
  Gene Symbol: SLC9A6
  Gene Name: solute carrier family 9, subfamily A (NHE6, cation proton antiporter 6), member 6
  Uniprot ID: Q92581
  ENSP ID: ENSP00000359735
MDEEIVSEKQAEESHRQDSANLLIFILLLTLTILTIWLFKHRRARFLHETGLAMIYGLLVGLVLRYGIHVPSDVNNVTLSCEVQSSPTTLLVNVSGKFYEYMLKGEISSHELNNVQDNEMLRKVTFDPEVFFNILLPPIIFYAGYSLKRRHFFRNLGSILAYAFLGTAISCFVIGSIMYGCVTLMKVTGQLAGDFYFTDCLLFGAIVSATDPVTVLAIFHELQVDVELYALLFGESVLNDAVAIVLSSSIVAYQPAGDNSHTFDVTAMFKSIGIFLGIFSGSFAMGAATGVVTALVTKFTKLREFQLLETGLFFLMSWSTFLLAEAWGFTGVVAVLFCGITQAHYTYNNLSTESQHRTKQLFELLNFLAENFIFSYMGLTLFTFQNHVFNPTFVVGAFVAIFLGRAANIYPLSLLLNLGRRSKIGSNFQHMMMFAGLRGAMAFALAIRDTATYARQMMFSTTLLIVFFTVWVFGGGTTAMLSCLHIRVGVDSDQEHLGVPENERRTTKAESAWLFRMWYNFDHNYLKPLLTHSGPPLTTTLPACCGPIARCLTSPQAYENQEQLKDDDSDLILNDGDISLTYGDSTVNTEPATSSAPRRFMGNSSEDALDRELAFGDHELVIRGTRLVLPMDDSEPPLNLLDNTRHGPA

SEQ ID NO: 82241 - protein, 184 aa, Homo sapiens
  Payload ID: 16369
  Gene Symbol: SLC9A6
  Gene Name: solute carrier family 9, subfamily A (NHE6, cation proton antiporter 6), member 6
  ENSP ID: ENSP00000486743
MDEEIVSEKQAEESHRQDSANLLIFILLLTLTILTIWLFKHRRARFLHETGLAMIYGLLVGLVLRYGIHVPSDVNNVTLSCEVQSSPTTLLVNVSGKFYEYMLKGEISSHELNNVQDNEMLRKVTFDPEVFFNILLPPIIFYAGYSLKRRHFFRNLGSILAYAFLGTAISCFVIGSIMYGCVTL

SEQ ID NO: 82242 - protein, 206 aa, Homo sapiens
  Payload ID: 16369
  Gene Symbol: SLC9A6
  Gene Name: solute carrier family 9, subfamily A (NHE6, cation proton antiporter 6), member 6
  ENSP ID: ENSP00000487486
  MOD_RES (1)..(1): Any amino acid
XYARQMMFSTTLLIVFFTVWVFGGGTTAMLSCLHIRYCARLWGYRDELRHGLYPQGTHSLFGETDRVGVDSDQEHLGVPENERRTTKAESAWLFRMWYNFDHNYLKPLLTHSGPPLTTTLPACCGPIARCLTSPQAYENQEQLKDDDSDLILNDGDISLTYGDSTVNTEPATSSAPRRFMGNSSEDALDRELAFGDHELVIRGTRL

SEQ ID NO: 82243 - protein, 725 aa, Homo sapiens
  Payload ID: 16370
  Gene Symbol: SLC9A7
  Gene Name: solute carrier family 9, subfamily A (NHE7, cation proton antiporter 7), member 7
  Uniprot ID: Q96T83
  ENSP ID: ENSP00000330320
MEPGDAARPGSGRATGAPPPRLLLLPLLLGWGLRVAAAASASSSGAAAEDSSAMEELATEKEAEESHRQDSVSLLTFILLLTLTILTIWLFKHRRVRFLHETGLAMIYGLIVGVILRYGTPATSGRDKSLSCTQEDRAFSTLLVNVSGKFFEYTLKGEISPGKINSVEQNDMLRKVTFDPEVFFNILLPPIIFHAGYSLKKRHFFRNLGSILAYAFLGTAVSCFIIGNLMYGVVKLMKIMGQLSDKFYYTDCLFFGAIISATDPVTVLAIFNELHADVDLYALLFGESVLNDAVAIVLSSSIVAYQPAGLNTHAFDAAAFFKSVGIFLGIFSGSFTMGAVTGVNANVTKFTKLHCFPLLETALFFLMSWSTFLLAEACGFTGVVAVLFCGITQAHYTYNNLSVESRSRTKQLFEVLHFLAENFIFSYMGLALFTFQKHVFSPIFIIGAFVAIFLGRAAHIYPLSFFLNLGRRHKIGWNFQHMMMFSGLRGAMAFALAIRDTASYARQMMFTTTLLIVFFTVWIIGGGTTPMLSWLNIRVGVEEPSEEDQNEHHWQYFRVGVDPDQDPPPNNDSFQVLQGDGPDSARGNRTKQESAWIFRLWYSFDHNYLKPILTHSGPPLTTTLPAWCGLLARCLTSPQVYDNQEPLREEDSDFILTEGDLTLTYGDSTVTANGSSSSHTASTSLEGSRRTKSSSEEVLERDLGMGDQKVSSRGTRLVFPLEDNA

SEQ ID NO: 82244 - protein, 726 aa, Homo sapiens
  Payload ID: 16370
  Gene Symbol: SLC9A7
  Gene Name: solute carrier family 9, subfamily A (NHE7, cation proton antiporter 7), member 7
  ENSP ID: ENSP00000480916
MEPGDAARPGSGRATGAPPPRLLLLPLLLGWGLRVAAAASASSSGAAAEDSSAMEELATEKEAEESHRQDSVSLLTFILLLTLTILTIWLFKHRRVRFLHETGLAMIYGLIVGVILRYGTPATSGRDKSLSCTQEDRAFSTLLVNVSGKFFEYTLKGEISPGKINSVEQNDMLRKVTFDPEVFFNILLPPIIFHAGYSLKKRHFFRNLGSILAYAFLGTAVSCFIIGNLMYGVVKLMKIMGQLSDKFYYTDCLFFGAIISATDPVTVLAIFNELHADVDLYALLFGESVLNDAVAIVLSSSIVAYQPAGLNTHAFDAAAFFKSVGIFLGIFSGSFTMGAVTGVVTALVTKFTKLHCFPLLETALFFLMSWSTFLLAEACGFTGVVAVLFCGITQAHYTYNNLSVESRSRTKQLFEVLHFLAENFIFSYMGLALFTFQKHVFSPIFIIGAFVAIFLGRAAHIYPLSFFLNLGRRHKIGWNFQHMMMFSGLRGAMAFALAIRDTASYARQMMFTTTLLIVFFTVWIIGGGTTPMLSWLNIRVGVEEPSEEDQNEHHWQYFRVGVDPDQDPPPNNDSFQVLQGDGPDSARGNRTKQESAWIFRLWYSFDHNYLKPILTHSGPPLTTTLPAWCGLLARCLTSPQVYDNQEPLREEDSDFILTEGDLTLTYGDSTVTANGSSSSHTASTSLEGSRRTKSSSEEVLERDLGMGDQKVSSRGTRLVFPLEDNA

SEQ ID NO: 82245 - protein, 581 aa, Homo sapiens
  Payload ID: 16371
  Gene Symbol: SLC9A8
  Gene Name: solute carrier family 9, subfamily A (NHE8, cation proton antiporter 8), member 8
  Uniprot ID: Q9Y2E8
  ENSP ID: ENSP00000354966
MGEKMAEEERFPNTTHEGFNVTLHTTLVVTTKLVLPTPGKPILPVQTGEQAQQEEQSSGMTIFFSLLVLAICIILVHLLIRYRLHFLPESVAVVSLGILMGAVIKIIEFKKLANWKEEEMFRPNMFFLLLLPPIIFESGYSLHKGNFFQNIGSITLFAVFGTAISAFVVGGGIYFLGQADVISKLNMTDSFAFGSLISAVDPVATIAIFNALHVDPVLNMLVFGESILNDAVSIVLTNTAEGLTRKNMSDVSGWQTFLQALDYFLKMFFGSAALGTLTGLISALVLKHIDLRKTPSLEFGMMIIFAYLPYGLAEGISLSGIMAILFSGIVMSHYTHHNLSPVTQILMQQTLRTVAFLCETCVFAFLGLSIFSFPHKFEISFVIWCIVLVLFGRAVNIFPLSYLLNFFRDHKITPKMMFIMWFSGLRGAIPYALSLHLDLEPMEKRQLIGTTTIVIVLFTILLLGGSTMPLIRLMDIEDAKAHRRNKKDVNLSKTEKMGNTVESEHLSELTEEEYEAHYIRRQDLKGFVWLDAKYLNPFFTRRLTQEDLHHGRIQMKTLTNKWYEEVRQGPSGSEDDEQELL

SEQ ID NO: 82246 - protein, 597 aa, Homo sapiens
  Payload ID: 16371
  Gene Symbol: SLC9A8
  Gene Name: solute carrier family 9, subfamily A (NHE8, cation proton antiporter 8), member 8
  Uniprot ID: Q9Y2E8
  ENSP ID: ENSP00000416418
MGEKMAEEERFPNTTHEGFNVTLHTTLVVTTKLVLPTPGKPILPVQTGEQAQQEEQSSGMTIFFSLLVLAICIILVHLLIRYRLHFLPESVAVVSLGILMGAVIKIIEFKKLANWKEEEMFRPNMFFLLLLPPIIFESGYSLHKGNFFQNIGSITLFAVFGTAISAFVVGGGIYFLGQGFFFVCVCVFVCFILQADVISKLNMTDSFAFGSLISAVDPVATIAIFNALHVDPVLNMLVFGESILNDAVSIVLTNTAEGLTRKNMSDVSGWQTFLQALDYFLKMFFGSAALGTLTGLISALVLKHIDLRKTPSLEFGMMIIFAYLPYGLAEGISLSGIMAILFSGIVMSHYTHHNLSPVTQILMQQTLRTVAFLCETCVFAFLGLSIFSFPHKFEISFVIWCIVLVLFGRAVNIFPLSYLLNFFRDHKITPKMMFIMWFSGLRGAIPYALSLHLDLEPMEKRQLIGTTTIVIVLFTILLLGGSTMPLIRLMDIEDAKAHRRNKKDVNLSKTEKMGNTVESEHLSELTEEEYEAHYIRRQDLKGFVWLDAKYLNPFFTRRLTQEDLHHGRIQMKTLTNKWYEEVRQGPSGSEDDEQELL

SEQ ID NO: 82247 - protein, 645 aa, Homo sapiens
  Payload ID: 16372
  Gene Symbol: SLC9A9
  Gene Name: solute carrier family 9, subfamily A (NHE9, cation proton antiporter 9), member 9
  Uniprot ID: Q8IVB4
  ENSP ID: ENSP00000320246
MERQSRVMSEKDEYQFQHQGAVELLVFNFLLILTILTIWLFKNHRFRFLHETGGAMVYGLIMGLILRYATAPTDIESGTVYDCVKLTFSPSTLLVNITDQVYEYKYKREISQHNINPHQGNAILEKMTFDPEIFFNVLLPPIIFHAGYSLKKRHFFQNLGSILTYAFLGTAISCIVIGLIMYGFVKAMIHAGQLKNGDFHFTDCLFFGSLMSATDPVTVLAIFHELHVDPDLYTLLFGESVLNDAVAIVLTYSISIYSPKENPNAFDAAAFFQSVGNFLGIFAGSFAMGSAYAIITALLTKFTKLCEFPMLETGLFFLLSWSAFLSAEAAGLTGIVAVLFCGVTQAHYTYNNLSSDSKIRTKQLFEFMNFLAENVIFCYMGLALFTFQNHIFNALFILGAFLAIFVARACNIYPLSFLLNLGRKQKIPWNFQHMMMFSGLRGAIAFALAIRNTESQPKQMMFTTTLLLVFFTVWVFGGGTTPMLTWLQIRVGVDLDENLKEDPSSQHQEANNLDKNMTKAESARLFRMWYSFDHKYLKPILTHSGPPLTTTLPEWCGPISRLLTSPQAYGEQLKEDDVECIVNQDELAINYQEQASSPCSPPARLGLDQKASPQTPGKENIYEGDLGLGGYELKLEQTLGQSQLN

SEQ ID NO: 82248 - protein, 147 aa, Homo sapiens
  Payload ID: 16372
  Gene Symbol: SLC9A9
  Gene Name: solute carrier family 9, subfamily A (NHE9, cation proton antiporter 9), member 9
  ENSP ID: ENSP00000418627
MERQSRVMSEKDEYQFQHQGAVELLVFNFLLILTILTIWLFKNHRFRFLHETGGAMVYGLIMGLILRYATAPTDIESGTVYDCVKLTFSPSTLLVNITDQVYEYKYKREISQHNINPHQGNAILEKRHFFQNLGSILTYAFLGTAIS

SEQ ID NO: 82249 - protein, 61 aa, Homo sapiens
  Payload ID: 16372
  Gene Symbol: SLC9A9
  Gene Name: solute carrier family 9, subfamily A (NHE9, cation proton antiporter 9), member 9
  ENSP ID: ENSP00000419090
MERQSRVMSEKDEYQFQHQGAVELLVFNFLLILTILTIWLFKNHRFRFLHETGGAMVYDDI

SEQ ID NO: 82250 - protein, 515 aa, Homo sapiens
  Payload ID: 16373
  Gene Symbol: SLC9B1
  Gene Name: solute carrier family 9, subfamily B (NHA1, cation proton antiporter 1), member 1
  Uniprot ID: Q4ZJI4
  ENSP ID: ENSP00000296422
MHTTESKNEHLEDENFQTSTTPQSLIDPNNTAQEETKTVLSDTEEIKPQTKKETYISCPLRGVLNVIITNGVILFVIWCMTWSILGSEALPGGNLFGLFIIFYSAIIGGKILQLIRIPLVPPLPPLLGMLLAGFTIRNVPFINEHVHVPNTWSSILRSIALTIILIRAGLGLDPQALRHLKVVCFRLAVGPCLMEASAAAVFSHFIMKFPWQWAFLLGFVLGAVSPAVVVPYMMVLQENGYGVEEGIPTLLMAASSMDDILAITGFNTCLSIVFSSGGILNNAIASIRNVCISLLAGIVLGFFVRYFPSEDQKKLTLKRGFLVLTMCVSAVLGSQRIGLHGSGGLCTLVLSFIAGTKWSQEKMKVQKIITTVWDIFQPLLFGLVGAEVSVSSLESNIVGISVATLSLALCVRILTTYLLMCFAGFSFKEKIFIALAWMPKATVQAVLGPLALETARVSAPHLEPYAKDVMTVAFLAILITAPNGALLMGILGPKMLTRHYDPSKIKLQLSTLEHH

SEQ ID NO: 82251 - protein, 475 aa, Homo sapiens
  Payload ID: 16373
  Gene Symbol: SLC9B1
  Gene Name: solute carrier family 9, subfamily B (NHA1, cation proton antiporter 1), member 1
  Uniprot ID: Q4ZJI4
  ENSP ID: ENSP00000378269
MHTTESKNEHLEDENFQTSTTPQSLIDPNNTAQEETKTVLSDTEEIKPQTKKETYISCPLRGVLNVIITNGVILFVIWCMTWSILGSEALPGGNLFGLFIIFYSAIIGGKILQLIRIPLVPPLPPLLGMLLAGFTIRNVPFINEHVHVPNTWSSILRSIALTIILIRAGLGLDPQALRHLKVVCFRLAVGPCLMEASAAAVFSHFIMKFPWQWAFLLGFVLGAVSPAVVVPYMMVLQENGYGVEEGIPTLLMAASSMDDILAITGFNTCLSIVFSSGGILNNAIASIRNVCISLLAGIVLGFFVRYFPSEDQKKLTLKRGFLVLTMCVSAVLGSQRIGLHGSGGLCTLVLSFIAGTKWSQEKMKVQKIITTVWDIFQPLLFGLVGAEVSVSSLESNIVGISVATLSLALCVRILTTYLLMCFAGFSFKEKIFIALAWMPKATVQINQAILLLFLLREEWTNCKVAKKCEYTKERQ

SEQ ID NO: 82252 - protein, 48 aa, Homo sapiens
  Payload ID: 16373
  Gene Symbol: SLC9B1
  Gene Name: solute carrier family 9, subfamily B (NHA1, cation proton antiporter 1), member 1
  ENSP ID: ENSP00000423072
MHTTESKNEHLEDENFQTSTTPQFCSRCCLSCCCCPLHDGAARKWIWC

SEQ ID NO: 82253 - protein, 127 aa, Homo sapiens
  Payload ID: 16373
  Gene Symbol: SLC9B1
  Gene Name: solute carrier family 9, subfamily B (NHA1, cation proton antiporter 1), member 1
  ENSP ID: ENSP00000425544
TGGILNNAIASIRNVCISLLAGIVLGFFVRYFPSEDQKKLTLKRGFLVLTMCVSAVLGSQRIGLHGSGGLCTLVLSFIAGTKWSQEKMKVQKIITTVWDIFQPLLFGLVGAEVSVSSLESNIVGKNN

SEQ ID NO: 82254 - protein, 73 aa, Homo sapiens
  Payload ID: 16373
  Gene Symbol: SLC9B1
  Gene Name: solute carrier family 9, subfamily B (NHA1, cation proton antiporter 1), member 1
  Uniprot ID: Q4ZJI4
  ENSP ID: ENSP00000425913
MHTTESKNEHLEDENFQTSTTPQSLIDPNNTAQEETKTVLSDTEEIKPQTKKETYISCPLRGVLNVIITNVLF

SEQ ID NO: 82255 - protein, 254 aa, Homo sapiens
  Payload ID: 16373
  Gene Symbol: SLC9B1
  Gene Name: solute carrier family 9, subfamily B (NHA1, cation proton antiporter 1), member 1
  ENSP ID: ENSP00000426056
MHTTESKNEHLEDENFQTSTTPQSLIDPNNTAQEETKTVLSDTEEIKPQTKKETYISCPLRGVLNVIITNGMLLAGFTIRNVPFINEHVHVPNTWSSILRSIALTIILIRAGLGLDPQALRHLKVVCFRLAVGPCLMEASAAAVFSHFIMKFPWQWAFLLGFVLGAVSPAVVVPYMMVLQENGYGVEEGIPTLLMAASSMDDILAITGFNTCLSIVFSSGGILNNAIASIRNVCISLLAGIVLGFFVRYFPSED

SEQ ID NO: 82256 - protein, 49 aa, Homo sapiens
  Payload ID: 16373
  Gene Symbol: SLC9B1
  Gene Name: solute carrier family 9, subfamily B (NHA1, cation proton antiporter 1), member 1
  ENSP ID: ENSP00000426325
MHTTESKNEHLEDENFQTSTTPQSLIDPNNTAQEETKTVLSDTEEIKPQ

SEQ ID NO: 82257 - protein, 200 aa, Homo sapiens
  Payload ID: 16373
  Gene Symbol: SLC9B1
  Gene Name: solute carrier family 9, subfamily B (NHA1, cation proton antiporter 1), member 1
  ENSP ID: ENSP00000426584
MHTTESKNEHLEDENFQTSTTPQSLIDPNNTAQEETKTVLSDTEEIKPQTKKETYISCPLRGVLNVIITNGVILFVIWCMTWSILGSEALPGGNLFGLFIIFYSAIIGGKILQLIRIPLVPPLPPLLGMLLAGFTIRNVPFINEHVHVPNTWSSILRSIALTIILIRAGLGLDPQFCSRCCLSCCCCPLHDGAARKWIWC

SEQ ID NO: 82258 - protein, 73 aa, Homo sapiens; identical to SEQ ID NO: 82254
  Payload ID: 16373
  Gene Symbol: SLC9B1
  Gene Name: solute carrier family 9, subfamily B (NHA1, cation proton antiporter 1), member 1
  Uniprot ID: Q4ZJI4
  ENSP ID: ENSP00000426926

SEQ ID NO: 82259 - protein, 537 aa, Homo sapiens
  Payload ID: 16374
  Gene Symbol: SLC9B2
  Gene Name: solute carrier family 9, subfamily B (NHA2, cation proton antiporter 2), member 2
  Uniprot ID: Q86UD5
  ENSP ID: ENSP00000354574
MGDEDKRITYEDSEPSTGMNYTPSMHQEAQEETVMKLKGIDANEPTEGSILLKSSEKKLQETPTEANHVQRLRQMLACPPHGLLDRVITNVTIIVLLWAVVWSITGSECLPGGNLFGIIILFYCAIIGGKLLGLIKLPTLPPLPSLLGMLLAGFLIRNIPVINDNVQIKHKWSSSLRSIALSIILVRAGLGLDSKALKKLKGVCVRLSMGPCIVEACTSALLAHYLLGLPWQWGFILGFVLGAVSPAVVVPSMLLLQGGGYGVEKGVPTLLMAAGSFDDILAITGFNTCLGIAFSTGSTVFNVLRGVLEVVIGVATGSVLGFFIQYFPSRDQDKLVCKRTFLVLGLSVLAVFSSVHFGFPGSGGLCTLVMAFLAGMGWTSEKAEVEKIIAVAWDIFQPLLFGLIGAEVSIASLRPETVGLCVATVGIAVLIRILTTFLMVCFAGFNLKEKIFISFAWLPKATVQAAIGSVALDTARSHGEKQLEDYGMDVLTVAFLSILITAPIGSLLIGLLGPRLLQKVEHQNKDEEVQGETSVQV

SEQ ID NO: 82260 - protein, 537 aa, Homo sapiens; identical to SEQ ID NO: 82259
  Payload ID: 16374
  Gene Symbol: SLC9B2
  Gene Name: solute carrier family 9, subfamily B (NHA2, cation proton antiporter 2), member 2
  Uniprot ID: Q86UD5
  ENSP ID: ENSP00000378265

SEQ ID NO: 82261 - protein, 354 aa, Homo sapiens
  Payload ID: 16374
  Gene Symbol: SLC9B2
  Gene Name: solute carrier family 9, subfamily B (NHA2, cation proton antiporter 2), member 2
  ENSP ID: ENSP00000421943
VWSITGSECLPGGNLFGIIILFYCAIIGGKLLGLIKLPTLPPLPSLLGMLLAGFLIRNIPVINDNVQIKHKWSSSLRSIALSIILVRAGLGLDSKALKKLKGVCVRLSMGPCIVEACTSALLAHYLLGLPWQWGFILGFVLGAVSPAVVVPSMLLLQGGGYGVEKGVPTLLMAAGSFDDILAITGFNTCLGIAFSTGSTVFNVLRGVLEVVIGVATGSVLGFFIQYFPSRDQDKLVCKRTFLVLGLSVLAVFSSVHFGFPGSGGLCTLVMAFLAGMGWTSEKAEVEKIIAVAWDIFQPLLFGLIGAEVSIASLRPETVGSADSITGNFGTERPKLLGPPSTQLRFHFFHIQLST

SEQ ID NO: 82262 - protein, 480 aa, Homo sapiens
  Payload ID: 16374
  Gene Symbol: SLC9B2
  Gene Name: solute carrier family 9, subfamily B (NHA2, cation proton antiporter 2), member 2
  ENSP ID: ENSP00000422477
MGDEDKRITYEDSEPSTGMNYTPSMHQEAQEETVMKLKGIDANEPTEGSILLKSSEKKLQETPTEANHVQRLRQMLACPPHGLLDRVITNGMLLAGFLIRNIPVINDNVQIKHKWSSSLRSIALSIILVRAGLGLDSKALKKLKGVCVRLSMGPCIVEACTSALLAHYLLGLPWQWGFILGFVLGAVSPAVVVPSMLLLQGGGYGVEKGVPTLLMAAGSFDDILAITGFNTCLGIAFSTGSTVFNVLRGVLEVVIGVATGSVLGFFIQYFPSRDQDKLVCKRTFLVLGLSVLAVFSSVHFGFPGSGGLCTLVMAFLAGMGWTSEKAEVEKIIAVAWDIFQPLLFGLIGAEVSIASLRPETVGLCVATVGIAVLIRILTTFLMVCFAGFNLKEKIFISFAWLPKATVQAAIGSVALDTARSHGEKQLEDYGMDVLTVAFLSILITAPIGSLLIGLLGPRLLQKVEHQNKDEEVQGETSVQV

SEQ ID NO: 82263 - protein, 112 aa, Homo sapiens
  Payload ID: 16374
  Gene Symbol: SLC9B2
  Gene Name: solute carrier family 9, subfamily B (NHA2, cation proton antiporter 2), member 2
  ENSP ID: ENSP00000423496
MATDDEKLRLPMLRVVNRCVYSTTKAAVIGLTKSVAADFIQQGIRCNCVCPGTVDTPSLQERIQARGNPEEARNDFLKRQKTGRFATAEEIAMLCVYLASDEISFLFPVSSS

SEQ ID NO: 82264 - protein, 417 aa, Homo sapiens
  Payload ID: 16374
  Gene Symbol: SLC9B2
  Gene Name: solute carrier family 9, subfamily B (NHA2, cation proton antiporter 2), member 2
  ENSP ID: ENSP00000425385
MGDEDKRITYEDSEPSTGMNYTPSMHQEAQEETVMKLKGIDANEPTEGSILLKSSEKKLQETPTEANHVQRLRQMLACPPHGLLDRVITNGMLLAGFLIRNIPVINDNVQIKHKWSSSLRSIALSIILVRAGLGLDSKALKKLKGVCVRLSMGPCIVEACTSALLAHYLLGLPWQWGFILGFVLGAVSPAVVVPSMLLLQGGGYGVEKGVPTLLMAAGSFDDILAITGFNTCLGIAFSTGSTVFNVLRGVLEVVIGVATGSVLGFFIQYFPSRDQDKLVCKRTFLVLGLSVLAVFSSVHFGFPGSGGLCTLVMAFLAGMGWTSEKAEVEKIIAVAWDIFQPLLFGLIGAEVSIASLRPETVGCNRICGFGHSKVTWRETIRRLWNGCVDSGIFVHPHHSPNWKSAYWFTGPQASAES

SEQ ID NO: 82265 - protein, 143 aa, Homo sapiens
  Payload ID: 16374
  Gene Symbol: SLC9B2
  Gene Name: solute carrier family 9, subfamily B (NHA2, cation proton antiporter 2), member 2
  ENSP ID: ENSP00000426305
MGDEDKRITYEDSEPSTGMNYTPSMHQEAQEETVMKLKGIDANEPTEGSILLKSSEKKLQETPTEANHVQRLRQMLACPPHGLLDRVITNVTIIVLLWAVVWSITGSECLPGGNLFGIIILFYCAIIGGKLLGLIKLPTLPPL

SEQ ID NO: 82266 - protein, 1177 aa, Homo sapiens
  Payload ID: 16375
  Gene Symbol: SLC9C1
  Gene Name: solute carrier family 9, subfamily C (Na+-transporting carboxylic acid decarboxylase), member 1
  Uniprot ID: Q4G0N8
  ENSP ID: ENSP00000306627
MAGIFKEFFFSTEDLPEVILTLSLISSIGAFLNRHLEDFPIPVPVILFLLGCSFEVLSFTSSQVQRYANAIQWMSPDLFFRIFTPVVFFTTAFDMDTYMLQKLFWQILLISIPGFLVNYILVLWHLASVNQLLLKPTQWLLFSAILVSSDPMLTAAAIRDLGLSRSLISLINGESLMTSVISLITFTSIMDFDQRLQSKRNHTLAEEIVGGICSYIIASFLFGILSSKLIQFWMSTVFGDDVNHISLIFSILYLIFYICELVGMSGIFTLAIVGLLLNSTSFKAAIEETLLLEFWTFLSRIAFLMVFTFFGLLIPAHTYLYIEFVDIYYSLNIYLTLIVLRFLTLLLISPVLSRVGHEFSWRWIFIMVCSEMKGMPNINMALLLAYSDLYFGSDKEKSQILFHGVLVCLITLVVNRFILPVAVTILGLRDATSTKYKSVCCTFQHFQELTKSAASALKFDKDLANADWNMIEKAITLENPYMLNEEETTEHQKVKCPHCNKEIDEIFNTEAMELANRRLLSAQIASYQRQYRNEILSQSAVQVLVGAAESFGEKKGKCMSLDTIKNYSESQKTVTFARKLLLNWVYNTRKEKEGPSKYFFFRICHTIVFTEEFEHVGYLVILMNIFPFIISWISQLNVIYHSELKHTNYCFLTLYILEALLKIAAMRKDFFSHAWNIFELAITLIGILHVILIEIDTIKYIFNETEVIVFIKVVQFFRILRIFKLIAPKLLQIIDKRMSHQKTFWYGILKGYVQGEADIMTIIDQITSSKQIKQMLLKQVIRNMEHAIKELGYLEYDHPEIAVTVKTKEEINVMLNMATEILKAFGLKGIISKTEGAGINKLIMAKKKEVLDSQSIIRPLTVEEVLYHIPWLDKNKDYINFIQEKAKVVTFDCGNDIFEEGDEPKGIYIIISGMVKLEKSKPGLGIDQMVESKEKDFPIIDTDYMLSGEIIGEINCLTNEPMKYSATCKTVVETCFIPKTHLYDAFEQCSPLIKQKMWLKLGLAITARKIREHLSYEDWNYNMQLKLSNIYVVDIPMSTKTDIYDENLIYVILIHGAVEDCLLRKTYRAPFLIPITCHQIQSIEDFTKVVIIQTPINMKTFRRNIRKFVPKHKSYLTPGLIGSVGTLEEGIQEERNVKEDGAHSAATARSPQPCSLLGTKFNCKESPRINLRKVRKE

SEQ ID NO: 82267 - protein, 85 aa, Homo sapiens
  Payload ID: 16375
  Gene Symbol: SLC9C1
  Gene Name: solute carrier family 9, subfamily C (Na+-transporting carboxylic acid decarboxylase), member 1
  ENSP ID: ENSP00000417274
MSPDLFFRIFTPVVFFTTAFDMDTYMLQKLFWQILLISIPGFLVNYILVLWHLASVNQLLLKPTQWLLFSAILVSSDPMLTAAAI

SEQ ID NO: 82268 - protein, 241 aa, Homo sapiens
  Payload ID: 16375
  Gene Symbol: SLC9C1
  Gene Name: solute carrier family 9, subfamily C (Na+-transporting carboxylic acid decarboxylase), member 1
  ENSP ID: ENSP00000418371
MAGIFKEFFFSTEDLPEVILTLSLISSIGAFLNRHLEDFPIPVPVILFLLGCSFEVLSFTSSQVQRYANAIQWMSPDLFFRIFTPVVFFTTAFDMDTYMLQKLFWQILLISIPGFLVNYILVLWHLASVNQLLLKPTQWLLFSAILVSSDPMLTAAAIRDLGLSRSLISLINGESLMTSVISLITFTSIMDFDQRLQSKRNHTLGELVGMSGIFTLAIVGLLLNSTSFKAAIEETLLLESS

SEQ ID NO: 82269 - protein, 1129 aa, Homo sapiens
  Payload ID: 16375
  Gene Symbol: SLC9C1
  Gene Name: solute carrier family 9, subfamily C (Na+-transporting carboxylic acid decarboxylase), member 1
  Uniprot ID: Q4G0N8
  ENSP ID: ENSP00000420688
MAGIFKEFFFSTEDLPEVILTLSLISSIGAFLNRHLEDFPIPVPVILFLLGCSFEVLSFTSSQVQRYANAIQWMSPDLFFRIFTPVVFFTTAFDMDTYMLQKLFWQILLISIPGFLVNYILVLWHLASVNQLLLKPTQWLLFSAILVSSDPMLTAAAIRDLGLSRSLISLINGESLMTSVISLITFTSIMDFDQRLQSKRNHTLAEEIVGGICSYIIASFLFGILSSKLIQFWMSTVFGDDVNHISLIFSILYLIFYICELVGMSGIFTLAIVGLLLNSTSFKAAIEETLLLEFLTLLLISPVLSRVGHEFSWRWIFIMVCSEMKGMPNINMALLLAYSDLYFGSDKEKSQILFHGVLVCLITLVVNRFILPVAVTILGLRDATSTKYKSVCCTFQHFQELTKSAASALKFDKDLANADWNMIEKAITLENPYMLNEEETTEHQKVKCPHCNKEIDEIFNTEAMELANRRLLSAQIASYQRQYRNEILSQSAVQVLVGAAESFGEKKGKCMSLDTIKNYSESQKTVTFARKLLLNWVYNTRKEKEGPSKYFFFRICHTIVFTEEFEHVGYLVILMNIFPFIISWISQLNVIYHSELKHTNYCFLTLYILEALLKIAAMRKDFFSHAWNIFELAITLIGILHVILIEIDTIKYIFNETEVIVFIKVVQFFRILRIFKLIAPKLLQIIDKRMSHQKTFWYGILKGYVQGEADIMTIIDQITSSKQIKQMLLKQVIRNMEHAIKELGYLEYDHPEIAVTVKTKEEINVMLNMATEILKAFGLKGIISKTEGAGINKLIMAKKKEVLDSQSIIRPLTVEEVLYHIPWLDKNKDYINFIQEKAKVVTFDCGNDIFEEGDEPKGIYIIISGMVKLEKSKPGLGIDQMVESKEKDFPIIDTDYMLSGEIIGEINCLTNEPMKYSATCKTVVETCFIPKTHLYDAFEQCSPLIKQKMWLKLGLAITARKIREHLSYEDWNYNMQLKLSNIYVVDIPMSTKTDIYDENLIYVILIHGAVEDCLLRKTYRAPFLIPITCHQIQSIEDFTKVVIIQTPINMKTFRRNIRKFVPKHKSYLTPGLIGSVGTLEEGIQEERNVKEDGAHSAATARSPQPCSLLGTKFNCKESPRINLRKVRKE

SEQ ID NO: 82270 - protein, 670 aa, Homo sapiens
  Payload ID: 16376
  Gene Symbol: SLCO1A2
  Gene Name: solute carrier organic anion transporter family, member 1A2
  Uniprot ID: P46721
  ENSP ID: ENSP00000305974
MGETEKRIETHRIRCLSKLKMFLLAITCAFVSKTLSGSYMNSMLTQIERQFNIPTSLVGFINGSFEIGNLLLIIFVSYFGTKLHRPIMIGIGCVVMGLGCFLKSLPHFLMNQYEYESTVSVSGNLSSNSFLCMENGTQILRPTQDPSECTKEVKSLMWVYVLVGNIVRGMGETPILPLGISYIEDFAKFENSPLYIGLVETGAIIGPLIGLLLASFCANVYVDTGFVNTDDLIITPTDTRWVGAWWFGFLICAGVNVLTAIPFFFLPNTLPKEGLETNADIIKNENEDKQKEEVKKEKYGITKDFLPFMKSLSCNPIYMLFILVSVIQFNAFVNMISFMPKYLEQQYGISSSDAIFLMGIYNLPPICIGYIIGGLIMKKFKITVKQAAHIGCWLSLLEYLLYFLSFLMTCENSSVVGINTSYEGIPQDLYVENDIFADCNVDCNCPSKIWDPVCGNNGLSYLSACLAGCETSIGTGINMVFQNCSCIQTSGNSSAVLGLCDKGPDCSLMLQYFLILSAMSSFIYSLAAIPGYMVLLRCMKSEEKSLGVGLHTFCTRVFAGIPAPIYFGALMDSTCLHWGTLKCGESGACRIYDSTTFRYIYLGLPAALRGSSFVPALIILILLRKCHLPGENASSGTELIETKVKGKENECKDIYQKSTVLKDDELKTKL

SEQ ID NO: 82271 - protein, 99 aa, Homo sapiens
  Payload ID: 16376
  Gene Symbol: SLCO1A2
  Gene Name: solute carrier organic anion transporter family, member 1A2
  ENSP ID: ENSP00000390572
MGETEKRIETHRIRCLSKLKMFLLAITCAFVSKTLSGSYMNSMLTQIERQFNIPTSLVGFINGSFEIGNLLLIIFVSYFGTKLHRPIMIGIGCVVMGLG

SEQ ID NO: 82272 - protein, 51 aa, Homo sapiens
  Payload ID: 16376
  Gene Symbol: SLCO1A2
  Gene Name: solute carrier organic anion transporter family, member 1A2
  ENSP ID: ENSP00000390672
MGETEKRIETHRIRCLSKLKMFLLAITCAFVSKTLSGSYMNSMLTQIERQF

SEQ ID NO: 82273 - protein, 13 aa, Homo sapiens
  Payload ID: 16376
  Gene Symbol: SLCO1A2
  Gene Name: solute carrier organic anion transporter family, member 1A2
  ENSP ID: ENSP00000392124
MGETEKRIETHRI

SEQ ID NO: 82274 - protein, 538 aa, Homo sapiens
  Payload ID: 16376
  Gene Symbol: SLCO1A2
  Gene Name: solute carrier organic anion transporter family, member 1A2
  ENSP ID: ENSP00000394854
MENGTQILRPTQDPSECTKEVKSLMWVYVLVGNIVRGMGETPILPLGISYIEDFAKFENSPLYIGLVETGAIIGPLIGLLLASFCANVYVDTGFVNTDDLIITPTDTRWVGAWWFGFLICAGVNVLTAIPFFFLPNTLPKEGLETNADIIKNENEDKQKEEVKKEKYGITKDFLPFMKSLSCNPIYMLFILVSVIQFNAFVNMISFMPKYLEQQYGISSSDAIFLMGIYNLPPICIGYIIGGLIMKKFKITVKQAAHIGCWLSLLEYLLYFLSFLMTCENSSVVGINTSYEGIPQDLYVENDIFADCNVDCNCPSKIWDPVCGNNGLSYLSACLAGCETSIGTGINMVFQNCSCIQTSGNSSAVLGLCDKGPDCSLMLQYFLILSAMSSFIYSLAAIPGYMVLLRCMKSEEKSLGVGLHTFCTRVFAGIPAPIYFGALMDSTCLHWGTLKCGESGACRIYDSTTFRYIYLGLPAALRGSSFVPALIILILLRKCHLPGENASSGTELIETKVKGKENECKDIYQKSTVLKDDELKTKL

SEQ ID NO: 82275 - protein, 88 aa, Homo sapiens
  Payload ID: 16376
  Gene Symbol: SLCO1A2
  Gene Name: solute carrier organic anion transporter family, member 1A2
  ENSP ID: ENSP00000401195
MGETEKRIETHRIRCLSKLKMFLLAITCAFVSKTLSGSYMNSMLTQIERQFNIPTSLVGFINGSFEIGNLLLIIFVSYFGTKLHRPIM

SEQ ID NO: 82276 - protein, 32 aa, Homo sapiens
  Payload ID: 16376
  Gene Symbol: SLCO1A2
  Gene Name: solute carrier organic anion transporter family, member 1A2
  ENSP ID: ENSP00000403638
MENGTQILRPTQDPSECTKEVKSLMWVYVLVG

SEQ ID NO: 82277 - protein, 91 aa, Homo sapiens
  Payload ID: 16376
  Gene Symbol: SLCO1A2
  Gene Name: solute carrier organic anion transporter family, member 1A2
  ENSP ID: ENSP00000407462
MGETEKRIETHRIRCLSKLKMFLLAITCAFVSKTLSGSYMNSMLTQIERQFNIPTSLVGFINGSFEIGNLLLIIFVSYFGTKLHRPIMIGI

SEQ ID NO: 82278 - protein, 136 aa, Homo sapiens
  Payload ID: 16376
  Gene Symbol: SLCO1A2
  Gene Name: solute carrier organic anion transporter family, member 1A2
  ENSP ID: ENSP00000409314
MGETEKRIETHRIRCLSKLKMFLLAITCAFVSKTLSGSYMNSMLTQIERQFNIPTSLVGFINGSFEIGNLLLIIFVSYFGTKLHRPIMIGIGCVVMGLGCFLKSLPHFLMNQYEYESTVSVSGNLSSNSFLCMENG

SEQ ID NO: 82279 - protein, 71 aa, Homo sapiens
  Payload ID: 16376
  Gene Symbol: SLCO1A2
  Gene Name: solute carrier organic anion transporter family, member 1A2
  ENSP ID: ENSP00000409691
MFLTKNCKQEQERVESAKMFLLAITCAFVSKTLSGSYMNSMLTQIERQFNIPTSLVGFINGSFEIGNLLLI

SEQ ID NO: 82280 - protein, 1 aa, Homo sapiens
  Payload ID: 16376
  Gene Symbol: SLCO1A2
  Gene Name: solute carrier organic anion transporter family, member 1A2
  ENSP ID: ENSP00000410338
M

SEQ ID NO: 82281 - protein, 147 aa, Homo sapiens
  Payload ID: 16376
  Gene Symbol: SLCO1A2
  Gene Name: solute carrier organic anion transporter family, member 1A2
  ENSP ID: ENSP00000416190
MGETEKRIETHRIRCLSKLKMFLLAITCAFVSKTLSGSYMNSMLTQIERQFNIPTSLVGFINGSFEIGNLLLIIFVSYFGTKLHRPIMIGIGCVVMGLGCFLKSLPHFLMNQYEYESTVSVSGNLSSNSFLCMENGTQILRPTQDPS

SEQ ID NO: 82282 - protein, 95 aa, Homo sapiens
  Payload ID: 16376
  Gene Symbol: SLCO1A2
  Gene Name: solute carrier organic anion transporter family, member 1A2
  ENSP ID: ENSP00000438348
MGETEKRIETHRIRCLSKLKMFLLAITCAFVSKTLSGSYMNSMLTQIERQFNIPTSLVGFINGSFEIDMNMNLQFQFQATCPQTVSCVWKMEPRF

SEQ ID NO: 82283 - protein, 93 aa, Homo sapiens
  Payload ID: 16376
  Gene Symbol: SLCO1A2
  Gene Name: solute carrier organic anion transporter family, member 1A2
  ENSP ID: ENSP00000440154
MFLTKNCKQEQERVESAKMFLLAITCAFVSKTLSGSYMNSMLTQIERQFNIPTSLVGFINGSFEIDMNMNLQFQFQATCPQTVSCVWKMEPRF

SEQ ID NO: 82284 - protein, 691 aa, Homo sapiens
  Payload ID: 16377
  Gene Symbol: SLCO1B1
  Gene Name: solute carrier organic anion transporter family, member 1B1
  Uniprot ID: Q9Y6L6
  ENSP ID: ENSP00000256958
MDQNQHLNKTAEAQPSENKKTRYCNGLKMFLAALSLSFIAKTLGAIIMKSSIIHIERRFEISSSLVGFIDGSFEIGNLLVIVFVSYFGSKLHRPKLIGIGCFIMGIGGVLTALPHFFMGYYRYSKETNINSSENSTSTLSTCLINQILSLNRASPEIVGKGCLKESGSYMWIYVFMGNMLRGIGETPIVPLGLSYIDDFAKEGHSSLYLGILNAIAMIGPIIGFTLGSLFSKMYVDIGYVDLSTIRITPTDSRWVGAWWLNFLVSGLFSIISSIPFFFLPQTPNKPQKERKASLSLHVLETNDEKDQTANLTNQGKNITKNVTGFFQSFKSILTNPLYVMFVLLTLLQVSSYIGAFTYVFKYVEQQYGQPSSKANILLGVITIPIFASGMFLGGYIIKKFKLNTVGIAKFSCFTAVMSLSFYLLYFFILCENKSVAGLTMTYDGNNPVTSHRDVPLSYCNSDCNCDESQWEPVCGNNGITYISPCLAGCKSSSGNKKPIVFYNCSCLEVTGLQNRNYSAHLGECPRDDACTRKFYFFVAIQVLNLFFSALGGTSHVMLIVKIVQPELKSLALGFHSMVIRALGGILAPIYFGALIDTTCIKWSTNNCGTRGSCRTYNSTSFSRVYLGLSSMLRVSSLVLYIILIYAMKKKYQEKDINASENGSVMDEANLESLNKNKHFVPSAGADSETHC

SEQ ID NO: 82285 - protein, 702 aa, Homo sapiens
  Payload ID: 16378
  Gene Symbol: SLCO1B3
  Gene Name: solute carrier organic anion transporter family, member 1B3
  Uniprot ID: Q9NPD5
  ENSP ID: ENSP00000261196
MDQHQHLNKTAESASSEKKKTRRCNGFKMFLAALSFSYIAKALGGIIMKISITQIERRFDISSSLAGLIDGSFEIGNLLVIVFVSYFGSKLHRPKLIGIGCLLMGTGSILTSLPHFFMGYYRYSKETHINPSENSTSSLSTCLINQTLSFNGTSPEIVEKDCVKESGSHMWIYVFMGNMLRGIGETPIVPLGISYIDDFAKEGHSSLYLGSLNAIGMIGPVIGFALGSLFAKMYVDIGYVDLSTIRITPKDSRWVGAWWLGFLVSGLFSIISSIPFFFLPKNPNKPQKERKISLSLHVLKTNDDRNQTANLTNQGKNVTKNVTGFFQSLKSILTNPLYVIFLLLTLLQVSSFIGSFTYVFKYMEQQYGQSASHANFLLGIITIPTVATGMFLGGFIIKKFKLSLVGIAKFSFLTSMISFLFQLLYFPLICESKSVAGLTLTYDGNNSVASHVDVPLSYCNSECNCDESQWEPVCGNNGITYLSPCLAGCKSSSGIKKHTVFYNCSCVEVTGLQNRNYSAHLGECPRDNTCTRKFFIYVAIQVINSLFSATGGTTFILLTVKIVQPELKALAMGFQSMVIRTLGGILAPIYFGALIDKTCMKWSTNSCGAQGACRIYNSVFFGRVYLGLSIALRFPALVLYIVFIFAMKKKFQGKDTKASDNERKVMDEANLEFLNNGEHFVPSAGTDSKTCNLDMQDNAAAN

SEQ ID NO: 82286 - protein, 702 aa, Homo sapiens; identical to SEQ ID NO: 82285
  Payload ID: 16378
  Gene Symbol: SLCO1B3
  Gene Name: solute carrier organic anion transporter family, member 1B3
  Uniprot ID: Q9NPD5
  ENSP ID: ENSP00000370956

SEQ ID NO: 82287 - protein, 291 aa, Homo sapiens
  Payload ID: 16378
  Gene Symbol: SLCO1B3
  Gene Name: solute carrier organic anion transporter family, member 1B3
  ENSP ID: ENSP00000442000
MDQHQHLNKTAESASSEKKKTRRCNGFKMFLAALSFSYIAKALGGIIMKISITQIERRFDISSSLAGLIDGSFEIGNLLVIVFVSYFGSKLHRPKLIGIGCLLMGTGSILTSLPHFFMGYYRYSKETHINPSENSTSSLSTCLINQTLSFNGTSPEIVEKDCVKESGSHMWIYVFMGNMLRGIGETPIVPLGISYIDDFAKEGHSSLYLGSLNAIGMIGPVIGFALGSLFAKMYVDIGYVDLSTIRITPKDSRWVGAWWLGFLVSGLFSIISSIPFFFLPKNPNKPQKERK

SEQ ID NO: 82288 - protein, 479 aa, Homo sapiens
  Payload ID: 16378
  Gene Symbol: SLCO1B3
  Gene Name: solute carrier organic anion transporter family, member 1B3
  ENSP ID: ENSP00000443225
GNMLRGIGETPIVPLGISYIDDFAKEGHSSLYLGSLNAIGMIGPVIGFALGSLFAKMYVDIGYVDLSTIRITPKDSRWVGAWWLGFLVSGLFSIISSIPFFFLPKNPNKPQKERKISLSLHVLKTNDDRNQTANLTNQGKNVTKNVTGFFQSLKSILTNPLYVIFLLLTLLQVSSFIGSFTYVFKYMEQQYGQSASHANFLLGIITIPTVATGMFLGGFIIKKFKLSLVGIAKFSFLTSMISFLFQLLYFPLICESKSVAGLTLTYDGNNSVASHVDVPLSYCNSECNCDESQWEPVCGNNGITYLSPCLAGCKSSSGIKKHTVFYNCSCVEVTGLQNRNYSAHLGECPRDNTCTRKFFIYVAIQVINSLFSATGGTTFILLTVKIVQPELKALAMGFQSMVIRTLGGILAPIYFGALIDKTCMKWSTNSCGAQGACRIYNSVFFGQKYPASDIKTTRLSGRNKKLLQLYLTSYRSINL

SEQ ID NO: 82289 - protein, 640 aa, Homo sapiens
  Payload ID: 16379
  Gene Symbol: SLCO1B7
  Gene Name: solute carrier organic anion transporter family, member 1B7 (non-functional)
  Uniprot ID: G3V0H7
  ENSP ID: ENSP00000394168
MKISTTQIERRFEISSSLVGLIDGSFEIGNLFVIVFVSYFGSKLHRPKLIGIGCFLMGTGSILMALPHFFMGYYRYSKETNIDPSENSTSNLPNCLINQMLSLNRTPSEIIERGCVKESGSHMWIYVFMGNMLRGIGETPIVPLGISYIDDFAKEGHSSLYLGTVNVMGMTGLVFAFMLGSLFAKMYVDIGYVDLSTIRITPKDSRWVGAWWLGFLVSGIVSIISSIPFFFLPLNPNKPQKERKVSLFLHVLKTNDKRNQIANLTNRRKYITKNVTGFFQSLKSILTNPLYVIFVIFTLLHMSSYIASLTYIIKMVEQQYGWSASKTNFLLGVLALPAVAIGMFSGGYIIKKFKLSLVGLAKLAFCSATVHLLSQVLYFFLICESKSVAGLTLTYDGNSPVRSHVDVPLSYCNSECNCDESQWEPVCGNNGITYLSPCLAGCKSSSGNKEPIVFYNCSCVEVIGLQNKNYSAHLGECPRDDACTRKSYVYFVIQVLDAFLCAVGLTSYSVLVIRIVQPELKALAIGFHSMIMRSLGGILVPIYFGALIDTTCMKWSTNSCGARGACRIYNSTYLGRAFFGLKVALIFPVLVLLTVFIFVVRKKSHGKDTKVLENERQVMDEANLEFLNDSEHFVPSAEEQ

SEQ ID NO: 82290 - protein, 99 aa, Homo sapiens
  Payload ID: 16379
  Gene Symbol: SLCO1B7
  Gene Name: solute carrier organic anion transporter family, member 1B7 (non-functional)
  ENSP ID: ENSP00000439857
VIQVLDAFLCAVGLTSYSVLVIRIVQPELKALAIGFHSMIMRSLGGILVPIYFGALIDTTCMKWSTNSCGARGACRIYNSTYLGRAFFGLKVDSMPWII

SEQ ID NO: 82291 - protein, 712 aa, Homo sapiens
  Payload ID: 16380
  Gene Symbol: SLCO1C1
  Gene Name: solute carrier organic anion transporter family, member 1C1
  Uniprot ID: Q9NYB5
  ENSP ID: ENSP00000266509
MDTSSKENIQLFCKTSVQPVGRPSFKTEYPSSEEKQPCCGELKVFLCALSFVYFAKALAEGYLKSTITQIERRFDIPSSLVGVIDGSFEIGNLLVITFVSYFGAKLHRPKIIGAGCVIMGVGTLLIAMPQFFMEQYKYERYSPSSNSTLSISPCLLESSSQLPVSVMEKSKSKISNECEVDTSSSMWIYVFLGNLLRGIGETPIQPLGIAYLDDFASEDNAAFYIGCVQTVAIIGPIFGFLLGSLCAKLYVDIGFVNLDHITITPKDPQWVGAWWLGYLIAGIISLLAAVPFWYLPKSLPRSQSREDSNSSSEKSKFIIDDHTDYQTPQGENAKIMEMARDFLPSLKNLFGNPVYFLYLCTSTVQFNSLFGMVTYKPKYIEQQYGQSSSRANFVIGLINIPAVALGIFSGGIVMKKFRISVCGAAKLYLGSSVFGYLLFLSLFALGCENSDVAGLTVSYQGTKPVSYHERALFSDCNSRCKCSETKWEPMCGENGITYVSACLAGCQTSNRSGKNIIFYNCTCVGIAASKSGNSSGIVGRCQKDNGCPQMFLYFLVISVITSYTLSLGGIPGYILLLRCIKPQLKSFALGIYTLAIRVLAGIPAPVYFGVLIDTSCLKWGFKRCGSRGSCRLYDSNVFRHIYLGLTVILGTVSILLSIAVLFILKKNYVSKHRSFITKRERTMVSTRFQKENYTTSDHLLQPNYWPGKETQL

SEQ ID NO: 82292 - protein, 46 aa, Homo sapiens
  Payload ID: 16380
  Gene Symbol: SLCO1C1
  Gene Name: solute carrier organic anion transporter family, member 1C1
  ENSP ID: ENSP00000437399
MDTSSKENIQLFCKTSVQPVGRPSFKTEYPSSEEKQPCCGELKVQI

SEQ ID NO: 82293 - protein, 663 aa, Homo sapiens
  Payload ID: 16380
  Gene Symbol: SLCO1C1
  Gene Name: solute carrier organic anion transporter family, member 1C1
  Uniprot ID: Q9NYB5
  ENSP ID: ENSP00000438665
MDTSSKENIQLFCKTSVQPVGRPSFKTEYPSSEEKQPCCGELKVFLCALSFVYFAKALAEGYLKSTITQIERRFDIPSSLVGVIDGSFEIGNLLVITFVSYFGAKLHRPKIIGAGCVIMGVGTLLIAMPQFFMEQYKYERYSPSSNSTLSISPCLLESSSQLPVSVMEKSKSKISNGCVQTVAIIGPIFGFLLGSLCAKLYVDIGFVNLDHITITPKDPQWVGAWWLGYLIAGIISLLAAVPFWYLPKSLPRSQSREDSNSSSEKSKFIIDDHTDYQTPQGENAKIMEMARDFLPSLKNLFGNPVYFLYLCTSTVQFNSLFGMVTYKPKYIEQQYGQSSSRANFVIGLINIPAVALGIFSGGIVMKKFRISVCGAAKLYLGSSVFGYLLFLSLFALGCENSDVAGLTVSYQGTKPVSYHERALFSDCNSRCKCSETKWEPMCGENGITYVSACLAGCQTSNRSGKNIIFYNCTCVGIAASKSGNSSGIVGRCQKDNGCPQMFLYFLVISVITSYTLSLGGIPGYILLLRCIKPQLKSFALGIYTLAIRVLAGIPAPVYFGVLIDTSCLKWGFKRCGSRGSCRLYDSNVFRHIYLGLTVILGTVSILLSIAVLFILKKNYVSKHRSFITKRERTMVSTRFQKENYTTSDHLLQPNYWPGKETQL

SEQ ID NO: 82294 - protein, 730 aa, Homo sapiens
  Payload ID: 16380
  Gene Symbol: SLCO1C1
  Gene Name: solute carrier organic anion transporter family, member 1C1
  Uniprot ID: Q9NYB5
  ENSP ID: ENSP00000444149
MDTSSKENIQLFCKTSVQPVGRPSFKTEYPSSEEKQPCCGELKVFLCALSFVYFAKALAEGYLKSTITQIERRFDIPSSLVGVIDGSFEIGNLLVITFVSYFGAKLHRPKIIGAGCVIMGVGTLLIAMPQFFMEQYKYERYSPSSNSTLSISPCLLESSSQLPVSVMEKSKSKISNECEVDTSSSMWIYVFLGNLLRGIGETPIQPLGIAYLDDFASEDNAAFYIGCVQTVAIIGPIFGFLLGSLCAKLYVDIGFVNLDHITITPKDPQWVGAWWLGYLIAGIISLLAAVPFWYLPKSLPRSQSREDSNSSSEKSKFIIDDHTDYQTPQGENAKIMEMARDFLPSLKNLFGNPVYFLYLCTSTVQFNSLFGMVTYKPKYIEQQYGQSSSRANFVIGLINIPAVALGIFSGGIVMKKFRISVCGAAKLYLGSSVFGYLLFLSLFALGCENSDVAGLTVSYQGTKPVSYHERALFSDCNSRCKCSETKWEPMCGENGITYVSACLAGCQTSNRSGKNIIFYNCTCVGIAASKSGNSSGIVGRCQKDNGCPQMFLYFLVISVITSYTLSLGGIPGYILLLRCIKPQLKSFALGIYTLAIRVLAGIPAPVYFGVLIDTSCLKWGFKRCGSRGSCRLYDSNVFRYQIKSIPASHCYSIPDLHNATDTNKFSCHFTACKTYISGTNCDTGHSVNSPKHCSTFHFKEKLCFKTQKFYNQERKNNGVYKIPKGKLHYK

SEQ ID NO: 82295 - protein, 612 aa, Homo sapiens
  Payload ID: 16380
  Gene Symbol: SLCO1C1
  Gene Name: solute carrier organic anion transporter family, member 1C1
  Uniprot ID: Q9NYB5
  ENSP ID: ENSP00000444527
MGVGTLLIAMPQFFMEQYKYERYSPSSNSTLSISPCLLESSSQLPVSVMEKSKSKISNECEVDTSSSMWIYVFLGNLLRGIGETPIQPLGIAYLDDFASEDNAAFYIGCVQTVAIIGPIFGFLLGSLCAKLYVDIGFVNLDHITITPKDPQWVGAWWLGYLIAGIISLLAAVPFWYLPKSLPRSQSREDSNSSSEKSKFIIDDHTDYQTPQGENAKIMEMARDFLPSLKNLFGNPVYFLYLCTSTVQFNSLFGMVTYKPKYIEQQYGQSSSRANFVIGLINIPAVALGIFSGGIVMKKFRISVCGAAKLYLGSSVFGYLLFLSLFALGCENSDVAGLTVSYQGTKPVSYHERALFSDCNSRCKCSETKWEPMCGENGITYVSACLAGCQTSNRSGKNIIFYNCTCVGIAASKSGNSSGIVGRCQKDNGCPQMFLYFLVISVITSYTLSLGGIPGYILLLRCIKPQLKSFALGIYTLAIRVLAGIPAPVYFGVLIDTSCLKWGFKRCGSRGSCRLYDSNVFRYQIKSIPASHCYSIPDLHNATDTNKFSCHFTACKTYISGTNCDTGHSVNSPKHCSTFHFKEKLCFKTQKFYNQERKNNGVYKIPKGKLHYK

SEQ ID NO: 82296 - protein, 643 aa, Homo sapiens [sequence omitted]

SEQ ID NO: 82297 - protein, 567 aa, Homo sapiens
  Payload ID: 16381
  Gene Symbol: SLCO2A1
  Gene Name: solute carrier organic anion transporter family, member 2A1
  ENSP ID: ENSP00000418893
MGLLPKLGASQGSDTSTSRAGRCARSVFGNIKVFVLCQGLLQLCQLLYSAYFKSSLTTIEKRFGLSSSSSGLISSLNEISNAILIIFVSYFGSRVHRPRLIGIGGLFLAAGAFILTLPHFLSEPYQYTLASTAILFAISVFGPAFGYLLGSVMLQIFVDYGRVNTAAVNLVPGDPRWIGAWWLGLLISSALLVLTSFPFFFFPRAMPIGAKRAPATADEARKLEEAKSRGSLVDFIKRFPCIFLRLLMNSLFVLVVLAQCTFSSVIAGLSTFLNKFLEKQYGTSAAYANFLIGAVNLPAAALGMLFGGILMKRFVFSLQAIPRIATTIITISMILCVPLFFMGCSTPTVAEVYPPSTSSSIHPQSPACRRDCSCPDSIFHPVCGDNGIEYLSPCHAGCSNINMSSATSKQLIYLNCSCVTGGSASAKTGSCPVPCAHFLLPAIFLISFVSLIACISHNPLYMMVLRVVNQEEKSFAIGVQFLLMRLLAWLPSPALYGLTIDHSCIRWNSLCLGRRGACAYYDNDALRDRYLGLQMGYKALGMLLLCFISWRVKKNKEYNVQKAAGLI

SEQ ID NO: 82298 - protein, 415 aa, Homo sapiens
  Payload ID: 16381
  Gene Symbol: SLCO2A1
  Gene Name: solute carrier organic anion transporter family, member 2A1
  ENSP ID: ENSP00000420028
MGLLPKLGASQGSDTSTSRAGRCARSVFGNIKVFVLCQGLLQLCQLLYSAYFKSSLTTIEKRFGLSSSSSGLISSLNEISNAILIIFVSYFGSRVHRPRLIGIGGLFLAAGAFILTLPHFLSEPYQYTLASTGNNSRLQAELCQKHWQDLPPSKCHSTTQNPQKETSSMWGLMVVAQLLAGIGTVPIQPFGISYVDDFSEPSNSPLYISILFAISVFGPAFGYLLGSVMLQIFVDYGRVNTAAVNLVPGDPRWIGAWWLGLLISSALLVLTSFPFFFFPRAMPIGAKRAPATADEARKLEEAKSRGSLVDFIKRFPCIFLRLLMNSLFVLVVLAQCTFSSVIAGLSTFLNKFLEKQYGTSAAYANFLIAHQVLYIRSLLPAAGTARAQILSSTRSVETMESSTSPLAMPAAATST

SEQ ID NO: 82299 - protein, 709 aa, Homo sapiens
  Payload ID: 16382
  Gene Symbol: SLCO2B1
  Gene Name: solute carrier organic anion transporter family, member 2B1
  ENSP ID: ENSP00000289575
MGPRIGPAGEVPQVPDKETKATMGTENTPGGKASPDPQDVRPSVFHNIKLFVLCHSLLQLAQLMISGYLKSSISTVEKRFGLSSQTSGLLASFNEVGNTALIVFVSYFGSRVHRPRMIGYGAILVALAGLLMTLPHFISEPYRYDNTSPEDMPQDFKASLCLPTTSAPASAPSNGNCSSYTETQHLSVVGIMFVAQTLLGVGGVPIQPFGISYIDDFAHNSNSPLYLGILFAVTMMGPGLAFGLGSLMLRLYVDINQMPEGGISLTIKDPRWVGAWWLGFLIAAGAVALAAIPYFFFPKEMPKEKRELQFRRKVLAVTDSPARKGKDSPSKQSPGESTKKQDGLVQIAPNLTVIQFIKVFPRVLLQTLRHPIFLLVVLSQVCLSSMAAGMATFLPKFLERQFSITASYANLLIGCLSFPSVIVGIVVGGVLVKRLHLGPVGCGALCLLGMLLCLFFSLPLFFIGCSSHQIAGITHQTSAHPGLELSPSCMEACSCPLDGFNPVCDPSTRVEYITPCHAGCSSWVVQDALDNSQVFYTNCSCVVEGNPVLAGSCDSTCSHLVVPFLLLVSLGSALACLTHTPSFMLILRGVKKEDKTLAVGIQFMFLRILAWMPSPVIHGSAIDTTCVHWALSCGRRAVCRYYNNDLLRNRFIGLQFFFKTGSVICFALVLAVLRQQDKEARTKESRSSPAVEQQLLVSGPGKKPEDSRV

SEQ ID NO: 82300 - protein, 687 aa, Homo sapiens
  Payload ID: 16382
  Gene Symbol: SLCO2B1
  Gene Name: solute carrier organic anion transporter family, member 2B1
  Uniprot ID: O94956
  ENSP ID: ENSP00000388912
MGTENTPGGKASPDPQDVRPSVFHNIKLFVLCHSLLQLAQLMISGYLKSSISTVEKRFGLSSQTSGLLASFNEVGNTALIVFVSYFGSRVHRPRMIGYGAILVALAGLLMTLPHFISEPYRYDNTSPEDMPQDFKASLCLPTTSAPASAPSNGNCSSYTETQHLSVVGIMFVAQTLLGVGGVPIQPFGISYIDDFAHNSNSPLYLGILFAVTMMGPGLAFGLGSLMLRLYVDINQMPEGGISLTIKDPRWVGAWWLGFLIAAGAVALAAIPYFFFPKEMPKEKRELQFRRKVLAVTDSPARKGKDSPSKQSPGESTKKQDGLVQIAPNLTVIQFIKVFPRVLLQTLRHPIFLLVVLSQVCLSSMAAGMATFLPKFLERQFSITASYANLLIGCLSFPSVIVGIVVGGVLVKRLHLGPVGCGALCLLGMLLCLFFSLPLFFIGCSSHQIAGITHQTSAHPGLELSPSCMEACSCPLDGFNPVCDPSTRVEYITPCHAGCSSWVVQDALDNSQVFYTNCSCVVEGNPVLAGSCDSTCSHLVVPFLLLVSLGSALACLTHTPSFMLILRGVKKEDKTLAVGIQFMFLRILAWMPSPVIHGSAIDTTCVHWALSCGRRAVCRYYNNDLLRNRFIGLQFFFKTGSVICFALVLAVLRQQDKEARTKESRSSPAVEQQLLVSGPGKKPEDSRV

SEQ ID NO: 82301 - protein, 482 aa, Homo sapiens
  Payload ID: 16382
  Gene Symbol: SLCO2B1
  Gene Name: solute carrier organic anion transporter family, member 2B1
  Uniprot ID: O94956
  ENSP ID: ENSP00000389653
MIGYGAILVALAGLLMTLPHFISEPYRYDNTSPGGISLTIKDPRWVGAWWLGFLIAAGAVALAAIPYFFFPKEMPKEKRELQFRRKVLAVTDSPARKGKDSPSKQSPGESTKKQDGLVQIAPNLTVIQFIKVFPRVLLQTLRHPIFLLVVLSQVCLSSMAAGMATFLPKFLERQFSITASYANLLIGCLSFPSVIVGIVVGGVLVKRLHLGPVGCGALCLLGMLLCLFFSLPLFFIGCSSHQIAGITHQTSAHPGLELSPSCMEACSCPLDGFNPVCDPSTRVEYITPCHAGCSSWVVQDALDNSQVFYTNCSCVVEGNPVLAGSCDSTCSHLVVPFLLLVSLGSALACLTHTPSFMLILRGVKKEDKTLAVGIQFMFLRILAWMPSPVIHGSAIDTTCVHWALSCGRRAVCRYYNNDLLRNRFIGLQFFFKTGSVICFALVLAVLRQQDKEARTKESRSSPAVEQQLLVSGPGKKPEDSRV

SEQ ID NO: 82302 - protein, 43 aa, Homo sapiens
  Payload ID: 16382
  Gene Symbol: SLCO2B1
  Gene Name: solute carrier organic anion transporter family, member 2B1
  ENSP ID: ENSP00000431192
MGTENTPGGKASPDPQDVRPSVFHNIKLFVLCHSLLQLAQLMI

SEQ ID NO: 82303 - protein, 43 aa, Homo sapiens; identical to SEQ ID NO: 82302
  Payload ID: 16382
  Gene Symbol: SLCO2B1
  Gene Name: solute carrier organic anion transporter family, member 2B1
  ENSP ID: ENSP00000431324

SEQ ID NO: 82304 - protein, 87 aa, Homo sapiens
  Payload ID: 16382
  Gene Symbol: SLCO2B1
  Gene Name: solute carrier organic anion transporter family, member 2B1
  ENSP ID: ENSP00000432889
MGTENTPGGKASPDPQDVRPSVFHNIKLFVLCHSLLQLAQLMISGYLKSSISTVEKRFGLSSQTSGLLASFNEVGNTALIVFVSYFG

SEQ ID NO: 82305 - protein, 127 aa, Homo sapiens
  Payload ID: 16382
  Gene Symbol: SLCO2B1
  Gene Name: solute carrier organic anion transporter family, member 2B1
  ENSP ID: ENSP00000433872
MGTENTPGGKASPDPQDVRPSVFHNIKLFVLCHSLLQLAQLMISGYLKSSISTVEKRFGLSSQTSGLLASFNEVGNTALIVFVSYFGSRVHRPRMIGYGAILVALAGLLMTLPHFISEPYRYDNTSP

SEQ ID NO: 82306 - protein, 593 aa, Homo sapiens
  Payload ID: 16382
  Gene Symbol: SLCO2B1
  Gene Name: solute carrier organic anion transporter family, member 2B1
  ENSP ID: ENSP00000434112
MIGYGAILVALAGLLMTLPHFISEPYRYDNTSPEDMPQDFKASLCLPTTSAPASAPSNGNCSSYTETQHLSVVGIMFVAQTLLGVGGVPIQPFGISYIDDFAHNSNSPLYLGILFAVTMMGPGLAFGLGSLMLRLYVDINQMPEGGISLTIKDPRWVGAWWLGFLIAAGAVALAAIPYFFFPKEMPKEKRELQFRRKVLAVTDSPARKGKDSPSKQSPGESTKKQDGLVQIAPNLTVIQFIKVFPRVLLQTLRHPIFLLVVLSQVCLSSMAAGMATFLPKFLERQFSITASYANLLIGCLSFPSVIVGIVVGGVLVKRLHLGPVGCGALCLLGMLLCLFFSLPLFFIGCSSHQIAGITHQTSAHPGLELSPSCMEACSCPLDGFNPVCDPSTRVEYITPCHAGCSSWVVQDALDNSQVFYTNCSCVVEGNPVLAGSCDSTCSHLVVPFLLLVSLGSALACLTHTPSFMLILRGVKKEDKTLAVGIQFMFLRILAWMPSPVIHGSAIDTTCVHWALSCGRRAVCRYYNNDLLRNRFIGLQFFFKTGSVICFALVLAVLRQQDKEARTKESRSSPAVEQQLLVSGPGKKPEDSRV

SEQ ID NO: 82307 - protein, 147 aa, Homo sapiens
  Payload ID: 16382
  Gene Symbol: SLCO2B1
  Gene Name: solute carrier organic anion transporter family, member 2B1
  ENSP ID: ENSP00000434742
VALAGLLMTLPHFISEPYRYDNTSPEDMPQDFKASLCLPTTSAPASAPSNGNCSSYTETQHLSVVGIMFVAQTLLGVGGVPIQPFGISYIDDFAHNSNSPLYLGILFAVTMMGPGLAFGLGSLMLRLYVDINQMPEGEPQEHMFARP

SEQ ID NO: 82308 - protein, 43 aa, Homo sapiens; identical to SEQ ID NO: 82302
  Payload ID: 16382
  Gene Symbol: SLCO2B1
  Gene Name: solute carrier organic anion transporter family, member 2B1
  ENSP ID: ENSP00000435384

SEQ ID NO: 82309 - protein, 565 aa, Homo sapiens
  Payload ID: 16382
  Gene Symbol: SLCO2B1
  Gene Name: solute carrier organic anion transporter family, member 2B1
  ENSP ID: ENSP00000436324
MGPRIEDMPQDFKASLCLPTTSAPASAPSNGNCSSYTETQHLSVVGIMFVAQTLLGVGGVPIQPFGISYIDDFAHNSNSPLYLGILFAVTMMGPGLAFGLGSLMLRLYVDINQMPEGGISLTIKDPRWVGAWWLGFLIAAGAVALAAIPYFFFPKEMPKEKRELQFRRKVLAVTDSPARKGKDSPSKQSPGESTKKQDGLVQIAPNLTVIQFIKVFPRVLLQTLRHPIFLLVVLSQVCLSSMAAGMATFLPKFLERQFSITASYANLLIGCLSFPSVIVGIVVGGVLVKRLHLGPVGCGALCLLGMLLCLFFSLPLFFIGCSSHQIAGITHQTSAHPGLELSPSCMEACSCPLDGFNPVCDPSTRVEYITPCHAGCSSWVVQDALDNSQVFYTNCSCVVEGNPVLAGSCDSTCSHLVVPFLLLVSLGSALACLTHTPSFMLILRGVKKEDKTLAVGIQFMFLRILAWMPSPVIHGSAIDTTCVHWALSCGRRAVCRYYNNDLLRNRFIGLQFFFKTGSVICFALVLAVLRQQDKEARTKESRSSPAVEQQLLVSGPGKKPEDSRV

SEQ ID NO: 82310 - protein, 150 aa, Homo sapiens
  Payload ID: 16382
  Gene Symbol: SLCO2B1
  Gene Name: solute carrier organic anion transporter family, member 2B1
  ENSP ID: ENSP00000436513
MGTENTPGGKASPDPQDVRPSVFHNIKLFVLCHSLLQLAQLMISGYLKSSISTVEKRFGLSSQTSGLLASFNEVGNTALIVFVSYFGSRVHRPRMIGYGAILVALAGLLMTLPHFISEPYRYDNTSPEDMPQDFKASLCLPTTSAPASAP

SEQ ID NO: 82311 - protein, 710 aa, Homo sapiens
  Payload ID: 16383
  Gene Symbol: SLCO3A1
  Gene Name: solute carrier organic anion transporter family, member 3A1
  Uniprot ID: Q9UIG8
  ENSP ID: ENSP00000320634
MQGKKPGGSSGGGRSGELQGDEAQRNKKKKKKVSCFSNIKIFLVSECALMLAQGTVGAYLVSVLTTLERRFNLQSADVGVIASSFEIGNLALILFVSYFGARGHRPRLIGCGGIVMALGALLSALPEFLTHQYKYEAGEIRWGAEGRDVCAANGSGGDEGPDPDLICRNRTATNMMYLLLIGAQVLLGIGATPVQPLGVSYIDDHVRRKDSSLYIGILFTMLVFGPACGFILGSFCTKIYVDAVFIDTSNLDITPDDPRWIGAWWGGFLLCGALLFFSSLLMFGFPQSLPPHSEPAMESEQAMLSEREYERPKPSNGVLRHPLEPDSSASCFQQLRVIPKVTKHLLSNPVFTCIILAACMEIAVVAGFAAFLGKYLEQQFNLTTSSANQLLGMTAIPCACLGIFLGGLLVKKLSLSALGAIRMAMLVNLVSTACYVSFLFLGCDTGPVAGVTVPYGNSTAPGSALDPYSPCNNNCECQTDSFTPVCGADGITYLSACFAGCNSTNLTGCACLTTVPAENATVVPGKCPSPGCQEAFLTFLCVMCICSLIGAMAQTPSVIILIRTVSPELKSYALGVLFLLLRLLGFIPPPLIFGAGIDSTCLFWSTFCGEQGACVLYDNVVYRYLYVSIAIALKSFAFILYTTTWQCLRKNYKRYIKNHEGGLSTSEFFASTLTLDNLGRDPVPANQTHRTKFIYNLEDHEWCENMESVL

SEQ ID NO: 82312 - protein, 692 aa, Homo sapiens
  Payload ID: 16383
  Gene Symbol: SLCO3A1
  Gene Name: solute carrier organic anion transporter family, member 3A1
  Uniprot ID: Q9UIG8
  ENSP ID: ENSP00000387846
MQGKKPGGSSGGGRSGELQGDEAQRNKKKKKKVSCFSNIKIFLVSECALMLAQGTVGAYLVSVLTTLERRFNLQSADVGVIASSFEIGNLALILFVSYFGARGHRPRLIGCGGIVMALGALLSALPEFLTHQYKYEAGEIRWGAEGRDVCAANGSGGDEGPDPDLICRNRTATNMMYLLLIGAQVLLGIGATPVQPLGVSYIDDHVRRKDSSLYIGILFTMLVFGPACGFILGSFCTKIYVDAVFIDTSNLDITPDDPRWIGAWWGGFLLCGALLFFSSLLMFGFPQSLPPHSEPAMESEQAMLSEREYERPKPSNGVLRHPLEPDSSASCFQQLRVIPKVTKHLLSNPVFTCIILAACMEIAVVAGFAAFLGKYLEQQFNLTTSSANQLLGMTAIPCACLGIFLGGLLVKKLSLSALGAIRMAMLVNLVSTACYVSFLFLGCDTGPVAGVTVPYGNSTAPGSALDPYSPCNNNCECQTDSFTPVCGADGITYLSACFAGCNSTNLTGCACLTTVPAENATVVPGKCPSPGCQEAFLTFLCVMCICSLIGAMAQTPSVIILIRTVSPELKSYALGVLFLLLRLLGFIPPPLIFGAGIDSTCLFWSTFCGEQGACVLYDNVVYRYLYVSIAIALKSFAFILYTTTWQCLRKNYKRYIKNHEGGLSTSTEYQDIETEKTCPESHSPSEDSFVRS

SEQ ID NO: 82313 - protein, 130 aa, Homo sapiens
  Payload ID: 16383
  Gene Symbol: SLCO3A1
  Gene Name: solute carrier organic anion transporter family, member 3A1
  ENSP ID: ENSP00000450559
MPVSVLTTLERRFNLQSADVGVIASSFEIGNLALILFVSYFGARGHRPRLIGCGGIVMALGALLSALPEFLTHQYKYEAGEIRWGAEGRDVCAANGSGGDEGPDPDLICRNRTATNMMYLLLIGAQVLLG

SEQ ID NO: 82314 - protein, 87 aa, Homo sapiens
  Payload ID: 16383
  Gene Symbol: SLCO3A1
  Gene Name: solute carrier organic anion transporter family, member 3A1
  ENSP ID: ENSP00000451287
METAQHLAQPWTPTRPAIITVNAKPIPSLQCVGQMASPTCLPALLAATARISRAVRASPPSLLRTQPWFLENAPVLGAKRPSSLSSV

SEQ ID NO: 82315 - protein, 109 aa, Homo sapiens
  Payload ID: 16383
  Gene Symbol: SLCO3A1
  Gene Name: solute carrier organic anion transporter family, member 3A1
  ENSP ID: ENSP00000451780
  MOD_RES (1)..(1): Any amino acid
XATSPSSSWAATLALWLGLLFPMETAQHLAQPWTPTRPAIITVNAKPIPSLQCVGQMASPTCLPALLAATARISRAVRASPPSLLRTQPWFLENAPVLGAKRPSSLSSV

SEQ ID NO: 82316 - protein, 722 aa, Homo sapiens
  Payload ID: 16384
  Gene Symbol: SLCO4A1
  Gene Name: solute carrier organic anion transporter family, member 4A1
  Uniprot ID: Q96BD0
  ENSP ID: ENSP00000217159
MPLHQLGDKPLTFPSPNSAMENGLDHTPPSRRASPGTPLSPGSLRSAAHSPLDTSKQPLCQLWAEKHGARGTHEVRYVSAGQSVACGWWAFAPPCLQVLNTPKGILFFLCAAAFLQGMTVNGFINTVITSLERRYDLHSYQSGLIASSYDIAACLCLTFVSYFGGSGHKPRWLGWGVLLMGTGSLVFALPHFTAGRYEVELDAGVRTCPANPGAVCADSTSGLSRYQLVFMLGQFLHGVGATPLYTLGVTYLDENVKSSCSPVYIAIFYTAAILGPAAGYLIGGALLNIYTEMGRRTELTTESPLWVGAWWVGFLGSGAAAFFTAVPILGYPRQLPGSQRYAVMRAAEMHQLKDSSRGEASNPDFGKTIRDLPLSIWLLLKNPTFILLCLAGATEATLITGMSTFSPKFLESQFSLSASEAATLFGYLVVPAGGGGTFLGGFFVNKLRLRGSAVIKFCLFCTVVSLLGILVFSLHCPSVPMAGVTASYGGSLLPEGHLNLTAPCNAACSCQPEHYSPVCGSDGLMYFSLCHAGCPAATETNVDGQKVYRDCSCIPQNLSSGFGHATAGKCTSTCQRKPLLLVFIFVVIFFTFLSSIPALTATLRCVRDPQRSFALGIQWIVVRILGGIPGPIAFGWVIDKACLLWQDQCGQQGSCLVYQNSAMSRYILIMGLLYKVLGVLFFAIACFLYKPLSESSDGLETCLPSQSSAPDSATDSQLQSSV

SEQ ID NO: 82317 - protein, 722 aa, Homo sapiens; identical to SEQ ID NO: 82316
  Payload ID: 16384
  Gene Symbol: SLCO4A1
  Gene Name: solute carrier organic anion transporter family, member 4A1
  Uniprot ID: Q96BD0
  ENSP ID: ENSP00000359538

SEQ ID NO: 82318 - protein, 151 aa, Homo sapiens
  Payload ID: 16384
  Gene Symbol: SLCO4A1
  Gene Name: solute carrier organic anion transporter family, member 4A1
  ENSP ID: ENSP00000414855
TTALCAARTASCTSHCATQGALQPRRRMWTARRCVRDPQRSFALGIQWIVVRILGGIPGPIAFGWVIDKACLLWQDQCGQQGSCLVYQNSAMSRYILIMGLLYKVLGVLFFAIACFLYKPLSESSDGLETCLPSQSSAPDSATDSQLQSSV

SEQ ID NO: 82319 - protein, 620 aa, Homo sapiens
  Payload ID: 16384
  Gene Symbol: SLCO4A1
  Gene Name: solute carrier organic anion transporter family, member 4A1
  ENSP ID: ENSP00000434245
MPLHQLGDKPLTFPSPNSAMENGLDHTPPSRRASPGTPLSPGSLRSAAHSPLDTSKQPLCQLWAEKHGARGTHEVRYVSAGQSVACGWWAFAPPCLQVLNTPKGILFFLCAAAFLQGMTVNGFINTVITSLERRYDLHSYQSGLIASSYDIAACLCLTFVSYFGGSGHKPRWLGWGVLLMGTGSLVFALPHFTAGRYEVELDAGVRTCPANPGAVCADSTSGLSRYQLVFMLGQFLHGVGATPLYTLGVTYLDENVKSSCSPVYIAIFYTAAILGPAAGYLIGGALLNIYTEMGRRTELTTESPLWVGAWWVGFLGSGAAAFFTAVPILGYPRQLPGSQRYAVMRAAEMHQLKDSSRGEASNPDFGKTIRDLPLSIWLLLKNPTFILLCLAGATEATLITGMSTFSPKFLESQFSLSASEAATLFGYLVVPAGGGGTFLGGFFVNKLRLRGSAVIKFCLFCTVVSLLGILVFSLHCPSVPMAGVTASYGGSLLPEGHLNLTAPCNAACSCQPEHYSPVCGSDGLMYFSLCHAGCPAATETNVDGQKVSGAAAYRPCPPLDPGKGPPCLPLVIGAIVGLPRCTETVAVSLRIFPLVLAMPLQGNALQLVRESPSFWFSYSL

SEQ ID NO: 82320 - protein, 724 aa, Homo sapiens
  Payload ID: 16385
  Gene Symbol: SLCO4C1
  Gene Name: solute carrier organic anion transporter family, member 4C1
  Uniprot ID: Q6ZQN7
  ENSP ID: ENSP00000309741
MKSAKGIENLAFVPSSPDILRRLSASPSQIEVSALSSDPQRENSQPQELQKPQEPQKSPEPSLPSAPPNVSEEKLRSLSLSEFEEGSYGWRNFHPQCLQRCNTPGGFLLHYCLLAVTQGIVVNGLVNISISTVEKRYEMKSSLTGLISSSYDISFCLLSLFVSFFGERGHKPRWLAFAAFMIGLGALVFSLPQFFSGEYKLGSLFEDTCVTTRNSTSCTSSTSSLSNYLYVFILGQLLLGAGGTPLYTLGTAFLDDSVPTHKSSLYIGTGYAMSILGPAIGYVLGGQLLTIYIDVAMGESTDVTEDDPRWLGAWWIGFLLSWIFAWSLIIPFSCFPKHLPGTAEIQAGKTSQAHQSNSNADVKFGKSIKDFPAALKNLMKNAVFMCLVLSTSSEALITTGFATFLPKFIENQFGLTSSFAATLGGAVLIPGAALGQILGGFLVSKFRMTCKNTMKFALFTSGVALTLSFVFMYAKCENEPFAGVSESYNGTGELGNLIAPCNANCNCSRSYYYPVCGDGVQYFSPCFAGCSNPVAHRKPKVYYNCSCIERKTEITSTAETFGFEAKAGKCETHCAKLPIFLCIFFIVIIFTFMAGTPITVSILRCVNHRQRSLALGIQFMVLRLLGTIPGPIIFGFTIDSTCILWDINDCGIKGACWIYDNIKMAHMLVAISVTCKVITMFFNGFAIFLYKPPPSATDVSFHKENAVVTNVLAEQDLNKIVKEG

SEQ ID NO: 82321 - protein, 848 aa, Homo sapiens
  Payload ID: 16386
  Gene Symbol: SLCO5A1
  Gene Name: solute carrier organic anion transporter family, member 5A1
  Uniprot ID: Q9H2Y9
  ENSP ID: ENSP00000260126
MDEGTGLQPGAGEQLEAPATAEAVQERCEPETLRSKSLPVLSSASCRPSLSPTSGDANPAFGCVDSSGHQELKQGPNPLAPSPSAPSTSAGLGDCNHRVDLSKTFSVSSALAMLQERRCLYVVLTDSRCFLVCMCFLTFIQALMVSGYLSSVITTIERRYSLKSSESGLLVSCFDIGNLVVVVFVSYFGGRGRRPLWLAVGGLLIAFGAALFALPHFISPPYQIQELNASAPNDGLCQGGNSTATLEPPACPKDSGGNNHWVYVALFICAQILIGMGSTPIYTLGPTYLDDNVKKENSSLYLAIMYVMGALGPAVGYLLGGLLIGFYVDPRNPVHLDQNDPRFIGNWWSGFLLCAIAMFLVIFPMFTFPKKLPPRHKKKKKKKFSVDAVSDDDVLKEKSNNSEQADKKVSSMGFGKDVRDLPRAAVRILSNMTFLFVSLSYTAESAIVTAFITFIPKFIESQFGIPASNASIYTGVIIVPSAGVGIVLGGYIIKKLKLGARESAKLAMICSGVSLLCFSTLFIVGCESINLGGINIPYTTGPSLTMPHRNLTGSCNVNCGCKIHEYEPVCGSDGITYFNPCLAGCVNSGNLSTGIRNYTECTCVQSRQVITPPTVGQRSQLRVVIVKTYLNENGYAVSGKCKRTCNTLIPFLVFLFIVTFITACAQPSAIIVTLRSVEDEERPFALGMQFVLLRTLAYIPTPIYFGAVIDTTCMLWQQECGVQGSCWEYNVTSFRFVYFGLAAGLKFVGFIFIFLAWYSIKYKEDGLQRRRQREFPLSTVSERVGHPDNARTRSCPAFSTQGEFHEETGLQKGIQCAAQTYPGPFPEAISSSADPGLEESPAALEPPS

SEQ ID NO: 82322 - protein, 793 aa, Homo sapiens
  Payload ID: 16386
  Gene Symbol: SLCO5A1
  Gene Name: solute carrier organic anion transporter family, member 5A1
  Uniprot ID: Q9H2Y9
  ENSP ID: ENSP00000431611
MDEGTGLQPGAGEQLEAPATAEAVQERCEPETLRSKSLPVLSSASCRPSLSPTSGDANPAFGCVDSSGHQELKQGPNPLAPSPSAPSTSAGLGDCNHRVDLSKTFSVSSALAMLQERRCLYVVLTDSRCFLVCMCFLTFIQALMVSGYLSSVITTIERRYSLKSSESGLLVSCFDIGNLVVVVFVSYFGGRGRRPLWLAVGGLLIAFGAALFALPHFISPPYQIQELNASAPNDGLCQGGNSTATLEPPACPKDSGGNNHWVYVALFICAQILIGMGSTPIYTLGPTYLDDNVKKENSSLYLAIMYVMGALGPAVGYLLGGLLIGFYVDPRNPVHLDQNDPRFIGNWWSGFLLCAIAMFLVIFPMFTFPKKLPPRHKKKKKKKFSVDAVSDDDVLKEKSNNSEQADKKVSSMGFGKDVRGVIIVPSAGVGIVLGGYIIKKLKLGARESAKLAMICSGVSLLCFSTLFIVGCESINLGGINIPYTTGPSLTMPHRNLTGSCNVNCGCKIHEYEPVCGSDGITYFNPCLAGCVNSGNLSTGIRNYTECTCVQSRQVITPPTVGQRSQLRVVIVKTYLNENGYAVSGKCKRTCNTLIPFLVFLFIVTFITACAQPSAIIVTLRSVEDEERPFALGMQFVLLRTLAYIPTPIYFGAVIDTTCMLWQQECGVQGSCWEYNVTSFRFVYFGLAAGLKFVGFIFIFLAWYSIKYKEDGLQRRRQREFPLSTVSERVGHPDNARTRSCPAFSTQGEFHEETGLQKGIQCAAQTYPGPFPEAISSSADPGLEESPAALEPPS

SEQ ID NO: 82323 - protein, 312 aa, Homo sapiens
  Payload ID: 16386
  Gene Symbol: SLCO5A1
  Gene Name: solute carrier organic anion transporter family, member 5A1
  ENSP ID: ENSP00000432676
MDEGTGLQPGAGEQLEAPATAEAVQERCEPETLRSKSLPVLSSASCRPSLSPTSGDANPAFGCVDSSGHQELKQGPNPLAPSPSAPSTSAGLGDCNHRVDLSKTFSVSSALAMLQERRCLYVVLTDSRCFLVCMCFLTFIQALMVSGYLSSVITTIERRYSLKSSESGLLVSCFDIGNLVVVVFVSYFGGRGRRPLWLAVGGLLIAFGAALFALPHFISPPYQIQELNASAPNDGLCQGGNSTATLEPPACPKDSGGNNHWVYVALFICAQILIGMGSTPIYTLGPTYLDDNVKKENSSLYLDLLSPCPIGI

SEQ ID NO: 82324 - protein, 687 aa, Homo sapiens
  Payload ID: 16386
  Gene Symbol: SLCO5A1
  Gene Name: solute carrier organic anion transporter family, member 5A1
  Uniprot ID: Q9H2Y9
  ENSP ID: ENSP00000434422
MDEGTGLQPGAGEQLEAPATAEAVQERCEPETLRSKSLPVLSSASCRPSLSPTSGDANPAFGCVDSSGHQELKQGPNPLAPSPSAPSTSAGLGDCNHRVDLSKTFSVSSALAMLQERRCLYVVLTDSRCFLVCMCFLTFIQALMVSGYLSSVITTIERRYSLKSSESGLLVSCFDIGNLVVVVFVSYFGGRGRRPLWLAVGGLLIAFGAALFALPHFISPPYQIQELNASAPNDGLCQGGNSTATLEPPACPKDSGGNNHWVYVALFICAQILIGMGSTPIYTLGPTYLDDNVKKENSSLYLAIMYVMGALGPAVGYLLGGLLIGFYVDPRNPVHLDQNDPRFIGNWWSGFLLCAIAMFLVIFPMFTFPKKLPPRHKKKKKKKFSVDAVSDDDVLKEKSNNSEQADKKVSSMGFGKDVRDLPRAAVRILSNMTFLFVSLSYTAESAIVTAFITFIPKFIESQFGIPASNASIYTGVIIVPSAGVGIVLGGYIIKKLKLGARESAKLAMICSGVSLLCFSTLFIVGCESINLGGINIPYTTGPSLTMPHRNLTGSCNVNCGCKIHEYEPVCGSDGITYFNPCLAGCVNSGNLSTGIRNYTECTCVQSRQVITPPTVGQRSQLRVVIVKTYLNENGYAVSGKCKRTCNTLIPFLVFLFIVTFITACAQPSAIIVTLSIHSYSNLLWSSH

SEQ ID NO: 82325 - protein, 719 aa, Homo sapiens
  Payload ID: 16387
  Gene Symbol: SLCO6A1
  Gene Name: solute carrier organic anion transporter family, member 6A1
  Uniprot ID: Q86UG4
  ENSP ID: ENSP00000369135
MFVGVARHSGSQDEVSRGVEPLEAARAQPAKDRRAKGTPKSSKPGKKHRYLRLLPEALIRFGGFRKRKKAKSSVSKKPGEVDDSLEQPCGLGCLVSTCCECCNNIRCFMIFYCILLICQGVVFGLIDVSIGDFQKEYQLKTIEKLALEKSYDISSGLVAIFIAFYGDRKKVIWFVASSFLIGLGSLLCAFPSINEENKQSKVGIEDICEEIKVVSGCQSSGISFQSKYLSFFILGQTVQGIAGMPLYILGITFIDENVATHSAGIYLGIAECTSMIGYALGYVLGAPLVKVPENTTSATNTTVNNGSPEWLWTWWINFLFAAVVAWCTLIPLSCFPNNMPGSTRIKARKRKQLHFFDSRLKDLKLGTNIKDLCAALWILMKNPVLICLALSKATEYLVIIGASEFLPIYLENQFILTPTVATTLAGLVLIPGGALGQLLGGVIVSTLEMSCKALMRFIMVTSVISLILLVFIIFVRCNPVQFAGINEDYDGTGKLGNLTAPCNEKCRCSSSIYSSICGRDDIEYFSPCFAGCTYSKAQNQKKMYYNCSCIKEGLITADAEGDFIDARPGKCDAKCYKLPLFIAFIFSTLIFSGFSGVPIVLAMTRVVPDKLRSLALGVSYVILRIFGTIPGPSIFKMSGETSCILRDVNKCGHTGRCWIYNKTKMAFLLVGICFLCKLCTIIFTTIAFFIYKRRLNENTDFPDVTVKNPKVKKKEETDL

SEQ ID NO: 82326 - protein, 657 aa, Homo sapiens
  Payload ID: 16387
  Gene Symbol: SLCO6A1
  Gene Name: solute carrier organic anion transporter family, member 6A1
  Uniprot ID: Q86UG4
  ENSP ID: ENSP00000373671
MFVGVARHSGSQDEVSRGVEPLEAARAQPAKDRRAKGTPKSSKPGKKHRYLRLLPEALIRFGGFRKRKKAKSSVSKKPGEVDDSLEQPCGLGCLVSTCCECCNNIRCFMIFYCILLICQGVVFGLIDVSIGDFQKEYQLKTIEKLALEKSYDISSGLVAIFIAFYGDRKKVIWFVASSFLIGLGSLLCAFPSINEENKQSKVGIEGIAECTSMIGYALGYVLGAPLVKVPENTTSATNTTVNNGSPEWLWTWWINFLFAAVVAWCTLIPLSCFPNNMPGSTRIKARKRKQLHFFDSRLKDLKLGTNIKDLCAALWILMKNPVLICLALSKATEYLVIIGASEFLPIYLENQFILTPTVATTLAGLVLIPGGALGQLLGGVIVSTLEMSCKALMRFIMVTSVISLILLVFIIFVRCNPVQFAGINEDYDGTGKLGNLTAPCNEKCRCSSSIYSSICGRDDIEYFSPCFAGCTYSKAQNQKKMYYNCSCIKEGLITADAEGDFIDARPGKCDAKCYKLPLFIAFIFSTLIFSGFSGVPIVLAMTRVVPDKLRSLALGVSYVILRIFGTIPGPSIFKMSGETSCILRDVNKCGHTGRCWIYNKTKMAFLLVGICFLCKLCTIIFTTIAFFIYKRRLNENTDFPDVTVKNPKVKKKEETDL

SEQ ID NO: 82327 - protein, 719 aa, Homo sapiens; identical to SEQ ID NO: 82325
  Payload ID: 16387
  Gene Symbol: SLCO6A1
  Gene Name: solute carrier organic anion transporter family, member 6A1
  Uniprot ID: Q86UG4
  ENSP ID: ENSP00000421339

SEQ ID NO: 82328 - protein, 25 aa, Homo sapiens
  Payload ID: 16387
  Gene Symbol: SLCO6A1
  Gene Name: solute carrier organic anion transporter family, member 6A1
  ENSP ID: ENSP00000421846
LNENTDFPDVTVKNPKVKKKEETDL

SEQ ID NO: 82329 - protein, 466 aa, Homo sapiens
  Payload ID: 16387
  Gene Symbol: SLCO6A1
  Gene Name: solute carrier organic anion transporter family, member 6A1
  ENSP ID: ENSP00000421990
MFVGVARHSGSQDEVSRGVEPLEAARAQPAKDRRAKGTPKSSKPGKKHRYLRLLPEALIRFGGFRKRKKAKSSVSKKPGEVDDSLEQPCGLGCLVSTCCECCNNIRCFMIFYCILLICQGVVFGLIDVSIGDFQKEYQLKTIEKLALEKSYDISSGLVAIFIAFYGDRKKVIWFVASSFLIGLGSLLCAFPSINEENKQSKVGIEGIAECTSMIGYALGYVLGAPLVKVPENTTSATKTGKLGNLTAPCNEKCRCSSSIYSSICGRDDIEYFSPCFAGCTYSKAQNQKKMYYNCSCIKEGLITADAEGDFIDARPGKCDAKCYKLPLFIAFIFSTLIFSGFSGVPIVLAMTRVVPDKLRSLALGVSYVILRIFGTIPGPSIFKMSGETSCILRDVNKCGHTGRCWIYNKTKMAFLLVGICFLCKLCTIIFTTIAFFIYKRRLNENTDFPDVTVKNPKVKKKEETDL

SEQ ID NO: 82330 - protein, 264 aa, Homo sapiens
  Payload ID: 16388
  Gene Symbol: SBSPON
  Gene Name: somatomedin B and thrombospondin, type 1 domain containing
  Uniprot ID: Q8IVN8
  ENSP ID: ENSP00000297354
MRTLWMALCALSRLWPGAQAGCAEAGRCCPGRDPACFARGWRLDRVYGTCFCDQACRFTGDCCFDYDRACPARPCFVGEWSPWSGCADQCKPTTRVRRRSVQQEPQNGGAPCPPLEERAGCLEYSTPQGQDCGHTYVPAFITTSAFNKERTRQATSPHWSTHTEDAGYCMEFKTESLTPHCALENWPLTRWMQYLREGYTVCVDCQPPAMNSVSLRCSGDGLDSDGNQTLHWQAIGNPRCQGTWKKVRRVDQCSCPAVHSFIFI

SEQ ID NO: 82331 - protein, 116 aa, Homo sapiens
  Payload ID: 16389
  Gene Symbol: SST
  Gene Name: somatostatin
  Uniprot ID: P61278
  ENSP ID: ENSP00000287641
MLSCRLQCALAALSIVLALGCVTGAPSDPRLRQFLQKSLAAAAGKQELAKYFLAELLSEPNQTENDALEPEDLSQAAEQDEMRLELQRSANSNPAMAPRERKAGCKNFFWKTFTSC

SEQ ID NO: 82332 - protein, 391 aa, Homo sapiens
  Payload ID: 16390
  Gene Symbol: SSTR1
  Gene Name: somatostatin receptor 1
  Uniprot ID: P30872
  ENSP ID: ENSP00000267377
MFPNGTASSPSSSPSPSPGSCGEGGGSRGPGAGAADGMEEPGRNASQNGTLSEGQGSAILISFIYSVVCLVGLCGNSMVIYVILRYAKMKTATNIYILNLAIADELLMLSVPFLVTSTLLRHWPFGALLCRLVLSVDAVNMFTSIYCLTVLSVDRYVAVVHPIKAARYRRPTVAKVVNLGVWVLSLLVILPIVVFSRTAANSDGTVACNMLMPEPAQRWLVGFVLYTFLMGFLLPVGAICLCYVLIIAKMRMVALKAGWQQRKRSERKITLMVMMVVMVFVICWMPFYVVQLVNVFAEQDDATVSQLSVILGYANSCANPILYGFLSDNFKRSFQRILCLSWMDNAAEEPVDYYATALKSRAYSVEDFQPENLESGGVFRNGTCTSRITTL

SEQ ID NO: 82333 - protein, 369 aa, Homo sapiens
  Payload ID: 16391
  Gene Symbol: SSTR2
  Gene Name: somatostatin receptor 2
  Uniprot ID: P30874
  ENSP ID: ENSP00000350198
MDMADEPLNGSHTWLSIPFDLNGSVVSTNTSNQTEPYYDLTSNAVLTFIYFVVCIIGLCGNTLVIYVILRYAKMKTITNIYILNLAIADELFMLGLPFLAMQVALVHWPFGKAICRVVMTVDGINQFTSIFCLTVMSIDRYLAVVHPIKSAKWRRPRTAKMITMAVWGVSLLVILPIMIYAGLRSNQWGRSSCTINWPGESGAWYTGFIIYTFILGFLVPLTIICLCYLFIIIKVKSSGIRVGSSKRKKSEKKVTRMVSIVVAVFIFCWLPFYIFNVSSVSMAISPTPALKGMFDFVVVLTYANSCANPILYAFLSDNFKKSFQNVLCLVKVSGTDDGERSDSKQDKSRLNETTETQRTLLNGDLQTSI

SEQ ID NO: 82334 - protein, 418 aa, Homo sapiens
  Payload ID: 16392
  Gene Symbol: SSTR3
  Gene Name: somatostatin receptor 3
  Uniprot ID: P32745
  ENSP ID: ENSP00000480971
MDMLHPSSVSTTSEPENASSAWPPDATLGNVSAGPSPAGLAVSGVLIPLVYLVVCVVGLLGNSLVIYVVLRHTASPSVTNVYILNLALADELFMLGLPFLAAQNALSYWPFGSLMCRLVMAVDGINQFTSIFCLTVMSVDRYLAVVHPTRSARWRTAPVARTVSAAVWVASAVVVLPVVVFSGVPRGMSTCHMQWPEPAAAWRAGFIIYTAALGFFGPLLVICLCYLLIVVKVRSAGRRVWAPSCQRRRRSERRVTRMVVAVVALFVLCWMPFYVLNIVNVVCPLPEEPAFFGLYFLVVALPYANSCANPILYGFLSYRFKQGFRRVLLRPSRRVRSQEPTVGPPEKTEEEDEEEEDGEESREGGKGKEMNGRVSQITQPGTSGQERPPSRVASKEQQLLPQEASTGEKSSTMRISYL

SEQ ID NO: 82335 - protein, 418 aa, Homo sapiens; identical to SEQ ID NO: 82334
  Payload ID: 16392
  Gene Symbol: SSTR3
  Gene Name: somatostatin receptor 3
  Uniprot ID: P32745
  ENSP ID: ENSP00000481325

SEQ ID NO: 82336 - protein, 388 aa, Homo sapiens
  Payload ID: 16393
  Gene Symbol: SSTR4
  Gene Name: somatostatin receptor 4
  Uniprot ID: P31391
  ENSP ID: ENSP00000255008
MSAPSTLPPGGEEGLGTAWPSAANASSAPAEAEEAVAGPGDARAAGMVAIQCIYALVCLVGLVGNALVIFVILRYAKMKTATNIYLLNLAVADELFMLSVPFVASSAALRHWPFGSVLCRAVLSVDGLNMFTSVFCLTVLSVDRYVAVVHPLRAATYRRPSVAKLINLGVWLASLLVTLPIAIFADTRPARGGQAVACNLQWPHPAWSAVFVVYTFLLGFLLPVLAIGLCYLLIVGKMRAVALRAGWQQRRRSEKKITRLVLMVVVVFVLCWMPFYVVQLLNLFVTSLDATVNHVSLILSYANSCANPILYGFLSDNFRRFFQRVLCLRCCLLEGAGGAEEEPLDYYATALKSKGGAGCMCPPLPCQQEALQPEPGRKRIPLTRTTTF

SEQ ID NO: 82337 - protein, 364 aa, Homo sapiens
  Payload ID: 16394
  Gene Symbol: SSTR5
  Gene Name: somatostatin receptor 5
  Uniprot ID: P35346
  ENSP ID: ENSP00000293897
MEPLFPASTPSWNASSPGAASGGGDNRTLVGPAPSAGARAVLVPVLYLLVCAAGLGGNTLVIYVVLRFAKMKTVTNIYILNLAVADVLYMLGLPFLATQNAASFWPFGPVLCRLVMTLDGVNQFTSVFCLTVMSVDRYLAVVHPLSSARWRRPRVAKLASAAAWVLSLCMSLPLLVFADVQEGGTCNASWPEPVGLWGAVFIIYTAVLGFFAPLLVICLCYLLIVVKVRAAGVRVGCVRRRSERKVTRMVLVVVLVFAGCWLPFFTVNIVNLAVALPQEPASAGLYFFVVILSYANSCANPVLYGFLSDNFRQSFQKVLCLRKGSGAKDADATEPRPDRIRQQQEATPPAHRAAANGLMQTSKL

SEQ ID NO: 82338 - protein, 2303 aa, Homo sapiens
  Payload ID: 16395
  Gene Symbol: SON
  Gene Name: SON DNA binding protein
  Uniprot ID: P18583
  ENSP ID: ENSP00000300278
MATNIEQIFRSFVVSKFREIQQELSSGRNEGQLNGETNTPIEGNQAGDAAASARSLPNEEIVQKIEEVLSGVLDTELRYKPDLKEGSRKSRCVSVQTDPTDEIPTKKSKKHKKHKNKKKKKKKEKEKKYKRQPEESESKTKSHDDGNIDLESDSFLKFDSEPSAVALELPTRAFGPSETNESPAVVLEPPVVSMEVSEPHILETLKPATKTAELSVVSTSVISEQSEQSVAVMPEPSMTKILDSFAAAPVPTTTLVLKSSEPVVTMSVEYQMKSVLKSVESTSPEPSKIMLVEPPVAKVLEPSETLVVSSETPTEVYPEPSTSTTMDFPESSAIEALRLPEQPVDVPSEIADSSMTRPQELPELPKTTALELQESSVASAMELPGPPATSMPELQGPPVTPVLELPGPSATPVPELPGPLSTPVPELPGPPATAVPELPGPSVTPVPQLSQELPGLPAPSMGLEPPQEVPEPPVMAQELPGLPLVTAAVELPEQPAVTVAMELTEQPVTTTELEQPVGMTTVEHPGHPEVTTATGLLGQPEATMVLELPGQPVATTALELPGQPSVTGVPELPGLPSATRALELSGQPVATGALELPGPLMAAGALEFSGQSGAAGALELLGQPLATGVLELPGQPGAPELPGQPVATVALEISVQSVVTTSELSTMTVSQSLEVPSTTALESYNTVAQELPTTLVGETSVTVGVDPLMAPESHILASNTMETHILASNTMDSQMLASNTMDSQMLASNTMDSQMLASSTMDSQMLATSSMDSQMLATSSMDSQMLATSTMDSQMLATSSMDSQMLATSSMDSQMLATSSMDSQMLATSSMDSQMLATSTMDSQMLATSTMDSQMLATSSMDSQMLASGTMDSQMLASGTMDAQMLASGTMDAQMLASSTQDSAMLGSKSPDPYRLAQDPYRLAQDPYRLGHDPYRLGHDAYRLGQDPYRLGHDPYRLTPDPYRMSPRPYRIAPRSYRIAPRPYRLAPRPLMLASRRSMMMSYAAERSMMSSYERSMMSYERSMMSPMAERSMMSAYERSMMSAYERSMMSPMAERSMMSAYERSMMSAYERSMMSPMADRSMMSMGADRSMMSSYSAADRSMMSSYSAADRSMMSSYTADRSMMSMAADSYTDSYTDTYTEAYMVPPLPPEEPPTMPPLPPEEPPMTPPLPPEEPPEGPALPTEQSALTAENTWPTEVPSSPSEESVSQPEPPVSQSEISEPSAVPTDYSVSASDPSVLVSEAAVTVPEPPPEPESSITLTPVESAVVAEEHEVVPERPVTCMVSETPAMSAEPTVLASEPPVMSETAETFDSMRASGHVASEVSTSLLVPAVTTPVLAESILEPPAMAAPESSAMAVLESSAVTVLESSTVTVLESSTVTVLEPSVVTVPEPPVVAEPDYVTIPVPVVSALEPSVPVLEPAVSVLQPSMIVSEPSVSVQESTVTVSEPAVTVSEQTQVIPTEVAIESTPMILESSIMSSHVMKGINLSSGDQNLAPEIGMQEIALHSGEEPHAEEHLKGDFYESEHGINIDLNINNHLIAKEMEHNTVCAAGTSPVGEIGEEKILPTSETKQRTVLDTYPGVSEADAGETLSSTGPFALEPDATGTSKGIEFTTASTLSLVNKYDVDLSLTTQDTEHDMVISTSPSGGSEADIEGPLPAKDIHLDLPSNNNLVSKDTEEPLPVKESDQTLAALLSPKESSGGEKEVPPPPKETLPDSGFSANIEDINEADLVRPLLPKDMERLTSLRAGIEGPLLASDVGRDRSAASPVVSSMPERASESSSEEKDDYEIFVKVKDTHEKSKKNKNRDKGEKEKKRDSSLRSRSKRSKSSEHKSRKRTSESRSRARKRSSKSKSHRSQTRSRSRSRRRRRSSRSRSKSRGRRSVSKEKRKRSPKHRSKSRERKRKRSSSRDNRKTVRARSRTPSRRSRSHTPSRRRRSRSVGRRRSFSISPSRRSRTPSRRSRTPSRRSRTPSRRSRTPSRRSRTPSRRSRTPSRRRRSRSVVRRRSFSISPVRLRRSRTPLRRRFSRSPIRRKRSRSSERGRSPKRLTDLDKAQLLEIAKANAAAMCAKAGVPLPPNLKPAPPPTIEEKVAKKSGGATIEELTEKCKQIAQSKEDDDVIVNKPHVSDEEEEEPPFYHHPFKLSEPKPIFFNLNIAAAKPTPPKSQVTLTKEFPVSSGSQHRKKEADSVYGEWVPVEKNGEENKDDDNVFSSNLPSEGRVKRQGRVRRQMKQPAASHLTVTRCNSLCGTKPQSEKHRIAENSVITSLPNIGPSLHLWEGSPRYNYLASRFASRLYSSRFWW

SEQ ID NO: 82339 - protein, 2426 aa, Homo sapiens
  Payload ID: 16395
  Gene Symbol: SON
  Gene Name: SON DNA binding protein
  Uniprot ID: P18583
  ENSP ID: ENSP00000348984
MATNIEQIFRSFVVSKFREIQQELSSGRNEGQLNGETNTPIEGNQAGDAAASARSLPNEEIVQKIEEVLSGVLDTELRYKPDLKEGSRKSRCVSVQTDPTDEIPTKKSKKHKKHKNKKKKKKKEKEKKYKRQPEESESKTKSHDDGNIDLESDSFLKFDSEPSAVALELPTRAFGPSETNESPAVVLEPPVVSMEVSEPHILETLKPATKTAELSVVSTSVISEQSEQSVAVMPEPSMTKILDSFAAAPVPTTTLVLKSSEPVVTMSVEYQMKSVLKSVESTSPEPSKIMLVEPPVAKVLEPSETLVVSSETPTEVYPEPSTSTTMDFPESSAIEALRLPEQPVDVPSEIADSSMTRPQELPELPKTTALELQESSVASAMELPGPPATSMPELQGPPVTPVLELPGPSATPVPELPGPLSTPVPELPGPPATAVPELPGPSVTPVPQLSQELPGLPAPSMGLEPPQEVPEPPVMAQELPGLPLVTAAVELPEQPAVTVAMELTEQPVTTTELEQPVGMTTVEHPGHPEVTTATGLLGQPEATMVLELPGQPVATTALELPGQPSVTGVPELPGLPSATRALELSGQPVATGALELPGPLMAAGALEFSGQSGAAGALELLGQPLATGVLELPGQPGAPELPGQPVATVALEISVQSVVTTSELSTMTVSQSLEVPSTTALESYNTVAQELPTTLVGETSVTVGVDPLMAPESHILASNTMETHILASNTMDSQMLASNTMDSQMLASNTMDSQMLASSTMDSQMLATSSMDSQMLATSSMDSQMLATSTMDSQMLATSSMDSQMLATSSMDSQMLATSSMDSQMLATSSMDSQMLATSTMDSQMLATSTMDSQMLATSSMDSQMLASGTMDSQMLASGTMDAQMLASGTMDAQMLASSTQDSAMLGSKSPDPYRLAQDPYRLAQDPYRLGHDPYRLGHDAYRLGQDPYRLGHDPYRLTPDPYRMSPRPYRIAPRSYRIAPRPYRLAPRPLMLASRRSMMMSYAAERSMMSSYERSMMSYERSMMSPMAERSMMSAYERSMMSAYERSMMSPMAERSMMSAYERSMMSAYERSMMSPMADRSMMSMGADRSMMSSYSAADRSMMSSYSAADRSMMSSYTADRSMMSMAADSYTDSYTDTYTEAYMVPPLPPEEPPTMPPLPPEEPPMTPPLPPEEPPEGPALPTEQSALTAENTWPTEVPSSPSEESVSQPEPPVSQSEISEPSAVPTDYSVSASDPSVLVSEAAVTVPEPPPEPESSITLTPVESAVVAEEHEVVPERPVTCMVSETPAMSAEPTVLASEPPVMSETAETFDSMRASGHVASEVSTSLLVPAVTTPVLAESILEPPAMAAPESSAMAVLESSAVTVLESSTVTVLESSTVTVLEPSVVTVPEPPVVAEPDYVTIPVPVVSALEPSVPVLEPAVSVLQPSMIVSEPSVSVQESTVTVSEPAVTVSEQTQVIPTEVAIESTPMILESSIMSSHVMKGINLSSGDQNLAPEIGMQEIALHSGEEPHAEEHLKGDFYESEHGINIDLNINNHLIAKEMEHNTVCAAGTSPVGEIGEEKILPTSETKQRTVLDTYPGVSEADAGETLSSTGPFALEPDATGTSKGIEFTTASTLSLVNKYDVDLSLTTQDTEHDMVISTSPSGGSEADIEGPLPAKDIHLDLPSNNNLVSKDTEEPLPVKESDQTLAALLSPKESSGGEKEVPPPPKETLPDSGFSANIEDINEADLVRPLLPKDMERLTSLRAGIEGPLLASDVGRDRSAASPVVSSMPERASESSSEEKDDYEIFVKVKDTHEKSKKNKNRDKGEKEKKRDSSLRSRSKRSKSSEHKSRKRTSESRSRARKRSSKSKSHRSQTRSRSRSRRRRRSSRSRSKSRGRRSVSKEKRKRSPKHRSKSRERKRKRSSSRDNRKTVRARSRTPSRRSRSHTPSRRRRSRSVGRRRSFSISPSRRSRTPSRRSRTPSRRSRTPSRRSRTPSRRSRTPSRRSRTPSRRRRSRSVVRRRSFSISPVRLRRSRTPLRRRFSRSPIRRKRSRSSERGRSPKRLTDLDKAQLLEIAKANAAAMCAKAGVPLPPNLKPAPPPTIEEKVAKKSGGATIEELTEKCKQIAQSKEDDDVIVNKPHVSDEEEEEPPFYHHPFKLSEPKPIFFNLNIAAAKPTPPKSQVTLTKEFPVSSGSQHRKKEADSVYGEWVPVEKNGEENKDDDNVFSSNLPSEPVDISTAMSERALAQKRLSENAFDLEAMSMLNRAQERIDAWAQLNSIPGQFTGSTGVQVLTQEQLANTGAQAWIKKDQFLRAAPVTGGMGAVLMRKMGWREGEGLGKNKEGNKEPILVDFKTDRKGLVAVGERAQKRSGNFSAAMKDLSGKHPVSALMEICNKRRWQPPEFLLVHDSGPDHRKHFLFRVLRNGALTRPNCMFFLNRY

SEQ ID NO: 82340 - protein, 2108 aa, Homo sapiens
  Payload ID: 16395
  Gene Symbol: SON
  Gene Name: SON DNA binding protein
  Uniprot ID: P18583
  ENSP ID: ENSP00000371095
MATNIEQIFRSFVVSKFREIQQELSSGRNEGQLNGETNTPIEGNQAGDAAASARSLPNEEIVQKIEEVLSGVLDTELRYKPDLKEGSRKSRCVSVQTDPTDEIPTKKSKKHKKHKNKKKKKKKEKEKKYKRQPEESESKTKSHDDGNIDLESDSFLKFDSEPSAVALELPTRAFGPSETNESPAVVLEPPVVSMEVSEPHILETLKPATKTAELSVVSTSVISEQSEQSVAVMPEPSMTKILDSFAAAPVPTTTLVLKSSEPVVTMSVEYQMKSVLKSVESTSPEPSKIMLVEPPVAKVLEPSETLVVSSETPTEVYPEPSTSTTMDFPESSAIEALRLPEQPVDVPSEIADSSMTRPQELPELPKTTALELQESSVASAMELPGPPATSMPELQGPPVTPVLELPGPSATPVPELPGPLSTPVPELPGPPATAVPELPGPSVTPVPQLSQELPGLPAPSMGLEPPQEVPEPPVMAQELPGLPLVTAAVELPEQPAVTVAMELTEQPVTTTELEQPVGMTTVEHPGHPEVTTATGLLGQPEATMVLELPGQPVATTALELPGQPSVTGVPELPGLPSATRALELSGQPVATGALELPGPLMAAGALEFSGQSGAAGALELLGQPLATGVLELPGQPGAPELPGQPVATVALEISVQSVVTTSELSTMTVSQSLEVPSTTALESYNTVAQELPTTLVGETSVTVGVDPLMAPESHILASNTMETHILASNTMDSQMLASNTMDSQMLASNTMDSQMLASSTMDSQMLATSSMDSQMLATSSMDSQMLATSTMDSQMLATSSMDSQMLATSSMDSQMLATSSMDSQMLATSSMDSQMLATSTMDSQMLATSTMDSQMLATSSMDSQMLASGTMDSQMLASGTMDAQMLASGTMDAQMLASSTQDSAMLGSKSPDPYRLAQDPYRLAQDPYRLGHDPYRLGHDAYRLGQDPYRLGHDPYRLTPDPYRMSPRPYRIAPRSYRIAPRPYRLAPRPLMLASRRSMMMSYAAERSMMSSYERSMMSYERSMMSPMAERSMMSAYERSMMSAYERSMMSPMAERSMMSAYERSMMSAYERSMMSPMADRSMMSMGADRSMMSSYSAADRSMMSSYSAADRSMMSSYTADRSMMSMAADSYTDSYTDTYTEAYMVPPLPPEEPPTMPPLPPEEPPMTPPLPPEEPPEGPALPTEQSALTAENTWPTEVPSSPSEESVSQPEPPVSQSEISEPSAVPTDYSVSASDPSVLVSEAAVTVPEPPPEPESSITLTPVESAVVAEEHEVVPERPVTCMVSETPAMSAEPTVLASEPPVMSETAETFDSMRASGHVASEVSTSLLVPAVTTPVLAESILEPPAMAAPESSAMAVLESSAVTVLESSTVTVLESSTVTVLEPSVVTVPEPPVVAEPDYVTIPVPVVSALEPSVPVLEPAVSVLQPSMIVSEPSVSVQESTVTVSEPAVTVSEQTQVIPTEVAIESTPMILESSIMSSHVMKGINLSSGDQNLAPEIGMQEIALHSGEEPHAEEHLKGDFYESEHGINIDLNINNHLIAKEMEHNTVCAAGTSPVGEIGEEKILPTSETKQRTVLDTYPGVSEADAGETLSSTGPFALEPDATGTSKGIEFTTASTLSLVNKYDVDLSLTTQDTEHDMVISTSPSGGSEADIEGPLPAKDIHLDLPSNNNLVSKDTEEPLPVKESDQTLAALLSPKESSGGEKEVPPPPKETLPDSGFSANIEDINEADLVRPLLPKDMERLTSLRAGIEGPLLASDVGRDRSAASPVVSSMPERASESSSEEKDDYEIFVKVKDTHEKSKKNKNRDKGEKEKKRDSSLRSRSKRSKSSEHKSRKRTSESRSRARKRSSKSKSHRSQTRSRSRSRRRRRSSRSRSKSRGRRSVSKEKRKRSPKHRSKSRERKRKRSSSRDNRKTVRARSRTPSRRSRSHTPSRRRRSRSVGRRRSFSISPSRRSRTPSRRSRTPSRRSRTPSRRSRTPSRRSRTPSRRSRTPSRRRRSRSVVRRRSFSISPVRLRRSRTPLRRRFSRSPIRRKRSRSSERGRSPKRLTDLDKAQLLEIAKANAAAMCAKAGVPLPPNLKPAPPPTIEEKVAKKSGGATIEELTEF

SEQ ID NO: 82341 - protein, 454 aa, Homo sapiens
  Payload ID: 16395
  Gene Symbol: SON
  Gene Name: SON DNA binding protein
  ENSP ID: ENSP00000371111
MATNIEQIFRSFVVSKFREIQQELSSGRNEGQLNGETNTPIEGNQAGDAAASARSLPNEEIVQKIEEVLSGVLDTELRYKPDKAQLLEIAKANAAAMCAKAGVPLPPNLKPAPPPTIEEKVAKKSGGATIEELTEKCKQIAQSKEDDDVIVNKPHVSDEEEEEPPFYHHPFKLSEPKPIFFNLNIAAAKPTPPKSQVTLTKEFPVSSGSQHRKKEADSVYGEWVPVEKNGEENKDDDNVFSSNLPSEPVDISTAMSERALAQKRLSENAFDLEAMSMLNRAQERIDAWAQLNSIPGQFTGSTGVQVLTQEQLANTGAQAWIKKDQFLRAAPVTGGMGAVLMRKMGWREGEGLGKNKEGNKEPILVDFKTDRKGLVAVGERAQKRSGNFSAAMKDLSGKHPVSALMEICNKRRWQPPEFLLVHDSGPDHRKHFLFRVLRNGALTRPNCMFFLNRY

SEQ ID NO: 82342 - protein, 2325 aa, Homo sapiens
  Payload ID: 16395
  Gene Symbol: SON
  Gene Name: SON DNA binding protein
  Uniprot ID: P18583
  ENSP ID: ENSP00000399783
MATNIEQIFRSFVVSKFREIQQELSSGRNEGQLNGETNTPIEGNQAGDAAASARSLPNEEIVQKIEEVLSGVLDTELRYKPDLKEGSRKSRCVSVQTDPTDEIPTKKSKKHKKHKNKKKKKKKEKEKKYKRQPEESESKTKSHDDGNIDLESDSFLKFDSEPSAVALELPTRAFGPSETNESPAVVLEPPVVSMEVSEPHILETLKPATKTAELSVVSTSVISEQSEQSVAVMPEPSMTKILDSFAAAPVPTTTLVLKSSEPVVTMSVEYQMKSVLKSVESTSPEPSKIMLVEPPVAKVLEPSETLVVSSETPTEVYPEPSTSTTMDFPESSAIEALRLPEQPVDVPSEIADSSMTRPQELPELPKTTALELQESSVASAMELPGPPATSMPELQGPPVTPVLELPGPSATPVPELPGPLSTPVPELPGPPATAVPELPGPSVTPVPQLSQELPGLPAPSMGLEPPQEVPEPPVMAQELPGLPLVTAAVELPEQPAVTVAMELTEQPVTTTELEQPVGMTTVEHPGHPEVTTATGLLGQPEATMVLELPGQPVATTALELPGQPSVTGVPELPGLPSATRALELSGQPVATGALELPGPLMAAGALEFSGQSGAAGALELLGQPLATGVLELPGQPGAPELPGQPVATVALEISVQSVVTTSELSTMTVSQSLEVPSTTALESYNTVAQELPTTLVGETSVTVGVDPLMAPESHILASNTMETHILASNTMDSQMLASNTMDSQMLASNTMDSQMLASSTMDSQMLATSSMDSQMLATSSMDSQMLATSTMDSQMLATSSMDSQMLATSSMDSQMLATSSMDSQMLATSSMDSQMLATSTMDSQMLATSTMDSQMLATSSMDSQMLASGTMDSQMLASGTMDAQMLASGTMDAQMLASSTQDSAMLGSKSPDPYRLAQDPYRLAQDPYRLGHDPYRLGHDAYRLGQDPYRLGHDPYRLTPDPYRMSPRPYRIAPRSYRIAPRPYRLAPRPLMLASRRSMMMSYAAERSMMSSYERSMMSYERSMMSPMAERSMMSAYERSMMSAYERSMMSPMAERSMMSAYERSMMSAYERSMMSPMADRSMMSMGADRSMMSSYSAADRSMMSSYSAADRSMMSSYTADRSMMSMAADSYTDSYTDTYTEAYMVPPLPPEEPPTMPPLPPEEPPMTPPLPPEEPPEGPALPTEQSALTAENTWPTEVPSSPSEESVSQPEPPVSQSEISEPSAVPTDYSVSASDPSVLVSEAAVTVPEPPPEPESSITLTPVESAVVAEEHEVVPERPVTCMVSETPAMSAEPTVLASEPPVMSETAETFDSMRASGHVASEVSTSLLVPAVTTPVLAESILEPPAMAAPESSAMAVLESSAVTVLESSTVTVLESSTVTVLEPSVVTVPEPPVVAEPDYVTIPVPVVSALEPSVPVLEPAVSVLQPSMIVSEPSVSVQESTVTVSEPAVTVSEQTQVIPTEVAIESTPMILESSIMSSHVMKGINLSSGDQNLAPEIGMQEIALHSGEEPHAEEHLKGDFYESEHGINIDLNINNHLIAKEMEHNTVCAAGTSPVGEIGEEKILPTSETKQRTVLDTYPGVSEADAGETLSSTGPFALEPDATGTSKGIEFTTASTLSLVNKYDVDLSLTTQDTEHDMVISTSPSGGSEADIEGPLPAKDIHLDLPSNNNLVSKDTEEPLPVKESDQTLAALLSPKESSGGEKEVPPPPKETLPDSGFSANIEDINEADLVRPLLPKDMERLTSLRAGIEGPLLASDVGRDRSAASPVVSSMPERASESSSEEKDDYEIFVKVKDTHEKSKKNKNRDKGEKEKKRDSSLRSRSKRSKSSEHKSRKRTSESRSRARKRSSKSKSHRSQTRSRSRSRRRRRSSRSRSKSRGRRSVSKEKRKRSPKHRSKSRERKRKRSSSRDNRKTVRARSRTPSRRSRSHTPSRRRRSRSVGRRRSFSISPSRRSRTPSRRSRTPSRRSRTPSRRSRTPSRRSRTPSRRSRTPSRRRRSRSVVRRRSFSISPVRLRRSRTPLRRRFSRSPIRRKRSRSSERGRSPKRLTDLDKAQLLEIAKANAAAMCAKAGVPLPPNLKPAPPPTIEEKVAKKSGGATIEELTEKCKQIAQSKEDDDVIVNKPHVSDEEEEEPPFYHHPFKLSEPKPIFFNLNIAAAKPTPPKSQVTLTKEFPVSSGSQHRKKEADSVYGEWVPVEKNGEENKDDDNVFSSNLPSEPVDISTAMSERALAQKRLSENAFDLEAMSMLNRAQERIDAWAQLNSIPGQFTGSTGVQVLTQEQLANTGAQAWIKKGQILVAVFLPRSVPAVLFTTLLLPRPRISS

SEQ ID NO: 82343 - protein, 1454 aa, Homo sapiens
  Payload ID: 16395
  Gene Symbol: SON
  Gene Name: SON DNA binding protein
  ENSP ID: ENSP00000400985
  MOD_RES (1)..(1): Any amino acid
XRSMMSSYERSMMSYERSMMSPMAERSMMSAYERSMMSAYERSMMSPMAERSMMSAYERSMMSAYERSMMSPMADRSMMSMGADRSMMSSYSAADRSMMSSYSAADRSMMSSYTADRSMMSMAADSYTDSYTDTYTEAYMVPPLPPEEPPTMPPLPPEEPPMTPPLPPEEPPEGPALPTEQSALTAENTWPTEVPSSPSEESVSQPEPPVSQSEISEPSAVPTDYSVSASDPSVLVSEAAVTVPEPPPEPESSITLTPVESAVVAEEHEVVPERPVTCMVSETPAMSAEPTVLASEPPVMSETAETFDSMRASGHVASEVSTSLLVPAVTTPVLAESILEPPAMAAPESSAMAVLESSAVTVLESSTVTVLESSTVTVLEPSVVTVPEPPVVAEPDYVTIPVPVVSALEPSVPVLEPAVSVLQPSMIVSEPSVSVQESTVTVSEPAVTVSEQTQVIPTEVAIESTPMILESSIMSSHVMKGINLSSGDQNLAPEIGMQEIALHSGEEPHAEEHLKGDFYESEHGINIDLNINNHLIAKEMEHNTVCAAGTSPVGEIGEEKILPTSETKQRTVLDTYPGVSEADAGETLSSTGPFALEPDATGTSKGIEFTTASTLSLVNKYDVDLSLTTQDTEHDMVISTSPSGGSEADIEGPLPAKDIHLDLPSNNNLVSKDTEEPLPVKESDQTLAALLSPKESSGGEKEVPPPPKETLPDSGFSANIEDINEADLVRPLLPKDMERLTSLRAGIEGPLLASDVGRDRSAASPVVSSMPERASESSSEEKDDYEIFVKVKDTHEKSKKNKNRDKGEKEKKRDSSLRSRSKRSKSSEHKSRKRTSESRSRARKRSSKSKSHRSQTRSRSRSRRRRRSSRSRSKSRGRRSVSKEKRKRSPKHRSKSRERKRKRSSSRDNRKTVRARSRTPSRRSRSHTPSRRRRSRSVGRRRSFSISPSRRSRTPSRRSRTPSRRSRTPSRRSRTPSRRSRTPSRRSRTPSRRRRSRSVVRRRSFSISPVRLRRSRTPLRRRFSRSPIRRKRSRSSERGRSPKRLTDLDKAQLLEIAKANAAAMCAKAGVPLPPNLKPAPPPTIEEKVAKKSGGATIEELTEKCKQIAQSKEDDDVIVNKPHVSDEEEEEPPFYHHPFKLSEPKPIFFNLNIAAAKPTPPKSQVTLTKEFPVSSGSQHRKKEADSVYGEWVPVEKNGEENKDDDNVFSSNLPSEPVDISTAMSERALAQKRLSENAFDLEAMSMLNRAQERIDAWAQLNSIPGQFTGSTGVQVLTQEQLANTGAQAWIKKDQFLRAAPVTGGMGAVLMRKMGWREGEGLGKNKEGNKEPILVDFKTDRKGLVAVGERAQKRSGNFSAAMKDLSGKHPVSALMEICNKRRWQPPEFLLVHDSGPDHRKHFLFRVLINGSAYQPSFASPNKKHAKATAATVVLQAMGLVPKDLMANATCFRSASRR

SEQ ID NO: 82344 - protein, 92 aa, Homo sapiens
  Payload ID: 16395
  Gene Symbol: SON
  Gene Name: SON DNA binding protein
  ENSP ID: ENSP00000401942
VDISTAMSERALAQKRLSENAFDLEAMSMLNRAQERIDAWAQLNSIPGQFTGSTGVQVLTQEQLANTGAQAWIKKCLCLLVRSLGPRSSLLL

SEQ ID NO: 82345 - protein, 97 aa, Homo sapiens
  Payload ID: 16395
  Gene Symbol: SON
  Gene Name: SON DNA binding protein
  ENSP ID: ENSP00000404135
  MOD_RES (1)..(1): Any amino acid
XRALAQKRLSENAFDLEAMSMLNRAQERIDAWAQLNSIPGQFTGSTGVQVLTQEQLANTGAQAWIKKGQILVAVFLPRSVPAVLFTTLLLPRPRISS

SEQ ID NO: 82346 - protein, 343 aa, Homo sapiens
  Payload ID: 16395
  Gene Symbol: SON
  Gene Name: SON DNA binding protein
  ENSP ID: ENSP00000405807
SRSVGRRRSFSISPSRRSRTPSRRSRTPSRRSRTPSRRSRTPSRRSRTPSRRSRTPSRRRRSRSVVRRRSFSISPVRLRRSRTPLRRRFSRSPIRRKRSRSSERGRSPKRLTDLDKAQLLEIAKANAAAMCAKAGVPLPPNLKPAPPPTIEEKVAKKSGGATIEELTEKCKQIAQSKEDDDVIVNKPHVSDEEEEEPPFYHHPFKLSEPKPIFFNLNIAAAKPTPPKSQVTLTKEFPVSSGSQHRKKEADSVYGEWVPVEKNGEENKDDDNVFSSNLPSEPVDISTAMSERALAQKRLSENAFDLEAMSMLNRAQERVCSSFLKKIIIYHQPTHTNVPVLMSK

SEQ ID NO: 82347 - protein, 1318 aa, Homo sapiens
  Payload ID: 16396
  Gene Symbol: SOS1
  Gene Name: son of sevenless homolog 1 (Drosophila)
  ENSP ID: ENSP00000378479
MQAQQLPYEFFSEENAPKWRGLLVPALKKVQGQVHPTLESNDDALQYVEELILQLLNMLCQAQPRSASDVEERVQKSFPHPIDKWAIADAQSAIEKRKRRNPLSLPVEKIHPLLKEVLGYKIDHQVSVYIVAVLEYISADILKLVGNYVRNIRHYEITKQDIKVAMCADKVLMDMFHQDVEDINILSLTDEEPSTSGEQTYYDLVKAFMAEIRQYIRELNLIIKVFREPFVSNSKLFSANDVENIFSRIVDIHELSVKLLGHIEDTVEMTDEGSPHPLVGSCFEDLAEELAFDPYESYARDILRPGFHDRFLSQLSKPGAALYLQSIGEGFKEAVQYVLPRLLLAPVYHCLHYFELLKQLEEKSEDQEDKECLKQAITALLNVQSGMEKICSKSLAKRRLSESACRFYSQQMKGKQLAIKKMNEIQKNIDGWEGKDIGQCCNEFIMEGTLTRVGAKHERHIFLFDGLMICCKSNHGQPRLPGASNAEYRLKEKFFMRKVQINDKDDTNEYKHAFEIILKDENSVIFSAKSAEEKNNWMAALISLQYRSTLERMLDVTMLQEEKEEQMRLPSADVYRFAEPDSEENIIFEENMQPKAGIPIIKAGTVIKLIERLTYHMYADPNFVRTFLTTYRSFCKPQELLSLIIERFEIPEPEPTEADRIAIENGDQPLSAELKRFRKEYIQPVQLRVLNVCRHWVEHHFYDFERDAYLLQRMEEFIGTVRGKAMKKWVESITKIIQRKKIARDNGPGHNITFQSSPPTVEWHISRPGHIETFDLLTLHPIEIARQLTLLESDLYRAVQPSELVGSVWTKEDKEINSPNLLKMIRHTTNLTLWFEKCIVETENLEERVAVVSRIIEILQVFQELNNFNGVLEVVSAMNSSPVYRLDHTFEQIPSRQKKILEEAHELSEDHYKKYLAKLRSINPPCVPFFGIYLTNILKTEEGNPEVLKRHGKELINFSKRRKVAEITGEIQQYQNQPYCLRVESDIKRFFENLNPMGNSMEKEFTDYLFNKSLEIEPRNPKPLPRFPKKYSYPLKSPGVRPSNPRPGTMRHPTPLQQEPRKISYSRIPESETESTASAPNSPRTPLTPPPASGASSTTDVCSVFDSDHSSPFHSRSASVSSISLTKGTDEVPVPPPVPPRRRPESAPAESSPSKIMSKHLDSPPAIPPRQPTSKAYSPRYSISDRTSISDPPESPPLLPPREPVRTPDVFSSSPLHLQPPPLGKKSDHGNAFFPNSPSPFTPPPPQTPSPHGTRRHLPSPPLTQEVDLHSIAGPPVPPRQSTSQHIPKLPPKTYKREHTHPSMHRDGPPLLENAHSS

SEQ ID NO: 82348 - protein, 1333 aa, Homo sapiens [sequence omitted]

SEQ ID NO: 82349 - protein, 1333 aa, Homo sapiens [sequence omitted]

SEQ ID NO: 82350 - protein, 102 aa, Homo sapiens
  Payload ID: 16396
  Gene Symbol: SOS1
  Gene Name: son of sevenless homolog 1 (Drosophila)
  ENSP ID: ENSP00000393899
MLCQAQPRSASDVEERVQKSFPHPIDKWAIADAQSAIEKRKRRNPLSLPVEKIHPLLKEVLGYKIDHQVSVYIVAVLEYISADILKLVGNYVRNIRHYEITK

SEQ ID NO: 82351 - protein, 1332 aa, Homo sapiens [sequence omitted]

SEQ ID NO: 82352 - protein, 1299 aa, Homo sapiens
  Payload ID: 16397
  Gene Symbol: SOS2
  Gene Name: son of sevenless homolog 2 (Drosophila)
  Uniprot ID: Q07890
  ENSP ID: ENSP00000445328
MQQAPQPYEFFSEENSPKWRGLLVSALRKVQEQVHPTLSANEESLYYIEELIFQLLNKLCMAQPRTVQDVEERVQKTFPHPIDKWAIADAQSAIEKRKRRNPLLLPVDKIHPSLKEVLGYKVDYHVSLYIVAVLEYISADILKLAGNYVFNIRHYEISQQDIKVSMCADKVLMDMFDQDDIGLVSLCEDEPSSSGELNYYDLVRTEIAEERQYLRELNMIIKVFREAFLSDRKLFKPSDIEKIFSNISDIHELTVKLLGLIEDTVEMTDESSPHPLAGSCFEDLAEEQAFDPYETLSQDILSPEFHEHFNKLMARPAVALHFQQLKACSEEQEDRECLNQAITALMNLQGSMDRIYKQYSPRRRPGDPVCPFYSHQLRSKHLAIKKMNEIQKNIDGWEGKDIGQCCNEFIMEGPLTRIGAKHERHIFLFDGLMISCKPNHGQTRLPGYSSAEYRLKEKFVMRKIQICDKEDTCEHKHAFELVSKDENSIIFAAKSAEEKNNWMAALISLHYRSTLDRMLDSVLLKEENEQPLRLPSPEVYRFVVKDSEENIVFEDNLQSRSGIPIIKGGTVVKLIERLTYHMYADPNFVRTFLTTYRSFCKPQELLSLLIERFEIPEPEPTDADKLAIEKGEQPISADLKRFRKEYVQPVQLRILNVFRHWVEHHFYDFERDLELLERLESFISSVRGKAMKKWVESIAKIIRRKKQAQANGVSHNITFESPPPPIEWHISKPGQFETFDLMTLHPIEIARQLTLLESDLYRKVQPSELVGSVWTKEDKEINSPNLLKMIRHTTNLTLWFEKCIVEAENFEERVAVLSRIIEILQVFQDLNNFNGVLEIVSAVNSVSVYRLDHTFEALQERKRKILDEAVELSQDHFKKYLVKLKSINPPCVPFFGIYLTNILKTEEGNNDFLKKKGKDLINFSKRRKVAEITGEIQQYQNQPYCLRIEPDMRRFFENLNPMGSASEKEFTDYLFNKSLEIEPRNCKQPPRFPRKSTFSLKSPGIRPNTGRHGSTSGTLRGHPTPLEREPCKISFSRIAETELESTVSAPTSPNTPSTPPVSASSDLSVFLDVDLNSSCGSNSIFAPVLLPHSKSFFSSCGSLHKLSEEPLIPPPLPPRKKFDHDASNSKGNMKSDDDPPAIPPRQPPPPKVKPRVPVPTGAFDGPLHSPPPPPPRDPLPDTPPPVPLRPPEHFINCPFNLQPPPLGHLHRDSDWLRDISTCPNSPSTPPSTPSPRVPRRCYVLSSSQNNLAHPPAPPVPPRQNSSPHLPKLPPKTYKRELSHPPLYRLPLLENAETPQ

SEQ ID NO: 82353 - protein, 70 aa, Homo sapiens
  Payload ID: 16397
  Gene Symbol: SOS2
  Gene Name: son of sevenless homolog 2 (Drosophila)
  ENSP ID: ENSP00000452553
MQQAPQPYEFFSEENSPKWRGLLVSALRKKCKAWFSSIVLLMSCYSIYGFRNKCIPLSQLMKSLSIILKS

SEQ ID NO: 82354 - protein, 419 aa, Homo sapiens
  Payload ID: 16397
  Gene Symbol: SOS2
  Gene Name: son of sevenless homolog 2 (Drosophila)
  ENSP ID: ENSP00000484766
  MOD_RES (1)..(1): Any amino acid
XSQDILSPEFHEHFNKLMARPAVALHFQSIADGFKEAVRYVLPRLMLVPVYHCWHYFELLKQLKACSEEQEDRECLNQAITALMNLQGSMDRIYKQYSPRRRPGDPVCPFYSHQLRSKHLAIKKMNEIQKNIDGWEGKDIGQCCNEFIMEGPLTRIGAKHERHIFLFDGLMISCKPNHGQTRLPGYSSAEYRLKEKFVMRKIQICDKEDTCEHKHAFELVSKDENSIIFAAKSAEEKNNWMAALISLHYRSTLDRMLDSVLLKEENEQPLRLPSPEVYRFVVKDSEENIVFEDNLQSRSGIPIIKGGTVVKLIERLTYHMYADPNFVRTFLTTYRSFCKPQELLSLLIERFEIPEPEPTDADKLAIEKGEQPISADLKRFRKEYVQPVQLRFGLNIFYIYIYTHIYTHTHTFYVSVFNI

SEQ ID NO: 82355 - protein, 462 aa, Homo sapiens
  Payload ID: 16398
  Gene Symbol: SHH
  Gene Name: sonic hedgehog
  Uniprot ID: Q15465
  ENSP ID: ENSP00000297261
MLLLARCLLLVLVSSLLVCSGLACGPGRGFGKRRHPKKLTPLAYKQFIPNVAEKTLGASGRYEGKISRNSERFKELTPNYNPDIIFKDEENTGADRLMTQRCKDKLNALAISVMNQWPGVKLRVTEGWDEDGHHSEESLHYEGRAVDITTSDRDRSKYGMLARLAVEAGFDWVYYESKAHIHCSVKAENSVAAKSGGCFPGSATVHLEQGGTKLVKDLSPGDRVLAADDQGRLLYSDFLTFLDRDDGAKKVFYVIETREPRERLLLTAAHLLFVAPHNDSATGEPEASSGSGPPSGGALGPRALFASRVRPGQRVYVVAERDGDRRLLPAAVHSVTLSEEAAGAYAPLTAQGTILINRVLASCYAVIEEHSWAHRAFAPFRLAHALLAALAPARTDRGGDSGGGDRGGGGGRVALTAPGAADAPGAGATAGIHWYSQLLYQIGTWLLDSEALHPLGMAVKSS

SEQ ID NO: 82356 - protein, 169 aa, Homo sapiens
  Payload ID: 16398
  Gene Symbol: SHH
  Gene Name: sonic hedgehog
  ENSP ID: ENSP00000396621
MLSLFPSPGPGSSRCKDKLNALAISVMNQWPGVKLRVTEGWDEDGHHSEESLHYEGRAVDITTSDRDRSKYGMLARLAVEAGFDWVYYESKAHIHCSVKAGKERKPLLRDTRYRASRGCSPAPPGRGADFSFRVDGAKSLCKMYAWWLLPASLMTKCISIPVKTCITMY

SEQ ID NO: 82357 - protein, 126 aa, Homo sapiens
  Payload ID: 16398
  Gene Symbol: SHH
  Gene Name: sonic hedgehog
  ENSP ID: ENSP00000410546
MLSLFPSPGPGSSRCKDKLNALAISVMNQWPGVKLRVTEGWDEDGHHSEESLHYEGRAVDITTSDRDRSKYGMLARLAVEAGFDWVYYESKAHIHCSVKAGGQQVPGWCLQSRRKCDGFCSFDSSV

SEQ ID NO: 82358 - protein, 123 aa, Homo sapiens
  Payload ID: 16398
  Gene Symbol: SHH
  Gene Name: sonic hedgehog
  ENSP ID: ENSP00000413871
MLSLFPSPGPGSSRCKDKLNALAISVMNQWPGVKLRVTEGWDEDGHHSEESLHYEGRAVDITTSDRDRSKYGMLARLAVEAGFDWVYYESKAHIHCSVKAVQSDFKSVESEPEAPGTAAPLAV

SEQ ID NO: 82359 - protein, 1151 aa, Homo sapiens
  Payload ID: 16399
  Gene Symbol: SORBS1
  Gene Name: sorbin and SH3 domain containing 1
  Uniprot ID: Q9BX66
  ENSP ID: ENSP00000277982
MSSECDGGSKAVMNGLAPGSNGQDKATADPLRARSISAVKIIPVKTVKNASGLVLPTDMDLTKICTGKGAVTLRASSSYRETPSSSPASPQETRQHESKPGLEPEPSSADEWRLSSSADANGNAQPSSLAAKGYRSVHPNLPSDKSQDATSSSAAQPEVIVVPLYLVNTDRGQEGTARPPTPLGPLGCVPTIPATASAASPLTFPTLDDFIPPHLQRWPHHSQPARASGSFAPISQTPPSFSPPPPLVPPAPEDLRRVSEPDLTGAVSSTDSSPLLNEVSSSLIGTDSQAFPSVSKPSSAYPSTTIVNPTIVLLQHNREQQKRLSSLSDPVSERRVGEQDSAPTQEKPTSPGKAIEKRAKDDSRRVVKSTQDLSDVSMDEVGIPLRNTERSKDWYKTMFKQIHKLNRDTPEENPYFPTYKFPELPEIQQTSEETKSCSVMSPRLECSGTVIAHCSLKLLDSSNPPTSASQVAGTADDDSDLYSPRYSFSEDTKSPLSVPRSKSEMSYIDGEKVVKRSATLPLPARSSSLKSSSERNDWEPPDKKVDTRKYRAEPKSIYEYQPGKSSVLTNEKMSRDISPEEIDLKNEPWYKFFSELEFGKPPPKKIWDYTPGDCSILPREDRKTNLDKDLSLCQTELEADLEKMETLNKAPSANVPQSSAISPTPEISSETPGYIYSSNFHAVKRESDGAPGDLTSLENERQIYKSVLEGGDIPLQGLSGLKRPSSSASTKDSESPRHFIPADYLESTEEFIRRRHDDKEKLLADQRRLKREQEEADIAARRHTGVIPTHHQFITNERFGDLLNIDDTAKRKSGSEMRPARAKFDFKAQTLKELPLQKGDIVYIYKQIDQNWYEGEHHGRVGIFPRTYIELLPPAEKAQPKKLTPVQVLEYGEAIAKFNFNGDTQVEMSFRKGERITLLRQVDENWYEGRIPGTSRQGIFPITYVDVIKRPLVKNPVDYMDLPFSSSPSRSATASPQPWREESGQYERKAERGAGERGPGGPKISKKSCLKPSDVVRCLSTEQRLSDLNTPEESRPGKPLGSAFPGSEAEQTERHRGGEQAGRKAARRGGSQQPQAQQRRVTPDRSQTSQDLFSYQALYSYIPQNDDELELRDGDIVDVMEKCDDGWFVGTSRRTKQFGTFPGNYVKPLYL

SEQ ID NO: 82360 - protein, 1004 aa, Homo sapiens
  Payload ID: 16399
  Gene Symbol: SORBS1
  Gene Name: sorbin and SH3 domain containing 1
  Uniprot ID: Q9BX66
  ENSP ID: ENSP00000277984
MSSECDGGSKAVMNGLAPGSNGQDKATADPLRARSISAVKIIPVKTVKNASGLVLPTDMDLTKICTGKGAVTLRASSSYRETPSSSPASPQETRQHESKPDEWRLSSSADANGNAQPSSLAAKGYRSVHPNLPSDKSQDATSSSAAQPEVIVVPLYLVNTDRGQEGTARPPTPLGPLGCVPTIPATASAASPLTFPTLDDFIPPHLQRWPHHSQPARASGSFAPISQTPPSFSPPPPLVPPAPEDLRRVSEPDLTGAVSSTDSSPLLNEVSSSLIGTDSQAFPSVSKPSSAYPSTTIVNPTIVLLQHNREQQKRLSSLSDPVSERRVGEQDSAPTQEKPTSPGKAIEKRAKDDSRRVVKSTQDLSDVSMDEVGIPLRNTERSKDWYKTMFKQIHKLNRDTPEENPYFPTYKFPELPEIQQTSEDDDSDLYSPRYSFSEDTKSPLSVPRSKSEMSYIDGEKVVKRSATLPLPARSSSLKSSSERNDWEPPDKKVDTRKYRAEPKSIYEYQPGKSSVLTNEKMSRDISPEEIDLKNEPWYKFFSELEFGKPPPKKIWDYTPGDCSILPREDRKTNLDKDLSLCQTELEADLEKMETLNKAPSANVPQSSAISPTPEISSETPGYIYSSNFHAVKRESDGAPGDLTSLENERQIYKSVLEGGDIPLQGLSGLKRPSSSASTKDSESPRHFIPADYLESTEEFIRRRHDDKEKLLADQRRLKREQEEADIAARRHTGVIPTHHQFITNERFGDLLNIDDTAKRKSGSEMRPARAKFDFKAQTLKELPLQKGDIVYIYKQIDQNWYEGEHHGRVGIFPRTYIELLPPAEKAQPKKLTPVQVLEYGEAIAKFNFNGDTQVEMSFRKGERITLLRQVDENWYEGRIPGTSRQGIFPITYVDVIKRPLVKNPVDYMDLPFSSSPSRSATASPQQPQAQQRRVTPDRSQTSQDLFSYQALYSYIPQNDDELELRDGDIVDVMEKCDDGWFVGTSRRTKQFGTFPGNYVKPLYL

SEQ ID NO: 82361 - protein, 781 aa, Homo sapiens
  Payload ID: 16399
  Gene Symbol: SORBS1
  Gene Name: sorbin and SH3 domain containing 1
  Uniprot ID: Q9BX66
  ENSP ID: ENSP00000302556
MSSECDGGSKAVMNGLAPGSNGQDKATADPLRARSISAVKIIPVKTVKNASGLVLPTDMDLTKICTGKGAVTLRASSSYRETPSSSPASPQETRQHESKPGLEPEPSSADEWRLSSSADANGNAQPSSLAAKGYRSVHPNLPSDKSQDSSPLLNEVSSSLIGTDSQAFPSVSKPSSAYPSTTIVNPTIVLLQHNREQQKRLSSLSDPVSERRVGEQDSAPTQEKPTSPGKAIEKRAKDDSRRVVKSTQDLSDVSMDEVGIPLRNTERSKDWYKTMFKQIHKLNRDDDSDLYSPRYSFSEDTKSPLSVPRSKSEMSYIDGEKVVKRSATLPLPARSSSLKSSSERNDWEPPDKKVDTRKYRAEPKSIYEYQPGKSSVLTNEKMSSAISPTPEISSETPGYIYSSNFHAVKRESDGAPGDLTSLENERQIYKSVLEGGDIPLQGLSGLKRPSSSASTKDSESPRHFIPADYLESTEEFIRRRHDDKEKLLADQRRLKREQEEADIAARRHTGVIPTHHQFITNERFGDLLNIDDTAKRKSGSEMRPARAKFDFKAQTLKELPLQKGDIVYIYKQIDQNWYEGEHHGRVGIFPRTYIELLPPAEKAQPKKLTPVQVLEYGEAIAKFNFNGDTQVEMSFRKGERITLLRQVDENWYEGRIPGTSRQGIFPITYVDVIKRPLVKNPVDYMDLPFSSSPSRSATASPQQPQAQQRRVTPDRSQTSQDLFSYQALYSYIPQNDDELELRDGDIVDVMEKCDDGWFVGTSRRTKQFGTFPGNYVKPLYL

SEQ ID NO: 82362 - protein, 1292 aa, Homo sapiens
  Payload ID: 16399
  Gene Symbol: SORBS1
  Gene Name: sorbin and SH3 domain containing 1
  Uniprot ID: Q9BX66
  ENSP ID: ENSP00000355136
MSSECDGGSKAVMNGLAPGSNGQDKATADPLRARSISAVKIIPVKTVKNASGLVLPTDMDLTKICTGKGAVTLRASSSYRETPSSSPASPQETRQHESKPGLEPEPSSADEWRLSSSADANGNAQPSSLAAKGYRSVHPNLPSDKSQDATSSSAAQPEVIVVPLYLVNTDRGQEGTARPPTPLGPLGCVPTIPATASAASPLTFPTLDDFIPPHLQRWPHHSQPARASGSFAPISQTPPSFSPPPPLVPPAPEDLRRVSEPDLTGAVSSTDSSPLLNEVSSSLIGTDSQAFPSVSKPSSAYPSTTIVNPTIVLLQHNREQQKRLSSLSDPVSERRVGEQDSAPTQEKPTSPGKAIEKRAKDDSRRVVKSTQDLSDVSMDEVGIPLRNTERSKDWYKTMFKQIHKLNRDTPEENPYFPTYKFPELPEIQQTSEEDNPYTPTYQFPASTPSPKSEDDDSDLYSPRYSFSEDTKSPLSVPRSKSEMSYIDGEKVVKRSATLPLPARSSSLKSSSERNDWEPPDKKVDTRKYRAEPKSIYEYQPGKSSVLTNEKMSRDISPEEIDLKNEPWYKFFSELEFGKPPPKKIWDYTPGDCSILPREDRKTNLDKDLSLCQTELEADLEKMETLNKAPSANVPQSSAISPTPEISSETPGYIYSSNFHAVKRESDGAPGDLTSLENERQIYKSVLEGGDIPLQGLSGLKRPSSSASTKDSESPRHFIPADYLESTEEFIRRRHDDKEKLLADQRRLKREQEEADIAARRHTGVIPTHHQFITNERFGDLLNIDDTAKRKSGSEMRPARAKFDFKAQTLKELPLQKGDIVYIYKQIDQNWYEGEHHGRVGIFPRTYIELLPPAEKAQPKKLTPVQVLEYGEAIAKFNFNGDTQVEMSFRKGERITLLRQVDENWYEGRIPGTSRQGIFPITYVDVIKRPLVKNPVDYMDLPFSSSPSRSATASPQFSSHSKLITPAPSSLPHSRRALSPEMHAVTSEWISLTVGVPGRRSLALTPPLPPLPEASIYNTDHLALSPRASPSLSLSLPHLSWSDRPTPRSVASPLALPSPHKTYSLAPTSQASLHMNGDGGVHTPSSGIHQDSFLQLPLGSSDSVISQLSDAFSSQSKRQPWREESGQYERKAERGAGERGPGGPKISKKSCLKPSDVVRCLSTEQRLSDLNTPEESRPGKPLGSAFPGSEAEQTERHRGGEQAGRKAARRGGSQQPQAQQRRVTPDRSQTSQDLFSYQALYSYIPQNDDELELRDGDIVDVMEKCDDGWFVGTSRRTKQFGTFPGNYVKPLYL

SEQ ID NO: 82363 - protein, 1266 aa, Homo sapiens
  Payload ID: 16399
  Gene Symbol: SORBS1
  Gene Name: sorbin and SH3 domain containing 1
  Uniprot ID: Q9BX66
  ENSP ID: ENSP00000360271
MSSECDGGSKAVMNGLAPGSNGQDKATADPLRARSISAVKIIPVKTVKNASGLVLPTDMDLTKICTGKGAVTLRASSSYRETPSSSPASPQETRQHESKPGLEPEPSSADEWRLSSSADANGNAQPSSLAAKGYRSVHPNLPSDKSQDATSSSAAQPEVIVVPLYLVNTDRGQEGTARPPTPLGPLGCVPTIPATASAASPLTFPTLDDFIPPHLQRWPHHSQPARASGSFAPISQTPPSFSPPPPLVPPAPEDLRRVSEPDLTGAVSSTDSSPLLNEVSSSLIGTDSQAFPSVSKPSSAYPSTTIVNPTIVLLQHNREQQKRLSSLSDPVSERRVGEQDSAPTQEKPTSPGKAIEKRAKDDSRRVVKSTQDLSDVSMDEVGIPLRNTERSKDWYKTMFKQIHKLNRDDDSDLYSPRYSFSEDTKSPLSVPRSKSEMSYIDGEKVVKRSATLPLPARSSSLKSSSERNDWEPPDKKVDTRKYRAEPKSIYEYQPGKSSVLTNEKMSRDISPEEIDLKNEPWYKFFSELEFGKPPPKKIWDYTPGDCSILPREDRKTNLDKDLSLCQTELEADLEKMETLNKAPSANVPQSSAISPTPEISSETPGYIYSSNFHAVKRESDGAPGDLTSLENERQIYKSVLEGGDIPLQGLSGLKRPSSSASTKDSESPRHFIPADYLESTEEFIRRRHDDKEKLLADQRRLKREQEEADIAARRHTGVIPTHHQFITNERFGDLLNIDDTAKRKSGSEMRPARAKFDFKAQTLKELPLQKGDIVYIYKQIDQNWYEGEHHGRVGIFPRTYIELLPPAEKAQPKKLTPVQVLEYGEAIAKFNFNGDTQVEMSFRKGERITLLRQVDENWYEGRIPGTSRQGIFPITYVDVIKRPLVKNPVDYMDLPFSSSPSRSATASPQFSSHSKLITPAPSSLPHSRRALSPEMHAVTSEWISLTVGVPGRRSLALTPPLPPLPEASIYNTDHLALSPRASPSLSLSLPHLSWSDRPTPRSVASPLALPSPHKTYSLAPTSQASLHMNGDGGVHTPSSGIHQDSFLQLPLGSSDSVISQLSDAFSSQSKRQPWREESGQYERKAERGAGERGPGGPKISKKSCLKPSDVVRCLSTEQRLSDLNTPEESRPGKPLGSAFPGSEAEQTERHRGGEQAGRKAARRGGSQLSHHSLRAGPDLTESEKSYVQPQAQQRRVTPDRSQTSQDLFSYQALYSYIPQNDDELELRDGDIVDVMEKCDDGWFVGTSRRTKQFGTFPGNYVKPLYL

SEQ ID NO: 82364 - protein, 186 aa, Homo sapiens
  Payload ID: 16399
  Gene Symbol: SORBS1
  Gene Name: sorbin and SH3 domain containing 1
  ENSP ID: ENSP00000360272
  MOD_RES (1)..(1): Any amino acid
XQTSRQPEWRLDARGDKSTLLRNIYLMSPLPFRLKKPLHHHPRQPSPGDSSGLLVGQKPDLPSQPHQDQPPSGGKPVVPTRLSSRHTMARLSRSSEPSQERPTALEDYPRAINNGNSVPYSDHSLDRNNNPQSELAPSRGDSESPRHFIPADYLESTEEFIRRRHDDKEMRPARAKFDFKAQTLKE

SEQ ID NO: 82365 - protein, 811 aa, Homo sapiens
  Payload ID: 16399
  Gene Symbol: SORBS1
  Gene Name: sorbin and SH3 domain containing 1
  Uniprot ID: Q9BX66
  ENSP ID: ENSP00000360283
MSSECDGGSKAVMNGLAPGSNGQDKDMDLTKICTGKGAVTLRASSSYRETPSSSPASPQETRQHESKPGLEPEPSSADEWRLSSSADANGNAQPSSLAAKGYRSVHPNLPSDKSQDSSPLLNEVSSSLIGTDSQAFPSVSKPSSAYPSTTIVNPTIVLLQHNREQQKRLSSLSDPVSERRVGEQDSAPTQEKPTSPGKAIEKRAKDDSRRVVKSTQDLSDVSMDEVGIPLRNTERSKDWYKTMFKQIHKLNRDDDSDLYSPRYSFSEDTKSPLSVPRSKSEMSYIDGEKVVKRSATLPLPARSSSLKSSSERNDWEPPDKKVDTRKYRAEPKSIYEYQPGKSSVLTNEKMSRDISPEEIDLKNEPWYKFFSELEFGKPTNLDKDLSLCQTELEADLEKMETLNKAPSANVPQSSAISPTPEISSETPGYIYSSNFHAVKRESDGAPGDLTSLENERQIYKSVLEGGDIPLQGLSGLKRPSSSASTKDSESPRHFIPADYLESTEEFIRRRHDDKEKLLADQRRLKREQEEADIAARRHTGVIPTHHQFITNERFGDLLNIDDTAKRKSGSEMRPARAKFDFKAQTLKELPLQKGDIVYIYKQIDQNWYEGEHHGRVGIFPRTYIELLPPAEKAQPKKLTPVQVLEYGEAIAKFNFNGDTQVEMSFRKGERITLLRQVDENWYEGRIPGTSRQGIFPITYVDVIKRPLVKNPVDYMDLPFSSSPSRSATASPQQPQAQQRRVTPDRSQTSQDLFSYQALYSYIPQNDDELELRDGDIVDVMEKCDDGWFVGTSRRTKQFGTFPGNYVKPLYL

SEQ ID NO: 82366 - protein, 684 aa, Homo sapiens
  Payload ID: 16399
  Gene Symbol: SORBS1
  Gene Name: sorbin and SH3 domain containing 1
  Uniprot ID: Q9BX66
  ENSP ID: ENSP00000360285
MSSECDGGSKAVMNGLAPGSNGQDKDMDLTKICTGKGAVTLRASSSYRETPSSSPASPQETRQHESKPDEWRLSSSADANGNAQPSSLAAKGYRSVHPNLPSDKSQDSSPLLNEVSSSLIGTDSQAFPSVSKPSSAYPSTTIVNPTIVLLQHNREQQKRLSSLSDPVSERRVGEQDSAPTQEKPTSPGKAIEKRAKDDSRRVVKSTQDLSDVSMDEVGIPLRNTERSKDWYKTMFKQIHKLNRDDDSDLYSPRYSFSEDTKSPLSVPRSKSEMSYIDGEKVVKRSATLPLPARSSSLKSSSERNDWEPPDKKVDTRKYRAEPKSIYEYQPGKSSVLTNEKMSSAISPTPEISSETPGYIYSSNFHAVKRESDGAPGDLTSLENERQIYKSVLEGGDIPLQGLSGLKRPSSSASTKDSESPRHFIPADYLESTEEFIRRRHDDKEMRPARAKFDFKAQTLKELPLQKGDIVYIYKQIDQNWYEGEHHGRVGIFPRTYIELLPPAEKAQPKKLTPVQVLEYGEAIAKFNFNGDTQVEMSFRKGERITLLRQVDENWYEGRIPGTSRQGIFPITYVDVIKRPLVKNPVDYMDLPFSSSPSRSATASPQQPQAQQRRVTPDRSQTSQDLFSYQALYSYIPQNDDELELRDGDIVDVMEKCDDGWFVGTSRRTKQFGTFPGNYVKPLYL

SEQ ID NO: 82367 - protein, 905 aa, Homo sapiens
  Payload ID: 16399
  Gene Symbol: SORBS1
  Gene Name: sorbin and SH3 domain containing 1
  Uniprot ID: Q9BX66
  ENSP ID: ENSP00000360291
MSSECDGGSKAVMNGLAPGSNGQDKATADPLRARSISAVKIIPVKTVKNASGLVLPTDMDLTKICTGKGAVTLRASSSYRETPSSSPASPQETRQHESKPGLEPEPSSADEWRLSSSADANGNAQPSSLAAKGYRSVHPNLPSDKSQRWPHHSQPARASGSFAPISQTPPSFSPPPPLVPPAPEDLRRVSEPDLTGAVSSTDSSPLLNEVSSSLIGTDSQAFPSVSKPSSAYPSTTIVNPTIVLLQHNREQQKRLSSLSDPVSERRVGEQDSAPTQEKPTSPGKAIEKRAKDDSRRVVKSTQDLSDVSMDEVGIPLRNTERSKDWYKTMFKQIHKLNRDDDSDLYSPRYSFSEDTKSPLSVPRSKSEMSYIDGEKVVKRSATLPLPARSSSLKSSSERNDWEPPDKKVDTRKYRAEPKSIYEYQPGKSSVLTNEKMSRDISPEEIDLKNEPWYKFFSELEFGKPPPKKIWDYTPGDCSILPREDRKSSAISPTPEISSETPGYIYSSNFHAVKRESDGAPGDLTSLENERQIYKSVLEGGDIPLQGLSGLKRPSSSASTKDSESPRHFIPADYLESTEEFIRRRHDDKEKLLADQRRLKREQEEADIAARRHTGVIPTHHQFITNERFGDLLNIDDTAKRKSGSEMRPARAKFDFKAQTLKELPLQKGDIVYIYKQIDQNWYEGEHHGRVGIFPRTYIELLPPAEKAQPKKLTPVQVLEYGEAIAKFNFNGDTQVEMSFRKGERITLLRQVDENWYEGRIPGTSRQGIFPITYVDVIKRPLVKNPVDYMDLPFSSSPSRSATASPQLSHHSLRAGPDLTESEKSYVQPQAQQRRVTPDRSQTSQDLFSYQALYSYIPQNDDELELRDGDIVDVMEKCDDGWFVGTSRRTKQFGTFPGNYVKPLYL

SEQ ID NO: 82368 - protein, 1151 aa, Homo sapiens; identical to SEQ ID NO: 82359
  Payload ID: 16399
  Gene Symbol: SORBS1
  Gene Name: sorbin and SH3 domain containing 1
  Uniprot ID: Q9BX66
  ENSP ID: ENSP00000360292

SEQ ID NO: 82369 - protein, 1292 aa, Homo sapiens; identical to SEQ ID NO: 82362
  Payload ID: 16399
  Gene Symbol: SORBS1
  Gene Name: sorbin and SH3 domain containing 1
  Uniprot ID: Q9BX66
  ENSP ID: ENSP00000360293

SEQ ID NO: 82370 - protein, 816 aa, Homo sapiens
  Payload ID: 16399
  Gene Symbol: SORBS1
  Gene Name: sorbin and SH3 domain containing 1
  Uniprot ID: Q9BX66
  ENSP ID: ENSP00000360295
MSSECDGGSKAVMNGLAPGSNGQDKDMDLTKICTGKGAVTLRASSSYRETPSSSPASPQETRQHESKPGLEPEPSSADEWRLSSSADANGNAQPSSLAAKGYRSVHPNLPSDKSQDATSSSAAQPEVIVVPLYLVNTDRGQEGTARPPTPLGPLGCVPTIPATASAASPLTFPTLDDFIPPHLQRWPHHSQPARASGSFAPISQTPPSFSPPPPLVPPAPEDLRRVSEPDLTGAVSSTDSSPLLNEVSSSLIGTDSQAFPSVSKPSSAYPSTTIVNPTIVLLQHNREQQKRLSSLSDPVSERRVGEQDSAPTQEKPTSPGKAIEKRAKDDSRRVVKSTQDLSDVSMDEVGIPLRNTERSKDWYKTMFKQIHKLNRDDDSDLYSPRYSFSEDTKSPLSVPRSKSEMSYIDGEKVVKRSATLPLPARSSSLKSSSERNDWEPPDKKVDTRKYRAEPKSIYEYQPGKSSVLTNEKMSSAISPTPEISSETPGYIYSSNFHAVKRESDGAPGDLTSLENERQIYKSVLEGGDIPLQGLSGLKRPSSSASTKDSESPRHFIPADYLESTEEFIRRRHDDKEMRPARAKFDFKAQTLKELPLQKGDIVYIYKQIDQNWYEGEHHGRVGIFPRTYIELLPPAEKAQPKKLTPVQVLEYGEAIAKFNFNGDTQVEMSFRKGERITLLRQVDENWYEGRIPGTSRQGIFPITYVDVIKRPLVKNPVDYMDLPFSSSPSRSATASPQQPQAQQRRVTPDRSQTSQDLFSYQALYSYIPQNDDELELRDGDIVDVMEKCDDGWFVGTSRRTKQFGTFPGNYVKPLYL

SEQ ID NO: 82371 - protein, 192 aa, Homo sapiens
  Payload ID: 16399
  Gene Symbol: SORBS1
  Gene Name: sorbin and SH3 domain containing 1
  ENSP ID: ENSP00000473813
  MOD_RES (1)..(1): Any amino acid
XTAGTGKPPPAPPPDPPKLFFDIRKDAVNRGESPSLGTQASFPDVRPPVLGPRVTSDPENRKSKESYLLQPSYPAKDSSPLLNEVSSSLIGTDSQAFPSVSKPSSAYPSTTIVNPTIVLLQHNREQQKRLSSLSDPVSERRVGEQDSAPTQEKPTSPGKAIEKRAKDDSRRVVKSTQDLSDVSMDEVGIPLR

SEQ ID NO: 82372 - protein, 145 aa, Homo sapiens
  Payload ID: 16399
  Gene Symbol: SORBS1
  Gene Name: sorbin and SH3 domain containing 1
  ENSP ID: ENSP00000474932
MSSECDGGSKAVMNGLAPGSNGQDKDMDLTKICTGKGAVTLRASSSYRETPSSSPASPQETRQHESKPDEWRLSSSADANGNAQPSSLAAKGYRSVHPNLPSDKSQDATSSSAAQPEVIVVPLYLVNTDRGQEGTARPPTPLGPL

SEQ ID NO: 82373 - protein, 1294 aa, Homo sapiens
  Payload ID: 16399
  Gene Symbol: SORBS1
  Gene Name: sorbin and SH3 domain containing 1
  Uniprot ID: Q9BX66
  ENSP ID: ENSP00000475901
MSSECDGGSKAVMNGLAPGSNGQDKDMDLTKICTGKGAVTLRASSSYRETPSSSPASPQETRQHESKPGLEPEPSSADEWRLSSSADANGNAQPSSLAAKGYRSVHPNLPSDKSQDSSPLLNEVSSSLIGTDSQAFPSVSKPSSAYPSTTIVNPTIVLLQHNRDPVSERRVGEQDSAPTQEKPTSPGKAIEKRAKDDSRRVVKSTQDLSDVSMDEVGIPLRNTERSKDWYKTMFKQIHKLNRDDDSDLYSPRYSFSEDTKSPLSVPRSKSEMSYIDGEKVVKRSATLPLPARSSSLKSSSERNDWEPPDKKVDTRKYRAEPKSIYEYQPGKSSVLTNEKMSRDISPEEIDLKNEPWYKFFSELEFGKPTNLDKDLSLCQTELEADLEKMETLNKAPSANVPQSSAISPTPEISSETPGYIYSSNFHAVKRESDGAPGDLTSLENERQIYKSVLEGGDIPLQGLSGLKRPSSSASTKVDRKGGNAHMISSSSVHSRTFNTSNALGPVCKHKKPLSAAKACISEILPSKFKPRLSAPSALLQEQKSILLPSEKAQSCENLCVSGSLNDSKRGLPLQVGGSIENLLMRSRRDYDSKSSSTMSLQEYSTSGRRPCPLSRKAGMQFTMLYRDMHQINRSGLFLGSISSSSSVRDLASHFEKSSLALSRGELGPSQEGSEHIPKHTVSSRITAFEQLIQRSRSMPSLDLSGRLSKSPTPVLSRGSLTSARSAESLLESTKLHPKEMDGMNSSGVYASPTCSNMAHHALSFRGLVPSEPLSTCSDDVDRCSNISTDSREGSGGSVHGDFPKHRLNKCKGTCPASYTRFTTIRKHEQQQTSRQPEWRLDARGDKSTLLRNIYLMSPLPFRLKKPLHHHPRQPSPGDSSGLLVGQKPDLPSQPHQDQPPSGGKPVVPTRLSSRHTMARLSRSSEPSQERPTALEDYPRAINNGNSVPYSDHSLDRNNNPQSELAPSRGDSESPRHFIPADYLESTEEFIRRRHDDKEKLLADQRRLKREQEEADIAARRHTGVIPTHHQFITNERFGDLLNIDDTAKRKSGSEMRPARAKFDFKAQTLKELPLQKGDIVYIYKQIDQNWYEGEHHGRVGIFPRTYIELLPPAEKAQPKKLTPVQVLEYGEAIAKFNFNGDTQVEMSFRKGERITLLRQVDENWYEGRIPGTSRQGIFPITYVDVIKRPLVKNPVDYMDLPFSSSPSRSATASPQQPQAQQRRVTPDRSQTSQDLFSYQALYSYIPQNDDELELRDGDIVDVMEKCDDGWFVGTSRRTKQFGTFPGNYVKPLYL

SEQ ID NO: 82374 - protein, 507 aa, Homo sapiens
  Payload ID: 16399
  Gene Symbol: SORBS1
  Gene Name: sorbin and SH3 domain containing 1
  ENSP ID: ENSP00000489022
  MOD_RES (1)..(1): Any amino acid
XPLSVPRSKSEMSYIDGEKVVKRSATLPLPARSSSLKSSSERNDWEPPDKKVDTRKYRAEPKSIYEYQPGKSSVLTNEKMSRDISPEEIDLKNEPWYKFFSELEFGKPSSAISPTPEISSETPGYIYSSNFHAVKRESDGAPGDLTSLENERQIYKSVLEGGDIPLQGLSGLKRPSSSASTKDSESPRHFIPADYLESTEEFIRRRHDDKEKLLADQRRLKREQEEADIAARRHTGVIPTHHQFITNERFGDLLNIDDTAKRKSGSEMRPARAKFDFKAQTLKELPLQKGDIVYIYKQIDQNWYEGEHHGRVGIFPRTYIELLPPAEKAQPKKLTPVQVLEYGEAIAKFNFNGDTQVEMSFRKGERITLLRQVDENWYEGRIPGTSRQGIFPITYVDVIKRPLVKNPVDYMDLPFSSSPSRSATASPQQPQAQQRRVTPDRSQTSQDLFSYQALYSYIPQNDDELELRDGDIVDVMEKCDDGWFVGTSRRTKQFGTFPGNYVKPLYL

SEQ ID NO: 82375 - protein, 1100 aa, Homo sapiens
  Payload ID: 16400
  Gene Symbol: SORBS2
  Gene Name: sorbin and SH3 domain containing 2
  Uniprot ID: O94875
  ENSP ID: ENSP00000284776
MSYYQRPFSPSAYSLPASLNSSIVMQHGTSLDSTDTYPQHAQSLDGTTSSSIPLYRSSEEEKRVTVIKAPHYPGIGPVDESGIPTAIRTTVDRPKDWYKTMFKQIHMVHKPDDDTDMYNTPYTYNAGLYNPPYSAQSHPAAKTQTYRPLSKSHSDNSPNAFKDASSPVPPPHVPPPVPPLRPRDRSSTEKHDWDPPDRKVDTRKFRSEPRSIFEYEPGKSSILQHERPASLYQSSIDRSLERPMSSASMASDFRKRRKSEPAVGPPRGLGDQSASRTSPGRVDLPGSSTTLTKSFTSSSPSSPSRAKGGDDSKICPSLCSYSGLNGNPSSELDYCSTYRQHLDVPRDSPRAISFKNGWQMARQNAEIWSSTEETVSPKIKSRSCDDLLNDDCDSFPDPKVKSESMGSLLCEEDSKESCPMAWGSPYVPEVRSNGRSRIRHRSARNAPGFLKMYKKMHRINRKDLMNSEVICSVKSRILQYESEQQHKDLLRAWSQCSTEEVPRDMVPTRISEFEKLIQKSKSMPNLGDDMLSPVTLEPPQNGLCPKRRFSIEYLLEEENQSGPPARGRRGCQSNALVPIHIEVTSDEQPRAHVEFSDSDQDGVVSDHSDYIHLEGSSFCSESDFDHFSFTSSESFYGSSHHHHHHHHHHHRHLISSCKGRCPASYTRFTTMLKHERARHENTEEPRRQEMDPGLSKLAFLVSPVPFRRKKNSAPKKQTEKAKCKASVFEALDSALKDICDQIKAEKKRGSLPDNSILHRLISELLPDVPERNSSLRALRRSPLHQPLHPLPPDGAIHCPPYQNDCGRMPRSASFQDVDTANSSCHHQDRGGALQDRESPRSYSSTLTDMGRSAPRERRGTPEKEKLPAKAVYDFKAQTSKELSFKKGDTVYILRKIDQNWYEGEHHGRVGIFPISYVEKLTPPEKAQPARPPPPAQPGEIGEAIAKYNFNADTNVELSLRKGDRVILLKRVDQNWYEGKIPGTNRQGIFPVSYVEVVKKNTKGAEDYPDPPIPHSYSSDRIHSLSSNKPQRPVFTHENIQGGGEPFQALYNYTPRNEDELELRESDVIDVMEKCDDGWFVGTSRRTKFFGTFPGNYVKRL

SEQ ID NO: 82376 - protein, 636 aa, Homo sapiens
  Payload ID: 16400
  Gene Symbol: SORBS2
  Gene Name: sorbin and SH3 domain containing 2
  ENSP ID: ENSP00000321983
MNTGRDSQSPDSAKGFRSVRPNLQDKRSPTQSQITVNGNSGGAVSPMSYYQRPFSPSAYSLPASLNSSIVMQHGTSLDSTDTYPQHAQSLDGTTSSSIPLYRSSEEEKRVTVIKAPHYPGIGPVDESGIPTAIRTTVDRPKDWYKTMFKQIHMVHKPDDDTDMYNTPYTYNAGLYNPPYSAQSHPAAKTQTYRPLSKSHSDNSPNAFKDASSPVPPPHVPPPVPPLRPRDRSSTEKHDWDPPDRKVDTRKFRSEPRSIFEYEPGKSSILQHERPPPLPTTPTPVPREPGRKPLSSSRLGEVTGSPSPPPRSGAPTPSSRAPALSPTRPPKKPLDYVQDHSSGVFNEASLYQSSIDRSLERPMSSASMASDFRKRRKSEPAVGPPRGLGDQSASRTSPGRVDLPGSSTTLTKSFTSSSPSSPSRAKDRESPRSYSSTLTDMGRSAPRERRGTPEKEKLPAKAVYDFKAQTSKELSFKKGDTVYILRKIDQNWYEGEHHGRVGIFPISYVEKLTPPEKAQPARPPPPAQPGEIGEAIAKYNFNADTNVELSLRKGDRVILLKRVDQNWYEGKIPGTNRQGIFPVSYVEVVKKNTKGAEDYPDPPIPHSYSSDRIHSLSSNKPQRPVFTHENIQGGGEP

SEQ ID NO: 82377 - protein, 731 aa, Homo sapiens
  Payload ID: 16400
  Gene Symbol: SORBS2
  Gene Name: sorbin and SH3 domain containing 2
  Uniprot ID: O94875
  ENSP ID: ENSP00000322182
MSVTLTSVKRVQSSPNLLAAGRDSQSPDSAWRSYNDGNQETLNGDATYSSLAAKGFRSVRPNLQDKRSPTQSQITVNGNSGGAVSPMSYYQRPFSPSAYSLPASLNSSIVMQHGTSLDSTDTYPQHAQSLDGTTSSSIPLYRSSEEEKRVTVIKAPHYPGIGPVDESGIPTAIRTTVDRPKDWYKTMFKQIHMVHKPDDDTDMYNTPYTYNAGLYNPPYSAQSHPAAKTQTYRPLSKSHSDNSPNAFKDASSPVPPPHVPPPVPPLRPRDRSSTEKHDWDPPDRKVDTRKFRSEPRSIFEYEPGKSSILQHERPPPLPTTPTPVPREPGRKPLSSSRLGEVTGSPSPPPRSGAPTPSSRAPALSPTRPPKKPLDYVQDHSSGVFNEASLYQSSIDRSLERPMSSASMASDFRKRRKSEPAVGPPRGLGDQSASRTSPGRVDLPGSSTTLTKSFTSSSPSSPSRAKDRESPRSYSSTLTDMGRSAPRERRGTPEKEKLPAKAVYDFKAQTSKELSFKKGDTVYILRKIDQNWYEGEHHGRVGIFPISYVEKLTPPEKAQPARPPPPAQPGEIGEAIAKYNFNADTNVELSLRKGDRVILLKRVDQNWYEGKIPGTNRQGIFPVSYVEVVKKNTKGAEDYPDPPIPHSYSSDRIHSLSSNKPQRPVFTHENIQGGGEPFQALYNYTPRNEDELELRESDVIDVMEKCDDGWFVGTSRRTKFFGTFPGNYVKRL

SEQ ID NO: 82378 - protein, 1200 aa, Homo sapiens
  Payload ID: 16400
  Gene Symbol: SORBS2
  Gene Name: sorbin and SH3 domain containing 2
  Uniprot ID: O94875
  ENSP ID: ENSP00000347852
MNTDSGGCARKRAAMSVTLTSVKRVQSSPNLLAAGRDSQSPDSAWRSYNDGNQETLNGDATYSSLAAKGFRSVRPNLQDKRSPTQSQITVNGNSGGAVSPMSYYQRPFSPSAYSLPASLNSSIVMQHGTSLDSTDTYPQHAQSLDGTTSSSIPLYRSSEEEKRVTVIKAPHYPGIGPVDESGIPTAIRTTVDRPKDWYKTMFKQIHMVHKPDDDTDMYNTPYTYNAGLYNPPYSAQSHPAAKTQTYRPLSKSHSDNSPNAFKDASSPVPPPHVPPPVPPLRPRDRSSTEKHDWDPPDRKVDTRKFRSEPRSIFEYEPGKSSILQHERPASLYQSSIDRSLERPMSSASMASDFRKRRKSEPAVGPPRGLGDQSASRTSPGRVDLPGSSTTLTKSFTSSSPSSPSRAKGGDDSKICPSLCSYSGLNGNPSSELDYCSTYRQHLDVPRDSPRAISFKNGWQMARQNAEIWSSTEETVSPKIKSRSCDDLLNDDCDSFPDPKVKSESMGSLLCEEDSKESCPMAWGSPYVPEVRSNGRSRIRHRSARNAPGFLKMYKKMHRINRKDLMNSEVICSVKSRILQYESEQQHKDLLRAWSQCSTEEVPRDMVPTRISEFEKLIQKSKSMPNLGDDMLSPVTLEPPQNGLCPKRRFSIEYLLEEENQSGPPARGRRGCQSNALVPIHIEVTSDEQPRAHVEFSDSDQDGVVSDHSDYIHLEGSSFCSESDFDHFSFTSSESFYGSSHHHHHHHHHHHRHLISSCKGRCPASYTRFTTMLKHERARHENTEEPRRQEMDPGLSKLAFLVSPVPFRRKKNSAPKKQTEKAKCKASVFEALDSALKDICDQIKAEKKRGSLPDNSILHRLISELLPDVPERNSSLRALRRSPLHQPLHPLPPDGAIHCPPYQNDCGRMPRSASFQDVDTANSSCHHQDRGGALQDRESPRSYSSTLTDMGRSAPRERRGTPEKEKLPAKAVYDFKAQTSKELSFKKGDTVYILRKIDQNWYEGEHHGRVGIFPISYVEKLTPPEKAQPARPPPPAQPGEIGEAIAKYNFNADTNVELSLRKGDRVILLKRVDQNWYEGKIPGTNRQGIFPVSYVEVVKKNTKGAEDYPDPPIPHSYSSDRIHSLSSNKPQRPVFTHENIQGGGEPFQALYNYTPRNEDELELRESDVIDVMEKCDDGWFVGTSRRTKFFGTFPGNYVKRL

SEQ ID NO: 82379 - protein, 9 aa, Homo sapiens
  Payload ID: 16400
  Gene Symbol: SORBS2
  Gene Name: sorbin and SH3 domain containing 2
  ENSP ID: ENSP00000377158
MSYYQRPFS

SEQ ID NO: 82380 - protein, 666 aa, Homo sapiens
  Payload ID: 16400
  Gene Symbol: SORBS2
  Gene Name: sorbin and SH3 domain containing 2
  Uniprot ID: O94875
  ENSP ID: ENSP00000377162
MNTGRDSQSPDSAKGFRSVRPNLQDKRSPTQSQITVNGNSGGAVSPMSYYQRPFSPSAYSLPASLNSSIVMQHGTSLDSTDTYPQHAQSLDGTTSSSIPLYRSSEEEKRVTVIKAPHYPGIGPVDESGIPTAIRTTVDRPKDWYKTMFKQIHMVHKPDDDTDMYNTPYTYNAGLYNPPYSAQSHPAAKTQTYRPLSKSHSDNSPNAFKDASSPVPPPHVPPPVPPLRPRDRSSTEKHDWDPPDRKVDTRKFRSEPRSIFEYEPGKSSILQHERPTDRINPDDIDLENEPWYKFFSELEFGRPPPKKPLDYVQDHSSGVFNEASLYQSSIDRSLERPMSSASMASDFRKRRKSEPAVGPPRGLGDQSASRTSPGRVDLPGSSTTLTKSFTSSSPSSPSRAKDRESPRSYSSTLTDMGRSAPRERRGTPEKEKLPAKAVYDFKAQTSKELSFKKGDTVYILRKIDQNWYEGEHHGRVGIFPISYVEKLTPPEKAQPARPPPPAQPGEIGEAIAKYNFNADTNVELSLRKGDRVILLKRVDQNWYEGKIPGTNRQGIFPVSYVEVVKKNTKGAEDYPDPPIPHSYSSDRIHSLSSNKPQRPVFTHENIQGGGEPFQALYNYTPRNEDELELRESDVIDVMEKCDDGWFVGTSRRTKFFGTFPGNYVKRL

SEQ ID NO: 82381 - protein, 15 aa, Homo sapiens
  Payload ID: 16400
  Gene Symbol: SORBS2
  Gene Name: sorbin and SH3 domain containing 2
  ENSP ID: ENSP00000389829
MNTDSGGCARKRAAM

SEQ ID NO: 82382 - protein, 291 aa, Homo sapiens
  Payload ID: 16400
  Gene Symbol: SORBS2
  Gene Name: sorbin and SH3 domain containing 2
  ENSP ID: ENSP00000389995
  MOD_RES (1)..(1): Any amino acid
XSEEEKRVTVIKAPHYPGIGPVDESGIPTAIRTTVDRPKDWYKTMFKQIHMVHKPDDDTDMYNTPYTYNAGLYNPPYSAQSHPAAKTQTYRPLSKSHSDNSPNAFKDASSPVPPPHVPPPVPPLRPRDRSSTEKHDWDPPDRKVDTRKFRSEPRSIFEYEPGKSSILQHERPASLYQSSIDRSLERPMSSASMASDFRKRRKSEPAVGPPRGLGDQSASRTSPGRVDLPGSSTTLTKSFTSSSPSSPSRAKDRESPRSYSSTLTDMGRSAPRERRGTPEKEKLPAKAVYDF

SEQ ID NO: 82383 - protein, 70 aa, Homo sapiens
  Payload ID: 16400
  Gene Symbol: SORBS2
  Gene Name: sorbin and SH3 domain containing 2
  ENSP ID: ENSP00000390162
MSVTLTSVKRVQSSPNLLAAGRDSQSPDSAWRSYNDGNQETLNGDATYSSLAAKGFRSVRPNLQDKRSPT

SEQ ID NO: 82384 - protein, 253 aa, Homo sapiens
  Payload ID: 16400
  Gene Symbol: SORBS2
  Gene Name: sorbin and SH3 domain containing 2
  ENSP ID: ENSP00000391940
  MOD_RES (1)..(1): Any amino acid
XQIHMVHKPDDDTDMYNTPYTYNAGLYNPPYSAQSHPAAKTQTYRPLSKSHSDNSPNAFKDASSPVPPPHVPPPVPPLRPRDRSSTEKHDWDPPDRKVDTRKFRSEPRSIFEYEPGKSSILQHERPPPLPTTPTPVPREPGRKPLSSSRLGEVTGSPSPPPRSGAPTPSSRAPALSPTRSSIDRSLERPMSSASMASDFRKRRKSEPAVGPPRGLGDQSASRTSPGRVDLPGSSTTLTKSFTSSSPSSPSRAK

SEQ ID NO: 82385 - protein, 182 aa, Homo sapiens
  Payload ID: 16400
  Gene Symbol: SORBS2
  Gene Name: sorbin and SH3 domain containing 2
  ENSP ID: ENSP00000393258
MNTDSGGCARKRAAMSVTLTSVKRVQSSPNLLAAGRDSQSPDSAWRSYNDGNQETLNGDATYSSLAAKGFRSVRPNLQDKRSPTQAPPPPERKESFHSSLITSHTKGVILDQLVTNTQIPSSTEYFANKKPLQGTMYSNEDSRQTIVYSEESNTTMSYTQKITNPLPAASSTDPAPFANINT

SEQ ID NO: 82386 - protein, 824 aa, Homo sapiens
  Payload ID: 16400
  Gene Symbol: SORBS2
  Gene Name: sorbin and SH3 domain containing 2
  Uniprot ID: O94875
  ENSP ID: ENSP00000396008
MYSNEDSRQTIVYSEESNTTMSYTQKITNPLPAASSTDPAPFANINTPVLQEDYRQDSQTRRISTLKLTHNQDLGSSSPISTPQFSKSVEVPSFLKRPRSLTPNPVPETHTASLSIQIAPLSGQDLESHKQLPELSPETAKIPLQQERQKSAVAAASQSSDCRVSQITVNGNSGGAVSPMSYYQRPFSPSAYSLPASLNSSIVMQHGTSLDSTDTYPQHAQSLDGTTSSSIPLYRSSEEEKRVTVIKAPHYPGIGPVDESGIPTAIRTTVDRPKDWYKTMFKQIHMVHKPDDDTDMYNTPYTYNAGLYNPPYSAQSHPAAKTQTYRPLSKSHSDNSPNAFKDASSPVPPPHVPPPVPPLRPRDRSSTEKHDWDPPDRKVDTRKFRSEPRSIFEYEPGKSSILQHERPPPLPTTPTPVPREPGRKPLSSSRLGEVTGSPSPPPRSGAPTPSSRAPALSPTRPPKKPLDYVQDHSSGVFNEASLYQSSIDRSLERPMSSASMASDFRKRRKSEPAVGPPRGLGDQSASRTSPGRVDLPGSSTTLTKSFTSSSPSSPSRAKDRESPRSYSSTLTDMGRSAPRERRGTPEKEKLPAKAVYDFKAQTSKELSFKKGDTVYILRKIDQNWYEGEHHGRVGIFPISYVEKLTPPEKAQPARPPPPAQPGEIGEAIAKYNFNADTNVELSLRKGDRVILLKRVDQNWYEGKIPGTNRQGIFPVSYVEVVKKNTKGAEDYPDPPIPHSYSSDRIHSLSSNKPQRPVFTHENIQGGGEPFQALYNYTPRNEDELELRESDVIDVMEKCDDGWFVGTSRRTKFFGTFPGNYVKRL

SEQ ID NO: 82387 - protein, 100 aa, Homo sapiens
  Payload ID: 16400
  Gene Symbol: SORBS2
  Gene Name: sorbin and SH3 domain containing 2
  ENSP ID: ENSP00000396183
MSVTLTSVKRVQSSPNLLAAGRDSQSPDSAKGFRSVRPNLQDKRSPTQSQITVNGNSGGAVSPMSYYQRPFSPSAYSLPASLNSSIVMQHGTSLDSTDTY

SEQ ID NO: 82388 - protein, 644 aa, Homo sapiens
  Payload ID: 16400
  Gene Symbol: SORBS2
  Gene Name: sorbin and SH3 domain containing 2
  Uniprot ID: O94875
  ENSP ID: ENSP00000397262
MSVTLTSVKRVQSSPNLLAAGRDSQSPDSAWRSYNDGNQETLNGDATYSSLAAKGFRSVRPNLQDKRSPTQSQITVNGNSGGAVSPMSYYQRPFSPSAYSLPASLNSSIVMQHGTSLDSTDTYPQHAQSLDGTTSSSIPLYRSSEEEKRVTVIKAPHYPGIGPVDESGIPTAIRTTVDRPKDWYKTMFKQIHMVHKPGLYNPPYSAQSHPAAKTQTYRPLSKSHSDNSPNAFKDASSPVPPPHVPPPVPPLRPRDRSSTEKHDWDPPDRKVDTRKFRSEPRSIFEYEPGKSSILQHERPASLYQSSIDRSLERPMSSASMASDFRKRRKSEPAVGPPRGLGDQSASRTSPGRVDLPGSSTTLTKSFTSSSPSSPSRAKDRESPRSYSSTLTDMGRSAPRERRGTPEKEKLPAKAVYDFKAQTSKELSFKKGDTVYILRKIDQNWYEGEHHGRVGIFPISYVEKLTPPEKAQPARPPPPAQPGEIGEAIAKYNFNADTNVELSLRKGDRVILLKRVDQNWYEGKIPGTNRQGIFPVSYVEVVKKNTKGAEDYPDPPIPHSYSSDRIHSLSSNKPQRPVFTHENIQGGGEPFQALYNYTPRNEDELELRESDVIDVMEKCDDGWFVGTSRRTKFFGTFPGNYVKRL

SEQ ID NO: 82389 - protein, 1004 aa, Homo sapiens
  Payload ID: 16400
  Gene Symbol: SORBS2
  Gene Name: sorbin and SH3 domain containing 2
  Uniprot ID: O94875
  ENSP ID: ENSP00000397482
MKATTPLQTVDRPKDWYKTMFKQIHMVHKPGLYNPPYSAQSHPAAKTQTYRPLSKSHSDNSPNAFKDASSPVPPPHVPPPVPPLRPRDRSSTEKHDWDPPDRKVDTRKFRSEPRSIFEYEPGKSSILQHERPASLYQSSIDRSLERPMSSASMASDFRKRRKSEPAVGPPRGLGDQSASRTSPGRVDLPGSSTTLTKSFTSSSPSSPSRAKGGDDSKICPSLCSYSGLNGNPSSELDYCSTYRQHLDVPRDSPRAISFKNGWQMARQNAEIWSSTEETVSPKIKSRSCDDLLNDDCDSFPDPKVKSESMGSLLCEEDSKESCPMAWGSPYVPEVRSNGRSRIRHRSARNAPGFLKMYKKMHRINRKDLMNSEVICSVKSRILQYESEQQHKDLLRAWSQCSTEEVPRDMVPTRISEFEKLIQKSKSMPNLGDDMLSPVTLEPPQNGLCPKRRFSIEYLLEEENQSGPPARGRRGCQSNALVPIHIEVTSDEQPRAHVEFSDSDQDGVVSDHSDYIHLEGSSFCSESDFDHFSFTSSESFYGSSHHHHHHHHHHHRHLISSCKGRCPASYTRFTTMLKHERARHENTEEPRRQEMDPGLSKLAFLVSPVPFRRKKNSAPKKQTEKAKCKASVFEALDSALKDICDQIKAEKKRGSLPDNSILHRLISELLPDVPERNSSLRALRRSPLHQPLHPLPPDGAIHCPPYQNDCGRMPRSASFQDVDTANSSCHHQDRGGALQDRESPRSYSSTLTDMGRSAPRERRGTPEKEKLPAKAVYDFKAQTSKELSFKKGDTVYILRKIDQNWYEGEHHGRVGIFPISYVEKLTPPEKAQPARPPPPAQPGEIGEAIAKYNFNADTNVELSLRKGDRVILLKRVDQNWYEGKIPGTNRQGIFPVSYVEVVKKNTKGAEDYPDPPIPHSYSSDRIHSLSSNKPQRPVFTHENIQGGGEPFQALYNYTPRNEDELELRESDVIDVMEKCDDGWFVGTSRRTKFFGTFPGNYVKRL

SEQ ID NO: 82390 - protein, 68 aa, Homo sapiens
  Payload ID: 16400
  Gene Symbol: SORBS2
  Gene Name: sorbin and SH3 domain containing 2
  ENSP ID: ENSP00000397664
MSYYQRPFSPSAYSLPASLNSSIVMQHGTSLDSTDTYPQHAQSLDGTTSSSIPLYRSSEEEKRVTVIK

SEQ ID NO: 82391 - protein, 59 aa, Homo sapiens
  Payload ID: 16400
  Gene Symbol: SORBS2
  Gene Name: sorbin and SH3 domain containing 2
  ENSP ID: ENSP00000398335
MSYYQRPFSPSAYSLPASLNSSIVMQHGTSLDSTDTYPQHAQSLDGTTSSSIPLYRSSE

SEQ ID NO: 82392 - protein, 100 aa, Homo sapiens
  Payload ID: 16400
  Gene Symbol: SORBS2
  Gene Name: sorbin and SH3 domain containing 2
  ENSP ID: ENSP00000399048
MSYYQRPFSPSAYSLPASLNSSIVMQHGTSLDSTDTYPQHAQSLDGTTSSSIPLYRSSEEEKRVTVIKAPHYPGIGPVDESGIPTAIRTTVDRPKDWYKT

SEQ ID NO: 82393 - protein, 291 aa, Homo sapiens
  Payload ID: 16400
  Gene Symbol: SORBS2
  Gene Name: sorbin and SH3 domain containing 2
  ENSP ID: ENSP00000401818
QTYRPLSKSHSDNSPNAFKDASSPVPPPHVPPPVPPLRPRDRSSTEKHDWDPPDRKVDTRKFRSEPRSIFEYEPGKSSILQHERPPPKKPLDYVQDHSSGVFNEASLYQSSIDRSLERPMSSASMASDFRKRRKSEPAVGPPRGLGDQSASRTSPGRVDLPGSSTTLTKSFTSSSPSSPSRAKDRESPRSYSSTLTDMGRSAPRERRGTPEKEKLPAKAVYDFKAQTSKELSFKKGDTVYILRKIDQNWYEGEHHGRVGIFPISYVEKLTPPEKAQPARPPPPAQPGEIGE

SEQ ID NO: 82394 - protein, 85 aa, Homo sapiens
  Payload ID: 16400
  Gene Symbol: SORBS2
  Gene Name: sorbin and SH3 domain containing 2
  ENSP ID: ENSP00000402328
MNTGRDSQSPDSAWRSYNDGNQETLNGDATYSSLAAKGFRSVRPNLQDKRSPTQLGNQNLPASVLEVNASQTHRQTTPEASPPCP

SEQ ID NO: 82395 - protein, 116 aa, Homo sapiens
  Payload ID: 16400
  Gene Symbol: SORBS2
  Gene Name: sorbin and SH3 domain containing 2
  ENSP ID: ENSP00000403417
MSVTLTSVKRVQSSPNLLAAGRDSQSPDSAWRSYNDGNQETLNGDATYSSLAAKGFRSVRPNLQDKRSPTQSQITVNGNSGGAVSPMSYYQRPFSPSAYSLPASLNSSIVMQHGTS

SEQ ID NO: 82396 - protein, 118 aa, Homo sapiens
  Payload ID: 16400
  Gene Symbol: SORBS2
  Gene Name: sorbin and SH3 domain containing 2
  ENSP ID: ENSP00000404430
MNTDSGGCARKRAAMSVTLTSVKRVQSSPNLLAAGRDSQSPDSAKGFRSVRPNLQDKRSPTQLGNQNLPASVLEVNASQTHRQTTPEASPPCPPSVVPLNRATFSPGSGTSSASLSLP

SEQ ID NO: 82397 - protein, 109 aa, Homo sapiens
  Payload ID: 16400
  Gene Symbol: SORBS2
  Gene Name: sorbin and SH3 domain containing 2
  ENSP ID: ENSP00000405092
MNTGRDSQSPDSAWRSYNDGNQETLNGDATYSSLAAKGFRSVRPNLQDKRSPTQSQITVNGNSGGAVSPMSYYQRPFSPSAYSLPASLNSSIVMQHGTSLDSTDTYPQH

SEQ ID NO: 82398 - protein, 96 aa, Homo sapiens
  Payload ID: 16400
  Gene Symbol: SORBS2
  Gene Name: sorbin and SH3 domain containing 2
  ENSP ID: ENSP00000405314
MNTDSGGCARKRAAMSVTLTSVKRVQSSPNLLAAGRDSQSPDSAWRSYNDGNQETLNGDATYSSLAAKGFRSVRPNLQDKRSPTQSQITVNGNSGG

SEQ ID NO: 82399 - protein, 119 aa, Homo sapiens
  Payload ID: 16400
  Gene Symbol: SORBS2
  Gene Name: sorbin and SH3 domain containing 2
  ENSP ID: ENSP00000405349
MNTGRDSQSPDSAKGFRSVRPNLQDKRSPTQSQITVNGNSGGAVSPMSYYQRPFSPSAYSLPASLNSSIVMQHGTSLDSTDTYPQHAQSLDGTTSSSIPLYRSSEEEKRVTVIKAPHYP

SEQ ID NO: 82400 - protein, 80 aa, Homo sapiens
  Payload ID: 16400
  Gene Symbol: SORBS2
  Gene Name: sorbin and SH3 domain containing 2
  ENSP ID: ENSP00000405432
MSVTLTSVKRVQSSPNLLAAGRDSQSPDSAWRSYNDGNQETLNGDATYSSLAAKGFRSVRPNLQDKRSPTQSQITVNGNS

SEQ ID NO: 82401 - protein, 75 aa, Homo sapiens
  Payload ID: 16400
  Gene Symbol: SORBS2
  Gene Name: sorbin and SH3 domain containing 2
  ENSP ID: ENSP00000405646
MNTDSGGCARKRAAMSVTLTSVKRVQSSPNLLAAGRDSQSPDSAKGFRSVRPNLQDKRSPTQSQITVNGNSGGAV

SEQ ID NO: 82402 - protein, 87 aa, Homo sapiens
  Payload ID: 16400
  Gene Symbol: SORBS2
  Gene Name: sorbin and SH3 domain containing 2
  ENSP ID: ENSP00000407006
MNTDSGGCARKRAAMSVTLTSVKRVQSSPNLLAAGRDSQSPDSAWRSYNDGNQETLNGDATYSSLAAKGFRSVRPNLQDKRSPTQSQ

SEQ ID NO: 82403 - protein, 113 aa, Homo sapiens
  Payload ID: 16400
  Gene Symbol: SORBS2
  Gene Name: sorbin and SH3 domain containing 2
  ENSP ID: ENSP00000408504
MNTDSGGCARKRAAMSVTLTSVKRVQSSPNLLAAGRDSQSPDSAWRSYNDGNQETLNGDATYSSLAAKGFRSVRPNLQDKRSPTQSQITVNGNSGGAVSPMSYYQRPFSPSAY

SEQ ID NO: 82404 - protein, 93 aa, Homo sapiens
  Payload ID: 16400
  Gene Symbol: SORBS2
  Gene Name: sorbin and SH3 domain containing 2
  ENSP ID: ENSP00000408909
MSYYQRPFSPSAYSLPASLNSSIVMQHGTSLDSTDTYPQHAQSLDGTTSSSIPLYRSSEEEKRVTVIKAPHYPGIGPVDESGIPTAIRTTVDR

SEQ ID NO: 82405 - protein, 661 aa, Homo sapiens
  Payload ID: 16400
  Gene Symbol: SORBS2
  Gene Name: sorbin and SH3 domain containing 2
  Uniprot ID: O94875
  ENSP ID: ENSP00000409158
MNTGRDSQSPDSAWRSYNDGNQETLNGDATYSSLAAKGFRSVRPNLQDKRSPTQSQITVNGNSGGAVSPMSYYQRPFSPSAYSLPASLNSSIVMQHGTSLDSTDTYPQHAQSLDGTTSSSIPLYRSSEEEKRVTVIKAPHYPGIGPVDESGIPTAIRTTVDRPKDWYKTMFKQIHMVHKPDDDTDMYNTPYTYNAGLYNPPYSAQSHPAAKTQTYRPLSKSHSDNSPNAFKDASSPVPPPHVPPPVPPLRPRDRSSTEKHDWDPPDRKVDTRKFRSEPRSIFEYEPGKSSILQHERPPPKKPLDYVQDHSSGVFNEASLYQSSIDRSLERPMSSASMASDFRKRRKSEPAVGPPRGLGDQSASRTSPGRVDLPGSSTTLTKSFTSSSPSSPSRAKDRESPRSYSSTLTDMGRSAPRERRGTPEKEKLPAKAVYDFKAQTSKELSFKKGDTVYILRKIDQNWYEGEHHGRVGIFPISYVEKLTPPEKAQPARPPPPAQPGEIGEAIAKYNFNADTNVELSLRKGDRVILLKRVDQNWYEGKIPGTNRQGIFPVSYVEVVKKNTKGAEDYPDPPIPHSYSSDRIHSLSSNKPQRPVFTHENIQGGGEPFQALYNYTPRNEDELELRESDVIDVMEKCDDGWFVGTSRRTKFFGTFPGNYVKRL

SEQ ID NO: 82406 - protein, 107 aa, Homo sapiens
  Payload ID: 16400
  Gene Symbol: SORBS2
  Gene Name: sorbin and SH3 domain containing 2
  ENSP ID: ENSP00000410233
MNTDSGGCARKRAAMSVTLTSVKRVQSSPNLLAAGRDSQSPDSAWRSYNDGNQETLNGDATYSSLAAKGFRSVRPNLQDKRSPTQSQITVNGNSGGAVSPMSYYQRP

SEQ ID NO: 82407 - protein, 89 aa, Homo sapiens
  Payload ID: 16400
  Gene Symbol: SORBS2
  Gene Name: sorbin and SH3 domain containing 2
  ENSP ID: ENSP00000410483
MSYYQRPFSPSAYSLPASLNSSIVMQHGTSLDSTDTYPQHAQSLDGTTSSSIPLYRSSEEEKRVTVIKAPHYPGIGPVDESGIPTAIRT

SEQ ID NO: 82408 - protein, 55 aa, Homo sapiens
  Payload ID: 16400
  Gene Symbol: SORBS2
  Gene Name: sorbin and SH3 domain containing 2
  ENSP ID: ENSP00000410967
MSYYQRPFSPSAYSLPASLNSSIVMQHGTSLDSTDTYPQHAQSLDGTTSSSIPLY

SEQ ID NO: 82409 - protein, 71 aa, Homo sapiens
  Payload ID: 16400
  Gene Symbol: SORBS2
  Gene Name: sorbin and SH3 domain containing 2
  ENSP ID: ENSP00000412447
MSVTLTSVKRVQSSPNLLAAGRDSQSPDSAWRSYNDGNQETLNGDATYSSLAAKGFRSVRPNLQDKRSPTQ

SEQ ID NO: 82410 - protein, 80 aa, Homo sapiens; identical to SEQ ID NO: 82400
  Payload ID: 16400
  Gene Symbol: SORBS2
  Gene Name: sorbin and SH3 domain containing 2
  ENSP ID: ENSP00000415166

SEQ ID NO: 82411 - protein, 80 aa, Homo sapiens; identical to SEQ ID NO: 82400
  Payload ID: 16400
  Gene Symbol: SORBS2
  Gene Name: sorbin and SH3 domain containing 2
  ENSP ID: ENSP00000415392

SEQ ID NO: 82412 - protein, 121 aa, Homo sapiens
  Payload ID: 16400
  Gene Symbol: SORBS2
  Gene Name: sorbin and SH3 domain containing 2
  ENSP ID: ENSP00000415637
MNTGRDSQSPDSAWRSYNDGNQETLNGDATYSSLAAKGFRSVRPNLQDKRSPTQSQITVNGNSGGAVSPMSYYQRPFSPSAYSLPASLNSSIVMQHGTSLDSTDTYPQHAQSLDGTTSSSI

SEQ ID NO: 82413 - protein, 73 aa, Homo sapiens
  Payload ID: 16400
  Gene Symbol: SORBS2
  Gene Name: sorbin and SH3 domain containing 2
  ENSP ID: ENSP00000415680
MSYYQRPFSPSAYSLPASLNSSIVMQHGTSLDSTDTYPQHAQSLDGTTSSSIPLYRSSEEEKRVTVIKAPHYP

SEQ ID NO: 82414 - protein, 120 aa, Homo sapiens
  Payload ID: 16400
  Gene Symbol: SORBS2
  Gene Name: sorbin and SH3 domain containing 2
  ENSP ID: ENSP00000416464
MNTGRDSQSPDSAWRSYNDGNQETLNGDATYSSLAAKGFRSVRPNLQDKRSPTQSQITVNGNSGGAVSPMSYYQRPFSPSAYSLPASLNSSIVMQHGTSLDSTDTYPQHAQSLDGTTSSS

SEQ ID NO: 82415 - protein, 671 aa, Homo sapiens
  Payload ID: 16401
  Gene Symbol: SORBS3
  Gene Name: sorbin and SH3 domain containing 3
  Uniprot ID: O60504
  ENSP ID: ENSP00000240123
MQGPPRSLRAGLSLDDFIPGHLQSHIGSSSRGTRVPVIRNGGSNTLNFQFHDPAPRTVCNGGYTPRRDASQHPDPAWYQTWPGPGSKPSASTKIPASQHTQNWSATWTKDSKRRDKRWVKYEGIGPVDESGMPIAPRSSVDRPRDWYRRMFQQIHRKMPDLQLDWTFEEPPRDPRHLGAQQRPAHRPGPATSSSGRSWDHSEELPRSTFNYRPGAFSTVLQPSNQVLRRREKVDNVWTEESWNQFLQELETGQRPKKPLVDDPGEKPSQPIEVLLERELAELSAELDKDLRAIETRLPSPKSSPAPRRAPEQRPPAGPASAWSSSYPHAPYLGSARSLSPHKMADGGSPFLGRRDFVYPSSTRDPSASNGGGSPARREEKKRKAARLKFDFQAQSPKELTLQKGDIVYIHKEVDKNWLEGEHHGRLGIFPANYVEVLPADEIPKPIKPPTYQVLEYGEAVAQYTFKGDLEVELSFRKGEHICLIRKVNENWYEGRITGTGRQGIFPASYVQVSREPRLRLCDDGPQLPTSPRLTAAARSARHPSSPSALRSPADPIDLGGQTSPRRTGFSFPTQEPRPQTQNLGTPGPALSHSRGPSHPLDLGTSSPNTSQIHWTPYRAMYQYRPQNEDELELREGDRVDVMQQCDDGWFVGVSRRTQKFGTFPGNYVAPV

SEQ ID NO: 82416 - protein, 152 aa, Homo sapiens
  Payload ID: 16401
  Gene Symbol: SORBS3
  Gene Name: sorbin and SH3 domain containing 3
  ENSP ID: ENSP00000428102
  MOD_RES (1)..(1): Any amino acid
XNFQFHDPAPRTVCNGGYTPRRDASQHPDPAWYQTWPGPGSKPSASTKIPASQHTQNWSATWTKDSKRRDKRWVKYEGIGPVDESGMPIAPRSSVDRPRDWYRRMFQQIHRKMPEEAGTTLKSYLEAPSTTDLEHSPLCCSPQIRCSDAGKK

SEQ ID NO: 82417 - protein, 186 aa, Homo sapiens
  Payload ID: 16401
  Gene Symbol: SORBS3
  Gene Name: sorbin and SH3 domain containing 3
  ENSP ID: ENSP00000428327
  MOD_RES (1)..(1): Any amino acid
XNWYEGRITGTGRQGIFPASYVQVSREPRLRLCDDGPQLPTSPRLTAAARSARHPSSPSALRSPADPIDLGGQTSPRRTGFSFPTQEPRPQTQNLGTPGPALSHSRGPSHPLDLGTSSPNTSQIHWTPYRAMYQYRPQNEDELELREGDRVDVMQQCDDGWFVGVSRRTQKFGTFPGNYVAPVGLL

SEQ ID NO: 82418 - protein, 226 aa, Homo sapiens
  Payload ID: 16401
  Gene Symbol: SORBS3
  Gene Name: sorbin and SH3 domain containing 3
  ENSP ID: ENSP00000428678
AVLVPTCRELTLQKGDIVYIHKEVDKNWLEGEHHGRLGIFPANYVEVLPADEIPKPIKPPTYQVLEYGEAVAQYTFKGDLEVELSFRKGEHICLIRKVNENWYEGRITGTGRQGIFPASYVQVSREPRLRLCDDGPQLPTSPRLTAAARSARHPSSPSALRSPADPIDLGGQTSPRRTGFSFPTQEPRPQTQNLGTPGPALSHSRGPSHPLDLGTSSPNTSQIHWT

SEQ ID NO: 82419 - protein, 94 aa, Homo sapiens
  Payload ID: 16401
  Gene Symbol: SORBS3
  Gene Name: sorbin and SH3 domain containing 3
  ENSP ID: ENSP00000429479
MADGGSPFLGRRDFVYPSSTRDPSASNGGGSPARREEKKRKAARLKFDFQAQSPKELTLQKGDIVYIHKEVDKNWLEGEHHGRLGIFPANYVEV

SEQ ID NO: 82420 - protein, 328 aa, Homo sapiens
  Payload ID: 16401
  Gene Symbol: SORBS3
  Gene Name: sorbin and SH3 domain containing 3
  ENSP ID: ENSP00000429723
MQGPPRSLRAGLSLDDFIPGHLQSHIGSSSRGTRVPVIRNGGSNTLNFQFHDPAPRTVCNGGYTPRRDASQHPDPAWYQTWPGPGSKPSASTKIPASQHTQNWSATWTKDSKRRDKRWVKYEGIGPVDESGMPIAPRSSVDRPRDWYRRMFQQIHRKMPDLQLDWTFEEPPRDPRHLGAQQRPAHRPGPATSSSGRSWDHSEELPRSTFNYRPGAFSTVLQPSNQVLRRREKVDNVWTEESWNQFLQELETGQRPKKPLVDDPGEKPSQPIEVLLERELAELSAELDKDLRAIETRLPSPKPGLSLELQLPTCTLPGFRPVPESPQNG

SEQ ID NO: 82421 - protein, 329 aa, Homo sapiens
  Payload ID: 16401
  Gene Symbol: SORBS3
  Gene Name: sorbin and SH3 domain containing 3
  Uniprot ID: O60504
  ENSP ID: ENSP00000429764
MADGGSPFLGRRDFVYPSSTRDPSASNGGGSPARREEKKRKAARLKFDFQAQSPKELTLQKGDIVYIHKEVDKNWLEGEHHGRLGIFPANYVEVLPADEIPKPIKPPTYQVLEYGEAVAQYTFKGDLEVELSFRKGEHICLIRKVNENWYEGRITGTGRQGIFPASYVQVSREPRLRLCDDGPQLPTSPRLTAAARSARHPSSPSALRSPADPIDLGGQTSPRRTGFSFPTQEPRPQTQNLGTPGPALSHSRGPSHPLDLGTSSPNTSQIHWTPYRAMYQYRPQNEDELELREGDRVDVMQQCDDGWFVGVSRRTQKFGTFPGNYVAPV

SEQ ID NO: 82422 - protein, 174 aa, Homo sapiens
  Payload ID: 16401
  Gene Symbol: SORBS3
  Gene Name: sorbin and SH3 domain containing 3
  ENSP ID: ENSP00000431128
MADGGSPFLGRRDFVYPSSTRDPSASNGGGSPARREEKKRKAARLKFDFQAQSPKELTLQKGDIVYIHKEVDKNWLEGEHHGRLGIFPANYVEVLPADEIPKPIKPPTYQVLEYGEAVAQYTFKGDLEVELSFRKGEHICLIRKVNENWYEGRITGTGRQGIFPASYVQVSREP

SEQ ID NO: 82423 - protein, 357 aa, Homo sapiens
  Payload ID: 16402
  Gene Symbol: SORD
  Gene Name: sorbitol dehydrogenase
  Uniprot ID: Q00796
  ENSP ID: ENSP00000267814
MAAAAKPNNLSLVVHGPGDLRLENYPIPEPGPNEVLLRMHSVGICGSDVHYWEYGRIGNFIVKKPMVLGHEASGTVEKVGSSVKHLKPGDRVAIEPGAPRENDEFCKMGRYNLSPSIFFCATPPDDGNLCRFYKHNAAFCYKLPDNVTFEEGALIEPLSVGIHACRRGGVTLGHKVLVCGAGPIGMVTLLVAKAMGAAQVVVTDLSATRLSKAKEIGADLVLQISKESPQEIARKVEGQLGCKPEVTIECTGAEASIQAGIYATRSGGNLVLVGLGSEMTTVPLLHAAIREVDIKGVFRYCNTWPVAISMLASKSVNVKPLVTHRFPLEKALEAFETFKKGLGLKIMLKCDPSDQNP

SEQ ID NO: 82424 - protein, 117 aa, Homo sapiens
  Payload ID: 16402
  Gene Symbol: SORD
  Gene Name: sorbitol dehydrogenase
  ENSP ID: ENSP00000452731
MAAAAKPNNLSLVVHGPGDLRLENYPIPEPGPNEVLLRMHSVGICGSDVHYWEYGRIGNFIVKKPMVLGHEASGTVEKVGSSVKHLKPGWKTKNQTKERADSAPTLGHGAIFVFLSR

SEQ ID NO: 82425 - protein, 336 aa, Homo sapiens
  Payload ID: 16402
  Gene Symbol: SORD
  Gene Name: sorbitol dehydrogenase
  ENSP ID: ENSP00000453122
MENYPIPEPGPNEVLLRMHSVGICGSDVHYWEYGRIGNFIVKKPMVLGHEASGTVEKVGSSVKHLKPGDRVAIEPGAPRENDEFCKMGRYNLSPSIFFCATPPDDGNLCRFYKHNAAFCYKLPDNVTFEEGALIEPLSVGIHACRRGGVTLGHKVLVCGAGPIGMVTLLVAKAMGAAQVVVTDLSATRLSKAKEIGADLVLQISKESPQEIARKVEGQLGCKPEVTIECTGAEASIQAGIYATRSGGNLVLVGLGSEMTTVPLLHAAIREVDIKGVFRYCNTWPVAISMLASKSVNVKPLVTHRFPLEKALEAFETFKKGLGLKIMLKCDPSDQNP

SEQ ID NO: 82426 - protein, 100 aa, Homo sapiens
  Payload ID: 16402
  Gene Symbol: SORD
  Gene Name: sorbitol dehydrogenase
  Uniprot ID: Q00796
  ENSP ID: ENSP00000453904
MAAAAKPNNLSLVVHGPGDLRLENYPIPEPGPNEVLLRMHSVGICGSDVHYWEYGRIGNFIVKKPMVLGHEASGTVEKVGSSVKHLKPGFLTMSPLRKAP

SEQ ID NO: 82427 - protein, 198 aa, Homo sapiens
  Payload ID: 16403
  Gene Symbol: SRI
  Gene Name: sorcin
  Uniprot ID: P30626
  ENSP ID: ENSP00000265729
MAYPGHPGAGGGYYPGGYGGAPGGPAFPGQTQDPLYGYFAAVAGQDGQIDADELQRCLTQSGIAGGYKPFNLETCRLMVSMLDRDMSGTMGFNEFKELWAVLNGWRQHFISFDTDRSGTVDPQELQKALTTMGFRLSPQAVNSIAKRYSTNGKITFDDYIACCVKLRALTDSFRRRDTAQQGVVNFPYDDFIQCVMSV

SEQ ID NO: 82428 - protein, 183 aa, Homo sapiens
  Payload ID: 16403
  Gene Symbol: SRI
  Gene Name: sorcin
  Uniprot ID: P30626
  ENSP ID: ENSP00000378137
MQYGGAPGGPAFPGQTQDPLYGYFAAVAGQDGQIDADELQRCLTQSGIAGGYKPFNLETCRLMVSMLDRDMSGTMGFNEFKELWAVLNGWRQHFISFDTDRSGTVDPQELQKALTTMGFRLSPQAVNSIAKRYSTNGKITFDDYIACCVKLRALTDSFRRRDTAQQGVVNFPYDDFIQCVMSV

SEQ ID NO: 82429 - protein, 180 aa, Homo sapiens
  Payload ID: 16403
  Gene Symbol: SRI
  Gene Name: sorcin
  Uniprot ID: P30626
  ENSP ID: ENSP00000391148
MQYGGAPGGPAFPGQTQDPLYGYFAAVAGQDGQIDADELQRCLTQSGIAGGYKPFNLETCRLMVSMLDRDMSGTMGFNEFKELWAVLNGWRQHFISFDTDRSGTVDPQELQKALTTMGFRLSPQAVNSIAKRYSTNGKITFDDYIACCVKLRALTDSFRRRDTAQQGVVNFPYDDVSLRN

SEQ ID NO: 82430 - protein, 158 aa, Homo sapiens
  Payload ID: 16403
  Gene Symbol: SRI
  Gene Name: sorcin
  ENSP ID: ENSP00000397609
MAYPGHPGAGGGYYPGGYGGAPGGPAFPGQTQDPLYGYFAAVAGQDGQIDADELQRCLTQSGIAGGYKPFNLETCRLMVSMLDRDMSGTMGFNEFKELWAVNSIAKRYSTNGKITFDDYIACCVKLRALTDSFRRRDTAQQGVVNFPYDDFIQCVMSV

SEQ ID NO: 82431 - protein, 72 aa, Homo sapiens
  Payload ID: 16403
  Gene Symbol: SRI
  Gene Name: sorcin
  ENSP ID: ENSP00000415271
MAYPGHPGAGGGYYPGGYGGAPGGPAFPGQTQDPLYGYFAAVAGQDGQIDADELQRCLTQSGIAGGYKLVRL

SEQ ID NO: 82432 - protein, 155 aa, Homo sapiens
  Payload ID: 16403
  Gene Symbol: SRI
  Gene Name: sorcin
  ENSP ID: ENSP00000418512
MQDGQIDADELQRCLTQSGIAGGYKPFNLETCRLMVSMLDRDMSGTMGFNEFKELWAVLNGWRQHFISFDTDRSGTVDPQELQKALTTMGFRLSPQAVNSIAKRYSTNGKITFDDYIACCVKLRALTDSFRRRDTAQQGVVNFPYDDFIQCVMSV

SEQ ID NO: 82433 - protein, 831 aa, Homo sapiens
  Payload ID: 16404
  Gene Symbol: SORT1
  Gene Name: sortilin 1
  Uniprot ID: Q99523
  ENSP ID: ENSP00000256637
MERPWGAADGLSRWPHGLGLLLLLQLLPPSTLSQDRLDAPPPPAAPLPRWSGPIGVSWGLRAAAAGGAFPRGGRWRRSAPGEDEECGRVRDFVAKLANNTHQHVFDDLRGSVSLSWVGDSTGVILVLTTFHVPLVIMTFGQSKLYRSEDYGKNFKDITDLINNTFIRTEFGMAIGPENSGKVVLTAEVSGGSRGGRIFRSSDFAKNFVQTDLPFHPLTQMMYSPQNSDYLLALSTENGLWVSKNFGGKWEEIHKAVCLAKWGSDNTIFFTTYANGSCKADLGALELWRTSDLGKSFKTIGVKIYSFGLGGRFLFASVMADKDTTRRIHVSTDQGDTWSMAQLPSVGQEQFYSILAANDDMVFMHVDEPGDTGFGTIFTSDDRGIVYSKSLDRHLYTTTGGETDFTNVTSLRGVYITSVLSEDNSIQTMITFDQGGRWTHLRKPENSECDATAKNKNECSLHIHASYSISQKLNVPMAPLSEPNAVGIVIAHGSVGDAISVMVPDVYISDDGGYSWTKMLEGPHYYTILDSGGIIVAIEHSSRPINVIKFSTDEGQCWQTYTFTRDPIYFTGLASEPGARSMNISIWGFTESFLTSQWVSYTIDFKDILERNCEEKDYTIWLAHSTDPEDYEDGCILGYKEQFLRLRKSSVCQNGRDYVVTKQPSICLCSLEDFLCDFGYYRPENDSKCVEQPELKGHDLEFCLYGREEHLTTNGYRKIPGDKCQGGVNPVREVKDLKKKCTSNFLSPEKQNSKSNSVPIILAIVGLMLVTVVAGVLIVKKYVCGGRFLVHRYSVLQQHAEANGVDGVDALDTASHTNKSGYHDDSDEDLLE

SEQ ID NO: 82434 - protein, 694 aa, Homo sapiens
  Payload ID: 16404
  Gene Symbol: SORT1
  Gene Name: sortilin 1
  Uniprot ID: Q99523
  ENSP ID: ENSP00000438597
MTFGQSKLYRSEDYGKNFKDITDLINNTFIRTEFGMAIGPENSGKVVLTAEVSGGSRGGRIFRSSDFAKNFVQTDLPFHPLTQMMYSPQNSDYLLALSTENGLWVSKNFGGKWEEIHKAVCLAKWGSDNTIFFTTYANGSCTDLGALELWRTSDLGKSFKTIGVKIYSFGLGGRFLFASVMADKDTTRRIHVSTDQGDTWSMAQLPSVGQEQFYSILAANDDMVFMHVDEPGDTGFGTIFTSDDRGIVYSKSLDRHLYTTTGGETDFTNVTSLRGVYITSVLSEDNSIQTMITFDQGGRWTHLRKPENSECDATAKNKNECSLHIHASYSISQKLNVPMAPLSEPNAVGIVIAHGSVGDAISVMVPDVYISDDGGYSWTKMLEGPHYYTILDSGGIIVAIEHSSRPINVIKFSTDEGQCWQTYTFTRDPIYFTGLASEPGARSMNISIWGFTESFLTSQWVSYTIDFKDILERNCEEKDYTIWLAHSTDPEDYEDGCILGYKEQFLRLRKSSVCQNGRDYVVTKQPSICLCSLEDFLCDFGYYRPENDSKCVEQPELKGHDLEFCLYGREEHLTTNGYRKIPGDKCQGGVNPVREVKDLKKKCTSNFLSPEKQNSKSNSVPIILAIVGLMLVTVVAGVLIVKKYVCGGRFLVHRYSVLQQHAEANGVDGVDALDTASHTNKSGYHDDSDEDLLE

SEQ ID NO: 82435 - protein, 104 aa, Homo sapiens
  Payload ID: 16404
  Gene Symbol: SORT1
  Gene Name: sortilin 1
  ENSP ID: ENSP00000487674
  MOD_RES (1)..(1): Any amino acid
XSRWPHGLGLLLLLQLLPPSTLSQDRLDAPPPPAAPLPRWSGPIGVSWGLRAAAAGGAFPRGGRWRRSAPGEDEECGRVRDFVAKLANNTHQLSKSLEHRFSSV

SEQ ID NO: 82436 - protein, 60 aa, Homo sapiens
  Payload ID: 16404
  Gene Symbol: SORT1
  Gene Name: sortilin 1
  ENSP ID: ENSP00000487712
MTFGQSKLYRSEDYGKNFKDITDLINNTFIRTEFGMAIGPENSGKVVLTAEVSGGSRGGR

SEQ ID NO: 82437 - protein, 118 aa, Homo sapiens
  Payload ID: 16404
  Gene Symbol: SORT1
  Gene Name: sortilin 1
  ENSP ID: ENSP00000488262
MTFGQSKLYRSEDYGKNFKDITDLINNTFIRTEFGMAIGPENSGKVVLTAEVSGGSRGGRIFRSSDFAKNFVQTDLPFHPLTQMMYSPQNSDYLLALSTENGLWVSKNFGGKWEEIHK

SEQ ID NO: 82438 - protein, 20 aa, Homo sapiens
  Payload ID: 16404
  Gene Symbol: SORT1
  Gene Name: sortilin 1
  ENSP ID: ENSP00000488662
MTFGQSKLYRSEDYGKNFKD

SEQ ID NO: 82439 - protein, 2214 aa, Homo sapiens
  Payload ID: 16405
  Gene Symbol: SORL1
  Gene Name: sortilin-related receptor, L(DLR class) A repeats containing
  Uniprot ID: Q92673
  ENSP ID: ENSP00000260197
MATRSSRRESRLPFLFTLVALLPPGALCEVWTQRLHGGSAPLPQDRGFLVVQGDPRELRLWARGDARGASRADEKPLRRKRSAALQPEPIKVYGQVSLNDSHNQMVVHWAGEKSNVIVALARDSLALARPKSSDVYVSYDYGKSFKKISDKLNFGLGNRSEAVIAQFYHSPADNKRYIFADAYAQYLWITFDFCNTLQGFSIPFRAADLLLHSKASNLLLGFDRSHPNKQLWKSDDFGQTWIMIQEHVKSFSWGIDPYDKPNTIYIERHEPSGYSTVFRSTDFFQSRENQEVILEEVRDFQLRDKYMFATKVVHLLGSEQQSSVQLWVSFGRKPMRAAQFVTRHPINEYYIADASEDQVFVCVSHSNNRTNLYISEAEGLKFSLSLENVLYYSPGGAGSDTLVRYFANEPFADFHRVEGLQGVYIATLINGSMNEENMRSVITFDKGGTWEFLQAPAFTGYGEKINCELSQGCSLHLAQRLSQLLNLQLRRMPILSKESAPGLIIATGSVGKNLASKTNVYISSSAGARWREALPGPHYYTWGDHGGIITAIAQGMETNELKYSTNEGETWKTFIFSEKPVFVYGLLTEPGEKSTVFTIFGSNKENVHSWLILQVNATDALGVPCTENDYKLWSPSDERGNECLLGHKTVFKRRTPHATCFNGEDFDRPVVVSNCSCTREDYECDFGFKMSEDLSLEVCVPDPEFSGKSYSPPVPCPVGSTYRRTRGYRKISGDTCSGGDVEARLEGELVPCPLAEENEFILYAVRKSIYRYDLASGATEQLPLTGLRAAVALDFDYEHNCLYWSDLALDVIQRLCLNGSTGQEVIINSGLETVEALAFEPLSQLLYWVDAGFKKIEVANPDGDFRLTIVNSSVLDRPRALVLVPQEGVMFWTDWGDLKPGIYRSNMDGSAAYHLVSEDVKWPNGISVDDQWIYWTDAYLECIERITFSGQQRSVILDNLPHPYAIAVFKNEIYWDDWSQLSIFRASKYSGSQMEILANQLTGLMDMKIFYKGKNTGSNACVPRPCSLLCLPKANNSRSCRCPEDVSSSVLPSGDLMCDCPQGYQLKNNTCVKQENTCLRNQYRCSNGNCINSIWWCDFDNDCGDMSDERNCPTTICDLDTQFRCQESGTCIPLSYKCDLEDDCGDNSDESHCEMHQCRSDEYNCSSGMCIRSSWVCDGDNDCRDWSDEANCTAIYHTCEASNFQCRNGHCIPQRWACDGDTDCQDGSDEDPVNCEKKCNGFRCPNGTCIPSSKHCDGLRDCSDGSDEQHCEPLCTHFMDFVCKNRQQCLFHSMVCDGIIQCRDGSDEDAAFAGCSQDPEFHKVCDEFGFQCQNGVCISLIWKCDGMDDCGDYSDEANCENPTEAPNCSRYFQFRCENGHCIPNRWKCDRENDCGDWSDEKDCGDSHILPFSTPGPSTCLPNYYRCSSGTCVMDTWVCDGYRDCADGSDEEACPLLANVTAASTPTQLGRCDRFEFECHQPKTCIPNWKRCDGHQDCQDGRDEANCPTHSTLTCMSREFQCEDGEACIVLSERCDGFLDCSDESDEKACSDELTVYKVQNLQWTADFSGDVTLTWMRPKKMPSASCVYNVYYRVVGESIWKTLETHSNKTNTVLKVLKPDTTYQVKVQVQCLSKAHNTNDFVTLRTPEGLPDAPRNLQLSLPREAEGVIVGHWAPPIHTHGLIREYIVEYSRSGSKMWASQRAASNFTEIKNLLVNTLYTVRVAAVTSRGIGNWSDSKSITTIKGKVIPPPDIHIDSYGENYLSFTLTMESDIKVNGYVVNLFWAFDTHKQERRTLNFRGSILSHKVGNLTAHTSYEISAWAKTDLGDSPLAFEHVMTRGVRPPAPSLKAKAINQTAVECTWTGPRNVVYGIFYATSFLDLYRNPKSLTTSLHNKTVIVSKDEQYLFLVRVVVPYQGPSSDYVVVKMIPDSRLPPRHLHVVHTGKTSVVIKWESPYDSPDQDLLYAVAVKDLIRKTDRSYKVKSRNSTVEYTLNKLEPGGKYHIIVQLGNMSKDSSIKITTVSLSAPDALKIITENDHVLLFWKSLALKEKHFNESRGYEIHMFDSAMNITAYLGNTTDNFFKISNLKMGHNYTFTVQARCLFGNQICGEPAILLYDELGSGADASATQAARSTDVAAVVVPILFLILLSLGVGFAILYTKHRRLQSSFTAFANSHYSSRLGSAIFSSGDDLGEDDEDAPMITGFSDDVPMVIA

SEQ ID NO: 82440 - protein, 1060 aa, Homo sapiens
  Payload ID: 16405
  Gene Symbol: SORL1
  Gene Name: sortilin-related receptor, L(DLR class) A repeats containing
  ENSP ID: ENSP00000432131
MHQCRSDEYNCSSGMCIRSSWVCDGDNDCRDWSDEANCTAIYHTCEASNFQCRNGHCIPQRWACDGDTDCQDGSDEDPVNCEKKCNGFRCPNGTCIPSSKHCDGLRDCSDGSDEQHCEPLCTHFMDFVCKNRQQCLFHSMVCDGIIQCRDGSDEDAAFAGCSQDPEFHKVCDEFGFQCQNGVCISLIWKCDGMDDCGDYSDEANCENPTEAPNCSRYFQFRCENGHCIPNRWKCDRENDCGDWSDEKDCGDSHILPFSTPGPSTCLPNYYRCSSGTCVMDTWVCDGYRDCADGSDEEACPLLANVTAASTPTQLGRCDRFEFECHQPKTCIPNWKRCDGHQDCQDGRDEANCPTHSTLTCMSREFQCEDGEACIVLSERCDGFLDCSDESDEKACSDELTVYKVQNLQWTADFSGDVTLTWMRPKKMPSASCVYNVYYRVVGESIWKTLETHSNKTNTVLKVLKPDTTYQVKVQVQCLSKAHNTNDFVTLRTPEGLPDAPRNLQLSLPREAEGVIVGHWAPPIHTHGLIREYIVEYSRSGSKMWASQRAASNFTEIKNLLVNTLYTVRVAAVTSRGIGNWSDSKSITTIKGKVIPPPDIHIDSYGENYLSFTLTMESDIKVNGYVVNLFWAFDTHKQERRTLNFRGSILSHKVGNLTAHTSYEISAWAKTDLGDSPLAFEHVMTRGVRPPAPSLKAKAINQTAVECTWTGPRNVVYGIFYATSFLDLYRNPKSLTTSLHNKTVIVSKDEQYLFLVRVVVPYQGPSSDYVVVKMIPDSRLPPRHLHVVHTGKTSVVIKWESPYDSPDQDLLYAVAVKDLIRKTDRSYKVKSRNSTVEYTLNKLEPGGKYHIIVQLGNMSKDSSIKITTVSLSAPDALKIITENDHVLLFWKSLALKEKHFNESRGYEIHMFDSAMNITAYLGNTTDNFFKISNLKMGHNYTFTVQARCLFGNQICGEPAILLYDELGSGADASATQAARSTDVAAVVVPILFLILLSLGVGFAILYTKHRRLQSSFTAFANSHYSSRLGSAIFSSGDDLGEDDEDAPMITGFSDDVPMVIA

SEQ ID NO: 82441 - protein, 1158 aa, Homo sapiens
  Payload ID: 16405
  Gene Symbol: SORL1
  Gene Name: sortilin-related receptor, L(DLR class) A repeats containing
  ENSP ID: ENSP00000434634
MCDCPQGYQLKNNTCVKQENTCLRNQYRCSNGNCINSIWWCDFDNDCGDMSDERNCPTTICDLDTQFRCQESGTCIPLSYKCDLEDDCGDNSDESHCEMHQCRSDEYNCSSGMCIRSSWVCDGDNDCRDWSDEANCTAIYHTCEASNFQCRNGHCIPQRWACDGDTDCQDGSDEDPVNCEKKCNGFRCPNGTCIPSSKHCDGLRDCSDGSDEQHCEPLCTHFMDFVCKNRQQCLFHSMVCDGIIQCRDGSDEDAAFAGCSQDPEFHKVCDEFGFQCQNGVCISLIWKCDGMDDCGDYSDEANCENPTEAPNCSRYFQFRCENGHCIPNRWKCDRENDCGDWSDEKDCGDSHILPFSTPGPSTCLPNYYRCSSGTCVMDTWVCDGYRDCADGSDEEACPLLANVTAASTPTQLGRCDRFEFECHQPKTCIPNWKRCDGHQDCQDGRDEANCPTHSTLTCMSREFQCEDGEACIVLSERCDGFLDCSDESDEKACSDELTVYKVQNLQWTADFSGDVTLTWMRPKKMPSASCVYNVYYRVVGESIWKTLETHSNKTNTVLKVLKPDTTYQVKVQVQCLSKAHNTNDFVTLRTPEGLPDAPRNLQLSLPREAEGVIVGHWAPPIHTHGLIREYIVEYSRSGSKMWASQRAASNFTEIKNLLVNTLYTVRVAAVTSRGIGNWSDSKSITTIKGKVIPPPDIHIDSYGENYLSFTLTMESDIKVNGYVVNLFWAFDTHKQERRTLNFRGSILSHKVGNLTAHTSYEISAWAKTDLGDSPLAFEHVMTRGVRPPAPSLKAKAINQTAVECTWTGPRNVVYGIFYATSFLDLYRNPKSLTTSLHNKTVIVSKDEQYLFLVRVVVPYQGPSSDYVVVKMIPDSRLPPRHLHVVHTGKTSVVIKWESPYDSPDQDLLYAVAVKDLIRKTDRSYKVKSRNSTVEYTLNKLEPGGKYHIIVQLGNMSKDSSIKITTVSLSAPDALKIITENDHVLLFWKSLALKEKHFNESRGYEIHMFDSAMNITAYLGNTTDNFFKISNLKMGHNYTFTVQARCLFGNQICGEPAILLYDELGSGADASATQAARSTDVAAVVVPILFLILLSLGVGFAILYTKHRRLQSSFTAFANSHYSSRLGSAIFSSGDDLGEDDEDAPMITGFSDDVPMVIA

SEQ ID NO: 82442 - protein, 829 aa, Homo sapiens
  Payload ID: 16405
  Gene Symbol: SORL1
  Gene Name: sortilin-related receptor, L(DLR class) A repeats containing
  ENSP ID: ENSP00000435405
MISRLAAAQSCASHWPPSADSHILPFSTPGPSTCLPNYYRCSSGTCVMDTWVCDGYRDCADGSDEEACPLLANVTAASTPTQLGRCDRFEFECHQPKTCIPNWKRCDGHQDCQDGRDEANCPTHSTLTCMSREFQCEDGEACIVLSERCDGFLDCSDESDEKACSDELTVYKVQNLQWTADFSGDVTLTWMRPKKMPSASCVYNVYYRVVGESIWKTLETHSNKTNTVLKVLKPDTTYQVKVQVQCLSKAHNTNDFVTLRTPEGLPDAPRNLQLSLPREAEGVIVGHWAPPIHTHGLIREYIVEYSRSGSKMWASQRAASNFTEIKNLLVNTLYTVRVAAVTSRGIGNWSDSKSITTIKGKVIPPPDIHIDSYGENYLSFTLTMESDIKVNGYVVNLFWAFDTHKQERRTLNFRGSILSHKVGNLTAHTSYEISAWAKTDLGDSPLAFEHVMTRGVRPPAPSLKAKAINQTAVECTWTGPRNVVYGIFYATSFLDLYRNPKSLTTSLHNKTVIVSKDEQYLFLVRVVVPYQGPSSDYVVVKMIPDSRLPPRHLHVVHTGKTSVVIKWESPYDSPDQDLLYAVAVKDLIRKTDRSYKVKSRNSTVEYTLNKLEPGGKYHIIVQLGNMSKDSSIKITTVSLSAPDALKIITENDHVLLFWKSLALKEKHFNESRGYEIHMFDSAMNITAYLGNTTDNFFKISNLKMGHNYTFTVQARCLFGNQICGEPAILLYDELGSGADASATQAARSTDVAAVVVPILFLILLSLGVGFAILYTKHRRLQSSFTAFANSHYSSRLGSAIFSSGDDLGEDDEDAPMITGFSDDVPMVIA

SEQ ID NO: 82443 - protein, 1124 aa, Homo sapiens
  Payload ID: 16405
  Gene Symbol: SORL1
  Gene Name: sortilin-related receptor, L(DLR class) A repeats containing
  ENSP ID: ENSP00000436447
MQTSRHSFSQTTGCVCRSPLFLESSTSWPPLSLLPNLLPIIASIENNICGEHWDEWTRMLLSREMHQCRSDEYNCSSGMCIRSSWVCDGDNDCRDWSDEANCTAIYHTCEASNFQCRNGHCIPQRWACDGDTDCQDGSDEDPVNCEKKCNGFRCPNGTCIPSSKHCDGLRDCSDGSDEQHCEPLCTHFMDFVCKNRQQCLFHSMVCDGIIQCRDGSDEDAAFAGCSQDPEFHKVCDEFGFQCQNGVCISLIWKCDGMDDCGDYSDEANCENPTEAPNCSRYFQFRCENGHCIPNRWKCDRENDCGDWSDEKDCGDSHILPFSTPGPSTCLPNYYRCSSGTCVMDTWVCDGYRDCADGSDEEACPLLANVTAASTPTQLGRCDRFEFECHQPKTCIPNWKRCDGHQDCQDGRDEANCPTHSTLTCMSREFQCEDGEACIVLSERCDGFLDCSDESDEKACSDELTVYKVQNLQWTADFSGDVTLTWMRPKKMPSASCVYNVYYRVVGESIWKTLETHSNKTNTVLKVLKPDTTYQVKVQVQCLSKAHNTNDFVTLRTPEGLPDAPRNLQLSLPREAEGVIVGHWAPPIHTHGLIREYIVEYSRSGSKMWASQRAASNFTEIKNLLVNTLYTVRVAAVTSRGIGNWSDSKSITTIKGKVIPPPDIHIDSYGENYLSFTLTMESDIKVNGYVVNLFWAFDTHKQERRTLNFRGSILSHKVGNLTAHTSYEISAWAKTDLGDSPLAFEHVMTRGVRPPAPSLKAKAINQTAVECTWTGPRNVVYGIFYATSFLDLYRNPKSLTTSLHNKTVIVSKDEQYLFLVRVVVPYQGPSSDYVVVKMIPDSRLPPRHLHVVHTGKTSVVIKWESPYDSPDQDLLYAVAVKDLIRKTDRSYKVKSRNSTVEYTLNKLEPGGKYHIIVQLGNMSKDSSIKITTVSLSAPDALKIITENDHVLLFWKSLALKEKHFNESRGYEIHMFDSAMNITAYLGNTTDNFFKISNLKMGHNYTFTVQARCLFGNQICGEPAILLYDELGSGADASATQAARSTDVAAVVVPILFLILLSLGVGFAILYTKHRRLQSSFTAFANSHYSSRLGSAIFSSGDDLGEDDEDAPMITGFSDDVPMVIA

SEQ ID NO: 82444 - protein, 1168 aa, Homo sapiens
  Payload ID: 16406
  Gene Symbol: SORCS1
  Gene Name: sortilin-related VPS10 domain containing receptor 1
  Uniprot ID: Q8WY21
  ENSP ID: ENSP00000263054
MGKVGAGGGSQARLSALLAGAGLLILCAPGVCGGGSCCPSPHPSSAPRSASTPRGFSHQGRPGRAPATPLPLVVRPLFSVAPGDRALSLERARGTGASMAVAARSGRRRRSGADQEKAERGEGASRSPRGVLRDGGQQEPGTRERDPDKATRFRMEELRLTSTTFALTGDSAHNQAMVHWSGHNSSVILILTKLYDYNLGSITESSLWRSTDYGTTYEKLNDKVGLKTILSYLYVCPTNKRKIMLLTDPEIESSLLISSDEGATYQKYRLNFYIQSLLFHPKQEDWILAYSQDQKLYSSAEFGRRWQLIQEGVVPNRFYWSVMGSNKEPDLVHLEARTVDGHSHYLTCRMQNCTEANRNQPFPGYIDPDSLIVQDHYVFVQLTSGGRPHYYVSYRRNAFAQMKLPKYALPKDMHVISTDENQVFAAVQEWNQNDTYNLYISDTRGVYFTLALENVQSSRGPEGNIMIDLYEVAGIKGMFLANKKIDNQVKTFITYNKGRDWRLLQAPDTDLRGDPVHCLLPYCSLHLHLKVSENPYTSGIIASKDTAPSIIVASGNIGSELSDTDISMFVSSDAGNTWRQIFEEEHSVLYLDQGGVLVAMKHTSLPIRHLWLSFDEGRSWSKYSFTSIPLFVDGVLGEPGEETLIMTVFGHFSHRSEWQLVKVDYKSIFDRRCAEEDYRPWQLHSQGEACIMGAKRIYKKRKSERKCMQGKYAGAMESEPCVCTEADFDCDYGYERHSNGQCLPAFWFNPSSLSKDCSLGQSYLNSTGYRKVVSNNCTDGVREQYTAKPQKCPGKAPRGLRIVTADGKLTAEQGHNVTLMVQLEEGDVQRTLIQVDFGDGIAVSYVNLSSMEDGIKHVYQNVGIFRVTVQVDNSLGSDSAVLYLHVTCPLEHVHLSLPFVTTKNKEVNATAVLWPSQVGTLTYVWWYGNNTEPLITLEGSISFRFTSEGMNTITVQVSAGNAILQDTKTIAVYEEFRSLRLSFSPNLDDYNPDIPEWRRDIGRVIKKSLVEATGVPGQHILVAVLPGLPTTAELFVLPYQDPAGENKRSTDDLEQISELLIHTLNQNSVHFELKPGVRVLVHAAHLTAAPLVDLTPTHSGSAMLMLLSVVFVGLAVFVIYKFKRRVALPSPPSPSTQPGDSSLRLQRARHATPPSTPKRGSAGAQYAI

SEQ ID NO: 82445 - protein, 945 aa, Homo sapiens
  Payload ID: 16406
  Gene Symbol: SORCS1
  Gene Name: sortilin-related VPS10 domain containing receptor 1
  ENSP ID: ENSP00000345964
IMLLTDPEIESSLLISSDEGATYQKYRLNFYIQSLLFHPKQEDWILAYSQDQKLYSSAEFGRRWQLIQEGVVPNRFYWSVMGSNKEPDLVHLEARTVDGHSHYLTCRMQNCTEANRNQPFPGYIDPDSLIVQDHYVFVQLTSGGRPHYYVSYRRNAFAQMKLPKYALPKDMHVISTDENQVFAAVQEWNQNDTYNLYISDTRGVYFTLALENVQSSRGPEGNIMIDLYEVAGIKGMFLANKKIDNQVKTFITYNKGRDWRLLQAPDTDLRGDPVHCLLPYCSLHLHLKVSENPYTSGIIASKDTAPSIIVASGNIGSELSDTDISMFVSSDAGNTWRQIFEEEHSVLYLDQGGVLVAMKHTSLPIRHLWLSFDEGRSWSKYSFTSIPLFVDGVLGEPGEETLIMTVFGHFSHRSEWQLVKVDYKSIFDRRCAEEDYRPWQLHSQGEACIMGAKRIYKKRKSERKCMQGKYAGAMESEPCVCTEADFDCDYGYERHSNGQCLPAFWFNPSSLSKDCSLGQSYLNSTGYRKVVSNNCTDGVREQYTAKPQKCPGKAPRGLRIVTADGKLTAEQGHNVTLMVQLEEGDVQRTLIQVDFGDGIAVSYVNLSSMEDGIKHVYQNVGIFRVTVQVDNSLGSDSAVLYLHVTCPLEHVHLSLPFVTTKNKEVNATAVLWPSQVGTLTYVWWYGNNTEPLITLEGSISFRFTSEGMNTITVQVSAGNAILQDTKTIAVYEEFRSLRLSFSPNLDDYNPDIPEWRRDIGRVIKKSLVEATGVPGQHILVAVLPGLPTTAELFVLPYQDPAGENKRSTDDLEQISELLIHTLNQNSVHFELKPGVRVLVHAAHLTAAPLVDLTPTHSGSAMLMLLSVVFVGLAVFVIYKFKRKIPGINVYAQMQNEKEQEMISPVSHSESRPNVPQTELRRPGQLIDEKVESQLIGRYRSTLQSL

SEQ ID NO: 82446 - protein, 714 aa, Homo sapiens
  Payload ID: 16406
  Gene Symbol: SORCS1
  Gene Name: sortilin-related VPS10 domain containing receptor 1
  ENSP ID: ENSP00000358712
MIDLYEVAGIKGMFLANKKIDNQVKTFITYNKGRDWRLLQAPDTDLRGDPVHCLLPYCSLHLHLKVSENPYTSGIIASKDTAPSIIVASGNIGSELSDTDISMFVSSDAGNTWRQIFEEEHSVLYLDQGGVLVAMKHTSLPIRHLWLSFDEGRSWSKYSFTSIPLFVDGVLGEPGEETLIMTVFGHFSHRSEWQLVKVDYKSIFDRRCAEEDYRPWQLHSQGEACIMGAKRIYKKRKSERKCMQGKYAGAMESEPCVCTEADFDCDYGYERHSNGQCLPAFWFNPSSLSKDCSLGQSYLNSTGYRKVVSNNCTDGVREQYTAKPQKCPGKAPRGLRIVTADGKLTAEQGHNVTLMVQLEEGDVQRTLIQVDFGDGIAVSYVNLSSMEDGIKHVYQNVGIFRVTVQVDNSLGSDSAVLYLHVTCPLEHVHLSLPFVTTKNKEVNATAVLWPSQVGTLTYVWWYGNNTEPLITLEGSISFRFTSEGMNTITVQVSAGNAILQDTKTIAVYEEFRSLRLSFSPNLDDYNPDIPEWRRDIGRVIKKSLVEATGVPGQHILVAVLPGLPTTAELFVLPYQDPAGENKRSTDDLEQISELLIHTLNQNSVHFELKPGVRVLVHAAHLTAAPLVDLTPTHSGSAMLMLLSVVFVGLAVFVIYKFKRKIPGINVYAQMQNEKEQEMISPVSHSESRPNVPQTELRRPGQLIDEKVESQLIGE

SEQ ID NO: 82447 - protein, 213 aa, Homo sapiens
  Payload ID: 16406
  Gene Symbol: SORCS1
  Gene Name: sortilin-related VPS10 domain containing receptor 1
  ENSP ID: ENSP00000407769
  MOD_RES (1)..(1): Any amino acid
XLDDYNPDIPEWRRDIGRVIKKSLVEATGVPGQHILVAVLPGLPTTAELFVLPYQDPAGENKRSTDDLEQISELLIHTLNQNSVHFELKPGVRVLVHAAHLTAAPLVDLTPTHSGSAMLMLLSVVFVGLAVFVIYKFKRKIPGINVYAQMQNEKEQEMISPVSHSESRPNVPQTELRRPGQLIDEKVESQLIGSISIVAENQSTKEIPTYVNV

SEQ ID NO: 82448 - protein, 926 aa, Homo sapiens
  Payload ID: 16406
  Gene Symbol: SORCS1
  Gene Name: sortilin-related VPS10 domain containing receptor 1
  ENSP ID: ENSP00000477888
IMLLTDPEIESSLLISSDEGATYQKYRLNFYIQSLLFHPKQEDWILAYSQDQKLYSSAEFGRRWQLIQEGVVPNRFYWSVMGSNKEPDLVHLEARTVDGHSHYLTCRMQNCTEANRNQPFPGYIDPDSLIVQDHYVFVQLTSGGRPHYYVSYRRNAFAQMKLPKYALPKDMHVISTDENQVFAAVQEWNQNDTYNLYISDTRGVYFTLALENVQSSRGPEGNIMIDLYEVAGIKGMFLANKKIDNQVKTFITYNKGRDWRLLQAPDTDLRGDPVHCLLPYCSLHLHLKVSENPYTSGIIASKDTAPSIIVASGNIGSELSDTDISMFVSSDAGNTWRQIFEEEHSVLYLDQGGVLVAMKHTSLPIRHLWLSFDEGRSWSKYSFTSIPLFVDGVLGEPGEETLIMTVFGHFSHRSEWQLVKVDYKSIFDRRCAEEDYRPWQLHSQGEACIMGAKRIYKKRKSERKCMQGKYAGAMESEPCVCTEADFDCDYGYERHSNGQCLPAFWFNPSSLSKDCSLGQSYLNSTGYRKVVSNNCTDGVREQYTAKPQKCPGKAPRGLRIVTADGKLTAEQGHNVTLMVQLEEGDVQRTLIQVDFGDGIAVSYVNLSSMEDGIKHVYQNVGIFRVTVQVDNSLGSDSAVLYLHVTCPLEHVHLSLPFVTTKNKEVNATAVLWPSQVGTLTYVWWYGNNTEPLITLEGSISFRFTSEGMNTITVQVSAGNAILQDTKTIAVYEEFRSLRLSFSPNLDDYNPDIPEWRRDIGRVIKKSLVEATGVPGQHILVAVLPGLPTTAELFVLPYQDPAGENKRSTDDLEQISELLIHTLNQNSVHFELKPGVRVLVHAAHLTAAPLVDLTPTHSGSAMLMLLSVVFVGLAVFVIYKFKRRVALPSPPSPSTQPGDSSLRLQRARHATPPSTPKRGSAGAQYAI

SEQ ID NO: 82449 - protein, 937 aa, Homo sapiens
  Payload ID: 16406
  Gene Symbol: SORCS1
  Gene Name: sortilin-related VPS10 domain containing receptor 1
  ENSP ID: ENSP00000478065
IMLLTDPEIESSLLISSDEGATYQKYRLNFYIQSLLFHPKQEDWILAYSQDQKLYSSAEFGRRWQLIQEGVVPNRFYWSVMGSNKEPDLVHLEARTVDGHSHYLTCRMQNCTEANRNQPFPGYIDPDSLIVQDHYVFVQLTSGGRPHYYVSYRRNAFAQMKLPKYALPKDMHVISTDENQVFAAVQEWNQNDTYNLYISDTRGVYFTLALENVQSSRGPEGNIMIDLYEVAGIKGMFLANKKIDNQVKTFITYNKGRDWRLLQAPDTDLRGDPVHCLLPYCSLHLHLKVSENPYTSGIIASKDTAPSIIVASGNIGSELSDTDISMFVSSDAGNTWRQIFEEEHSVLYLDQGGVLVAMKHTSLPIRHLWLSFDEGRSWSKYSFTSIPLFVDGVLGEPGEETLIMTVFGHFSHRSEWQLVKVDYKSIFDRRCAEEDYRPWQLHSQGEACIMGAKRIYKKRKSERKCMQGKYAGAMESEPCVCTEADFDCDYGYERHSNGQCLPAFWFNPSSLSKDCSLGQSYLNSTGYRKVVSNNCTDGVREQYTAKPQKCPGKAPRGLRIVTADGKLTAEQGHNVTLMVQLEEGDVQRTLIQVDFGDGIAVSYVNLSSMEDGIKHVYQNVGIFRVTVQVDNSLGSDSAVLYLHVTCPLEHVHLSLPFVTTKNKEVNATAVLWPSQVGTLTYVWWYGNNTEPLITLEGSISFRFTSEGMNTITVQVSAGNAILQDTKTIAVYEEFRSLRLSFSPNLDDYNPDIPEWRRDIGRVIKKSLVEATGVPGQHILVAVLPGLPTTAELFVLPYQDPAGENKRSTDDLEQISELLIHTLNQNSVHFELKPGVRVLVHAAHLTAAPLVDLTPTHSGSAMLMLLSVVFVGLAVFVIYKFKRKIPGINVYAQMQNEKEQEMISPVSHSESRPNVPQTELRRPGQLIDEKVESQLIGE

SEQ ID NO: 82450 - protein, 987 aa, Homo sapiens
  Payload ID: 16407
  Gene Symbol: SORCS2
  Gene Name: sortilin-related VPS10 domain containing receptor 2
  ENSP ID: ENSP00000329124
MGKVLESSLWRSSDFGTSYTKLTLQPGVTTVIDNFYICPTNKRKVILVSSSLSDRDQSLFLSADEGATFQKQPIPFFVETLIFHPKEEDKVLAYTKESKLYVSSDLGKKWTLLQERVTKDHVFWSVSGVDADPDLVHVEAQDLGGDFRYVTCAIHNCSEKMLTAPFAGPIDHGSLTVQDDYIFFKATSANQTKYYVSYRRNEFVLMKLPKYALPKDLQIISTDESQVFVAVQEWYQMDTYNLYQSDPRGVRYALVLQDVRSSRQAEESVLIDILEVRGVKGVFLANQKIDGKVMTLITYNKGRDWDYLRPPSMDMNGKPTNCKPPDCHLHLHLRWADNPYVSGTVHTKDTAPGLIMGAGNLGSQLVEYKEEMYITSDCGHTWRQVFEEEHHILYLDHGGVIVAIKDTSIPLKILKFSVDEGLTWSTHNFTSTSVFVDGLLSEPGDETLVMTVFGHISFRSDWELVKVDFRPSFSRQCGEEDYSSWELSNLQGDRCIMGQQRSFRKRKSTSWCIKGRSFTSALTSRVCECRDSDFLCDYGFERSSSSESSTNKCSANFWFNPLSPPDDCALGQTYTSSLGYRKVVSNVCEGGVDMQQSQVQLQCPLTPPRGLQVSIQGEAVAVRPGEDVLFVVRQEQGDVLTTKYQVDLGDGFKAMYVNLTLTGEPIRHRYESPGIYRVSVRAENTAGHDEAVLFVQVNSPLQALYLEVVPVIGLNQEVNLTAVLLPLNPNLTVFYWWIGHSLQPLLSLDNSVTTRFSDTGDVRVTVQAACGNSVLQDSRVLRVLDQFQVMPLQFSKELDAYNPNTPEWREDVGLVVTRLLSKETSVPQELLVTVVKPGLPTLADLYVLLPPPRPTRKRSLSSDKRLAAIQQVLNAQKISFLLRGGVRVLVALRDTGTGAEQLGGGGGYWAVVVLFVIGLFAAGAFILYNFIRKRPGRTVYAQMHNEKEQEMTSPVSHSEDVQGAVQGNHSGVVLSINSREMHSYLVS

SEQ ID NO: 82451 - protein, 1159 aa, Homo sapiens
  Payload ID: 16407
  Gene Symbol: SORCS2
  Gene Name: sortilin-related VPS10 domain containing receptor 2
  Uniprot ID: Q96PQ0
  ENSP ID: ENSP00000422185
MAHRGPSRASKGPGPTARAPSPGAPPPPRSPRSRPLLLLLLLLGACGAAGRSPEPGRLGPHAQLTRVPRSPPAGRAEPGGGEDRQARGTEPGAPGPSPGPAPGPGEDGAPAAGYRRWERAAPLAGVASRAQVSLISTSFVLKGDATHNQAMVHWTGENSSVILILTKYYHADMGKVLESSLWRSSDFGTSYTKLTLQPGVTTVIDNFYICPTNKRKVILVSSSLSDRDQSLFLSADEGATFQKQPIPFFVETLIFHPKEEDKVLAYTKESKLYVSSDLGKKWTLLQERVTKDHVFWSVSGVDADPDLVHVEAQDLGGDFRYVTCAIHNCSEKMLTAPFAGPIDHGSLTVQDDYIFFKATSANQTKYYVSYRRNEFVLMKLPKYALPKDLQIISTDESQVFVAVQEWYQMDTYNLYQSDPRGVRYALVLQDVRSSRQAEESVLIDILEVRGVKGVFLANQKIDGKVMTLITYNKGRDWDYLRPPSMDMNGKPTNCKPPDCHLHLHLRWADNPYVSGTVHTKDTAPGLIMGAGNLGSQLVEYKEEMYITSDCGHTWRQVFEEEHHILYLDHGGVIVAIKDTSIPLKILKFSVDEGLTWSTHNFTSTSVFVDGLLSEPGDETLVMTVFGHISFRSDWELVKVDFRPSFSRQCGEEDYSSWELSNLQGDRCIMGQQRSFRKRKSTSWCIKGRSFTSALTSRVCECRDSDFLCDYGFERSSSSESSTNKCSANFWFNPLSPPDDCALGQTYTSSLGYRKVVSNVCEGGVDMQQSQVQLQCPLTPPRGLQVSIQGEAVAVRPGEDVLFVVRQEQGDVLTTKYQVDLGDGFKAMYVNLTLTGEPIRHRYESPGIYRVSVRAENTAGHDEAVLFVQVNSPLQALYLEVVPVIGLNQEVNLTAVLLPLNPNLTVFYWWIGHSLQPLLSLDNSVTTRFSDTGDVRVTVQAACGNSVLQDSRVLRVLDQFQVMPLQFSKELDAYNPNTPEWREDVGLVVTRLLSKETSVPQELLVTVVKPGLPTLADLYVLLPPPRPTRKRSLSSDKRLAAIQQVLNAQKISFLLRGGVRVLVALRDTGTGAEQLGGGGGYWAVVVLFVIGLFAAGAFILYKFKRKRPGRTVYAQMHNEKEQEMTSPVSHSEDVQGAVQGNHSGVVLSINSREMHSYLVS

SEQ ID NO: 82452 - protein, 101 aa, Homo sapiens
  Payload ID: 16407
  Gene Symbol: SORCS2
  Gene Name: sortilin-related VPS10 domain containing receptor 2
  ENSP ID: ENSP00000424194
QLGGGGGYWAVVVLFVIGLFAAGAFILYKFKRKRPGRTVYAQMHNEKEQEMTSPVSHSEDVQGAVQGEEFIDDDLDSQTLGNHSGVVLSINSREMHSYLVS

SEQ ID NO: 82453 - protein, 1222 aa, Homo sapiens
  Payload ID: 16408
  Gene Symbol: SORCS3
  Gene Name: sortilin-related VPS10 domain containing receptor 3
  Uniprot ID: Q9UPU3
  ENSP ID: ENSP00000358713
MEAARTERPAGRPGAPLVRTGLLLLSTWVLAGAEITWDATGGPGRPAAPASRPPALSPLSPRAVASQWPEELASARRAAVLGRRAGPELLPQQGGGRGGEMQVEAGGTSPAGERRGRGIPAPAKLGGARRSRRAQPPITQERGDAWATAPADGSRGSRPLAKGSREEVKAPRAGGSAAEDLRLPSTSFALTGDSAHNQAMVHWSGHNSSVILILTKLYDFNLGSVTESSLWRSTDYGTTYEKLNDKVGLKTVLSYLYVNPTNKRKIMLLSDPEMESSILISSDEGATYQKYRLTFYIQSLLFHPKQEDWVLAYSLDQKLYSSMDFGRRWQLMHERITPNRFYWSVAGLDKEADLVHMEVRTTDGYAHYLTCRIQECAETTRSGPFARSIDISSLVVQDEYIFIQVTTSGRASYYVSYRREAFAQIKLPKYSLPKDMHIISTDENQVFAAVQEWNQNDTYNLYISDTRGIYFTLAMENIKSSRGLMGNIIIELYEVAGIKGIFLANKKVDDQVKTYITYNKGRDWRLLQAPDVDLRGSPVHCLLPFCSLHLHLQLSENPYSSGRISSKETAPGLVVATGNIGPELSYTDIGVFISSDGGNTWRQIFDEEYNVWFLDWGGALVAMKHTPLPVRHLWVSFDEGHSWDKYGFTSVPLFVDGALVEAGMETHIMTVFGHFSLRSEWQLVKVDYKSIFSRHCTKEDYQTWHLLNQGEPCVMGERKIFKKRKPGAQCALGRDHSGSVVSEPCVCANWDFECDYGYERHGESQCVPAFWYNPASPSKDCSLGQSYLNSTGYRRIVSNNCTDGLREKYTAKAQMCPGKAPRGLHVVTTDGRLVAEQGHNATFIILMEEGDLQRTNIQLDFGDGIAVSYANFSPIEDGIKHVYKSAGIFQVTAYAENNLGSDTAVLFLHVVCPVEHVHLRVPFVAIRNKEVNISAVVWPSQLGTLTYFWWFGNSTKPLITLDSSISFTFLAEGTDTITVQVAAGNALIQDTKEIAVHEYFQSQLLSFSPNLDYHNPDIPEWRKDIGNVIKRALVKVTSVPEDQILIAVFPGLPTSAELFILPPKNLTERRKGNEGDLEQIVETLFNALNQNLVQFELKPGVQVIVYVTQLTLAPLVDSSAGHSSSAMLMLLSVVFVGLAVFLIYKFKRKIPWINIYAQVQHDKEQEMIGSVSQSENAPKITLSDFTEPEELLDKELDTRVIGGIATIANSESTKEIPNCTSV

SEQ ID NO: 82454 - protein, 1222 aa, Homo sapiens; identical to SEQ ID NO: 82453
  Payload ID: 16408
  Gene Symbol: SORCS3
  Gene Name: sortilin-related VPS10 domain containing receptor 3
  Uniprot ID: Q9UPU3
  ENSP ID: ENSP00000358715

SEQ ID NO: 82455 - protein, 152 aa, Homo sapiens
  Payload ID: 16408
  Gene Symbol: SORCS3
  Gene Name: sortilin-related VPS10 domain containing receptor 3
  ENSP ID: ENSP00000376876
ENPYSSGRISSKETAPGLVVATGNIGPELSYTDIGVFISSDGGNTWRQIFDEEYNVWFLDWGGALVAMKHTPLPVRHLWVSFDEGHSWDKYGFTSVPLFVDGALVEAGMETHIMTDYGYERHGESQCVPAFWYNPASPSKDCSLGQSYLNST

SEQ ID NO: 82456 - protein, 557 aa, Homo sapiens
  Payload ID: 16409
  Gene Symbol: SNX1
  Gene Name: sorting nexin 1
  Uniprot ID: Q13596
  ENSP ID: ENSP00000261889
MASGGGGCSASERLPPPFPGLEPESEGAAGGSEPEAGDSDTEGEDIFTGAAVVSKHQSPKITTSLLPINNGSKENGIHEEQDQEPQDLFADATVELSLDSTQNNQKKVLAKTLISLPPQEATNSSKPQPTYEELEEEEQEDQFDLTVGITDPEKIGDGMNAYVAYKVTTQTSLPLFRSKQFAVKRRFSDFLGLYEKLSEKHSQNGFIVPPPPEKSLIGMTKVKVGKEDSSSAEFLEKRRAALERYLQRIVNHPTMLQDPDVREFLEKEELPRAVGTQTLSGAGLLKMFNKATDAVSKMTIKMNESDIWFEEKLQEVECEEQRLRKLHAVVETLVNHRKELALNTAQFAKSLAMLGSSEDNTALSRALSQLAEVEEKIEQLHQEQANNDFFLLAELLSDYIRLLAIVRAAFDQRMKTWQRWQDAQATLQKKREAEARLLWANKPDKLQQAKDEILEWESRVTQYERDFERISTVVRKEVIRFEKEKSKDFKNHVIKYLETLLYSQQQAGEQLGIRSGILLTKKLPRYSKFFSTVHKFCAAASLWKWGFFLSAYLSYLF

SEQ ID NO: 82457 - protein, 102 aa, Homo sapiens
  Payload ID: 16409
  Gene Symbol: SNX1
  Gene Name: sorting nexin 1
  ENSP ID: ENSP00000369638
MASGGGGCSASERLPPPFPGLEPESEGAAGGSEPEAGDSDTEGEDIFTGAAVVSKHQSPKITTSLLPINNGSKENGIHEEQDQEPQDLFAGSHKFFEAPANL

SEQ ID NO: 82458 - protein, 304 aa, Homo sapiens
  Payload ID: 16409
  Gene Symbol: SNX1
  Gene Name: sorting nexin 1
  ENSP ID: ENSP00000452651
MTKVKVGKEDSSSAEFLEKRRAALERYLQRIVNHPTMLQDPDVREFLEKEELPRAVGTQTLSGAGLLKMFNKATDAVSKMTIKMNESDIWFEEKLQEVECEEQRLRKLHAVVETLVNHRKELALNTAQFAKSLAMLGSSEDNTALSRALSQLAEVEEKIEQLHQEQANNDFFLLAELLSDYIRLLAIVRAAFDQRMKTWQRWQDAQATLQKKREAEARLLWANKPDKLQQAKDEILEWESRVTQYERDFERISTVVRKEVIRFEKEKSKDFKNHVIKYLETLLYSQQQLAKYWEAFLPEAKAIS

SEQ ID NO: 82459 - protein, 19 aa, Homo sapiens
  Payload ID: 16409
  Gene Symbol: SNX1
  Gene Name: sorting nexin 1
  ENSP ID: ENSP00000452652
MNAYVAYKVTTQTSLPLFR

SEQ ID NO: 82460 - protein, 128 aa, Homo sapiens
  Payload ID: 16409
  Gene Symbol: SNX1
  Gene Name: sorting nexin 1
  ENSP ID: ENSP00000452668
GGGCSASERLPPPFPGLEPESEGAAGGSEPEAGDSDTEGEDIFTGAAVVSKHQSPKITTSLLPINNGSKENGIHEEQDQEPQDLFADATVELSLDSTQNNQKKCWDYRREPPHPALSCFLKDLKASTQ

SEQ ID NO: 82461 - protein, 107 aa, Homo sapiens
  Payload ID: 16409
  Gene Symbol: SNX1
  Gene Name: sorting nexin 1
  ENSP ID: ENSP00000452759
MASGGGGCSASERLPPPFPGLEPESEGAAGGSEPEAGDSDTEGEDIFTGAAVVSKHQSPKITTSLLPINNGSKENGIHEEQDQEPQDLFADKLTIVQKQTVCSKKKI

SEQ ID NO: 82462 - protein, 111 aa, Homo sapiens
  Payload ID: 16409
  Gene Symbol: SNX1
  Gene Name: sorting nexin 1
  ENSP ID: ENSP00000452852
  MOD_RES (1)..(1): Any amino acid
XGCSASERLPPPFPGLEPESEGAAGGSEPEAGDSDTEGEDIFTGAAVVSKHQSPKITTSLLPINNGSKENGIHEEQDQEPQDLFAGSHSVAQAGVQWCGHGSLQPRPPRLK

SEQ ID NO: 82463 - protein, 70 aa, Homo sapiens
  Payload ID: 16409
  Gene Symbol: SNX1
  Gene Name: sorting nexin 1
  ENSP ID: ENSP00000452931
WESRVTQYERDFERISTVVRKEVIRFEKEKSKDFKNHVIKYLETLLYSQQQAGEQLGIRSGILLTKKLPR

SEQ ID NO: 82464 - protein, 457 aa, Homo sapiens
  Payload ID: 16409
  Gene Symbol: SNX1
  Gene Name: sorting nexin 1
  Uniprot ID: Q13596
  ENSP ID: ENSP00000453567
MASGGGGCSASERLPPPFPGLEPESEGAAGGSEPEAGDSDTEGEDIFTGAAVVSKHQSPKITTSLLPINNGSKENGIHEEQDQEPQDLFAGDGMNAYVAYKVTTQTSLPLFRSKQFAVKRRFSDFLGLYEKLSEKHSQNGFIVPPPPEKSLIGMTKVKVGKEDSSSAEFLEKRRAALERYLQRIVNHPTMLQDPDVREFLEKEELPRAVGTQTLSGAGLLKMFNKATDAVSKMTIKMNESDIWFEEKLQEVECEEQRLRKLHAVVETLVNHRKELALNTAQFAKSLAMLGSSEDNTALSRALSQLAEVEEKIEQLHQEQANNDFFLLAELLSDYIRLLAIVRAAFDQRMKTWQRWQDAQATLQKKREAEARLLWANKPDKLQQAKDEILEWESRVTQYERDFERISTVVRKEVIRFEKEKSKDFKNHVIKYLETLLYSQQQLAKYWEAFLPEAKAIS

SEQ ID NO: 82465 - protein, 522 aa, Homo sapiens
  Payload ID: 16409
  Gene Symbol: SNX1
  Gene Name: sorting nexin 1
  Uniprot ID: Q13596
  ENSP ID: ENSP00000453785
MASGGGGCSASERLPPPFPGLEPESEGAAGGSEPEAGDSDTEGEDIFTGAAVVSKHQSPKITTSLLPINNGSKENGIHEEQDQEPQDLFADATVELSLDSTQNNQKKVLAKTLISLPPQEATNSSKPQPTYEELEEEEQEDQFDLTVGITDPEKIGDGMNAYVAYKVTTQTSLPLFRSKQFAVKRRFSDFLGLYEKLSEKHSQNGFIVPPPPEKSLIGMTKVKVGKEDSSSAEFLEKRRAALERYLQRIVNHPTMLQDPDVREFLEKEELPRAVGTQTLSGAGLLKMFNKATDAVSKMTIKMNESDIWFEEKLQEVECEEQRLRKLHAVVETLVNHRKELALNTAQFAKSLAMLGSSEDNTALSRALSQLAEVEEKIEQLHQEQANNDFFLLAELLSDYIRLLAIVRAAFDQRMKTWQRWQDAQATLQKKREAEARLLWANKPDKLQQAKDEILEWESRVTQYERDFERISTVVRKEVIRFEKEKSKDFKNHVIKYLETLLYSQQQLAKYWEAFLPEAKAIS

SEQ ID NO: 82466 - protein, 107 aa, Homo sapiens; identical to SEQ ID NO: 82461
  Payload ID: 16409
  Gene Symbol: SNX1
  Gene Name: sorting nexin 1
  ENSP ID: ENSP00000486714

SEQ ID NO: 82467 - protein, 201 aa, Homo sapiens
  Payload ID: 16410
  Gene Symbol: SNX10
  Gene Name: sorting nexin 10
  Uniprot ID: Q9Y5X0
  ENSP ID: ENSP00000343709
MFPEQQKEEFVSVWVRDPRIQKEDFWHSYIDYEICIHTNSMCFTMKTSCVRRRYREFVWLRQRLQSNALLVQLPELPSKNLFFNMNNRQHVDQRRQGLEDFLRKVLQNALLLSDSSLHLFLQSHLNSEDIEACVSGQTKYSVEEAIHKFALMNRRFPEEDEEGKKENDIDYDSESSSSGLGHSSDDSSSHGCKVNTAPQES

SEQ ID NO: 82468 - protein, 201 aa, Homo sapiens; identical to SEQ ID NO: 82467
  Payload ID: 16410
  Gene Symbol: SNX10
  Gene Name: sorting nexin 10
  Uniprot ID: Q9Y5X0
  ENSP ID: ENSP00000379661

SEQ ID NO: 82469 - protein, 117 aa, Homo sapiens
  Payload ID: 16410
  Gene Symbol: SNX10
  Gene Name: sorting nexin 10
  Uniprot ID: Q9Y5X0
  ENSP ID: ENSP00000386540
MNNRQHVDQRRQGLEDFLRKVLQNALLLSDSSLHLFLQSHLNSEDIEACVSGQTKYSVEEAIHKFALMNRRFPEEDEEGKKENDIDYDSESSSSGLGHSSDDSSSHGCKVNTAPQES

SEQ ID NO: 82470 - protein, 161 aa, Homo sapiens
  Payload ID: 16410
  Gene Symbol: SNX10
  Gene Name: sorting nexin 10
  ENSP ID: ENSP00000387274
MCFTMKTSCVRRRYREFVWLRQRLQSNALLVQLPELPSKNLFFNMNNRQHVDQRRQGLEDFLRKVLQNALLLSDSSLHLFLQSHLNSEDIEACVSGQTKYSVEEAIHKFALMNRRFPEEDEEGKKENDIDYDSESSSSGLGHSSDDSSSHGCKVNTAPQES

SEQ ID NO: 82471 - protein, 53 aa, Homo sapiens
  Payload ID: 16410
  Gene Symbol: SNX10
  Gene Name: sorting nexin 10
  ENSP ID: ENSP00000393690
MILMEGIGCMRHSSLTRQPKLPYRSLASARGGLQEFVSVWVRDPRIQKEDFWH

SEQ ID NO: 82472 - protein, 201 aa, Homo sapiens; identical to SEQ ID NO: 82467
  Payload ID: 16410
  Gene Symbol: SNX10
  Gene Name: sorting nexin 10
  Uniprot ID: Q9Y5X0
  ENSP ID: ENSP00000395474

SEQ ID NO: 82473 - protein, 197 aa, Homo sapiens
  Payload ID: 16410
  Gene Symbol: SNX10
  Gene Name: sorting nexin 10
  ENSP ID: ENSP00000408164
MILMEGIGCMRHSSLTRQPKLPYRSLASARGGLQEFVSVWVRDPRIQKEDFWHSYIDYEICIHTNSMCFTMKTSCVRRRYREFVWLRQRLQSNALLVQLPELPSKNLFFNMNNRQHVDQRRQGLEDFLRKVLQNALLLSDSSLHLFLQSHLNSEDIEACVSGQTKYSVEEAIHKFALMNRRFPEEDEEGKKENDIDY

SEQ ID NO: 82474 - protein, 201 aa, Homo sapiens [sequence omitted]

SEQ ID NO: 82475 - protein, 270 aa, Homo sapiens
  Payload ID: 16411
  Gene Symbol: SNX11
  Gene Name: sorting nexin 11
  Uniprot ID: Q9Y5W9
  ENSP ID: ENSP00000352175
MGFWCRMSENQEQEEVITVRVQDPRVQNEGSWNSYVDYKIFLHTNSKAFTAKTSCVRRRYREFVWLRKQLQRNAGLVPVPELPGKSTFFGTSDEFIEKRRQGLQHFLEKVLQSVVLLSDSQLHLFLQSQLSVPEIEACVQGRSTMTVSDAILRYAMSNCGWAQEERQSSSHLAKGDQPKSCCFLPRSGRRSSPSPPPSEEKDHLEVWAPVVDSEVPSLESPTLPPLSSPLCCDFGRPKEGTSTLQSVRRAVGGDHAVPLDPGQLETVLEK

SEQ ID NO: 82476 - protein, 270 aa, Homo sapiens; identical to SEQ ID NO: 82475
  Payload ID: 16411
  Gene Symbol: SNX11
  Gene Name: sorting nexin 11
  Uniprot ID: Q9Y5W9
  ENSP ID: ENSP00000377059

SEQ ID NO: 82477 - protein, 126 aa, Homo sapiens
  Payload ID: 16411
  Gene Symbol: SNX11
  Gene Name: sorting nexin 11
  ENSP ID: ENSP00000396790
MTVSDAILRYAMSNCGWAQEERQSSSHLAKGDQPKSCCFLPRSGRRSSPSPPPSEEKDHLEVWAPVVDSEVPSLESPTLPPLSSPLCCDFGRPKEGTSTLQSVRRAVGGDHAVPLDPGQLETVLEK

SEQ ID NO: 82478 - protein, 262 aa, Homo sapiens
  Payload ID: 16411
  Gene Symbol: SNX11
  Gene Name: sorting nexin 11
  Uniprot ID: Q9Y5W9
  ENSP ID: ENSP00000462188
MVCREQEVITVRVQDPRVQNEGSWNSYVDYKIFLHTNSKAFTAKTSCVRRRYREFVWLRKQLQRNAGLVPVPELPGKSTFFGTSDEFIEKRRQGLQHFLEKVLQSVVLLSDSQLHLFLQSQLSVPEIEACVQGRSTMTVSDAILRYAMSNCGWAQEERQSSSHLAKGDQPKSCCFLPRSGRRSSPSPPPSEEKDHLEVWAPVVDSEVPSLESPTLPPLSSPLCCDFGRPKEGTSTLQSVRRAVGGDHAVPLDPGQLETVLEK

SEQ ID NO: 82479 - protein, 177 aa, Homo sapiens
  Payload ID: 16411
  Gene Symbol: SNX11
  Gene Name: sorting nexin 11
  ENSP ID: ENSP00000463076
MGFWCRMSENQEQEEVITVRVQDPRVQNEGSWNSYVDYKIFLHTNSKAFTAKTSCVRRRYREFVWLRKQLQRNAGLVPVPELPGKSTFFGTSDEFIEKRRQGLQHFLEKVLQSVVLLSDSQLHLFLQSQLSVPEIEACVQGRSTMTVSDAILRYAMSNCGWAQEERQSSSHLAKGDQ

SEQ ID NO: 82480 - protein, 57 aa, Homo sapiens
  Payload ID: 16411
  Gene Symbol: SNX11
  Gene Name: sorting nexin 11
  ENSP ID: ENSP00000463250
MGFWCRMSENQEQEEVITVRVQDPRVQNEGSWNSYVDYKIFLHMEFCSCCPGWSAVV

SEQ ID NO: 82481 - protein, 254 aa, Homo sapiens
  Payload ID: 16411
  Gene Symbol: SNX11
  Gene Name: sorting nexin 11
  ENSP ID: ENSP00000463726
MGFWCRMSENQEQEEVITVRVQDPRVQNEGSWNSYVDYKIFLHTNSKAFTAKTSCVRRRYREFVWLRKQLQRNAGLVPVPELPGKSTFFGTSDEFIEKRRQGLQHFLEKVLQSVVLLSDSQLHLFLQSQLSVPEIEACVQGRSTMTVSDAILRYAMSNCGWAQEERQSSSHLAKGDQPKSCCFLPRSGRRSSPSPPPSEEKDHLEVWAPVVDSEVPSLESPTLPPLSSPLCCDFGRPKEGTSTLQSVRRAVGGD

SEQ ID NO: 82482 - protein, 262 aa, Homo sapiens; identical to SEQ ID NO: 82478
  Payload ID: 16411
  Gene Symbol: SNX11
  Gene Name: sorting nexin 11
  Uniprot ID: Q9Y5W9
  ENSP ID: ENSP00000463948

SEQ ID NO: 82483 - protein, 172 aa, Homo sapiens
  Payload ID: 16411
  Gene Symbol: SNX11
  Gene Name: sorting nexin 11
  ENSP ID: ENSP00000464136
MGFWCRMSENQEQEEVITVRVQDPRVQNEGSWNSYVDYKIFLHTNSKAFTAKTSCVRRRYREFVWLRKQLQRNAGLVPVPELPGKSTFFGTSDEFIEKRRQGLQHFLEKVLQSVVLLSDSQLHLFLQSQLSVPEIEACVQGRSTMTVSDAILRYAMSNCGWAQEERQSSSHL

SEQ ID NO: 82484 - protein, 46 aa, Homo sapiens
  Payload ID: 16411
  Gene Symbol: SNX11
  Gene Name: sorting nexin 11
  ENSP ID: ENSP00000464410
MGFWCRMSENQEQEEVITVRVQDPRVQNEGSWNSYVDYKIFLHACS

SEQ ID NO: 82485 - protein, 158 aa, Homo sapiens
  Payload ID: 16412
  Gene Symbol: SNX12
  Gene Name: sorting nexin 12
  Uniprot ID: Q9UMY4
  ENSP ID: ENSP00000276105
MSDTAVADTRRLNSKPQDLTDAYGPPSNFLEIDIFNPQTVGVGRARFTTYETNLPIFKLKESCVRRRYSDFEWLKNELERDSKIVVPPLPGKALKRQLPFRGDEGIFEESFIEERRQGLEQFINKIAGHPLAQNERCLHMFLQEEAIDRNYVPGKVRQ

SEQ ID NO: 82486 - protein, 162 aa, Homo sapiens
  Payload ID: 16412
  Gene Symbol: SNX12
  Gene Name: sorting nexin 12
  Uniprot ID: Q9UMY4
  ENSP ID: ENSP00000363392
MSDTAVADTRRLNSKPQDLTDAYGPPSNFLEIDIFNPQTVGVGRARFTTYEVRMRTNLPIFKLKESCVRRRYSDFEWLKNELERDSKIVVPPLPGKALKRQLPFRGDEGIFEESFIEERRQGLEQFINKIAGHPLAQNERCLHMFLQEEAIDRNYVPGKVRQ

SEQ ID NO: 82487 - protein, 162 aa, Homo sapiens; identical to SEQ ID NO: 82486
  Payload ID: 16412
  Gene Symbol: SNX12
  Gene Name: sorting nexin 12
  Uniprot ID: Q9UMY4
  ENSP ID: ENSP00000481314

SEQ ID NO: 82488 - protein, 172 aa, Homo sapiens
  Payload ID: 16412
  Gene Symbol: SNX12
  Gene Name: sorting nexin 12
  ENSP ID: ENSP00000483613
MSDTAVADTRRLNSKPQDLTDAYGPPSNFLEIDIFNPQTVGVGRARFTTYEVRMRTNLPIFKLKESCVRRRYSDFEWLKNELERDSKIVVPPLPGKALKRQLPFRGDEGIFEESFIEERRQGLEQFINKIAGHPLAQNERCLHMFLQEEAIDRNYVPGKSFSQCCPGWSAVA

SEQ ID NO: 82489 - protein, 189 aa, Homo sapiens
  Payload ID: 16413
  Gene Symbol: SNX13
  Gene Name: sorting nexin 13
  ENSP ID: ENSP00000386639
MLTEASLSIWGWGSLGIVLFLITFGPFVIFYLTFYILCFVGGGLVVTLLFGKTNSEKYLEQCEHSFLPPTSPGVPKCLEEMKREARTIKIDRRLTGANIIDEPLQQVIQFSLRDYVQYWYYTLSDDESFLLEIRQTLQNALIQFATRVSPCRPGWSTMAQSRLTATSASWNPVLFNKTLVSLCLLEYVI

SEQ ID NO: 82490 - protein, 154 aa, Homo sapiens
  Payload ID: 16413
  Gene Symbol: SNX13
  Gene Name: sorting nexin 13
  ENSP ID: ENSP00000387053
MLTEASLSIWGWGSLGIVLFLITFGPFVIFYLTFYILCFVGGGLVVTLLFGKTNSEKYLEQCEHSFLPPTSPGVPKCLEEMKREARTIKIDRRLTGANIIDEPLQQVIQFSLRDYVQYWYYTLSDDESFLLEIRQTLQNALIQFATRCWGYSSE

SEQ ID NO: 82491 - protein, 43 aa, Homo sapiens
  Payload ID: 16413
  Gene Symbol: SNX13
  Gene Name: sorting nexin 13
  ENSP ID: ENSP00000397768
MLTEASLSIWGWGSLGIVLFLITFGPFVIFYLTFYILCFVGGA

SEQ ID NO: 82492 - protein, 957 aa, Homo sapiens
  Payload ID: 16413
  Gene Symbol: SNX13
  Gene Name: sorting nexin 13
  Uniprot ID: Q9Y5W8
  ENSP ID: ENSP00000398789
MLTEASLSIWGWGSLGIVLFLITFGPFVIFYLTFYILCFVGGGLVVTLLFGKTNSEKYLEQCEHSFLPPTSPGVPKCLEEMKREARTIKIDRRLTGANIIDEPLQQVIQFSLRDYVQYWYYTLSDDESFLLEIRQTLQNALIQFATRSKEIDWQPYFTTRIVDDFGTHLRVFRKAQQKITEKDDQVKGTAEDLVDTFFEVEVEMEKEVCRDLVCTSPKDEEGFLRDLCEVLLYLLLPPGDFQNKIMRYFVREILARGILLPLINQLSDPDYINQYVIWMIRDSNCNYEAFMNIIKLSDNIGELEAVRDKAAEELQYLRSLDTAGDDINTIKNQINSLLFVKKVCDSRIQRLQSGKEINTVKLAANFGKLCTVPLDSILVDNVALQFFMDYMQQTGGQAHLFFWMTVEGYRVTAQQQLEVLLSRQRDGKHQTNQTKGLLRAAAVGIYEQYLSEKASPRVTVDDYLVAKLADTLNHEDPTPEIFDDIQRKVYELMLRDERFYPSFRQNALYVRMLAELDMLKDPSFRGSDDGDGESFNGSPTGSINLSLDDLSNVSSDDSVQLHAYISDTGVCNDHGKTYALYAITVHRRNLNSEEMWKTYRRYSDFHDFHMRITEQFESLSSILKLPGKKTFNNMDRDFLEKRKKDLNAYLQLLLAPEMMKASPALAHYVYDFLENKAYSKGKGDFARKMDTFVNPLRNSMRNVSNAVKSLPDSLAEGMTKMSDNMGKMSERLGQDIKQSFFKVPPLIPKTDSDPEHRRVSAQLDDNVDDNIPLRVMLLLMDEVFDLKERNQWLRRNIKNLLQQLIRATYGDTINRKIVDHVDWMTSPEQVADSVKRFRDAFWPNGILAEAVPCRDKSIRMRTRVAGKTKLLAIMPDELKHIIGAETTRKGILRVFEMFQHNQLNRRMVYVFLEGFLETLFPQYKFRELFNKLHSRSKQMQKYKQKLQTTQAPSLQKR

SEQ ID NO: 82493 - protein, 888 aa, Homo sapiens
  Payload ID: 16413
  Gene Symbol: SNX13
  Gene Name: sorting nexin 13
  ENSP ID: ENSP00000479044
MLTEASLSIWGWGSLGIVLFLITFGPFVIFYLTFYILCFVGGGLVVTLLFGKTNSEKYLEQCEHSFLPPTSPGVPKCLEEMKREARTIKIDRRLTGANIIDEPLQQVIQFSLRDYVQYWYYTLSDDESFLLEIRQTLQNALIQFATRSKEIDWQPYFTTRIVDDFGTHLRVFRKAQQKITEKDDQVKGTAEDLVDTFFEVEVEMEKEVCRDLVCTSPKDEEGFLRDLCEVLLYLLLPPGDFQNKIMRYFVREILARGILLPLINQLSDPDYINQYVIWMIRDSNCNYEAFMNIIKLSDNIGELEAVRDKAAEELQYLRSLDTAGDDINTIKNQINSLLFVKKVCDSRIQRLQSGKEINTVKLAANFGKLCTVPLDSILVDNVALQFFMDYMQQTGGQAHLFFWMTVEGYRVTAQQQLEVLLSRQRDGKHQTNQTKGLLRAAAVGIYEQYLSEKASPRVTVDDYLVAKLADTLNHEDPTPEIFDDIQRKVYELMLRDERFYPSFRQNALYVRMLAELDMLKDPSFRGSDDGDGESFNGSPTGSINLSLDDLSNVSSDDSVQLHAYISDTVYADYDPYAVAGVCNDHGKTYALYAITVHRRNLNSEEMWKTYRRYSDFHDFHMRITEQFESLSSILKLPGKKTFNNMDRDFLEKRKKDLNAYLQLLLAPEMMKASPALAHYVYDFLENKAYSKGKGDFARKMDTFVNPLRNSMRNVSNAVKSLPDSLAEGMTKMSDNMGKMSERLGQDIKQSFFKVPPLIPKTDSDPEHRRVSAQLDDNVDDNIPLRVMLLLMDEVFDLKERNQWLRRNIKNLLQQLIRATYGDTINRKIVDHVDWMTSPEQVADSVKRFRDAFWPNGILAEAVPCRDKSIRMRTRVAGKTKLLAIMPGE

SEQ ID NO: 82494 - protein, 893 aa, Homo sapiens
  Payload ID: 16414
  Gene Symbol: SNX14
  Gene Name: sorting nexin 14
  Uniprot ID: Q9Y5W7
  ENSP ID: ENSP00000257769
MVPWVRTMGQKLKQRLRLDVGREICRQYPLFCFLLLCLSAASLLLNRYIHILMIFWSFVAGVVTFYCSLGPDSLLPNIFFTIKYKPKQLGLQELFPQGHSCAVCGKVKCKRHRPSLLLENYQPWLDLKISSKVDASLSEVDIPSIITKKLLKAAMKHIEVIVKARQKVKNTEFLQQAALEEYGPELHVALRSRRDELHYLRKLTELLFPYILPPKATDCRSLTLLIREILSGSVFLPSLDFLADPDTVNHLLIIFIDDSPPEKATEPASPLVPFLQKFAEPRNKKPSVLKLELKQIREQQDLLFRFMNFLKQEGAVHVLQFCLTVEEFNDRILRPELSNDEMLSLHEELQKIYKTYCLDESIDKIRFDPFIVEEIQRIAEGPYIDVVKLQTMRCLFEAYEHVLSLLENVFTPMFCHSDEYFRQLLRGAESPTRNSKLNRNTQKRGESFGISRIGSKIKGVFKSTTMEGAMLPNYGVAEGEDDFIEEGIVVMEDDSPVEAVSTPNTPRNLAAWKISIPYVDFFEDPSSERKEKKERIPVFCIDVERNDRRAVGHEPEHWSVYRRYLEFYVLESKLTEFHGAFPDAQLPSKRIIGPKNYEFLKSKREEFQEYLQKLLQHPELSNSQLLADFLSPNGGETQFLDKILPDVNLGKIIKSVPGKLMKEKGQHLEPFIMNFINSCESPKPKPSRPELTILSPTSENNKKLFNDLFKNNANRAENTERKQNQNYFMEVMTVEGVYDYLMYVGRVVFQVPDWLHHLLMGTRILFKNTLEMYTDYYLQCKLEQLFQEHRLVSLITLLRDAIFCENTEPRSLQDKQKGAKQTFEEMMNYIPDLLVKCIGEETKYESIRLLFDGLQQPVLNKQLTYVLLDIVIQELFPELNKVQKEVTSVTSWM

SEQ ID NO: 82495 - protein, 946 aa, Homo sapiens
  Payload ID: 16414
  Gene Symbol: SNX14
  Gene Name: sorting nexin 14
  Uniprot ID: Q9Y5W7
  ENSP ID: ENSP00000313121
MVPWVRTMGQKLKQRLRLDVGREICRQYPLFCFLLLCLSAASLLLNRYIHILMIFWSFVAGVVTFYCSLGPDSLLPNIFFTIKYKPKQLGLQELFPQGHSCAVCGKVKCKRHRPSLLLENYQPWLDLKISSKVDASLSEVLELVLENFVYPWYRDVTDDESFVDELRITLRFFASVLIRRIHKVDIPSIITKKLLKAAMKHIEVIVKARQKVKNTEFLQQAALEEYGPELHVALRSRRDELHYLRKLTELLFPYILPPKATDCRSLTLLIREILSGSVFLPSLDFLADPDTVNHLLIIFIDDSPPEKATEPASPLVPFLQKFAEPRNKKPSVLKLELKQIREQQDLLFRFMNFLKQEGAVHVLQFCLTVEEFNDRILRPELSNDEMLSLHEELQKIYKTYCLDESIDKIRFDPFIVEEIQRIAEGPYIDVVKLQTMRCLFEAYEHVLSLLENVFTPMFCHSDEYFRQLLRGAESPTRNSKLNRGSLSLDDFRNTQKRGESFGISRIGSKIKGVFKSTTMEGAMLPNYGVAEGEDDFIEEGIVVMEDDSPVEAVSTPNTPRNLAAWKISIPYVDFFEDPSSERKEKKERIPVFCIDVERNDRRAVGHEPEHWSVYRRYLEFYVLESKLTEFHGAFPDAQLPSKRIIGPKNYEFLKSKREEFQEYLQKLLQHPELSNSQLLADFLSPNGGETQFLDKILPDVNLGKIIKSVPGKLMKEKGQHLEPFIMNFINSCESPKPKPSRPELTILSPTSENNKKLFNDLFKNNANRAENTERKQNQNYFMEVMTVEGVYDYLMYVGRVVFQVPDWLHHLLMGTRILFKNTLEMYTDYYLQCKLEQLFQEHRLVSLITLLRDAIFCENTEPRSLQDKQKGAKQTFEEMMNYIPDLLVKCIGEETKYESIRLLFDGLQQPVLNKQLTYVLLDIVIQELFPELNKVQKEVTSVTSWM

SEQ ID NO: 82496 - protein, 937 aa, Homo sapiens
  Payload ID: 16414
  Gene Symbol: SNX14
  Gene Name: sorting nexin 14
  Uniprot ID: Q9Y5W7
  ENSP ID: ENSP00000358641
MVPWVRTMGQKLKQRLRLDVGREICRQYPLFCFLLLCLSAASLLLNRYIHILMIFWSFVAGVVTFYCSLGPDSLLPNIFFTIKYKPKQLGLQELFPQGHSCAVCGKVKCKRHRPSLLLENYQPWLDLKISSKVDASLSEVLELVLENFVYPWYRDVTDDESFVDELRITLRFFASVLIRRIHKVDIPSIITKKLLKAAMKHIEVIVKARQKVKNTEFLQQAALEEYGPELHVALRSRRDELHYLRKLTELLFPYILPPKATDCRSLTLLIREILSGSVFLPSLDFLADPDTVNHLLIIFIDDSPPEKATEPASPLVPFLQKFAEPRNKKPSVLKLELKQIREQQDLLFRFMNFLKQEGAVHVLQFCLTVEEFNDRILRPELSNDEMLSLHEELQKIYKTYCLDESIDKIRFDPFIVEEIQRIAEGPYIDVVKLQTMRCLFEAYEHVLSLLENVFTPMFCHSDEYFRQLLRGAESPTRNSKLNRNTQKRGESFGISRIGSKIKGVFKSTTMEGAMLPNYGVAEGEDDFIEEGIVVMEDDSPVEAVSTPNTPRNLAAWKISIPYVDFFEDPSSERKEKKERIPVFCIDVERNDRRAVGHEPEHWSVYRRYLEFYVLESKLTEFHGAFPDAQLPSKRIIGPKNYEFLKSKREEFQEYLQKLLQHPELSNSQLLADFLSPNGGETQFLDKILPDVNLGKIIKSVPGKLMKEKGQHLEPFIMNFINSCESPKPKPSRPELTILSPTSENNKKLFNDLFKNNANRAENTERKQNQNYFMEVMTVEGVYDYLMYVGRVVFQVPDWLHHLLMGTRILFKNTLEMYTDYYLQCKLEQLFQEHRLVSLITLLRDAIFCENTEPRSLQDKQKGAKQTFEEMMNYIPDLLVKCIGEETKYESIRLLFDGLQQPVLNKQLTYVLLDIVIQELFPELNKVQKEVTSVTSWM

SEQ ID NO: 82497 - protein, 183 aa, Homo sapiens
  Payload ID: 16414
  Gene Symbol: SNX14
  Gene Name: sorting nexin 14
  ENSP ID: ENSP00000358649
MVPWVRTMGQKLKQRLRLDVGREICRQYPLFCFLLLCLSAASLLLNRYIHILMIFWSFVAGVVTFYCSLGPDSLLPNIFFTIKYKPKQLGLQELFPQGHSCAVCGKVKCKRHRPSLLLENYQPWLDLKISSKVDASLSEVLELVLENFVYPWYRDVTDDESFVDELRITLRFFASVLIRRIHK

SEQ ID NO: 82498 - protein, 212 aa, Homo sapiens
  Payload ID: 16414
  Gene Symbol: SNX14
  Gene Name: sorting nexin 14
  ENSP ID: ENSP00000391981
DAQLPSKRIIGPKNYEFLKSKREEFQEYLQKLLQHPELSNSQLLADFLSPNGGETQFLDKILPDVNLGKIIKSVPGKLMKEKGQHLEPFIMNFINSCESPKPKPSRPELTILSPTSENNKKLFNDLFKNNANRAENTERKQNQNYFMEVMTVEGVYDYLMYVDAIFCENTEPRSLQDKQKGAKQTFEEMMNYIPDLLVKCIGEETKYESIRL

SEQ ID NO: 82499 - protein, 665 aa, Homo sapiens
  Payload ID: 16414
  Gene Symbol: SNX14
  Gene Name: sorting nexin 14
  ENSP ID: ENSP00000420938
MVPWVRTMGQKLKQRLRLDVGREICRQYPLFCFLLLCLSAASLLLNRYIHILMIFWSFVAGVVTFYCSLGPDSLLPNIFFTIKYKPKQLGLQELFPQGHSCAVCGKVKCKRHRPSLLLENYQPWLDLKISSKVDASLSEVLELVLENFVYPWYRDVTDDESFVDELRITLRFFASVLIRRIHKVDIPSIITKKLLKAAMKHIEVIVKARQKVKNTEFLQQAALEEYGPELHVALRSRRDELHYLRKLTELLFPYILPPKATDCRSLTLLIREILSGSVFLPSLDFLADPDTVNHLLIIFIDDSPPEKATEPASPLVPFLQKFAEPRNKKPSVLKLELKQIREQQDLLFRFMNFLKQEGAVHVLQFCLTVEEFNDRILRPELSNDEMLSLHEELQKIYKTYCLDESIDKIRFDPFIVEEIQRRKIIKSVPGKLMKEKGQHLEPFIMNFINSCESPKPKPSRPELTILSPTSENNKKLFNDLFKNNANRAENTERKQNQNYFMEVMTVEGVYDYLMYVGRVVFQVPDWLHHLLMGTRILFKNTLEMYTDYYLQCKLEQLFQEHRLVSLITLLRDAIFCENTEPRSLQDKQKGAKQTFEEMMNYIPDLLVKCIGEETKYESIRLLFDGLQQPVLNKQLTYVLLDIVIQELFPELNKVQKEVTSVTSWM

SEQ ID NO: 82500 - protein, 178 aa, Homo sapiens
  Payload ID: 16414
  Gene Symbol: SNX14
  Gene Name: sorting nexin 14
  ENSP ID: ENSP00000422814
  MOD_RES (1)..(1): Any amino acid
XKNNANRAENTERKQNQNYFMEVMTVEGVYDYLMYVGRVVFQVPDWLHHLLMGTRILFKNTLEMYTDYYLQCKLEQLFQEHRLVSLITLLRDAIFCENTEPRSLQDKQKGAKQTFEEMMNYIPDLLVKCIGEETKYESIRLLFDGLQQPVLNKQLTYVLLDIVIQELFPELNKVTEKQ

SEQ ID NO: 82501 - protein, 145 aa, Homo sapiens
  Payload ID: 16414
  Gene Symbol: SNX14
  Gene Name: sorting nexin 14
  ENSP ID: ENSP00000424302
MIFWSFVAGVVTFYCSLGPDSLLPNIFFTIKYKPKQLGLQELFPQGHSCAVCGKVKCKRHRPSLLLENYQPWLDLKISSKVDASLSEVDIPSIITKKLLKAAMKHIEVIVKARQKVKNTEFLQQAALEEYGPELHVALRSRRDEL

SEQ ID NO: 82502 - protein, 236 aa, Homo sapiens
  Payload ID: 16414
  Gene Symbol: SNX14
  Gene Name: sorting nexin 14
  ENSP ID: ENSP00000425387
MVPWVRTMGQKLKQRLRLDVGREICRQYPLFCFLLLCLSAASLLLNRYIHILMIFWSFVAGVVTFYCSLGPDSLLPNIFFTIKYKPKLGLQELFPQGHSCAVCGKVKCKRHRPSLLLENYQPWLDLKISSKVDASLSEVLELVLENFVYPWYRDVTDDESFVDELRITLRFFASVLIRRIHKVDIPSIITKKLLKAAMKHIEVIVKARQKVKNTEFLQQAALEEYGPELHVALRSR

SEQ ID NO: 82503 - protein, 833 aa, Homo sapiens
  Payload ID: 16414
  Gene Symbol: SNX14
  Gene Name: sorting nexin 14
  ENSP ID: ENSP00000425630
MKMKTFVIIHFHLIQLGLQELFPQGHSCAVCGKVKCKRHRPSLLLENYQPWLDLKISSKVDASLSEVLELVLENFVYPWYRDVTDDESFVDELRITLRFFASVLIRRIHKVDIPSIITKKLLKAAMKHIEVIVKARQKVKNTEFLQQAALEEYGPELHVALRSRRDELHYLRKLTELLFPYILPPKATDCRSLTLLIREILSGSVFLPSLDFLADPDTVNHLLIIFIDDSPPEKATEPASPLVPFLQKFAEPRNKKPSVLKLELKQIREQQDLLFRFMNFLKQEGAVHVLQFCLTVEEFNDRILRPELSNDEMLSLHEELQKIYKTYCLDESIDKIRFDPFIVEEIQRIAEGPYIDVVKLQTMRCLFEAYEHVLSLLENVFTPMFCHSDEYFRQLLRGAESPTRNSKLNRNTQKRGESFGISRIGSKIKGVFKSTTMEGAMLPNYGVAEGEDDFIEEGIVVMEDDSPVEAVSTPNTPRNLAAWKISIPYVDFFEDPSSERKEKKERIPVFCIDVERNDRRAVGHEPEHWSVYRRYLEFYVLESKLTEFHGAFPDAQLPSKRIIGPKNYEFLKSKREEFQEYLQKLLQHPELSNSQLLADFLSPNGGETQFLDKILPDVNLGKIIKSVPGKLMKEKGQHLEPFIMNFINSCESPKPKPSRPELTILSPTSENNKKLFNDLFKNNANRAENTERKQNQNYFMEVMTVEGVYDYLMYVGRVVFQVPDWLHHLLMGTRILFKNTLEMYTDYYLQCKLEQLFQEHRLVSLITLLRDAIFCENTEPRSLQDKQKGAKQTFEEMMNYIPDLLVKCIGEETKYESIRLLFDGLQQPVLNKQ

SEQ ID NO: 82504 - protein, 91 aa, Homo sapiens
  Payload ID: 16414
  Gene Symbol: SNX14
  Gene Name: sorting nexin 14
  ENSP ID: ENSP00000426806
MIFWSFVAGVVTFYCSLGPDSLLPNIFFTIKYKPKQLGLQELFPQGHSCAVCGKVKCKRHRPSLLLENYQPWLDLKISSKVDASLSEGCDR

SEQ ID NO: 82505 - protein, 894 aa, Homo sapiens
  Payload ID: 16414
  Gene Symbol: SNX14
  Gene Name: sorting nexin 14
  Uniprot ID: Q9Y5W7
  ENSP ID: ENSP00000427380
MIFWSFVAGVVTFYCSLGPDSLLPNIFFTIKYKPKQLGLQELFPQGHSCAVCGKVKCKRHRPSLLLENYQPWLDLKISSKVDASLSEVLELVLENFVYPWYRDVTDDESFVDELRITLRFFASVLIRRIHKVDIPSIITKKLLKAAMKHIEVIVKARQKVKNTEFLQQAALEEYGPELHVALRSRRDELHYLRKLTELLFPYILPPKATDCRSLTLLIREILSGSVFLPSLDFLADPDTVNHLLIIFIDDSPPEKATEPASPLVPFLQKFAEPRNKKPSVLKLELKQIREQQDLLFRFMNFLKQEGAVHVLQFCLTVEEFNDRILRPELSNDEMLSLHEELQKIYKTYCLDESIDKIRFDPFIVEEIQRIAEGPYIDVVKLQTMRCLFEAYEHVLSLLENVFTPMFCHSDEYFRQLLRGAESPTRNSKLNRGSLSLDDFRNTQKRGESFGISRIGSKIKGVFKSTTMEGAMLPNYGVAEGEDDFIEEGIVVMEDDSPVEAVSTPNTPRNLAAWKISIPYVDFFEDPSSERKEKKERIPVFCIDVERNDRRAVGHEPEHWSVYRRYLEFYVLESKLTEFHGAFPDAQLPSKRIIGPKNYEFLKSKREEFQEYLQKLLQHPELSNSQLLADFLSPNGGETQFLDKILPDVNLGKIIKSVPGKLMKEKGQHLEPFIMNFINSCESPKPKPSRPELTILSPTSENNKKLFNDLFKNNANRAENTERKQNQNYFMEVMTVEGVYDYLMYVGRVVFQVPDWLHHLLMGTRILFKNTLEMYTDYYLQCKLEQLFQEHRLVSLITLLRDAIFCENTEPRSLQDKQKGAKQTFEEMMNYIPDLLVKCIGEETKYESIRLLFDGLQQPVLNKQLTYVLLDIVIQELFPELNKVQKEVTSVTSWM

SEQ ID NO: 82506 - protein, 256 aa, Homo sapiens
  Payload ID: 16415
  Gene Symbol: SNX15
  Gene Name: sorting nexin 15
  Uniprot ID: Q9NRS6
  ENSP ID: ENSP00000316410
MSRQAKDDFLRHYTVSDPRTHPKGYTEYKVTAQFISKKDPEDVKEVVVWKRYSDFRKLHGDLAYTHRNLFRRLEEFPAFPRAQVFGRFEASVIEERRKGAEDLLRFTVHIPALNNSPQLKEFFRGGEVTRPLEVSRDLHILPPPLIPTPPPDDPRLSQLLPAERRGLEELEVPVDPPPSSPAQEALDLLFNCESTEEASGSPARGPLTEAELALFDPFSKEGDPLPARQEGVKKKAAEYLKRAEEILRLHLSQLPP

SEQ ID NO: 82507 - protein, 342 aa, Homo sapiens
  Payload ID: 16415
  Gene Symbol: SNX15
  Gene Name: sorting nexin 15
  Uniprot ID: Q9NRS6
  ENSP ID: ENSP00000366452
MSRQAKDDFLRHYTVSDPRTHPKGYTEYKVTAQFISKKDPEDVKEVVVWKRYSDFRKLHGDLAYTHRNLFRRLEEFPAFPRAQVFGRFEASVIEERRKGAEDLLRFTVHIPALNNSPQLKEFFRGGEVTRPLEVSRDLHILPPPLIPTPPPDDPRLSQLLPAERRGLEELEVPVDPPPSSPAQEALDLLFNCESTEEASGSPARGPLTEAELALFDPFSKEEGAAPSPTHVAELATMEVESARLDQEPWEPGGQEEEEDGEGGPTPAYLSQATELITQALRDEKAGAYAAALQGYRDGVHVLLQGVPSDPLPARQEGVKKKAAEYLKRAEEILRLHLSQLPP

SEQ ID NO: 82508 - protein, 192 aa, Homo sapiens
  Payload ID: 16415
  Gene Symbol: SNX15
  Gene Name: sorting nexin 15
  ENSP ID: ENSP00000431690
MSRQAKDDFLRHYTVSDPRTHPKGYTEYKVTAQVVVWKRYSDFRKLHGDLAYTHRNLFRRLEEFPAFPRAQVFGRFEASVIEERRKGAEDLLRFTVHIPALNNSPQLKEFFRGGEVTRPLEVSRDLHILPPPLIPTPPPDDPRLSQLLPAERRGLEELEVPVDPPPSSPAQEALDLLFNCESTEEASGSPAR

SEQ ID NO: 82509 - protein, 114 aa, Homo sapiens
  Payload ID: 16415
  Gene Symbol: SNX15
  Gene Name: sorting nexin 15
  ENSP ID: ENSP00000434778
MSRQAKDDFLRHYTVSDPRTHPKGYTEYKVTAQFISKKDPEDVKEVRLLGGRGTVLQFQIWKLSRGSWWWSGSGTATSASCMETWPTPTATSSAASRSSLLSPGPRCLAGLKPQ

SEQ ID NO: 82510 - protein, 66 aa, Homo sapiens
  Payload ID: 16415
  Gene Symbol: SNX15
  Gene Name: sorting nexin 15
  ENSP ID: ENSP00000436023
MSKRWWSGSGTATSASCMETWPTPTATSSAASRSSLLSPGPRCLGGEVTRPLEVSRDLHILPPPLI

SEQ ID NO: 82511 - protein, 217 aa, Homo sapiens
  Payload ID: 16415
  Gene Symbol: SNX15
  Gene Name: sorting nexin 15
  ENSP ID: ENSP00000437277
MSRQAKDDFLRHYTVSDPRTHPKGYTEYKFISKKDPEDVKEVVVWKRYSDFRKLHGDLAYTHRNLFRRLEEFPAFPRAQVFGRFEASVIEERRKGAEDLLRFTVHIPALNNSPQLKEFFRGGEVTRPLEVSRDLHILPPPLIPTPPPDDPRLSQLLPAERRGLEELEVPVDPPPSSPAQEALDLLFNCESTEEASGSPARGPLTEAELALFDPFSKE

SEQ ID NO: 82512 - protein, 315 aa, Homo sapiens
  Payload ID: 16416
  Gene Symbol: SNX16
  Gene Name: sorting nexin 16
  Uniprot ID: P57768
  ENSP ID: ENSP00000322631
MATPYVPVPMPIGNSASSFTTNRNQRSSSFGSVSTSSNSSKGQLEDSNMGNFKQTSVPDQMDNTSSVCSSPLIRTKFTGTASSIEYSTRPRDTEEQNPETVNWEDRPSTPTILGYEVMEERAKFTLKEMFPGFRLALPPKRWFKDNYNADFLEDRQLGLQAFLQNLVAHKDIANCLAVREFLCLDDPPGPFDSLEESRAFCETLEETNYRLQKELLEKQKEMESLKKLLSEKQLHIDTLENRIRTLSLEPEESLDVSETEGEQILKVESSALEVDQDVLDEESRADNKPCLSFSEPENAVSEIEVAEVAYDAEED

SEQ ID NO: 82513 - protein, 344 aa, Homo sapiens
  Payload ID: 16416
  Gene Symbol: SNX16
  Gene Name: sorting nexin 16
  Uniprot ID: P57768
  ENSP ID: ENSP00000322652
MATPYVPVPMPIGNSASSFTTNRNQRSSSFGSVSTSSNSSKGQLEDSNMGNFKQTSVPDQMDNTSSVCSSPLIRTKFTGTASSIEYSTRPRDTEEQNPETVNWEDRPSTPTILGYEVMEERAKFTVYKILVKKTPEESWVVFRRYTDFSRLNDKLKEMFPGFRLALPPKRWFKDNYNADFLEDRQLGLQAFLQNLVAHKDIANCLAVREFLCLDDPPGPFDSLEESRAFCETLEETNYRLQKELLEKQKEMESLKKLLSEKQLHIDTLENRIRTLSLEPEESLDVSETEGEQILKVESSALEVDQDVLDEESRADNKPCLSFSEPENAVSEIEVAEVAYDAEED

SEQ ID NO: 82514 - protein, 344 aa, Homo sapiens; identical to SEQ ID NO: 82513
  Payload ID: 16416
  Gene Symbol: SNX16
  Gene Name: sorting nexin 16
  Uniprot ID: P57768
  ENSP ID: ENSP00000379621

SEQ ID NO: 82515 - protein, 73 aa, Homo sapiens
  Payload ID: 16416
  Gene Symbol: SNX16
  Gene Name: sorting nexin 16
  ENSP ID: ENSP00000427876
MATPYVPVPMPIGNSASSFTTNRNQRSSSFGSVSTSSNSSKGQLEDSNMGTASSIEYSTRPRDTEEQNPETVN

SEQ ID NO: 82516 - protein, 84 aa, Homo sapiens
  Payload ID: 16416
  Gene Symbol: SNX16
  Gene Name: sorting nexin 16
  ENSP ID: ENSP00000428289
MATPYVPVPMPIGNSASSFTTNRNQRSSSFGSVSTSSNSSKGQLEDSNMGNFKQTSVPDQMDNTSSVCSSPLIRTKFTGTASSI

SEQ ID NO: 82517 - protein, 92 aa, Homo sapiens
  Payload ID: 16416
  Gene Symbol: SNX16
  Gene Name: sorting nexin 16
  ENSP ID: ENSP00000428591
MATPYVPVPMPIGNSASSFTTNRNQRSSSFGSVSTSSNSSKGQLEDSNMGNFKQTSVPDQMDNTSSVCSSPLIRTKFTGTASSIEYSTRPRD

SEQ ID NO: 82518 - protein, 162 aa, Homo sapiens
  Payload ID: 16416
  Gene Symbol: SNX16
  Gene Name: sorting nexin 16
  ENSP ID: ENSP00000428699
MATPYVPVPMPIGNSASSFTTNRNQRSSSFGSVSTSSNSSKGQLEDSNMGNFKQTSVPDQMDNTSSVCSSPLIRTKFTGTASSIEYSTRPRDTEEQNPETVNWEDRPSTPTILGYEVMEERAKFTAFCETLEETNYRLQKELLEKQKEMESLKKLLSEKQLH

SEQ ID NO: 82519 - protein, 203 aa, Homo sapiens
  Payload ID: 16416
  Gene Symbol: SNX16
  Gene Name: sorting nexin 16
  ENSP ID: ENSP00000428734
MATPYVPVPMPIGNSASSFTTNRNQRSSSFGSVSTSSNSSKGQLEDSNMGNFKQTSVPDQMDNTSSVCSSPLIRTKFTGTASSIEYSTRPRDTEEQNPETVNWEDRPSTPTILGYEVMEERAKFTVYKILVKKTPEESWVVFRRYTDFSRLNDKLKEMFPGFRLALPPKRWFKDNYNADFLEDRQLGLQAFLQNLVAHKDIAN

SEQ ID NO: 82520 - protein, 174 aa, Homo sapiens
  Payload ID: 16416
  Gene Symbol: SNX16
  Gene Name: sorting nexin 16
  ENSP ID: ENSP00000430038
MATPYVPVPMPIGNSASSFTTNRNQRSSSFGSVSTSSNSSKGQLEDSNMGTASSIEYSTRPRDTEEQNPETVNWEDRPSTPTILGYEVMEERAKFTVYKILVKKTPEESWVVFRRYTDFSRLNDKLKEMFPGFRLALPPKRWFKDNYNADFLEDRQLGLQAFLQNLVAHKDIAN

SEQ ID NO: 82521 - protein, 36 aa, Homo sapiens
  Payload ID: 16416
  Gene Symbol: SNX16
  Gene Name: sorting nexin 16
  ENSP ID: ENSP00000430585
MATPYVPVPMPIGNSASSFTTNRNQRSSSFGSVSTS

SEQ ID NO: 82522 - protein, 343 aa, Homo sapiens [sequence omitted]

SEQ ID NO: 82523 - protein, 470 aa, Homo sapiens
  Payload ID: 16417
  Gene Symbol: SNX17
  Gene Name: sorting nexin 17
  Uniprot ID: Q15036
  ENSP ID: ENSP00000233575
MHFSIPETESRSGDSGGSAYVAYNIHVNGVLHCRVRYSQLLGLHEQLRKEYGANVLPAFPPKKLFSLTPAEVEQRREQLEKYMQAVRQDPLLGSSETFNSFLRRAQQETQQVPTEEVSLEVLLSNGQKVLVNVLTSDQTEDVLEAVAAKLDLPDDLIGYFSLFLVREKEDGAFSFVRKLQEFELPYVSVTSLRSQEYKIVLRKSYWDSAYDDDVMENRVGLNLLYAQTVSDIERGWILVTKEQHRQLKSLQEKVSKKEFLRLAQTLRHYGYLRFDACVADFPEKDCPVVVSAGNSELSLQLRLPGQQLREGSFRVTRMRCWRVTSSVPLPSGSTSSPGRGRGEVRLELAFEYLMSKDRLQWVTITSPQAIMMSICLQSMVDELMVKKSGGSIRKMLRRRVGGTLRRSDSQQAVKSPPLLESPDATRESMVKLSSKLSAVSLRGIGSPSTDASASDVHGNFAFEGIGDEDL

SEQ ID NO: 82524 - protein, 53 aa, Homo sapiens
  Payload ID: 16417
  Gene Symbol: SNX17
  Gene Name: sorting nexin 17
  ENSP ID: ENSP00000399727
MHFSIPETESRSGDSGGSAYVAYNIHVNGVLHCRVRYSQLLGLHEQVGLAPLP

SEQ ID NO: 82525 - protein, 69 aa, Homo sapiens
  Payload ID: 16417
  Gene Symbol: SNX17
  Gene Name: sorting nexin 17
  ENSP ID: ENSP00000401922
MHFSIPETESRSGDSGGSAYVFGKTHCLGAARLSTVSCVGHNRRHSRSPQRKCPWKCCSATGRKFWSTC

SEQ ID NO: 82526 - protein, 87 aa, Homo sapiens
  Payload ID: 16417
  Gene Symbol: SNX17
  Gene Name: sorting nexin 17
  ENSP ID: ENSP00000405399
MHFSIPETESRSGDSGGSAYVAYNIHVNGVLHCRVRYSQLLGLHEQLRKEYGANVLPAFPPKKLFSLTPAEVEQRREQLEKYMQAVL

SEQ ID NO: 82527 - protein, 445 aa, Homo sapiens
  Payload ID: 16417
  Gene Symbol: SNX17
  Gene Name: sorting nexin 17
  Uniprot ID: Q15036
  ENSP ID: ENSP00000439208
MHFSIPETESRSGDSGGSAYVLRKEYGANVLPAFPPKKLFSLTPAEVEQRREQLEKYMQAVRQDPLLGSSETFNSFLRRAQQETQQVPTEEVSLEVLLSNGQKVLVNVLTSDQTEDVLEAVAAKLDLPDDLIGYFSLFLVREKEDGAFSFVRKLQEFELPYVSVTSLRSQEYKIVLRKSYWDSAYDDDVMENRVGLNLLYAQTVSDIERGWILVTKEQHRQLKSLQEKVSKKEFLRLAQTLRHYGYLRFDACVADFPEKDCPVVVSAGNSELSLQLRLPGQQLREGSFRVTRMRCWRVTSSVPLPSGSTSSPGRGRGEVRLELAFEYLMSKDRLQWVTITSPQAIMMSICLQSMVDELMVKKSGGSIRKMLRRRVGGTLRRSDSQQAVKSPPLLESPDATRESMVKLSSKLSAVSLRGIGSPSTDASASDVHGNFAFEGIGDEDL

SEQ ID NO: 82528 - protein, 628 aa, Homo sapiens
  Payload ID: 16418
  Gene Symbol: SNX18
  Gene Name: sorting nexin 18
  Uniprot ID: Q96RF0
  ENSP ID: ENSP00000317332
MALRARALYDFRSENPGEISLREHEVLSLCSEQDIEGWLEGVNSRGDRGLFPASYVQVIRAPEPGPAGDGGPGAPARYANVPPGGFEPLPVAPPASFKPPPDAFQALLQPQQAPPPSTFQPPGAGFPYGGGALQPSPQQLYGGYQASQGSDDDWDDEWDDSSTVADEPGALGSGAYPDLDGSSSAGVGAAGRYRLSTRSDLSLGSRGGSVPPQHHPSGPKSSATVSRNLNRFSTFVKSGGEAFVLGEASGFVKDGDKLCVVLGPYGPEWQENPYPFQCTIDDPTKQTKFKGMKSYISYKLVPTHTQVPVHRRYKHFDWLYARLAEKFPVISVPHLPEKQATGRFEEDFISKRRKGLIWWMNHMASHPVLAQCDVFQHFLTCPSSTDEKAWKQGKRKAEKDEMVGANFFLTLSTPPAAALDLQEVESKIDGFKCFTKKMDDSALQLNHTANEFARKQVTGFKKEYQKVGQSFRGLSQAFELDQQAFSVGLNQAIAFTGDAYDAIGELFAEQPRQDLDPVMDLLALYQGHLANFPDIIHVQKGKAWPLEQVIWSVLCRLKGATLTAVPLWVSESYSTGEEASRDVDAWVFSLECKLDCSTGSFLLEYLALGNEYSFSKVQRVPLMTVLSF

SEQ ID NO: 82529 - protein, 591 aa, Homo sapiens
  Payload ID: 16418
  Gene Symbol: SNX18
  Gene Name: sorting nexin 18
  Uniprot ID: Q96RF0
  ENSP ID: ENSP00000342276
MALRARALYDFRSENPGEISLREHEVLSLCSEQDIEGWLEGVNSRGDRGLFPASYVQVIRAPEPGPAGDGGPGAPARYANVPPGGFEPLPVAPPASFKPPPDAFQALLQPQQAPPPSTFQPPGAGFPYGGGALQPSPQQLYGGYQASQGSDDDWDDEWDDSSTVADEPGALGSGAYPDLDGSSSAGVGAAGRYRLSTRSDLSLGSRGGSVPPQHHPSGPKSSATVSRNLNRFSTFVKSGGEAFVLGEASGFVKDGDKLCVVLGPYGPEWQENPYPFQCTIDDPTKQTKFKGMKSYISYKLVPTHTQVPVHRRYKHFDWLYARLAEKFPVISVPHLPEKQATGRFEEDFISKRRKGLIWWMNHMASHPVLAQCDVFQHFLTCPSSTDEKAWKQGKRKAEKDEMVGANFFLTLSTPPAAALDLQEVESKIDGFKCFTKKMDDSALQLNHTANEFARKQVTGFKKEYQKVGQSFRGLSQAFELDQQAFSVGLNQAIAFTGDAYDAIGELFAEQPRQDLDPVMDLLALYQGHLANFPDIIHVQKGKAWPLEQVIWSVLCRLKGATLTAVPLWVSESYSTGEEASRDVDAWVFSLE

SEQ ID NO: 82530 - protein, 624 aa, Homo sapiens
  Payload ID: 16418
  Gene Symbol: SNX18
  Gene Name: sorting nexin 18
  Uniprot ID: Q96RF0
  ENSP ID: ENSP00000370817
MALRARALYDFRSENPGEISLREHEVLSLCSEQDIEGWLEGVNSRGDRGLFPASYVQVIRAPEPGPAGDGGPGAPARYANVPPGGFEPLPVAPPASFKPPPDAFQALLQPQQAPPPSTFQPPGAGFPYGGGALQPSPQQLYGGYQASQGSDDDWDDEWDDSSTVADEPGALGSGAYPDLDGSSSAGVGAAGRYRLSTRSDLSLGSRGGSVPPQHHPSGPKSSATVSRNLNRFSTFVKSGGEAFVLGEASGFVKDGDKLCVVLGPYGPEWQENPYPFQCTIDDPTKQTKFKGMKSYISYKLVPTHTQVPVHRRYKHFDWLYARLAEKFPVISVPHLPEKQATGRFEEDFISKRRKGLIWWMNHMASHPVLAQCDVFQHFLTCPSSTDEKAWKQGKRKAEKDEMVGANFFLTLSTPPAAALDLQEVESKIDGFKCFTKKMDDSALQLNHTANEFARKQVTGFKKEYQKVGQSFRGLSQAFELDQQAFSVGLNQAIAFTGDAYDAIGELFAEQPRQDLDPVMDLLALYQGHLANFPDIIHVQKGALTKVKESRRHVEEGKMEVQKADGIQDRCNTISFATLAEIHHFHQIRVRDFKSQMQHFLQQQIIFFQKVTQKLEEALHKYDSV

SEQ ID NO: 82531 - protein, 992 aa, Homo sapiens
  Payload ID: 16419
  Gene Symbol: SNX19
  Gene Name: sorting nexin 19
  Uniprot ID: Q92543
  ENSP ID: ENSP00000265909
MKTETVPPFQETPAGSSCHLNNLLSSRKLMAVGVLLGWLLVIHLLVNVWLLCLLSALLVVLGGWLGSSLAGVASGRLHLERFIPLATCPPCPEAERQLEREINRTIQMIIRDFVLSWYRSVSQEPAFEEEMEAAMKGLVQELRRRMSVMDSHAVAQSVLTLCGCHLQSYIQAKEATAGKNGPVEPSHLWEAYCRATAPHPAVHSPSAEVTYTRGVVNLLLQGLVPKPHLETRTGRHVVVELITCNVILPLISRLSDPDWIHLVLVGIFSKARDPAPCPASAPEQPSVPTSLPLIAEVEQLPEGRASPVAAPVFLSYSEPEGSAGPSPEVEEGHEAVEGDLGGMCEERKVGNNSSHFLQPNVRGPLFLCEDSELESPLSELGKETIMLMTPGSFLSDRIQDALCALESSQALEPKDGEASEGAEAEEGPGTETETGLPVSTLNSCPEIHIDTADKEIEQGDVTASVTALLEGPEKTCPSRPSCLEKDLTNDVSSLDPTLPPVLLSSSPPGPLSSATFSFEPLSSPDGPVIIQNLRITGTITAREHSGTGFHPYTLYTVKYETALDGENSSGLQQLAYHTVNRRYREFLNLQTRLEEKPDLRKFIKNVKGPKKLFPDLPLGNMDSDRVEARKSLLESFLKQLCAIPEIANSEEVQEFLALNTDARIAFVKKPFMVSRIDKMVVSAIVDTLKTAFPRSEPQSPTEELSEAETESKPQTEGKKASKSRLRFSSSKISPALSVTEAQDKILYCLQEGNVESETLSMSAMESFIEKQTKLLEMQPTKAPEKDPEQPPKGRVDSCVSDAAVPAQDPSNSDPGTETELADTALDLLLLLLTEQWKWLCTENMQKFLRLIFGTLVQRWLEVQVANLTSPQRWVQYLLLLQESIWPGGVLPKFPRPVRTQEQKLAAEKQALQSLMGVLPDLVVEILGVNKCRLSWGLVLESLQQPLINRHLIYCLGDIILEFLDLSASVEESAATTSASDTPGNSKRMGVSS

SEQ ID NO: 82532 - protein, 160 aa, Homo sapiens
  Payload ID: 16419
  Gene Symbol: SNX19
  Gene Name: sorting nexin 19
  ENSP ID: ENSP00000413345
MLAPKDFSERIQPSWEGGWCANAASRWLEVQVANLTSPQRWVQYLLLLQESIWPGGVLPKFPRPVRTQEQKLAAEKQALQSLMGVLPDLVVEILGVNKCRLSWGLVLESLQQPLINRHLIYCLGDIILEFLDLSASVEESAATTSASDTPGNSKRMGVSS

SEQ ID NO: 82533 - protein, 372 aa, Homo sapiens
  Payload ID: 16419
  Gene Symbol: SNX19
  Gene Name: sorting nexin 19
  ENSP ID: ENSP00000432307
MDSDRVEARKSLLESFLKQLCAIPEIANSEEVQEFLALNTDARIAFVKKPFMVSRIDKMVVSAIVDTLKTAFPRSEPQSPTEELSEAETESKPQTEGKKASKSRLRFSSSKISPALSVTEAQDKILYCLQEGNVESETLSMSAMESFIEKQTKLLEMQPTKAPEKDPEQPPKGRVDSCVSDAAVPAQDPSNSDPGTETELADTALDLLLLLLTEQWKWLCTENMQKFLRLIFGTLVQRWLEVQVANLTSPQRWVQYLLLLQESIWPGGVLPKFPRPVRTQEQKLAAEKQALQSLMGVLPDLVVEILGVNKCRLSWGLVLESLQQPLINRHLIYCLGDIILEFLDLSASVEESAATTSASDTPGNSKRMGVSS

SEQ ID NO: 82534 - protein, 232 aa, Homo sapiens
  Payload ID: 16419
  Gene Symbol: SNX19
  Gene Name: sorting nexin 19
  ENSP ID: ENSP00000433699
MSAMESFIEKQTKLLEMQPTKAPEKDPEQPPKGRVDSCVSDAAVPAQDPSNSDPGTETELADTALDLLLLLLTEQWKWLCTENMQKFLRLIFGTLVQRWLEVQVANLTSPQRWVQYLLLLQESIWPGGVLPKFPRPVRTQEQKLAAEKQALQSLMGVLPDLVVEILGVNKCRLSWGLVLESLQQPLINRHLIYCLGDIILEFLDLSASVEESAATTSASDTPGNSKRMGVSS

SEQ ID NO: 82535 - protein, 372 aa, Homo sapiens; identical to SEQ ID NO: 82533
  Payload ID: 16419
  Gene Symbol: SNX19
  Gene Name: sorting nexin 19
  ENSP ID: ENSP00000435122

SEQ ID NO: 82536 - protein, 803 aa, Homo sapiens
  Payload ID: 16419
  Gene Symbol: SNX19
  Gene Name: sorting nexin 19
  Uniprot ID: Q92543
  ENSP ID: ENSP00000435390
MKTETVPPFQETPAGSSCHLNNLLSSRKLMAVGVLLGWLLVIHLLVNVWLLCLLSALLVVLGGWLGSSLAGVASGRLHLERFIPLATCPPCPEAERQLEREINRTIQMIIRDFVLSWYRSVSQEPAFEEEMEAAMKGLVQELRRRMSVMDSHAVAQSVLTLCGCHLQSYIQAKEATAGKNGPVEPSHLWEAYCRATAPHPAVHSPSAEVTYTRGVVNLLLQGLVPKPHLETRTGRHVVVELITCNVILPLISRLSDPDWIHLVLVGIFSKARDPAPCPASAPEQPSVPTSLPLIAEVEQLPEGRASPVAAPVFLSYSEPEGSAGPSPEVEEGHEAVEGDLGGMCEERKVGNNSSHFLQPNVRGPLFLCEDSELESPLSELGKETIMLMTPGSFLSDRIQDALCALESSQALEPKDGEASEGAEAEEGPGTETETGLPVSTLNSCPEIHIDTADKEIEQGDVTASVTALLEGPEKTCPSRPSCLEKDLTNDVSSLDPTLPPVLLSSSPPGPLSSATFSFEPLSSPDGPVIIQNLRITGTITAREHSGTGFHPYTLYTVKYETALDGENSSGLQQLAYHTVNRRYREFLNLQTRLEEKPDLRKFIKNVKGPKKLFPDLPLGNMDSDRVEARKSLLESFLKQLCAIPEIANSEEVQEFLALNTDARIAFVKKPFMVSRIDKMVVSAIVDTLKTAFPRSEPQSPTEELSEAETESKPQTEGKKASKSRLRFSSSKISPALSVTEAQDKILYCLQEGNVTKLLEMQPTKAPEKDPEQPPKGRVDSCVSDAAVPAQDPSNSDPAEHAMC

SEQ ID NO: 82537 - protein, 519 aa, Homo sapiens
  Payload ID: 16420
  Gene Symbol: SNX2
  Gene Name: sorting nexin 2
  Uniprot ID: O60749
  ENSP ID: ENSP00000368831
MAAEREPPPLGDGKPTDFEDLEDGEDLFTSTVSTLESSPSSPEPASLPAEDISANSNGPKPTEVVLDDDREDLFAEATEEVSLDSPEREPILSSEPSPAVTPVTPTTLIAPRIESKSMSAPVIFDRSREEIEEEANGDIFDIEIGVSDPEKVGDGMNAYMAYRVTTKTSLSMFSKSEFSVKRRFSDFLGLHSKLASKYLHVGYIVPPAPEKSIVGMTKVKVGKEDSSSTEFVEKRRAALERYLQRTVKHPTLLQDPDLRQFLESSELPRAVNTQALSGAGILRMVNKAADAVNKMTIKMNESDAWFEEKQQQFENLDQQLRKLHVSVEALVCHRKELSANTAAFAKSAAMLGNSEDHTALSRALSQLAEVEEKIDQLHQEQAFADFYMFSELLSDYIRLIAAVKGVFDHRMKCWQKWEDAQITLLKKREAEAKMMVANKPDKIQQAKNEIREWEAKVQQGERDFEQISKTIRKEVGRFEKERVKDFKTVIIKYLESLVQTQQQLIKYWEAFLPEAKAIA

SEQ ID NO: 82538 - protein, 402 aa, Homo sapiens
  Payload ID: 16420
  Gene Symbol: SNX2
  Gene Name: sorting nexin 2
  Uniprot ID: O60749
  ENSP ID: ENSP00000421663
MSAPVIFDRSREEIEEEANGDIFDIEIGVSDPEKVGDGMNAYMAYRVTTKTSLSMFSKSEFSVKRRFSDFLGLHSKLASKYLHVGYIVPPAPEKSIVGMTKVKVGKEDSSSTEFVEKRRAALERYLQRTVKHPTLLQDPDLRQFLESSELPRAVNTQALSGAGILRMVNKAADAVNKMTIKMNESDAWFEEKQQQFENLDQQLRKLHVSVEALVCHRKELSANTAAFAKSAAMLGNSEDHTALSRALSQLAEVEEKIDQLHQEQAFADFYMFSELLSDYIRLIAAVKGVFDHRMKCWQKWEDAQITLLKKREAEAKMMVANKPDKIQQAKNEIREWEAKVQQGERDFEQISKTIRKEVGRFEKERVKDFKTVIIKYLESLVQTQQQLIKYWEAFLPEAKAIA

SEQ ID NO: 82539 - protein, 265 aa, Homo sapiens
  Payload ID: 16420
  Gene Symbol: SNX2
  Gene Name: sorting nexin 2
  ENSP ID: ENSP00000422413
MAAEREPPPLGDGKPTDFEDLEDGEDLFTSTVSTLESSPSSPEPASLPAEDISANSNGPKPTEVVLDDDREDLFAATEEVSLDSPEREPILSSEPSPAVTPVTPTTLIAPRIESKSMSAPVIFDRSREEIEEEANGDIFDIEIGVSDPEKVGDGMNAYMAYRVTTKTSLSMFSKSEFSVKRRFSDFLGLHSKLASKYLHVGYIVPPAPEKSIVGMTKVKVGKEDSSSTEFVEKRRAALERYLQRTVKHPTLLQDPDLRQFLESSE

SEQ ID NO: 82540 - protein, 76 aa, Homo sapiens
  Payload ID: 16420
  Gene Symbol: SNX2
  Gene Name: sorting nexin 2
  ENSP ID: ENSP00000422560
MAAEREPPPLGDGKPTDFEDLEDGEDLFTSTVSTLESSPSSPEPASLPAEDISANSNGPKPTEVVLDDDREDLFAD

SEQ ID NO: 82541 - protein, 129 aa, Homo sapiens
  Payload ID: 16421
  Gene Symbol: SNX20
  Gene Name: sorting nexin 20
  Uniprot ID: Q7Z614
  ENSP ID: ENSP00000300590
MASPEHPGSPGCMGPITQCTARTQQEAPATGPDLPHPGPDGHLDTHSGLSSNSSMTTRELQQYWQNQKCRWKHVKLLFEIASARIEERKVSKFVMGKSRPGEMTYPGSRGETGTAPEPDPRCPRQSDML

SEQ ID NO: 82542 - protein, 316 aa, Homo sapiens
  Payload ID: 16421
  Gene Symbol: SNX20
  Gene Name: sorting nexin 20
  Uniprot ID: Q7Z614
  ENSP ID: ENSP00000332062
MASPEHPGSPGCMGPITQCTARTQQEAPATGPDLPHPGPDGHLDTHSGLSSNSSMTTRELQQYWQNQKCRWKHVKLLFEIASARIEERKVSKFVVYQIIVIQTGSFDNNKAVLERRYSDFAKLQKALLKTFREEIEDVEFPRKHLTGNFAEEMICERRRALQEYLGLLYAIRCVRRSREFLDFLTRPELREAFGCLRAGQYPRALELLLRVLPLQEKLTAHCPAAAVPALCAVLLCHRDLDRPAEAFAAGERALQRLQAREGHRYYAPLLDAMVRLAYALGKDFVTLQERLEESQLRRPTPRGITLKELTVREYLH

SEQ ID NO: 82543 - protein, 102 aa, Homo sapiens
  Payload ID: 16421
  Gene Symbol: SNX20
  Gene Name: sorting nexin 20
  Uniprot ID: Q7Z614
  ENSP ID: ENSP00000388875
MASPEHPGSPGCMGPITQCTARTQQEAPATGPDLPHPGPDGHLDTHSGLSSNSSMTTRELQQYWQNQKCRWKHVKLLFEIASARIEERKVSKFVAPAPDATP

SEQ ID NO: 82544 - protein, 129 aa, Homo sapiens; identical to SEQ ID NO: 82541
  Payload ID: 16421
  Gene Symbol: SNX20
  Gene Name: sorting nexin 20
  Uniprot ID: Q7Z614
  ENSP ID: ENSP00000454863

SEQ ID NO: 82545 - protein, 152 aa, Homo sapiens [sequence omitted]

SEQ ID NO: 82546 - protein, 193 aa, Homo sapiens
  Payload ID: 16422
  Gene Symbol: SNX22
  Gene Name: sorting nexin 22
  Uniprot ID: Q96L94
  ENSP ID: ENSP00000323435
MLEVHIPSVGPEAEGPRQSPEKSHMVFRVEVLCSGRRHTVPRRYSEFHALHKRIKKLYKVPDFPSKRLPNWRTRGLEQRRQGLEAYIQGILYLNQEVPKELLEFLRLRHFPTDPKASNWGTLREFLPGDSSSQQHQRPVLSFHVDPYVCNPSPESLPNVVVNGVLQGLYSFSISPDKAQPKAACHPAPLPPMP

SEQ ID NO: 82547 - protein, 120 aa, Homo sapiens
  Payload ID: 16422
  Gene Symbol: SNX22
  Gene Name: sorting nexin 22
  Uniprot ID: Q96L94
  ENSP ID: ENSP00000452692
MLEVHIPSVGPEAEGPRQSPEKSHMVFRVEVLCSGRRHTVPRRYSEFHALHKRIKKLYKVPDFPSKRLPNWRTRGLEQRRQGLEAYIQGILYLNQEVPKELLEFLRLRHFPTDPKASNWG

SEQ ID NO: 82548 - protein, 169 aa, Homo sapiens
  Payload ID: 16423
  Gene Symbol: SNX24
  Gene Name: sorting nexin 24
  Uniprot ID: Q9Y343
  ENSP ID: ENSP00000261369
MEVYIPSFRYEESDLERGYTVFKIEVLMNGRKHFVEKRYSEFHALHKKLKKCIKTPEIPSKHVRNWVPKVLEQRRQGLETYLQAVILENEELPKLFLDFLNVRHLPSLPKAESCGSFDETESEESSKLSHQPVLLFLRDPYVLPAASDFPNVVIEGVLHGIFYPHLQPR

SEQ ID NO: 82549 - protein, 202 aa, Homo sapiens
  Payload ID: 16423
  Gene Symbol: SNX24
  Gene Name: sorting nexin 24
  ENSP ID: ENSP00000378837
MEVYIPSFRYEESDLERGYTVVIVWHRAFQTKMESYEVIVLEIAFSNGRLTYQVFKIEVLMNGRKHFVEKRYSEFHALHKKLKKCIKTPEIPSKHVRNWVPKVLEQRRQGLETYLQAVILENEELPKLFLDFLNVRHLPSLPKAESCGSFDETESEESSKLSHQPVLLFLRDPYVLPAASDFPNVVIEGVLHGIFYPHLQPR

SEQ ID NO: 82550 - protein, 22 aa, Homo sapiens
  Payload ID: 16423
  Gene Symbol: SNX24
  Gene Name: sorting nexin 24
  ENSP ID: ENSP00000422184
  MOD_RES (1)..(1): Any amino acid
XEESDLERGYTVRVLQCCPGRP

SEQ ID NO: 82551 - protein, 159 aa, Homo sapiens
  Payload ID: 16423
  Gene Symbol: SNX24
  Gene Name: sorting nexin 24
  Uniprot ID: Q9Y343
  ENSP ID: ENSP00000422535
MEVYIPSFRYEESDLERGYTVFKIEVLMNGRKHFVEKRYSEFHALHKKLKKCIKTPEIPSKHVRNWVPKVLEQRRQGLETYLQAVILENEELPKLFLDFLNVRHLPSLPKAESCGSFDETESEESSKLSHQPVLLFLRDPYVLPAASGNQTCHLLTALY

SEQ ID NO: 82552 - protein, 159 aa, Homo sapiens; identical to SEQ ID NO: 82551
  Payload ID: 16423
  Gene Symbol: SNX24
  Gene Name: sorting nexin 24
  Uniprot ID: Q9Y343
  ENSP ID: ENSP00000424149

SEQ ID NO: 82553 - protein, 68 aa, Homo sapiens
  Payload ID: 16423
  Gene Symbol: SNX24
  Gene Name: sorting nexin 24
  ENSP ID: ENSP00000425919
VFKIEVLMNGRKHFVEKRYSEFHALHKKLKKCIKTPEIPSKHVRNWVPKVLEQRRQGLETYLQRNVGA

SEQ ID NO: 82554 - protein, 840 aa, Homo sapiens
  Payload ID: 16424
  Gene Symbol: SNX25
  Gene Name: sorting nexin 25
  Uniprot ID: Q9H3E2
  ENSP ID: ENSP00000264694
MDKALKEVFDYSYRDYILSWYGNLSRDEGQLYHLLLEDFWEIARQLHHRLSHVDVVKVVCNDVVRTLLTHFCDLKAANARHEEQPRPFVLHACLRNSDDEVRFLQTCSRVLVFCLLPSKDVQSLSLRIMLAEILTTKVLKPVVELLSNPDYINQMLLAQLAYREQMNEHHKRAYTYAPSYEDFIKLINSNSDVEFLKQLRYQIVVEIIQATTISSFPQLKRHKGKETAAMKADLLRARNMKRYINQLTVAKKQCEKRIRILGGPAYDQQEDGALDEGEGPQSQKILQFEDILANTFYREHFGMYMERMDKRALISFWESVEHLKNANKNEIPQLVGEIYQNFFVESKEISVEKSLYKEIQQCLVGNKGIEVFYKIQEDVYETLKDRYYPSFIVSDLYEKLLIKEEEKHASQMISNKDEMGPRDEAGEEAVDDGTNQINEQASFAVNKLRELNEKLEYKRQALNSIQNAPKPDKKIVSKLKDEIILIEKERTDLQLHMARTDWWCENLGMWKASITSGEVTEENGEQLPCYFVMVSLQEVGGVETKNWTVPRRLSEFQNLHRKLSECVPSLKKVQLPSLSKLPFKSIDQKFMEKSKNQLNKFLQNLLSDERLCQSEALYAFLSPSPDYLKVIDVQGKKNSFSLSSFLERLPRDFFSHQEEETEEDSDLSDYGDDVDGRKDALAEPCFMLIGEIFELRGMFKWVRRTLIALVQVTFGRTINKQIRDTVSWIFSEQMLVYYINIFRDAFWPNGKLAPPTTIRSKEQSQETKQRAQQKLLENIPDMLQSLVGQQNARHGIIKIFNALQETRANKHLLYALMELLLIELCPELRVHLDQLKAGQV

SEQ ID NO: 82555 - protein, 142 aa, Homo sapiens
  Payload ID: 16424
  Gene Symbol: SNX25
  Gene Name: sorting nexin 25
  ENSP ID: ENSP00000424826
  MOD_RES (1)..(1): Any amino acid
XLKNANKNEIPQLVGEIYQNFFVESKEISVEKSLYKEIQQCLVGNKGIEVFYKIQEDVYETLKDRYYPSFIVSDLYEKLLIKEEEKHASQMISNKDEMGPRDEAGEEAVDDGTNQINEQASFAVNKLRELNEKLEYKRLFPS

SEQ ID NO: 82556 - protein, 840 aa, Homo sapiens; identical to SEQ ID NO: 82554
  Payload ID: 16424
  Gene Symbol: SNX25
  Gene Name: sorting nexin 25
  Uniprot ID: Q9H3E2
  ENSP ID: ENSP00000426255

SEQ ID NO: 82557 - protein, 556 aa, Homo sapiens
  Payload ID: 16424
  Gene Symbol: SNX25
  Gene Name: sorting nexin 25
  Uniprot ID: Q9H3E2
  ENSP ID: ENSP00000483653
MKADLLRARNMKRYINQLTVAKKQCEKRIRILGGPAYDQQEDGALDEGEGPQSQKILQFEDILANTFYREHFGMYMERMDKRALISFWESVEHLKNANKNEIPQLVGEIYQNFFVESKEISVEKSLYKEIQQCLVGNKGIEVFYKIQEDVYETLKDRYYPSFIVSDLYEKLLIKEEEKHASQMISNKDEMGPRDEAGEEAVDDGTNQINEQASFAVNKLRELNEKLEYKRQALNSIQNAPKPDKKIVSKLKDEIILIEKERTDLQLHMARTDWWCENLGMWKASITSGEVTEENGEQLPCYFVMVSLQEVGGVETKNWTVPRRLSEFQNLHRKLSECVPSLKKVQLPSLSKLPFKSIDQKFMEKSKNQLNKFLQEETEEDSDLSDYGDDVDGRKDALAEPCFMLIGEIFELRGMFKWVRRTLIALVQVTFGRTINKQIRDTVSWIFSEQMLVYYINIFRDAFWPNGKLAPPTTIRSKEQSQETKQRAQQKLLENIPDMLQSLVGQQNARHGIIKIFNALQETRANKHLLYALMELLLIELCPELRVHLDQLKAGQV

SEQ ID NO: 82558 - protein, 69 aa, Homo sapiens
  Payload ID: 16425
  Gene Symbol: SNX29
  Gene Name: sorting nexin 29
  ENSP ID: ENSP00000455327
QELIDLRGPVPGDLSQTSEDQSLSDFEISNRALINVWIPSVFLRGKAANAFHVYQLFKNVKIILSLWAV

SEQ ID NO: 82559 - protein, 175 aa, Homo sapiens
  Payload ID: 16425
  Gene Symbol: SNX29
  Gene Name: sorting nexin 29
  ENSP ID: ENSP00000455747
  MOD_RES (1)..(1): Any amino acid
XGHSESPEKPLEGNTCLSQMHSWAPLKVLHNDSDILFPVSGVGSYSPADAPLGSLENGTGPEDHVLPDPGLRYSVEASSPGHGSPLSSLLPSASVPESMTISELRQATVAMMNRKDELEEENRSLRNLLDGEMEHSAALRQEVDTLKRKVAEQEERQGMKVQALASYLCYFVRRF

SEQ ID NO: 82560 - protein, 813 aa, Homo sapiens
  Payload ID: 16425
  Gene Symbol: SNX29
  Gene Name: sorting nexin 29
  Uniprot ID: Q8TEQ0
  ENSP ID: ENSP00000456480
MSGSQNNDKRQFLLERLLDAVKQCQIRFGGRKEIASDSDSRVTCLCAQFEAVLQHGLKRSRGLALTAAAIKQAAGFASKTETEPVFWYYVKEVLNKHELQRFYSLRHIASDVGRGRAWLRCALNEHSLERYLHMLLADRCRLSTFYEDWSFVMDEERSSMLPTMAAGLNSILFAINIDNKDLNGQSKFAPTVSDLLKESTQNVTSLLKESTQGVSSLFREITASSAVSILIKPEQETDPLPVVSRNVSADAKCKKERKKKKKVTNIISFDDEEDEQNSGDVFKKTPGAGESSEDNSDRSSVNIMSAFESPFGPNSNGSQSSNSWKIDSLSLNGEFGYQKLDVKSIDDEDVDENEDDVYGNSSGRKHRGHSESPEKPLEGNTCLSQMHSWAPLKVLHNDSDILFPVSGVGSYSPADAPLGSLENGTGPEDHVLPDPGLRYSVEASSPGHGSPLSSLLPSASVPESMTISELRQATVAMMNRKDELEEENRSLRNLLDGEMEHSAALRQEVDTLKRKVAEQEERQGMKVQALARENEVLKVQLKKYVGAVQMLKREGQTAEVPNLWSVDGEVTVAEQKPGEIAEELASSYERKLIEVAEMHGELIEFNERLHRALVAKEALVSQMRQELIDLRGPVPGDLSQTSEDQSLSDFEISNRALINVWIPSVFLRGKAANAFHVYQVYIRIKDDEWNIYRRYTEFRSLHHKLQNKYPQVRAYNFPPKKAIGNKDAKFVEERRKQLQNYLRSVMNKVIQMVPEFAASPKKETLIQLMPFFVDITPPGEPVNSRPKAASRFPKLSRGQPRETRNVEPQSGDL

SEQ ID NO: 82561 - protein, 282 aa, Homo sapiens
  Payload ID: 16425
  Gene Symbol: SNX29
  Gene Name: sorting nexin 29
  ENSP ID: ENSP00000457017
LKRKVAEQEERQGMKVQALARENEVLKVQLKKYVGAVQMLKREGQTAEVPNLWSVDGEVTVAEQKPGEIAEELASSYERKLIEVAEMHGELIEFNERLHRALVAKEALVSQMRQELIDLRGPVPGDLSQTSEDQSLSDFEISNRALINVWIPSVFLRGKAANAFHVYQVYIRIKDDEWNIYRRYTEFRSLHHKLQNKYPQVRAYNFPPKKAIGNKDAKFVEERRKQLQNYLRSVMNKVIQMVPEFAASPKKETLIQLMPFFVDWISLFGNGRDSSREEFSSS

SEQ ID NO: 82562 - protein, 96 aa, Homo sapiens
  Payload ID: 16425
  Gene Symbol: SNX29
  Gene Name: sorting nexin 29
  ENSP ID: ENSP00000457085
MSGSQNNDKRQFLLERLLDAVKQCQIRFGGRKEIASDSDSRVTCLCAQFEAVLQHGLKRSRGLALTAAAIKQAAGFASKTETDGASLCCPVWSAVA

SEQ ID NO: 82563 - protein, 162 aa, Homo sapiens
  Payload ID: 16426
  Gene Symbol: SNX3
  Gene Name: sorting nexin 3
  Uniprot ID: O60493
  ENSP ID: ENSP00000230085
MAETVADTRRLITKPQNLNDAYGPPSNFLEIDVSNPQTVGVGRGRFTTYEIRVKTNLPIFKLKESTVRRRYSDFEWLRSELERESKVVVPPLPGKAFLRQLPFRGDDGIFDDNFIEERKQGLEQFINKVAGHPLAQNERCLHMFLQDEIIDKSYTPSKIRHA

SEQ ID NO: 82564 - protein, 140 aa, Homo sapiens
  Payload ID: 16426
  Gene Symbol: SNX3
  Gene Name: sorting nexin 3
  Uniprot ID: O60493
  ENSP ID: ENSP00000296991
MAETVADTRRLITKPQNLNDAYGPPSNFLEIDTNLPIFKLKESTVRRRYSDFEWLRSELERESKVVVPPLPGKAFLRQLPFRGDDGIFDDNFIEERKQGLEQFINKVAGHPLAQNERCLHMFLQDEIIDKSYTPSKIRHA

SEQ ID NO: 82565 - protein, 113 aa, Homo sapiens
  Payload ID: 16426
  Gene Symbol: SNX3
  Gene Name: sorting nexin 3
  Uniprot ID: O60493
  ENSP ID: ENSP00000357975
MAETVADTRRLITKPQNLNDAYGPPSNFLEIDVSNPQTVGVGRGRFTTYEIRVKTNLPIFKLKESTVRRRYSDFEWLRSELERESKPCLRMTSEARSHGRTWCAQNDEKLFCD

SEQ ID NO: 82566 - protein, 130 aa, Homo sapiens
  Payload ID: 16426
  Gene Symbol: SNX3
  Gene Name: sorting nexin 3
  Uniprot ID: O60493
  ENSP ID: ENSP00000401779
MAETVADTRRLITKPQNLNDAYGPPSNFLEIDVSNPQTVGVGRGRFTTYEIRVKVVVPPLPGKAFLRQLPFRGDDGIFDDNFIEERKQGLEQFINKVAGHPLAQNERCLHMFLQDEIIDKSYTPSKIRHA

SEQ ID NO: 82567 - protein, 440 aa, Homo sapiens
  Payload ID: 16427
  Gene Symbol: SNX31
  Gene Name: sorting nexin 31
  Uniprot ID: Q8N9S9
  ENSP ID: ENSP00000312368
MKMHFCIPVSQQRSDALGGRYVLYSVHLDGFLFCRVRYSQLHGWNEQLRRVFGNCLPPFPPKYYLAMTTAMADERRDQLEQYLQNVTMDPNVLRSDVFVEFLKLAQLNTFDIATKKAYLDIFLPNEQSIRIEIITSDTAERVLEVVSHKIGLCRELLGYFGLFLIRFGKEGKLSVVKKLADFELPYVSLGSSEVENCKVGLRKWYMAPSLDSVLMDCRVAVDLLYMQAIQDIEKGWAKPTQAQRQKLEAFQKEDSQTKFLELAREVRHYGYLQLDPCTCDYPESGSGAVLSVGNNEISCCITLPDSQTQDIVFQMSRVKCWQVTFLGTLLDTDGPQRTLNQNLELRFQYSEDSCWQWFVIYTKQAFLLSSCLKKMISEKMVKLAAENTEMQIEVPEQSKSKKYHIQQSQQKDYSSFLSRKSKIKIAKDDCVFGNIKEEDL

SEQ ID NO: 82568 - protein, 341 aa, Homo sapiens
  Payload ID: 16427
  Gene Symbol: SNX31
  Gene Name: sorting nexin 31
  Uniprot ID: Q8N9S9
  ENSP ID: ENSP00000405024
MLGNTENWNTFDIATKKAYLDIFLPNEQSIRIEIITSDTAERVLEVVSHKIGLCRELLGYFGLFLIRFGKEGKLSVVKKLADFELPYVSLGSSEVENCKVGLRKWYMAPSLDSVLMDCRVAVDLLYMQAIQDIEKGWAKPTQAQRQKLEAFQKEDSQTKFLELAREVRHYGYLQLDPCTCDYPESGSGAVLSVGNNEISCCITLPDSQTQDIVFQMSRVKCWQVTFLGTLLDTDGPQRTLNQNLELRFQYSEDSCWQWFVIYTKQAFLLSSCLKKMISEKMVKLAAENTEMQIEVPEQSKSKKYHIQQSQQKDYSSFLSRKSKIKIAKDDCVFGNIKEEDL

SEQ ID NO: 82569 - protein, 124 aa, Homo sapiens
  Payload ID: 16427
  Gene Symbol: SNX31
  Gene Name: sorting nexin 31
  ENSP ID: ENSP00000428210
MTTAMADERRDQLEQYLQNVTMDPNVLRSDVFVEFLKLAQLNTFDIATKKAYLDIFLPNEQSIRIEIITSDTAERVLEVVSHKIGLCRELLGYFGLFLIRFGKEGKLSVVKKLADFELPYVSLG

SEQ ID NO: 82570 - protein, 100 aa, Homo sapiens
  Payload ID: 16427
  Gene Symbol: SNX31
  Gene Name: sorting nexin 31
  ENSP ID: ENSP00000428262
MESTFVTQAGMQWGDLGLLQPLPPRFKGFSCLSLPSSPLHSSPLDLHQLYSVHLDGFLFCRVRYSQLHGWNEQLRRVFGNCLPPFPPKYYLAMTTAMADE

SEQ ID NO: 82571 - protein, 137 aa, Homo sapiens
  Payload ID: 16427
  Gene Symbol: SNX31
  Gene Name: sorting nexin 31
  ENSP ID: ENSP00000428855
MESTFVTQAGMQWGDLGLLQPLPPRFKGFSCLSLPSSPLHSSPLDLHQLRRVFGNCLPPFPPKYYLAMTTAMADERRDQLEQYLQNVTMDPNVLRSDVFVEFLKLAQLNTFDIATKKAYLDIFLPNEQSIRIEIITS

SEQ ID NO: 82572 - protein, 48 aa, Homo sapiens
  Payload ID: 16427
  Gene Symbol: SNX31
  Gene Name: sorting nexin 31
  ENSP ID: ENSP00000429110
  MOD_RES (1)..(1): Any amino acid
XMISEKMVKLAAENTEMQKDYSSFLSRKSKIKIAKDDCVFGNIKEEDL

SEQ ID NO: 82573 - protein, 403 aa, Homo sapiens
  Payload ID: 16428
  Gene Symbol: SNX32
  Gene Name: sorting nexin 32
  Uniprot ID: Q86XE0
  ENSP ID: ENSP00000310620
METYAEVGKEGKPSCASVDLQGDSSLQVEISDAVSERDKVKFTVQTKSCLPHFAQTEFSVVRQHEEFIWLHDAYVENEEYAGLIIPPAPPRPDFEASREKLQKLGEGDSSVTREEFAKMKQELEAEYLAIFKKTVAMHEVFLQRLAAHPTLRRDHNFFVFLEYGQDLSVRGKNRKELLGGFLRNIVKSADEALITGMSGLKEVDDFFEHERTFLLEYHTRIRDACLRADRVMRAHKCLADDYIPISAALSSLGTQEVNQLRTSFLKLAELFERLRKLEGRVASDEDLKLSDMLRYYMRDSQAAKDLLYRRLRALADYENANKALDKARTRNREVRPAESHQQLCCQRFERLSDSAKQELMDFKSRRVSSFRKNLIELAELELKHAKASTLILRNTLVALKGEP

SEQ ID NO: 82574 - protein, 574 aa, Homo sapiens
  Payload ID: 16429
  Gene Symbol: SNX33
  Gene Name: sorting nexin 33
  Uniprot ID: Q8WV41
  ENSP ID: ENSP00000311427
MALKGRALYDFHSENKEEISIQQDEDLVIFSETSLDGWLQGQNSRGETGLFPASYVEIVRSGISTNHADYSSSPAGSPGAQVSLYNSPSVASPARSGGGSGFLSNQGSFEEDDDDDWDDWDDGCTVVEEPRAGGLGTNGHPPLNLSYPGAYPSQHMAFRPKPPLERQDSLASAKRGSVVGRNLNRFSCFVRSGVEAFILGDVPMMAKIAETYSIEMGPRGPQWKANPHPFACSVEDPTKQTKFKGIKSYISYKLTPTHAASPVYRRYKHFDWLYNRLLHKFTVISVPHLPEKQATGRFEEDFIEKRKRRLILWMDHMTSHPVLSQYEGFQHFLSCLDDKQWKMGKRRAEKDEMVGASFLLTFQIPTEHQDLQDVEDRVDTFKAFSKKMDDSVLQLSTVASELVRKHVGGFRKEFQKLGSAFQAISHSFQMDPPFCSEALNSAISHTGRTYEAIGEMFAEQPKNDLFQMLDTLSLYQGLLSNFPDIIHLQKGAFAKVKESQRMSDEGRMVQDEADGIRRRCRVVGFALQAEMNHFHQRRELDFKHMMQNYLRQQILFYQRVGQQLEKTLRMYDNL

SEQ ID NO: 82575 - protein, 283 aa, Homo sapiens
  Payload ID: 16429
  Gene Symbol: SNX33
  Gene Name: sorting nexin 33
  ENSP ID: ENSP00000455436
  MOD_RES (1)..(1): Any amino acid
XRGPQWKANPHPFACSVEDPTKQTKFKGIKSYISYKLTPTHAASPVYRRYKHFDWLYNRLLHKFTVISVPHLPEKQATGRFEEDFIEKRKRRLILWMDHMTSHPVLSQYEGFQHFLSCLDDKQWKMGKRRAEKDEMVGASFLLTFQIPTEHQDLQDVEDRVDTFKAFSKKMDDSVLQLSTVASELGLLSNFPDIIHLQKGAFAKVKESQRMSDEGRMVQDEADGIRRRCRVVGFALQAEMNHFHQRRELDFKHMMQNYLRQQILFYQRVGQQLEKTLRMYDNL

SEQ ID NO: 82576 - protein, 450 aa, Homo sapiens
  Payload ID: 16430
  Gene Symbol: SNX4
  Gene Name: sorting nexin 4
  Uniprot ID: O95219
  ENSP ID: ENSP00000251775
MEQAPPDPERQLQPAPLEPLGSPDAGLGAAVGKEAEGAGEESSGVDTMTHNNFWLKKIEISVSEAEKRTGRNAMNMQETYTAYLIETRSVEHTDGQSVLTDSLWRRYSEFELLRSYLLVYYPHIVVPPLPEKRAEFVWHKLSADNMDPDFVERRRIGLENFLLRIASHPILCRDKIFYLFLTQEGNWKETVNETGFQLKADSRLKALNATFRVKNPDKRFTDLKHYSDELQSVISHLLRVRARVADRLYGVYKVHGNYGRVFSEWSAIEKEMGDGLQSAGHHMDVYASSIDDILEDEEHYADQLKEYLFYAEALRAVCRKHELMQYDLEMAAQDLASKKQQCEELVTGTVRTFSLKGMTTKLFGQETPEQREARIKVLEEQINEGEQQLKSKNLEGREFVKNAWADIERFKEQKNRDLKEALISYAVMQISMCKKGIQVWTNAKECFSKM

SEQ ID NO: 82577 - protein, 155 aa, Homo sapiens
  Payload ID: 16430
  Gene Symbol: SNX4
  Gene Name: sorting nexin 4
  ENSP ID: ENSP00000420175
MTHNNFWLKKIEISVSEAEKRTGRNAMNMQETYTAYLIETRSVEHTDGQSVLTDSLWRRYSEFELLRSYLLVYYPHIVVPPLPEKRAEFVWHKLSADNMDPDFVERRRIGLENFLLRIASHPILCRDKIFYLFLTQEGNWKETVNETGFQLKEIY

SEQ ID NO: 82578 - protein, 49 aa, Homo sapiens
  Payload ID: 16430
  Gene Symbol: SNX4
  Gene Name: sorting nexin 4
  ENSP ID: ENSP00000420526
MEQAPPDPERQLQPAPLEPLGSPDAGLGAAVGKEAEGAGEESSGVDTVS

SEQ ID NO: 82579 - protein, 404 aa, Homo sapiens
  Payload ID: 16431
  Gene Symbol: SNX5
  Gene Name: sorting nexin 5
  Uniprot ID: Q9Y5X3
  ENSP ID: ENSP00000366988
MAAVPELLQQQEEDRSKLRSVSVDLNVDPSLQIDIPDALSERDKVKFTVHTKTTLPTFQSPEFSVTRQHEDFVWLHDTLIETTDYAGLIIPPAPTKPDFDGPREKMQKLGEGEGSMTKEEFAKMKQELEAEYLAVFKKTVSSHEVFLQRLSSHPVLSKDRNFHVFLEYDQDLSVRRKNTKEMFGGFFKSVVKSADEVLFTGVKEVDDFFEQEKNFLINYYNRIKDSCVKADKMTRSHKNVADDYIHTAACLHSLALEEPTVIKKYLLKVAELFEKLRKVEGRVSSDEDLKLTELLRYYMLNIEAAKDLLYRRTKALIDYENSNKALDKARLKSKDVKLAEAHQQECCQKFEQLSESAKEELINFKRKRVAAFRKNLIEMSELEIKHARNNVSLLQSCIDLFKNN

SEQ ID NO: 82580 - protein, 404 aa, Homo sapiens; identical to SEQ ID NO: 82579
  Payload ID: 16431
  Gene Symbol: SNX5
  Gene Name: sorting nexin 5
  Uniprot ID: Q9Y5X3
  ENSP ID: ENSP00000366998

SEQ ID NO: 82581 - protein, 269 aa, Homo sapiens
  Payload ID: 16431
  Gene Symbol: SNX5
  Gene Name: sorting nexin 5
  ENSP ID: ENSP00000404448
MAAVPELLQQQEEDRSKLRSVSVDLNVDPSLQIDIPDALSERDKVKFTVHTKIPPAPTKPDFDGPREKMQKLGEGEGSMTKEEFAKMKQELEAEYLAVFKKTVSSHEVFLQRLSSHPVLSKDRNFHVFLEYDQDLSVRRKNTKEMFGGFFKSVVKSADEVLFTGVKEVDDFFEQEKNFLINYYNRIKDSCVKADKMTRSHKNVADDYIHTAACLHSLALEEPTVIKKYLLKVAELFEKLRKVEGRVSSDEDLKLTELLRYYMLNIEAAK

SEQ ID NO: 82582 - protein, 230 aa, Homo sapiens
  Payload ID: 16431
  Gene Symbol: SNX5
  Gene Name: sorting nexin 5
  ENSP ID: ENSP00000406731
MAAVPELLQQQEEDRSKTTLPTFQSPEFSVTRQHEDFVWLHDTLIETTDYAGLIIPPAPTKPDFDGPREKMQKLGEGEGSMTKEEFAKMKQELEAEYLAVFKKTVSSHEVFLQRLSSHPVLSKDRNFHVFLEYDQDLSVRRKNTKEMFGGFFKSVVKSADEVLFTGVKEVDDFFEQEKNFLINYYNRIKDSCVKADKMTRSHKNVADDYIHTAACLHSLALEEPTVIKKY

SEQ ID NO: 82583 - protein, 126 aa, Homo sapiens
  Payload ID: 16431
  Gene Symbol: SNX5
  Gene Name: sorting nexin 5
  Uniprot ID: Q9Y5X3
  ENSP ID: ENSP00000475510
MAAVPELLQQQEEDRSKVRSSQPQTPGRAALRAPGSLHSFPCASIGRGCSPPSPAREAPVRPGRPLSLVFTEGCPGESLWMSRILLGQNQRRGTLAPAQAPVPSGLGEMISGDPGMFFLKLSSASW

SEQ ID NO: 82584 - protein, 31 aa, Homo sapiens
  Payload ID: 16431
  Gene Symbol: SNX5
  Gene Name: sorting nexin 5
  ENSP ID: ENSP00000475606
MAAVPELLQQQEEDRSKAVAARRHPQRGKHP

SEQ ID NO: 82585 - protein, 31 aa, Homo sapiens; identical to SEQ ID NO: 82584
  Payload ID: 16431
  Gene Symbol: SNX5
  Gene Name: sorting nexin 5
  ENSP ID: ENSP00000475983

SEQ ID NO: 82586 - protein, 55 aa, Homo sapiens
  Payload ID: 16431
  Gene Symbol: SNX5
  Gene Name: sorting nexin 5
  ENSP ID: ENSP00000476097
MAAVPELLQQQEEDRSKNQRRGTLAPAQAPVPSGLGEMISGDPGMFFLKLSSASW

SEQ ID NO: 82587 - protein, 170 aa, Homo sapiens
  Payload ID: 16431
  Gene Symbol: SNX5
  Gene Name: sorting nexin 5
  ENSP ID: ENSP00000479021
  MOD_RES (1)..(1): Any amino acid
XKSADEVLFTGVKEVDDFFEQEKNFLINYYNRIKDSCVKADKMTRSHKNVADDYIHTAACLHSLALEEPTVIKKYLLKVAELFEKLRKVEGRVSSDEDLKLTELLRYYMLNIEAAKDLLYRRTKALIDYENSNKALDKARLKSKDVKLAEAHQQECCQKFEQLSESAKEG

SEQ ID NO: 82588 - protein, 418 aa, Homo sapiens
  Payload ID: 16432
  Gene Symbol: SNX6
  Gene Name: sorting nexin 6
  ENSP ID: ENSP00000355217
MRACAGPRLGAAMMEGLDDGPDFLSEEDRGLKAINVDLQSDAALQVDISDALSERDKVKFTVHTKSSLPNFKQNEFSVVRQHEEFIWLHDSFVENEDYAGYIIPPAPPRPDFDASREKLQKLGEGEGSMTKEEFTKMKQELEAEYLAIFKKTVAMHEVFLCRVAAHPILRRDLNFHVFLEYNQDLSVRGKNKKEKLEDFFKNMVKSADGVIVSGVKDVDDFFEHERTFLLEYHNRVKDASAKSDRMTRSHKSAADDYNRIGSSLYALGTQDSTDICKFFLKVSELFDKTRKIEARVSADEDLKLSDLLKYYLRESQAAKDLLYRRSRSLVDYENANKALDKARAKNKDVLQAETSQQLCCQKFEKISESAKQELIDFKTRRVAAFRKNLVELAELELKHAKGNLQLLQNCLAVLNGDT

SEQ ID NO: 82589 - protein, 290 aa, Homo sapiens
  Payload ID: 16432
  Gene Symbol: SNX6
  Gene Name: sorting nexin 6
  Uniprot ID: Q9UNH7
  ENSP ID: ENSP00000379779
MTKEEFTKMKQELEAEYLAIFKKTVAMHEVFLCRVAAHPILRRDLNFHVFLEYNQDLSVRGKNKKEKLEDFFKNMVKSADGVIVSGVKDVDDFFEHERTFLLEYHNRVKDASAKSDRMTRSHKSAADDYNRIGSSLYALGTQDSTDICKFFLKVSELFDKTRKIEARVSADEDLKLSDLLKYYLRESQAAKDLLYRRSRSLVDYENANKALDKARAKNKDVLQAETSQQLCCQKFEKISESAKQELIDFKTRRVAAFRKNLVELAELELKHAKGNLQLLQNCLAVLNGDT

SEQ ID NO: 82590 - protein, 132 aa, Homo sapiens
  Payload ID: 16432
  Gene Symbol: SNX6
  Gene Name: sorting nexin 6
  ENSP ID: ENSP00000450863
MRACAGPRLGAAMMEGLDDGPDFLSEEDRGLKAINVDLQSDAALQVDISDALSERDKVKFTVHTKIPPAPPRPDFDASREKLQKLGEGEGSMTKEEFTKMKQELEAGWITENLGFILLLPPSSASFFFVFTE

SEQ ID NO: 82591 - protein, 150 aa, Homo sapiens
  Payload ID: 16432
  Gene Symbol: SNX6
  Gene Name: sorting nexin 6
  ENSP ID: ENSP00000451415
  MOD_RES (1)..(1): Any amino acid
XRLGAAMMEGLDDGPDFLSEEDRGLKAINVDLQSDAALQVDISDALSERDKVKFTVHTKSSLPNFKQNEFSVVRQHEEFIWLHDSFVENEDYAGYIIPPAPPRPDFDASREKLQKLGEGEGSMTKEEFTKMKQELEADQTSPIIGPAGLL

SEQ ID NO: 82592 - protein, 169 aa, Homo sapiens
  Payload ID: 16432
  Gene Symbol: SNX6
  Gene Name: sorting nexin 6
  ENSP ID: ENSP00000452082
MRACAGPRLGAAMMEGLDDGPDFLSEEDRGLKAINVDLQSDAALQVDISDALSERDKVKFTVHTKSSLPNFKQNEFSVVRQHEEFIWLHDSFVENEDYAGYIIPPAPPRPDFDASREKLQKLGEGEGSMTKEEFTKMKQELEAGWITENLGFILLLPPSSASFFFVFTE

SEQ ID NO: 82593 - protein, 32 aa, Homo sapiens
  Payload ID: 16432
  Gene Symbol: SNX6
  Gene Name: sorting nexin 6
  ENSP ID: ENSP00000452231
MRACAGPRLGAAMMAWTTARTSSQKRTADLKQ

SEQ ID NO: 82594 - protein, 132 aa, Homo sapiens
  Payload ID: 16432
  Gene Symbol: SNX6
  Gene Name: sorting nexin 6
  ENSP ID: ENSP00000452520
MERPHPPSTLWGHENPFSDLPSGTLNFHPVWTSRTCSRPPFCLSQIVQLKAINVDLQSDAALQVDISDALSERDKVKFTVHTKSSLPNFKQNEFSVVRQHEEFIWLHDSFVENEDYAGYIIPPAPPRPDFDA

SEQ ID NO: 82595 - protein, 239 aa, Homo sapiens
  Payload ID: 16432
  Gene Symbol: SNX6
  Gene Name: sorting nexin 6
  ENSP ID: ENSP00000452577
MRACAGPRLGAAMMEGLDDGPDFLSEEDRGLKAINVDLQSDAALQVDISDALSERDKVKFTVHTKIPPAPPRPDFDASREKLQKLGEGEGSMTKEEFTKMKQELEAEYLAIFKKTVAMHEVFLCRVAAHPILRRDLNFHVFLEYNQDLSVRGKNKKEKLEDFFKNMVKSADGVIVSGVKDVDDFFEHERTFLLEYHNRVKDASAKSDRMTRSHKSAADDYNRIGSSLYALGTQDSTDIC

SEQ ID NO: 82596 - protein, 451 aa, Homo sapiens
  Payload ID: 16433
  Gene Symbol: SNX7
  Gene Name: sorting nexin 7
  Uniprot ID: Q9UNH6
  ENSP ID: ENSP00000304429
MEGERRASQAPSSGLPAGGANGESPGGGAPFPGSSGSSALLQAEVLDLDEDEDDLEVFSKDASLMDMNSFSPMMPTSPLSMINQIKFEDEPDLKDLFITVDEPESHVTTIETFITYRIITKTSRGEFDSSEFEVRRRYQDFLWLKGKLEEAHPTLIIPPLPEKFIVKGMVERFNDDFIETRRKALHKFLNRIADHPTLTFNEDFKIFLTAQAWELSSHKKQGPGLLSRMGQTVRAVASSMRGVKNRPEEFMEMNNFIELFSQKINLIDKISQRIYKEEREYFDEMKEYGPIHILWSASEEDLVDTLKDVASCIDRCCKATEKRMSGLSEALLPVVHEYVLYSEMLMGVMKRRDQIQAELDSKVEVLTYKKADTDLLPEEIGKLEDKVECANNALKADWERWKQNMQNDIKLAFTDMAEENIHYYEQCLATWESFLTSQTNLHLEEASEDKP

SEQ ID NO: 82597 - protein, 108 aa, Homo sapiens
  Payload ID: 16433
  Gene Symbol: SNX7
  Gene Name: sorting nexin 7
  ENSP ID: ENSP00000388266
MDMNSFSPMMPTSPLSMINQIKFEDEPDLKDLFITVDEPESHVTTIETFITYRIITKTSRGEFDSSEFEVRRRYQDFLWLKGKLEEAHPTLIIPPLPEKFIVKGMVER

SEQ ID NO: 82598 - protein, 396 aa, Homo sapiens
  Payload ID: 16433
  Gene Symbol: SNX7
  Gene Name: sorting nexin 7
  ENSP ID: ENSP00000434731
MEGERRASQAPSSGLPAGGANGESPGGGAPFPGSSGSSALLQAEVLDLDEDEDDLEVFSKDASLMDMNSFSPMMPTSPLSMINQIKFEDEPDLKDLFITVDEPESHVTTIETFITYRIITKTSRGEFDSSEFEVRRRYQDFLWLKGKLEEAHPTLIIPELSSHKKQGPGLLSRMGQTVRAVASSMRGVKNRPEEFMEMNNFIELFSQKINLIDKISQRIYKEEREYFDEMKEYGPIHILWSASEEDLVDTLKDVASCIDRCCKATEKRMSGLSEALLPVVHEYVLYSEMLMGVMKRRDQIQAELDSKVEVLTYKKADTDLLPEEIGKLEDKVECANNALKADWERWKQNMQNDIKLAFTDMAEENIHYYEQCLATWESFLTSQTNLHLEEASEDKP

SEQ ID NO: 82599 - protein, 36 aa, Homo sapiens
  Payload ID: 16433
  Gene Symbol: SNX7
  Gene Name: sorting nexin 7
  ENSP ID: ENSP00000435172
MSLQFLKLLLREDLSSDHNAVFITKKPVHFNVTWRY

SEQ ID NO: 82600 - protein, 465 aa, Homo sapiens
  Payload ID: 16434
  Gene Symbol: SNX8
  Gene Name: sorting nexin 8
  Uniprot ID: Q9Y5X2
  ENSP ID: ENSP00000222990
MTGRAMDPLPAAAVGAAAEAEADEEADPPASDLPTPQAIEPQAIVQQVPAPSRMQMPQGNPLLLSHTLQELLARDTVQVELIPEKKGLFLKHVEYEVSSQRFKSSVYRRYNDFVVFQEMLLHKFPYRMVPALPPKRMLGADREFIEARRRALKRFVNLVARHPLFSEDVVLKLFLSFSGSDVQNKLKESAQCVGDEFLNCKLATRAKDFLPADIQAQFAISRELIRNIYNSFHKLRDRAERIASRAIDNAADLLIFGKELSAIGSDTTPLPSWAALNSSTWGSLKQALKGLSVEFALLADKAAQQGKQEENDVVEKLNLFLDLLQSYKDLCERHEKGVLHKHQRALHKYSLMKRQMMSATAQNREPESVEQLESRIVEQENAIQTMELRNYFSLYCLHQETQLIHVYLPLTSHILRAFVNSQIQGHKEMSKVWNDLRPKLSCLFAGPHSTLTPPCSPPEDGLCPH

SEQ ID NO: 82601 - protein, 224 aa, Homo sapiens
  Payload ID: 16434
  Gene Symbol: SNX8
  Gene Name: sorting nexin 8
  ENSP ID: ENSP00000392437
MHPGLPSTLTCSCSLMSDLPTPQAIEPQAIVQQVPAPSRMQMPQGNPLLLSHTLQELLARDTVQVELIPEKKGLFLKHVEYEVSSQRFKSSVYRRYNDFVVFQEMLLHKFPYRMVPALPPKRMLGADREFIEARRRALKRFVNLVARHPLFSEDVVLKLFLSFSGSDVQNKLKESAQCVGDEFLNCKLATRAKDFLPADIQAQFAISRELIRNIYNSFHKLRDR

SEQ ID NO: 82602 - protein, 42 aa, Homo sapiens
  Payload ID: 16434
  Gene Symbol: SNX8
  Gene Name: sorting nexin 8
  ENSP ID: ENSP00000399127
MQMPQGNPLLLSHTLQELLARDTVQVELIPEKKGLFLKHVEY

SEQ ID NO: 82603 - protein, 85 aa, Homo sapiens
  Payload ID: 16434
  Gene Symbol: SNX8
  Gene Name: sorting nexin 8
  ENSP ID: ENSP00000403608
MQMPQGNPLLLSHTLQELLARDTVQVELIPEKKGLFLKHVEYEVSSQRFKSSVYRRYNDFVVFQEMLLHKFPYRMVPALPPKRML

SEQ ID NO: 82604 - protein, 160 aa, Homo sapiens
  Payload ID: 16434
  Gene Symbol: SNX8
  Gene Name: sorting nexin 8
  ENSP ID: ENSP00000406212
MQMPQGNPLLLSHTLQELLARDTVQVELIPEKKGLFLKHVEYEVSSQRFKSSVYRRYNDFVVFQEMLLHKFPYRMVPALPPKRMLGADREFIEARRRALKRFVNLVARHPLFSEDVVLKLFLSFSGSDVQNKLKESAQCVGDEFLNCKLATRAKDFLPAD

SEQ ID NO: 82605 - protein, 176 aa, Homo sapiens
  Payload ID: 16434
  Gene Symbol: SNX8
  Gene Name: sorting nexin 8
  ENSP ID: ENSP00000406954
MQMPQGNPLLLSHTLQELLARDTVQVELIPEKKGLFLKHVEYEVSSQRFKSSVYRRYNDFVVFQEMLLHKFPYRMVPALPPKRMLGADREFIEARRRALKRFVNLVARHPLFSEDVVLKLFLSFSGSDVQNKLKESAQCVGDEFLNCKLATRAKDFLPADIQAQFAISRELIRNIY

SEQ ID NO: 82606 - protein, 595 aa, Homo sapiens
  Payload ID: 16435
  Gene Symbol: SNX9
  Gene Name: sorting nexin 9
  Uniprot ID: Q9Y5X1
  ENSP ID: ENSP00000376024
MATKARVMYDFAAEPGNNELTVNEGEIITITNPDVGGGWLEGRNIKGERGLVPTDYVEILPSDGKDQFSCGNSVADQAFLDSLSASTAQASSSAASNNHQVGSGNDPWSAWSASKSGNWESSEGWGAQPEGAGAQRNTNTPNNWDTAFGHPQAYQGPATGDDDDWDEDWDGPKSSSYFKDSESADAGGAQRGNSRASSSSMKIPLNKFPGFAKPGTEQYLLAKQLAKPKEKIPIIVGDYGPMWVYPTSTFDCVVADPRKGSKMYGLKSYIEYQLTPTNTNRSVNHRYKHFDWLYERLLVKFGSAIPIPSLPDKQVTGRFEEEFIKMRMERLQAWMTRMCRHPVISESEVFQQFLNFRDEKEWKTGKRKAERDELAGVMIFSTMEPEAPDLDLVEIEQKCEAVGKFTKAMDDGVKELLTVGQEHWKRCTGPLPKEYQKIGKALQSLATVFSSSGYQGETDLNDAITEAGKTYEEIASLVAEQPKKDLHFLMECNHEYKGFLGCFPDIIGTHKGAIEKVKESDKLVATSKITLQDKQNMVKRVSIMSYALQAEMNHFHSNRIYDYNSVIRLYLEQQVQFYETIAEKLRQALSRFPVM

SEQ ID NO: 82607 - protein, 63 aa, Homo sapiens
  Payload ID: 16435
  Gene Symbol: SNX9
  Gene Name: sorting nexin 9
  ENSP ID: ENSP00000479382
MYDFAAEPGNNELTVNEGEIITITNPDVGGGWLEGRNIKGERGLVPTDYVEILPSDGKDQFSC

SEQ ID NO: 82608 - protein, 594 aa, Homo sapiens
  Payload ID: 16435
  Gene Symbol: SNX9
  Gene Name: sorting nexin 9
  ENSP ID: ENSP00000482087
STKARVMYDFAAEPGNNELTVNEGEIITITNPDVGGGWLEGRNIKGERGLVPTDYVEILPSDGKDQFSCGNSVADQAFLDSLSASTAQASSSAASNNHQVGSGNDPWSAWSASKSGNWESSEGWGAQPEGAGAQRNTNTPNNWDTAFGHPQAYQGPATGDDDDWDEDWDGPKSSSYFKDSESADAGGAQRGNSRASSSSMKIPLNKFPGFAKPGTEQYLLAKQLAKPKEKIPIIVGDYGPMWVYPTSTFDCVVADPRKGSKMYGLKSYIEYQLTPTNTNRSVNHRYKHFDWLYERLLVKFGSAIPIPSLPDKQVTGRFEEEFIKMRMERLQAWMTRMCRHPVISESEVFQQFLNFRDEKEWKTGKRKAERDELAGVMIFSTMEPEAPDLDLVEIEQKCEAVGKFTKAMDDGVKELLTVGQEHWKRCTGPLPKEYQKIGKALQSLATVFSSSGYQGETDLNDAITEAGKTYEEIASLVAEQPKKDLHFLMECNHEYKGFLGCFPDIIGTHKGAIEKVKESDKLVATSKITLQDKQNMVKRVSIMSYALQAEMNHFHSNRIYDYNSVIRLYLEQQVQFYETIAEKLRQALSRFPVM

SEQ ID NO: 82609 - protein, 84 aa, Homo sapiens
  Payload ID: 16435
  Gene Symbol: SNX9
  Gene Name: sorting nexin 9
  ENSP ID: ENSP00000482920
MYDFAAEPGNNELTVNEGEIITITNPDVGGGWLEGRNIKGERGLVPTDYVEILPSDGKDQFSCGNSVADQAFLDSLSASTAQAS

SEQ ID NO: 82610 - protein, 199 aa, Homo sapiens
  Payload ID: 16436
  Gene Symbol: SNX21
  Gene Name: sorting nexin family member 21
  Uniprot ID: Q969T3
  ENSP ID: ENSP00000344586
MHRGTQEGAMASRLLHRLRHALAGDGPGEAAASPEAEQFPESSELEDDDAEGLSSRLSGTLSFTSAEDDEDDEDEDDEEAGPDQLPLGDGTSGEDAERSPPPDGQWGSQLLARQLQDFWKKSRNTLAPQRLLFEVTSANVVKDPPSKYVLYTLAVIGPGPPDCQPAQISRRYSDFERLHRNLQRQFRGPMAAISFPQSH

SEQ ID NO: 82611 - protein, 149 aa, Homo sapiens
  Payload ID: 16436
  Gene Symbol: SNX21
  Gene Name: sorting nexin family member 21
  ENSP ID: ENSP00000361619
MASRLLHRLRHALAGDGPGEAAASPEAEQFPESSELEDDDAEGLSSRLSGTLSFTSAEDDEDDEDEDDEEAGPDQLPLGDGTSGEDAERSPPPDGQWGSQLLARQLQDFWKKSRNTLAPQRLLFEVTSANVVKDPPSKYVTNLSSTPSP

SEQ ID NO: 82612 - protein, 364 aa, Homo sapiens
  Payload ID: 16436
  Gene Symbol: SNX21
  Gene Name: sorting nexin family member 21
  ENSP ID: ENSP00000361620
MASRLLHRLRHALAGDGPGEAAASPEAEQFPESSELEDDDAEGLSSRLSGTLSFTSAEDDEDDEDEDDEEAGPDQLPLGDGTSGEDAERSPPPDGQWGSQLLARQLQDFWKKSRNTLAPQRLLFEVTSANVVKDPPSKYVLYTLAVIGPGPPDCQPAQISRRYSDFERLHRNLQRQFRGPMAAISFPRKRLRRNFTAETIARRSRAFEQFLGHLQAVPELRHAPDLQDFFVLPELRRAQSLTCTGLYREALALWANAWQLQAQLGTPSGPDRPLLTLAGLAVCHQELEDPGEARACCEKALQLLGDKSLHPLLAPFLEAHVRLSWRLGLDKRQSEARLQALQEAGLTPTPPPSLKELLIKEVLD

SEQ ID NO: 82613 - protein, 373 aa, Homo sapiens
  Payload ID: 16436
  Gene Symbol: SNX21
  Gene Name: sorting nexin family member 21
  Uniprot ID: Q969T3
  ENSP ID: ENSP00000418593
MHRGTQEGAMASRLLHRLRHALAGDGPGEAAASPEAEQFPESSELEDDDAEGLSSRLSGTLSFTSAEDDEDDEDEDDEEAGPDQLPLGDGTSGEDAERSPPPDGQWGSQLLARQLQDFWKKSRNTLAPQRLLFEVTSANVVKDPPSKYVLYTLAVIGPGPPDCQPAQISRRYSDFERLHRNLQRQFRGPMAAISFPRKRLRRNFTAETIARRSRAFEQFLGHLQAVPELRHAPDLQDFFVLPELRRAQSLTCTGLYREALALWANAWQLQAQLGTPSGPDRPLLTLAGLAVCHQELEDPGEARACCEKALQLLGDKSLHPLLAPFLEAHVRLSWRLGLDKRQSEARLQALQEAGLTPTPPPSLKELLIKEVLD

SEQ ID NO: 82614 - protein, 158 aa, Homo sapiens
  Payload ID: 16436
  Gene Symbol: SNX21
  Gene Name: sorting nexin family member 21
  Uniprot ID: Q969T3
  ENSP ID: ENSP00000420169
MHRGTQEGAMASRLLHRLRHALAGDGPGEAAASPEAEQFPESSELEDDDAEGLSSRLSGTLSFTSAEDDEDDEDEDDEEAGPDQLPLGDGTSGEDAERSPPPDGQWGSQLLARQLQDFWKKSRNTLAPQRLLFEVTSANVVKDPPSKYVTNLSSTPSP

SEQ ID NO: 82615 - protein, 165 aa, Homo sapiens
  Payload ID: 16436
  Gene Symbol: SNX21
  Gene Name: sorting nexin family member 21
  ENSP ID: ENSP00000478395
MHRGTQEGAMASRLLHRLRHALAGDGPGEAAASPEAEQFPESSELEDDDAEGLSSRLSGTLSFTSAEDDEDDEDEDDEEAGPDQLPLGDGTSGEDAERSPPPDGQWGSQLLARQLQDFWKKSRNTLAPQRLLFEVTSANVVKDPPSKYVRQGLAMLPRLVSNSWP

SEQ ID NO: 82616 - protein, 435 aa, Homo sapiens
  Payload ID: 16437
  Gene Symbol: SNX27
  Gene Name: sorting nexin family member 27
  ENSP ID: ENSP00000357831
MGLSFSLFPLRNHVNVEGATHKQVVDLIRAGEKELILTVLSVPPHEADNLDPSDDSLGQSFYDYTEKQAVPISVPRYKHVEQNGEKFVVYNVYMAGRQLCSKRYREFAILHQNLKREFANFTFPRLPGKWPFSLSEQQLDARRRGLEEYLEKVCSIRVIGESDIMQEFLSESDENYNGVSDVELRVALPDGTTVTVRVKKNSTTDQVYQAIAAKVGMDSTTVNYFALFEVISHSFVRKLAPNEFPHKLYIQNYTSAVPGTCLTIRKWLFTTEEEILLNDNDLAVTYFFHQAVDDVKKGYIKAEEKSYQLQKLYEQRKMVMYLNMLRTCEGYNEIIFPHCACDSRRKGHVITAISITHFKLHACTEEGQLENQVIAFEWDEMQRWDTDEEGMAFCFEYARGEKKPRWVKIFTPYFNYMHECFERVFCELKWRKEEY

SEQ ID NO: 82617 - protein, 65 aa, Homo sapiens
  Payload ID: 16437
  Gene Symbol: SNX27
  Gene Name: sorting nexin family member 27
  ENSP ID: ENSP00000357834
MADEDGEGIHPSAPHRNGGGGGGGGSGLHCAGNGGGGGGGPRVVRIVKSESGYGFNVRGQEPREC

SEQ ID NO: 82618 - protein, 528 aa, Homo sapiens
  Payload ID: 16437
  Gene Symbol: SNX27
  Gene Name: sorting nexin family member 27
  Uniprot ID: Q96L92
  ENSP ID: ENSP00000357836
MADEDGEGIHPSAPHRNGGGGGGGGSGLHCAGNGGGGGGGPRVVRIVKSESGYGFNVRGQVSEGGQLRSINGELYAPLQHVSAVLPGGAADRAGVRKGDRILEVNHVNVEGATHKQVVDLIRAGEKELILTVLSVPPHEADNLDPSDDSLGQSFYDYTEKQAVPISVPRYKHVEQNGEKFVVYNVYMAGRQLCSKRYREFAILHQNLKREFANFTFPRLPGKWPFSLSEQQLDARRRGLEEYLEKVCSIRVIGESDIMQEFLSESDENYNGVSDVELRVALPDGTTVTVRVKKNSTTDQVYQAIAAKVGMDSTTVNYFALFEVISHSFVRKLAPNEFPHKLYIQNYTSAVPGTCLTIRKWLFTTEEEILLNDNDLAVTYFFHQAVDDVKKGYIKAEEKSYQLQKLYEQRKMVMYLNMLRTCEGYNEIIFPHCACDSRRKGHVITAISITHFKLHACTEEGQLENQVIAFEWDEMQRWDTDEEGMAFCFEYARGEKKPRWVKIFTPYFNYMHECFERVFCELKWRKEEY

SEQ ID NO: 82619 - protein, 541 aa, Homo sapiens
  Payload ID: 16437
  Gene Symbol: SNX27
  Gene Name: sorting nexin family member 27
  Uniprot ID: Q96L92
  ENSP ID: ENSP00000400333
MADEDGEGIHPSAPHRNGGGGGGGGSGLHCAGNGGGGGGGPRVVRIVKSESGYGFNVRGQVSEGGQLRSINGELYAPLQHVSAVLPGGAADRAGVRKGDRILEVNHVNVEGATHKQVVDLIRAGEKELILTVLSVPPHEADNLDPSDDSLGQSFYDYTEKQAVPISVPRYKHVEQNGEKFVVYNVYMAGRQLCSKRYREFAILHQNLKREFANFTFPRLPGKWPFSLSEQQLDARRRGLEEYLEKVCSIRVIGESDIMQEFLSESDENYNGVSDVELRVALPDGTTVTVRVKKNSTTDQVYQAIAAKVGMDSTTVNYFALFEVISHSFVRKLAPNEFPHKLYIQNYTSAVPGTCLTIRKWLFTTEEEILLNDNDLAVTYFFHQAVDDVKKGYIKAEEKSYQLQKLYEQRKMVMYLNMLRTCEGYNEIIFPHCACDSRRKGHVITAISITHFKLHACTEEGQLENQVIAFEWDEMQRWDTDEEGMAFCFEYARGEKKPRWVKIFTPYFNYMHECFERVFCELKWRKENIFQMARSQQRDVAT

SEQ ID NO: 82620 - protein, 437 aa, Homo sapiens
  Payload ID: 16438
  Gene Symbol: SNX30
  Gene Name: sorting nexin family member 30
  Uniprot ID: Q5VWJ9
  ENSP ID: ENSP00000363349
MAGGPPKALPSTGPHSLRDMPHPLAGSSSEEAVGGDSTPSPDLLMARSFGDKDLILPNGGTPAGTSSPASSSSLLNRLQLDDDIDGETRDLFVIVDDPKKHVCTMETYITYRITTKSTRVEFDLPEYSVRRRYQDFDWLRSKLEESQPTHLIPPLPEKFVVKGVVDRFSEEFVETRRKALDKFLKRITDHPVLSFNEHFNIFLTAKDLNAYKKQGIALLTRMGESVKHVTGGYKLRTRPLEFAAIGDYLDTFALKLGTIDRIAQRIIKEEIEYLVELREYGPVYSTWSALEGELAEPLEGVSACIGNCSTALEELTDDMTEDFLPVLREYILYSDSMKSVLKKRDQVQAEYEAKLEAVALRKEDRPKVPADVEKCQDRMECFNADLKADMERWQNNKRQDFRQLLMGMADKNIQYYEKCLMAWESIIPLLQEKQEAK

SEQ ID NO: 82621 - protein, 124 aa, Homo sapiens
  Payload ID: 16438
  Gene Symbol: SNX30
  Gene Name: sorting nexin family member 30
  ENSP ID: ENSP00000390454
  MOD_RES (1)..(1): Any amino acid
XSACIGNCSTALEELTDDMTEDFLPVLREYILYSDSMKSVLKKRDQVQAEYEAKLEAVALRKEDRPKVPADVEKCQDRMECFNADLKADMERWQNNKRQDFRQLLMGMADKNIQYYEKSIADLK

SEQ ID NO: 82622 - protein, 549 aa, Homo sapiens
  Payload ID: 16439
  Gene Symbol: SOWAHA
  Gene Name: sosondowah ankyrin repeat domain family member A
  Uniprot ID: Q2M3V2
  ENSP ID: ENSP00000367965
MALAAAAAAAAAGVSQAAVLGFLQEHGGKVRNSELLSRFKPLLDAGDPRGRAARRDRFKQFVNNVAVVKELDGVKFVVLRKKPRPPEPEPAPFGPPGAAAQPSKPTSTVLPRSASAPGAPPLVRVPRPVEPPGDLGLPTEPQDTPGGPASEPAQPPGERSADPPLPALELAQATERPSADAAPPPRAPSEAASPCSDPPDAEPGPGAAKGPPQQKPCMLPVRCVPAPATLRLRAEEPGLRRQLSEEPSPRSSPLLLRRLSVEESGLGLGLGPGRSPHLRRLSRAGPRLLSPDAEELPAAPPPSAVPLEPSEHEWLVRTAGGRWTHQLHGLLLRDRGLAAKRDFMSGFTALHWAAKSGDGEMALQLVEVARRSGAPVDVNARSHGGYTPLHLAALHGHEDAAVLLVVRLGAQVHVRDHSGRRAYQYLRPGSSYALRRLLGDPGLRGTTEPDATGGGSGSLAARRPVQVAATILSSTTSAFLGVLADDLMLQDLARGLKKSSSFSKFLSASPMAPRKKTKIRGGLPAFSEISRRPTPGPLAGLVPSLPPTT

SEQ ID NO: 82623 - protein, 793 aa, Homo sapiens
  Payload ID: 16440
  Gene Symbol: SOWAHB
  Gene Name: sosondowah ankyrin repeat domain family member B
  Uniprot ID: A6NEL2
  ENSP ID: ENSP00000334879
MARELSQEALLDFLCQAGGRVTNAALLSHFKSFLRDPDASPSQHQHRRELFKGFVNSVAAVRQDPDGTKYVVLKRRYRDLLGEEGLQRPREPPAAAPSAGGAAPCSPRGARRGEPPQQQPRRRRREKEPEEEPAGAAARAADAACNGLPGSDSRRAPGKGGGSKGSPGQRPPVPAAAAAGAQARASCAAAKTQGRCCWECLQNNLAVLPGELGALPHSATAEEKPARALPAQDDRGASREREEGALAEPAPVPAVAHSPPATVEAATSRASPPALLPGPAPRGDRPELLTPSSLHYSTLQQQQQRTREWVARHPQVPEARDQGPIRAWSVLPDNFLQLPLEPGSTEPNSEPPDPCLSSHSLFPVVPDESWESWAGNPSLTVFRSIRCQLSLQDLDDFVDQESDGSEESSSGPKDSPGASEEGLQVVLGTPDRGKLRNPAGGLSVSRKEGSPSRSPQGLRNRGDGHISQQVPAGANGLAGHPLKPLPWPVPKLRRSLRRSSLAGRAKLSSSDEEYLDEGLLKRSRRPPRSRKPSKAGTAPSPRVDAGLSLKLAEVKAVVAERGWRHSLWVPSGEGSAALAPHRTSEHKSSLVPLDAREHEWIVKLASGSWIQVWTLFWEDPQLALHKDFLTGYTALHWIAKHGDLRALQDLVSGAKKAGIVLDVNVRSSCGYTPLHLAAIHGHQGVIKLLVQRLASRVNVRDSSGKKPWQYLTSNTSGEIWQLLGAPRGKPIFPVYPLVGSSSPTRKAKSKEISRSVTRKTSFAALLKSQHNKWKLANQYEKFHSPREREEYSD

SEQ ID NO: 82624 - protein, 525 aa, Homo sapiens
  Payload ID: 16441
  Gene Symbol: SOWAHC
  Gene Name: sosondowah ankyrin repeat domain family member C
  Uniprot ID: Q53LP3
  ENSP ID: ENSP00000365830
MEGPAEWGPEAALGPEAVLRFLAERGGRALHAELVQHFRGALGGEPEQRARARAHFKELVNAVATVRVDPADGAKYVHLKKRFCEGPSEPSGDPPRIQVTAEPEAPDGPAGPEARDRLPDAAAPESLPGQGRELGEGEPPAPAHWPPLSAGARRKNSRRDVQPLPRTPAPGPSEDLELPPHGCEEADRGSSLVGATAQRPARQNLRDLVMGSSPQLKRSVCPGGSSPGSSSGGGRGRGGGDSDSASVASSSAEEESSGGGSVTLDPLEHAWMLSASDGKWDSLEGLLTCEPGLLVKRDFITGFTCLHWAAKHGRQELLAMLVNFANKHQLPVNIDARTSGGYTALHLAAMHGHVEVVKLLVGAYDADVDIRDYSGKKASQYLSRSIAEEIKNLVGALDEGDGESAAGSGGGRWRLSKVLPSHLITYKLSHALEDGGDHHHHHHSAEGWVGGKAKDPGRKASGSSSGRIKPRLNKIRFRTQIVHTTPSFRDPEQPLEGRGEEGVGEERPVKGHSPFTLRPKSNVFG

SEQ ID NO: 82625 - protein, 315 aa, Homo sapiens
  Payload ID: 16442
  Gene Symbol: SOWAHD
  Gene Name: sosondowah ankyrin repeat domain family member D
  Uniprot ID: A6NJG2
  ENSP ID: ENSP00000340975
MAQLGGAANRAPTASLAPTSQSLRCAPQPRPSRADTGSLGRYWGKAAAAASREHPFPGTLMHSAAGSGRRRGALRELLGLQRAAPAGWLSEERAEELGGPSGPGSSRLCLEPREHAWILAAAEGRYEVLRELLEAEPELLLRGDPITGYSVLHWLAKHGRHEELILVHDFALRRGLRLDVSAPGSGGLTPLHLAALQGHDMVIKVLVGALGADATRRDHSGHRACHYLRPDAPWRLRELSGAEEWEMESGSGCTNLNNNSSGTTAWRAASAVGATAVETSRRVAASRTKAKDTAGSRVAQMHSLFRHLFPSFQDR

SEQ ID NO: 82626 - protein, 785 aa, Homo sapiens
  Payload ID: 16443
  Gene Symbol: SP1
  Gene Name: Sp1 transcription factor
  Uniprot ID: P08047
  ENSP ID: ENSP00000329357
MSDQDHSMDEMTAVVKIEKGVGGNNGGNGNGGGAFSQARSSSTGSSSSTGGGGQESQPSPLALLAATCSRIESPNENSNNSQGPSQSGGTGELDLTATQLSQGANGWQIISSSSGATPTSKEQSGSSTNGSNGSESSKNRTVSGGQYVVAAAPNLQNQQVLTGLPGVMPNIQYQVIPQFQTVDGQQLQFAATGAQVQQDGSGQIQIIPGANQQIITNRGSGGNIIAAMPNLLQQAVPLQGLANNVLSGQTQYVTNVPVALNGNITLLPVNSVSAATLTPSSQAVTISSSGSQESGSQPVTSGTTISSASLVSSQASSSSFFTNANSYSTTTTTSNMGIMNFTTSGSSGTNSQGQTPQRVSGLQGSDALNIQQNQTSGGSLQAGQQKEGEQNQQTQQQQILIQPQLVQGGQALQALQAAPLSGQTFTTQAISQETLQNLQLQAVPNSGPIIIRTPTVGPNGQVSWQTLQLQNLQVQNPQAQTITLAPMQGVSLGQTSSSNTTLTPIASAASIPAGTVTVNAAQLSSMPGLQTINLSALGTSGIQVHPIQGLPLAIANAPGDHGAQLGLHGAGGDGIHDDTAGGEEGENSPDAQPQAGRRTRREACTCPYCKDSEGRGSGDPGKKKQHICHIQGCGKVYGKTSHLRAHLRWHTGERPFMCTWSYCGKRFTRSDELQRHKRTHTGEKKFACPECPKRFMRSDHLSKHIKTHQNKKGGPGVALSVGTLPLDSGAGSEGSGTATPSALITTNMVAMEAICPEGIARLANSGINVMQVADLQSINISGNGF

SEQ ID NO: 82627 - protein, 778 aa, Homo sapiens
  Payload ID: 16443
  Gene Symbol: SP1
  Gene Name: Sp1 transcription factor
  Uniprot ID: P08047
  ENSP ID: ENSP00000404263
MDEMTAVVKIEKGVGGNNGGNGNGGGAFSQARSSSTGSSSSTGGGGQESQPSPLALLAATCSRIESPNENSNNSQGPSQSGGTGELDLTATQLSQGANGWQIISSSSGATPTSKEQSGSSTNGSNGSESSKNRTVSGGQYVVAAAPNLQNQQVLTGLPGVMPNIQYQVIPQFQTVDGQQLQFAATGAQVQQDGSGQIQIIPGANQQIITNRGSGGNIIAAMPNLLQQAVPLQGLANNVLSGQTQYVTNVPVALNGNITLLPVNSVSAATLTPSSQAVTISSSGSQESGSQPVTSGTTISSASLVSSQASSSSFFTNANSYSTTTTTSNMGIMNFTTSGSSGTNSQGQTPQRVSGLQGSDALNIQQNQTSGGSLQAGQQKEGEQNQQTQQQQILIQPQLVQGGQALQALQAAPLSGQTFTTQAISQETLQNLQLQAVPNSGPIIIRTPTVGPNGQVSWQTLQLQNLQVQNPQAQTITLAPMQGVSLGQTSSSNTTLTPIASAASIPAGTVTVNAAQLSSMPGLQTINLSALGTSGIQVHPIQGLPLAIANAPGDHGAQLGLHGAGGDGIHDDTAGGEEGENSPDAQPQAGRRTRREACTCPYCKDSEGRGSGDPGKKKQHICHIQGCGKVYGKTSHLRAHLRWHTGERPFMCTWSYCGKRFTRSDELQRHKRTHTGEKKFACPECPKRFMRSDHLSKHIKTHQNKKGGPGVALSVGTLPLDSGAGSEGSGTATPSALITTNMVAMEAICPEGIARLANSGINVMQVADLQSINISGNGF

SEQ ID NO: 82628 - protein, 162 aa, Homo sapiens
  Payload ID: 16443
  Gene Symbol: SP1
  Gene Name: Sp1 transcription factor
  ENSP ID: ENSP00000457804
MSDQDHSMDEMTAVVKIEKGVGGNNGGNGNGGGAFSQARSSSTGSSSSTGGGGQGANGWQIISSSSGATPTSKEQSGSSTNGSNGSESSKNRTVSGGQYVVAAAPNLQNQQVLTGLPGVMPNIQYQVIPQFQTVDGQQLQFAATGAQVQQDGSGQIQIIPGA

SEQ ID NO: 82629 - protein, 230 aa, Homo sapiens
  Payload ID: 16443
  Gene Symbol: SP1
  Gene Name: Sp1 transcription factor
  ENSP ID: ENSP00000458133
MDEMTAVVKIEKGVGGNNGGNGNGGGAFSQARSSSTGSSSSTGGGGQESQPSPLALLAATCSRIESPNENSNNSQGPSQSGGTGELDLTATQLSQGANGWQIISSSSGATPTSKEQSGSSTNGSNGSESSKNRTVSGGQYVVAAAPNLQNQQVLTGLPGVMPNIQYQVIPQFQTVDGQQLQFAATGAQVQQDGSGQIQIIPGANQQIITNRGSGGNIIAAMPNLLQQAVP

SEQ ID NO: 82630 - protein, 879 aa, Homo sapiens
  Payload ID: 16444
  Gene Symbol: SP100
  Gene Name: SP100 nuclear antigen
  Uniprot ID: P23497
  ENSP ID: ENSP00000264052
MAGGGGDLSTRRLNECISPVANEMNHLPAHSHDLQRMFTEDQGVDDRLLYDIVFKHFKRNKVEISNAIKKTFPFLEGLRDRDLITNKMFEDSQDSCRNLVPVQRVVYNVLSELEKTFNLPVLEALFSDVNMQEYPDLIHIYKGFENVIHDKLPLQESEEEEREERSGLQLSLEQGTGENSFRSLTWPPSGSPSHAGTTPPENGLSEHPCETEQINAKRKDTTSDKDDSLGSQQTNEQCAQKAEPTESCEQIAVQVNNGDAGREMPCPLPCDEESPEAELHNHGIQINSCSVRLVDIKKEKPFSNSKVECQAQARTHHNQASDIIVISSEDSEGSTDVDEPLEVFISAPRSEPVINNDNPLESNDEKEGQEATCSRPQIVPEPMDFRKLSTFRESFKKRVIGQDHDFSESSEEEAPAEASSGALRSKHGEKAPMTSRSTSTWRIPSRKRRFSSSDFSDLSNGEELQETCSSSLRRGSGSQPQEPENKKCSCVMCFPKGVPRSQEARTESSQASDMMDTMDVENNSTLEKHSGKRRKKRRHRSKVNGLQRGRKKDRPRKHLTLNNKVQKKRWQQRGRKANTRPLKRRRKRGPRIPKDENINFKQSELPVTCGEVKGTLYKERFKQGTSKKCIQSEDKKWFTPREFEIEGDRGASKNWKLSIRCGGYTLKVLMENKFLPEPPSTRKKRILESHNNTLVDPCEEHKKKNPDASVKFSEFLKKCSETWKTIFAKEKGKFEDMAKADKAHYEREMKTYIPPKGEKKKKFKDPNAPKRPPLAFFLFCSEYRPKIKGEHPGLSIDDVVKKLAGMWNNTAAADKQFYEKKAAKLKEKYKKDIAAYRAKGKPNSAKKRVVKAEKSKKKKEEEEDEEDEQEEENEEDDDK

SEQ ID NO: 82631 - protein, 885 aa, Homo sapiens
  Payload ID: 16444
  Gene Symbol: SP100
  Gene Name: SP100 nuclear antigen
  Uniprot ID: P23497
  ENSP ID: ENSP00000343023
MAGGGGDLSTRRLNECISPVANEMNHLPAHSHDLQRMFTEDQGVDDRLLYDIVFKHFKRNKVEISNAIKKTFPFLEGLRDRDLITNKMFEDSQDSCRNLVPVQRVVYNVLSELEKTFNLPVLEALFSDVNMQEYPDLIHIYKGFENVIHDKLPLQESEEEEREERSGLQLSLEQGTGENSFRSLTWPPSGSPSHAGTTPPENGLSEHPCETEQINAKRKDTTSDKDDSLGSQQTNEQCAQKAEPTESCEQIAVQVNNGDAGREMPCPLPCDEESPEAELHNHGIQINSCSVRLVDIKKEKPFSNSKVECQAQARTHHNQASDIIVISSEDSEGSTDVDEPLEVFISAPRSEPVINNDNPLESNDEKEGQEATCSRPQIVPEPMDFRKLSTFRESFKKRVIGQDHDFSESSEEEAPAEASSGALRSKHGEKAPMTSRSTSTWRIPSRKRRFSSSDFSDLSNGEELQETCSSSLRRGSGSQPQEPENKKCSCVMCFPKGVPRSQEARTESSQASDMMDTMDVENNSTLEKHSGKRRKKRRHRSKVNGLQRGRKKDRPRKHLTLNNKVQKKRWQQRGRKANTRPLKRRRKRGPRIPKDENINFKQSELPVTCGEVKGTLYKERFKQGTSKKCIQSEDKKWFTPREFEIEGDRGASKNWKLSIRCGGYTLKVLMENKFLPEPPSTRKKRILESHNNTLVDPCPENSNICEVCNKWGRLFCCDTCPRSFHEHCHIPSVEANKNPWSCIFCRIKTIQERCPESQSGHQESEVLMRQMLPEEQLKCEFLLLKVYCDSKSCFFASEPYYNREGSQGPQKPMWLNKVKTSLNEQMYTRVEGFVQDMRLIFHNHKEFYREDKFTRLGIQVQDIFEKNFRNIFAIQETSKNIIMFI

SEQ ID NO: 82632 - protein, 480 aa, Homo sapiens
  Payload ID: 16444
  Gene Symbol: SP100
  Gene Name: SP100 nuclear antigen
  Uniprot ID: P23497
  ENSP ID: ENSP00000386404
MAGGGGDLSTRRLNECISPVANEMNHLPAHSHDLQRMFTEDQGVDDRLLYDIVFKHFKRNKVEISNAIKKTFPFLEGLRDRDLITNKMFEDSQDSCRNLVPVQRVVYNVLSELEKTFNLPVLEALFSDVNMQEYPDLIHIYKGFENVIHDKLPLQESEEEEREERSGLQLSLEQGTGENSFRSLTWPPSGSPSHAGTTPPENGLSEHPCETEQINAKRKDTTSDKDDSLGSQQTNEQCAQKAEPTESCEQIAVQVNNGDAGREMPCPLPCDEESPEAELHNHGIQINSCSVRLVDIKKEKPFSNSKVECQAQARTHHNQASDIIVISSEDSEGSTDVDEPLEVFISAPRSEPVINNDNPLESNDEKEGQEATCSRPQIVPEPMDFRKLSTFRESFKKRVIGQDHDFSESSEEEAPAEASSGALRSKHGEKAPMTSRSTSTWRIPSRKRRFSSSDFSDLSNGEELQETCSSSLRRGSGKED

SEQ ID NO: 82633 - protein, 688 aa, Homo sapiens
  Payload ID: 16444
  Gene Symbol: SP100
  Gene Name: SP100 nuclear antigen
  Uniprot ID: P23497
  ENSP ID: ENSP00000386427
MAGGGGDLSTRRLNECISPVANEMNHLPAHSHDLQRMFTEDQGVDDRLLYDIVFKHFKRNKVEISNAIKKTFPFLEGLRDRDLITNKMFEDSQDSCRNLVPVQRVVYNVLSELEKTFNLPVLEALFSDVNMQEYPDLIHIYKGFENVIHDKLPLQESEEEEREERSGLQLSLEQGTGENSFRSLTWPPSGSPSHAGTTPPENGLSEHPCETEQINAKRKDTTSDKDDSLGSQQTNEQCAQKAEPTESCEQIAVQVNNGDAGREMPCPLPCDEESPEAELHNHGIQINSCSVRLVDIKKEKPFSNSKVECQAQARTHHNQASDIIVISSEDSEGSTDVDEPLEVFISAPRSEPVINNDNPLESNDEKEGQEATCSRPQIVPEPMDFRKLSTFRESFKKRVIGQDHDFSESSEEEAPAEASSGALRSKHGEKAPMTSRSTSTWRIPSRKRRFSSSDFSDLSNGEELQETCSSSLRRGSGSQPQEPENKKCSCVMCFPKGVPRSQEARTESSQASDMMDTMDVENNSTLEKHSGKRRKKRRHRSKVNGLQRGRKKDRPRKHLTLNNKVQKKRWQQRGRKANTRPLKRRRKRGPRIPKDENINFKQSELPVTCGEVKGTLYKERFKQGTSKKCIQSEDKKWFTPREFEIEGDRGASKNWKLSIRCGGYTLKVLMENKFLPEPPSTRKKVMIK

SEQ ID NO: 82634 - protein, 445 aa, Homo sapiens
  Payload ID: 16444
  Gene Symbol: SP100
  Gene Name: SP100 nuclear antigen
  Uniprot ID: P23497
  ENSP ID: ENSP00000386998
MMFTEDQGVDDRLLYDIVFKHFKRNKVEISNAIKKTFPFLEGLRDRDLITNKMFEDSQDSCRNLVPVQRVVYNVLSELEKTFNLPVLEALFSDVNMQEYPDLIHIYKGFENVIHDKLPLQESEEEEREERSGLQLSLEQGTGENSFRSLTWPPSGSPSHAGTTPPENGLSEHPCETEQINAKRKDTTSDKDDSLGSQQTNEQCAQKAEPTESCEQIAVQVNNGDAGREMPCPLPCDEESPEAELHNHGIQINSCSVRLVDIKKEKPFSNSKVECQAQARTHHNQASDIIVISSEDSEGSTDVDEPLEVFISAPRSEPVINNDNPLESNDEKEGQEATCSRPQIVPEPMDFRKLSTFRESFKKRVIGQDHDFSESSEEEAPAEASSGALRSKHGEKAPMTSRSTSTWRIPSRKRRFSSSDFSDLSNGEELQETCSSSLRRGSGKED

SEQ ID NO: 82635 - protein, 455 aa, Homo sapiens
  Payload ID: 16444
  Gene Symbol: SP100
  Gene Name: SP100 nuclear antigen
  ENSP ID: ENSP00000387311
MAGGGGDLSTRMFTEDQGVDDRLLYDIVFKHFKRNKVEISNAIKKTFPFLEGLRDRDLITNKMFEDSQDSCRNLVPVQRVVYNVLSELEKTFNLPVLEALFSDVNMQEYPDLIHIYKGFENVIHDKLPLQESEEEEREERSGLQLSLEQGTGENSFRSLTWPPSGSPSHAGTTPPENGLSEHPCETEQINAKRKDTTSDKDDSLGSQQTNEQCAQKAEPTESCEQIAVQVNNGDAGREMPCPLPCDEESPEAELHNHGIQINSCSVRLVDIKKEKPFSNSKVECQAQARTHHNQASDIIVISSEDSEGSTDVDEPLEVFISAPRSEPVINNDNPLESNDEKEGQEATCSRPQIVPEPMDFRKLSTFRESFKKRVIGQDHDFSESSEEEAPAEASSGALRSKHGEKAPMTSRSTSTWRIPSRKRRFSSSDFSDLSNGEELQETCSSSLRRGSGKED

SEQ ID NO: 82636 - protein, 192 aa, Homo sapiens
  Payload ID: 16444
  Gene Symbol: SP100
  Gene Name: SP100 nuclear antigen
  ENSP ID: ENSP00000391616
MAGGGGDLSTRMFTEDQGVDDRLLYDIVFKHFKRNKVEISNAIKKTFPFLEGLRDRDLITNKMFEDSQDSCRNLVPVQRVVYNVLSELEKTFNLPVLEALFSDVNMQEYPDLIHIYKGFENVIHDKLPLQESEEEEREERSGLQLSLEQGTGENSFRSLTWPPSGSPSHAGCLGGFLPPTPLNHTCCWFLLP

SEQ ID NO: 82637 - protein, 259 aa, Homo sapiens
  Payload ID: 16444
  Gene Symbol: SP100
  Gene Name: SP100 nuclear antigen
  ENSP ID: ENSP00000393679
  MOD_RES (1)..(1): Any amino acid
XTLYKERFKQGTSKKCIQSEDKKWFTPREFEIEGDRGASKNWKLSIRCGGYTLKVLMERILESHNNTLVDPCPENSNICEVCNKWGRLFCCDTCPRSFHEHCHIPSVEANKNPWSCIFCRIKTIQERCPESQSGHQESEVLMRQMLPEEQLKCEFLLLKVYCDSKSCFFASEPYYNREGSQGPQKPMWLNKVKTSLNEQMYTRVEGFVQDMRLIFHNHKEFYREDKFTRLGIQVQDIFEKNFRNIFAIQETSKNIIMFI

SEQ ID NO: 82638 - protein, 452 aa, Homo sapiens
  Payload ID: 16444
  Gene Symbol: SP100
  Gene Name: SP100 nuclear antigen
  Uniprot ID: P23497
  ENSP ID: ENSP00000399389
MAGGGGDLSTRMFTEDQGVDDRLLYDIVFKHFKRNKVEISNAIKKTFPFLEGLRDRDLITNKMFEDSQDSCRNLVPVQRVVYNVLSELEKTFNLPVLEALFSDVNMQEYPDLIHIYKGFENVIHDKLPLQESEEEEREERSGLQLSLEQGTGENSFRSLTWPPSGSPSHAGTTPPENGLSEHPCETEQINAKRKDTTSDKDDSLGSQQTNEQCAQKAEPTESCEQIAVQVNNGDAGREMPCPLPCDEESPEAELHNHGIQINSCSVRLVDIKKEKPFSNSKVECQAQARTHHNQASDIIVISSEDSEGSTDVDEPLEVFISAPRSEPVINNDNPLESNDEKEGQEATCSRPQIVPEPMDFRKLSTFRESFKKRVIGQDHDFSESSEEEAPAEASSGALRSKHAPMTSRSTSTWRIPSRKRRFSSSDFSDLSNGEELQETCSSSLRRGSGKED

SEQ ID NO: 82639 - protein, 126 aa, Homo sapiens
  Payload ID: 16444
  Gene Symbol: SP100
  Gene Name: SP100 nuclear antigen
  ENSP ID: ENSP00000400277
  MOD_RES (1)..(1): Any amino acid
XISSEDSEGSTDVDEPLEVFISAPRSEPEPMDFRKLSTFRESFKKRVIGQDHDFSESSEEEAPAEASSGALRSKHGEKAPMTSRSTSTWRIPSRKRRFSSSDFSDLSNGEELQETCSSSLRRGSGK

SEQ ID NO: 82640 - protein, 193 aa, Homo sapiens
  Payload ID: 16444
  Gene Symbol: SP100
  Gene Name: SP100 nuclear antigen
  ENSP ID: ENSP00000416563
DVDEPLEVFISAPRSEPVINNDNPLESNDEKEGQEATCSRPQIVPEPMDFRKLSTFRESFKKRVIGQDHDFSESSEEEAPAEASSGALRSKHGEKAPMTSRSTSTWRIPSRKRRFSSSDFSDLSNGEELQETCSSSLRRGSGVPRSQEARTESSQASDMMDTMDVENNSTLEKHSGKRRKKRRHRSKVNGLQR

SEQ ID NO: 82641 - protein, 713 aa, Homo sapiens
  Payload ID: 16445
  Gene Symbol: SP110
  Gene Name: SP110 nuclear body protein
  Uniprot ID: Q9HB58
  ENSP ID: ENSP00000258381
MFTMTRAMEEALFQHFMHQKLGIAYAIHKPFPFFEGLLDNSIITKRMYMESLEACRNLIPVSRVVHNILTQLERTFNLSLLVTLFSQINLREYPNLVTIYRSFKRVGASYEWQSRDTPILLEAPTGLAEGSSLHTPLALPPPQPPQPSCSPCAPRVSEPGTSSQQSDEILSESPSPSDPVLPLPALIQEGRSTSVTNDKLTSKMNAEEDSEEMPSLLTSTVQVASDNLIPQIRDKEDPQEMPHSPLGSMPEIRDNSPEPNDPEEPQEVSSTPSDKKGKKRKRCIWSTPKRRHKKKSLPGGTASSRHGIQKKLKRVDQVPQKKDDSTCNSTVETRAQKARTECARKSRSEEIIDGTSEMNEGKRSQKTPSTPRRVTQGAASPGHGIQEKLQVVDKVTQRKDDSTWNSEVMMRVQKARTKCARKSRLKEKKKEKDICSSSKRRFQKNIHRRGKPKSDTVDFHCSKLPVTCGEAKGILYKKKMKHGSSVKCIRNEDGTWLTPNEFEVEGKGRNAKNWKRNIRCEGMTLGELLKRKNSDECEVCCQGGQLLCCGTCPRVFHEDCHIPPVEAKRMLWSCTFCRMKRSSGSQQCHHVSKTLERQMQPQDQLKCEFLLLKAYCHPQSSFFTGIPFNIRDYGEPFQEAMWLDLVKERLITEMYTVAWFVRDMRLMFRNHKTFYKASDFGQVGLDLEAEFEKDLKDVLGFHEANDGGFWTLP

SEQ ID NO: 82642 - protein, 549 aa, Homo sapiens
  Payload ID: 16445
  Gene Symbol: SP110
  Gene Name: SP110 nuclear body protein
  Uniprot ID: Q9HB58
  ENSP ID: ENSP00000258382
MFTMTRAMEEALFQHFMHQKLGIAYAIHKPFPFFEGLLDNSIITKRMYMESLEACRNLIPVSRVVHNILTQLERTFNLSLLVTLFSQINLREYPNLVTIYRSFKRVGASYEWQSRDTPILLEAPTGLAEGSSLHTPLALPPPQPPQPSCSPCAPRVSEPGTSSQQSDEILSESPSPSDPVLPLPALIQEGRSTSVTNDKLTSKMNAEEDSEEMPSLLTSTVQVASDNLIPQIRDKEDPQEMPHSPLGSMPEIRDNSPEPNDPEEPQEVSSTPSDKKGKKRKRCIWSTPKRRHKKKSLPGGTASSRHGIQKKLKRVDQVPQKKDDSTCNSTVETRAQKARTECARKSRSEEIIDGTSEMNEGKRSQKTPSTPRRVTQGAASPGHGIQEKLQVVDKVTQRKDDSTWNSEVMMRVQKARTKCARKSRLKEKKKEKDICSSSKRRFQKNIHRRGKPKSDTVDFHCSKLPVTCGEAKGILYKKKMKHGSSVKCIRNEDGTWLTPNEFEVEGKGRNAKNWKRNIRCEGMTLGELLKSGLLLCPPRINLKRELNSK

SEQ ID NO: 82643 - protein, 689 aa, Homo sapiens
  Payload ID: 16445
  Gene Symbol: SP110
  Gene Name: SP110 nuclear body protein
  Uniprot ID: Q9HB58
  ENSP ID: ENSP00000351488
MFTMTRAMEEALFQHFMHQKLGIAYAIHKPFPFFEGLLDNSIITKRMYMESLEACRNLIPVSRVVHNILTQLERTFNLSLLVTLFSQINLREYPNLVTIYRSFKRVGASYEWQSRDTPILLEAPTGLAEGSSLHTPLALPPPQPPQPSCSPCAPRVSEPGTSSQQSDEILSESPSPSDPVLPLPALIQEGRSTSVTNDKLTSKMNAEEDSEEMPSLLTSTVQVASDNLIPQIRDKEDPQEMPHSPLGSMPEIRDNSPEPNDPEEPQEVSSTPSDKKGKKRKRCIWSTPKRRHKKKSLPGGTASSRHGIQKKLKRVDQVPQKKDDSTCNSTVETRAQKARTECARKSRSEEIIDGTSEMNEGKRSQKTPSTPRRVTQGAASPGHGIQEKLQVVDKVTQRKDDSTWNSEVMMRVQKARTKCARKSRLKEKKKEKDICSSSKRRFQKNIHRRGKPKSDTVDFHCSKLPVTCGEAKGILYKKKMKHGSSVKCIRNEDGTWLTPNEFEVEGKGRNAKNWKRNIRCEGMTLGELLKRKNSDECEVCCQGGQLLCCGTCPRVFHEDCHIPPVEAKRMLWSCTFCRMKRSSGSQQCHHVSKTLERQMQPQDQLIRDYGEPFQEAMWLDLVKERLITEMYTVAWFVRDMRLMFRNHKTFYKASDFGQVGLDLEAEFEKDLKDVLGFHEANDGGFWTLP

SEQ ID NO: 82644 - protein, 547 aa, Homo sapiens
  Payload ID: 16445
  Gene Symbol: SP110
  Gene Name: SP110 nuclear body protein
  ENSP ID: ENSP00000375902
MFTMTRAMEEALFQHFMHQKLGIAYAIHKPFPFFEGLLDNSIITKRMYMESLEACRNLIPVSRVVHNILTQLERTFNLSLLVTLFSQINLREYPNLVTIYRSFKRVGASYEWQSRDTPILLEAPTGLAEGSSLHTPLALPPPQPPQPSCSPCAPRVSEPGTSSQQSDEILSESPSPSDPVLPLPALIQEGRSTSVTNDKLTSKMNAEEDSEEMPSLLTSTVQVASDNLIPQIRDKEDPQEMPHSPLGSMPEIRDNSPEPNDPEEPQEVSSTPSDKKGKKRKRCIWSTPKRRHKKKSLPGASSRHGIQKKLKRVDQVPQKKDDSTCNSTVETRAQKARTECARKSRSEEIIDGTSEMNEGKRSQKTPSTPRRVTQGAASPGHGIQEKLQVVDKVTQRKDDSTWNSEVMMRVQKARTKCARKSRLKEKKKEKDICSSSKRRFQKNIHRRGKPKSDTVDFHCSKLPVTCGEAKGILYKKKMKHGSSVKCIRNEDGTWLTPNEFEVEGKGRNAKNWKRNIRCEGMTLGELLKSGLLLCPPRINLKRELNSK

SEQ ID NO: 82645 - protein, 221 aa, Homo sapiens
  Payload ID: 16445
  Gene Symbol: SP110
  Gene Name: SP110 nuclear body protein
  ENSP ID: ENSP00000387172
MFTMTRAMEEALFQHFMHQKLGIAYAIHKPFPFFEGLLDNSIITKRMYMESLEACRNLIPVSRVVHNILTQLERTFNLSLLVTLFSQINLREYPNLVTIYRSFKRVGASYEWQSRDTPILLEAPTGLAEGSSLHTPLALPPPQPPQPSCSPCAPRVSEPGTSSQQSDEILSESPSPSDPVLPLPALIQEGRSTSVTNDKLTSKMNAEEDSEEMPSLLTSTV

SEQ ID NO: 82646 - protein, 160 aa, Homo sapiens
  Payload ID: 16445
  Gene Symbol: SP110
  Gene Name: SP110 nuclear body protein
  ENSP ID: ENSP00000393992
MYMESLEACRNLIPVSRVVHNILTQLERTFNLSLLVTLFSQINLREYPNLVTIYRSFKRVGASYEWQSRDTPILLEAPTGLAEGSSLHTPLALPPPQPPQPSCSPCAPRVSEPGTSSQQSDEILSESPSPSDPVLPLPALIQEGRSTSVTNDKLTSKMNA

SEQ ID NO: 82647 - protein, 101 aa, Homo sapiens
  Payload ID: 16445
  Gene Symbol: SP110
  Gene Name: SP110 nuclear body protein
  ENSP ID: ENSP00000399978
MFTMTRAMEEALFQHFMHQKLGIAYAIHKPFPFFEGLLDNSIITKRMYMESLEACRNLIPVSRVVHNILTQLERTFNLSLLVTLFSQINLREYPNLVTIYR

SEQ ID NO: 82648 - protein, 807 aa, Homo sapiens
  Payload ID: 16446
  Gene Symbol: SP140
  Gene Name: SP140 nuclear body protein
  Uniprot ID: Q13342
  ENSP ID: ENSP00000342096
MAQQGQQGQMASGDSNLNFRMVAEIQNVEGQNLQEQVCPEPIFRFFRENKVEIASAITRPFPFLMGLRDRSFISEQMYEHFQEAFRNLVPVTRVMYCVLSELEKTFGWSHLEALFSRINLMAYPDLNEIYRSFQNVCYEHSPLQMNNVNDLEDRPRLLPYGKQENSNACHEMDDIAVPQEALSSSPRCEPGFSSESCEQLALPKAGGGDAEDAPSLLPGGGVLESNGMIDAARTYSTAPGEKQGEEEGRNSPRKRNQDKEKYQESPEGRDKETFDLKTPQVTNEGEPEKGLCLLPGEGEEGSDDCSEMCDGEEPQEASSSLARCGSEGSDDCSEMCDGEERQEASSSLARRGSVSSELENHPMNEEGESEELASSLLYDNVPGAEQSAYENEKCSCVMCFSEEVPGSPEARTESDQACGTMDTVDIANNSTLGKPKRKRRKKRGHGWSRMRMRRQENSQQNDNSKADGQVVSSEKKANVNLKDLSKIRGRKRGKPGTRFTQSDRAAQKRVRSRASRKHKDETVDFKAPLLPVTCGGVKGILHKKKLQQGILVKCIQTEDGKWFTPTEFEIKGGHARSKNWRLSVRCGGWPLRWLMENGFLPDPPRIRYRKKKRILKSQNNSSVDPCMRNLDECEVCRDGGELFCCDTCSRVFHEDCHIPPVEAERTPWNCIFCRMKESPGSQQCCQESEVLERQMCPEEQLKCEFLLLKVYCCSESSFFAKIPYYYYIREACQGLKEPMWLDKIKKRLNEHGYPQVEGFVQDMRLIFQNHRASYKYKDFGQMGFRLEAEFEKNFKEVFAIQETNGNN

SEQ ID NO: 82649 - protein, 172 aa, Homo sapiens
  Payload ID: 16446
  Gene Symbol: SP140
  Gene Name: SP140 nuclear body protein
  Uniprot ID: Q13342
  ENSP ID: ENSP00000362749
MAQQGQQGQMASGDSNLNFRMVAEIQNVEGQNLQEQVCPEPIFRFFRENKVEIASAITRPFPFLMGLRDRSFISEQMYEHFQEAFRNLVPVTRVMYCVLSELEKTFGWSHLEALFSRINLMAYPDLNEIYRSFQNENLSSSAVLCQLVSPNKDWRSHEESLAHTGTLRRSCM

SEQ ID NO: 82650 - protein, 867 aa, Homo sapiens
  Payload ID: 16446
  Gene Symbol: SP140
  Gene Name: SP140 nuclear body protein
  Uniprot ID: Q13342
  ENSP ID: ENSP00000375899
MAQQGQQGQMASGDSNLNFRMVAEIQNVEGQNLQEQVCPEPIFRFFRENKVEIASAITRPFPFLMGLRDRSFISEQMYEHFQEAFRNLVPVTRVMYCVLSELEKTFGWSHLEALFSRINLMAYPDLNEIYRSFQNVCYEHSPLQMNNVNDLEDRPRLLPYGKQENSNACHEMDDIAVPQEALSSSPRCEPGFSSESCEQLALPKAGGGDAEDAPSLLPGGGVSCKLAIQIDEGESEEMPKLLPYDTEVLESNGMIDAARTYSTAPGEKQGEEEGRNSPRKRNQDKEKYQESPEGRDKETFDLKTPQVTNEGEPEKGLCLLPGEGEEGSDDCSEMCDGEEPQEASSSLARCGSVSCLSAETFDLKTPQVTNEGEPEKELSLLPGEGEEGSDDCSEMCDGEERQEASSSLARRGSVSSELENHPMNEEGESEELASSLLYDNVPGAEQSAYENEKCSCVMCFSEEVPGSPEARTESDQACGTMDTVDIANNSTLGKPKRKRRKKRGHGWSRMRMRRQENSQQNDNSKADGQVVSSEKKANVNLKDLSKIRGRKRGKPGTRFTQSDRAAQKRVRSRASRKHKDETVDFKAPLLPVTCGGVKGILHKKKLQQGILVKCIQTEDGKWFTPTEFEIKGGHARSKNWRLSVRCGGWPLRWLMENGFLPDPPRIRYRKKKRILKSQNNSSVDPCMRNLDECEVCRDGGELFCCDTCSRVFHEDCHIPPVEAERTPWNCIFCRMKESPGSQQCCQESEVLERQMCPEEQLKCEFLLLKVYCCSESSFFAKIPYYYYIREACQGLKEPMWLDKIKKRLNEHGYPQVEGFVQDMRLIFQNHRASYKYKDFGQMGFRLEAEFEKNFKEVFAIQETNGNN

SEQ ID NO: 82651 - protein, 753 aa, Homo sapiens
  Payload ID: 16446
  Gene Symbol: SP140
  Gene Name: SP140 nuclear body protein
  Uniprot ID: Q13342
  ENSP ID: ENSP00000393618
MAQQGQQGQMASGDSNLNFRMVAEIQNVEGQNLQEQVCPEPIFRFFRENKVEIASAITRPFPFLMGLRDRSFISEQMYEHFQEAFRNLVPVTRVMYCVLSELEKTFGWSHLEALFSRINLMAYPDLNEIYRSFQNVCYEHSPLQMNNVNDLEDRPRLLPYGKQENSNACHEMDDIAVPQEALSSSPRCEPGFSSESCEQLALPKAGGGDAEDAPSLLPVSCKLAIQIDEGESEEMPKLLPYDTEETFDLKTPQVTNEGEPEKGLCLLPGEGEEGSDDCSEMCDGEERQEASSSLARRGSVSSELENHPMNEEGESEELASSLLYDNVPGAEQSAYENEKCSCVMCFSEEVPGSPEARTESDQACGTMDTVDIANNSTLGKPKRKRRKKRGHGWSRMRMRRQENSQQNDNSKADGQVVSSEKKANVNLKDLSKIRGRKRGKPGTRFTQSDRAAQKRVRSRASRKHKDETVDFKAPLLPVTCGGVKGILHKKKLQQGILVKCIQTEDGKWFTPTEFEIKGGHARSKNWRLSVRCGGWPLRWLMENGFLPDPPRIRYRKKKRILKSQNNSSVDPCMRNLDECEVCRDGGELFCCDTCSRVFHEDCHIPPVEAERTPWNCIFCRMKESPGSQQCCQESEVLERQMCPEEQLKCEFLLLKVYCCSESSFFAKIPYYYYIREACQGLKEPMWLDKIKKRLNEHGYPQVEGFVQDMRLIFQNHRASYKYKDFGQMGFRLEAEFEKNFKEVFAIQETNGNN

SEQ ID NO: 82652 - protein, 840 aa, Homo sapiens
  Payload ID: 16446
  Gene Symbol: SP140
  Gene Name: SP140 nuclear body protein
  Uniprot ID: Q13342
  ENSP ID: ENSP00000398210
MAQQGQQGQMASGDSNLNFRMVAEIQNVEGQNLQEQVCPEPIFRFFRENKVEIASAITRPFPFLMGLRDRSFISEQMYEHFQEAFRNLVPVTRVMYCVLSELEKTFGWSHLEALFSRINLMAYPDLNEIYRSFQNVCYEHSPLQMNNVNDLEDRPRLLPYGKQENSNACHEMDDIAVPQEALSSSPRCEPGFSSESCEQLALPKAGGGDAEDAPSLLPGGGVSCKLAIQIDEGESEEMPKLLPYDTEVLESNGMIDAARTYSTAPGEKQGEEEGRNSPRKRNQDKEKYQESPEGRDKETFDLKTPQVTNEGEPEKGLCLLPGEGEEGSDDCSEMCDGEEPQEASSSLARCGSVSCLSAETFDLKTPQVTNEGEPEKELSLLPGEGEVSSELENHPMNEEGESEELASSLLYDNVPGAEQSAYENEKCSCVMCFSEEVPGSPEARTESDQACGTMDTVDIANNSTLGKPKRKRRKKRGHGWSRMRMRRQENSQQNDNSKADGQVVSSEKKANVNLKDLSKIRGRKRGKPGTRFTQSDRAAQKRVRSRASRKHKDETVDFKAPLLPVTCGGVKGILHKKKLQQGILVKCIQTEDGKWFTPTEFEIKGGHARSKNWRLSVRCGGWPLRWLMENGFLPDPPRIRYRKKKRILKSQNNSSVDPCMRNLDECEVCRDGGELFCCDTCSRVFHEDCHIPPVEAERTPWNCIFCRMKESPGSQQCCQESEVLERQMCPEEQLKCEFLLLKVYCCSESSFFAKIPYYYYIREACQGLKEPMWLDKIKKRLNEHGYPQVEGFVQDMRLIFQNHRASYKYKDFGQMGFRLEAEFEKNFKEVFAIQETNGNN

SEQ ID NO: 82653 - protein, 29 aa, Homo sapiens
  Payload ID: 16446
  Gene Symbol: SP140
  Gene Name: SP140 nuclear body protein
  ENSP ID: ENSP00000475284
MAQQGQQGQMASGDSNLNFRFPQMLWSVV

SEQ ID NO: 82654 - protein, 555 aa, Homo sapiens
  Payload ID: 16447
  Gene Symbol: SP140L
  Gene Name: SP140 nuclear body protein-like
  ENSP ID: ENSP00000243810
MAGGGSDLSTRLFTEDQDVDEGLVYDTVFKHFKRHKLEISNAIKKTFPFLEGLRDRELITNKMFEDSEDSCRNLVPVQRVVYNVLSELEKTFNLSVLEALFSEVNMQEYPDLIHIYKSFKNAIQDKLSFQESDRKEREERPDIKLSLKQGEVPESPEARKESDQACGKMDTVDIANNSTLGKPKRKRRKKKGHGWSRMGTRTQKNNQQNDNSKADGQLVSSEKKANMNLKDLSKIRGRKRGKPGTHFTQSDRAPQKRVRSRASRKHKDETVDFQAPLLPVTCGGVKGILHKEKLEQGTLAKCIQTEDGKWFTPMEFEIKGGYARSKNWRLSVRCGGWPLRRLMEEGSLPNPPRIYYRNKKRILKSQNNSSVDPCMRNLDECEVCRDGGELFCCDTCSRVFHEDCHIPPVESEKTPWNCIFCRMKESPGSQQCCQESEVLERQMCPEEQLKCEFLLLKVYCCSESSFFAKIPYYYYIREACQGLKEPMWLDKIKKRLNEHGYPQVEGFVQDMRLIFQNHRASYKYKDFGQMGLRLEAEFEKDFKEVFAIQETNGNS

SEQ ID NO: 82655 - protein, 520 aa, Homo sapiens
  Payload ID: 16447
  Gene Symbol: SP140L
  Gene Name: SP140 nuclear body protein-like
  ENSP ID: ENSP00000379811
MAGGGSDLSTRLFTEDQDVDEGLVYDTVFKHFKRHKLEISNAIKKTFPFLEGLRDRELITNKMFEDSEDSCRNLVPVQRVVYNVLSELEKTFNLSVLEALFSEVNMQEYPDLIHIYKSFKNAIQDKLSFQESDRKEREERPDIKLSLKQGEVPESPEARKESDQACGKMDTVDIANNSTLGKPKRKRRKKKGHGWSRMGTRTQKNNQQNDNSKADGQLVSSEKKANMNLKDLSKIRGRKRGKPGTHFTQSDRAPQKRVRSRGTLAKCIQTEDGKWFTPMEFEIKGGYARSKNWRLSVRCGGWPLRRLMEEGSLPNPPRIYYRNKKRILKSQNNSSVDPCMRNLDECEVCRDGGELFCCDTCSRVFHEDCHIPPVESEKTPWNCIFCRMKESPGSQQCCQESEVLERQMCPEEQLKCEFLLLKVYCCSESSFFAKIPYYYYIREACQGLKEPMWLDKIKKRLNEHGYPQVEGFVQDMRLIFQNHRASYKYKDFGQMGLRLEAEFEKDFKEVFAIQETNGNS

SEQ ID NO: 82656 - protein, 438 aa, Homo sapiens
  Payload ID: 16447
  Gene Symbol: SP140L
  Gene Name: SP140 nuclear body protein-like
  Uniprot ID: Q9H930
  ENSP ID: ENSP00000395195
MAGGGSDLSTRGLNGGVSQVANEMNHLPAHSQSLQRLFTEDQDVDEGLVYDTVFKHFKRHKLEISNAIKKTFPFLEGLRDRELITNKMFEDSEDSCRNLVPVQRVVYNVLSELEKTFNLSVLEALFSEVNMQEYPDLIHIYKSFKNAIQDKLSFQESDRKEREERPDIKLSLKQGEVPESPEARKESDQACGKMDTVDIANNSTLGKPKRKRRKKKGHGWSRMGTRTQKNNQQNDNSKADGQLVSSEKKANMNLKDLSKIRGRKRGKPGTHFTQSDRAPQKRVRSRASRKHKDETVDFQAPLLPVTCGGVKGILHKEKLEQGTLAKCIQTEDGKWFTPMEFEIKGGYARSKNWRLSVRCGGWPLRRLMEEGSLPNPPRIYYRNKKRILKSQNNSSVDPCMRNLDECEVCRDGGELFCCDTCSRVFHEDCHIPPVESEK

SEQ ID NO: 82657 - protein, 129 aa, Homo sapiens
  Payload ID: 16447
  Gene Symbol: SP140L
  Gene Name: SP140 nuclear body protein-like
  Uniprot ID: Q9H930
  ENSP ID: ENSP00000395223
MFEDSEDSCRNLVPVQRVVYNVLSELEKTFNLSVLEALFSEVNMQEYPDLIHIYKSFKNAIQDKLSFQESDRKEREERPDIKLSLKQGEVPESPEARKESDQACGKMDTVDIANNSTLGKPKRKRSKNK

SEQ ID NO: 82658 - protein, 580 aa, Homo sapiens
  Payload ID: 16447
  Gene Symbol: SP140L
  Gene Name: SP140 nuclear body protein-like
  Uniprot ID: Q9H930
  ENSP ID: ENSP00000397911
MAGGGSDLSTRGLNGGVSQVANEMNHLPAHSQSLQRLFTEDQDVDEGLVYDTVFKHFKRHKLEISNAIKKTFPFLEGLRDRELITNKMFEDSEDSCRNLVPVQRVVYNVLSELEKTFNLSVLEALFSEVNMQEYPDLIHIYKSFKNAIQDKLSFQESDRKEREERPDIKLSLKQGEVPESPEARKESDQACGKMDTVDIANNSTLGKPKRKRRKKKGHGWSRMGTRTQKNNQQNDNSKADGQLVSSEKKANMNLKDLSKIRGRKRGKPGTHFTQSDRAPQKRVRSRASRKHKDETVDFQAPLLPVTCGGVKGILHKEKLEQGTLAKCIQTEDGKWFTPMEFEIKGGYARSKNWRLSVRCGGWPLRRLMEEGSLPNPPRIYYRNKKRILKSQNNSSVDPCMRNLDECEVCRDGGELFCCDTCSRVFHEDCHIPPVESEKTPWNCIFCRMKESPGSQQCCQESEVLERQMCPEEQLKCEFLLLKVYCCSESSFFAKIPYYYYIREACQGLKEPMWLDKIKKRLNEHGYPQVEGFVQDMRLIFQNHRASYKYKDFGQMGLRLEAEFEKDFKEVFAIQETNGNS

SEQ ID NO: 82659 - protein, 613 aa, Homo sapiens
  Payload ID: 16448
  Gene Symbol: SP2
  Gene Name: Sp2 transcription factor
  Uniprot ID: Q02086
  ENSP ID: ENSP00000365931
MSDPQTSMAATAAVSPSDYLQPAASTTQDSQPSPLALLAATCSKIGPPAVEAAVTPPAPPQPTPRKLVPIKPAPLPLSPGKNSFGILSSKGNILQIQGSQLSASYPGGQLVFAIQNPTMINKGTRSNANIQYQAVPQIQASNSQTIQVQPNLTNQIQIIPGTNQAIITPSPSSHKPVPIKPAPIQKSSTTTTPVQSGANVVKLTGGGGNVTLTLPVNNLVNASDTGAPTQLLTESPPTPLSKTNKKARKKSLPASQPPVAVAEQVETVLIETTADNIIQAGNNLLIVQSPGGGQPAVVQQVQVVPPKAEQQQVVQIPQQALRVVQAASATLPTVPQKPSQNFQIQAAEPTPTQVYIRTPSGEVQTVLVQDSPPATAAATSNTTCSSPASRAPHLSGTSKKHSAAILRKERPLPKIAPAGSIISLNAAQLAAAAQAMQTININGVQVQGVPVTITNTGGQQQLTVQNVSGNNLTISGLSPTQIQLQMEQALAGETQPGEKRRRMACTCPNCKDGEKRSGEQGKKKHVCHIPDCGKTFRKTSLLRAHVRLHTGERPFVCNWFFCGKRFTRSDELQRHARTHTGDKRFECAQCQKRFMRSDHLTKHYKTHLVTKNL

SEQ ID NO: 82660 - protein, 249 aa, Homo sapiens
  Payload ID: 16448
  Gene Symbol: SP2
  Gene Name: Sp2 transcription factor
  ENSP ID: ENSP00000484898
MAATAAVSPSDYLQPAASTTQDSQPSPLALLAATCSKIGPPAVEAAVTPPAPPQPTPRKLVPIKPAPLPLSPGKNSFGILSSKGNILQIQGSQLSASYPGGQLVFAIQNPTMINKGTRSNANIQYQAVPQIQASNSQTIQVQPNLTNQIQIIPGTNQAIITPSPSSHKPVPIKPAPIQKSSTTTTPVQSGANVVKLTGGGGNVTLTLPVNNLVNASDTGAPTQLLTASCQTGMLNSTRMFLFLAFINVL

SEQ ID NO: 82661 - protein, 781 aa, Homo sapiens
  Payload ID: 16449
  Gene Symbol: SP3
  Gene Name: Sp3 transcription factor
  Uniprot ID: Q02447
  ENSP ID: ENSP00000310301
MTAPEKPVKQEEMAALDVDSGGGGGGGGGHGEYLQQQQQHGNGAVAAAAAAQDTQPSPLALLAATCSKIGPPSPGDDEEEAAAAAGAPAAAGATGDLASAQLGGAPNRWEVLSATPTTIKDEAGNLVQIPSAATSSGQYVLPLQNLQNQQIFSVAPGSDSSNGTVSSVQYQVIPQIQSADGQQVQIGFTGSSDNGGINQESSQIQIIPGSNQTLLASGTPSANIQNLIPQTGQVQVQGVAIGGSSFPGQTQVVANVPLGLPGNITFVPINSVDLDSLGLSGSSQTMTAGINADGHLINTGQAMDSSDNSERTGERVSPDINETNTDTDLFVPTSSSSQLPVTIDSTGILQQNTNSLTTSSGQVHSSDLQGNYIQSPVSEETQAQNIQVSTAQPVVQHLQLQESQQPTSQAQIVQGITPQTIHGVQASGQNISQQALQNLQLQLNPGTFLIQAQTVTPSGQVTWQTFQVQGVQNLQNLQIQNTAAQQITLTPVQTLTLGQVAAGGAFTSTPVSLSTGQLPNLQTVTVNSIDSAGIQLHPGENADSPADIRIKEEEPDPEEWQLSGDSTLNTNDLTHLRVQVVDEEGDQQHQEGKRLRRVACTCPNCKEGGGRGTNLGKKKQHICHIPGCGKVYGKTSHLRAHLRWHSGERPFVCNWMYCGKRFTRSDELQRHRRTHTGEKKFVCPECSKRFMRSDHLAKHIKTHQNKKGIHSSSTVLASVEAARDDTLITAGGTTLILANIQQGSVSGIGTVNTSATSNQDILTNTEIPLQLVTVSGNETME

SEQ ID NO: 82662 - protein, 713 aa, Homo sapiens
  Payload ID: 16449
  Gene Symbol: SP3
  Gene Name: Sp3 transcription factor
  ENSP ID: ENSP00000406140
IGPPSPGDDEEEAAAAAGAPAAAGATGDLASAQLGGAPNRWEVLSATPTTIKDEAGNLVQIPSAATSSGQYVLPLQNLQNQQIFSVAPGSDSSNGTVSSVQYQVIPQIQSADGQQVQIGFTGSSDNGGINQESSQIQIIPGSNQTLLASGTPSANIQNLIPQTGQVQVQGVAIGGSSFPGQTQVVANVPLGLPGNITFVPINSVDLDSLGLSGSSQTMTAGINADGHLINTGQAMDSSDNSERTGERVSPDINETNTDTDLFVPTSSSSQLPVTIDSTGILQQNTNSLTTSSGQVHSSDLQGNYIQSPVSEETQAQNIQVSTAQPVVQHLQLQESQQPTSQAQIVQGITPQTIHGVQASGQNISQQALQNLQLQLNPGTFLIQAQTVTPSGQVTWQTFQVQGVQNLQNLQIQNTAAQQITLTPVQTLTLGQVAAGGAFTSTPVSLSTGQLPNLQTVTVNSIDSAGIQLHPGENADSPADIRIKEEEPDPEEWQLSGDSTLNTNDLTHLRVQVVDEEGDQQHQEGKRLRRVACTCPNCKEGGGRGTNLGKKKQHICHIPGCGKVYGKTSHLRAHLRWHSGERPFVCNWMYCGKRFTRSDELQRHRRTHTGEKKFVCPECSKRFMRSDHLAKHIKTHQNKKGIHSSSTVLASVEAARDDTLITAGGTTLILANIQQGSVSGIGTVNTSATSNQDILTNTEIPLQLVTVSGNETME

SEQ ID NO: 82663 - protein, 738 aa, Homo sapiens
  Payload ID: 16449
  Gene Symbol: SP3
  Gene Name: Sp3 transcription factor
  ENSP ID: ENSP00000413665
  MOD_RES (1)..(1): Any amino acid
XPEKPVKQEEMAALDVDSGGGGGGGGGHGEYLQQQQQHGNGAVAAAAAAQTGDLASAQLGGAPNRWEVLSATPTTIKDEAGNLVQIPSAATSSGQYVLPLQNLQNQQIFSVAPGSDSSNGTVSSVQYQVIPQIQSADGQQVQIGFTGSSDNGGINQESSQIQIIPGSNQTLLASGTPSANIQNLIPQTGQVQVQGVAIGGSSFPGQTQVVANVPLGLPGNITFVPINSVDLDSLGLSGSSQTMTAGINADGHLINTGQAMDSSDNSERTGERVSPDINETNTDTDLFVPTSSSSQLPVTIDSTGILQQNTNSLTTSSGQVHSSDLQGNYIQSPVSEETQAQNIQVSTAQPVVQHLQLQESQQPTSQAQIVQGITPQTIHGVQASGQNISQQALQNLQLQLNPGTFLIQAQTVTPSGQVTWQTFQVQGVQNLQNLQIQNTAAQQITLTPVQTLTLGQVAAGGAFTSTPVSLSTGQLPNLQTVTVNSIDSAGIQLHPGENADSPADIRIKEEEPDPEEWQLSGDSTLNTNDLTHLRVQVVDEEGDQQHQEGKRLRRVACTCPNCKEGGGRGTNLGKKKQHICHIPGCGKVYGKTSHLRAHLRWHSGERPFVCNWMYCGKRFTRSDELQRHRRTHTGEKKFVCPECSKRFMRSDHLAKHIKTHQNKKGIHSSSTVLASVEAARDDTLITAGGTTLILANIQQGSVSGIGTVNTSATSNQDILTNTEIPLQLVTVSGNETME

SEQ ID NO: 82664 - protein, 784 aa, Homo sapiens
  Payload ID: 16450
  Gene Symbol: SP4
  Gene Name: Sp4 transcription factor
  Uniprot ID: Q02446
  ENSP ID: ENSP00000222584
MSDQKKEEEEEAAAAAAMATEGGKTSEPENNNKKPKTSGSQDSQPSPLALLAATCSKIGTPGENQATGQQQIIIDPSQGLVQLQNQPQQLELVTTQLAGNAWQLVASTPPASKENNVSQPASSSSSSSSSNNGSASPTKTKSGNSSTPGQFQVIQVQNPSGSVQYQVIPQLQTVEGQQIQINPTSSSSLQDLQGQIQLISAGNNQAILTAANRTASGNILAQNLANQTVPVQIRPGVSIPLQLQTLPGTQAQVVTTLPINIGGVTLALPVINNVAAGGGTGQVGQPAATADSGTSNGNQLVSTPTNTTTSASTMPESPSSSTTCTTTASTSLTSSDTLVSSADTGQYASTSASSSERTIEESQTPAATESEAQSSSQLQPNGMQNAQDQSNSLQQVQIVGQPILQQIQIQQPQQQIIQAIPPQSFQLQSGQTIQTIQQQPLQNVQLQAVNPTQVLIRAPTLTPSGQISWQTVQVQNIQSLSNLQVQNAGLSQQLTITPVSSSGGTTLAQIAPVAVAGAPITLNTAQLASVPNLQTVSVANLGAAGVQVQGVPVTITSVAGQQQGQDGVKVQQATIAPVTVAVGGIANATIGAVSPDQLTQVHLQQGQQTSDQEVQPGKRLRRVACSCPNCREGEGRGSNEPGKKKQHICHIEGCGKVYGKTSHLRAHLRWHTGERPFICNWMFCGKRFTRSDELQRHRRTHTGEKRFECPECSKRFMRSDHLSKHVKTHQNKKGGGTALAIVTSGELDSSVTEVLGSPRIVTVAAISQDSNPATPNVSTNMEEF

SEQ ID NO: 82665 - protein, 49 aa, Homo sapiens
  Payload ID: 16450
  Gene Symbol: SP4
  Gene Name: Sp4 transcription factor
  ENSP ID: ENSP00000390817
MSDQKKEEEEEAAAAAAMATEGGKTSEPENNNKKPKTSGSQVSSKDKME

SEQ ID NO: 82666 - protein, 56 aa, Homo sapiens
  Payload ID: 16450
  Gene Symbol: SP4
  Gene Name: Sp4 transcription factor
  ENSP ID: ENSP00000393623
MSGQQQGQDGVKVQQATIAPVTVAVGGIANATIGAVSPDQLTQVHLQQGQQTSDQE

SEQ ID NO: 82667 - protein, 398 aa, Homo sapiens
  Payload ID: 16451
  Gene Symbol: SP5
  Gene Name: Sp5 transcription factor
  Uniprot ID: Q6BEB4
  ENSP ID: ENSP00000364430
MAAVAVLRNDSLQAFLQDRTPSASPDLGKHSPLALLAATCSRIGQPGAAAPPDFLQVPYDPALGSPSRLFHPWTADMPAHSPGALPPPHPSLGLTPQKTHLQPSFGAAHELPLTPPADPSYPYEFSPVKMLPSSMAALPASCAPAYVPYAAQAALPPGYSNLLPPPPPPPPPPTCRQLSPNPAPDDLPWWSIPQAGAGPGASGVPGSGLSGACAGAPHAPRFPASAAAAAAAAAALQRGLVLGPSDFAQYQSQIAALLQTKAPLAATARRCRRCRCPNCQAAGGAPEAEPGKKKQHVCHVPGCGKVYGKTSHLKAHLRWHTGERPFVCNWLFCGKSFTRSDELQRHLRTHTGEKRFACPECGKRFMRSDHLAKHVKTHQNKKLKVAEAGVKREDARDL

SEQ ID NO: 82668 - protein, 376 aa, Homo sapiens
  Payload ID: 16452
  Gene Symbol: SP6
  Gene Name: Sp6 transcription factor
  Uniprot ID: Q3SY56
  ENSP ID: ENSP00000340799
MLTAVCGSLGSQHTEAPHASPPRLDLQPLQTYQGHTSPEAGDYPSPLQPGELQSLPLGPEVDFSQGYELPGASSRVTCEDLESDSPLAPGPFSKLLQPDMSHHYESWFRPTHPGAEDGSWWDLHPGTSWMDLPHTQGALTSPGHPGALQAGLGGYVGDHQLCAPPPHPHAHHLLPAAGGQHLLGPPDGAKALEVAAPESQGLDSSLDGAARPKGSRRSVPRSSGQTVCRCPNCLEAERLGAPCGPDGGKKKHLHNCHIPGCGKAYAKTSHLKAHLRWHSGDRPFVCNWLFCGKRFTRSDELQRHLQTHTGTKKFPCAVCSRVFMRSDHLAKHMKTHEGAKEEAAGAASGEGKAGGAVEPPGGKGKREAEGSVAPSN

SEQ ID NO: 82669 - protein, 376 aa, Homo sapiens; identical to SEQ ID NO: 82668
  Payload ID: 16452
  Gene Symbol: SP6
  Gene Name: Sp6 transcription factor
  Uniprot ID: Q3SY56
  ENSP ID: ENSP00000438209

SEQ ID NO: 82670 - protein, 431 aa, Homo sapiens
  Payload ID: 16453
  Gene Symbol: SP7
  Gene Name: Sp7 transcription factor
  Uniprot ID: Q8TDD2
  ENSP ID: ENSP00000302812
MASSLLEEEVHYGSSPLAMLTAACSKFGGSSPLRDSTTLGKAGTKKPYSVGSDLSASKTMGDAYPAPFTSTNGLLSPAGSPPAPTSGYANDYPPFSHSFPGPTGTQDPGLLVPKGHSSSDCLPSVYTSLDMTHPYGSWYKAGIHAGISPGPGNTPTPWWDMHPGGNWLGGGQGQGDGLQGTLPTGPAQPPLNPQLPTYPSDFAPLNPAPYPAPHLLQPGPQHVLPQDVYKPKAVGNSGQLEGSGGAKPPRGASTGGSGGYGGSGAGRSSCDCPNCQELERLGAAAAGLRKKPIHSCHIPGCGKVYGKASHLKAHLRWHTGERPFVCNWLFCGKRFTRSDELERHVRTHTREKKFTCLLCSKRFTRSDHLSKHQRTHGEPGPGPPPSGPKELGEGRSTGEEEASQTPRPSASPATPEKAPGGSPEQSNLLEI

SEQ ID NO: 82671 - protein, 413 aa, Homo sapiens
  Payload ID: 16453
  Gene Symbol: SP7
  Gene Name: Sp7 transcription factor
  Uniprot ID: Q8TDD2
  ENSP ID: ENSP00000441367
MLTAACSKFGGSSPLRDSTTLGKAGTKKPYSVGSDLSASKTMGDAYPAPFTSTNGLLSPAGSPPAPTSGYANDYPPFSHSFPGPTGTQDPGLLVPKGHSSSDCLPSVYTSLDMTHPYGSWYKAGIHAGISPGPGNTPTPWWDMHPGGNWLGGGQGQGDGLQGTLPTGPAQPPLNPQLPTYPSDFAPLNPAPYPAPHLLQPGPQHVLPQDVYKPKAVGNSGQLEGSGGAKPPRGASTGGSGGYGGSGAGRSSCDCPNCQELERLGAAAAGLRKKPIHSCHIPGCGKVYGKASHLKAHLRWHTGERPFVCNWLFCGKRFTRSDELERHVRTHTREKKFTCLLCSKRFTRSDHLSKHQRTHGEPGPGPPPSGPKELGEGRSTGEEEASQTPRPSASPATPEKAPGGSPEQSNLLEI

SEQ ID NO: 82672 - protein, 431 aa, Homo sapiens; identical to SEQ ID NO: 82670
  Payload ID: 16453
  Gene Symbol: SP7
  Gene Name: Sp7 transcription factor
  Uniprot ID: Q8TDD2
  ENSP ID: ENSP00000443827

SEQ ID NO: 82673 - protein, 269 aa, Homo sapiens
  Payload ID: 16453
  Gene Symbol: SP7
  Gene Name: Sp7 transcription factor
  ENSP ID: ENSP00000449355
MLTAACSKFGGSSPLRDSTTLGKAGTKKPYSVGSDLSASKTMGDAYPAPFTSTNGLLSPAGSPPAPTSGYANDYPPFSHSFPGPTGTQDPGLLVPKGHSSSDCLPSVYTSLDMTHPYGSWYKAGIHAGISPGPGNTPTPWWDMHPGGNWLGGGQGQGDGLQGTLPTGPAQPPLNPQLPTYPSDFAPLNPAPYPAPHLLQPGPQHVLPQDVYKPKAVGNSGQLEGSGGAKPPRGASTGGSGGYGGSGAGRSSCDCPNCQELERLGAAAAG

SEQ ID NO: 82674 - protein, 490 aa, Homo sapiens
  Payload ID: 16454
  Gene Symbol: SP8
  Gene Name: Sp8 transcription factor
  Uniprot ID: Q8IXZ3
  ENSP ID: ENSP00000354482
MLAATCNKIGSPSPSPSSLSDSSSSFGKGFHPWKRSSSSSSASCNVVGSSLSSFGVSGASRNGGSSSAAAAAAAAAAAAAALVSDSFSCGGSPGSSAFSLTSSSAAAAAAAAAAAASSSPFANDYSVFQAPGVSGGSGGGGGGGGGGSSAHSQDGSHQPVFISKVHTSVDGLQGIYPRVGMAHPYESWFKPSHPGLGAAGEVGSAGASSWWDVGAGWIDVQNPNSAAALPGSLHPAAGGLQTSLHSPLGGYNSDYSGLSHSAFSSGASSHLLSPAGQHLMDGFKPVLPGSYPDSAPSPLAGAGGSMLSAGPSAPLGGSPRSSARRYSGRATCDCPNCQEAERLGPAGASLRRKGLHSCHIPGCGKVYGKTSHLKAHLRWHTGERPFVCNWLFCGKRFTRSDELQRHLRTHTGEKRFACPVCNKRFMRSDHLSKHVKTHSGGGGGGGSAGSGSGGKKGSDTDSEHSAAGSPPCHSPELLQPPEPGHRNGLE

SEQ ID NO: 82675 - protein, 508 aa, Homo sapiens
  Payload ID: 16454
  Gene Symbol: SP8
  Gene Name: Sp8 transcription factor
  Uniprot ID: Q8IXZ3
  ENSP ID: ENSP00000408792
MATSLLGEEPRLGSTPLAMLAATCNKIGSPSPSPSSLSDSSSSFGKGFHPWKRSSSSSSASCNVVGSSLSSFGVSGASRNGGSSSAAAAAAAAAAAAAALVSDSFSCGGSPGSSAFSLTSSSAAAAAAAAAAAASSSPFANDYSVFQAPGVSGGSGGGGGGGGGGSSAHSQDGSHQPVFISKVHTSVDGLQGIYPRVGMAHPYESWFKPSHPGLGAAGEVGSAGASSWWDVGAGWIDVQNPNSAAALPGSLHPAAGGLQTSLHSPLGGYNSDYSGLSHSAFSSGASSHLLSPAGQHLMDGFKPVLPGSYPDSAPSPLAGAGGSMLSAGPSAPLGGSPRSSARRYSGRATCDCPNCQEAERLGPAGASLRRKGLHSCHIPGCGKVYGKTSHLKAHLRWHTGERPFVCNWLFCGKRFTRSDELQRHLRTHTGEKRFACPVCNKRFMRSDHLSKHVKTHSGGGGGGGSAGSGSGGKKGSDTDSEHSAAGSPPCHSPELLQPPEPGHRNGLE

SEQ ID NO: 82676 - protein, 466 aa, Homo sapiens [sequence omitted]

SEQ ID NO: 82677 - protein, 484 aa, Homo sapiens
  Payload ID: 16455
  Gene Symbol: SP9
  Gene Name: Sp9 transcription factor
  Uniprot ID: P0CG40
  ENSP ID: ENSP00000378418
MATSILGEEPRFGTTPLAMLAATCNKIGNTSPLTTLPESSAFAKGGFHPWKRSSSSCNLGSSLSGFAVATGGRGSGGLAGGSGAANSAFCLASTSPTSSAFSSDYGGLFSNSAAAAAAAAGVSPQEAGGQSAFISKVHTTAADGLYPRVGMAHPYESWYKSGFHSTLAAGEVTNGAASSWWDVHSSPGSWLEVQNPAGGLQSSLHSGAPQASLHSQLGTYNPDFSSLTHSAFSSTGLGSSAAAASHLLSTSQHLLAQDGFKPVLPSYSDSSAAVAAAAASAMISGAAAAAAGGSSARSARRYSGRATCDCPNCQEAERLGPAGASLRRKGLHSCHIPGCGKVYGKTSHLKAHLRWHTGERPFVCNWLFCGKRFTRSDELQRHLRTHTGEKRFACPVCNKRFMRSDHLSKHIKTHNGGGGGKKGSDSDTDASNLETPRSESPDLILHDSGVSAARAAAAAAAAAAAAAAAASAGGKEAASGPNDS

SEQ ID NO: 82678 - protein, 1324 aa, Homo sapiens
  Payload ID: 16456
  Gene Symbol: SALL1
  Gene Name: spalt-like transcription factor 1
  Uniprot ID: Q9NSC2
  ENSP ID: ENSP00000251020
MSRRKQAKPQHFQSDPEVASLPRRDGDTEKGQPSRPTKSKDAHVCGRCCAEFFELSDLLLHKKNCTKNQLVLIVNENPASPPETFSPSPPPDNPDEQMNDTVNKTDQVDCSDLSEHNGLDREESMEVEAPVANKSGSGTSSGSHSSTAPSSSSSSSSSSGGGGSSSTGTSAITTSLPQLGDLTTLGNFSVINSNVIIENLQSTKVAVAQFSQEARCGGASGGKLAVPALMEQLLALQQQQIHQLQLIEQIRHQILLLASQNADLPTSSSPSQGTLRTSANPLSTLSSHLSQQLAAAAGLAQSLASQSASISGVKQLPPIQLPQSSSGNTIIPSNSGSSPNMNILAAAVTTPSSEKVASSAGASHVSNPAVSSSSSPAFAISSLLSPASNPLLPQQASANSVFPSPLPNIGTTAEDLNSLSALAQQRKSKPPNVTAFEAKSTSDEAFFKHKCRFCAKVFGSDSALQIHLRSHTGERPFKCNICGNRFSTKGNLKVHFQRHKEKYPHIQMNPYPVPEHLDNIPTSTGIPYGMSIPPEKPVTSWLDTKPVLPTLTTSVGLPLPPTLPSLIPFIKTEEPAPIPISHSATSPPGSVKSDSGGPESATRNLGGLPEEAEGSTLPPSGGKSEESGMVTNSVPTASSSVLSSPAADCGPAGSATTFTNPLLPLMSEQFKAKFPFGGLLDSAQASETSKLQQLVENIDKKATDPNECIICHRVLSCQSALKMHYRTHTGERPFKCKICGRAFTTKGNLKTHYSVHRAMPPLRVQHSCPICQKKFTNAVVLQQHIRMHMGGQIPNTPVPDSYSESMESDTGSFDEKNFDDLDNFSDENMEDCPEGSIPDTPKSADASQDSLSSSPLPLEMSSIAALENQMKMINAGLAEQLQASLKSVENGSIEGDVLTNDSSSVGGDMESQSAGSPAISESTSSMQALSPSNSTQEFHKSPSIEEKPQRAVPSEFANGLSPTPVNGGALDLTSSHAEKIIKEDSLGILFPFRDRGKFKNTACDICGKTFACQSALDIHYRSHTKERPFICTVCNRGFSTKGNLKQHMLTHQMRDLPSQLFEPSSNLGPNQNSAVIPANSLSSLIKTEVNGFVHVSPQDSKDTPTSHVPSGPLSSSATSPVLLPALPRRTPKQHYCNTCGKTFSSSSALQIHERTHTGEKPFACTICGRAFTTKGNLKVHMGTHMWNSTPARRGRRLSVDGPMTFLGGNPVKFPEMFQKDLAARSGSGDPSSFWNQYAAALSNGLAMKANEISVIQNGGIPPIPGSLGSGNSSPVSGLTGNLERLQNSEPNAPLAGLEKMASSENGTNFRFTRFVEDSKEIVTS

SEQ ID NO: 82679 - protein, 1227 aa, Homo sapiens
  Payload ID: 16456
  Gene Symbol: SALL1
  Gene Name: spalt-like transcription factor 1
  Uniprot ID: Q9NSC2
  ENSP ID: ENSP00000407914
MNDTVNKTDQVDCSDLSEHNGLDREESMEVEAPVANKSGSGTSSGSHSSTAPSSSSSSSSSSGGGGSSSTGTSAITTSLPQLGDLTTLGNFSVINSNVIIENLQSTKVAVAQFSQEARCGGASGGKLAVPALMEQLLALQQQQIHQLQLIEQIRHQILLLASQNADLPTSSSPSQGTLRTSANPLSTLSSHLSQQLAAAAGLAQSLASQSASISGVKQLPPIQLPQSSSGNTIIPSNSGSSPNMNILAAAVTTPSSEKVASSAGASHVSNPAVSSSSSPAFAISSLLSPASNPLLPQQASANSVFPSPLPNIGTTAEDLNSLSALAQQRKSKPPNVTAFEAKSTSDEAFFKHKCRFCAKVFGSDSALQIHLRSHTGERPFKCNICGNRFSTKGNLKVHFQRHKEKYPHIQMNPYPVPEHLDNIPTSTGIPYGMSIPPEKPVTSWLDTKPVLPTLTTSVGLPLPPTLPSLIPFIKTEEPAPIPISHSATSPPGSVKSDSGGPESATRNLGGLPEEAEGSTLPPSGGKSEESGMVTNSVPTASSSVLSSPAADCGPAGSATTFTNPLLPLMSEQFKAKFPFGGLLDSAQASETSKLQQLVENIDKKATDPNECIICHRVLSCQSALKMHYRTHTGERPFKCKICGRAFTTKGNLKTHYSVHRAMPPLRVQHSCPICQKKFTNAVVLQQHIRMHMGGQIPNTPVPDSYSESMESDTGSFDEKNFDDLDNFSDENMEDCPEGSIPDTPKSADASQDSLSSSPLPLEMSSIAALENQMKMINAGLAEQLQASLKSVENGSIEGDVLTNDSSSVGGDMESQSAGSPAISESTSSMQALSPSNSTQEFHKSPSIEEKPQRAVPSEFANGLSPTPVNGGALDLTSSHAEKIIKEDSLGILFPFRDRGKFKNTACDICGKTFACQSALDIHYRSHTKERPFICTVCNRGFSTKGNLKQHMLTHQMRDLPSQLFEPSSNLGPNQNSAVIPANSLSSLIKTEVNGFVHVSPQDSKDTPTSHVPSGPLSSSATSPVLLPALPRRTPKQHYCNTCGKTFSSSSALQIHERTHTGEKPFACTICGRAFTTKGNLKVHMGTHMWNSTPARRGRRLSVDGPMTFLGGNPVKFPEMFQKDLAARSGSGDPSSFWNQYAAALSNGLAMKANEISVIQNGGIPPIPGSLGSGNSSPVSGLTGNLERLQNSEPNAPLAGLEKMASSENGTNFRFTRFVEDSKEIVTS

SEQ ID NO: 82680 - protein, 34 aa, Homo sapiens
  Payload ID: 16456
  Gene Symbol: SALL1
  Gene Name: spalt-like transcription factor 1
  ENSP ID: ENSP00000455582
MSRRKQAKPQHFQSDPEVASLPRRDGTHGHSHVE

SEQ ID NO: 82681 - protein, 1154 aa, Homo sapiens
  Payload ID: 16456
  Gene Symbol: SALL1
  Gene Name: spalt-like transcription factor 1
  ENSP ID: ENSP00000456777
MNDTVNKTDQVDCSDLSEHNGLDREESMEVEAPVANKSGSGTSSGSHSSTAPSSSSSSSSSSGGGGSSSTGTSAITTSLPQLGDLTTLGNFSVINSNVIIENLQSTKVAVAQFSQEARCGGASGGKLAVPALMEQLLALQQQQIHQLQLIEQIRHQILLLASQNADLPTSSSPSQGTLRTSANPLSTLSSHLSQQLAAAAGLAQSLASQSASISGVKQLPPIQLPQSSSGNTIIPSNSGSSPNMNILAAAVTTPSSEKVASSAGASHVSNPAVSSSSSPAFAISSLLSPASNPLLPQQASANSVFPSPLPNIGTTAEDLNSLSALAQQRKSKPPNVTAFEAKSTSDEAFFKHKCRFCAKVFGSDSALQIHLRSHTGERPFKCNICGNRFSTKGNLKVHFQRHKEKYPHIQMNPYPVPEHLDNIPTSTGIPYGMSIPPEKPVTSWLDTKPVLPTLTTSVGLPLPPTLPSLIPFIKTEEPAPIPISHSATSPPGSVKSDSGGPESATRNLGGLPEEAEGSTLPPSGGKSEESGMVTNSVPTASSSVLSSPAADCGPAGSATTFTNPLLPLMSEQFKAKFPFGGLLDSAQASETSKLQQLVENIDKKATDPNECIICHRVLSCQSALKMHYRTHTGERPFKCKICGRAFTTKGNLKTHYSVHRAMPPLRVQHSCPICQKKFTNAVVLQQHIRMHMGGQIPNTPVPDSYSESMESDTGSFDEKNFDDLDNFSDENMEDCPEGSIPDTPKSADASQDSLSSSPLPLEMSSIAALENQMKMINAGLAEQLQASLKSVENGSIEGDVLTNDSSSVGGDMESQSAGSPAISESTSSMQALSPSNSTQEFHKSPSIEEKPQRAVPSEFANGLSPTPVNGGALDLTSSHAEKIIKEDSLGILFPFRDRGKFKNTACDICGKTFACQSALDIHYRSHTKERPFICTVCNRGFSTKGNLKQHMLTHQMRDLPSQLFEPSSNLGPNQNSAVIPANSLSSLIKTEVNGFVHVSPQDSKDTPTSHVPSGPLSSSATSPVLLPALPRRTPKQHYCNTCGKTFSSSSALQIHERTHTGEKPFACTICGRAFTTKGNLKVHMGTHMWNSTPARRGRRLSVDGPMTFLGGNPVKFPEMFQKDLAARSGSGDPSSFWNQYAAALSNGLAMKANE

SEQ ID NO: 82682 - protein, 906 aa, Homo sapiens
  Payload ID: 16457
  Gene Symbol: SALL2
  Gene Name: spalt-like transcription factor 2
  ENSP ID: ENSP00000396773
MAHESERSSRLGVPCGEPAELGGDASEEDHPQVCAKCCAQFTDPTEFLAHQNACSTDPPVMVIIGGQENPNNSSASSEPRPEGHNNPQVMDTEHSNPPDSGSSVPTDPTWGPERRGEESSGHFLVAATGAETPKQAFFHLYHPLGSQHPFSAGGVGRSHKPTPAPSPALPGSTDQLIASPHLAFPSTTGLLAAQCLGAARGLEATASPGLLKPKNGSGELSYGEVMGPLEKPGGRHKCRFCAKVFGSDSALQIHLRSHTGERPYKCNVCGNRFTTRGNLKVHFHRHREKYPHVQMNPHPVPEHLDYVITSSGLPYGMSVPPEKAEEEAATPGGGVERKPLVASTTALSATESLTLLSTSAGTATAPGLPAFNKFVLMKAVEPKNKADENTPPGSEGSAISGVAESSTATRMQLSKLVTSLPSWALLTNHFKSTGSFPFPYVLEPLGASPSETSKLQQLVEKIDRQGAVAVTSAASGAPTTSAPAPSSSASSGPNQCVICLRVLSCPRALRLHYGQHGGERPFKCKVCGRAFSTRGNLRAHFVGHKASPAARAQNSCPICQKKFTNAVTLQQHVRMHLGGQIPNGGTALPEGGGAAQENGSEQSTVSGARSFPQQQSQQPSPEEELSEEEEEEDEEEEEDVTDEDSLAGRGSESGGEKAISVRGDSEEASGAEEEVGTVAAAATAGKEMDSNEKTTQQSSLPPPPPPDSLDQPQPMEQGSSGVLGGKEEGGKPERSSSPASALTPEGEATSVTLVEELSLQEAMRKEPGESSSRKACEVCGQAFPSQAALEEHQKTHPKEGPLFTCVFCRQGFLERATLKKHMLLAHHQNQYVAFLSNGLPMKPWNSSSTSTTTPSLAPPVLFGLGTVAGKVPPTMGSREAKEKTAPLLFQPPAPKAVPEKPIIDKK

SEQ ID NO: 82683 - protein, 191 aa, Homo sapiens
  Payload ID: 16457
  Gene Symbol: SALL2
  Gene Name: spalt-like transcription factor 2
  ENSP ID: ENSP00000438493
MAHESERSSRLGVPCGEPAELGGDASEEDHPQVCAKCCAQFTDPTEFLAHQNACSTDPPVMVIIGGQENPNNSSASSEPRPEGHNNPQVMDTEHSNPPDSGSSVPTDPTWGPERRGEESSGHFLVAATGTAAGGGGGLILASPKLGATPLPPESTPAPPPPPPPPPPPGVGSGHLNIPLILEELRVLQQRQ

SEQ ID NO: 82684 - protein, 99 aa, Homo sapiens
  Payload ID: 16457
  Gene Symbol: SALL2
  Gene Name: spalt-like transcription factor 2
  ENSP ID: ENSP00000439654
MVIIGGQENPNNSSASSEPRPEGHNNPQVMDTEHSNPPDSGSSVPTDPTWGPERRGEESSGHFLVAATGTAAGGGGGLILASPKLGATPLPPESTPAPP

SEQ ID NO: 82685 - protein, 902 aa, Homo sapiens
  Payload ID: 16457
  Gene Symbol: SALL2
  Gene Name: spalt-like transcription factor 2
  ENSP ID: ENSP00000440054
  MOD_RES (1)..(1): Any amino acid
XKPQQLISDCEGPSASENGDASEEDHPQVCAKCCAQFTDPTEFLAHQNACSTDPPVMVIIGGQENPNNSSASSEPRPEGHNNPQVMDTEHSNPPDSGSSVPTDPTWGPERRGEESSGHFLVAATGAETPKQAFFHLYHPLGSQHPFSAGGVGRSHKPTPAPSPALPGSTDQLIASPHLAFPSTTGLLAAQCLGAARGLEATASPGLLKPKNGSGELSYGEVMGPLEKPGGRHKCRFCAKVFGSDSALQIHLRSHTGERPYKCNVCGNRFTTRGNLKVHFHRHREKYPHVQMNPHPVPEHLDYVITSSGLPYGMSVPPEKAEEEAATPGGGVERKPLVASTTALSATESLTLLSTSAGTATAPGLPAFNKFVLMKAVEPKNKADENTPPGSEGSAISGVAESSTATRMQLSKLVTSLPSWALLTNHFKSTGSFPFPYVLEPLGASPSETSKLQQLVEKIDRQGAVAVTSAASGAPTTSAPAPSSSASSGPNQCVICLRVLSCPRALRLHYGQHGGERPFKCKVCGRAFSTRGNLRAHFVGHKASPAARAQNSCPICQKKFTNAVTLQQHVRMHLGGQIPNGGTALPEGGGAAQENGSEQSTVSGARSFPQQQSQQPSPEEELSEEEEEEDEEEEEDVTDEDSLAGRGSESGGEKAISVRGDSEEASGAEEEVGTVAAAATAGKEMDSNEKTTQQSSLPPPPPPDSLDQPQPMEQGSSGVLGGKEEGGKPERSSSPASALTPEGEATSVTLVEELSLQEAMRKEPGESSSRKACEVCGQAFPSQAALEEHQKTHPKEGPLFTCVFCRQGFLERATLKKHMLLAHHQNQYVAFLSNGLPMKPWNSSSTSTTTPSLAPPVLFGLGTVAGKVPPTMGSREAKEKTAPLLFQPPAPKAVPEKPIIDKK

SEQ ID NO: 82686 - protein, 200 aa, Homo sapiens
  Payload ID: 16457
  Gene Symbol: SALL2
  Gene Name: spalt-like transcription factor 2
  ENSP ID: ENSP00000483202
MSRRKQRKPQQLISDCEGPSASENGDASEEDHPQVCAKCCAQFTDPTEFLAHQNACSTDPPVMVIIGGQENPNNSSASSEPRPEGHNNPQVMDTEHSNPPDSGSSVPTDPTWGPERRGEESSGHFLVAATEPVCGIPVKWPAHEALEFQLHLHYHSKPGPTSAVWPRNCGWEGASNNGIQGSQGEDSPPPISASCTQGSA

SEQ ID NO: 82687 - protein, 1007 aa, Homo sapiens
  Payload ID: 16457
  Gene Symbol: SALL2
  Gene Name: spalt-like transcription factor 2
  Uniprot ID: Q9Y467
  ENSP ID: ENSP00000483562
MSRRKQRKPQQLISDCEGPSASENGDASEEDHPQVCAKCCAQFTDPTEFLAHQNACSTDPPVMVIIGGQENPNNSSASSEPRPEGHNNPQVMDTEHSNPPDSGSSVPTDPTWGPERRGEESSGHFLVAATGTAAGGGGGLILASPKLGATPLPPESTPAPPPPPPPPPPPGVGSGHLNIPLILEELRVLQQRQIHQMQMTEQICRQVLLLGSLGQTVGAPASPSELPGTGTASSTKPLLPLFSPIKPVQTSKTLASSSSSSSSSSGAETPKQAFFHLYHPLGSQHPFSAGGVGRSHKPTPAPSPALPGSTDQLIASPHLAFPSTTGLLAAQCLGAARGLEATASPGLLKPKNGSGELSYGEVMGPLEKPGGRHKCRFCAKVFGSDSALQIHLRSHTGERPYKCNVCGNRFTTRGNLKVHFHRHREKYPHVQMNPHPVPEHLDYVITSSGLPYGMSVPPEKAEEEAATPGGGVERKPLVASTTALSATESLTLLSTSAGTATAPGLPAFNKFVLMKAVEPKNKADENTPPGSEGSAISGVAESSTATRMQLSKLVTSLPSWALLTNHFKSTGSFPFPYVLEPLGASPSETSKLQQLVEKIDRQGAVAVTSAASGAPTTSAPAPSSSASSGPNQCVICLRVLSCPRALRLHYGQHGGERPFKCKVCGRAFSTRGNLRAHFVGHKASPAARAQNSCPICQKKFTNAVTLQQHVRMHLGGQIPNGGTALPEGGGAAQENGSEQSTVSGARSFPQQQSQQPSPEEELSEEEEEEDEEEEEDVTDEDSLAGRGSESGGEKAISVRGDSEEASGAEEEVGTVAAAATAGKEMDSNEKTTQQSSLPPPPPPDSLDQPQPMEQGSSGVLGGKEEGGKPERSSSPASALTPEGEATSVTLVEELSLQEAMRKEPGESSSRKACEVCGQAFPSQAALEEHQKTHPKEGPLFTCVFCRQGFLERATLKKHMLLAHHQVQPFAPHGPQNIAALSLVPGCSPSITSTGLSPFPRKDDPTIP

SEQ ID NO: 82688 - protein, 198 aa, Homo sapiens
  Payload ID: 16457
  Gene Symbol: SALL2
  Gene Name: spalt-like transcription factor 2
  ENSP ID: ENSP00000484460
MAHESERSSRLGVPCGEPAELGGDASEEDHPQVCAKCCAQFTDPTEFLAHQNACSTDPPVMVIIGGQENPNNSSASSEPRPEGHNNPQVMDTEHSNPPDSGSSVPTDPTWGPERRGEESSGHFLVAATEPVCGIPVKWPAHEALEFQLHLHYHSKPGPTSAVWPRNCGWEGASNNGIQGSQGEDSPPPISASCTQGSA

SEQ ID NO: 82689 - protein, 1095 aa, Homo sapiens
  Payload ID: 16458
  Gene Symbol: SALL3
  Gene Name: spalt-like transcription factor 3
  Uniprot ID: Q9BXA9
  ENSP ID: ENSP00000439975
MDAEPAGDTRAPRPPPAAPAPPTPAYGAPSTNVTLEALLSTKVAVAQFSQGARAAGGSGAGGGVAAAAVPLILEQLMALQQQQIHQLQLIEQIRSQVALMQRPPPRPSLSPAAAPSAPGPAPSQLPGLAALPLSAGAPAAAIAGSGPAAPAAFEGAQPLSRPESGASTPGGPAEPSAPAAPSAAPAPAAPAPAPAPQSAASSQPQSASTPPALAPGSLLGAAPGLPSPLLPQTSASGVIFPNPLVSIAATANALDPLSALMKHRKGKPPNVSVFEPKASAEDPFFKHKCRFCAKVFGSDSALQIHLRSHTGERPFKCNICGNRFSTKGNLKVHFQRHKEKYPHIQMNPYPVPEYLDNVPTCSGIPYGMSLPPEKPVTTWLDSKPVLPTVPTSVGLQLPPTVPGAHGYADSPSATPASRSPQRPSPASSECASLSPGLNHVESGVSATAESPQSLLGGPPLTKAEPVSLPCTNARAGDAPVGAQASAAPTSVDGAPTSLGSPGLPAVSEQFKAQFPFGGLLDSMQTSETSKLQQLVENIDKKMTDPNQCVICHRVLSCQSALKMHYRTHTGERPFKCKICGRAFTTKGNLKTHFGVHRAKPPLRVQHSCPICQKKFTNAVVLQQHIRMHMGGQIPNTPLPEGFQDAMDSELAYDDKNAETLSSYDDDMDENSMEDDAELKDAATDPAKPLLSYAGSCPPSPPSVISSIAALENQMKMIDSVMSCQQLTGLKSVENGSGESDRLSNDSSSAVGDLESRSAGSPALSESSSSQALSPAPSNGESFRSKSPGLGAPEEPQEIPLKTERPDSPAAAPGSGGAPGRAGIKEEAPFSLLFLSRERGPSQSTPSLISSAAPTMIKMEVNGHGKAMALGEGPPLPAGVQVPAGPQTVMGPGLAPMLAPPPRRTPKQHNCQSCGKTFSSASALQIHERTHTGEKPFGCTICGRAFTTKGNLKVHMGTHMWNNAPARRGRRLSVENPMALLGGDALKFSEMFQKDLAARAMNVDPSFWNQYAAAITNGLAMKNNEISVIQNGGIPQLPVSLGGSALPPLGSMASGMDKARTGSSPPIVSLDKASSETAASRPFTRFIEDNKEIGIN

SEQ ID NO: 82690 - protein, 1300 aa, Homo sapiens
  Payload ID: 16458
  Gene Symbol: SALL3
  Gene Name: spalt-like transcription factor 3
  Uniprot ID: Q9BXA9
  ENSP ID: ENSP00000441823
MSRRKQAKPQHLKSDEELLPPDGAPEHAAPGEGAEDADSGPESRSGGEETSVCEKCCAEFFKWADFLEHQRSCTKLPPVLIVHEDAPAPPPEDFPEPSPASSPSERAESEAAEEAGAEGAEGEARPVEKEAEPMDAEPAGDTRAPRPPPAAPAPPTPAYGAPSTNVTLEALLSTKVAVAQFSQGARAAGGSGAGGGVAAAAVPLILEQLMALQQQQIHQLQLIEQIRSQVALMQRPPPRPSLSPAAAPSAPGPAPSQLPGLAALPLSAGAPAAAIAGSGPAAPAAFEGAQPLSRPESGASTPGGPAEPSAPAAPSAAPAPAAPAPAPAPQSAASSQPQSASTPPALAPGSLLGAAPGLPSPLLPQTSASGVIFPNPLVSIAATANALDPLSALMKHRKGKPPNVSVFEPKASAEDPFFKHKCRFCAKVFGSDSALQIHLRSHTGERPFKCNICGNRFSTKGNLKVHFQRHKEKYPHIQMNPYPVPEYLDNVPTCSGIPYGMSLPPEKPVTTWLDSKPVLPTVPTSVGLQLPPTVPGAHGYADSPSATPASRSPQRPSPASSECASLSPGLNHVESGVSATAESPQSLLGGPPLTKAEPVSLPCTNARAGDAPVGAQASAAPTSVDGAPTSLGSPGLPAVSEQFKAQFPFGGLLDSMQTSETSKLQQLVENIDKKMTDPNQCVICHRVLSCQSALKMHYRTHTGERPFKCKICGRAFTTKGNLKTHFGVHRAKPPLRVQHSCPICQKKFTNAVVLQQHIRMHMGGQIPNTPLPEGFQDAMDSELAYDDKNAETLSSYDDDMDENSMEDDAELKDAATDPAKPLLSYAGSCPPSPPSVISSIAALENQMKMIDSVMSCQQLTGLKSVENGSGESDRLSNDSSSAVGDLESRSAGSPALSESSSSQALSPAPSNGESFRSKSPGLGAPEEPQEIPLKTERPDSPAAAPGSGGAPGRAGIKEEAPFSLLFLSRERGKCPSTVCGVCGKPFACKSALEIHYRSHTKERPFVCALCRRGCSTMGNLKQHLLTHRLKELPSQLFDPNFALGPSQSTPSLISSAAPTMIKMEVNGHGKAMALGEGPPLPAGVQVPAGPQTVMGPGLAPMLAPPPRRTPKQHNCQSCGKTFSSASALQIHERTHTGEKPFGCTICGRAFTTKGNLKVHMGTHMWNNAPARRGRRLSVENPMALLGGDALKFSEMFQKDLAARAMNVDPSFWNQYAAAITNGLAMKNNEISVIQNGGIPQLPVSLGGSALPPLGSMASGMDKARTGSSPPIVSLDKASSETAASRPFTRFIEDNKEIGIN

SEQ ID NO: 82691 - protein, 1228 aa, Homo sapiens
  Payload ID: 16458
  Gene Symbol: SALL3
  Gene Name: spalt-like transcription factor 3
  Uniprot ID: Q9BXA9
  ENSP ID: ENSP00000458360
MSRRKQAKPQHLKSDEELLPPDGAPEHAAPGEGAEDADSGPESRSGGEETSVCEKCCAEFFKWADFLEHQRSCTKLPPVLIVHEDAPAPPPEDFPEPSPASSPSERAESEAAEEAGAEGAEGEARPVEKEAEPMDAEPAGDTRAPRPPPAAPAPPTPAYGAPSTNVTLEALLSTKVAVAQFSQGARAAGGSGAGGGVAAAAVPLILEQLMALQQQQIHQLQLIEQIRSQVALMQRPPPRPSLSPAAAPSAPGPAPSQLPGLAALPLSAGAPAAAIAGSGPAAPAAFEGAQPLSRPESGASTPGGPAEPSAPAAPSAAPAPAAPAPAPAPQSAASSQPQSASTPPALAPGSLLGAAPGLPSPLLPQTSASGVIFPNPLVSIAATANALDPLSALMKHRKGKPPNVSVFEPKASAEDPFFKHKCRFCAKVFGSDSALQIHLRSHTGERPFKCNICGNRFSTKGNLKVHFQRHKEKYPHIQMNPYPVPEYLDNVPTCSGIPYGMSLPPEKPVTTWLDSKPVLPTVPTSVGLQLPPTVPGAHGYADSPSATPASRSPQRPSPASSECASLSPGLNHVESGVSATAESPQSLLGGPPLTKAEPVSLPCTNARAGDAPVGAQASAAPTSVDGAPTSLGSPGLPAVSEQFKAQFPFGGLLDSMQTSETSKLQQLVENIDKKMTDPNQCVICHRVLSCQSALKMHYRTHTGERPFKCKICGRAFTTKGNLKTHFGVHRAKPPLRVQHSCPICQKKFTNAVVLQQHIRMHMGGQIPNTPLPEGFQDAMDSELAYDDKNAETLSSYDDDMDENSMEDDAELKDAATDPAKPLLSYAGSCPPSPPSVISSIAALENQMKMIDSVMSCQQLTGLKSVENGSGESDRLSNDSSSAVGDLESRSAGSPALSESSSSQALSPAPSNGESFRSKSPGLGAPEEPQEIPLKTERPDSPAAAPGSGGAPGRAGIKEEAPFSLLFLSRERGPSQSTPSLISSAAPTMIKMEVNGHGKAMALGEGPPLPAGVQVPAGPQTVMGPGLAPMLAPPPRRTPKQHNCQSCGKTFSSASALQIHERTHTGEKPFGCTICGRAFTTKGNLKVHMGTHMWNNAPARRGRRLSVENPMALLGGDALKFSEMFQKDLAARAMNVDPSFWNQYAAAITNGLAMKNNEISVIQNGGIPQLPVSLGGSALPPLGSMASGMDKARTGSSPPIVSLDKASSETAASRPFTRFIEDNKEIGIN

SEQ ID NO: 82692 - protein, 1224 aa, Homo sapiens
  Payload ID: 16458
  Gene Symbol: SALL3
  Gene Name: spalt-like transcription factor 3
  ENSP ID: ENSP00000460356
  MOD_RES (1)..(1): Any amino acid
XQAKPQHLKSDEELLPPDGAPEHAAPGEGAEDADSGPESRSGGEETSVCEKCCAEFFKWADFLEHQRSCTKLPPVLIVHEDAPAPPPEDFPEPSPASSPSERAESEAAEEAGAEGAEGEARPVEKEAEPMDAEPAGDTRAPRPPPAAPAPPTPAYGAPSTNVTLEALLSTKVAVAQFSQGARAAGGSGAGGGVAAAAVPLILEQLMALQQQQIHQLQLIEQIRSQVALMQRPPPRPSLSPAAAPSAPGPAPSQLPGLAALPLSAGAPAAAIAGSGPAAPAAFEGAQPLSRPESGASTPGGPAEPSAPAAPSAAPAPAAPAPAPAPQSAASSQPQSASTPPALAPGSLLGAAPGLPSPLLPQTSASGVIFPNPLVSIAATANALDPLSALMKHRKGKPPNVSVFEPKASAEDPFFKHKCRFCAKVFGSDSALQIHLRSHTGERPFKCNICGNRFSTKGNLKVHFQRHKEKYPHIQMNPYPVPEYLDNVPTCSGIPYGMSLPPEKPVTTWLDSKPVLPTVPTSVGLQLPPAVPGAHGYADSPSATPASRSPQRPSPASSECASLSPGLNHVESGVSATAESPQSLLGGPPVTKAEPVSLPCTNARAGDAPVGAQASAAPTSVDGAPTSLGSPGLPAVSEQFKAQFPFGGLLDSMQTSETSKLQQLVENIDKKMTDPNQCVICHRVLSCQSALKMHYRTHTGERPFKCKICGRAFTTKGNLKTHFGVHRAKPPLRVQHSCPICQKKFTNAVVLQQHIRMHMGGQIPNTPLPEGFQDAMDSELAYDDKNAETLSSYDDDMDENSMEDDAELKDAATDPAKPLLSYAGSCPPSPPSVISSIAALENQMKMIDSVMSCQQLTGLKSVENGSGESDRLSNDSSSAVGDLESRSAGSPALSESSSSQALSPAPSNGESFRSKSPGLGAPEEPQEIPLKTERPDSPAAAPGSGGAPGRAGIKEEAPFSLLFLSRERGPSQSTPSLISSAAPTMIKMEVNGHGKAMALGEGPPLPAGVQVPAGPQTVMGPGLAPMLAPPPRRTPKQHNCQSCGKTFSSASALQIHERTHTGEKPFGCTICGRAFTTKGNLKVHMGTHMWNNAPARRGRRLSVENPMALLGGDALKFSEMFQKDLAARAMNVDPSFWNQYAAAITNGLAMKNNEISVIQNGGIPQLPVSLGGSALPPLGSMASGMDKARTGSSPPIVSLDKASSETAASRPFTRFIEDNKEIGIN

SEQ ID NO: 82693 - protein, 150 aa, Homo sapiens
  Payload ID: 16458
  Gene Symbol: SALL3
  Gene Name: spalt-like transcription factor 3
  ENSP ID: ENSP00000460555
  MOD_RES (1)..(1): Any amino acid
XRPDSPAAAPGSGGAPGRAGIKEEAPFSLLFLSRERGPSQSTPSLISSAAPTMIKMEVNGHGKAMALGEGPPLPAGVQVPAGPQTVMGPGLAPMLAPPPRRTPKQHNCQSCGKTFSSASALQIHERTHTGEKPFGCTICGRAFTTKGNLK

SEQ ID NO: 82694 - protein, 1300 aa, Homo sapiens
  Payload ID: 16458
  Gene Symbol: SALL3
  Gene Name: spalt-like transcription factor 3
  ENSP ID: ENSP00000461114
MSRRKQAKPQHLKSDEELLPPDGAPEHAAPGEGAEDADSGPESRSGGEETSVCEKCCAEFFKWADFLEHQRSCTKLPPVLIVHEDAPAPPPEDFPEPSPASSPSERAESEAAEEAGAEGAEGEARPVEKEAEPMDAEPAGDTRAPRPPPAAPAPPTPAYGAPSTNVTLEALLSTKVAVAQFSQGARAAGGSGAGGGVAAAAVPLILEQLMALQQQQIHQLQLIEQIRSQVALMQRPPPRPSLSPAAAPSAPGPAPSQLPGLAALPLSAGAPAAAIAGSGPAAPAAFEGAQPLSRPESGASTPGGPAEPSAPAAPSAAPAPAAPAPAPAPQSAASSQPQSASTPPALAPGSLLGAAPGLPSPLLPQTSASGVIFPNPLVSIAATANALDPLSALMKHRKGKPPNVSVFEPKASAEDPFFKHKCRFCAKVFGSDSALQIHLRSHTGERPFKCNICGNRFSTKGNLKVHFQRHKEKYPHIQMNPYPVPEYLDNVPTCSGIPYGMSLPPEKPVTTWLDSKPVLPTVPTSVGLQLPPAVPGAHGYADSPSATPASRSPQRPSPASSECASLSPGLNHVESGVSATAESPQSLLGGPPVTKAEPVSLPCTNARAGDAPVGAQASAAPTSVDGAPTSLGSPGLPAVSEQFKAQFPFGGLLDSMQTSETSKLQQLVENIDKKMTDPNQCVICHRVLSCQSALKMHYRTHTGERPFKCKICGRAFTTKGNLKTHFGVHRAKPPLRVQHSCPICQKKFTNAVVLQQHIRMHMGGQIPNTPLPEGFQDAMDSELAYDDKNAETLSSYDDDMDENSMEDDAELKDAATDPAKPLLSYAGSCPPSPPSVISSIAALENQMKMIDSVMSCQQLTGLKSVENGSGESDRLSNDSSSAVGDLESRSAGSPALSESSSSQALSPAPSNGESFRSKSPGLGAPEEPQEIPLKTERPDSPAAAPGSGGAPGRAGIKEEAPFSLLFLSRERGKCPSTVCGVCGKPFACKSALEIHYRSHTKERPFVCALCRRGCSTMGNLKQHLLTHRLKELPSQLFDPNFALGPSQSTPSLISSAAPTMIKMEVNGHGKAMALGEGPPLPAGVQVPAGPQTVMGPGLAPMLAPPPRRTPKQHNCQSCGKTFSSASALQIHERTHTGEKPFGCTICGRAFTTKGNLKVHMGTHMWNNAPARRGRRLSVENPMALLGGDALKFSEMFQKDLAARAMNVDPSFWNQYAAAITNGLAMKNNEISVIQNGGIPQLPVSLGGSALPPLGSMASGMDKARTGSSPPIVSLDKASSETAASRPFTRFIEDNKEIGIN

SEQ ID NO: 82695 - protein, 150 aa, Homo sapiens; identical to SEQ ID NO: 82693
  Payload ID: 16458
  Gene Symbol: SALL3
  Gene Name: spalt-like transcription factor 3
  ENSP ID: ENSP00000461451
  MOD_RES (1)..(1): Any amino acid

SEQ ID NO: 82696 - protein, 1300 aa, Homo sapiens; identical to SEQ ID NO: 82690
  Payload ID: 16458
  Gene Symbol: SALL3
  Gene Name: spalt-like transcription factor 3
  Uniprot ID: Q9BXA9
  ENSP ID: ENSP00000478953

SEQ ID NO: 82697 - protein, 960 aa, Homo sapiens
  Payload ID: 16458
  Gene Symbol: SALL3
  Gene Name: spalt-like transcription factor 3
  ENSP ID: ENSP00000481352
MSRRKQAKPQHLKSDEELLPPDGAPEHAAPGEGAEDADSGPESRSGGEETSVCEKCCAEFFKWADFLEHQRSCTKLPPVLIVHEDAPPGLPSPLLPQTSASGVIFPNPLVSIAATANALDPLSALMKHRKGKPPNVSVFEPKASAEDPFFKHKCRFCAKVFGSDSALQIHLRSHTGERPFKCNICGNRFSTKGNLKVHFQRHKEKYPHIQMNPYPVPEYLDNVPTCSGIPYGMSLPPEKPVTTWLDSKPVLPTVPTSVGLQLPPTVPGAHGYADSPSATPASRSPQRPSPASSECASLSPGLNHVESGVSATAESPQSLLGGPPLTKAEPVSLPCTNARAGDAPVGAQASAAPTSVDGAPTSLGSPGLPAVSEQFKAQFPFGGLLDSMQTSETSKLQQLVENIDKKMTDPNQCVICHRVLSCQSALKMHYRTHTGERPFKCKICGRAFTTKGNLKTHFGVHRAKPPLRVQHSCPICQKKFTNAVVLQQHIRMHMGGQIPNTPLPEGFQDAMDSELAYDDKNAETLSSYDDDMDENSMEDDAELKDAATDPAKPLLSYAGSCPPSPPSVISSIAALENQMKMIDSVMSCQQLTGLKSVENGSGESDRLSNDSSSAVGDLESRSAGSPALSESSSSQALSPAPSNGESFRSKSPGLGAPEEPQEIPLKTERPDSPAAAPGSGGAPGRAGIKEEAPFSLLFLSRERGPSQSTPSLISSAAPTMIKMEVNGHGKAMALGEGPPLPAGVQVPAGPQTVMGPGLAPMLAPPPRRTPKQHNCQSCGKTFSSASALQIHERTHTGEKPFGCTICGRAFTTKGNLKVHMGTHMWNNAPARRGRRLSVENPMALLGGDALKFSEMFQKDLAARAMNVDPSFWNQYAAAITNGLAMKNNEISVIQNGGIPQLPVSLGGSALPPLGSMASGMDKARTGSSPPIVSLDKASSETAASRPFTRFIEDNKEIGIN

SEQ ID NO: 82698 - protein, 960 aa, Homo sapiens; identical to SEQ ID NO: 82697
  Payload ID: 16458
  Gene Symbol: SALL3
  Gene Name: spalt-like transcription factor 3
  ENSP ID: ENSP00000482958

SEQ ID NO: 82699 - protein, 959 aa, Homo sapiens
  Payload ID: 16458
  Gene Symbol: SALL3
  Gene Name: spalt-like transcription factor 3
  ENSP ID: ENSP00000483370
MSRRKQAKPQHLKSDEELLPPDGAPEHAAPGEGAEDADSGPESRSGGEETSVCEKCCAEFFKWADFLEHQRSCTKLPPVLIVHEDAPGLPSPLLPQTSASGVIFPNPLVSIAATANALDPLSALMKHRKGKPPNVSVFEPKASAEDPFFKHKCRFCAKVFGSDSALQIHLRSHTGERPFKCNICGNRFSTKGNLKVHFQRHKEKYPHIQMNPYPVPEYLDNVPTCSGIPYGMSLPPEKPVTTWLDSKPVLPTVPTSVGLQLPPAVPGAHGYADSPSATPASRSPQRPSPASSECASLSPGLNHVESGVSATAESPQSLLGGPPVTKAEPVSLPCTNARAGDAPVGAQASAAPTSVDGAPTSLGSPGLPAVSEQFKAQFPFGGLLDSMQTSETSKLQQLVENIDKKMTDPNQCVICHRVLSCQSALKMHYRTHTGERPFKCKICGRAFTTKGNLKTHFGVHRAKPPLRVQHSCPICQKKFTNAVVLQQHIRMHMGGQIPNTPLPEGFQDAMDSELAYDDKNAETLSSYDDDMDENSMEDDAELKDAATDPAKPLLSYAGSCPPSPPSVISSIAALENQMKMIDSVMSCQQLTGLKSVENGSGESDRLSNDSSSAVGDLESRSAGSPALSESSSSQALSPAPSNGESFRSKSPGLGAPEEPQEIPLKTERPDSPAAAPGSGGAPGRAGIKEEAPFSLLFLSRERGPSQSTPSLISSAAPTMIKMEVNGHGKAMALGEGPPLPAGVQVPAGPQTVMGPGLAPMLAPPPRRTPKQHNCQSCGKTFSSASALQIHERTHTGEKPFGCTICGRAFTTKGNLKVHMGTHMWNNAPARRGRRLSVENPMALLGGDALKFSEMFQKDLAARAMNVDPSFWNQYAAAITNGLAMKNNEISVIQNGGIPQLPVSLGGSALPPLGSMASGMDKARTGSSPPIVSLDKASSETAASRPFTRFIEDNKEIGIN

SEQ ID NO: 82700 - protein, 150 aa, Homo sapiens; identical to SEQ ID NO: 82693
  Payload ID: 16458
  Gene Symbol: SALL3
  Gene Name: spalt-like transcription factor 3
  ENSP ID: ENSP00000487734
  MOD_RES (1)..(1): Any amino acid

SEQ ID NO: 82701 - protein, 1228 aa, Homo sapiens; identical to SEQ ID NO: 82691
  Payload ID: 16458
  Gene Symbol: SALL3
  Gene Name: spalt-like transcription factor 3
  Uniprot ID: Q9BXA9
  ENSP ID: ENSP00000488140

SEQ ID NO: 82702 - protein, 1095 aa, Homo sapiens; identical to SEQ ID NO: 82689
  Payload ID: 16458
  Gene Symbol: SALL3
  Gene Name: spalt-like transcription factor 3
  Uniprot ID: Q9BXA9
  ENSP ID: ENSP00000488722

SEQ ID NO: 82703 - protein, 1053 aa, Homo sapiens
  Payload ID: 16459
  Gene Symbol: SALL4
  Gene Name: spalt-like transcription factor 4
  Uniprot ID: Q9UJQ4
  ENSP ID: ENSP00000217086
MSRRKQAKPQHINSEEDQGEQQPQQQTPEFADAAPAAPAAGELGAPVNHPGNDEVASEDEATVKRLRREETHVCEKCCAEFFSISEFLEHKKNCTKNPPVLIMNDSEGPVPSEDFSGAVLSHQPTSPGSKDCHRENGGSSEDMKEKPDAESVVYLKTETALPPTPQDISYLAKGKVANTNVTLQALRGTKVAVNQRSADALPAPVPGANSIPWVLEQILCLQQQQLQQIQLTEQIRIQVNMWASHALHSSGAGADTLKTLGSHMSQQVSAAVALLSQKAGSQGLSLDALKQAKLPHANIPSATSSLSPGLAPFTLKPDGTRVLPNVMSRLPSALLPQAPGSVLFQSPFSTVALDTSKKGKGKPPNISAVDVKPKDEAALYKHKCKYCSKVFGTDSSLQIHLRSHTGERPFVCSVCGHRFTTKGNLKVHFHRHPQVKANPQLFAEFQDKVAAGNGIPYALSVPDPIDEPSLSLDSKPVLVTTSVGLPQNLSSGTNPKDLTGGSLPGDLQPGPSPESEGGPTLPGVGPNYNSPRAGGFQGSGTPEPGSETLKLQQLVENIDKATTDPNECLICHRVLSCQSSLKMHYRTHTGERPFQCKICGRAFSTKGNLKTHLGVHRTNTSIKTQHSCPICQKKFTNAVMLQQHIRMHMGGQIPNTPLPENPCDFTGSEPMTVGENGSTGAICHDDVIESIDVEEVSSQEAPSSSSKVPTPLPSIHSASPTLGFAMMASLDAPGKVGPAPFNLQRQGSRENGSVESDGLTNDSSSLMGDQEYQSRSPDILETTSFQALSPANSQAESIKSKSPDAGSKAESSENSRTEMEGRSSLPSTFIRAPPTYVKVEVPGTFVGPSTLSPGMTPLLAAQPRRQAKQHGCTRCGKNFSSASALQIHERTHTGEKPFVCNICGRAFTTKGNLKVHYMTHGANNNSARRGRKLAIENTMALLGTDGKRVSEIFPKEILAPSVNVDPVVWNQYTSMLNGGLAVKTNEISVIQSGGVPTLPVSLGATSVVNNATVSKMDGSQSGISADVEKPSATDGVPKHQFPHFLEENKIAVS

SEQ ID NO: 82704 - protein, 276 aa, Homo sapiens
  Payload ID: 16459
  Gene Symbol: SALL4
  Gene Name: spalt-like transcription factor 4
  ENSP ID: ENSP00000360594
MSRRKQAKPQHINSEEDQGEQQPQQQTPEFADAAPAAPAAGELGRSSLPSTFIRAPPTYVKVEVPGTFVGPSTLSPGMTPLLAAQPRRQAKQHGCTRCGKNFSSASALQIHERTHTGEKPFVCNICGRAFTTKGNLKVHYMTHGANNNSARRGRKLAIENTMALLGTDGKRVSEIFPKEILAPSVNVDPVVWNQYTSMLNGGLAVKTNEISVIQSGGVPTLPVSLGATSVVNNATVSKMDGSQSGISADVEKPSATDGVPKHQFPHFLEENKIAVS

SEQ ID NO: 82705 - protein, 616 aa, Homo sapiens
  Payload ID: 16459
  Gene Symbol: SALL4
  Gene Name: spalt-like transcription factor 4
  Uniprot ID: Q9UJQ4
  ENSP ID: ENSP00000379319
MSRRKQAKPQHINSEEDQGEQQPQQQTPEFADAAPAAPAAGELGAPVNHPGNDEVASEDEATVKRLRREETHVCEKCCAEFFSISEFLEHKKNCTKNPPVLIMNDSEGPVPSEDFSGAVLSHQPTSPGSKDCHRENGGSSEDMKEKPDAESVVYLKTETALPPTPQDISYLAKGKVANTNVTLQALRGTKVAVNQRSADALPAPVPGANSIPWVLEQILCLQQQQLQQIQLTEQIRIQVNMWASHALHSSGAGADTLKTLGSHMSQQVSAAVALLSQKAGSQGLSLDALKQAKLPHANIPSATSSLSPGLAPFTLKPDGTRVLPNVMSRLPSALLPQAPGSVLFQSPFSTVALDTSKKGKGKPPNISAVDVKPKDEAALYKHKCRSSLPSTFIRAPPTYVKVEVPGTFVGPSTLSPGMTPLLAAQPRRQAKQHGCTRCGKNFSSASALQIHERTHTGEKPFVCNICGRAFTTKGNLKVHYMTHGANNNSARRGRKLAIENTMALLGTDGKRVSEIFPKEILAPSVNVDPVVWNQYTSMLNGGLAVKTNEISVIQSGGVPTLPVSLGATSVVNNATVSKMDGSQSGISADVEKPSATDGVPKHQFPHFLEENKIAVS

SEQ ID NO: 82706 - protein, 97 aa, Homo sapiens
  Payload ID: 16460
  Gene Symbol: SPANXA2
  Gene Name: SPANX family, member A2
  Uniprot ID: Q9NS26
  ENSP ID: ENSP00000359549
MDKQSSAGGVKRSVPCDSNEANEMMPETPTGDSDPQPAPKKMKTSESSTILVVRYRRNFKRTSPEELLNDHARENRINPLQMEEEEFMEIMVEIPAK

SEQ ID NO: 82707 - protein, 103 aa, Homo sapiens
  Payload ID: 16461
  Gene Symbol: SPANXB1
  Gene Name: SPANX family, member B1
  Uniprot ID: Q9NS25
  ENSP ID: ENSP00000405202
MGQQSSVRRLKRSVPCESNEANEANEANKTMPETPTGDSDPQPAPKKMKTSESSTILVVRYRRNVKRTSPEELLNDHARENRINPDQMEEEEFIEITTERPKK

SEQ ID NO: 82708 - protein, 97 aa, Homo sapiens
  Payload ID: 16462
  Gene Symbol: SPANXC
  Gene Name: SPANX family, member C
  Uniprot ID: Q9NY87
  ENSP ID: ENSP00000351884
MDKQSSAGGVKRSVPCDSNEANEMMPETSSGYSDPQPAPKKLKTSESSTILVVRYRRNVKRTSPEELVNDHARENRINPLQMEEEEFMEIMVEIPAK

SEQ ID NO: 82709 - protein, 97 aa, Homo sapiens
  Payload ID: 16463
  Gene Symbol: SPANXD
  Gene Name: SPANX family, member D
  Uniprot ID: Q9BXN6
  ENSP ID: ENSP00000359546
MDKQSSAGGVKRSVPCDSNEANEMMPETSSGYSDPQPAPKKLKTSESSTILVVRYRRNFKRTSPEELVNDHARKNRINPLQMEEEEFMEIMVEIPAK

SEQ ID NO: 82710 - protein, 72 aa, Homo sapiens
  Payload ID: 16464
  Gene Symbol: SPANXN1
  Gene Name: SPANX family, member N1
  Uniprot ID: Q5VSR9
  ENSP ID: ENSP00000359524
MEQPTSSINGEKRKSPCESNNENDEMQETPNRDLAPEPSLKKMKTSEYSTVLAFCYRKAKKIHSNQLENDQS

SEQ ID NO: 82711 - protein, 180 aa, Homo sapiens
  Payload ID: 16465
  Gene Symbol: SPANXN2
  Gene Name: SPANX family, member N2
  Uniprot ID: Q5MJ10
  ENSP ID: ENSP00000470584
MEQPTSSTNGEKRKSPCESNNKKNDEMQEAPNRVLAPKQSLQKTKTIEYLTIIVYYYRKHTKINSNQLEKDQSRENSINPVQEEEDEGLDSAEGSSQEDEDLDSSEGSSQEDEDLDSSEGSSQEDEDLDSSEGSSQEDEDLDSSEGSSQEDEDLDPPEGSSQEDEDLDSSEGSSQEGGED

SEQ ID NO: 82712 - protein, 141 aa, Homo sapiens
  Payload ID: 16466
  Gene Symbol: SPANXN3
  Gene Name: SPANX family, member N3
  Uniprot ID: Q5MJ09
  ENSP ID: ENSP00000359534
MEQPTSSTNGEKTKSPCESNNKKNDEMQEVPNRVLAPEQSLKNTKTSEYPIIFVYYLRKGKKINSNQLENEQSQENSINPIQKEEDEGVDLSEGSSNEDEDLGPCEGPSKEDKDLDSSEGSSQEDEDLGLSEGSSQDSGED

SEQ ID NO: 82713 - protein, 156 aa, Homo sapiens
  Payload ID: 16467
  Gene Symbol: SPANXN4
  Gene Name: SPANX family, member N4
  ENSP ID: ENSP00000359535
MEEPTSSTNENKMKSPCESNKRKVDKKKNLHRASAPEQSLKETEKAKYPTLVFYCRKNKKRNSNQLENNQPTESSTDPIKEKGDLDISAGSPQDGEEEKDLVFLGARACLEEHIRRSVLYVGDSDTLSKMKTSESPPSGHIPQSGVFCNSPNAVSN

SEQ ID NO: 82714 - protein, 99 aa, Homo sapiens
  Payload ID: 16467
  Gene Symbol: SPANXN4
  Gene Name: SPANX family, member N4
  Uniprot ID: Q5MJ08
  ENSP ID: ENSP00000405210
MEEPTSSTNENKMKSPCESNKRKVDKKKKNLHRASAPEQSLKETEKAKYPTLVFYCRKNKKRNSNQLENNQPTESSTDPIKEKGDLDISAGSPQDGGQN

SEQ ID NO: 82715 - protein, 72 aa, Homo sapiens
  Payload ID: 16468
  Gene Symbol: SPANXN5
  Gene Name: SPANX family, member N5
  Uniprot ID: Q5MJ07
  ENSP ID: ENSP00000364661
MEKPTSSTNGEKRKSPCDSNSKNDEMQETPNRDLVLEPSLKKMKTSEYSTVLVLCYRKTKKIHSNQLENDQS

SEQ ID NO: 82716 - protein, 435 aa, Homo sapiens
  Payload ID: 16469
  Gene Symbol: SMOC1
  Gene Name: SPARC related modular calcium binding 1
  Uniprot ID: Q9H4F8
  ENSP ID: ENSP00000355110
MLPARCARLLTPHLLLVLVQLSPARGHRTTGPRFLISDRDPQCNLHCSRTQPKPICASDGRSYESMCEYQRAKCRDPTLGVVHRGRCKDAGQSKCRLERAQALEQAKKPQEAVFVPECGEDGSFTQVQCHTYTGYCWCVTPDGKPISGSSVQNKTPVCSGSVTDKPLSQGNSGRKDDGSKPTPTMETQPVFDGDEITAPTLWIKHLVIKDSKLNNTNIRNSEKVYSCDQERQSALEEAQQNPREGIVIPECAPGGLYKPVQCHQSTGYCWCVLVDTGRPLPGTSTRYVMPSCESDARAKTTEADDPFKDRELPGCPEGKKMEFITSLLDALTTDMVQAINSAAPTGGGRFSEPDPSHTLEERVVHWYFSQLDSNSSNDINKREMKPFKRYVKKKAKPKKCARRFTDYCDLNKDKVISLPELKGCLGVSKEVGRLV

SEQ ID NO: 82717 - protein, 434 aa, Homo sapiens
  Payload ID: 16469
  Gene Symbol: SMOC1
  Gene Name: SPARC related modular calcium binding 1
  Uniprot ID: Q9H4F8
  ENSP ID: ENSP00000370680
MLPARCARLLTPHLLLVLVQLSPARGHRTTGPRFLISDRDPQCNLHCSRTQPKPICASDGRSYESMCEYQRAKCRDPTLGVVHRGRCKDAGQSKCRLERAQALEQAKKPQEAVFVPECGEDGSFTQVQCHTYTGYCWCVTPDGKPISGSSVQNKTPVCSGSVTDKPLSQGNSGRKDDGSKPTPTMETQPVFDGDEITAPTLWIKHLVIKDSKLNNTNIRNSEKVYSCDQERQSALEEAQQNPREGIVIPECAPGGLYKPVQCHQSTGYCWCVLVDTGRPLPGTSTRYVMPSCESDARAKTTEADDPFKDRELPGCPEGKKMEFITSLLDALTTDMVQAINSAAPTGGGRFSEPDPSHTLEERVVHWYFSQLDSNSSNDINKREMKPFKRYVKKKAKPKKCARRFTDYCDLNKDKVISLPELKGCLGVSKEGRLV

SEQ ID NO: 82718 - protein, 457 aa, Homo sapiens
  Payload ID: 16470
  Gene Symbol: SMOC2
  Gene Name: SPARC related modular calcium binding 2
  Uniprot ID: Q9H3U7
  ENSP ID: ENSP00000346537
MLLPQLCWLPLLAGLLPPVPAQKFSALTFLRVDQDKDKDCSLDCAGSPQKPLCASDGRTFLSRCEFQRAKCKDPQLEIAYRGNCKDVSRCVAERKYTQEQARKEFQQVFIPECNDDGTYSQVQCHSYTGYCWCVTPNGRPISGTAVAHKTPRCPGSVNEKLPQREGTGKTVSLQIFSVLNSDDAAAPALETQPQGDEEDIASRYPTLWTEQVKSRQNKTNKNSVSSCDQEHQSALEEAKQPKNDNVVIPECAHGGLYKPVQCHPSTGYCWCVLVDTGRPIPGTSTRYEQPKCDNTARAHPAKARDLYKGRQLQGCPGAKKHEFLTSVLDALSTDMVHAASDPSSSSGRLSEPDPSHTLEERVVHWYFKLLDKNSSGDIGKKEIKPFKRFLRKKSKPKKCVKKFVEYCDVNNDKSISVQELMGCLGVAKEDGKADTKKRHTPRGHAESTSNRQPRKQG

SEQ ID NO: 82719 - protein, 446 aa, Homo sapiens
  Payload ID: 16470
  Gene Symbol: SMOC2
  Gene Name: SPARC related modular calcium binding 2
  Uniprot ID: Q9H3U7
  ENSP ID: ENSP00000348630
MLLPQLCWLPLLAGLLPPVPAQKFSALTFLRVDQDKDKDCSLDCAGSPQKPLCASDGRTFLSRCEFQRAKCKDPQLEIAYRGNCKDVSRCVAERKYTQEQARKEFQQVFIPECNDDGTYSQVQCHSYTGYCWCVTPNGRPISGTAVAHKTPRCPGSVNEKLPQREGTGKTDDAAAPALETQPQGDEEDIASRYPTLWTEQVKSRQNKTNKNSVSSCDQEHQSALEEAKQPKNDNVVIPECAHGGLYKPVQCHPSTGYCWCVLVDTGRPIPGTSTRYEQPKCDNTARAHPAKARDLYKGRQLQGCPGAKKHEFLTSVLDALSTDMVHAASDPSSSSGRLSEPDPSHTLEERVVHWYFKLLDKNSSGDIGKKEIKPFKRFLRKKSKPKKCVKKFVEYCDVNNDKSISVQELMGCLGVAKEDGKADTKKRHTPRGHAESTSNRQPRKQG

SEQ ID NO: 82720 - protein, 67 aa, Homo sapiens
  Payload ID: 16470
  Gene Symbol: SMOC2
  Gene Name: SPARC related modular calcium binding 2
  ENSP ID: ENSP00000375949
GKKEIKPFKRFLRKKSKPKKCVKKFVEYCDVNNDKSISVQELMGCLGVAKEDGKADTKKRHRSKRNL

SEQ ID NO: 82721 - protein, 84 aa, Homo sapiens
  Payload ID: 16470
  Gene Symbol: SMOC2
  Gene Name: SPARC related modular calcium binding 2
  ENSP ID: ENSP00000398696
KKSKPKKCVKKFVEYCDVNNDKSISVQELMGCLGVAKEDGKADTKKRHTPRGHAESTSNRQDAMVVSSRPKATTHRKSRTLSRR

SEQ ID NO: 82722 - protein, 136 aa, Homo sapiens
  Payload ID: 16470
  Gene Symbol: SMOC2
  Gene Name: SPARC related modular calcium binding 2
  ENSP ID: ENSP00000477975
MVGGCLGGSKSSHSAWEGPILPKCKSSRGVTELANRLVCLVFLLHVDIILLILLPGPPQGYRKVKSSPEPIMSSLLTEGTAGYVVPPGLVLAAGGGAGSPRFLSAFLNASRVRELANGKFIRVALAEKDRSGMPTQ

SEQ ID NO: 82723 - protein, 377 aa, Homo sapiens
  Payload ID: 16471
  Gene Symbol: SPOCK1
  Gene Name: sparc/osteonectin, cwcv and kazal-like domains proteoglycan (testican) 1
  ENSP ID: ENSP00000282223
DDYFRNWNPNKPFDQALDPSKDPCLKVKCSPHKVCVTQDYQTALCVSRKHLLPRQKKGNVAQKHWVGPSNLVKCKPCPVAQSAMVCGSDGHSYTSKCKLEFHACSTGKSLATLCDGPCPCLPEPEPPKHKAERSACTDKELRNLASRLKDWFGALHEDANRVIKPTSSNTAQGRFDTSILPICKDSLGWMFNKLDMNYDLLLDPSEINAIYLDKYEPCIKPLFNSCDSFKDGKLSNNEWCYCFQKPGGLPCQNEMNRIQKLSKGKSLLGAFIPRCNEEGYYKATQCHGSTGQCWCVDKYGNELAGSRKQGAVSCEEEQETSGDFGSGGSVVLLDDLEYERELGPKDKEGKLRVHTRAVTEDDEDEDDDKEDEVGYIW

SEQ ID NO: 82724 - protein, 439 aa, Homo sapiens
  Payload ID: 16471
  Gene Symbol: SPOCK1
  Gene Name: sparc/osteonectin, cwcv and kazal-like domains proteoglycan (testican) 1
  Uniprot ID: Q08629
  ENSP ID: ENSP00000378401
MPAIAVLAAAAAAWCFLQVESRHLDALAGGAGPNHGNFLDNDQWLSTVSQYDRDKYWNRFRDDDYFRNWNPNKPFDQALDPSKDPCLKVKCSPHKVCVTQDYQTALCVSRKHLLPRQKKGNVAQKHWVGPSNLVKCKPCPVAQSAMVCGSDGHSYTSKCKLEFHACSTGKSLATLCDGPCPCLPEPEPPKHKAERSACTDKELRNLASRLKDWFGALHEDANRVIKPTSSNTAQGRFDTSILPICKDSLGWMFNKLDMNYDLLLDPSEINAIYLDKYEPCIKPLFNSCDSFKDGKLSNNEWCYCFQKPGGLPCQNEMNRIQKLSKGKSLLGAFIPRCNEEGYYKATQCHGSTGQCWCVDKYGNELAGSRKQGAVSCEEEQETSGDFGSGGSVVLLDDLEYERELGPKDKEGKLRVHTRAVTEDDEDEDDDKEDEVGYIW

SEQ ID NO: 82725 - protein, 67 aa, Homo sapiens
  Payload ID: 16471
  Gene Symbol: SPOCK1
  Gene Name: sparc/osteonectin, cwcv and kazal-like domains proteoglycan (testican) 1
  ENSP ID: ENSP00000421677
MVCGSDGHSYTSKCKLEFHACSTGKSLATLCDGPCPCLPEPEPPKHKAERSACTDKELRNLASRLKD

SEQ ID NO: 82726 - protein, 139 aa, Homo sapiens
  Payload ID: 16471
  Gene Symbol: SPOCK1
  Gene Name: sparc/osteonectin, cwcv and kazal-like domains proteoglycan (testican) 1
  ENSP ID: ENSP00000424517
MPAIAVLAAAAAAWCFLQVESRHLDALAGGAGPNHGNFLDNDQWLSTVSQYDRDKYWNRFRDDDYFRNWNPNKPFDQALDPSKDPCLKVKCSPHKVCVTQDYQTALCVSRKHLLPRQKKGNVAQKHWVGPSNLVKCKPC

SEQ ID NO: 82727 - protein, 424 aa, Homo sapiens
  Payload ID: 16472
  Gene Symbol: SPOCK2
  Gene Name: sparc/osteonectin, cwcv and kazal-like domains proteoglycan (testican) 2
  Uniprot ID: Q92563
  ENSP ID: ENSP00000321108
MRAPGCGRLVLPLLLLAAAALAEGDAKGLKEGETPGNFMEDEQWLSSISQYSGKIKHWNRFRDEVEDDYIKSWEDNQQGDEALDTTKDPCQKVKCSRHKVCIAQGYQRAMCISRKKLEHRIKQPTVKLHGNKDSICKPCHMAQLASVCGSDGHTYSSVCKLEQQACLSSKQLAVRCEGPCPCPTEQAATSTADGKPETCTGQDLADLGDRLRDWFQLLHENSKQNGSASSVAGPASGLDKSLGASCKDSIGWMFSKLDTSADLFLDQTELAAINLDKYEVCIRPFFNSCDTYKDGRVSTAEWCFCFWREKPPCLAELERIQIQEAAKKKPGIFIPSCDEDGYYRKMQCDQSSGDCWCVDQLGLELTGTRTHGSPDCDDIVGFSGDFGSGVGWEDEEEKETEEAGEEAEEEEGEAGEADDGGYIW

SEQ ID NO: 82728 - protein, 424 aa, Homo sapiens; identical to SEQ ID NO: 82727
  Payload ID: 16472
  Gene Symbol: SPOCK2
  Gene Name: sparc/osteonectin, cwcv and kazal-like domains proteoglycan (testican) 2
  Uniprot ID: Q92563
  ENSP ID: ENSP00000362201

SEQ ID NO: 82729 - protein, 77 aa, Homo sapiens
  Payload ID: 16472
  Gene Symbol: SPOCK2
  Gene Name: sparc/osteonectin, cwcv and kazal-like domains proteoglycan (testican) 2
  Uniprot ID: Q92563
  ENSP ID: ENSP00000397715
MRAPGCGRLVLPLLLLAAAALAEGDAKGLKEGETPGNFMEDEQWLSSISQYSGKIKHWNRFRDVPSSDPPSTTQATP

SEQ ID NO: 82730 - protein, 423 aa, Homo sapiens [sequence omitted]

SEQ ID NO: 82731 - protein, 436 aa, Homo sapiens
  Payload ID: 16473
  Gene Symbol: SPOCK3
  Gene Name: sparc/osteonectin, cwcv and kazal-like domains proteoglycan (testican) 3
  Uniprot ID: Q9BQ16
  ENSP ID: ENSP00000349677
MLKVSAVLCVCAAAWCSQSLAAAAAVAAAGGRSDGGNFLDDKQWLTTISQYDKEVGQWNKFRDEVEDDYFRTWSPGKPFDQALDPAKDPCLKMKCSRHKVCIAQDSQTAVCISHRRLTHRMKEAGVDHRQWRGPILSTCKQCPVVYPSPVCGSDGHTYSFQCKLEYQACVLGKQISVKCEGHCPCPSDKPTSTSRNVKRACSDLEFREVANRLRDWFKALHESGSQNKKTKTLLRPERSRFDTSILPICKDSLGWMFNRLDTNYDLLLDQSELRSIYLDKNEQCTKAFFNSCDTYKDSLISNNEWCYCFQRQQDPPCQTELSNIQKRQGVKKLLGQYIPLCDEDGYYKPTQCHGSVGQCWCVDRYGNEVMGSRINGVADCAIDFEISGDFASGDFHEWTDDEDDEDDIMNDEDEIEDDDEDEGDDDDGGDDHDVYI

SEQ ID NO: 82732 - protein, 433 aa, Homo sapiens
  Payload ID: 16473
  Gene Symbol: SPOCK3
  Gene Name: sparc/osteonectin, cwcv and kazal-like domains proteoglycan (testican) 3
  Uniprot ID: Q9BQ16
  ENSP ID: ENSP00000350153
MLKVSAVLCVCAAAWCSQSLAAAAAVAAAGGRSDGGNFLDDKQWLTTISQYDKEVGQWNKFRDDDYFRTWSPGKPFDQALDPAKDPCLKMKCSRHKVCIAQDSQTAVCISHRRLTHRMKEAGVDHRQWRGPILSTCKQCPVVYPSPVCGSDGHTYSFQCKLEYQACVLGKQISVKCEGHCPCPSDKPTSTSRNVKRACSDLEFREVANRLRDWFKALHESGSQNKKTKTLLRPERSRFDTSILPICKDSLGWMFNRLDTNYDLLLDQSELRSIYLDKNEQCTKAFFNSCDTYKDSLISNNEWCYCFQRQQDPPCQTELSNIQKRQGVKKLLGQYIPLCDEDGYYKPTQCHGSVGQCWCVDRYGNEVMGSRINGVADCAIDFEISGDFASGDFHEWTDDEDDEDDIMNDEDEIEDDDEDEGDDDDGGDDHDVYI

SEQ ID NO: 82733 - protein, 385 aa, Homo sapiens
  Payload ID: 16473
  Gene Symbol: SPOCK3
  Gene Name: sparc/osteonectin, cwcv and kazal-like domains proteoglycan (testican) 3
  Uniprot ID: Q9BQ16
  ENSP ID: ENSP00000411344
MITQDHIHMSSGLSQDDYFRTWSPGKPFDQALDPAKDPCLKMKCSRHKVCIAQDSQTAVCISHRRLTHRMKEAGVDHRQWRGPILSTCKQCPVVYPSPVCGSDGHTYSFQCKLEYQACVLGKQISVKCEGHCPCPSDKPTSTSRNVKRACSDLEFREVANRLRDWFKALHESGSQNKKTKTLLRPERSRFDTSILPICKDSLGWMFNRLDTNYDLLLDQSELRSIYLDKNEQCTKAFFNSCDTYKDSLISNNEWCYCFQRQQDPPCQTELSNIQKRQGVKKLLGQYIPLCDEDGYYKPTQCHGSVGQCWCVDRYGNEVMGSRINGVADCAIDFEISGDFASGDFHEWTDDEDDEDDIMNDEDEIEDDDEDEGDDDDGGDDHDVYI

SEQ ID NO: 82734 - protein, 436 aa, Homo sapiens; identical to SEQ ID NO: 82731
  Payload ID: 16473
  Gene Symbol: SPOCK3
  Gene Name: sparc/osteonectin, cwcv and kazal-like domains proteoglycan (testican) 3
  Uniprot ID: Q9BQ16
  ENSP ID: ENSP00000420920

SEQ ID NO: 82735 - protein, 122 aa, Homo sapiens
  Payload ID: 16473
  Gene Symbol: SPOCK3
  Gene Name: sparc/osteonectin, cwcv and kazal-like domains proteoglycan (testican) 3
  ENSP ID: ENSP00000420928
MLKVSAVLCVCAAAWCSQSLAAAAAVAAAGGRSDGGNFLDDKQWLTTISQYDKEVGQWNKFRDEVEDDYFRTWSPGKPFDQALDPAKDPCLKMKCSRHKVCIAQDSQTAVCISHRRLTHSAN

SEQ ID NO: 82736 - protein, 64 aa, Homo sapiens
  Payload ID: 16473
  Gene Symbol: SPOCK3
  Gene Name: sparc/osteonectin, cwcv and kazal-like domains proteoglycan (testican) 3
  ENSP ID: ENSP00000422170
MLKVSAVLCVCAAAWCSQSLAAAAAVAAAGGRSDGGNFLDDKQWLTTISQYDKEVGQWNKFRDL

SEQ ID NO: 82737 - protein, 122 aa, Homo sapiens; identical to SEQ ID NO: 82735
  Payload ID: 16473
  Gene Symbol: SPOCK3
  Gene Name: sparc/osteonectin, cwcv and kazal-like domains proteoglycan (testican) 3
  ENSP ID: ENSP00000422336

SEQ ID NO: 82738 - protein, 172 aa, Homo sapiens
  Payload ID: 16473
  Gene Symbol: SPOCK3
  Gene Name: sparc/osteonectin, cwcv and kazal-like domains proteoglycan (testican) 3
  ENSP ID: ENSP00000423176
MLKVSAVLCVCAAAWCSQSLAAAAAVAAAGGRSDGGNFLDDKQWLTTISQYDKEVGQWNKFRDDDYFRTWSPGKPFDQACSDLEFREVANRLRDWFKALHESGSQNKKTKTLLRPERSRFDTSILPICKDSLGWMFNRLDTNYDLLLDQSELRSIYLDKNEQCTKAFFNSCD

SEQ ID NO: 82739 - protein, 161 aa, Homo sapiens
  Payload ID: 16473
  Gene Symbol: SPOCK3
  Gene Name: sparc/osteonectin, cwcv and kazal-like domains proteoglycan (testican) 3
  ENSP ID: ENSP00000423367
MLKVSAVLCVCAAAWCSQSLAAAAAVAAAGGRSDGGNFLDDKQWLTTISQYDKEVGQWNKFRDDDYFRTWSPGKPFDQALDPAKDPCLKMKCSRHKVCIAQDSQTAVCISHRRLTHRMKEAGVDHRQWRGPILSTCKQCPVVYPSPVCGSDGHTYSFQCKL

SEQ ID NO: 82740 - protein, 436 aa, Homo sapiens; identical to SEQ ID NO: 82731
  Payload ID: 16473
  Gene Symbol: SPOCK3
  Gene Name: sparc/osteonectin, cwcv and kazal-like domains proteoglycan (testican) 3
  Uniprot ID: Q9BQ16
  ENSP ID: ENSP00000423421

SEQ ID NO: 82741 - protein, 436 aa, Homo sapiens; identical to SEQ ID NO: 82731
  Payload ID: 16473
  Gene Symbol: SPOCK3
  Gene Name: sparc/osteonectin, cwcv and kazal-like domains proteoglycan (testican) 3
  Uniprot ID: Q9BQ16
  ENSP ID: ENSP00000423606

SEQ ID NO: 82742 - protein, 115 aa, Homo sapiens
  Payload ID: 16473
  Gene Symbol: SPOCK3
  Gene Name: sparc/osteonectin, cwcv and kazal-like domains proteoglycan (testican) 3
  ENSP ID: ENSP00000424168
MLKVSAVLCVCAAAWCSQSLAAAAAVAAAGGRSDGGNFLDDKQWLTTISQYDKEVGQWNKFRDEVEDDYFRTWSPGKPFDQALDPAKDPCLKMKCSRHKVCIAQDSQTAVCISHR

SEQ ID NO: 82743 - protein, 79 aa, Homo sapiens
  Payload ID: 16473
  Gene Symbol: SPOCK3
  Gene Name: sparc/osteonectin, cwcv and kazal-like domains proteoglycan (testican) 3
  ENSP ID: ENSP00000424674
MLKVSAVLCVCAAAWCSQSLAAAAAVAAAGGRSDGGNFLDDKQWLTTISQYDKEVGQWNKFRDDDYFRTWSPGKPFDQG

SEQ ID NO: 82744 - protein, 71 aa, Homo sapiens
  Payload ID: 16473
  Gene Symbol: SPOCK3
  Gene Name: sparc/osteonectin, cwcv and kazal-like domains proteoglycan (testican) 3
  ENSP ID: ENSP00000424677
MLKVSAVLCVCAAAWCSQSLAAAAAVAAAGGRSDGGNFLDDKQWLTTISQYDKEVGQWNKFRDDERSRSRP

SEQ ID NO: 82745 - protein, 63 aa, Homo sapiens
  Payload ID: 16473
  Gene Symbol: SPOCK3
  Gene Name: sparc/osteonectin, cwcv and kazal-like domains proteoglycan (testican) 3
  ENSP ID: ENSP00000424980
MLKVSAVLCVCAAAWCSQSLAAAAAVAAAGGRSDGGNFLDDKQWLTTISQYDKEVGQWNKFRD

SEQ ID NO: 82746 - protein, 115 aa, Homo sapiens; identical to SEQ ID NO: 82742
  Payload ID: 16473
  Gene Symbol: SPOCK3
  Gene Name: sparc/osteonectin, cwcv and kazal-like domains proteoglycan (testican) 3
  ENSP ID: ENSP00000425407

SEQ ID NO: 82747 - protein, 433 aa, Homo sapiens; identical to SEQ ID NO: 82732
  Payload ID: 16473
  Gene Symbol: SPOCK3
  Gene Name: sparc/osteonectin, cwcv and kazal-like domains proteoglycan (testican) 3
  Uniprot ID: Q9BQ16
  ENSP ID: ENSP00000425502

SEQ ID NO: 82748 - protein, 433 aa, Homo sapiens; identical to SEQ ID NO: 82732
  Payload ID: 16473
  Gene Symbol: SPOCK3
  Gene Name: sparc/osteonectin, cwcv and kazal-like domains proteoglycan (testican) 3
  Uniprot ID: Q9BQ16
  ENSP ID: ENSP00000425570

SEQ ID NO: 82749 - protein, 79 aa, Homo sapiens; identical to SEQ ID NO: 82743
  Payload ID: 16473
  Gene Symbol: SPOCK3
  Gene Name: sparc/osteonectin, cwcv and kazal-like domains proteoglycan (testican) 3
  ENSP ID: ENSP00000425712

SEQ ID NO: 82750 - protein, 83 aa, Homo sapiens
  Payload ID: 16473
  Gene Symbol: SPOCK3
  Gene Name: sparc/osteonectin, cwcv and kazal-like domains proteoglycan (testican) 3
  ENSP ID: ENSP00000425859
NFLDDKQWLTTISQYDKEVGQWNKFRDDDYFRTWSPGKPFDQALDPAKDPCLKMKCSRHKVCIAQDSQTAVCISHRRLTHSAN

SEQ ID NO: 82751 - protein, 313 aa, Homo sapiens
  Payload ID: 16473
  Gene Symbol: SPOCK3
  Gene Name: sparc/osteonectin, cwcv and kazal-like domains proteoglycan (testican) 3
  Uniprot ID: Q9BQ16
  ENSP ID: ENSP00000426177
MLKVSAVLCVCAAAWCSQSLAAAAAVAAAGGRSDGGNFLDDKQWLTTISQYDKEVGQWNKFRDDDYFRTWSPGKPFDQALDPAKDPCLKMKCSRHKVCIAQDSQTAVCISHRRLTHRMKEAGVDHRQWRGPILSTCKQCPVVYPSPVCGSDGHTYSFQCKLEYQACVLGKQISVKCEGHCPCPSDKPTSTSRNVKRACSDLEFREVANRLRDWFKALHESGSQNKKTKTLLRPERSRFDTSILPICKDSLGWMFNRLDTNYDLLLDQSELRSIYLDKNEQCTKAFFNSCDTYKDSLISNNEWCYCFQRQQGKR

SEQ ID NO: 82752 - protein, 338 aa, Homo sapiens
  Payload ID: 16473
  Gene Symbol: SPOCK3
  Gene Name: sparc/osteonectin, cwcv and kazal-like domains proteoglycan (testican) 3
  Uniprot ID: Q9BQ16
  ENSP ID: ENSP00000426318
MLKVSAVLCVCAAAWCSQSLAAAAAVAAAGGRSDGGNFLDDKQWLTTISQYDKEVGQWNKFRDCKLEYQACVLGKQISVKCEGHCPCPSDKPTSTSRNVKRACSDLEFREVANRLRDWFKALHESGSQNKKTKTLLRPERSRFDTSILPICKDSLGWMFNRLDTNYDLLLDQSELRSIYLDKNEQCTKAFFNSCDTYKDSLISNNEWCYCFQRQQDPPCQTELSNIQKRQGVKKLLGQYIPLCDEDGYYKPTQCHGSVGQCWCVDRYGNEVMGSRINGVADCAIDFEISGDFASGDFHEWTDDEDDEDDIMNDEDEIEDDDEDEGDDDDGGDDHDVYI

SEQ ID NO: 82753 - protein, 393 aa, Homo sapiens
  Payload ID: 16473
  Gene Symbol: SPOCK3
  Gene Name: sparc/osteonectin, cwcv and kazal-like domains proteoglycan (testican) 3
  Uniprot ID: Q9BQ16
  ENSP ID: ENSP00000426716
MLKVSAVLCVCAAAWCSQSLAAAAAVAAAGGRSDGGNFLDDKQWLTTISQYDKEVGQWNKFRDDDYFRTWSPGKPFDQALDPAKDPCLKMKCSRHKVCIAQDSQTAVCISHRRLTHRMKEAGVDHRQWRGPILSTCKQCPVVYPSPVCGSDGHTYSFQCKLEYQACVLGKQISVKCEGHCPCPSDKPTSTSRNVKRGFDTSILPICKDSLGWMFNRLDTNYDLLLDQSELRSIYLDKNEQCTKAFFNSCDTYKDSLISNNEWCYCFQRQQDPPCQTELSNIQKRQGVKKLLGQYIPLCDEDGYYKPTQCHGSVGQCWCVDRYGNEVMGSRINGVADCAIDFEISGDFASGDFHEWTDDEDDEDDIMNDEDEIEDDDEDEGDDDDGGDDHDVYI

SEQ ID NO: 82754 - protein, 89 aa, Homo sapiens
  Payload ID: 16473
  Gene Symbol: SPOCK3
  Gene Name: sparc/osteonectin, cwcv and kazal-like domains proteoglycan (testican) 3
  ENSP ID: ENSP00000426995
MLKVSAVLCVCAAAWCSQSLAAAAAVAAAGGRSDGGNFLDDKQWLTTISQYDKEVGQWNKFRDDDYFRTWSPGKPFDQALSFHDLGIFV

SEQ ID NO: 82755 - protein, 344 aa, Homo sapiens
  Payload ID: 16473
  Gene Symbol: SPOCK3
  Gene Name: sparc/osteonectin, cwcv and kazal-like domains proteoglycan (testican) 3
  ENSP ID: ENSP00000441396
MKCSRHKVCIAQDSQTAVCISHRRLTHRMKEAGVDHRQWRGPILSTCKQCPVVYPSPVCGSDGHTYSFQCKLEYQACVLGKQISVKCEGHCPCPSDKPTSTSRNVKRACSDLEFREVANRLRDWFKALHESGSQNKKTKTLLRPERSRFDTSILPICKDSLGWMFNRLDTNYDLLLDQSELRSIYLDKNEQCTKAFFNSCDTYKDSLISNNEWCYCFQRQQDPPCQTELSNIQKRQGVKKLLGQYIPLCDEDGYYKPTQCHGSVGQCWCVDRYGNEVMGSRINGVADCAIDFEISGDFASGDFHEWTDDEDDEDDIMNDEDEIEDDDEDEGDDDDGGDDHDVYI

SEQ ID NO: 82756 - protein, 316 aa, Homo sapiens
  Payload ID: 16473
  Gene Symbol: SPOCK3
  Gene Name: sparc/osteonectin, cwcv and kazal-like domains proteoglycan (testican) 3
  Uniprot ID: Q9BQ16
  ENSP ID: ENSP00000444789
MKEAGVDHRQWRGPILSTCKQCPVVYPSPVCGSDGHTYSFQCKLEYQACVLGKQISVKCEGHCPCPSDKPTSTSRNVKRACSDLEFREVANRLRDWFKALHESGSQNKKTKTLLRPERSRFDTSILPICKDSLGWMFNRLDTNYDLLLDQSELRSIYLDKNEQCTKAFFNSCDTYKDSLISNNEWCYCFQRQQDPPCQTELSNIQKRQGVKKLLGQYIPLCDEDGYYKPTQCHGSVGQCWCVDRYGNEVMGSRINGVADCAIDFEISGDFASGDFHEWTDDEDDEDDIMNDEDEIEDDDEDEGDDDDGGDDHDVYI

SEQ ID NO: 82757 - protein, 664 aa, Homo sapiens
  Payload ID: 16474
  Gene Symbol: SPARCL1
  Gene Name: SPARC-like 1 (hevin)
  Uniprot ID: Q14515
  ENSP ID: ENSP00000282470
MKTGLFFLCLLGTAAAIPTNARLLSDHSKPTAETVAPDNTAIPSLRAEAEENEKETAVSTEDDSHHKAEKSSVLKSKEESHEQSAEQGKSSSQELGLKDQEDSDGHLSVNLEYAPTEGTLDIKEDMSEPQEKKLSENTDFLAPGVSSFTDSNQQESITKREENQEQPRNYSHHQLNRSSKHSQGLRDQGNQEQDPNISNGEEEEEKEPGEVGTHNDNQERKTELPREHANSKQEEDNTQSDDILEESDQPTQVSKMQEDEFDQGNQEQEDNSNAEMEEENASNVNKHIQETEWQSQEGKTGLEAISNHKETEEKTVSEALLMEPTDDGNTTPRNHGVDDDGDDDGDDGGTDGPRHSASDDYFIPSQAFLEAERAQSIAYHLKIEEQREKVHENENIGTTEPGEHQEAKKAENSSNEEETSSEGNMRVHAVDSCMSFQCKRGHICKADQQGKPHCVCQDPVTCPPTKPLDQVCGTDNQTYASSCHLFATKCRLEGTKKGHQLQLDYFGACKSIPTCTDFEVIQFPLRMRDWLKNILMQLYEANSEHAGYLNEKQRNKVKKIYLDEKRLLAGDHPIDLLLRDFKKNYHMYVYPVHWQFSELDQHPMDRVLTHSELAPLRASLVPMEHCITRFFEECDPNKDKHITLKEWGHCFGIKEEDIDENLLF

SEQ ID NO: 82758 - protein, 56 aa, Homo sapiens
  Payload ID: 16474
  Gene Symbol: SPARCL1
  Gene Name: SPARC-like 1 (hevin)
  ENSP ID: ENSP00000406251
MKTGLFFLCLLGTAAAIPTNARLLSDHSKPTAETVAPDNTAIPSLRAEAEENEKET

SEQ ID NO: 82759 - protein, 664 aa, Homo sapiens; identical to SEQ ID NO: 82757
  Payload ID: 16474
  Gene Symbol: SPARCL1
  Gene Name: SPARC-like 1 (hevin)
  Uniprot ID: Q14515
  ENSP ID: ENSP00000414856

SEQ ID NO: 82760 - protein, 141 aa, Homo sapiens
  Payload ID: 16474
  Gene Symbol: SPARCL1
  Gene Name: SPARC-like 1 (hevin)
  ENSP ID: ENSP00000416971
MKTGLFFLCLLGTAAAIPTNARLLSDHSKPTAETVAPDNTAIPSLRAEAEENEKETAVSTEDDSHHKAEKSSVLKSKEESHEQSAEQGKSSSQELGLKDQEDSDGHLSVNLEYAPTEGTLDIKEDMSEPQEKKLSENTDFL

SEQ ID NO: 82761 - protein, 539 aa, Homo sapiens
  Payload ID: 16474
  Gene Symbol: SPARCL1
  Gene Name: SPARC-like 1 (hevin)
  Uniprot ID: Q14515
  ENSP ID: ENSP00000422903
MSEPQEKKLSENTDFLAPGVSSFTDSNQQESITKREENQEQPRNYSHHQLNRSSKHSQGLRDQGNQEQDPNISNGEEEEEKEPGEVGTHNDNQERKTELPREHANSKQEEDNTQSDDILEESDQPTQVSKMQEDEFDQGNQEQEDNSNAEMEEENASNVNKHIQETEWQSQEGKTGLEAISNHKETEEKTVSEALLMEPTDDGNTTPRNHGVDDDGDDDGDDGGTDGPRHSASDDYFIPSQAFLEAERAQSIAYHLKIEEQREKVHENENIGTTEPGEHQEAKKAENSSNEEETSSEGNMRVHAVDSCMSFQCKRGHICKADQQGKPHCVCQDPVTCPPTKPLDQVCGTDNQTYASSCHLFATKCRLEGTKKGHQLQLDYFGACKSIPTCTDFEVIQFPLRMRDWLKNILMQLYEANSEHAGYLNEKQRNKVKKIYLDEKRLLAGDHPIDLLLRDFKKNYHMYVYPVHWQFSELDQHPMDRVLTHSELAPLRASLVPMEHCITRFFEECDPNKDKHITLKEWGHCFGIKEEDIDENLLF

SEQ ID NO: 82762 - protein, 120 aa, Homo sapiens
  Payload ID: 16474
  Gene Symbol: SPARCL1
  Gene Name: SPARC-like 1 (hevin)
  ENSP ID: ENSP00000423448
MKTGLFFLCLLGTAAAIPTNARLLSDHSKPTAETVAPDNTAIPSLRAEAEENEKETAVSTEDDSHHKAEKSSVLKSKEESHEQSAEQGKSSSQELGLKDQEDSDGHLSVNLEYAPTEGTL

SEQ ID NO: 82763 - protein, 143 aa, Homo sapiens
  Payload ID: 16474
  Gene Symbol: SPARCL1
  Gene Name: SPARC-like 1 (hevin)
  ENSP ID: ENSP00000423483
MKTGLFFLCLLGTAAAIPTNARLLSDHSKPTAETVAPDNTAIPSLRAEAEENEKETAVSTEDDSHHKAEKSSVLKSKEESHEQSAEQGKSSSQELGLKDQEDSDGHLSVNLEYAPTEGTLDIKEDMSEPQEKKLSENTDFLAP

SEQ ID NO: 82764 - protein, 127 aa, Homo sapiens
  Payload ID: 16474
  Gene Symbol: SPARCL1
  Gene Name: SPARC-like 1 (hevin)
  ENSP ID: ENSP00000438188
MKTGLFFLCLLGTAAAIPTNARLLSDHSKPTAETVAPDNTAIPSLRAEAEENEKETAVSTEDDSHHKAEKSSVLKSKEESHEQSAEQGKSSSQELGLKDQEDSDGHLSVNLEYAPTEGTLDIKEDMS

SEQ ID NO: 82765 - protein, 89 aa, Homo sapiens
  Payload ID: 16474
  Gene Symbol: SPARCL1
  Gene Name: SPARC-like 1 (hevin)
  ENSP ID: ENSP00000444832
MKTGLFFLCLLGTAAAIPTNARLLSDHSKPTAETVAPDNTAIPSLRAEAEENEKETAVSTEDDSHHKAEKSSVLKSKEESHEQSAEQGK

SEQ ID NO: 82766 - protein, 18 aa, Homo sapiens
  Payload ID: 16474
  Gene Symbol: SPARCL1
  Gene Name: SPARC-like 1 (hevin)
  ENSP ID: ENSP00000445678
MSEPQEKKLSENTDFLAP

SEQ ID NO: 82767 - protein, 2443 aa, Homo sapiens
  Payload ID: 16475
  Gene Symbol: SPG11
  Gene Name: spastic paraplegia 11 (autosomal recessive)
  Uniprot ID: Q96JI7
  ENSP ID: ENSP00000261866
MAAEEGVASAASAGGSWGTAAMGRVLPMLLVPVPAEAMGQLGSRAQLRTQPEALGSLTAAGSLQVLSLTPGSRGGGRCCLEGPFWHFLWEDSRNSSTPTEKPKLLALGENYELLIYEFNLKDGRCDATILYSCSREALQKLIDDQDISISLLSLRILSFHNNTSLLFINKCVILHIIFPERDAAIRVLNCFTLPLPAQAVDMIIDTQLCRGILFVLSSLGWIYIFDVVDGTYVAHVDLALHKEDMCNEQQQEPAKISSFTSLKVSQDLDVAVIVSSSNSAVALNLNLYFRQHPGHLLCERILEDLPIQGPKGVDEDDPVNSAYNMKLAKFSFQIDRSWKAQLSSLNETIKNSKLEVSCCAPWFQDILHLESPESGNHSTSVQSWAFIPQDIMHGQYNVLQKDHAKTSDPGRSWKIMHISEQEEPIELKCVSVTGFTALFTWEVERMGYTITLWDLETQGMQCFSLGTKCIPVDSSGDQQLCFVLTENGLSLILFGLTQEEFLNRLMIHGSASTVDTLCHLNGWGRCSIPIHALEAGIENRQLDTVNFFLKSKENLFNPSSKSSVSDQFDHLSSHLYLRNVEELIPALDLLCSAIRESYSEPQSKHFSEQLLNLTLSFLNNQIKELFIHTEELDEHLQKGVNILTSYINELRTFMIKFPWKLTDAIDEYDVHENVPKVKESNIWKKLSFEEVIASAILNNKIPEAQTFFRIDSHSAQKLEELIGIGLNLVFDNLKKNNIKEASELLKNMGFDVKGQLLKICFYTTNKNIRDFLVEILKEKNYFSEKEKRTIDFVHQVEKLYLGHFQENMQIQSFPRYWIKEQDFFKHKSVLDSFLKYDCKDEFNKQDHRIVLNWALWWDQLTQESILLPRISPEEYKSYSPEALWRYLTARHDWLNIILWIGEFQTQHSYASLQQNKWPLLTVDVINQNTSCNNYMRNEILDKLARNGVFLASELEDFECFLLRLSRIGGVIQDTLPVQNYKTKEGWDFHSQFILYCLEHSLQHLLYVYLDCYKLSPENCPFLEKKELHEAHPWFEFLVQCRQVASNLTDPKLIFQASLANAQILIPTNQASVSSMLLEGHTLLALATTMYSPGGVSQVVQNEENENCLKKVDPQLLKMALTPYPKLKTALFPQCTPPSVLPSDITIYHLIQSLSPFDPSRLFGWQSANTLAIGDAWSHLPHFSSPDLVNKYAIVERLNFAYYLHNGRPSFAFGTFLVQELIKSKTPKQLIQQVGNEAYVIGLSSFHIPSIGAACVCFLELLGLDSLKLRVDMKVANIILSYKCRNEDAQYSFIRESVAEKLSKLADGEKTTTEELLVLLEEGTWNSIQQQEIKRLSSESSSQWALVVQFCRLHNMKLSISYLRECAKANDWLQFIIHSQLHNYHPAEVKSLIQYFSPVIQDHLRLAFENLPSVPTSKMDSDQVCNKCPQELQGSKQEMTDLFEILLQCSEEPDSWHWLLVEAVKQQAPILSVLASCLQGASAISCLCVWIITSVEDNVATEAMGHIQDSTEDHTWNLEDLSVIWRTLLTRQKSKTLIRGFQLFFKDSPLLLVMEMYELCMFFRNYKEAEAKLLEFQKSLETLNTAATKVHPVIPAMWLEDQVCFLLKLMLQQCKTQYELGKLLQLFVEREHLFSDGPDVKKLCILCQILKDTSIAINHTIITSYSIENLQHECRSILERLQTDGQFALARRVAELAELPVDNLVIKEITQEMQTLKHIEQWSLKQARIDFWKKCHENFKKNSISSKAASSFFSTQAHVACEHPTGWSSMEERHLLLTLAGHWLAQEDVVPLDKLEELEKQIWLCRITQHTLGRNQEETEPRFSRQISTSGELSFDSLASEFSFSKLAALNTSKYLELNSLPSKETCENRLDWKEQESLNFLIGRLLDDGCVHEASRVCRYFHFYNPDVALVLHCRALASGEASMEDLHPEIHALLQSAELLEEEAPDIPLRRVHSTSSLDSQKFVTVPSSNEVVTNLEVLTSKCLHGKNYCRQVLCLYDLAKELGCSYTDVAAQDGEAMLRKILASQQPDRCKRAQAFISTQGLKPDTVAELVAEEVTRELLTSSQGTGHKQMFNPTEESQTFLQLTTLCQDRTLVGMKLLDKISSVPHGELSCTTELLILAHHCFTLTCHMEGIIRVLQAAHMLTDNHLAPSEEYGLVVRLLTGIGRYNEMTYIFDLLHKKHYFEVLMRKKLDPSGTLKTALLDYIKRCRPGDSEKHNMIALCFSMCREIGENHEAAARIQLKLIESQPWEDSLKDGHQLKQLLLKALTLMLDAAESYAKDSCVRQAQHCQRLTKLITLQIHFLNTGQNTMLINLGRHKLMDCILALPRFYQASIVAEAYDFVPDWAEILYQQVILKGDFNYLEEFKQQRLLKSSIFEEISKKYKQHQPTDMVMENLKKLLTYCEDVYLYYKLAYEHKFYEIVNVLLKDPQTGCCLKDMLAG

SEQ ID NO: 82768 - protein, 2265 aa, Homo sapiens
  Payload ID: 16475
  Gene Symbol: SPG11
  Gene Name: spastic paraplegia 11 (autosomal recessive)
  ENSP ID: ENSP00000396110
MAAEEGVASAASAGGSWGTAAMGRVLPMLLVPVPAEAMGQLGSRAQLRTQPEALGSLTAAGSLQVLSLTPGSRGGGRCCLEGPFWHFLWEDSRNSSTPTEKPKLLALGENYELLIYEFNLKDGRCDATILYSCSREALQKLIDDQDISISLLSLRILSFHNNTSLLFINKCVILHIIFPERDAAIRVLNCFTLPLPAQAVDMIIDTQLCRGILFVLSSLGWIYIFDVVDGTYVAHVDLALHKEDMCNEQQQEPAKISSFTSLKVSQDLDVAVIVSSSNSAVALNLNLYFRQHPGHLLCERILEDLPIQGPKGVDEDDPVNSAYNMKLAKFSFQIDRSWKAQLSSLNETIKNSKLEVSCCAPWFQDILHLESPESGNHSTSVQSWAFIPQDIMHGQYNVLQKDHAKTSDPGRSWKIMHISEQEEPIELKCVSVTGFTALFTWEVERMGYTITLWDLETQGMQCFSLGTKCIPVDSSGDQQLCFVLTENGLSLILFGLTQEEFLNRLMIHGSASTVDTLCHLNGWGRCSIPIHALEAGIENRQLDTVNFFLKSKENLFNPSSKSSVSDQFDHLSSHLYLRNVEELIPALDLLCSAIRESYSEPQSKHFSEQLLNLTLSFLNNQIKELFIHTEELDEHLQKGVNILTSYINELRTFMIKFPWKLTDAIDEYDVHENVPKVKESNIWKKLSFEEVIASAILNNKIPEAQTFFRIDSHSAQKLEELIGIGLNLVFDNLKKNNIKEASELLKNMGFDVKGQLLKICFYTTNKNIRDFLVEILKEKNYFSEKEKRTIDFVHQVEKLYLGHFQENMQIQSFPRYWIKEQDFFKHKSVLDSFLKYDCKDEFNKQDHRIVLNWALWWDQLTQESILLPRISPEEYKSYSPEALWRYLTARHDWLNIILWIGEFQTQHSYASLQQNKWPLLTVDVINQNTSCNNYMRNEILDKLARNGVFLASELEDFECFLLRLSRIGGVIQDTLPVQNYKTKEGWDFHSQFILYCLEHSLQHLLYVYLDCYKLSPENCPFLEKKELHEAHPWFEFLVQCRQVASNLTDPKLIFQASLANAQILIPTNQASVSSMLLEGHTLLALATTMYSPGGVSQVVQNEENENCLKKVDPQLLKMALTPYPKLKTALFPQCTPPSVLPSDITIYHLIQSLSPFDPSRLFGWQSANTLAIGDAWSHLPHFSSPDLVNKYAIVERLNFAYYLHNGRPSFAFGTFLVQELIKSKTPKQLIQQVGNEAYVIGLSSFHIPSIGAACVCFLELLGLDSLKLRVDMKVANIILSYKCRNEDAQYSFIRESVAEKLSKLADGEKTTTEELLVLLEEGTWNSIQQQEIKRLSSESSSQWALVVQFCRLHNMKLSISYLRECAKANDWLQFIIHSQLHNYHPAEVKSLIQYFSPVIQDHLRLAFENLPSVPTSKMDSDQVCNKCPQELQGSKQEMTDLFEILLQCSEEPDSWHWLLVEAVKQQAPILSVLASCLQGASAISCLCVWIITSVEDNVATEAMGHIQDSTEDHTWNLEDLSVIWRTLLTRQKSKTLIRGFQLFFKDSPLLLVMEMYELCMFFRNYKEAEAKLLEFQKSLETLNTAATKVHPVIPAMWLEDQVCFLLKLMLQQCKTQYELGKLLQLFVEREHLFSDGPDVKKLCILCQILKDTSIAINHTIITSYSIENLQHECRSILERLQTDGQFALARRVAELAELPVDNLVIKEITQEMQTLKHIEQWSLKQARIDFWKKCHENFKKNSISSKAASSFFSTQAHVACEHPTGWSSMEERHLLLTLAGHWLAQEDVVPLDKLEELEKQIWLCRITQHTLGRNQEETEPRFSRQISTSGELSFDSLASEFSFSKLAALNTSKYLELNSLPSKETCENRLDWKEQESLNFLIGRLLDDGCVHEASRVCRYFHFYNPDVALVLHCRALASGEASMEDLHPEIHALLQSAELLEEEAPDIPLRRVHSTSSLDSQKFVTVPSSNEVVTNLEVLTSKCLHGKNYCRQVLCLYDLAKELGCSYTDVAAQDGEAMLRKILASQQPDRCKRAQAFISTQGLKPDTVAELVAEEVTRELLTSSQGTGHKQMFNPTEESQTFLQLTTLCQDRTLVGMKLLDKISSVPHGELSCTTELLILAHHCFTLTCHMEGIIRVLQAAHMLTDNHLAPSEEYGLVVRLLTGIGRYNEMTYIFDLLHKKHYFEVLMRKKLDPSGTLKTALLDYIKRCRPGDSEKHNMIALCFSMCREIGENHEAAARIQLKLIESQPWDINNISLLTWSWKT

SEQ ID NO: 82769 - protein, 2330 aa, Homo sapiens
  Payload ID: 16475
  Gene Symbol: SPG11
  Gene Name: spastic paraplegia 11 (autosomal recessive)
  Uniprot ID: Q96JI7
  ENSP ID: ENSP00000445278
MAAEEGVASAASAGGSWGTAAMGRVLPMLLVPVPAEAMGQLGSRAQLRTQPEALGSLTAAGSLQVLSLTPGSRGGGRCCLEGPFWHFLWEDSRNSSTPTEKPKLLALGENYELLIYEFNLKDGRCDATILYSCSREALQKLIDDQDISISLLSLRILSFHNNTSLLFINKCVILHIIFPERDAAIRVLNCFTLPLPAQAVDMIIDTQLCRGILFVLSSLGWIYIFDVVDGTYVAHVDLALHKEDMCNEQQQEPAKISSFTSLKVSQDLDVAVIVSSSNSAVALNLNLYFRQHPGHLLCERILEDLPIQGPKGVDEDDPVNSAYNMKLAKFSFQIDRSWKAQLSSLNETIKNSKLEVSCCAPWFQDILHLESPESGNHSTSVQSWAFIPQDIMHGQYNVLQKDHAKTSDPGRSWKIMHISEQEEPIELKCVSVTGFTALFTWEVERMGYTITLWDLETQGMQCFSLGTKCIPVDSSGDQQLCFVLTENGLSLILFGLTQEEFLNRLMIHGSASTVDTLCHLNGWGRCSIPIHALEAGIENRQLDTVNFFLKSKENLFNPSSKSSVSDQFDHLSSHLYLRNVEELIPALDLLCSAIRESYSEPQSKHFSEQLLNLTLSFLNNQIKELFIHTEELDEHLQKGVNILTSYINELRTFMIKFPWKLTDAIDEYDVHENVPKVKESNIWKKLSFEEVIASAILNNKIPEAQTFFRIDSHSAQKLEELIGIGLNLVFDNLKKNNIKEASELLKNMGFDVKGQLLKICFYTTNKNIRDFLVEILKEKNYFSEKEKRTIDFVHQVEKLYLGHFQENMQIQSFPRYWIKEQDFFKHKSVLDSFLKYDCKDEFNKQDHRIVLNWALWWDQLTQESILLPRISPEEYKSYSPEALWRYLTARHDWLNIILWIGEFQTQHSYASLQQNKWPLLTVDVINQNTSCNNYMRNEILDKLARNGVFLASELEDFECFLLRLSRIGGVIQDTLPVQNYKTKEGWDFHSQFILYCLEHSLQHLLYVYLDCYKLSPENCPFLEKKELHEAHPWFEFLVQCRQVASNLTDPKLIFQASLANAQILIPTNQASVSSMLLEGHTLLALATTMYSPGGVSQVVQNEENENCLKKVDPQLLKMALTPYPKLKTALFPQCTPPSVLPSDITIYHLIQSLSPFDPSRLFGWQSANTLAIGDAWSHLPHFSSPDLVNKYAIVERLNFAYYLHNGRPSFAFGTFLVQELIKSKTPKQLIQQVGNEAYVIGLSSFHIPSIGAACVCFLELLGLDSLKLRVDMKVANIILSYKCRNEDAQYSFIRESVAEKLSKLADGEKTTTEELLVLLEEGTWNSIQQQEIKRLSSESSSQWALVVQFCRLHNMKLSISYLRECAKANDWLQFIIHSQLHNYHPAEVKSLIQYFSPVIQDHLRLAFENLPSVPTSKMDSDQVCNKCPQELQGSKQEMTDLFEILLQCSEEPDSWHWLLVEAVKQQAPILSVLASCLQGASAISCLCVWIITSVEDNVATEAMGHIQDSTEDHTWNLEDLSVIWRTLLTRQKSKTLIRGFQLFFKDSPLLLVMEMYELCMFFRNYKEAEAKLLEFQKSLETLNTAATKVHPVIPAMWLEDQVCFLLKLMLQQCKTQYELGKLLQLFVEREHLFSDGPDVKKLCILCQILKDTSIAINHTIITSYSIENLQHECRSILERLQTDGQFALARRVAELAELPVDNLVIKEITQEMQTLKHIEQWSLKQARIDFWKKCHENFKKNSISSKAASSFFSTQAHVACEHPTGWSSMEERHLLLTLAGHWLAQEDVVPLDKLEELEKQIWLCRITQHTLGRNQEETEPRFSRQISTSGELSFDSLASEFSFSKLAALNTSKYLELNSLPSKETCENRLDWKEQESLNFLIGRLLDDGCVHEASRVCRYFHFYNPDVALVLHCRALASGEASMEDLHPEIHALLQSAELLEEEAPDIPLRRVHSRHKQMFNPTEESQTFLQLTTLCQDRTLVGMKLLDKISSVPHGELSCTTELLILAHHCFTLTCHMEGIIRVLQAAHMLTDNHLAPSEEYGLVVRLLTGIGRYNEMTYIFDLLHKKHYFEVLMRKKLDPSGTLKTALLDYIKRCRPGDSEKHNMIALCFSMCREIGENHEAAARIQLKLIESQPWEDSLKDGHQLKQLLLKALTLMLDAAESYAKDSCVRQAQHCQRLTKLITLQIHFLNTGQNTMLINLGRHKLMDCILALPRFYQASIVAEAYDFVPDWAEILYQQVILKGDFNYLEEFKQQRLLKSSIFEEISKKYKQHQPTDMVMENLKKLLTYCEDVYLYYKLAYEHKFYEIVNVLLKDPQTGCCLKDMLAG

SEQ ID NO: 82770 - protein, 43 aa, Homo sapiens
  Payload ID: 16475
  Gene Symbol: SPG11
  Gene Name: spastic paraplegia 11 (autosomal recessive)
  ENSP ID: ENSP00000452629
HSYASLQQNKWPLLTVDVINQNTSCNNYMRNEILDKLARYYNC

SEQ ID NO: 82771 - protein, 131 aa, Homo sapiens
  Payload ID: 16475
  Gene Symbol: SPG11
  Gene Name: spastic paraplegia 11 (autosomal recessive)
  ENSP ID: ENSP00000452744
  MOD_RES (1)..(1): Any amino acid
XSSKAASSFFSTQAHVACEHPTGWSSMEERHLLLTLAGHWLAQEDVVPLDKLEELEKQIWLCRITQHTLGRNQEETEPRFSRQISTSGELSFDSLAKHWPQGKLVWRICTQRSMLSYKVLSCLRKKHPTFP

SEQ ID NO: 82772 - protein, 99 aa, Homo sapiens
  Payload ID: 16475
  Gene Symbol: SPG11
  Gene Name: spastic paraplegia 11 (autosomal recessive)
  ENSP ID: ENSP00000452991
QLFFKDSPLLLVMEMYELCMFFRNYKEAEAKLLEFQKSLETLNTAATKVHPVIPAMWLEDQVCFLLKLMLQQCKTQYELGKLLQLFVEREHLFSDGKED

SEQ ID NO: 82773 - protein, 156 aa, Homo sapiens
  Payload ID: 16475
  Gene Symbol: SPG11
  Gene Name: spastic paraplegia 11 (autosomal recessive)
  ENSP ID: ENSP00000453227
FTALFTWEVERMGYTITLWDLETQGMQCFSLGTKCIPVDSSGDQQLCFVLTENGLSLILFGLTQEEFLNRLMIHGSASTVDTLCHLNGWGRCSIPIHALEAGIENRQLDTVNFFLKSKENLFNPSSKSSVSDQFDHLSSHLYLRSKWNKDFYICIY

SEQ ID NO: 82774 - protein, 102 aa, Homo sapiens
  Payload ID: 16475
  Gene Symbol: SPG11
  Gene Name: spastic paraplegia 11 (autosomal recessive)
  ENSP ID: ENSP00000453238
LIQYFSPVIQDHLRLAFENLPSVPTSKMDSDQVCNKCPQELQGSKQEMTDLFEILLQCSEEPDSWHWLLVEAVKQQAPILSVLASCLQVRIMRSLKIPRYYW

SEQ ID NO: 82775 - protein, 567 aa, Homo sapiens
  Payload ID: 16475
  Gene Symbol: SPG11
  Gene Name: spastic paraplegia 11 (autosomal recessive)
  ENSP ID: ENSP00000453246
  MOD_RES (1)..(1): Any amino acid
XEQWSLKQARIDFWKKCHENFKKNSISSKAASSFFSTQAHVACEHPTGWSSMEERHLLLTLAGHWLAQEDVVPLDKLEELEKQIWLCRITQHTLGRNQEETEPRFSRQISTSGELSFDSLASEFSFSKLAALNTSKYLELNSLPSKETCENRLDWKEQESLNFLIGRLLDDGCVHEASRVCRYFHFYNPDVALVLHCRALASGEASMEDLHPEIHALLQSAELLEEEAPDIPLRRVHSTTELLILAHHCFTLTCHMEGIIRVLQAAHMLTDNHLAPSEEYGLVVRLLTGIGRYNEMTYIFDLLHKKHYFEVLMRKKLDPSGTLKTALLDYIKRCRPGDSEKHNMIALCFSMCREIGENHEAAARIQLKLIESQPWEDSLKDGHQLKQLLLKALTLMLDAAESYAKDSCVRQAQHCQRLTKLITLQIHFLNTGQNTMLINLGRHKLMDCILALPRFYQASIVAEAYDFVPDWAEILYQQVILKGDFNYLEEFKQQRLLKSSIFEEISKKYKQHQPTDMVMENLKKLLTYCEDVYLYYKLAYEHKFYEIVNVLLKDPQTGCCLKDMLAG

SEQ ID NO: 82776 - protein, 250 aa, Homo sapiens
  Payload ID: 16475
  Gene Symbol: SPG11
  Gene Name: spastic paraplegia 11 (autosomal recessive)
  ENSP ID: ENSP00000453314
TGHKQMFNPTEESQTFLQLTTLCQDRTLVGMKLLDKISSVPHGELSCTTELLILAHHCFTLTCHMEGIIRVLQAAHMLTDNHLAPSEEYGLVSGTLKTALLDYIKRCRPGDSEKHNMIALCFSMCREIGENHEAAARIQLKLIESQPWEDSLKDGHQLKQLLLKALTLMLDAAESYAKDSCVRQAQHCQRLTKLITLQIHFLNTGQNTMLINLGRHKLMDCILALPRFYQASIVAEAYDFVPDWAEILYQ

SEQ ID NO: 82777 - protein, 107 aa, Homo sapiens
  Payload ID: 16475
  Gene Symbol: SPG11
  Gene Name: spastic paraplegia 11 (autosomal recessive)
  ENSP ID: ENSP00000453490
  MOD_RES (1)..(1): Any amino acid
XPGGVSQVVQNEENENCLKKVDPQLLKMALTPYPKLKTALFPQCTPPSVLPSDITIYHLIQSLSPFDPSRLFGWQSANTLAIGGIRSQCEKSLEFHEKTQLYFRNKL

SEQ ID NO: 82778 - protein, 2079 aa, Homo sapiens
  Payload ID: 16475
  Gene Symbol: SPG11
  Gene Name: spastic paraplegia 11 (autosomal recessive)
  Uniprot ID: Q96JI7
  ENSP ID: ENSP00000453599
MAAEEGVASAASAGGSWGTAAMGRVLPMLLVPVPAEAMGQLGSRAQLRTQPEALGSLTAAGSLQVLSLTPGSRGGGRCCLEGPFWHFLWEDSRNSSTPTEKPKLLALGENYELLIYEFNLKDGRCDATILYSCSREALQKLIDDQDISISLLSLRILSFHNNTSLLFINKCVILHIIFPERDAAIRVLNCFTLPLPAQAVDMIIDTQLCRGILFVLSSLGWIYIFDVVDGTYVAHVDLALHKEDMCNEQQQEPAKISSFTSLKVSQDLDVAVIVSSSNSAVALNLNLYFRQHPGHLLCERILEDLPIQGPKGVDEDDPVNSAYNMKLAKFSFQIDRSWKAQLSSLNETIKNSKLEVSCCAPWFQDILHLESPESGNHSTSVQSWAFIPQDIMHGQYNVLQKDHAKTSDPGRSWKIMHISEQEEPIELKCVSVTGFTALFTWEVERMGYTITLWDLETQGMQCFSLGTKCIPVDSSGDQQLCFVLTENGLSLILFGLTQEEFLNRLMIHGSASTVDTLCHLNGWGRCSIPIHALEAGIENRQLDTVNFFLKSKENLFNPSSKSSVSDQFDHLSSHLYLRNVEELIPALDLLCSAIRESYSEPQSKHFSEQLLNLTLSFLNNQIKELFIHTEELDEHLQKGVNILTSYINELRTFMIKFPWKLTDAIDEYDVHENVPKVKESNIWKKLSFEEVIASAILNNKIPEAQTFFRIDSHSAQKLEELIGIGLNLVFDNLKKNNIKEASELLKNMGFDVKGQLLKICFYTTNKNIRDFLVEILKEKNYFSEKEKRTIDFVHQVEKLYLGHFQENMQIQSFPRYWIKEQDFFKHKSVLDSFLKYDCKDEFNKQDHRIVLNWALWWDQLTQESILLPRISPEEYKSYSPEALWRYLTARHDWLNIILWIGEFQTQHSYASLQQNKWPLLTVDVINQNTSCNNYMRNEILDKLARNGVFLASELEDFECFLLRLSRIGGVIQDTLPVQNYKTKEGWDFHSQFILYCLEHSLQHLLYVYLDCYKLSPENCPFLEKKELHEAHPWFEFLVQCRQVASNLTDPKLIFQASLANAQILIPTNQASVSSMLLEGHTLLALATTMYSPGGVSQVVQNEENENCLKKVDPQLLKMALTPYPKLKTALFPQCTPPSVLPSDITIYHLIQSLSPFDPSRLFGWQSANTLAIGDAWSHLPHFSSPDLVNKYAIVERLNFAYYLHNGRPSFAFGTFLVQELIKSKTPKQLIQQVGNEAYVIGLSSFHIPSIGAACVCFLELLGLDSLKLRVDMKVANIILSYKCRNEDAQYSFIRESVAEKLSKLADGEKTTTEELLVLLEEGTWNSIQQQEIKRLSSESSSQWALVVQFCRLHNMKLSISYLRECAKANDWLQFIIHSQLHNYHPAEVKSLIQYFSPVIQDHLRLAFENLPSVPTSKMDSDQVCNKCPQELQGSKQEMTDLFEILLQCSEEPDSWHWLLVEAVKQQAPILSVLASCLQGASAISCLCVWIITSVEDNVATEAMGHIQDSTEDHTWNLEDLSVIWRTLLTRQKSKTLIRGFQLFFKDSPLLLVMEMYELCMFFRNYKEAEAKLLEFQKSLETLNTAATKVHPVIPAMWLEDQVCFLLKLMLQQCKTQYELGKLLQLFVEREHLFSDGPDVKKLCILCQILKDTSIAINHTIITSYSIENLQHECRSILERLQTDGQFALARRVAELAELPVDNLVIKEITQEMQTLKHIEQWSLKQARIDFWKKCHENFKKNSISSKAASSFFSTQAHVACEHPTGWSSMEERHLLLTLAGHWLAQEDVVPLDKLEELEKQIWLCRITQHTLGRNQEETEPRFSRQISTSGELSFDSLASEFSFSKLAALNTSKYLELNSLPSKETCENRLDWKEQESLNFLIGRLLDDGCVHEASRVCRYFHFYNPDVALVLHCRALASGEASMEDLHPEIHALLQSAELLEEEAPDIPLRRVHSTSSLDSQKFVTVPSSNEVVTNLEVLTSKCLHGKNYCRQVLCLYDLAKELGCSYTDVAAQDGEAMLRKILASQQPDRCKRAQAFISTQGLKPDTVAELVAEEVTRELLTSSQGTGALPPGDSQPL

SEQ ID NO: 82779 - protein, 779 aa, Homo sapiens
  Payload ID: 16475
  Gene Symbol: SPG11
  Gene Name: spastic paraplegia 11 (autosomal recessive)
  ENSP ID: ENSP00000453848
MAAEEGVASAASAGGSWGTAAMGRVLPMLLVPVPAEAMGQLGSRAQLRTQPEALGSLTAAGSLQVLSLTPGSRGGGRCCLEGPFWHFLWEDSRNSSTPTEKPKLLALGENYELLIYEFNLKDGRCDATILYSCSREALQKLIDDQDISISLLSLRILSFHNNTSLLFINKCVILHIIFPERDAAIRVLNCFTLPLPAQAVDMIIDTQLCRGILFVLSSLGWIYIFDVVDGTYVAHVDLALHKEDMCNEQQQEPAKISSFTSLKVSQDLDVAVIVSSSNSAVALNLNLYFRQHPGHLLCERILEDLPIQGPKGVDEDDPVNSAYNMKLAKFSFQIDRSWKAQLSSLNETIKNSKLEVSCCAPWFQDILHLESPESGNHSTSVQSWAFIPQDIMHGQYNVLQKDHAKTSDPGRSWKIMHISEQEEPIELKCVSVTGFTALFTWEVERMGYTITLWDLETQGMQCFSLGTKCIPVDSSGDQQLCFVLTENGLSLILFGLTQEEFLNRLMIHGSASTVDTLCHLNGWGRCSIPIHALEAGIENRQLDTVNFFLKSKENLFNPSSKSSVSDQFDHLSSHLYLRNVEELIPALDLLCSAIRESYSEPQSKHFSEQLLNLTLSFLNNQIKELFIHTEELDEHLQKGVNILTSYINELRTFMIKFPWKLTDAIDEYDVHENVPKVKESNIWKKLSFEEVIASAILNNKIPEAQTFFRIDSHSAQKLEELIGIGLNLVFDNLKKNNIKEASELLKNMGFDVKGQLLKICFYTTNKNIRDFLVGKGETT

SEQ ID NO: 82780 - protein, 138 aa, Homo sapiens
  Payload ID: 16475
  Gene Symbol: SPG11
  Gene Name: spastic paraplegia 11 (autosomal recessive)
  ENSP ID: ENSP00000453921
PGGVSQVVQNEENENCLKKVDPQLLKMALTPYPKLKTALFPQCTPPSVLPSDITIYHLIQSLSPFDPSRLFGWQSANTLAIGDAWSHLPHFSSPDLVNKYAIVERLNFAYYLHNGRPSFAFGTFLVQELIKSKTPKQL

SEQ ID NO: 82781 - protein, 666 aa, Homo sapiens
  Payload ID: 16476
  Gene Symbol: SPG20
  Gene Name: spastic paraplegia 20 (Troyer syndrome)
  Uniprot ID: Q8N0X7
  ENSP ID: ENSP00000347314
MEQEPQNGEPAEIKIIREAYKKAFLFVNKGLNTDELGQKEEAKNYYKQGIGHLLRGISISSKESEHTGPGWESARQMQQKMKETLQNVRTRLEILEKGLATSLQNDLQEVPKLYPEFPPKDMCEKLPEPQSFSSAPQHAEVNGNTSTPSAGAVAAPASLSLPSQSCPAEAPPAYTPQAAEGHYTVSYGTDSGEFSSVGEEFYRNHSQPPPLETLGLDADELILIPNGVQIFFVNPAGEVSAPSYPGYLRIVRFLDNSLDTVLNRPPGFLQVCDWLYPLVPDRSPVLKCTAGAYMFPDTMLQAAGCFVGVVLSSELPEDDRELFEDLLRQMSDLRLQANWNRAEEENEFQIPGRTRPSSDQLKEASGTDVKQLDQGNKDVRHKGKRGKRAKDTSSEEVNLSHIVPCEPVPEEKPKELPEWSEKVAHNILSGASWVSWGLVKGAEITGKAIQKGASKLRERIQPEEKPVEVSPAVTKGLYIAKQATGGAAKVSQFLVDGVCTVANCVGKELAPHVKKHGSKLVPESLKKDKDGKSPLDGAMVVAASSVQGFSTVWQGLECAAKCIVNNVSAETVQTVRYKYGYNAGEATHHAVDSAVNVGVTAYNINNIGIKAMVKKTATQTGHTLLEDYQIVDNSQRENQEGAANVNVRGEKDEQTKEVKEAKKKDK

SEQ ID NO: 82782 - protein, 666 aa, Homo sapiens; identical to SEQ ID NO: 82781
  Payload ID: 16476
  Gene Symbol: SPG20
  Gene Name: spastic paraplegia 20 (Troyer syndrome)
  Uniprot ID: Q8N0X7
  ENSP ID: ENSP00000406061

SEQ ID NO: 82783 - protein, 666 aa, Homo sapiens; identical to SEQ ID NO: 82781
  Payload ID: 16476
  Gene Symbol: SPG20
  Gene Name: spastic paraplegia 20 (Troyer syndrome)
  Uniprot ID: Q8N0X7
  ENSP ID: ENSP00000414147

SEQ ID NO: 82784 - protein, 666 aa, Homo sapiens; identical to SEQ ID NO: 82781
  Payload ID: 16476
  Gene Symbol: SPG20
  Gene Name: spastic paraplegia 20 (Troyer syndrome)
  Uniprot ID: Q8N0X7
  ENSP ID: ENSP00000473599

SEQ ID NO: 82785 - protein, 308 aa, Homo sapiens
  Payload ID: 16477
  Gene Symbol: SPG21
  Gene Name: spastic paraplegia 21 (autosomal recessive, Mast syndrome)
  Uniprot ID: Q9NZD8
  ENSP ID: ENSP00000204566
MGEIKVSPDYNWFRGTVPLKKIIVDDDDSKIWSLYDAGPRSIRCPLIFLPPVSGTADVFFRQILALTGWGYRVIALQYPVYWDHLEFCDGFRKLLDHLQLDKVHLFGASLGGFLAQKFAEYTHKSPRVHSLILCNSFSDTSIFNQTWTANSFWLMPAFMLKKIVLGNFSSGPVDPMMADAIDFMVDRLESLGQSELASRLTLNCQNSYVEPHKIRDIPVTIMDVFDQSALSTEAKEEMYKLYPNARRAHLKTGGNFPYLCRSAEVNLYVQIHLLQFHGTKYAAIDPSMVSAEELEVQKGSLGISQEEQ

SEQ ID NO: 82786 - protein, 281 aa, Homo sapiens
  Payload ID: 16477
  Gene Symbol: SPG21
  Gene Name: spastic paraplegia 21 (autosomal recessive, Mast syndrome)
  Uniprot ID: Q9NZD8
  ENSP ID: ENSP00000394846
MGEIKVSPDYNWFRGTVPLKKIIVDDDDSKIWSLYDAGPRSIRCPLIFLPPVSGTADVFFRQILALTGWGYRVIAVHLFGASLGGFLAQKFAEYTHKSPRVHSLILCNSFSDTSIFNQTWTANSFWLMPAFMLKKIVLGNFSSGPVDPMMADAIDFMVDRLESLGQSELASRLTLNCQNSYVEPHKIRDIPVTIMDVFDQSALSTEAKEEMYKLYPNARRAHLKTGGNFPYLCRSAEVNLYVQIHLLQFHGTKYAAIDPSMVSAEELEVQKGSLGISQEEQ

SEQ ID NO: 82787 - protein, 308 aa, Homo sapiens; identical to SEQ ID NO: 82785
  Payload ID: 16477
  Gene Symbol: SPG21
  Gene Name: spastic paraplegia 21 (autosomal recessive, Mast syndrome)
  Uniprot ID: Q9NZD8
  ENSP ID: ENSP00000404111

SEQ ID NO: 82788 - protein, 150 aa, Homo sapiens
  Payload ID: 16477
  Gene Symbol: SPG21
  Gene Name: spastic paraplegia 21 (autosomal recessive, Mast syndrome)
  ENSP ID: ENSP00000452728
MGEIKVSPDYNWFRGTVPLKKIIVDDDDSKIWSLYDAGPRSIRCPLIFLPPVSGTADVFFRQILALTGWGYRVIALQYPVYWDHLEFCDGFRKLLDHLQLDKVHLFGASLGGFLAQKFAEYTHKSPRVHSLILCNSFSDTSIFNQTWTAN

SEQ ID NO: 82789 - protein, 129 aa, Homo sapiens
  Payload ID: 16477
  Gene Symbol: SPG21
  Gene Name: spastic paraplegia 21 (autosomal recessive, Mast syndrome)
  ENSP ID: ENSP00000452865
MGEIKVSPDYNWFRGTVPLKKIIVDDDDSKIWSLYDAGPRSIRCPLIFLPPVSGTADVFFRQILALTGWGYRVIALQYPVYWDHLEFCDGFRKLLDHLQLDKLLADACIYAQKNSSWKFFIWPGGPYDG

SEQ ID NO: 82790 - protein, 53 aa, Homo sapiens
  Payload ID: 16477
  Gene Symbol: SPG21
  Gene Name: spastic paraplegia 21 (autosomal recessive, Mast syndrome)
  ENSP ID: ENSP00000453167
MGEIKVSPDYNWFRGTVPLKKIIVDDDDSKIWSLYDAGPRSIRCPLIFLPPVS

SEQ ID NO: 82791 - protein, 102 aa, Homo sapiens
  Payload ID: 16477
  Gene Symbol: SPG21
  Gene Name: spastic paraplegia 21 (autosomal recessive, Mast syndrome)
  ENSP ID: ENSP00000453333
MGEIKVSPDYNWFRGTVPLKKIIVDDDDSKIWSLYDAGPRSIRCPLIFLPPVSGTADVFFRQILALTGWGYRVIALQYPVYWDHLEFCDGFRKLLDHLQLDK

SEQ ID NO: 82792 - protein, 71 aa, Homo sapiens
  Payload ID: 16477
  Gene Symbol: SPG21
  Gene Name: spastic paraplegia 21 (autosomal recessive, Mast syndrome)
  ENSP ID: ENSP00000453362
MGEIKVSPDYNWFRGTVPLKKIIVDDDDSKIWSLYDAGPRSIRCPLIFLPPVSGTADVFFRQILALTGWGY

SEQ ID NO: 82793 - protein, 141 aa, Homo sapiens
  Payload ID: 16477
  Gene Symbol: SPG21
  Gene Name: spastic paraplegia 21 (autosomal recessive, Mast syndrome)
  ENSP ID: ENSP00000453541
MGEIKVSPDYNWFRGTVPLKKIIVDDDDSKIWSLYDAGPRSIRCPLIFLPPVSGTADVFFRQILALTGWGYRVIALQYPVYWDHLEFCDGFRKLLDHLQLDKVHLFGASLGGFLAQKFAEYTHKSPRVHSLILCNSFSDTS

SEQ ID NO: 82794 - protein, 40 aa, Homo sapiens
  Payload ID: 16477
  Gene Symbol: SPG21
  Gene Name: spastic paraplegia 21 (autosomal recessive, Mast syndrome)
  ENSP ID: ENSP00000453658
MGEIKVSPDYNWFRGTVPLKKIIVDDDDSKIWSLYDAGPR

SEQ ID NO: 82795 - protein, 154 aa, Homo sapiens
  Payload ID: 16477
  Gene Symbol: SPG21
  Gene Name: spastic paraplegia 21 (autosomal recessive, Mast syndrome)
  ENSP ID: ENSP00000456365
MPAFMLKKIVLGNFSSGPVDPMMADAIDFMVDRLESLGQSELASRLTLNCQNSYVEPHKIRDIPVTIMDVFDQSALSTEAKEEMYKLYPNARRAHLKTGGNFPYLCRSAEVNLYVQIHLLQFHGTKYAAIDPSMVSAEELEVQKGSLGISQEEQ

SEQ ID NO: 82796 - protein, 795 aa, Homo sapiens
  Payload ID: 16478
  Gene Symbol: SPG7
  Gene Name: spastic paraplegia 7 (pure and complicated autosomal recessive)
  Uniprot ID: Q9UQ90
  ENSP ID: ENSP00000268704
MAVLLLLLRALRRGPGPGPRPLWGPGPAWSPGFPARPGRGRPYMASRPPGDLAEAGGRALQSLQLRLLTPTFEGINGLLLKQHLVQNPVRLWQLLGGTFYFNTSRLKQKNKEKDKSKGKAPEEDEEERRRRERDDQMYRERLRTLLVIAVVMSLLNALSTSGGSISWNDFVHEMLAKGEVQRVQVVPESDVVEVYLHPGAVVFGRPRLALMYRMQVANIDKFEEKLRAAEDELNIEAKDRIPVSYKRTGFFGNALYSVGMTAVGLAILWYVFRLAGMTGREGGFSAFNQLKMARFTIVDGKMGKGVSFKDVAGMHEAKLEVREFVDYLKSPERFLQLGAKVPKGALLLGPPGCGKTLLAKAVATEAQVPFLAMAGPEFVEVIGGLGAARVRSLFKEARARAPCIVYIDEIDAVGKKRSTTMSGFSNTEEEQTLNQLLVEMDGMGTTDHVIVLASTNRADILDGALMRPGRLDRHVFIDLPTLQERREIFEQHLKSLKLTQSSTFYSQRLAELTPGFSGADIANICNEAALHAAREGHTSVHTLNFEYAVERVLAGTAKKSKILSKEEQKVVAFHESGHALVGWMLEHTEAVMKVSITPRTNAALGFAQMLPRDQHLFTKEQLFERMCMALGGRASEALSFNEVTSGAQDDLRKVTRIAYSMVKQFGMAPGIGPISFPEAQEGLMGIGRRPFSQGLQQMMDHEARLLVAKAYRHTEKVLQDNLDKLQALANALLEKEVINYEDIEALIGPPPHGPKKMIAPQRWIDAQREKQDLGEEETEETQQPPLGGEEPTWPK

SEQ ID NO: 82797 - protein, 489 aa, Homo sapiens
  Payload ID: 16478
  Gene Symbol: SPG7
  Gene Name: spastic paraplegia 7 (pure and complicated autosomal recessive)
  Uniprot ID: Q9UQ90
  ENSP ID: ENSP00000341157
MAVLLLLLRALRRGPGPGPRPLWGPGPAWSPGFPARPGRGRPYMASRPPGDLAEAGGRALQSLQLRLLTPTFEGINGLLLKQHLVQNPVRLWQLLGGTFYFNTSRLKQKNKEKDKSKGKAPEEDEEERRRRERDDQMYRERLRTLLVIAVVMSLLNALSTSGGSISWNDFVHEMLAKGEVQRVQVVPESDVVEVYLHPGAVVFGRPRLALMYRMQVANIDKFEEKLRAAEDELNIEAKDRIPVSYKRTGFFGNALYSVGMTAVGLAILWYVFRLAGMTGREGGFSAFNQLKMARFTIVDGKMGKGVSFKDVAGMHEAKLEVREFVDYLKSPERFLQLGAKVPKGALLLGPPGCGKTLLAKAVATEAQVPFLAMAGPEFVEVIGGLGAARVRSLFKEARARAPCIVYIDEIDAVGKKRSTTMSGFSNTEEEQTLNQLLVEMDGASLDQLPSQGTMRKLRGKTPACSCLTEPTGSRRAMEGHSLCWGCLLH

SEQ ID NO: 82798 - protein, 131 aa, Homo sapiens
  Payload ID: 16478
  Gene Symbol: SPG7
  Gene Name: spastic paraplegia 7 (pure and complicated autosomal recessive)
  ENSP ID: ENSP00000454475
MGSRSGRGRTEARSASESLQLRLLTPTFEGINGLLLKQHLVQNPVRLWQLLGGTFYFNTSRLKQKNKEKDKSKGKAPEEDEEERRRRERDDQMYRERLRTLLVIAVVMSLLNALSTSGGSISWNDFVHEML

SEQ ID NO: 82799 - protein, 70 aa, Homo sapiens
  Payload ID: 16478
  Gene Symbol: SPG7
  Gene Name: spastic paraplegia 7 (pure and complicated autosomal recessive)
  ENSP ID: ENSP00000454805
  MOD_RES (1)..(1): Any amino acid
XMGTTDHVIVLASTNRADILDGALMRPGRLDRHVFIDLPTLQRKGVALSPRLECSAAITTHCGLNLQGSS

SEQ ID NO: 82800 - protein, 106 aa, Homo sapiens
  Payload ID: 16478
  Gene Symbol: SPG7
  Gene Name: spastic paraplegia 7 (pure and complicated autosomal recessive)
  ENSP ID: ENSP00000457298
  MOD_RES (1)..(1): Any amino acid
XGRLDRHVFIDLPTLQERREIFEQHLKSLKLTQSSTFYSQRLAELTPGFSGADIANICNEAALHAAREGHTSVHTLNFEYAVERVLAALRVERTGAACVLLKFIFV

SEQ ID NO: 82801 - protein, 210 aa, Homo sapiens
  Payload ID: 16478
  Gene Symbol: SPG7
  Gene Name: spastic paraplegia 7 (pure and complicated autosomal recessive)
  ENSP ID: ENSP00000457387
REIFEQHLKSLKLTQSSTFYSQRLAELTPGFSGADIANICNEAALHAAREGHTSVHTLNFEYAVERVLAGTAKKSKILSKEEQKVVAFHESGHALVGWMLEHTEAVMKVSITPRTNAALGFAQMLPRDQHLFTKEQLFERMCMALGGRASEALSFNEVTSALLCACSAEDASVSTPPSRGTGRPEEGHPHRLLHGEAVWDGTWHRAHLLP

SEQ ID NO: 82802 - protein, 181 aa, Homo sapiens
  Payload ID: 16478
  Gene Symbol: SPG7
  Gene Name: spastic paraplegia 7 (pure and complicated autosomal recessive)
  ENSP ID: ENSP00000457719
LWARGSPSCGPRRGATVGALDRGRWAGREEAGLGSAQSSAWTFPTRLLCVDVLRPSSSPFKVESSNGFRRSTNLQSTPVDRFRHQEFQRLPVRSLQLRLLTPTFEGINGLLLKQHLVQNPVRLWQLLGGTFYFNTSRLKQKNKEKDKSKGKAPEEDEEERRRRERDDQMYRERLRTLLVIA

SEQ ID NO: 82803 - protein, 154 aa, Homo sapiens
  Payload ID: 16478
  Gene Symbol: SPG7
  Gene Name: spastic paraplegia 7 (pure and complicated autosomal recessive)
  ENSP ID: ENSP00000461979
  MOD_RES (1)..(1): Any amino acid
XFERMCMALGGRASEALSFNEVTSGAQDDLRKVTRIAYSMVKQFGMAPGIGPISFPEAQEGLMGIGRRPFSQGLQQMMDHEARLLVAKAYRHTEKVLQDNLDKLQAVRPWPGVGATASHSVHTAPTVPTPLVKYFQGTQSTENTLTDVNSTQLN

SEQ ID NO: 82804 - protein, 238 aa, Homo sapiens
  Payload ID: 16478
  Gene Symbol: SPG7
  Gene Name: spastic paraplegia 7 (pure and complicated autosomal recessive)
  ENSP ID: ENSP00000478030
MRLRCTRRGRDTLPCTLSTSSTPWSASSQVPRAQLGKAVGSCRGVGSCCARHCKTHLASLRQPCGERTGAACVLLIYFRVTIYFYVEIEKLLIIVAKQEGLSGNHKPVERKYMTYLSAQDHELIQVVQNGHLQMCGKSETGNEASPGLPKRARSCPRKNRKWLRFMSRATPWWAGCWSTRRDEGLHNPSTNAALGFAQAPQRPAPLHEQLFERMCMALGGRASEALSQRGHFWGHRTT

SEQ ID NO: 82805 - protein, 109 aa, Homo sapiens
  Payload ID: 16478
  Gene Symbol: SPG7
  Gene Name: spastic paraplegia 7 (pure and complicated autosomal recessive)
  ENSP ID: ENSP00000483351
  MOD_RES (1)..(1): Any amino acid
XAGPEFVEVIGGLGAARVRSLFKEARARAPCIVYIDEIDAVGKKRSTTMSGFSNTEEEQTLNQLLVEMDGQCSCAPHPHCTIRGGFPMSFRTGCGEPRSCHCTPAWVTE

SEQ ID NO: 82806 - protein, 616 aa, Homo sapiens
  Payload ID: 16479
  Gene Symbol: SPAST
  Gene Name: spastin
  Uniprot ID: Q9UBP0
  ENSP ID: ENSP00000320885
MNSPGGRGKKKGSGGASNPVPPRPPPPCLAPAPPAAGPAPPPESPHKRNLYYFSYPLFVGFALLRLVAFHLGLLFVWLCQRFSRALMAAKRSSGAAPAPASASAPAPVPGGEAERVRVFHKQAFEYISIALRIDEDEKAGQKEQAVEWYKKGIEELEKGIAVIVTGQGEQCERARRLQAKMMTNLVMAKDRLQLLEKMQPVLPFSKSQTDVYNDSTNLACRNGHLQSESGAVPKRKDPLTHTSNSLPRSKTVMKTGSAGLSGHHRAPSYSGLSMVSGVKQGSGPAPTTHKGTPKTNRTNKPSTPTTATRKKKDLKNFRNVDSNLANLIMNEIVDNGTAVKFDDIAGQDLAKQALQEIVILPSLRPELFTGLRAPARGLLLFGPPGNGKTMLAKAVAAESNATFFNISAASLTSKYVGEGEKLVRALFAVARELQPSIIFIDEVDSLLCERREGEHDASRRLKTEFLIEFDGVQSAGDDRVLVMGATNRPQELDEAVLRRFIKRVYVSLPNEETRLLLLKNLLCKQGSPLTQKELAQLARMTDGYSGSDLTALAKDAALGPIRELKPEQVKNMSASEMRNIRLSDFTESLKKIKRSVSPQTLEAYIRWNKDFGDTTV

SEQ ID NO: 82807 - protein, 584 aa, Homo sapiens
  Payload ID: 16479
  Gene Symbol: SPAST
  Gene Name: spastin
  Uniprot ID: Q9UBP0
  ENSP ID: ENSP00000340817
MNSPGGRGKKKGSGGASNPVPPRPPPPCLAPAPPAAGPAPPPESPHKRNLYYFSYPLFVGFALLRLVAFHLGLLFVWLCQRFSRALMAAKRSSGAAPAPASASAPAPVPGGEAERVRVFHKQAFEYISIALRIDEDEKAGQKEQAVEWYKKGIEELEKGIAVIVTGQGEQCERARRLQAKMMTNLVMAKDRLQLLESGAVPKRKDPLTHTSNSLPRSKTVMKTGSAGLSGHHRAPSYSGLSMVSGVKQGSGPAPTTHKGTPKTNRTNKPSTPTTATRKKKDLKNFRNVDSNLANLIMNEIVDNGTAVKFDDIAGQDLAKQALQEIVILPSLRPELFTGLRAPARGLLLFGPPGNGKTMLAKAVAAESNATFFNISAASLTSKYVGEGEKLVRALFAVARELQPSIIFIDEVDSLLCERREGEHDASRRLKTEFLIEFDGVQSAGDDRVLVMGATNRPQELDEAVLRRFIKRVYVSLPNEETRLLLLKNLLCKQGSPLTQKELAQLARMTDGYSGSDLTALAKDAALGPIRELKPEQVKNMSASEMRNIRLSDFTESLKKIKRSVSPQTLEAYIRWNKDFGDTTV

SEQ ID NO: 82808 - protein, 616 aa, Homo sapiens; identical to SEQ ID NO: 82806
  Payload ID: 16479
  Gene Symbol: SPAST
  Gene Name: spastin
  Uniprot ID: Q9UBP0
  ENSP ID: ENSP00000480893

SEQ ID NO: 82809 - protein, 530 aa, Homo sapiens
  Payload ID: 16479
  Gene Symbol: SPAST
  Gene Name: spastin
  Uniprot ID: Q9UBP0
  ENSP ID: ENSP00000482496
MAAKRSSGAAPAPASASAPAPVPGGEAERVRVFHKQAFEYISIALRIDEDEKAGQKEQAVEWYKKGIEELEKGIAVIVTGQGEQCERARRLQAKMMTNLVMAKDRLQLLEKMQPVLPFSKSQTDVYNDSTNLACRNGHLQSESGAVPKRKDPLTHTSNSLPRSKTVMKTGSAGLSGHHRAPSYSGLSMVSGVKQGSGPAPTTHKGTPKTNRTNKPSTPTTATRKKKDLKNFRNVDSNLANLIMNEIVDNGTAVKFDDIAGQDLAKQALQEIVILPSLRPELFTGLRAPARGLLLFGPPGNGKTMLAKAVAAESNATFFNISAASLTSKYVGEGEKLVRALFAVARELQPSIIFIDEVDSLLCERREGEHDASRRLKTEFLIEFDGVQSAGDDRVLVMGATNRPQELDEAVLRRFIKRVYVSLPNEETRLLLLKNLLCKQGSPLTQKELAQLARMTDGYSGSDLTALAKDAALGPIRELKPEQVKNMSASEMRNIRLSDFTESLKKIKRSVSPQTLEAYIRWNKDFGDTTV

SEQ ID NO: 82810 - protein, 1361 aa, Homo sapiens
  Payload ID: 16480
  Gene Symbol: SPATA31A1
  Gene Name: SPATA31 subfamily A, member 1
  ENSP ID: ENSP00000366875
MPRAQLLESNAPIHMENLPFPLKLLSASSLNAPSSTPWVLDIFLTLVFALGFFFLLLPYLSYFRCDDPPSPSPGKRKCPVGRRRRPRGRMKNHSLRAGRECPRGLQETSDLLSQLQSLLGPHLDKGDFGQLSGPDPPGEVGERAPDGASQSSHEPMEDAAPILSPLASPDPQAKHPQDLASTPSPGPMTTSVSSLSASQPPEPSLPLEHPSPEPPALFPHPPHTPDPLACSPPPPKGFTAPPLRDSTLITPSHCDSVALPLGTVPQSLSPHEDLVASVPAISGLGGSNSHVSASSRWQETARTSCAFNSSVQQDHLSRHPPETYQMEAGSLFLLSSDGQNAVGIQVTETAKVNIWEEKENVGSFTDRMTPEKHLNSLRNLAKSLDAEQDTTNPKPFWNMGENSKQLPGPQKLSDPRLWQESFWKNYSQLFWGLPSLHSESLVANAWVTDRSYTLQSPPFLFNEMSNVCPIQRETTMSPLLFQAQPPSHLGPECQPFISSTPQFRPTPMAQAEAQAHLQSSFPVLSPAFPSLIKNTGVACPASQNKVQALSLPETQHPEWPLLRRQLEGRLALPSRVQKSQDVFSVSTPNLPQESLTSILPENFPVSPELRRQLEQHIKKWIIQHWGNLGRIQESLDLMQLRDESPGTSQAKGKPSPWQSSMSTGESSKEAQKVKFQLERDPCPHLGQILGETPQNLSRDMKSFPRKVLGVTSEESERNLRKPLRSDSGSDLLRCTERTHIENILKAHMGRNLGQTNEGLIPVRVRRSWLAVNQALPVSNTHVKTSNLAAPKSGKACVNTAQVLSFLEPCTQQGLGAHIVRFWAKHRWGLPLRVLKPIQCFKLEKVSSLSLTQLAGPSSATCESGAGSEVEVDMFLRKPPMASLRKQVLTKASDHMPESLLASSPAWKQFQRAPRGIPSWNDHGPLKPPPAGQEGRWPSKPLTYSLTGSTQQSRSLGAQSSKAGETREAVPQCRVPLETCMLANLQATSEDMHGFEAPGTSKSSLHPRVSVSQDPRKLCLMEEVVNEFEPGMATKSETQPQVCAAVVLLPDGQASVVPHASENLVSQVPQGHLQSMPAGNMRASQELHDLMAARRSKLVHEEPRNPNCQGSCKNQRPMFPPIHKSEKSRKPNLEKHEERLEGLRTPQLTPVRKTEDTHQDEGVQLLPSKKQPPSVSHFGGNIKQFFQWIFSKKKSKPAPVTAESQKTVKNRSCVYSSSAEAQGLMTAVGQMLDEKMSLCHARHASKVNQHKQKFQAPVCGFPCNHRHLFYSEHGRILSYAASSQQATLKSQGCPNRDRQIRNQQPLKSVRCNNEQWGLRHPQILHPKKAVSPVSPLQHWPKTSGASSHHHHCPRHCLLWEGI

SEQ ID NO: 82811 - protein, 1347 aa, Homo sapiens
  Payload ID: 16481
  Gene Symbol: SPATA31A3
  Gene Name: SPATA31 subfamily A, member 3
  Uniprot ID: Q5VYP0
  ENSP ID: ENSP00000485118
MENLPFPLKLLSASSLNAPSSTPWVLDIFLTLVFALGFFFLLLPYLSYFRCDDPPSPSPGKRKCPVGRRRRPRGRMKNHSLRAGRECRRGLEETSDLLSQLQSLLGPHLDKGDFGQLSGPDPPGEVGERAPDGASQSSHEPMEDAAPILSLLASPDPQAKHPQDLASTPSPGPMTTSVSSLSASQPPEPSLPLEHPSPEPPALFPHPPHTPDPLACSLPPPKGFTAPPLRDSTLITPSHCDSVALPLGTVPQSLSPHEDLVASVPAISGLGGSNSHVSASSRWQETARTSCAFNSSVQQDHLSRHPPETCQMEAGSLFLLSSDGQNVVGIQVTETAKVNIWEEKENVGSFTNRMTPEKHLNSLRNLAKSLDAEQDTTNPKPFWNMGENSKQLPGPQKLSDPRLWQESFWKNYSQLFWGLPSLHSESLVANAWVTDRSYTLQSPPFLFNEMSNVCPIQRETTMSPLLFQAQPLSHLGPECQPFISSTPQFRPTPMAQAEAQAHLQSSFPVLSPAFPSLIQNTGVACPASQNKVQALSLPETQHPEWPLLRRQLEGRLALPSRVQKSQDVFSVSTPNLPQESLTSILPENFPVSPELRRQLEQHIKKWIIQHWGNLGRIQESLDLMQLQDESPGTSQAKGKPSPWQSSMSTGESSKEAQKVKFQLERDPCPHLGQILGETPQNLSRDMKSFPRKVLGVTSEELERNLRKPLRSDSGSDLLRCTERTHIENILKAHMGRNLGQTNEGLIPVRVRRSWLAVNQALPVSNTHVKTSNLAAPKSGKACVNTAQVLSFLEPCTQQGLGAHIVRFWAKHRWGLPLRVLKPIQCFKLEKVSSLSLTQLAGPSSATCESGAGSEVEVDMFLRKPPMASLRKQVLTKASDHMPESLLASSPAWKQFQRAPRGIPSWNDHEPLKPPPAGQEGRWPSKPLTYSLTGSTQQSRSLGAQSSKAGETREAVPQCRVPLETCMLANLQATSEDVHGFEAPGTSKSSLHPRVSVSQDPRKLCLMEEVVSEFEPGMATKSETQPQVCAAVVLLPDGQASVVPHASENLVSQVPQGHLQSMPTGNMRASQELHDLMAARRSKLVHEEPRKPNCQGSCKSQRPMFPPIHKSEKFRKPNLEKHEERLEGLRTPQLTPVRKTEDTHQDEGVQLLPSKKQPPSVSPFGENIKQIFQWIFSKKKSKPAPVTAESQKTVKNRSCVYSSSAEAQGLMTAVGQMLDEKMSLCHARHASKVNQHKQKFQAPVCGFPCNHRHLFYSEHGRILSYAASSQQATLKSQGCPNRDRQIRNQQPLKSVRCNNEQWGLRHPQILHPKKAVSPVSPPQHWPKTSGASSHHHHCPRHCLLWEGI

SEQ ID NO: 82812 - protein, 1347 aa, Homo sapiens
  Payload ID: 16482
  Gene Symbol: SPATA31A5
  Gene Name: SPATA31 subfamily A, member 5
  Uniprot ID: Q5VU36
  ENSP ID: ENSP00000485628
MENLPFPLKLLSASSLNAPSSTPWVLDIFLTLVFALGFFFLLLPYLSYFRCDDPPSPSPGKRKCPVGRRRRPRGRMKNHSLRAGRECRRGLEETSDLLSQLQSLLGPHLDKGDFGQLSGPDPPGEVGERAPDGASQSSHEPMEDAAPILSPLASPDPQAKHPQDLASTPSPGPMTTSVSSLSASQPPEPSLPLEHPSPEPPALFPHPPHTPDPLACSLPPPKGFTAPPLRDSTLITPSHCDSVAFPLGTVPQSLSPHEDLVASVPAISGLGGSNSHVSASSRWQETARTSCAFNSSVQQDHLSRHPPETCQMEAGSLFLLSSDGQNVVGIQVTETAKVNIWEEKENVGSFTNRMTPEKHLNSLRNLAKSLDAEQDTTNPKPFWNMGENSKQLPGPQKLSDPRLWQESFWKNYSQLFWGLPSLHSESLVANAWVTDRSYTLQSPPFLFNEMSNVCPIQRETTMSPLLFQAQPLSHLGPECQPFISSTPQFRPTPMAQAEAQAHLQSSFPVLSPAFPSLIQNTGVACPASQNKVQALSLPETQHPEWPLLRRQLEGRLALPSRVQKSQDVFSVSTPNLPQESLTSILPENFPVSPELRRQLEQHIKKWIIQHWGNLGRIQESLDLMQLRDESPGTSQAKGKPSPWQSSMSTGEGSKEAQKVKFQLERDPCPHLGQILGETPQNLSRDMKSFPRKVLGVTSEELERNLRKPLRSDSGSDLLRCTERTHIENILKAHMGRNLGQTNEGLIPVCVRRSWLAVNQALPVSNTHVKTSNLAAPKSGKACVNTAQVLSFLEPCTQQGLGAHIVRFWAKHRWGLPLRVLKPIQCFKLEKVSSLSLTQLAGPSSATCESGAGSEVEVDMFLRKPPMASLRKQVLTKASDHMPESLLASSPAWKQFQRAPRGIPSWNDHEPLKPPPAGQEGRWPSKPLTYSLTGSIQQSRSLGAQSSKAGETREAVPQCRVPLETCMLANLQATSEDVHGFEAPGTSKSSLHPRVSVSQDPRKLCLMEEVVNEFEPGMATKSETQPQVCAAVVLLPDGQASVVPHASENLVSQVPQGHLQSMPTGNMRASQELHDLMAARRSKLVHEEPRNPNCQGSCKSQRPMFPPIHKSEKSRKPNLEKHEERLEGLRTPQLTPVRKTEDTHQDEGVQLLPSKKQPPSVSPFGENIKQIFQWIFSKKKSKPAPVTAESQKTVKNRSRVYSSSAEAQGLMTAVGQMLDEKMSLCHARHASKVNQHKQKFQAPVCGFPCNHRHLFYSEHGRILSYAASSQQATLKSQGCPNRDRQIRNQQPLKSVRCNNEQWGLRHPQILHPKKAVSPVSPPQHWPKTSGASSHHHHCPRHCLLWEGI

SEQ ID NO: 82813 - protein, 1343 aa, Homo sapiens
  Payload ID: 16483
  Gene Symbol: SPATA31A6
  Gene Name: SPATA31 subfamily A, member 6
  Uniprot ID: Q5VVP1
  ENSP ID: ENSP00000329825
MENLPFPLKLLSASSLNAPSSTPWVLDIFLTLVFALGFFFLLLPYLSYFHCDDPPSPSPGKRKCPVGRRRRPRGRMKNHSLRAGRECPRGLEETSDLLSQLQSLLGPHLDKGDFGQLSGPDPPGEVGERAPDGASQSSHEPMEDAAPILSPLASPDPQAKHPQDLASTPSPGPMTTSVSSLSASQPPEPSLPLEHPSPEPPALFPHPPHTPDPLACSPPPPKGFTAPPLRDSTLITPSHCDSVALPLGTVPQSLSPHEDLVASVPAISGLGGSNSHVSASSRWQETARTSCAFNSSVQQDPLSRHPPETCQMEAGSLFLLSSDGQNVVGIQVTETAKVNIWEEKENVGSFTNQMTPEKHLNSLGNLAKSLDAEQDTTNPKPFWNMGENSKQLPGPQKCSDPRLLQESFWKNYSQLFWGLPSLHSESLVANAWVTDRSYTLQSPPFLFNEMSNVCPIQRETTMSPLLFQAQPLSHRQPFISSTPQFLPTPMAQAEAQAHLQSSFPVLSPAFPSLIKNTGVACPASQNKVQALSLPETQHPEWPLLRKQLEGRLALPSRVQKSQDVFSVSTPNLPQESLTSILPENFPVSPELRRQLEQHIKKWIIQHWGNLGRIQESLDLMQLRDESPGTSQAKGKPSPWQSSTSTGESSKEAQKVKFQLERDLCPHLGQILGETPQNLSRDMKSFPRKVLGVTSEESERNLRKPLRSDSGSDLLRCTERTHIENILKAHMGRNLGQTNEGLIPVRVRRSWLAVNQALPVSNTHVKTSNLAAPKSGKACVNTAQVLSFLEPCTQQGLGAHIVRFWAKHRWGLPLRVLKPIQCFKLEKVSSLSLTQLAGPSSATCESGAGSEVEVDMFLRKPPMASLRKQVLTKASDHMPESLLASSPAWKQFQRAPRGIPSWNDHGPLKPPPAGQEGRWPSKPLTYSLTGSTQQSRSLGAQSSKAGETREAVPQCRVPLETCMLANLQATSEDVHGFEAPGTSKSSLHPRVSVSQDPRKLCLMEEVVSEFEPGMATKSETQPQVCAAVVLLPDGQASVVPHASENLVSQVPQGHLQSMPTGNMRASQELHDLMAARRSKLVQEEPRNPNCQGSCKSQRPMFPPIHKSEKSRKPNLEKHEERLEGLRTPQLTPVRKTEDTHQDEGVQLLPSKKQPPSVSHFGENIKQFFQWIFSKKKSKPAPVTAESQKTVKNRSCVYSSSAEAQGLMTAVGQMLDKKMSLCHAHHASKVNQHKQKFQAPVCGFPCNHRHLFYSEHGRILSYAASSQQATLKSQGCPNRDRQIRNQQPLKSVRCNNEQWGLRHPQILHPKKAVSPVSPPQHWPKTSGASSHHHHCPRHCLLWEGI

SEQ ID NO: 82814 - protein, 1347 aa, Homo sapiens
  Payload ID: 16484
  Gene Symbol: SPATA31A7
  Gene Name: SPATA31 subfamily A, member 7
  Uniprot ID: Q8IWB4
  ENSP ID: ENSP00000484807
MENLPFPLKLLSASSLNAPSSTPWVLDIFLTLVFALGFFFLLLPYLSYFRCDDPPSPSPGKRKCPVGRRRRPRGRMKNHSLRAGRECPRGLEETSDLLSQLQSLLGPHLDKGDFGQLSGPDPPGEVGERAPDGASQSSHEPMEDAAPILSPLASPDPQAKHPQDLASTPSPGPMTTSVSSLSASQPPEPSLPLEHPSPEPPALFPHPPHTPDPLACSLPPPKGFTAPPLRDSTLITPSHCDSVAFPLGTVPQSLSPHEDLVASVPAISGLGGSNSHVSASSRWQETARTSCAFNSSVQQDHLSRHPPETCQMEAGSLFLLSSDGQNVVGIQVTETAKVNIWEEKENVGSFTNRMTPEKHLNYLRNLAKSLDAEQDTTNPKPFWNMGENSKQLPGPQKLSDPRLWQESFWKNYSQLFWGLPSLHSESLVANAWVTDRSYTLQSPPFLFNEMSNVCPIQRETTMSPLLFQAQPLSHLGPECQPFISSTPQFRPTPMAQAEAQAHLQSSFPVLSPAFPSLIQNTGVACPASQNKVQALSLPETQHPEWPLLRRQLEGRLALPSRVQKSQDVFSVSTPNLPQESLTSILPENFPVSPELRRQLEQHIKKWIIQHWGNLGRIQESLDLMQLRDESPGTSQAKGKPSPWQSSMSTGESSKEAQKVKFQLERDPCPHLGQILGETPQNLSRDMKSFPRKVLGVTSEELERNLRKPLRSDSGSDLLRCTERTHIENILKAHMGRNLGQTNEGLIPVCVRRSWLAVNQALPVSNTHVKTSNLAAPKSGKACVNTAQVLSFLEPCTQQGLGAHIVRFWAKHRWGLPLRVLKPIQCFKLEKVSSLSLTQLAGPSSATCESGAGSEVEVDMFLRKPPMASLRKQVLTKASDHMPESLLASSPAWKQFQRAPRGIPSWNDHEPLKPPPAGQEGRWPSKPLTYSLTGSIQQSRSLGAQSSKAGETREAVPQCRVPLETCMLANLQATSEDVHGFEAPGTSKSSLHPRVSVSQDPRKLCLMEEVVNEFEPGMATKSETQPQVCAAVVLLPDGQASVVPHASENLVSQVPQGHLQSMPTGNMRASQELHDLMAARRSKLVHEEPRNPNCQGSCKSQRPMFPPIHKSEKSRKPNLEKHEERLEGLRTPQLTPVRKTEDTHQDEGVQLLPSKKQPPSVSPFGENIKQIFQWIFSKKKSKPAPVTAESQKTVKNRSRVYSSSAEAQGLMTAVGQMLDEKMSLCHARHASKVNQHKQKFQAPVCGFPCNHRHLFYSEHGRILSYAASSQQATLKSQGCPNRDRQIRNQQPLKSVRCNNEQWGLRHPQILHPKKAVSPVSPPQHWPKTSGASSHHHHCPRHCLLWEGI

SEQ ID NO: 82815 - protein, 1576 aa, Homo sapiens
  Payload ID: 16485
  Gene Symbol: SPATA31D1
  Gene Name: SPATA31 subfamily D, member 1
  Uniprot ID: Q6ZQQ2
  ENSP ID: ENSP00000341988
MENILCFLNSYTETGLSPDSHWLDIDPNFICLSGLGLFILYLFYVVLTLYSSPTEKNNDIQKHQGRAKRRRKGGTFKGFPDWKSFQREEEEERKLLSLLKSFGPPVSCSPRGQHHDTNHFRRLLCPDPVCRVCKRATADIQQLLSWESLKDAAPSVSPLASSASATESSFTLASTPSATPPEDLILSPRPKASPPPPLILSPDLITTLADLFSPSPLRDPLPPQPVSPLDSKFPIDHSPPQQLPFPLLPPHHIERVESSLQPEASLSLNTIFSFGSTLCQDISQAMNPIDSCARHHGPPIPSALPPEDCTVTQSKSSLTILKTFPEMLSLGGSGGSSTSAPTIKGIDHSHLASSEFTWWQPHAKDSFSSNFVPSDFMEELLTLHSSEAFLGGHSVANLIEPVNISFLSHDILALLERQVKKRGDFLMWKENGKKPGSFPKQLRPNYQLNSSRNMLTSIAVKHDLAESFPFWASKGKLEWQHIHQQPPHSKCFEDHLEQKYVQLFWGLPSLHSESLHPTVLVQRGHSSMFVFFNGITNTSISHESPVLPPPQPLSLPSTQPLPLPQTLPQGQSPHLTQVKSLAQPQSPFRALLPSPLFLIRICGVCFHRPQNEARSLLPSEINHLEWNVLQKVQESLWGLPSVVQKSQEDFCPPAPNPELVRKSFKVHVPISIIPGDFPLSSEVRKKLEQHIRRRLIQRRWGLPRRIHESLSLLRPQSKISELSVSERIHGPLNISLVEGQRCNVLKKSASSFPRSFHERSSNMLSMENVGNYQGYSQETVPKDHLLHGPETSSDKDLRSNSERDLETHMMHLSGNDSGVRLGQKQLENALTVRLSKKFEEINEGRMPGTVHSSWHSVKQTMSLPEKSHSQIKHRNLVTLVSEDHCVDTSQEISFLSSNKQKMLEAHIKTFRMRMLWGLPLKVLESIEIFKSKADLSTSFSHFDLPSSATFISQGDSKDGVSKSRSRSTFQGEKLGTTSSVPILDRPHPVSSPVVQEGQGTLRRQFSDTDHDLIETDSKDGASTSLRRGTTDFQSEKLDSTSSFPILGHSYLVTSPVNQEKQGTLRREFSDTDNDLTESVRTTEDGRQTFLPPPHSIVDEVSQKQTVLASRCSAELPIMQAGAGCESWDKRKSSFHNVDRLQGSRKTFPVTNALQSQTRNNLTTSKSGSCSLTNVKASTSNETEIFPPRISVPQDPKSSYLKNQMLSQLKLVQRKHSQPQSHFTDMSFALDNLSSKDLLTNSQGISSGDMGTSQVVHVHLEDSGIRVAQKQEPRVPTCVLQKCQVTNFPPAVNRVSPVRPKGGELDGGDAGLGTSQRRRKSLPVHNKTSGEVLGSKSSPTLKTQPPPENLFRKWMKTSLQWFNKPSISYEEQESSWEKGSSLSSCVQNIGRVIRAAFTGTTEAQKIRKDTREFLEEKLGHRHGIDITCPQEPLSFPVGLGKAQHNPEVHVRAEPVQGCPCNYRAPSCKVTRTKSCSQQAIFVGQNYPTRIRQIIDKDRQPQKVEAFKGKILCQSHPQSMPHRKPVPHPNPTCRRQVSLVCPAVPTSAKSPVFSDVPFLTGQKMLPKHLQGGKFPPTK

SEQ ID NO: 82816 - protein, 917 aa, Homo sapiens
  Payload ID: 16486
  Gene Symbol: SPATA31D3
  Gene Name: SPATA31 subfamily D, member 3
  Uniprot ID: P0C874
  ENSP ID: ENSP00000488117
MENILCFLNSYTETGLSPDSHCLDIDLNFICLSGLGLFILYLFYMVLTLYSSPTEKNNDTQKHQGRARRKRKSVTFKDRKSLQKEAEEERKLHSFLKSFGPPVSCSPLGQHHDTTLFRRLLCPDPVCRVCNRATADIQRLLSWESLKDAAPSVSPLASSASGAESSFTLASTPSATTPEDLILSSRPKPSPPPPLILSPDLITTLADLFSPSPLRDPLPPQPVSPLDSKFPIDHSPPQQLPFPLLPPHHIERVEPSLQPEASLSLNTIFSFGSTLCQDISQAVNRTDSCARHHGPPTPSALPPEDCTVTQSKSNLTVLKTFPEMLSLGGSGGSSTSAPTTKGIDHSCPASSEFSWWQPHAKDSFSSNFVPSDFMEELLTLHSSEASLGGHSVANIIQPVNISFLSHDIPALLERQVKRRGDFLMWKENGKKPGSFPTQLRPNYQLNSSRNMLTSTAVKHDLAESFPFWASKGKLEWQHIHQQPPYSKCFEDHLEQKYVQLFWGLPSLHSESLHPTVFVQHGRSSMFVFFNGITNTSMSHESPVLPPPQPLFLPSTQPLPLPQTLPRGQSLHLTQVKSLAQPQSPFPALPPSPLFLIRVCGVCFHRPQNEARSLMPSEINHLEWNVLQKVQESVWGLPSVVQKSQEDFCPPAPNPVLVRKSFKVHVPISIIPGDFPLSSEVRKKLEQHIRKRLIQRRWGLPRRIHESLSLLRPQNKISELSVSESIHGPLNISLVEGQRCNVLKKSASSFPRSFHERSSNMLSMENVGNYQGCSQETAPKNHLLHDPETSSEEDLRSNSERDLGTHMMHLSGNDSGVRLGQKQLENALTVHLSKKFEEINEGRMPGTVHSSWHSVKQTICLPEKSHSQIKHRNLAALVSEDHRVDTSQEMSFLSSNKQKMLEAHIKSFHMKPILNLSI

SEQ ID NO: 82817 - protein, 917 aa, Homo sapiens; identical to SEQ ID NO: 82816
  Payload ID: 16486
  Gene Symbol: SPATA31D3
  Gene Name: SPATA31 subfamily D, member 3
  Uniprot ID: P0C874
  ENSP ID: ENSP00000488801

SEQ ID NO: 82818 - protein, 917 aa, Homo sapiens
  Payload ID: 16487
  Gene Symbol: SPATA31D4
  Gene Name: SPATA31 subfamily D, member 4
  ENSP ID: ENSP00000488251
MENILCFLNSYTETGLSPDSHCLDIDLNFICLSGLGLFILYLFYMVLTLYSSPTEKNNDTQKHQGRARRKRKSVTFKDRKSLQKEAEEERKLHSFLKSFGPPVSCSPLGQHHDTTLFRRLLCPDPVCRVCNRATADIQRLLSWESLKDAAPSVSPLASSASGAESSFTLASTPSATTPEDLILSSRPKPSPPPPLILSPDLITTLADLFSPSPLRDPLPPQPVSPLDSKFPIDHSPPQQLPFPLLPPHHIERVEPSLQPEASLSLNTIFSFGSTLCQDISQAVNRTDSCARHHGPPTPSALPPEDCTVTQSKSNLTVLKTFPEMLSLGGSGGSSTSAPTTKGIDHSCPASSEFSWWQPHAKDSFSSNFVPSDFMEELLTLHSSEASLGGHSVANIIQPVNISFLSHDIPALLERQVKRRGDFLMWKENGKKPGSFPTQLRPNYQLNSSRNMLTSTAVKHDLAESFPFWASKGKLEWQHIHQQPPYSKCFEDHLEQKYVQLFWGLPSLHSESLHPTVFVQHGRSSMFVFFNGITNTSMSHESPVLPPPQPLFLPSTQPLPLPQTLPRGQSLHLTQVKSLAQPQSPFPALPPSPLFLIRVCGVCFHRPQNEARSLMPSEINHLEWNVLQKVQESVWGLPSVVQKSQEDFCPPAPNPVLVRKSFKVHVPISIIPGDFPLSSEVRKKLEQHIRKRLIQRRWGLPRRIHESLSLLRPQNKISELSVSESIHGPLNISLVEGQRCNVLKKSASSFPRSFHERSSNMLSMENVGNYQGCSQETAPKNHLLHDPETSSDEDLRSNSERDLGTHMMHLSGNDSGVRLGQKQLENALTVHLSKKFEEINEGRMPGTVHSSWHSVKQTICLPEKSHSQIKHRNLAALVSEDHGVDTSQEMSFLSSNKQKMLEAHIKSFHMKPILNLSI

SEQ ID NO: 82819 - protein, 1445 aa, Homo sapiens
  Payload ID: 16488
  Gene Symbol: SPATA31E1
  Gene Name: SPATA31 subfamily E, member 1
  Uniprot ID: Q6ZUB1
  ENSP ID: ENSP00000322640
MGNLVIPLGKGRAGRVESGQRIPPPAPRPSVECTGDDIALQMEKMLFPLKSPSATWLSPSSTPWMMDFILTSVCGLVLLFLLLLYVHSDPPSPPPGRKRSSREPQRERSGRSRSRKISALKACRILLRELEETRDLNYLLESHLRKLAGEGSSHLPLGGDPLGDVCKPVPAKAHQPHGKCMQDPSPASLSPPAPPAPLASTLSPGPMTFSEPFGPHSTLSASGPPEPLLPLKCPATQPHVVFPPSPQPHGPLASSPPPPDSSLAGLQCGSTTCPVPQSSPLHNQVLPPPTRVISGLGCSSDPIWDLYCWREAATTWGLSTYSHGKSQPRHLPDHTSEASFWGDPTPKHMEVGGCTFIHPDVQKLLETLIAKRALMKMWQEKERKRADHPHMTSLGKEWDITTLNPFWNVSTQPQQLPRPQQVSDATTVGNHLQQKRSQLFWDLPSLNSESLATTVWVSRNPSSQNAHSVPLDKASTSLPGEPEVEASSQLSQAPPQPHHMAQPQHFTPAWPQSQPPPLAEIQTQAHLSPPVPSLGCSSPPQIRGCGASYPTSQERTQSVIPTGKEYLEWPLKKRPKWKRVLPSLLKKSQAVLSQPTAHLPQERPASWSPKSAPILPGVVTSPELPEHWWQGRNAIHQEQSCGPPSRLQASGDLLQPDGEFPGRPQSQAEDTQQALLPSQPSDFAGKGRKDVQKTGFRSSGRFSDKGCLGSKLGPDPSRDQGSGRTSVKALDEDKEAEGDLRRSWKYQSVSSTPRDPDKEHLENKLQIHLARKVGEIKEGWIPMPVRRSWLMAKCAVPKSDTHRKPGKLASWRGGKAHVNTSQELSFLHPCTQQILEVHLVRFCVRHSWGTDLQSLEPINVWSGEAQAPPFPQSTFTPWASWVSRVESVPKVPIFLGKRPQNGPGDNRTTSKSVPTVSGPLAAPPPEQEGVQRPPRGSQSADTHGRSEAFPTGHKGRGCSQPPTCSLVGRTWQSRTVLESGKPKPRLEGSMGSEMAGNEAWLESESMSPGDPCSSRALQVLSIGSQWARAEDALQALKVGEKPPTWEVTLGASVRASSGSVQEDLRSTGALGTTGNPSASSVCVAQDPEQLHLKAQVVSEIALIVQVDSEEQLPGRAPGILLQDGATGLCLPGRHMDMLTAADRLPTQAPLSTSQSVSGKNMTASQGPCALLWKGGDSPGQQEPGSPKAKAPQKSQKTLGCADKGEAHRRPRTGEQGHRSKGPRTSEASGRSHPAQAREIGDKQERKYNQLQLEKGQTPPESHFQRKISHHPQGLHPRKGGTRWEDVLQKGKPGADAFQSWGSGPPRQFMDCMADKAWTISRVVGQILVDKLGLQWGRGPSEVNRHKGDFRAQENVPSCCHRGHCHQERSREMRALACSPKATPKGHHCPVKNRGIRDRDSSWAPPPREPVSPAGPHHHRPRMASTSGGPHPQLQELMSAQRCLAS

SEQ ID NO: 82820 - protein, 134 aa, Homo sapiens
  Payload ID: 16489
  Gene Symbol: SPC24
  Gene Name: SPC24, NDC80 kinetochore complex component
  ENSP ID: ENSP00000397131
MAAFRDIEEVSQGLLSLLGANRAEAQQRRLLGRHEQVVERLLETQDGAEKQLRGLQTRGMFLASGGKWNHLLSALLGEGQTLGSLLLSTLQRSSPWRRKWPRAFSMRRSRCTREAWSCSSWKLGFRRLGRRTPV

SEQ ID NO: 82821 - protein, 197 aa, Homo sapiens
  Payload ID: 16489
  Gene Symbol: SPC24
  Gene Name: SPC24, NDC80 kinetochore complex component
  Uniprot ID: Q8NBT2
  ENSP ID: ENSP00000465075
MAAFRDIEEVSQGLLSLLGANRAEAQQRRLLGRHEQVVERLLETQDGAEKQLREILTMEKEVAQSLLNAKEQVHQGGVELQQLEAGLQEAGEEDTRLKASLLQLTRELEELKEIEADLERQEKEVDEDTTVTIPSAVYVAQLYHQVSKIEWDYECEPGMVKGIHHGPSVAQPIHLDSTQLSRKFISDYLWSLVDTEW

SEQ ID NO: 82822 - protein, 168 aa, Homo sapiens
  Payload ID: 16489
  Gene Symbol: SPC24
  Gene Name: SPC24, NDC80 kinetochore complex component
  ENSP ID: ENSP00000465167
  MOD_RES (1)..(1): Any amino acid
XFRDIEEVSQGLLSLLGANRAEAQQRRLLGRHEQVVERLLETQDGAEKQLREILTMEKEVAQSLLNAKEQVHQGGVELQQLEAGLQEAGEEDTRLKASLLQLTRELEELKEIEADLERQEKEVDEDTTVTIPSAVYVAQLYHQVSKIEWDYECEPGMVKGSILFGEPF

SEQ ID NO: 82823 - protein, 172 aa, Homo sapiens
  Payload ID: 16489
  Gene Symbol: SPC24
  Gene Name: SPC24, NDC80 kinetochore complex component
  ENSP ID: ENSP00000465335
  MOD_RES (1)..(1): Any amino acid
XRDIEEVSQGLLSLLGANRAEAQQRRLLGRHEQVVERLLETQDGAEKQLREILTMEKEVAQSLLNAKEQVHQGGVELQQLEAGLQEAGEEDTRLKASLLQLTRELEELKEIEADLERQEKEVDEDTTVTIPSAVYVAQLYHQLLEWPQLGNQRESTYLCQACSFTSVTGWDK

SEQ ID NO: 82824 - protein, 171 aa, Homo sapiens
  Payload ID: 16489
  Gene Symbol: SPC24
  Gene Name: SPC24, NDC80 kinetochore complex component
  ENSP ID: ENSP00000466688
RDIEEVSQGLLSLLGANRAEAQQRRLLGRHEQVVERLLETQDGAEKQLREILTMEKEVAQSLLNAKEQVHQGGVELQQLEAGLQEAGEEDTRLKASLLQLTRELEELKEIEADLERQEKEVDEDTTVTIPSAVYVAQLYHQVSKIEWDYECEPGMVKGRGMFECHGVPRLC

SEQ ID NO: 82825 - protein, 126 aa, Homo sapiens
  Payload ID: 16489
  Gene Symbol: SPC24
  Gene Name: SPC24, NDC80 kinetochore complex component
  ENSP ID: ENSP00000468366
DIEEVSQGLLSLLGANRAEAQQRRLLGRHEQVVERLLETQDGAEKQLRGTWLNFTTKLVKLSGIMSVSQGWSKASIMAPVWPSPSTWTAPSSPGNSSATTSGVWWTPSGSQEPRGCVLHPAGICRG

SEQ ID NO: 82826 - protein, 209 aa, Homo sapiens
  Payload ID: 16489
  Gene Symbol: SPC24
  Gene Name: SPC24, NDC80 kinetochore complex component
  ENSP ID: ENSP00000468818
MAAFRDIEEVSQGLLSLLGANRAEAQQRRLLGRHEQVVERLLETQDGAEKQLREILTMEKEVAQSLLNAKEQVHQGGVELQQLEAGLQEAGEEDTRLKASLLQLTRELEELKEIEADLERQEKEVDEDTTVTIPSAVYVAQLYHQVIRPPWPPKVLDSRDLPTSASKYLGLQVCAIASGWIVSRWRETQNFLERNGGVILVPPGLFLLS

SEQ ID NO: 82827 - protein, 224 aa, Homo sapiens
  Payload ID: 16490
  Gene Symbol: SPC25
  Gene Name: SPC25, NDC80 kinetochore complex component
  Uniprot ID: Q9HBM1
  ENSP ID: ENSP00000282074
MVEDELALFDKSINEFWNKFKSTDTSCQMAGLRDTYKDSIKAFAEKLSVKLKEEERMVEMFLEYQNQISRQNKLIQEKKDNLLKLIAEVKGKKQELEVLTANIQDLKEEYSRKKETISTANKANAERLKRLQKSADLYKDRLGLEIRKIYGEKLQFIFTNIDPKNPESPFMFSLHLNEARDYEVSDSAPHLEGLAEFQENVRKTNNFSAFLANVRKAFTATVYN

SEQ ID NO: 82828 - protein, 115 aa, Homo sapiens
  Payload ID: 16490
  Gene Symbol: SPC25
  Gene Name: SPC25, NDC80 kinetochore complex component
  ENSP ID: ENSP00000393322
MVEDELALFDKSINEFWNKFKSTDTSCQMAGLRDTYKDSIKAFAEKLSVKLKEEERMVEMFLEYQNQISRQNKLIQEKKDNLLKLIAEVKGKKQELEVLTANIQDLKEEYSRKKE

SEQ ID NO: 82829 - protein, 115 aa, Homo sapiens; identical to SEQ ID NO: 82828
  Payload ID: 16490
  Gene Symbol: SPC25
  Gene Name: SPC25, NDC80 kinetochore complex component
  ENSP ID: ENSP00000478742

SEQ ID NO: 82830 - protein, 224 aa, Homo sapiens; identical to SEQ ID NO: 82827
  Payload ID: 16490
  Gene Symbol: SPC25
  Gene Name: SPC25, NDC80 kinetochore complex component
  Uniprot ID: Q9HBM1
  ENSP ID: ENSP00000481354

SEQ ID NO: 82831 - protein, 224 aa, Homo sapiens; identical to SEQ ID NO: 82827
  Payload ID: 16490
  Gene Symbol: SPC25
  Gene Name: SPC25, NDC80 kinetochore complex component
  Uniprot ID: Q9HBM1
  ENSP ID: ENSP00000483050

SEQ ID NO: 82832 - protein, 911 aa, Homo sapiens
  Payload ID: 16491
  Gene Symbol: SPECC1L-ADORA2A
  Gene Name: SPECC1L-ADORA2A readthrough (NMD candidate)
  ENSP ID: ENSP00000351480
MKKASRSVGSVPKVSAISKTQTAEKIKPENSSSASTGGKLVKPGTAASLSKTKSSDDLLAGMAGGVTVTNGVKGKKSTCPSAAPSASAPAMTTVENKSKISTGTASSTKRSTSTGNKESSSTRERLRERTRLNQSKKLPSAGQGANDMALAKRSRSRTATECDVRMSKSKSDNQISDRAALEAKVKDLLTLAKTKDVEILHLRNELRDMRAQLGINEDHSEGDEKSEKETIMAHQPTDVESTLLQLQEQNTAIREELNQLKNENRMLKDRLNALGFSLEQRLDNSEKLFGYQSLSPEITPGNQSDGGGTLTSSVEGSAPGSVEDLLSQDENTLMDHQHSNSMDNLDSECSEVYQPLTSSDDALDAPSSSESEGIPSIERSRKGSSGNASEVSVACLTERIHQMEENQHSTSEELQATLQELADLQQITQELNSENERLGEEKVILMESLCQQSDKLEHFSRQIEYFRSLLDEHHISYVIDEDVKSGRYMELEQRYMDLAENARFEREQLLGVQQHLSNTLKMAEQDNKEAQEMIGALKERSHHMERIIESEQKGKAALAATLEEYKATVASDQIEMNRLKAQLENEKQKVAELYSIHNSGDKSDIQDLLESVRLDKEKAETLASSLQEDLAHTRNDANRLQDAIAKVEDEYRAFQEEAKKQIEDLNMTLEKLRSDLDEKETERSDMKETIFELEDEVEQHRAVKLHDNLIISDLENTVKKLQDQKHDMEREIKTLHRRLREESAEWRQFQADLQTAVVIANDIKSEAQEEIGDLKRRLHEAQEKNEKLTKELEEIKSRKQEEERGRVYNYMNAVERDLAALRQGMGLSRRSSTSSEPTPTVKTLIKSFDSASQVPNPAAAAIPRTPLSPSPMKTPPAAAVSPMQMESSSVAHAGMQWRDLGSLQPLPPGFK

SEQ ID NO: 82833 - protein, 412 aa, Homo sapiens; identical to SEQ ID NO: 2674
  Payload ID: 16491
  Gene Symbol: SPECC1L-ADORA2A
  Gene Name: SPECC1L-ADORA2A readthrough (NMD candidate)
  Uniprot ID: P29274
  ENSP ID: ENSP00000480012

SEQ ID NO: 82834 - protein, 412 aa, Homo sapiens; identical to SEQ ID NO: 2674
  Payload ID: 16491
  Gene Symbol: SPECC1L-ADORA2A
  Gene Name: SPECC1L-ADORA2A readthrough (NMD candidate)
  Uniprot ID: P29274
  ENSP ID: ENSP00000481552

SEQ ID NO: 82835 - protein, 412 aa, Homo sapiens; identical to SEQ ID NO: 2674
  Payload ID: 16491
  Gene Symbol: SPECC1L-ADORA2A
  Gene Name: SPECC1L-ADORA2A readthrough (NMD candidate)
  Uniprot ID: P29274
  ENSP ID: ENSP00000483102

SEQ ID NO: 82836 - protein, 374 aa, Homo sapiens
  Payload ID: 16492
  Gene Symbol: SPOP
  Gene Name: speckle-type POZ protein
  Uniprot ID: O43791
  ENSP ID: ENSP00000240327
MSRVPSPPPPAEMSSGPVAESWCYTQIKVVKFSYMWTINNFSFCREEMGEVIKSSTFSSGANDKLKWCLRVNPKGLDEESKDYLSLYLLLVSCPKSEVRAKFKFSILNAKGEETKAMESQRAYRFVQGKDWGFKKFIRRDFLLDEANGLLPDDKLTLFCEVSVVQDSVNISGQNTMNMVKVPECRLADELGGLWENSRFTDCCLCVAGQEFQAHKAILAARSPVFSAMFEHEMEESKKNRVEINDVEPEVFKEMMCFIYTGKAPNLDKMADDLLAAADKYALERLKVMCEDALCSNLSVENAAEILILADLHSADQLKTQAVDFINYHASDVLETSGWKSMVVSHPHLVAEAYRSLASAQCPFLGPPRKRLKQS

SEQ ID NO: 82837 - protein, 374 aa, Homo sapiens; identical to SEQ ID NO: 82836
  Payload ID: 16492
  Gene Symbol: SPOP
  Gene Name: speckle-type POZ protein
  Uniprot ID: O43791
  ENSP ID: ENSP00000377001

SEQ ID NO: 82838 - protein, 374 aa, Homo sapiens; identical to SEQ ID NO: 82836
  Payload ID: 16492
  Gene Symbol: SPOP
  Gene Name: speckle-type POZ protein
  Uniprot ID: O43791
  ENSP ID: ENSP00000420908

SEQ ID NO: 82839 - protein, 238 aa, Homo sapiens
  Payload ID: 16492
  Gene Symbol: SPOP
  Gene Name: speckle-type POZ protein
  ENSP ID: ENSP00000420960
MSRVPSPPPPAEMSSGPVAESWCYTQIKVVKFSYMWTINNFSFCREEMGEVIKSSTFSSGANDKLKWCLRVNPKGLDEESKDYLSLYLLLVSCPKSEVRAKFKFSILNAKGEETKAMESQRAYRFVQGKDWGFKKFIRRDFLLDEANGLLPDDKLTLFCEVSVVQDSVNISGQNTMNMVKVPECRLADELGGLWENSRFTDCCLCVAGQEFQAHKAILAARSPVFSAMFEHEMEESKK

SEQ ID NO: 82840 - protein, 44 aa, Homo sapiens
  Payload ID: 16492
  Gene Symbol: SPOP
  Gene Name: speckle-type POZ protein
  ENSP ID: ENSP00000422609
MSRVPSPPPPAEMSSGPVAESWCYTQCSQQLKKVIKAIGQCEIS

SEQ ID NO: 82841 - protein, 32 aa, Homo sapiens
  Payload ID: 16492
  Gene Symbol: SPOP
  Gene Name: speckle-type POZ protein
  ENSP ID: ENSP00000423076
MSRVPSPPPPAEMSSGPVAESWCYTQIKVVKF

SEQ ID NO: 82842 - protein, 72 aa, Homo sapiens
  Payload ID: 16492
  Gene Symbol: SPOP
  Gene Name: speckle-type POZ protein
  ENSP ID: ENSP00000423284
  MOD_RES (1)..(1): Any amino acid
XKSEVRAKFKFSILNAKGEETKAMESQRAYRFVQGKDWGFKKFIRRDFLLDEANGLLPDDKLTLFCEILIKS

SEQ ID NO: 82843 - protein, 138 aa, Homo sapiens
  Payload ID: 16492
  Gene Symbol: SPOP
  Gene Name: speckle-type POZ protein
  ENSP ID: ENSP00000424119
MSRVPSPPPPAEMSSGPVAESWCYTQIKVVKFSYMWTINNFSFCREEMGEVIKSSTFSSGANDKLKWCLRVNPKGLDEESKDYLSLYLLLVSCPKSEVRAKFKFSILNAKGEETKAMESQRAYRFVQGKDWGFKKFIR

SEQ ID NO: 82844 - protein, 66 aa, Homo sapiens
  Payload ID: 16492
  Gene Symbol: SPOP
  Gene Name: speckle-type POZ protein
  ENSP ID: ENSP00000425410
MSRVPSPPPPAEMSSGPVAESWCYTQIKVVKFSYMWTINNFSFCREEMGEVIKSSTFSSGANDKLK

SEQ ID NO: 82845 - protein, 44 aa, Homo sapiens; identical to SEQ ID NO: 82840
  Payload ID: 16492
  Gene Symbol: SPOP
  Gene Name: speckle-type POZ protein
  ENSP ID: ENSP00000425604

SEQ ID NO: 82846 - protein, 374 aa, Homo sapiens; identical to SEQ ID NO: 82836
  Payload ID: 16492
  Gene Symbol: SPOP
  Gene Name: speckle-type POZ protein
  Uniprot ID: O43791
  ENSP ID: ENSP00000425905

SEQ ID NO: 82847 - protein, 185 aa, Homo sapiens
  Payload ID: 16492
  Gene Symbol: SPOP
  Gene Name: speckle-type POZ protein
  ENSP ID: ENSP00000426262
MSRVPSPPPPAEMSSGPVAESWCYTQIKVVKFSYMWTINNFSFCREEMGEVIKSSTFSSGANDKLKWCLRVNPKGLDEESKDYLSLYLLLVSCPKSEVRAKFKFSILNAKGEETKAMESQRAYRFVQGKDWGFKKFIRRDFLLDEANGLLPDDKLTLFCEVSVVQDSVNISGQNTMNMVKVPECR

SEQ ID NO: 82848 - protein, 117 aa, Homo sapiens
  Payload ID: 16492
  Gene Symbol: SPOP
  Gene Name: speckle-type POZ protein
  ENSP ID: ENSP00000426537
MSRVPSPPPPAEMSSGPVAESWCYTQIKVVKFSYMWTINNFSFCREEMGEVIKSSTFSSGANDKLKWCLRVNPKGLDEESKDYLSLYLLLVSCPKSEVRAKFKFSILNAKGEETKAM

SEQ ID NO: 82849 - protein, 262 aa, Homo sapiens
  Payload ID: 16492
  Gene Symbol: SPOP
  Gene Name: speckle-type POZ protein
  ENSP ID: ENSP00000426986
MSRVPSPPPPAEMSSGPVAESWCYTQIKVVKFSYMWTINNFSFCREEMGEVIKSSTFSSGANDKLKWCLRVNPKGLDEESKDYLSLYLLLVSCPKSEVRAKFKFSILNAKGEETKAMESQRAYRFVQGKDWGFKKFIRRDFLLDEANGLLPDDKLTLFCEVSVVQDSVNISGQNTMNMVKVPECRLADELGGLWENSRFTDCCLCVAGQEFQAHKAILAARSPVFSAMFEHEMEESKKNRVEINDVEPEVFKEMMCFIYTGK

SEQ ID NO: 82850 - protein, 40 aa, Homo sapiens
  Payload ID: 16492
  Gene Symbol: SPOP
  Gene Name: speckle-type POZ protein
  ENSP ID: ENSP00000427419
MSRVPSPPPPAEMSSGPVAESWCYTQIKVVKFSYMWTINN

SEQ ID NO: 82851 - protein, 392 aa, Homo sapiens
  Payload ID: 16493
  Gene Symbol: SPOPL
  Gene Name: speckle-type POZ protein-like
  Uniprot ID: Q6IQ16
  ENSP ID: ENSP00000280098
MSREPTPPLPGDMSTGPIAESWCYTQVKVVKFSYMWTINNFSFCREEMGEVLKSSTFSSGPSDKMKWCLRVNPKGLDDESKDYLSLYLLLVSCPKSEVRAKFKFSLLNAKREETKAMESQRAYRFVQGKDWGFKKFIRRDFLLDEANGLLPDDKLTLFCEVSVVQDSVNISGHTNTNTLKVPECRLAEDLGNLWENTRFTDCSFFVRGQEFKAHKSVLAARSPVFNAMFEHEMEESKKNRVEINDLDPEVFKEMMRFIYTGRAPNLDKMADNLLAAADKYALERLKVMCEEALCSNLSVENVADTLVLADLHSAEQLKAQAIDFINRCSVLRQLGCKDGKNWNSNQATDIMETSGWKSMIQSHPHLVAEAFRALASAQCPQFGIPRKRLKQS
